(19) United States
(12) Patent Application Publication
(10) Pub. No.: US 2026/0022370 A1
(43) Pub. Date: Jan. 22, 2026

(54) SYNTHETIC ENHANCERS AND PROMOTERS BASED ON CONCATENATED PALINDROMIC SUBSEQUENCES

(71) Applicant: THE GOVERNING COUNCIL OF THE UNIVERSITY OF TORONTO, Toronto (CA)

(72) Inventors: Kien TRUONG, Thornhill (CA); Polina GOVORKOVA, Burlington (CA)

(73) Assignee: THE GOVERNING COUNCIL OF THE UNIVERSITY OF TORONTO, Toronto, ON (CA)

(21) Appl. No.: 18/838,341

(22) PCT Filed: Feb. 18, 2023
(86) PCT No.: PCT/CA2023/050215

§ 371 Date: Aug. 14, 2024

Related U.S. Application Data
(60) Provisional application No. 63/268,234, filed on Feb. 18, 2022.

(51) Int. Cl. C12N 15/10; G16B 25/20; G16B 40/20

(52) U.S. Cl. CPC C12N 15/1082; C12N 15/1089; G16B 25/20; G16B 40/20

(57) ABSTRACT

The present disclosure relates to a method of constructing a synthetic enhancer comprising: identifying probable palindromic subsequences in a promoter of interest; selecting and extracting highly palindromic subsequences from amongst the probable palindromic subsequences; and concatenating some or all of the extracted highly palindromic subsequences to produce a synthetic enhancer. Identifying the probable palindromic subsequence includes defining a candidate subsequence in the promoter of interest; generating a complement or reverse complement of the candidate subsequence; comparing the candidate subsequence with its complement or reverse complement to identify the number of mismatches; and identifying the candidate subsequence as a probable palindromic subsequence if the number of mismatches is the same or lower than a mismatch threshold corresponding to the number of mismatches expected from comparable randomly generated sequences. The method can be applied to create a synthetic enhancer for any promoter of interest.

### CROSS-REFERENCE TO RELATED APPLICATIONS

[0001] This application is the National Phase application of PCT International Patent Application No. PCT/CA2023/050215, filed on Feb. 18, 2023 and titled “SYNTHETIC ENHANCERS AND PROMOTERS BASED ON CONCATENATED PALINDROMIC SUBSEQUENCES,’ which claims benefit of priority under 35 U.S.C. 119 to U.S. Provisional Patent Application Ser. No. 63/268,234, filed Feb. 18, 2022, and titled “SYNTHETIC ENHANCERS AND PROMOTERS BASED ON CONCATENATED PALINDROMIC SUBSEQUENCES,” the contents of each application are herein incorporated by reference in its entirety.

### SEQUENCE LISTING

[0002] The instant application contains a Sequence Listing which has been submitted in XML file format via Patent Center and is hereby incorporated by reference in its entirety. Said XML file copy, created on Aug. 1, 2025, is named Sequence_Listing_17978-275.xml, and is 73,168,722 bytes in size. The Sequence Listing is incorporated by reference in its entirety.

### TECHNICAL FIELD

[0003] This disclosure generally relates to synthetic enhancers and promoters for driving transcription in host cells. More specifically, this disclosure relates to a method of designing synthetic promoters using concatenated palindromic subsequences.

### BACKGROUND

[0004] To express transgenes in specific cell types and states, promoters for endogenous genes are commonly created by truncating the sequence upstream of the transcriptional start site until the promoter is no longer functional to determine a minimum region of nucleotides required for a functional promoter. This method of designing truncated promoters often results in a promoter sequence that is longer than necessary. Typically, shorter promoter sequences are desired as gene delivery efficiency decreases with the increasing length of genetic material.

[0005] In cases where expression is required for specific tissues, the promoters for endogenous genes that are expressed in relatively greater concentration than other tissues, such as the synapsin-1 promoter in neurons, are often used. While the consensus binding sequences for some transcription factors have been experimentally determined, there remain many whose consensus binding sequences are unknown. Thus, designing a minimal synthetic enhancer region for these endogenous promoters is not always possible. As a result, the design of these promoters typically begins with the synthesis of a subsequence of the promoter between ˜1000 nucleotides upstream and ˜50 nucleotides downstream of the transcription start site (TSS). Then, the upstream section is truncated at the 5′ end until the promoter no longer functions as desired. For example, to isolate the active regions of the human synapsin-1 promoter, 5′ end truncations were performed until a minimal region 422 nucleotides upstream of the TSS was identified that retained strong expression in PC12 neuronal cells compared to non-neuronal cells. While this 5′ end truncation strategy may work for some promoters, many 5′ end truncated sequences need to be synthesized before finding the optimal one. Moreover, even after the optimal truncation is found, it may still contain subsequences that do not contribute to the promoter functionality.

[0006] While many methods have been developed to efficiently find biological palindromes in sequences, it is difficult to determine which palindromes are truly significant. For example, short palindromes (i.e., six nucleotides) may bind transcription factors, but they occur too frequently to effectively distinguish between transcriptional function and random occurrence.

### SUMMARY

[0007] According to one aspect, there is provided a method of constructing a synthetic enhancer, the method comprising: identifying probable palindromic subsequences in a promoter of interest; selecting and extracting highly palindromic subsequences from amongst the probable palindromic subsequences, the highly palindromic subsequences being those having a palindromic density above a palindromic density threshold; and concatenating some or all of the extracted highly palindromic subsequences to produce a synthetic enhancer having an overall length that is less than that of a contiguous segment of the promoter of interest that comprises all the concatenated highly palindromic subsequences.

[0008] In some embodiments, identifying probable palindromic subsequences comprises: defining a candidate subsequence of a predetermined length in the promoter of interest; generating a complement or reverse complement of the candidate subsequence; comparing the candidate subsequence with its complement or reverse complement to identify the number of mismatches; and identifying the candidate subsequence as a probable palindromic subsequence if the number of mismatches is the same or lower than a mismatch threshold corresponding to the number of mismatches expected from comparable randomly generated sequences.

[0009] In some embodiments, selecting highly palindromic subsequences based on palindromic density comprises determining a palindromic nucleotide score for each individual nucleotide in the probable palindromic subsequence, the palindromic nucleotide score correlating with the number of probable palindromic subsequences of different lengths and different subsequence frames in which the nucleotide participates, and optionally plotting a palindromic density graph of palindromic nucleotide score as a function of nucleotide position within the promoter of interest. In some embodiments, selecting highly palindromic subsequences based on palindromic density further comprises determining an overall palindromic density sequence score for each probable palindromic subsequence, the overall palindromic density sequence score correlating with the palindromic nucleotide scores for all or substantially all individual nucleotides in the probable palindromic subsequence. In some embodiments, the palindromic density threshold is based on the expected palindromic densities of comparable randomly generated sequences.

[0010] In some embodiments, the method further comprises synthesizing a polynucleotide comprising the synthetic enhancer. In some embodiments, the synthetic enhancer is fused to a core promoter, or to a core promoter operably fused to a polynucleotide sequence to be transcribed. In some embodiments, the synthetic enhancer is heterologous with respect to the core promoter and/or with respect to the polynucleotide sequence to be transcribed.

[0011] According to another aspect, there is provided a method of constructing a synthetic promoter, the method comprising: providing the synthetic enhancer produced by or as defined herein; and operably linking the synthetic enhancer to a core promoter as defined herein. According to another aspect, there is provided a synthetic promoter suitable for driving transcription of a DNA sequence of interest, wherein the synthetic promoter is as defined herein, or is constructed by the method as defined herein. According to another aspect, there is provided an expression cassette or vector comprising the synthetic enhancer produced by or as defined herein operably linked to a core promoter as defined herein.

[0012] In some embodiments, the synthetic promoter defined herein, or the expression cassette or vector defined herein, is for use in gene therapy. In some embodiments, the synthetic promoter defined herein, or the expression cassette or vector defined herein, is for use in genome editing, wherein the synthetic promoter drives expression of an endonuclease (e.g., an RNA-guided endonuclease) and/or a guide RNA.

[0013] According to another aspect, there is provided a computer-implemented process for constructing a synthetic enhancer, the process comprising: (a) inputting or receiving a nucleotide sequence of a promoter of interest; (b) identifying probable palindromic subsequences in the nucleotide sequence of the promoter of interest; (c) selecting and extracting highly palindromic subsequences from amongst the probable palindromic subsequences, the highly palindromic subsequences being those having a palindromic density above a palindromic density threshold; and (d) concatenating some or all of the extracted highly palindromic subsequences to produce a synthetic enhancer having an overall length that is less than that of a contiguous segment of the promoter of interest that comprises all the concatenated highly palindromic subsequences. In some embodiments, the computer-implemented process is a cloud-based computer-implemented process. In some embodiments, the computer is configured to implement the method as defined herein.

[0014] According to another aspect, there is provided a non-transitory computer-readable medium storing processor-executable instructions, the instructions when executed by a processor cause the processor to perform the method as defined herein, and optionally outputting sequence information to a user.

### General Definitions

[0015] Headings, and other identifiers, e.g., (a), (b), (i), (ii), etc., are presented merely for ease of reading the specification and claims. The use of headings or other identifiers in the specification or claims does not necessarily require the steps or elements be performed in alphabetical or numerical order or the order in which they are presented.

[0016] The use of the word “a” or “an” when used in conjunction with the term “comprising” in the claims and/or the specification may mean “one,” but it is also consistent with the meaning of “one or more”, “at least one”, and “one or more than one”.

[0017] As used in this specification and claim(s), the words “comprising” (and any form of comprising, such as “comprise” and “comprises”), “having” (and any form of having, such as “have” and “has”), “including” (and any form of including, such as “includes” and “include”) or “containing” (and any form of containing, such as “contains” and “contain”) are inclusive or open-ended and do not exclude additional, unrecited elements or method steps.

[0018] The term “about” is used to indicate that a value includes the standard deviation of error for the device or method being employed in order to determine the value. In general, the terminology “about” is meant to designate a possible variation of up to 10%. Therefore, a variation of 1, 2, 3, 4, 5, 6, 7, 8, 9 and 10% of a value is included in the term “about”. Unless indicated otherwise, use of the term “about” before a range applies to both ends of the range.

### BRIEF DESCRIPTION OF THE DRAWINGS

[0019] FIG. 1A shows a representation of a direct binding of oligomeric transcription factors to a palindromic sequence (striped rectangle); FIG. 1B shows a representation of an indirect binding of oligomeric transcription factors to a palindromic sequence (striped rectangle); and FIG. 1C shows an example calculation of a mismatch indicator function M(s, i) and the summation of mismatches N(s) in a given sequence s, in which the 8 nucleotide long sequence s is shown in bold text, a complement and reverse of the sequence s (C(a)) is shown in unbold text, and the mismatches are indicated with downward-pointing arrows.

[0020] FIG. 2 shows a flow chart of an exemplary method of identifying highly palindromic subsequences.

[0021] FIGS. 3A to 3D show bar graphs representing the probability of the summation of mismatches N(s) in random sequences s having lengths of 6 nucleotides (FIG. 3A); 10 nucleotides (FIG. 3B); 20 nucleotides (FIG. 3C); and 30 nucleotides (FIG. 3D). An exemplary mismatch threshold of the number of mismatches expected from the top 2% to 3% of randomly generated sequences of the same length is shown as a broken line with probable palindromes being indicated with arrow.

[0022] FIGS. 4A to 4D show exemplary palindromic density graphs representing the palindromic score S(s, i) of each nucleotide in an exemplary sequence having 18 nucleotides and exhibiting long palindromes (FIG. 4A) or overlapping palindromes (FIG. 4C). The corresponding palindromic line graphs of the palindromic score S(s, i) at each nucleotide index i are shown for long palindromes (FIG. 4B) exhibiting a sharp peak and overlapping palindromes exhibiting a flatter peak (FIG. 4D).

[0023] FIGS. 5A to 5F show line graphs representing the palindromic score S(s, i) for each nucleotide at nucleotide index i for three random 1101 nucleotide sequences marked as yellow, red, and blue (FIG. 5A); a CMV promoter (FIG. 5B); a human insulin promoter (FIG. 5C); a human desmin promoter (FIG. 5D); a human synapsin-1 promoter (FIG. 5E); and a truncated human synapsin-1 promoter (InvivoGen; FIG. 5F). The nucleotide index i of the transcription start site (TSS) is represented by a vertical broken line.

[0024] FIGS. 6A and 6B show line graphs representing: the probability distribution of the palindromic scores S(s, i) found in randomly generated sequences (yellow), Mus musculus version mm 10 genome promoters (black), and Homo sapien hg38 genome promoters (red) (FIG. 6A); and the probability distribution of the average palindromic scores A(s) for each of the randomly generated sequences (yellow), each Mus musculus version mm 10 genome promoter (black), and each Homo sapien hg38 genome promoter (red) (FIG. 6B).

[0025] FIGS. 7A to 7D shows line graphs representing the palindromic score S(s, i) for each nucleotide at nucleotide index i for orthologous promoters of the synapsin-1 promoter in Mus musculus (FIG. 7A); Sus domesticus (pig) (FIG. 7B); Rattus norvegicus domestica (rat) (FIG. 7C); and Drosophila melanogaster (fly) (FIG. 7D). The nucleotide index i of the TSS is represented by a vertical broken line.

[0026] FIG. 8A shows a line graph representing the probability distribution of the palindromic scores S(s, i) of 1,003,000,000 fully scored nucleotides from 1,000,000 randomly generated sequences. The exemplary enhancement threshold of the top 25% of palindromic scores S(s, i), corresponding to a palindromic score S(s, i) of at least 40, is shown with a vertical broken line. FIG. 8B shows a flow chart of an exemplary method of designing a synthetic promoter. FIG. 8C shows a line graph representing the palindromic score S(s, i) at each nucleotide index i for the cytomegalovirus immediate-early (CMV) promoter. The highly palindromic subsequences comprising nucleotides with a palindromic score S(s, i) above the enhancement threshold (i.e., at least 40) are indicated by a broken rectangle, with the remaining promoter nucleotides that were not deemed to be highly palindromic falling outside of the broken rectangle. The TSS is represented by a vertical solid line. FIG. 8D shows the nucleotide sequence of the synthetic CMV promoter (SEQ ID NO: 54696) developed using the method described herein. The nucleotides of a CREB site in the forward direction are highlighted in black and in the reverse direction are underlined. The bold nucleotides indicate an AP-1 site. The minimal CMV core promoter is shown in italics. FIG. 8E a line graph representing the palindromic score S(s, i) at each nucleotide index i for the mouse synapsin-1 promoter. The highly palindromic subsequences are indicated by a broken rectangle, with the remaining promoter nucleotides that were not deemed to be highly palindromic falling outside of the broken rectangle. The TSS is represented by a solid vertical line. FIG. 8F shows the nucleotide sequence of the synthetic mouse synapsin-1 promoter (SEQ ID NO: 54698) developed using the method described herein. The nucleotides of a NRSE/RE-1 site are highlighted in black, and the minimal CMV core promoter is shown in italics.

[0027] FIG. 9A shows a schematic of Venus yellow fluorescent protein constructs regulated by synthetic promoters derived from the CMV promoter (PCMVp, SEQ ID NO: 54696) and the mouse synapsin-1 promoter (PmSyn-1, SEQ ID NO: 54698). FIG. 9B shows a representation of the translocation of the fluorescent reporter to the plasma membrane by post-translational lipid modification. FIG. 9C shows a 10× magnification representative fluorescence image of HEK293 cells transiently transfected with the PCMVp construct. FIG. 9D shows a 40× magnification representative fluorescence image of HEK293 cells transiently transfected with the PCMVp construct. FIG. 9E shows a 10× magnification representative fluorescence image of N2A cells transiently transfected with the PmSyn1 construct. FIG. 9F shows a 40× magnification representative fluorescence image of N2A cells transiently transfected with the PmSyn1 construct. FIG. 9G shows a bar graph representing the percentage of Venus positive cells after transfection with a minimal core CMV promoter (core, SEQ ID NO: 1), CMVp (full promoter, SEQ ID NO: 54700), and PCMVp (short synthetic promoter, SEQ ID NO: 54696). FIG. 9H shows a bar graph representing the percentage of Venus positive cells after transfection with a minimal core CMV promoter (core, SEQ ID NO: 1), mSyn1p (full promoter, SEQ ID NO: 54699), and PmSyn4p (short synthetic promoter, SEQ ID NO: 54698). FIG. 9I shows a bar graph representing the percentage of Venus positive cells in N2A cells, Hela cells, MDCK cells, CHO cells, and 3T3 cells after transfection with PmSyn1p (SEQ ID NO: 54698).

[0028] FIG. 10A to 10C shows bar graphs representing the normalized fluorescence intensity (f/f₀) of HEK293 cells transfected with CMVp (full promoter, SEQ ID NO: 54700) and PCMVp (short synthetic promoter, SEQ ID NO: 54696) (FIG. 10A); the normalized fluorescence intensity (f/f₀) of N2A cells transfected with mSyn1p (full promoter, SEQ ID NO: 54699) and PmSyn1p (short synthetic promoter, SEQ ID NO: 54698) (FIG. 10B); and the percentage of Venus positive cells in N2A cells, Hela cells, MDCK cells, CHO cells, and 3T3 cells after transfection with CMVp (full promoter, SEQ ID NO: 54700) (FIG. 10C).

[0029] FIG. 11 shows a bar graph representing the percentage of Venus positive cells in HEK293 cells after transfection with the following short synthetic promoters: PCMVp (SEQ ID NO: 54696), PhCALRp (SEQ ID NO: 54701), PhEF1p (SEQ ID NO: 54702), PhHSP70p (SEQ ID NO: 54703), PhLDHAp (SEQ ID NO: 54704), PhNPM1p (SEQ ID NO: 54705), PhPKMp (SEQ ID NO: 54706), PhRACK1p (SEQ ID NO: 54707), PhTUBA1p (SEQ ID NO: 54708), PhUBBp (SEQ ID NO: 54709), and PhUBCp (SEQ ID NO: 54710).

[0030] FIG. 12 shows a bar graph representing the probability distribution of the length of synthetic enhancers having nucleotides sequences as shown in SEQ ID NOs: 2 to 54695 that were designed for all promoters in the Homo sapiens and Mus musculus genomes using the methods described herein.

### SEQUENCE LISTING

[0031] The present application is being filed along with a Sequence Listing in electronic format that was created on February 18, 2023. The information in electronic format of the Sequence Listing is incorporated herein by reference in its entirety.

[0032] The nucleotide sequence of the CMV core promoter (core) is shown in SEQ ID NO: 1. The nucleotide sequences of synthetic enhancers extracted from promoters in the Homo sapien genome are shown in SEQ ID NOs: 2 to 29597. The nucleotide sequences of synthetic enhancers extracted from promoters in the Mus musculus genome are shown in SEQ ID NOs: 29598 to 54695. The organism name indicated for each of the synthetic constructs of SEQ ID NOs: 2 to 54695 includes both the gene name and organism from which each of the synthetic enhancers and/or promoters were derived. In some instances, the gene name is followed by an underscore and a number, which refers to different transcriptional start sites that have been identified for that gene starting from the most upstream transcriptional start site.

[0033] A synthetic CMV promoter (PCMVp) comprising a synthetic CMV enhancer and the minimal CMV core promoter is shown in SEQ ID NO: 54696. The nucleotide sequence of the synthetic CMV enhancer is shown in SEQ ID NO: 54697 and the nucleotide sequence of the full CMV promoter is shown in SEQ ID NO: 54700. The nucleotide sequence of a full mouse synapsin-1 promoter (mSyn1p) used as a control is shown in SEQ ID NO: 54699 and the nucleotide sequence of a synthetic mouse synapsin-1 promoter (PmSyn1p) is shown in SEQ ID NO: 54698. The nucleotide sequence of synthetic promoters extracted from full promoters of the following Homo sapiens genes: CALR, EEF1A1, HSP70, LDHA, NPM1, PKM, RACK1, TUBA1, UBB, and UBC are shown in SEQ ID NOs: 54701 to 54710, respectively. The nucleotide sequence of a serum response factor (SRF) is shown in SEQ ID NO: 54711. The amino acid sequence of the 12 N-terminal amino acids of a Lyn kinase is shown in SEQ ID NO: 54712. The synthetic constructs showing example probable palindromes in FIG. 4A are identified in SEQ ID NOs: 54713 to 54717 and the synthetic constructs showing example probable palindromes in FIG. 4C are identified in SEQ ID NOs: 54718 and 54719.

### DETAILED DESCRIPTION

[0034] A method of designing shortened synthetic enhancers and promoters for gene expression, and the synthetic enhancers and promoters created by such method, are described herein. In general, the synthetic enhancers described herein are constructed by identifying highly palindromic nucleotides within the sequence of a promoter of interest using a palindromic density metric. Highly palindromic subsequences are then concatenated to create a synthetic enhancer that is significantly shorter in overall length as compared to corresponding sequences comprised in the original promoter of interest. Strikingly, in some embodiments, the shortened synthetic enhancers described herein retain promoter-enhancing activity and/or tissue-specificity comparable to that of their parent full-length promoters.

[0035] In a first aspect, described herein is a method of constructing a synthetic enhancer (or a candidate synthetic enhancer). The method generally comprises: identifying probable palindromic subsequences in a promoter of interest; selecting and extracting highly palindromic subsequences from amongst the probable palindromic subsequences (e.g., highly palindromic subsequences having a palindromic density above a given palindromic density threshold); and concatenating some or all of the extracted highly palindromic subsequences to produce a synthetic enhancer having an overall length that is less than that of a contiguous segment of the promoter of interest that comprises all the concatenated highly palindromic subsequences. As used herein, the term “synthetic” in the expressions “synthetic enhancer” and “synthetic promoter” refer to sequences that are not found in a genome of naturally-occurring or non-genetically modified organism. As used herein, the terms “enhancer” or “synthetic enhancer” refer to sequences having promoter-enhancing activity—i.e., they can activate, improve, or functionally modify (e.g., control tissue-specific expression) a core promoter's transcriptional activity when fused thereto.

### Identifying Probable Palindromic Subsequences

[0036] In some embodiments, identifying probable palindromic subsequences may comprise: defining a candidate subsequence of a predetermined length in the promoter of interest; generating a complement or reverse complement of the candidate subsequence; comparing the candidate subsequence with its complement or reverse complement to identify the number of mismatches; and identifying the candidate subsequence as a probable palindromic subsequence if the number of mismatches is the same or lower than a mismatch threshold corresponding to the number of mismatches expected from comparable randomly generated sequences.

[0037] In some embodiments, the candidate subsequence's length may be set at a minimal length of at least 4, 5, 6, 7, 8, 9, or 10 nucleotides, and/or at a maximal length of up to 30, 35, 40, 45, 50, 55, 60, 65, 70, 75, 80, 85, 90, 95, 100, 125, or 150 nucleotides. In some embodiments, the candidate subsequence may be compared with its reverse complement by performing a sequence alignment to identify the number of mismatches. In some embodiments, the mismatch threshold may be selected or may correspond to the number of mismatches expected from the most palindromic randomly generated sequences of the same or similar length as the candidate subsequence. In some embodiments, the mismatch threshold may be selected as the number of mismatches expected within a given percentile (e.g., 75^{th}, 80^{th}, 85^{th}, 90^{th}, 95^{th}, 96^{th}, 97^{th}, 98^{th} or 99^{th} percentile) of randomly generated sequences of the same or similar length as the candidate subsequence.

[0038] In some embodiments, comparing the number of mismatches between the candidate subsequence and its reverse complement may be determined using the mismatch indicator function M(s, i):

$$M ( s , i ) = \{ \begin{matrix}1 , if {s}_{i} \neq C ( {s}_{L ( s ) - i + 1} ) \\ 0 , otherwise\end{matrix} ;$$

where s is a candidate subsequence of the promoter of interest, i is a nucleotide index, L(s) is a length of the subsequence s, and C(s_{L(s)-i+1}) is the DNA complement of the nucleotide identified by s_{L(s)-i+1}. For example, when the nucleotide in the subsequence s at the nucleotide index i is adenine, the DNA complement of the nucleotide (C(s_{L(s)-i+1})) would be thymine. Similarly, when the nucleotide is thymine, guanine, or cytosine, the DNA complement is adenine, cytosine, or guanine, respectively.

[0039] In some embodiments, comparing the number of mismatches between the candidate subsequence and its reverse complement may further comprise performing a summation of the mismatches N(s):

$$N ( s ) = {\sum }_{i = 1}^{i = L ( s )} M ( s , i ) .$$

[0040] In some embodiments, probable palindromic subsequences may be determined by calculating a probable palindrome indicator function P(s):

$$P ( s ) = \{ \begin{matrix}1 , if N ( s ) \leq Cutoff ( L ( s ) ) \\ 0 , otherwise\end{matrix} ;$$

where Cutoff(p) is a mismatch threshold corresponding to the number of allowed mismatches for a sequence of length p.

### Selecting and Extracting Highly Palindromic Subsequences

[0041] In some embodiments, selecting highly palindromic subsequences based on palindromic density may comprise determining a palindromic nucleotide score for each individual nucleotide in the probable palindromic subsequence, the palindromic nucleotide score correlating with the number of probable palindromic subsequences of different lengths and different subsequence frames in which the nucleotide participates. In some embodiments, a palindromic density graph of palindromic nucleotide score as a function of nucleotide position within the promoter of interest may be plotted.

[0042] In some embodiments, selecting highly palindromic subsequences based on palindromic density may further comprise determining an overall palindromic density sequence score for each probable palindromic subsequence, wherein the overall palindromic density sequence score correlates with the palindromic nucleotide scores for all (or substantially all) individual nucleotides in the probable palindromic subsequence.

[0043] In some embodiments, the palindromic density threshold may be set based on the expected palindromic densities of comparable randomly generated sequences. For example, the palindromic density threshold may be set to be within a 60^{th}, 65^{th}, 70^{th}, 75^{th}, 80^{th}, 85^{th}, 90^{th}, or 95^{th} percentile of the expected palindromic densities of comparable randomly generated sequences.

[0044] In some embodiments, the palindromic nucleotide score S(s, i) may be determined by:

$$S ( s , i ) = {\sum }_{p = y}^{p = x} {\sum }_{w = max ( i - p + 1 , 1 )}^{w = min ( i , L ( s ) - p + 1 )} P ( {s}_{w … ( w + p - 1 )} )$$

wherein p is a palindrome length of each probable palindromic subsequence, and the palindrome length has a maximum number of nucleotides equal to x, and a minimum number of nucleotides equal to y. In some embodiments, x may be 30, 35, 40, 45, 50, 55, 60, 65, 70, 75, 80, 85, 90, 95, 100, 125, or 150 nucleotides. In some embodiments, y may be 4, 5, 6, 7, 8, 9, or 10 nucleotides. In some embodiments, the length of the sequence (L(s)) of the promoter of interest may be less than 1 000 000, 500 000, 250 000, 200 000, 150 000, 100 000, 50 000, 25 000, 20 000, 15 000, 10 000, 7500, 5000, 4000, 3000, 2000, 1500, or 1101 nucleotides.

[0045] In some embodiments, the overall palindromic density sequence score may be calculated based on the average of the palindromic nucleotide scores of all individual nucleotides in the probable palindromic subsequence according to the function:

$$A ( s ) = \frac{1}{L ( s )} \cdot {\sum }_{i = 1}^{i = L ( s )} S ( s , i )$$

where i is the nucleotide index.

### Concatenation of Highly Palindromic Subsequences

[0046] In some embodiments, the method described herein comprise concatenating some or all of the extracted highly palindromic subsequences to produce a synthetic enhancer having an overall length that is less than that of a contiguous segment of the promoter of interest that comprises all the concatenated highly palindromic subsequences. Conversely, methods described herein may comprise removing intervening genomic sequences between highly palindromic subsequences to shorten the overall length of a synthetic enhancer and/or synthetic promoter described herein.

[0047] As used herein, the terms “concatenating”, “concatenation” and “concatenated”, and the like, refer to the joining or fusing together of highly palindromic subsequences described herein such that the concatenated sequences have promoter-enhancing activity. For greater clarity, the concatenations described herein are not limited to maintaining the same 5′ to 3′ order in which the highly palindromic subsequences are found in their parental promoter sequences. As there may be great variability in the length of intervening non-highly palindromic genomic sequences, individual highly palindromic subsequences may be viewed as being modular in nature.

[0048] In some embodiments, extracted highly palindromic subsequences may be concatenated with one or more intervening synthetic linker sequences therebetween, wherein at least one of synthetic linker synthetic comprises a palindromic subsequence, a non-palindromic subsequence, or binding site (e.g., a restriction site or landing sites, such as an integrase, recombinase, or transposase landing site).

[0049] In some embodiments, the synthetic linker sequences may be between 1 and 50, preferably between 1 and 20 nucleotides in length. It is understood that using linkers longer than necessary may undesirably lengthen the overall length of the synthetic enhancer and/or promoter comprising same. Thus, in some embodiments, the extracted highly palindromic subsequences are concatenated without intervening synthetic linker sequences therebetween.

### Promoters of Interest

[0050] In some embodiments, promoters of interest described herein may have a length of less than 1 000 000, 500 000, 250 000, 200 000, 150 000, 100 000, 50 000, 25 000, 20 000, 15 000, 10 000, 7500, 5000, 4000, 3000, 2000, 1500, 1250, or 1000 nucleotides. In some embodiments, promoters of interest described herein may comprise between 200 and 5000 nucleotides upstream of a transcription start site of the promoter of interest. In some embodiments, promoters of interest described herein may comprise 0 to 200, 0 to 150, 0 to 100, or 20 to 100 nucleotides downstream of the transcription start site promoter of interest. In some embodiments, promoters of interest described herein may comprise less than 1000 nucleotides upstream of the transcription start site of the promoter of interest.

[0051] In some embodiments, promoters of interest described herein may be from a constitutive promoter, an inducible promoter, and/or a tissue-specific promoter.

[0052] In some embodiments, promoters of interest described herein may comprise a promoter from a mammalian genome, such as a Homo sapiens genome (e.g., hg38) or a Mus musculus genome (e.g., mm10).

### Synthesis of Synthetic Enhancers and Synthetic Promoters

[0053] In some embodiments, methods described herein may comprise synthesizing a polynucleotide comprising a synthetic enhancer as defined herein. In some embodiments, the synthetic enhancer may be fused to a core promoter, or to a core promoter operably fused to a polynucleotide sequence to be transcribed in RNA (e.g., mRNA or non-coding RNA).

[0054] In some embodiments, the synthetic enhancer may be heterologous with respect to the core promoter and/or with respect to the polynucleotide sequence to be transcribed. In some embodiments, the core promoter may be from a constitutive promoter, an inducible promoter, and/or a tissue-specific promoter. In some embodiments, the core promoter may be a minimal CMV promoter.

[0055] In some embodiments, described herein is a method of constructing a synthetic promoter, the method comprising: providing a synthetic enhancer described herein or produced by a method described herein; and operably linking the synthetic enhancer to a core promoter (e.g., a core promoter described herein).

[0056] In some embodiments, a synthetic enhancer described herein may comprise a nucleic acid fragment or variant of any one of SEQ ID NOs: 2 to 54695 having promoter enhancing activity. In some embodiments, a synthetic enhancer described herein may comprise a nucleic acid fragment encompassing at least 50, 55, 60, 65, 70, 75, 80, 85, 90, 95, or 100 contiguous nucleotides of any one of SEQ ID NOs: 2 to 54695. In some embodiments, a synthetic enhancer described herein may comprise a nucleic acid fragment encompassing at least two adjacently concatenated highly palindromic subsequences of any one of SEQ ID NOs: 2 to 54695. A nucleic acid sequence at least 50, 55, 60, 65, 70, 75, 80, 85, 90, 95, or 100% identical overall, or over a segment of at least 50, 55, 60, 65, 70, 75, 80, 85, 90, 95, or 100 contiguous nucleotides, with respect to any one of SEQ ID NOs: 2 to 54695. In some embodiments, a synthetic enhancer described herein may comprise a nucleic acid sequence that hybridizes under stringent conditions to the full complement of any one of SEQ ID NOs: 2 to 54695. Polynucleotides comprising such sequences are suitable for example as probes, primers, and/or molecular tools for identifying, validating, or discovering novel synthetic enhancers and/or transcription-modulating binding sites. In some embodiments, the stringent conditions comprise hybridization in 6× sodium chloride/sodium citrate (SSC) at about 45° C. followed by one or more washing steps in 0.2× SSC. 0.1% SDS at about 50° C. to about 65° C. In some embodiments, a synthetic enhancer described herein may comprise a nucleic acid sequence that is derived from the sequence of any one of SEQ ID NOs: 2 to 54695 and differs therefrom by no more than 10, 15, 20, 25, 30, 35, 40, 45, or 50 nucleotides. In some embodiments, a synthetic enhancer described herein may comprise concatenated highly palindromic subsequences upstream of (or 5′-relative to) a gene (or gene name) identified in the Sequence Listing filed herewith with respect to any one of SEQ ID NOS: 2 to 54695.

[0057] In some embodiments, the core promoter may comprise or consist of the nucleotide sequence of SEQ ID NO: 1, or a variant or fragment thereof having promoter activity. In some embodiments, the core promoter may comprise or consist of a nucleic acid fragment encompassing at least 10, 11, 12, 13, 14, 15, 16, 17, 18, 19, 20, 21, 22, 23, 24, 25, 26, 27, 28, 29, 30, 31, 32, 33, 34, 35, 36, 37, 38, 39, 40, 41, 42, 43, 44, 45, 46, 47, 48, 49, or 50 contiguous nucleotides of SEQ ID NO: 1. In some embodiments, the core promoter may comprise or consist of a nucleic acid sequence at least 50, 55, 60, 65, 70, 75, 80, 85, 90, 95, or 100% identical overall, or over a segment of at least 20, 21, 22, 23, 24, 25, 26, 27, 28, 29, 30, 31, 32, 33, 34, 35, 36, 37, 38, 39, 40, 41, 42, 43, 44, 45, 46, 47, 48, 49, or 50 contiguous nucleotides, with respect to SEQ ID NO: 1. In some embodiments, the core promoter may comprise or consist of a nucleic acid sequence that hybridizes under stringent conditions to the full complement of SEQ ID NO: 1. In some embodiments, the stringent conditions comprise hybridization in 6× sodium chloride/sodium citrate (SSC) at about 45° C. followed by one or more washing steps in 0.2× SSC, 0.1% SDS at about 50° C. to about 65° C. In some embodiments, the core promoter may comprise or consist of a nucleic acid sequence that is derived from SEQ ID NO: 1 and differs therefrom by no more than 10, 15, 20, or 25 nucleotides.

[0058] In some embodiments, described herein is a synthetic promoter suitable for driving transcription of a DNA sequence of interest, wherein the synthetic promoter is as described here, or is constructed by a method as described herein. In some embodiments, the synthetic promoter described herein may comprise or consist of a nucleic acid sequence of any one of SEQ ID NOs: 54696, 54700, 54698, or 54701 to 54710, or a variant or fragment thereof having promoter activity. In some embodiments, the synthetic promoter may comprise or consist of a nucleic acid fragment encompassing at least 50, 55, 60, 65, 70, 75, 80, 85, 90, 95, or 100% identical overall, or over a segment of at least 50, 55, 60, 65, 70, 75, 80, 85, 90, 95, or 100 contiguous nucleotides of any one of SEQ ID NOs: 54696, 54700, 54698, or 54701 to 54710. In some embodiments, the synthetic promoter may comprise or consist of a nucleic acid sequence at least 50, 55, 60, 65, 70, 75, 80, 85, 90, 95, or 100% identical overall, or over a segment of at least 50, 55, 60, 65, 70, 75, 80, 85, 90, 95, or 100 contiguous nucleotides, with respect to any one of SEQ ID NOs: 54696, 54700, 54698, or 54701 to 54710. In some embodiments, the synthetic promoter may comprise or consist of a nucleic acid sequence that hybridizes under stringent conditions to the full complement of any one of SEQ ID NOs: 54696, 54700, 54698, or 54701 to 54710. In some embodiments, the stringent conditions comprise hybridization in 6× sodium chloride/sodium citrate (SSC) at about 45° C. followed by one or more washing steps in 0.2× SSC, 0.1% SDS at about 50° C. to about 65° C. In some embodiments, the synthetic promoter may comprise or consist of a nucleic acid sequence that is derived from any one of SEQ ID NOs: 54696, 54700, 54698, or 54701 to 54710 and differs therefrom by no more than 10, 15, 20, 25, 30, 35, 40, 45, or 50 nucleotides.

[0059] In some embodiments, described herein is an expression cassette or expression vector comprising a synthetic enhancer as described herein or produced by a method as described herein, operably linked a core promoter (e.g., a core promoter as described herein). In some embodiments, a synthetic promoter, expression cassette, and/or vector as described herein may be for use in gene therapy. In some embodiments, a synthetic promoter, expression cassette, and/or vector as described herein may be for use in genome editing, for example wherein the synthetic promoter drives expression of an endonuclease (e.g., an RNA-guided endonuclease) and/or a guide RNA.

### Computer-Implemented Applications

[0060] In some aspects, described herein is a computer-implemented process for constructing a synthetic enhancer. The process generally comprises: (a) inputting or receiving a nucleotide sequence of a promoter of interest; (b) identifying probable palindromic subsequences in the nucleotide sequence of the promoter of interest; (c) selecting and extracting highly palindromic subsequences from amongst the probable palindromic subsequences, the highly palindromic subsequences being those having a palindromic density above a palindromic density threshold; and (d) concatenating some or all of the extracted highly palindromic subsequences to produce a synthetic enhancer having an overall length that is less than that of a contiguous segment of the promoter of interest that comprises all the concatenated highly palindromic subsequences. In some embodiments, the computer-implemented process is a cloud-based computer-implemented process. In some embodiments, the computer may be configured to implement a method as described herein.

[0061] In some aspects, described herein is a non-transitory computer-readable medium storing processor-executable instructions, the instructions when executed by a processor cause the processor to perform a method as described herein, and optionally outputting sequence information to a user.

### Implementations

[0062] In some implementations, all probable palindromes of a given promoter sequence of interest are identified, and for each nucleotide in the promoter, the total number of times the nucleotide participates in a probable palindrome is calculated. The summation of probable palindromes may then be graphed to create a palindromic density graph to determine subsequences that are more palindromic (e.g., by setting an enhancement threshold) than would be expected in random sequences. These palindromic subsequences are then extracted and concatenated to form the synthetic enhancer sequence of the promoter of interest. The synthetic promoter may then be assembled by fusing the synthetic enhancer to a core promoter. As described herein, this method was then applied across all the promoters in the Homo sapien hg38 genome and in the Mus musculus version mm 10 genome to create a database of shortened synthetic enhancers. The results shown herein demonstrate that palindromic density of a given sequence in the enhancer region of promoters can be a predictor of the capacity of the sequence to partake in transcription factor binding and thus can be used to design shortened synthetic enhancers that can be concatenated with a core promoter.

[0063] Referring to FIGS. 1A and 1B, transcription factors and most DNA binding proteins are typically associated with oligomers, such as dimers, trimers, and tetramers, thus consistent with the binding sequence being symmetric or palindromic. For example, FIG. 1A shows a direct binding of oligomeric transcription factors to a palindromic sequence. Even with transcription factors that do not have palindromic binding sequences, another binding site in the antisense strand of the promoter could easily create a higher-order palindromic sequence. FIG. 1B shows an indirect binding of oligomeric transcription factors to a palindromic sequence.

[0064] In some embodiments, a palindromic density metric as described herein may be employed to determine the palindromic density of specific subsequences. Referring now to FIG. 2, a mismatch indicator function M(s, i) is used to identify whether each nucleotide at nucleotide index i in a sequence s is a mismatch or a match for the DNA complement C(a) of the sequence s. The mismatch indicator function M(s, i) for each nucleotide in the subsequence s was determined by the equation:

$$M ( s , i ) = \{ \begin{matrix}1 , if {s}_{i} \neq C ( {s}_{L ( s ) - i + 1} ) \\ 0 , otherwise\end{matrix}$$

in which s is the subsequence, i is a nucleotide index, L(s) is the length of the subsequence s and C(s_{L(s)-i+1}) is a DNA complement of the nucleotide, which is identified by s_{L(s)-i+1}. For example, when the nucleotide in the subsequence s at the nucleotide index i is adenine, the DNA complement of the nucleotide (C(s_{L(s)-i+1})) would be thymine. Similarly, when the nucleotide is thymine, guanine, or cytosine, the DNA complement is adenine, cytosine, or guanine, respectively. The mismatch indicator function M(s, i) is 1 if there is a mismatch with the DNA complement C(a) of a specific nucleotide a at nucleotide index i and is 0 when there is a match at index i. For example, as shown in FIG. 1C, in an 8-nucleotide subsequence frame of 5′ ATCGCCAA 3′ has a DNA complement C(a) of 5′ TTGGCGAT 3′, indicating 4 mismatches (bolded). The mismatch indicator function M(s, i) determines these mismatches for each nucleotide index i.

[0065] The summation of all mismatches for a sequence s within a promoter of interest can then be determined by the equation:

$$N ( s ) = {\sum }_{i = 1}^{i = L ( s )} M ( s , i ) .$$

[0066] In the example shown in FIG. 1C, the summation of all mismatches N(s) is 4.

[0067] To determine whether a particular subsequence s is a probable palindrome, a probable palindrome indicator function P(s) is calculated with the following equation:

$$P ( s ) = \{ \begin{matrix}1 , if N ( s ) \leq Cutoff ( L ( s ) ) \\ 0 , otherwise\end{matrix}$$

in which Cutoff(p) is a mismatch threshold.

[0068] In some embodiments, the mismatch threshold is the number of mismatches expected from between the top 1% and the top 15% of randomly generated sequences of the same length (i.e., within the 85^{th} to 99^{th} percentile). In some embodiments, the mismatch threshold is the number of mismatches expected from the top 2% to 3% of randomly generated sequences of the same length (i.e., within the 97^{th} to 98^{th} percentile). In an exemplary embodiment discussed herein, a subsequence of a particular length was defined as a probable palindrome if the number of mismatches was less than or equal to the number of mismatches in the top 2% to 3% of randomly generated subsequences of the same length.

[0069] To empirically determine the propensity of palindromic mismatches in subsequences having a length of 6 nucleotides, all unique combinations of 6 nucleotides were generated, yielding 4,096 subsequences. The number of mismatches was calculated for every subsequence and tabulated as a histogram as shown in FIG. 3A. The probability of 0 mismatches was 1.58% and the probability of 0 to 2 mismatches increased to 15.59%; accordingly, 0 mismatches were allowed in probable palindromes having a length of 6 nucleotides (i.e., within the top 2 to 3%). The same procedure was repeated for all sequence having lengths ranging from 6 to 10 nucleotides, as shown in FIG. 3B. For subsequences with lengths of between 11 and 50nucleotides, 1,000,000 randomly generated subsequences were used to create the corresponding histograms to estimate the probability, as shown in FIGS. 3C and 3D. As shown in FIG. 3, the probability of mismatches in the top 2% to 3% (represented by a vertical broken line) of mismatches found in random subsequences of example lengths of 6 (FIG. 3A), 10 (FIG. 3B), 20 (FIG. 3C), and 30 (FIG. 3D) nucleotides was determined to be less than or equal to 0, 2, 8, and 14, respectively. Subsequences of even length, such as the subsequence shown in FIG. 1C, only exhibit even summations of mismatches N(s) and sequences having an odd number of nucleotides have an odd summation of mismatches N(s). The allowed total number of mismatches when using a mismatch threshold within the 97^{th} to 98^{th} percentile for each length of subsequence between 6 and 50 nucleotides is listed in Table 1.

TABLE 1

| Palindrome length | 6 | 7 | 8 | 9 | 10 | 11 | 12 | 13 | 14 | 15 | 16 | 17 | 18 | 19 | 20 |
|---|---|---|---|---|---|---|---|---|---|---|---|---|---|---|---|
| Allowed mismatches | 0 | 1 | 0 | 1 | 2 | 3 | 4 | 5 | 4 | 5 | 6 | 7 | 6 | 7 | 8 |
| Palindrome length | 21 | 22 | 23 | 24 | 25 | 26 | 27 | 28 | 29 | 30 | 31 | 32 | 33 | 34 | 35 |
| Allowed mismatches | 9 | 10 | 11 | 10 | 11 | 12 | 13 | 14 | 15 | 14 | 15 | 16 | 17 | 18 | 19 |
| Palindrome length | 36 | 37 | 38 | 39 | 40 | 41 | 42 | 43 | 44 | 45 | 46 | 47 | 48 | 49 | 50 |
| Allowed mismatches | 18 | 19 | 20 | 21 | 22 | 23 | 22 | 23 | 24 | 25 | 24 | 25 | 26 | 27 | 28 |

[0070] It is to be understood that the mismatch thresholds listed in Table 1 is the number of mismatches expected from the top 2% to 3% of randomly generated subsequences of the same length (97^{th} to 98^{th} percentile); however, the mismatch threshold can vary and can include a mismatch threshold that allows more or less mismatches in a given enhancer sequence length.

[0071] Once the probable palindrome indicator function P(s) is calculated, the palindromic score S(s, i) of each nucleotide in the promoter sequence s can be determined with the following equation:

$$S ( s , i ) = {\sum }_{p = y}^{p = x} {\sum }_{w = max ( i - p + 1 , 1 )}^{w = min ( i , L ( s ) - p + 1 )} P ( {s}_{w … ( w + p - 1 )} )$$

wherein p is the length of subsequence frame, which has a maximum nucleotide length of x and a minimum nucleotide length of y. The palindromic score S(s, i) represents the number of probable palindromes of different lengths and subsequence frames the nucleotide participates in.

[0072] The subsequence window length p used to determine probable palindromes can vary depending on factors, such as the number of nucleotides in known transcription factor binding sequences in the particular species and/or promoter. In an exemplary embodiment, the length of subsequences used to determine probable palindromes was set between 6 and 50 nucleotides (x=50, y=6), corresponding to known transcription factor binding sequences that are as short as 6 nucleotides, such as the DNA-binding domain of Engrailed (EngHD) binding 5′ TAATTA 3′, and transcription factor binding sequences that are as long as 50 nucleotides, such as the DNA-binding domain of Listeria phage A118 integrase. The palindromic content of transcription factor binding sequences that are longer than 50 nucleotides are still captured by considering all the subsequences within a 6 to 50 nucleotide frame. However, it is to be understood that a subsequence frame of more or less than 6 to 50 nucleotides can be used.

[0073] Referring now to FIGS. 4A to 4D, palindromic density graphs showing the tabulated palindromic scores S(s, i) of each nucleotide in the promoter sequence are shown. Many transcription factors bind relatively short and degenerate palindromes, such as the serum response factor binding the consensus 5′ CCWWWWWWGG 3′ (SEQ ID NO: 54711), which can often occur by chance. Accordingly, stronger reasons are needed to consider a short palindrome as being a highly palindromic subsequence, such as the probability of the sequence being involved in the transcriptional activity. As described herein, the density of palindromes in a subsequence is a useful measure in determining that significance.

[0074] The palindromic density graphs shown in FIGS. 4A and 4C were determined by evaluating all subsequences between 6 to 50 nucleotides of a promoter of interest to determine if each nucleotide met the criterion for being a probable palindrome (i.e., calculating the probable palindrome indicator function P(s) for each nucleotide). Each nucleotide in the original sequence received a tally of 1 for every probable palindrome the nucleotide was involved with (FIGS. 4A and 4C). These tallies comprised an individual nucleotide's palindromic score S(s, i), with the theoretical limit (i.e. all evaluated subsequences being probable palindromes) equal to 1260.

[0075] As shown in FIGS. 4A to 4D, long palindromes were observable as sharp peaks (FIGS. 4A and 4B), whereas overlapping palindromes were observable as flatter peaks (FIGS. 4C and 4D). The protein structures of transcription factors binding to DNA in the protein databank were shown to typically bind around 6 to 10 nucleotides on the DNA. Accordingly, longer palindromic sequences are theorized as a collection of transcription factors that are each recognizing their individual targets that together form a longer palindromic sequence, as opposed to a single transcription factor. For example, transcription factors such as TBX5 and CTCF are homodimers, where each monomer binds non-adjacent DNA sites creating DNA looping.

[0076] To evaluate the overall sequence, the average palindromic score A(s) for a given sequence was determined. The average palindromic score A(s) is equal to the average of palindromic scores of each nucleotide in the given sequence and can be determined by the following equation:

$$A ( s ) = \frac{1}{L ( s )} \cdot {\sum }_{i - 1}^{i - L ( s )} S ( s , i )$$

[0077] As shown herein, the palindromic density graphs of real promoters have a higher average palindromic score A(s) than that of randomly generated sequences.

[0078] Referring now to FIG. 5A, a palindromic density line graph represented by the palindromic score S(s, i) at each nucleotide index i is shown for three random sequences marked as yellow, red, and blue. To determine the expected palindromic score of a random nucleotide, palindromic density graphs were created for 1,000,000 random sequences having a length of 1101 nucleotides to mimic the analysis of human and mouse promoter sequences. It is understood that any size of random sequences may be generated for the purpose of creating the palindromic density graphs. In an exemplary embodiment, a sequence size of 1101 nucleotides was chosen to mimic the size of larger human and mouse promoters. As shown in FIG. 5A. the palindromic density graphs of random sequences typically had peaks randomly distributed throughout the sequences. The average palindromic score A(s) of these random sequences was 30.55, with the maximum S(s, i) recorded as 264 (Table 2). It should be noted that the first and the last 49 nucleotides in each sequence generally have lower palindromic scores because equation S(s, i) computes the palindromic score using fewer possible sequence frames. When considering the maximum experimental length of 50 nucleotides for probable palindromes, a nucleotide would have a full palindromic score only if there are at least 49 nucleotides upstream and downstream, which is not the case for the end nucleotides. Thus, only the center 1003 nucleotides (excluding 49 nucleotides on each end) would have full tallies (hereafter, named fully scored nucleotides). To calculate the expected palindromic score of a random nucleotide, 1,003,000,000 fully scored nucleotides were averaged, resulting in an average palindromic score of fully scored nucleotides A^{FS}(s) of 31.55 (Table 2).

[0079] Referring now to FIGS. 5B to 5F, a palindromic density line graph represented by the palindromic score S(s, i) of each nucleotide at nucleotide index i in a given promoter sequence is shown for a cytomegalovirus immediate-early (CMV) promoter (FIG. 5B), a human insulin promotor (FIG. 5C), a human desmin promoter (FIG. 5D), a human synapsin-1 promoter (FIG. 5E), and a truncated human synapsin-1 promoter (InvivoGen) (FIG. 5F). The nucleotide index of the transcription start site is represented by a dotted vertical green line. Interestingly, the mouse promoter sequences have a cytosine-guanine content (GC-content) of 51.5%, whereas human promoter sequences have a GC-content of 54.5% (Table 6). When random sequences were generated using GC-content consistent with mouse or human sequences, higher GC-content resulted in a slightly higher average palindromic score of fully scored nucleotides A^{FS}(s) of 31.74 and 33.07. respectively (Table 7) (p <0.00000000001, Wilcoxon rank sum test, two-sided, n=1,000,000).

TABLE 2

| Criterion | Random sequences | Mouse promoters | Human promoters |
|---|---|---|---|
| Number of sequences | 1000000 | 25111 | 29598 |
| Sequence length | 1101 | 1101 | 1101 |
| Number of degenerate sequences | 0 | 12 | 1 |
| discarded | | | |
| Average A(s) | 30.55 | 41.99 | 47.97 |
| Average A^{FS}(s) (fully scored | 31.55 | 43.15 | 49.39 |
| nucleotides) | | | |
| Maximum S(s, i) | 281 | 806 | 822 |
| Minimum S(s, i) | 0 | 0 | 0 |

| | Number | % | Number | % | Number | % |
|---|---|---|---|---|---|---|
| Number of sequences with A(s) > | 498948 | 49.89% | 21039 | 83.82% | 26422 | 89.27% |
| 30.55 (i.e. the average A(s) of | | | | | | |
| random sequences) | | | | | | |

[0080] Referring now to FIG. 6A, a probability distribution of the palindromic score S(s, i) of each nucleotide in a given subsequence is shown for random sequences (yellow), mouse genome promoters (black), and human genome promoters (red). FIG. 6B shows the probability distribution of the average palindromic score A(s) for random sequences (yellow), mouse genome promoters (black), and human genome promoters (red). The analysis of the human genome promoters (red) was performed on version hg38 of the human genome and the mouse genome promoters (black) was performed on version mm10 of the mouse genome. The human and mouse sequences analyzed were of the same length as the random sequences (yellow), excluding degenerate sequences. The palindromic score S(s, i) and the average palindromic score of fully scored nucleotides A^{FS}(s) was determined for each nucleotide in the given sequences.

[0081] The evaluated human hg38 sequences and mouse version mm10 sequences comprised 1101 nucleotide sequences encompassing 1000 nucleotides upstream of the TSS and 100 nucleotides downstream of the TSS, as determined from Dreos et al., 2017. However, it should be noted that any number of nucleotides upstream and downstream of the TSS can be analyzed. In some embodiments, the size of the sequence can be up to 5000 nucleotides in length. In some embodiments, the sequence of the promoter of interest can comprise from about 400 to about 5000 nucleotides upstream of the TSS to 0 to about 200 nucleotides downstream of the TSS.

[0082] When the promoters from the hg38 (Homo sapien) and version mm 10 (Mus musculus) genomes were compared against the randomly generated sequences of the same length, the genome promoters were more palindromic than randomly generated sequences. The average palindromic score of fully scored nucleotides A^{FS}(s) was 41.99 for the version mm 10 mouse promoters and 47.97 for the hg38 human genome promoters, as shown in Table 2 (p<0.00000000001. Wilcoxon rank sum test, two-sided, n=25,099).

[0083] Although the number of random sequences was around 33 and 40 times higher than the number of evaluated human and mouse promoters, respectively, the maximum palindromic score S(s, i) in human genome promoters (822) and in mouse genome promoters (806) was around 65% of the theoretical limit and 3 times higher than that of the random sequences (281), which reached only 22.48% of the theoretical limit. Human and mouse promoters were generally more palindromic than the random sequences as 89% of the human promoter sequences and 84% of the mouse promoter sequences had a higher average palindromic score A(s) than the average palindromic score A(s) of the random sequences (30.55). The maximum average palindromic score A(s) for human and mouse genome promoters were 411.48 and 199.87, respectively, both more than four times larger than the maximum average palindromic score A(s) of random sequences, 49.03 (Table 3). Interestingly, human and mouse promoters also had sequences with an average palindromic score A(s) as low as 1.19, much below the corresponding minimum score of random sequences, suggesting that the lack of palindromes may be associated with their functionality. These sequences were usually dominated by non-pairing nucleotides, such as Cytosine-Thymine (CT) rich sequences yielding low palindromic scores. The existence of these abnormally non-palindromic sequences explains the spike in nucleotides with very low palindromic scores (<5), as shown in FIG. 6A.

TABLE 3

| | | Palindromic | Mouse Gene ID | Palindromic | Human Gene ID | Palindromic |
|---|---|---|---|---|---|---|
| | | Score | (Enhancer | Score | (Enhancer | Score |
| | | S(S, i) | SEQ ID NO:) | S(S, i) | SEQ ID NO:) | S(S, i) |
| Top 5 | 1 | 281 | Spryd4_1 (44407) | 806 | HIPK2_1 (11790) | 822 |
| sequences | 2 | 249 | Catip_1 (30081) | 794 | TBXAS1_2 (11789) | 822 |
| with the | 3 | 242 | Esm1_1 (48286) | 769 | AFF2_1 (29424) | 814 |
| highest | 4 | 242 | Dach1_1 (49167) | 764 | AFF2_2 (29423) | 814 |
| S(s, i) | 5 | 240 | Dach1_2 (49165) | 764 | CARM1_2 (25019) | 814 |
| Top 5 | 1 | 49.03 | Usp7_2 (50318) | 199.87 | ACTRT3_3 (6284) | 411.48 |
| sequences | 2 | 46.29 | Zcchc14_1 (41865) | 198.46 | ACTRT3_1 (6283) | 344.91 |
| with the | 3 | 46.14 | Tmem117_1 (50029) | 192.37 | API5_1 (15799) | 256.98 |
| highest A(s) | 4 | 45.6 | Ydjc_1 (50411) | 192.35 | SKI_1 (70) | 255.67 |
| | 5 | 45.51 | 4921531C22Rik_1 (33061) | 190.79 | ZNF430_1 (25395) | 249.74 |
| Top 5 | 1 | 18.18 | Gm732_1 (*) | 1.19 | SMIM24_2 (24749) | 5.30 |
| sequences | 2 | 18.68 | Cldn34c4_1 (54388) | 5.73 | FAM167A_4 (12062) | 6.35 |
| with the | 3 | 18.9 | Fcer2a_1 (40797) | 10.51 | CRCP_3 (11092) | 7.27 |
| lowest A(s) | 4 | 18.92 | Mrln_1 (40797) | 11.96 | GCNA_2 (28991) | 8.23 |
| | 5 | 18.93 | Cabp2_1 (52925) | 12.9 | GCNT3_1 (20590) | 9.93 |

* Promoter sequence selected in this analysis (cut-off of 1000 nucleotides upstream of the TSS) gave a palindromic score too low to extract any subsequences.

[0084] Referring back to FIG. 5B, an analogous analysis was also performed on the CMV promoter, which is one of the most commonly used constitutive promoter in the literature. The CMV promoter had an average palindromic score A(s) of 45.28, which is also higher than the average palindromic score A(s) of random sequences (30.55) as shown in Table 4. Furthermore, the shape of the CMV promoter palindromic density graph shown in FIG. 5B suggests that the CMV promoter has probable overlapping palindromes consistently distributed throughout the sequence.

[0085] Referring now to FIGS. 5C to 5E, the analysis was also completed on promoters used to target expression in particular tissues: human insulin promoter for pancreatic β cells (FIG. 5C); human desmin promoter for muscle cells (FIG. 5D); and human synapsin-1 promoter for neurons (FIG. 5E). These human promoters had high average palindromic scores A(s), as shown in Table 4. The palindromic density graphs for the human promoters also exhibited sharp peaks, suggesting the presence of long, isolated palindromes.

[0086] Referring now to FIG. 7, palindromic density line graphs were created for closely related orthologous promoters of the human synapsin-1 promoter in a mouse (FIG. 7A), pig (FIG. 7B), and rat (FIG. 7C), as well as a distantly related orthologous promoters of the synapsin-1 promoter in a fly (FIG. 7D). The closely related orthologous promoters (i.e., mouse, pig, and rat synapsin-1 promoters) had more similarly aligned peaks, which differ from the palindromic density peaks for the distantly related promoter of the fly. Interestingly, when the palindromic density of a truncated human synapsin-1 promoter from InvivoGen was calculated, as shown in Table 4, the truncated human synapsin-1 promoter had a greater average palindromic score A(s) (69.97) than the human synapsin-1 promoter (47.44), suggesting a higher number of palindromes in the upstream region that is proximal to the TSS than the upstream region that is distal to the TSS.

TABLE 4

| Evaluated sequence | A(s) |
|---|---|
| Random | 30.55 |
| CMV promoter | 45.28 |
| Human synapsin-1 promoter (truncated) | 69.97 |
| Human synapsin-1 promoter | 47.44 |
| Mouse synapsin-1 promoter | 36.02 |
| Rat synapsin-1 promoter | 35.15 |
| Pig synapsin-1 promoter | 50.82 |
| Fly synapsin-1 promoter | 71.71 |
| Mouse insulin promoter | 39.68 |
| Mouse desmin promoter | 36.20 |
| Human desmin promoter | 44.77 |
| Human insulin promoter | 34.72 |

[0087] By determining the palindromic scores S(s, i) of each nucleotide within a given promoter sequence, an enhancer sequence can be designed by concatenating the highly palindromic nucleotides in palindromic subsequences found upstream of the TSS. Referring now to FIG. 8A, the distribution of palindromic scores S(s, i) of fully scored nucleotides in random sequences were plotted to determine a threshold for determining what constitutes a highly palindromic nucleotide. As noted above, only the fully scored nucleotides were calculated to avoid scores that are biased to be lower by being on either end of the sequence (i.e., being within a fewer number of sequence frames). The distribution of the palindromic scores S(s, i) in the random sequences had an average palindromic score A^{FS}(s) of 31.55 and followed an extreme value distribution. The distribution of the palindromic scores S(s, i) for the random sequences was then used to determine an enhancement threshold that defines a highly palindromic nucleotide.

[0088] In an exemplary embodiment, a highly palindromic nucleotide was defined as a nucleotide within an enhancement threshold that was determined by the top 25% of predetermined palindromic scores of randomly generated sequences (i.e., a highly palindromic nucleotide is a nucleotide within the promoter sequence that has a palindromic score S(s, i) within the 75^{th} percentile of the predetermined palindromic scores S(s, i) of random sequences). In the present example, this definition corresponded to a palindromic score P(s, i) of at least 40. However, it is to be understood that a different enhancement threshold can be used to define a highly palindromic nucleotide. For example, the enhancement threshold can be more tolerant of mismatches, thus corresponding to a larger percentage threshold, such as 40% (i.e. within the 60^{th} percentile), and a lower palindromic score P(s, i) requirement. Alternatively, the enhancement threshold can be less tolerant of mismatches, thus corresponding to a smaller percentage threshold, such as 5% (i.e., within the 95^{th} percentile), and a high palindromic score P(s, i) requirement.

[0089] Thus, to design the synthetic enhancer sequence, all of the nucleotides in the promoter sequence that were deemed to be highly palindromic nucleotides were concatenated to produce a synthetic enhancer. In some embodiments, some or all of the nucleotides downstream of the transcription start site, as well as a predetermined number of nucleotides upstream, such as between 50 and 1 nucleotides, can be excluded as these nucleotides typically encompass the core promoter. In an exemplary embodiment, all of the nucleotides downstream of the TSS and 20 nucleotides upstream of the TSS were excluded.

[0090] In some embodiments, the highly palindromic nucleotides in the promoter sequence that are adjacent to each other can be considered highly palindromic subsequences. The highly palindromic subsequences can be directly concatenated together to produce the synthetic enhancer. Alternatively, the highly palindromic subsequences can be concatenated via one or more linkers (e.g., 1 to 25 nucleotides in length) interspaced between two or more highly palindromic subsequences. In some embodiments, the linker can comprise a palindromic subsequence or a non-palindromic subsequence. In some embodiments, the linker can comprise a functional sequence, such as a restriction site or a landing site (e.g., integrase, recombinase, or transposase landing site).

[0091] Using the method described herein, synthetic enhancer regions for every promoter in the Homo sapien (hg38) and Mus musculus (version mm 10) genome were created. In some embodiments, the Homo sapien synthetic enhancer comprises a nucleotide sequence individually selected from the group consisting of SEQ ID NOs: 2 to 29597. In another embodiment, the Mus musculus synthetic enhancer comprises a nucleotide sequence individually selected from the group consisting of SEQ ID NOs: 29598 to 54695. To create a synthetic promoter using these enhancer sequences, a synthetic enhancer comprising a nucleotide sequence individually selected from the group consisting of SEQ ID NOs: 2 to 54695 can be operably fused, optionally with a linker, to a core promoter. In some embodiments, the core promoter may be a minimal sequence of approximately 50 to 100 nucleotides that enables accurate initiation of transcription at the transcription start site (TSS). However, it should be noted that in some embodiments, the minimal core promoter can encompass a larger or smaller number of nucleotides.

[0092] While core promoters appear to be relatively interchangeable, the core promoter from the Cytomegalovirus immediate-early promoter (CMVp, SEQ ID NO: 54700) was used as an exemplary embodiment as CMVp is commonly used in the scientific literature. The minimal CMV core promoter (SEQ ID NO: 1) contains a TATA box and mammalian initiator sequence. Alone, the basal expression of genes controlled by minimal core promoters is significantly lower (and often undetectable) than full-length promoters, which rely on enhancer elements to promote higher levels of expression. This enhancer region contains sequences of transcription factor binding sites that allow for specific expression depending on the transcription factors expressed by the cell. By using the palindromic density of subsequences in the promoter as a metric for the ability of the subsequence to promote similar levels of expression and/or a similar expression profile (i.e., as a predictor for the ability of the subsequence to act as a transcription factor), synthetic enhancers were designed for each promoter of interest to be concatenated with a core promoter, such as the minimal CMV promoter. However, the skilled artisan would understand that any core promoter that is configured to initiate transcription can be used, such as a core promoter from an/a SV40, UbC, EFIA, PGK, or CAGG promoter.

### Experimental Verification

### Example 1

[0093] The CMV promoter was used as a test case for synthetic promoter design because the CMV promotor is the most commonly used promoter in the scientific literature to constitutively express genes of interest. The transcription factor binding sites of AP-1 (5′ TGASTCA 3′) and CREB (5′ TGACG 3″) are frequently found in strong constitutive promoters and the CMV promoter has 1 AP-1 site and 11 CREB sites. A synthetic CMV enhancer was created by concatenating highly palindromic subsequences that were identified using the method described herein. Using the method described herein, the sequence of the CMV promoter was reduced from 508 nucleotides to 373 nucleotides, as shown in FIGS. 8C and 8D. Interestingly, the AP-1 site and all the CREB sites of the CMV promoter were conserved. In FIG. 8C, the AP-1 site is boxed, the CREB sites in the forward direction are highlighted in black, and the CREB sites in the reverse direction are underlined.

[0094] To create the synthetic CMV promoter (PCMVp, SEQ ID NO: 54696) using the identified highly palindromic subsequences, the 373 nucleotide synthetic enhancer comprising the concatenated subsequences that were identified as being highly palindromic subsequences (SEQ ID NO: 54697) was concatenated to the minimal CMV core promoter (SEQ ID NO: 1).

### Example 2

[0095] The mouse synapsin-1 promoter (mSyn1p) was used as a Mus musculus test case. Previous experiments showed that the neuronal-specific expression was abolished when the neuron-restrictive silencer element/repressor element-1 (NRSE/RE-1) was removed from the promoter. The synthetic mSyn1p enhancer was created by concatenating highly palindromic subsequences identified using the method described here. The synthetic mSyn1p enhancer reduced the enhancer of the mSyn1p from 980 nucleotides (as defined in the Eukaryotic Promoter Database of Dreos et al., 2017) to 324 nucleotides, as shown in FIGS. 8E and 8F. Interestingly, the NRSE/RE-1 site known to be required for neuronal specific expression was conserved, as shown highlighted in black in FIG. 8F. To create a synthetic mouse synapsin-1 promoter (PmSyn1p, SEQ ID NO: 54698) using the identified highly palindromic subsequences, the 324 nucleotide synthetic enhancer comprising the concatenated subsequences that were identified as being highly palindromic subsequences was concatenated to a minimal CMV core promoter (SEQ ID NO: 1). The nucleotide sequence of the synthetic enhancer sequence comprises the synthetic enhancer sequence as shown in SEQ ID NO: 53836.

[0096] Referring now to FIG. 9, experimental verification of synthetic promoters PCMVp (SEQ ID NO: 54696) and PmSyn1p (SEQ ID NO: 54698) was conducted in living cells. As shown in FIG. 9A, vectors for transiently expressing Venus yellow fluorescent protein under the regulation of PCMVp or PmSyn1p and having a SV40 polyA transcriptional termination sequence (pA) were synthesized. The Venus yellow fluorescent protein was localized to the plasma membrane (pm Venus) with the 12 N-terminal amino acids from Lyn kinase (¹MGCIKSKGKDSA¹²; SEQ ID NO: 54712). All synthesis and subcloning of plasmids was achieved by GenScript™ following a subcloning methodology.

[0097] FIG. 9B shows a representation of the translocation of the fluorescent reporter to the plasma membrane by post-translational lipid modification. As the methionine is removed and glycine is lipid-modified for membrane anchoring upon expression, the localization of the Venus yellow fluorescent protein to the plasma membrane indicated that transcription was precisely activated by the upstream promoter.

[0098] The pm Venus vectors regulated by PCMBp and PmSyn1p were transfected in HEK293 cells and N2A cells, respectively. The cells were maintained in Dulbecco's Modified Eagle's Medium (DMEM) containing 25 mM D-glucose, 1 mM sodium pyruvate and 4 mM L-glutamine (Invitrogen111) supplemented with 10% Fetal Bovine Serum (FBS) (Sigma-Aldrich) in T25 flasks and incubated at 37° C. and 5% CO₂. Specifically, cells at 90% confluency were transfected with 100 ng of plasmid per well of a 96-well plate for 24 hours with lipofectamine 3000 following the manufacturers' protocol (Thermo Fisher Scientific). Venus positive cells were determined by the percentage of cells in the well that had fluorescence visible through the eyepiece of the microscope.

[0099] Prior to imaging. HEK293 cells or N2A cells were plated in 96-well glass-bottom plates (MatTek™). Images were taken with the Olympus IX81™ microscope, using a Lambda™ DG4 xenon lamp for the light source, and a QuantEM™ 512SC CCD camera with a 10× objective or 40× objective (Olympus). Excitation (EX) and emission (EM) filter bandpass specifications for Venus yellow fluorescent proteins (EX: 500/24, EM: 524/27) were used (Semrock™). Images were analysed via ImageJ and μManager software. Imaging was conducted with cells washed and maintained in PBS with CaCl₂ (Sigma). FIGS. 9C and 9D show representative fluorescence images of HEK293 cells transfected with pm Venus regulated by PCMVp at 10× magnification and 40× magnification, respectively. The scale bar at 10× magnification is 100 μm and at 40× magnification is 10 μm. The transfection efficiency of the HEK293 cells transfected with pm Venus regulated by PCMVp was at 70±5% with membrane localization.

[0100] FIGS. 9E and 9F show representative fluorescence images of N2A cells transfected with pm Venus regulated by PmSyn1p at 10× magnification and 40× magnification, respectively. The transfection efficiency of N2A cells transfected with pm Venus regulated by PmSyn1p was 5±3% with membrane localization. The lower transfection efficiency in N2A is due to the less efficient uptake of genetic material, which is a characteristic of this cell line. When the PmSyn1p vector was transfected in HeLa, MDCK, CHO or 3T3 cells, no fluorescence was detected in any experiments (FIG. 9I), despite these cells being able to express fluorescent protein regulated by full length CMVp, as shown in FIG. 10C.

[0101] FIGS. 10A to 10C show bar graphs of the normalized fluorescence intensity (f/f₀) of HEK293 cells (FIG. 10A) after transfection with the full length CMVp promoter (SEQ ID NO: 54700) and the synthetic PCMVp promoter (SEQ ID NO: 54696) and N2A cells (FIG. 10B) after transfection with the full length mSyn1p promoter (SEQ ID NO: 54699) and the synthetic PmSyn1p promoter (SEQ ID NO: 54698), where f is the mean fluorescence of regions with cells and f₀ is the mean fluorescence of a similar sized region without cells. The mean normalized fluorescence intensities (f/f₀) were derived from regions encompassing at least 500 cells for HEK293 and 100 cells for N2A. Error bars (s.e.m.) were derived from 3 independent experiments. As can be seen, the normalized fluorescence intensity (f/f₀) for both the full length and synthetic promoters in HEK293 and N2A cells were deemed not significant with an unpaired Student's t test (n.s.). Indeed, as shown in FIGS. 9G and 9H, as well as in FIGS. 10A and 10B, both the PCMVp and PmSyn1p synthetic promoters designed using the method described herein were found to be equally as effective as their full length promoters.

[0102] FIG. 10C shows a graph of the percentage of Venus fluorescent in N2A, HeLa, MDCK, CHO and 3T3 cells after transfection with CMVp (full promoter). Error bars (s.d.) were derived from 3 independent experiments with at least 100 cells in the field of view.

### Example 3

[0103] To further verify the broader effectiveness of the method of constructing synthetic promoters, 10 additional shortened human promoters designed using the method described herein were tested in HEK293 cells: CALR, EEF1A1, HSP70, LDHA, NPM1, PKM, RACK1, TUBA1, UBB, and UBC as listed in Table 5. These genes were chosen because the shortened promoters are between 300 to 500 nucleotides and they are among the most well expressed genes in HEK293 cells based on public transcriptome data (GEO ID: GSE165900) on NCBI GEO database. As shown in FIG. 11, all of the tested promoters were active in HEK293 cells with some promoters being as effective as PCMVp.

TABLE 5

| | Promoter | |
|---|---|---|
| Gene | name | Promoter sequence |
| Control | CMV core | TAGGCGTGTACGGTGGGAGGTCTATATAAGCAGAGCTCGTTTAGTGAA |
| | | CCGCCACCATG (SEQ ID NO: 1) |
| SYN1 | mSyn1p | ATGTAGACTAAATATGTGCATGTGGAGGAGGCTGAAAACACATCAGAG |
| | | CTAGCGCTGCAGGAAATGCTTCTGCATTGCATACCCAGAGTTTCCTTG |
| | | CTCATCTGGGAGTCTGTGTTTTTCCTAGATGTGTGCACTTGTGTGAGA |
| | | TTCTCTGGGTGTGAGTCAAAGTGTTATCTGAATGTGTAATGTGTGCTC |
| | | AATATGCTCATGTGTGTTACCCTGAGCTTCTGTGTCTACATATATACC |
| | | TGGATGCCTGTGTGTTCTGTGATGTACATATATATTCTGTCTTTCCTT |
| | | CCTTTTCTATTTGTGTTATTCCATGTGTTCTTTCAGATTCTCACCACC |
| | | AAGGGCAAGGATATGTTAACTACCCAAGTGTCCACCTCCGCCTGTCTG |
| | | GTGATGTTTACGCCACCCCCGTGCTCTTTTCTTTGCCCGACAGAGTTG |
| | | TTATAGGAGATGTCTCCCCGGGAACACTGCAGGAAGGAGAATTTCTAC |
| | | ATTTATGTTCCCCTCTGAGTGTGCTTCTATCCCCAAAATGCCTTCAAA |
| | | GGTGAAAATCAACACTGGAAACCCAAGTATCTGGGAAGGGCAAGAGTG |
| | | TGTAAGTGCAAGTTAGCCTAAGGAATAGGAAGAGGTTGGTAAACAGGG |
| | | TAGGATCGTGGGAGGGAGTTTCGTTACTACAGGTCCGGACCCTCAGGA |
| | | CAAGAACCCCACCCCCACTCCCCAAATTGCGCATCCCCCGCCCCCATC |
| | | AGAGGGGGAGGGGAAGAGGTTGCGGCGCGGCGCATGCGCACTGTCGGA |
| | | TTCAGCACCGCGGTCAGAGCCTTCGCCTCCGCTGCCGGCGCGCACCAC |
| | | CACCTCCCCAGCACCAAAGGCTGACTGACGTCACTCACTAGCCCTCCC |
| | | CAAACTCCCCTTCCTCGCCGCCTTGGTCGCGTCCATGCTGCCGTGAGT |
| | | CCAGTCGGACCGCACCACGAGAGGTGCAAGATAGGGAGGTGCGGGCGC |
| | | GACCATACGCTCTGCGGCGGTAGGCGTGTACGGTGGGAGGTCTATATA |
| | | AGCAGAGCTCGTTTAGTGAACCGCCACCATG (SEQ ID NO: |
| | | 54699) |
| CMV genes | CMVp | CGGGGTCATTAGTTCATAGCCCATATATGGAGTTCCGCGTTACATAAC |
| | | TTACGGTAAATGGCCCGCCTGGCTGACCGCCCAACGACCCCCGCCCAT |
| | | TGACGTCAATAATGACGTATGTTCCCATAGTAACGCCAATAGGGACTT |
| | | TCCATTGACGTCAATGGGTGGAGTATTTACGGTAAACTGCCCACTTGG |
| | | CAGTACATCAAGTGTATCATATGCCAAGTACGCCCCCTATTGACGTCA |
| | | ATGACGGTAAATGGCCCGCCTGGCATTATGCCCAGTACATGACCTTAT |
| | | GGGACTTTCCTACTTGGCAGTACATCTACGTATTAGTCATCGCTATTA |
| | | CCATGCTGATGCGGTTTTGGCAGTACATCAATGGGCGTGGATAGCGGT |
| | | TTGACTCACGGGGATTTCCAAGTCTCCACCCCATTGACGTCAATGGGA |
| | | GTTTGTTTTGGCACCAAAATCAACGGGACTTTCCAAAATGTCGTAACA |
| | | ACTCCGCCCCATTGACGCAAATGGGCGGTAGGCGTGTACGGTGGGAGG |
| | | TCTATATAAGCAGAGCTCGTTTAGTGAACCGCCACCATG |
| | | (SEQ ID NO: 54700) |
| CALR | PhCALRp | AAAAGCCAGGCCGTTTACCCCCTTCATGGAGGGTAGGGTAATAACCCT |
| Bolded | | TTAAAAACAGAGATGCCCCGGTCACAGGGCAGAAGGAGGAGAGGGCTG |
| Sequence: | | GCATTCTTCCCACCGGCCCGCGTGACTGTAGCACCGGGGTGCAGCGAA |
| SEQ ID NO: | | GCGAGCTCTCTCCCATCCCAGGCAGGGGTGGGGGAGCAGCAGGAAAGC |
| 25122 | | CTTGCCCAGCCCCTCCACCTAGAGGGAATGGGAGGGAGGGGTCCCGGT |
| | | CCCGCGTAGACAGCTGCGCTCCCGCCGCGCGCCGGGGTTGGGTTCAGG |
| | | TCTGGTCACATGACCTGGCCTGAGGTGCTCGCGGCCCCCACCCCACCA |
| | | GTGGGCGTCCCCCCCACGCGTGGTCGACCATCATTGGTCGGTGGAACC |
| | | CAGCGTTCCGAGTAGGCGTGTACGGTGGGAGGTCTATATAAGCAGAGC |
| | | TCGTTTAGTGAACCGCCACCATG_(SEQ ID NO: 54701) |
| EEF1A1 | PhEF1p | GCCGCGGGCTGAATTACTTCCACGCCCCTGGCTGCAGTACGTGATTCT |
| Bolded | | TGATCCCGAGCGCTGGGGCCGCCGCGTGCGAATCTGGTGGCACCTTCG |
| Sequence: | | CCTAGCCATTTAAAATTTTTGATTGGGGCCGCGGGCGGCGACGGGGCC |
| SEQ ID NO: | | CGTGCGTCCCAGCGCACATGTTCGGCGAGGCGGGGCCTGCGAGCGCGG |
| 9999 | | CCACCGAGAATCGGCAAGCTGGCCGGCCTGCTCTGGTGCCTGGCCTCG |
| | | CGCCGCCGTGTATCGCCCCGCCCTGGGCGGCAAGGCTGGCCCGGTCGG |
| | | CACCAGGGAGCGGAAAGATGGCCGCTTCCCGGCCCTGCTGCAGGGAGC |
| | | TGTCACCCACACAAAGGAAAAGGGCCTTGTCGCTTCATGTGACTCCAC |
| | | GGAGTACCGGGCGCCGTCCAGGCACCTCGACCCACACTGAGTGGGTGG |
| | | TAGGCGTGTACGGTGGGAGGTCTATATAAGCAGAGCTCGTTTAGTGAA |
| | | CCGCCACCATG_(SEQ ID NO: 54702) |
| HSP70 | PhHSP70p | AGACACGACCGCGTCCTGAGGCGGTTCTGCTGCCTCCCGACAGTTGCC |
| Bolded | | GTAGGGAAGGTGCTGGGAGGCCTGCCGAGCTAACCCGCCCCACCCCGC |
| Sequence: | | GGCGGCCTGGCGGCTCCCTCCAATCCCAATCCTGGGGGGCCGTGAGCG |
| SEQ ID NO: | | AGCAGCCCTAGTGGCACCCCCGGCCAAGATCCCGGCTAGCGCCGCTAT |
| 16979 | | CCGCCCCCTCCCTCCCGCGGAAGCTGGGGGCGCATGCGTAGAGGTGGA |
| | | CGCTCCCCTCCCCCGCCCGGGGTAACTGAGGACTCCCGCGCGCGGACT |
| | | CGCTGCGCCCCACCCTCCCTTTCCCCGGGGCCGTCCGGAGAGCGGGGG |
| | | CGAGCTTGAAAGTAGGGGGGGGCCCCTTCTGGTAGGCGTGTACGGTGG |
| | | GAGGTCTATATAAGCAGAGCTCGTTTAGTGAACCGCCACCATG (SEQ |
| | | ID NO: 54703) |
| LDHA | PhLDHAp | GTTGCAGTGAGCCGAGATCAGCCCACTGCACTCCAGTTAATAATTGAG |
| Bolded | | GCTGCAGGAAGCCATGATCACGCCACTGCCCTCCAGCCTGGGTGACAG |
| Sequence: | | AGTGAGACCCTGCTGACAGTTCTTGGAATGTACATTTGACTGCAAGGC |
| SEQ ID NO: | | CTGAGAGGCCAAGGCTTCACTGTGCAGACTGACTGACTGCTAGGCATT |
| 15642 | | TTCTTCCTTTCCAGGTTTCATGGATGAGGCCTGACTCAGGCTCATGGC |
| | | TCCGACCCCGGCTTCTGTGGAGCAGTCTGCCGGTCGGTTGTCTGGCTG |
| | | CGCGCGCCACCCGGGCCTCTCCAGTGCCCCGCCTGGCTCGGCATCCAC |
| | | CCCCAGCCCGACTCACACGTGGGTTCCCGCACGTCCGCCGGCCCCCCC |
| | | CGCTGACGTCAGCATAGGCGTGTACGGTGGGAGGTCTATATAAGCAGA |
| | | GCTCGTTTAGTGAACCGCCACCATG_(SEQ ID NO: 54704) |
| NPM1 | PhNPMlp | TTGTTTGATATGTTGAGGCTTAAAAAAAAAAGATCTTCAGAACGCCCC |
| Bolded | | AATGCCCGCGGGGTGCTGGGGTGCCTCTTCTTTCATCAGAGTCGGCCC |
| Sequence: | | ACCCTCCGAGCTCTTCAGACAGAGCTGAAAAACTCATTCGAGCCGGCT |
| SEQ ID NO: | | AACCGCTAAGGGCTGCCGACGCCATTTTGCAGGGTGGGCTGCGCAGAC |
| 8931 | | TCTTGGCACGCGTGCGCACAGGCGGTACGAGTGCGCGTGCTCGGTGGG |
| | | AGCCCGCGGAGTACGCTTCGGAGCACGCGCGCGGAGGCAAGCGCTCTA |
| | | GGCGTGTACGGTGGGAGGTCTATATAAGCAGAGCTCGTTTAGTGAACC |
| | | GCCACCATG_(SEQ ID NO: 54705) |
| PKM | PhPKMp | TGCTGTAAGAAAAGTTCCAACAATACCAGTCTCCGAGGGTGCGCCAGA |
| Bolded | | GCAGACGGGCCGGGAGAATGCTGCCCCGGAACCCATAAATCTGGGCCC |
| Sequence: | | TGCCCAGGTAGGCCGGGACAGCTGGGGTGGCCTGGGCCGCCCCATCTG |
| SEQ ID NO: | | GCAGCCCAACTTGGCGGCAACAGGTGGCCCGGCGCCCGGGGGTCTGGG |
| 20744 | | AGGAAAGTCGCTCCGGGGGCGGGCCCCGTTGCCCCGCCGCGTCCCCAT |
| | | TCGAAAGGGCAACCTGCCCGCGCGTTCCGCCGCCGCCGCCGCGCTTCC |
| | | TCCTGAAGGTGACTGCGCCCGCGGGGACGCAGGGGGCGGGGCCCGGGT |
| | | CGCCCGGAGCCGGGATTGGGCAGAGGGCGGGGCGGCGGAGGGATTGCG |
| | | GCGGCCCGCAGCGGGTAGGCGTGTACGGTGGGAGGTCTATATAAGCAG |
| | | AGCTCGTTTAGTGAACCGCCACCATG_(SEQ ID NO: 54706) |
| RACK1 | PhRACK1p | TTTATTATTTTATTTGCTGCCCAGGCTGGAGTGCAGTGGCGCGATCTA |
| Bolded | | CTGCAAAGGGATTCTCCCCGAGTAACTCAGTCCAGCCTGGACTAAGTC |
| Sequence: | | CTTCCGGAGTTGGCACAGTTTTAAAGTTTATTTTTAACATTTTAATAC |
| SEQ ID NO: | | TCTACTTTTTAAATTGCCCATCCACGATGTGGAACAGGCGGAGCTCGA |
| 9090 | | GCTATGCCACATAAAGCCTTTTTAAACACTTGAATGTGCTTGTTTCAG |
| | | AGTGTAGGCGTGTACGGTGGGAGGTCTATATAAGCAGAGCTCGTTTAG |
| | | TGAACCGCCACCATG (SEQ ID NO: 54707) |
| TUBA1 | PhTUBA1bp | TCTGAAATGTGTTTTTAAATCTCCTTTTCAAAAAGCCCTTAGGACTGT |
| Bolded | | TCCATAAAGTTGATGGCTTAGATCTAAAATTGGGGCCTACTTTGCCCT |
| Sequence: | | TTTAACAGCTAATGACTGAAATACTATTTGCTTCCAGCGTTTGGTTCA |
| SEQ ID NO: | | GGTTGCGGGAGGCCGACTCGCGCCCGCCCCTCGGCAGGCCCTCGCAGC |
| 17649 | | CATGCGCCGCACACTGCAGTACTGGCGCGCGTTGCCCGCAGGCGCGGC |
| | | AGACCCCACCCCGCGGCCGCGCGAGGGGAGGGGGCTCGGGGCTCGGAG |
| | | CCCGCCTCTGCGGCGGCCAGGCCGGGCGCGGAGTGGGCGCGCGGGGCC |
| | | GGAGGAGGGGCCAGCGACCGCGGCACCGCCTGTGCCCGCCCGCCCCTC |
| | | CGCAGCCGCTACTTAAGAGGCTAGGCGTGTACGGTGGGAGGTCTATAT |
| | | AAGCAGAGCTCGTTTAGTGAACCGCCACCATG |
| | | (SEQ ID NO: 54708) |
| UBB | PhUBBp | CCTTGGCCAGGCTGGTCTTGACAGGCGTGAGCCTCCGCGCCCGGCCAG |
| Bolded | | GGGCGCGCGTTTTTAATATCGGGTGCCACGCCGTCCCGCTTCTGAGGC |
| Sequence: | | GCGGCGGCCCACTTTGGCAGGCCGAGGCGGGAGATCGCGCCATTGCAC |
| SEQ ID NO: | | TCCAGCTCCCGCCGGAATTCAGGACGGCGCGCCTGTGCGGCGCACGCG |
| 22803 | | CGCTCAGTTACTTAGCAACCTCGGCGCTAAGCCACCCGCGCTGCAAGG |
| | | AAGTTTCCAGAGCTTTCGAGGAAGGTTTCTTCAACTCTCATCTGATAA |
| | | TTTTCTTATATTTTCCTAAAGAAGGAAGAGACTGCCTCTCGGGAGGTT |
| | | GGGCGCGGCGAACTACTTGGGTGATAAGTGACGCAACACTCGTTGCAT |
| | | AAATTTAGGCGTGTACGGTGGGAGGTCTATATAAGCAGAGCTCGTTTA |
| | | GTGAACCGCCACCATG (SEQ ID NO: 54709) |
| UBC | PhUBCp | AACGCGGGGTTCGCGACCCGAGGGGACCGCGGGGGCTGAGGGGAGGGG |
| Bolded | | CCGCGGAGCCGCGGCTAAGGAACGCGGGCCGCCCACCCGCTCCCGGTG |
| Sequence: | | CAGCGGCCTCCGCGCCGGGTTTTGGCGCCTCCCGCGGGCGCCCCCCTC |
| SEQ ID NO: | | CTCACGGCGAGCGCTGCCACGTCAGACGAAGGGCGCAGCGAGCGTCCT |
| 18659 | | GATCCTTCCGCCCGGACGCTCAGGACAGCGGCCCGCTGCTCATAAGAC |
| | | TCGGCCTTAGAACCCCAGTAAAGTAGTCCCTTCTCGGCGATTCTGCGG |
| | | AGGGATCTCCGCCGGGTGTGGCACAGCTAGTTCCGTCGCAGCCGGGGC |
| | | TGCTGGGCTGGCCGGGGCTTTCGTGGCCGCCGGGCCGCTCGGTGGGAC |
| | | GGAGGCTCCCGAGTCTGGCAAGAACCCAAGGTCTTGAGGCCTTCGCTA |
| | | ATGCGGGCAGTGCACCCGTACCTTTGGGAGCGCGCGCCCTCGTTAGGC |
| | | GTGTACGGTGGGAGGTCTATATAAGCAGAGCTCGTTTAGTGAACCGCC |
| | | ACCATG (SEQ ID NO: 54710) |

### Example 4

[0104] The method of constructing synthetic promoters described herein was applied to all Homo sapien and Mus musculus promoters identified in the hg38 human genome and the version mm 10 mouse genome, respectively. The analysis showed that promoter sequences have a higher palindromic density when compared to randomly generated sequences. As shown in FIG. 12, the average length of the resulting synthetic enhancers was 413 nucleotides and the length of the enhancer sequence increased as the average of palindromic scores A(s) increased.

TABLE 6

| | Mouse | Human |
|---|---|---|
| | promoters | promoters |
| Number of sequences | 25111 | 29598 |
| Sequence length | 1101 | 1101 |
| Number of degenerate sequences | 12 | 1 |
| discarded | | |
| Number of nucleotides evaluated | 27633999 | 32586297 |
| Proportion of adenine (A) | 0.242 | 0.227 |
| Proportion of thymine (T) | 0.242 | 0.228 |
| Proportion of cytosine (C) | 0.256 | 0.271 |
| Proportion of guanine (G) | 0.259 | 0.274 |
| Proportion of GC-content | 0.515 | 0.545 |

TABLE 7

| | Balanced GC- | Mouse GC- | Human GC- |
|---|---|---|---|
| | content | content | content |
| Number of sequences | 1000000 | 1000000 | 1000000 |
| Sequence length | 1101 | 1101 | 1101 |
| Average A(s) | 30.55 | 30.74 | 32.03 |
| Average A^{FS}(s) | 31.55 | 31.74 | 33.07 |
| (fully scored nucleotides) | | | |
| Maximum S(s, i) | 281 | 309 | 386 |
| Minimum S(s, i) | 0 | 0 | 0 |

[0105] Altogether, these results show a synthetic enhancer region can be designed for a promoter of interest using palindromic density as a metric for determining highly palindromic subsequences.

### REFERENCES

[0106] Dreos et al., “The Eukaryotic Promoter Database in Its 30th Year: Focus on Non-Vertebrate Organisms”. Nucleic Acids Res 2017, 45 (D1), D51-D55.

1. A method of constructing a synthetic enhancer, the method comprising:
identifying probable palindromic subsequences in a promoter of interest;
selecting and extracting highly palindromic subsequences from amongst the probable palindromic subsequences, the highly palindromic subsequences being those having a palindromic density above a palindromic density threshold; and
concatenating some or all of the extracted highly palindromic subsequences to produce a synthetic enhancer having an overall length that is less than that of a contiguous segment of the promoter of interest that comprises all the concatenated highly palindromic subsequences.

2. The method of claim 1, wherein:
(a) identifying the probable palindromic subsequences comprises:
defining a candidate subsequence of a predetermined length in the promoter of interest;
generating a complement or reverse complement of the candidate subsequence;
comparing the candidate subsequence with a DNA complement or reverse complement to identify the number of mismatches; and
identifying the candidate subsequence as the probable palindromic subsequence if the number of mismatches is the same or lower than a mismatch threshold corresponding to the number of mismatches expected from comparable randomly generated sequences; and/or
(b) selecting the highly palindromic subsequences based on the palindromic density comprises determining a palindromic nucleotide score S(s, i) for each individual nucleotide in the probable palindromic subsequence, the palindromic nucleotide score correlating with a number of probable palindromic subsequences of different lengths and different subsequence frames in which the nucleotide participates, and optionally plotting a palindromic density graph of palindromic nucleotide score as a function of nucleotide position within the promoter of interest.

3. The method of claim 2, wherein:
(a) the candidate subsequence's length is set at a minimal length of at least 4, 5, 6, 7, 8, 9, or 10 nucleotides, and/or a maximal length of up to 30, 35, 40, 45, 50, 55, 60, 65, 70, 75, 80, 85, 90, 95, 100, 125, or 150 nucleotides;
(b) the candidate subsequence is compared with its reverse complement by performing a sequence alignment to identify the number of mismatches;
(c) the mismatch threshold corresponds to the number of mismatches expected from the most palindromic randomly generated sequences of the same length as the candidate subsequence, such as the number of mismatches expected within a 60^{th}, 65^{th}, 70^{th}, 75^{th}, 80^{th}, 85^{th}, 90^{th}, 95^{th}, 96^{th}, 97^{th}, 98^{th}, or 99^{th} percentile of randomly generated sequences of a same length; or
(d) any combination of (a) to (c).

4. The method of claim 2, wherein
(a) comparing the number of mismatches is determined by mismatch indicator function M (s, i):
$$M ( s , i ) = \{ \begin{matrix}1 , if {s}_{i} \neq C ( {s}_{L ( s ) - i + 1} ) \\ 0 , otherwise\end{matrix} ;$$
where s is a candidate subsequence of the promoter of interest, i is a nucleotide index, L(s) is a length of the subsequence s, and C(s_{L(s)-i+1}) is the DNA complement of nucleotide s_{L(s)-i+1};
(b) selecting the highly palindromic subsequences based on the palindromic density further comprises determining an overall palindromic density sequence score for each of the probable palindromic subsequence, the overall palindromic density sequence score correlating with the palindromic nucleotide scores for all or substantially all individual nucleotides in the probable palindromic subsequence;
(c) the palindromic nucleotide score S(s, i) is determined by:
$$S ( s , i ) = {\sum }_{p = y}^{p = x} {\sum }_{w = max ( i - p + 1 , 1 )}^{w = min ( i , L ( s ) - p + 1 )} P ( {s}_{w … ( w + p - 1 )} )$$
wherein p is a palindrome length of each probable palindromic subsequence, and the palindrome length has a maximum number of nucleotides equal to x, and a minimum number of nucleotides equal to y; or
(d) any combination of (a) to (c).

5. The method of claim 4, wherein comparing the number of mismatches further comprises performing a summation of the mismatches N(s):
$$N ( s ) = {\sum }_{i = 1}^{i = L ( s )} M ( s , i ) .$$

6. The method of claim 5, wherein probable palindromic subsequences are determined by calculating a probable palindrome indicator function P(s):
$$P ( s ) = \{ \begin{matrix}1 , if N ( s ) \leq Cutoff ( L ( s ) ) \\ 0 , otherwise\end{matrix} ;$$
where Cutoff(p) is a mismatch threshold corresponding to the number of allowed mismatches for a sequence of length p.

7. (canceled)

8. (canceled)

9. The method of claim 1, wherein;
(a) the palindromic density threshold is based on the expected palindromic densities of comparable randomly generated sequences;
(b) the extracted highly palindromic subsequences are concatenated with one or more intervening synthetic linker sequences therebetween, wherein at least one of the one or more intervening synthetic linker sequences comprises a palindromic subsequence, a non-palindromic subsequence, or binding site (e.g., a restriction site or a landing site, such as an integrase, recombinase, or transposase landing site);
(c) the extracted highly palindromic subsequences are concatenated without intervening synthetic linker sequences therebetween;
(d) the promoter of interest comprises a promoter from a mammalian genome; or
(e) the method further comprises synthesizing a polynucleotide comprising the synthetic enhancer.

10. The method of claim 9, wherein the palindromic density threshold is within a 60^{th}, 65^{th}, 70^{th}, 75^{th}, 80^{th}, 85^{th}, 90^{th}, or 95^{th} percentile of the expected palindromic densities of comparable randomly generated sequences.

11. (canceled)

12. The method of claim 4, wherein:
(a) x is 30, 35, 40, 45, 50, 55, 60, 65, 70, 75, 80, 85, 90, 95, 100, 125, or 150 nucleotides;
(b) y is 4, 5, 6, 7, 8, 9, or 10 nucleotides;
(c) wherein the length of the sequence (L(s)) of the promoter of interest is less than 1 000 000, 500 000, 250 000, 200 000, 150 000, 100 000, 50 000, 25 000, 20 000, 15 000, 10 000, 7500, 5000, 4000, 3000, 2000, 1500, or 1101 nucleotides;
(d) the overall palindromic density sequence score is calculated based on the average of the palindromic nucleotide scores of all individual nucleotides in the probable palindromic subsequence according to the function:
$$A ( s ) = \frac{1}{L ( s )} \cdot {\sum }_{i = 1}^{i = L ( s )} S ( s , i )$$
where i is the nucleotide index; or
(e) any combination of (a) to (d).

13. (canceled)

14. (canceled)

15. (canceled)

16. The method of claim 1, wherein the promoter of interest:
(a) has a length of less than 1 000 000, 500 000, 250 000, 200 000, 150 000, 100 000, 50 000, 25 000, 20 000, 15 000, 10 000, 7500, 5000, 4000, 3000, 2000, 1500, 1250, or 1000 nucleotides;
(b) comprises between 200 and 5000 nucleotides upstream of a transcription start site of the promoter of interest;
(c) comprises 0 to 200, 0 to 150, 0 to 100, or 20 to 100 nucleotides downstream of the transcription start site of the promoter of interest;
(d) comprises less than 1000 nucleotides upstream of the transcription start site of the promoter of interest; or
(e) any combination of (a) to (d).

17. (canceled)

18. The method of claim 9, wherein the mammalian genome is a Homo sapien genome (e.g., hg38) or a Mus musculus genome (e.g., mm10).

19. (canceled)

20. The method of claim 9, wherein the synthetic enhancer is fused to a core promoter, or to a core promoter operably fused to a polynucleotide sequence to be transcribed.

21. The method of claim 20, wherein the synthetic enhancer is heterologous with respect to the core promoter and/or with respect to the polynucleotide sequence to be transcribed and/or wherein the core promoter sequence is a minimal CMV promoter.

22. (canceled)

23. The method of claim 1, further comprising: providing the synthetic enhancer produced by the method of claim 1; and operably linking the synthetic enhancer to a core promoter or to a core promoter operably fused to a polynucleotide sequence to be transcribed.

24. The method of claim 1, wherein the synthetic enhancer comprises:
(a) a nucleic acid fragment or variant of any one of SEQ ID NOs: 2 to 54695 having promoter enhancing activity;
(b) a nucleic acid fragment encompassing at least 50, 55, 60, 65, 70, 75, 80, 85, 90, 95, or 100 contiguous nucleotides of any one of SEQ ID NOs: 2 to 54695;
(c) a nucleic acid fragment encompassing at least two adjacently concatenated highly palindromic subsequences of any one of SEQ ID NOs: 2 to 54695;
(d) a nucleic acid sequence at least 50, 55, 60, 65, 70, 75, 80, 85, 90, 95, or 100% identical overall, or over a segment of at least 50, 55, 60, 65, 70, 75, 80, 85, 90, 95, or 100 contiguous nucleotides, with respect to any one of SEQ ID NOs: 2 to 54695;
(e) a nucleic acid sequence that hybridizes under stringent conditions to the full complement of any one of SEQ ID NOs: 2 to 54695, optionally wherein the stringent conditions comprise hybridization in 6× sodium chloride/sodium citrate (SSC) at about 45° C. followed by one or more washing steps in 0.2× SSC, 0.1% SDS at 50° C. to 65° C.;
(f) a nucleic acid sequence that is derived from the sequence of any one of SEQ ID NOs: 2 to 54695 and differs therefrom by no more than 10, 15, 20, 25, 30, 35, 40, 45, or 50 nucleotides; or
(g) any combination of (a) to (f).

25. A synthetic promoter suitable for driving transcription of a DNA sequence of interest, wherein the synthetic promoter is as defined in claim 23, or is constructed by the method of claim 24.

26. (canceled)

27. The synthetic promoter of claim 25, for use in gene therapy.

28. The synthetic promoter of claim 25, for use in genome editing, wherein the synthetic promoter drives expression of an endonuclease (e.g., an RNA-guided endonuclease) and/or a guide RNA.

29. A computer-implemented process for constructing a synthetic enhancer, the process comprising:
(a) inputting or receiving a nucleotide sequence of a promoter of interest;
(b) identifying probable palindromic subsequences in the nucleotide sequence of the promoter of interest;
(c) selecting and extracting highly palindromic subsequences from amongst the probable palindromic subsequences, the highly palindromic subsequences being those having a palindromic density above a palindromic density threshold; and
(d) concatenating some or all of the extracted highly palindromic subsequences to produce a synthetic enhancer having an overall length that is less than that of a contiguous segment of the promoter of interest that comprises all the concatenated highly palindromic subsequences.

30. (canceled)

31. The computer-implemented process of claim 29, wherein said computer is configured to implement the method as defined in claim 1.

32. (canceled)

The application's sequence listing, which the Patent Office published only in electronic form, follows.

SEQUENCE LISTING (54719 sequences)

SEQ ID NO: 1 - DNA, 59 bp, Cytomegalovirus
  source 1..59: mol_type = other DNA
taggcgtgtacggtgggaggtctatataagcagagctcgtttagtgaaccgccaccatg

SEQ ID NO: 2 - DNA, 585 bp, Homo sapiens
  source 1..585: mol_type = other DNA
agcaagaggccctgggtctctccaagcagctagtgggtgcacacgcgtgcactgggacaggctgagggcagctgcgcaactcgcaggcatctgggagctgcaaggcagcctgggctgggtactgaggccgaggtccccgccacatcgtgggctctggggttagggctggggaggacagccttgcccccgagtgcgctgactgtcttggccgtctagggggcatgtggcctccctgagtccccttaagccttggggaccctgactcgggtctgtggcgagggggcccaggcaggaggggaggctgcggtggctttggccgccgtctcctgtgctggaactcctgcctcagccctccctgcagtcaccggtgactcgggccggcctcccggggggcctggaaggtcgccccgggttcaccaaggaggcctcgtctgggccagaggggtgcttgccccaaggctggcctctcgagtggagggcccagggcagagacctgcacggctcaggtaggggccaggcctcttccagaaaggctccaccctcgcccaggccctggtgccgggcgggacgtcccggagccccgcc

SEQ ID NO: 3 - DNA, 774 bp, Homo sapiens
  source 1..774: mol_type = other DNA
acccgtcacctgcacgcgacgcaggctccgcaggtgtctcacggaggatgtccgccttctccagcttcgagtcaggtcagctgcgacccagactccgggtctcgggccttcgcctgagcgaggctctcgttaatacgcgctcggcgccgcttctccatgaccggcttggaggactgcgggtcgggcaccggctgagtcccgcgtccctcccgccccccggtcgcccccctcacgcccggccgggaccccaccttgcggtgctcggccgcgctccggggcttgtctggggtccggctggcgctggccggcgctcctgccatcggcgaggcgctcggtttccccggcgtgtctgcggccatggtgcgccccgcgcctccccgtgccgggtggagcgcgccgccacggaccacgggcgggctggcgggcgagcggcgagcgcgcggcgatccgagcccctagggcggatcccggctccaggcccgcgcgcgcctcaggcccgccgccgcggggtgtgtgaacccggctccgcatgtcacgcctcggctccgggcgcggcctccgcgggcgacaatggcatgcggggcccccgcccgcgcccccctccgacaccgctggggacagggccgggtgatcccgcgctccccgatgcagccggggccgagcaacgcgccgggaggggccgctgggggcgaacggggcccgggacccccggggctgggcggagtctcggggctcactctcccgcccagggggccgggagccggggctggacgc

SEQ ID NO: 4 - DNA, 719 bp, Homo sapiens
  source 1..719: mol_type = other DNA
gaggtgctctcctccggggagccccggggccccgcggcaccaagaagtcgaatgggaccccgaggccaatccgcccgtgttcgcctcacgcgccccctcagcgccagggctgggggagccgtgcctgcgccccgcggcgcccttgtcgcggggtctggctgtccaggcccgggggcccgggtgtcaggctggtagcgggaaggaaggcgccggcctccccaccgtcttcgtcccgtgcggcgtccccgggaagagccgcggtcggcacccagagggccatggacggggagcgccctgcgtggtgttcgtggcgctggcccggtctccgcggatcggaggcgaagccagcctggccctcgggtcgcccgtcttttgtcgagctggcgacatcagtgcggtgcataggagccccgccgttgcagtctggcgtcctcgcaggcgcgtgccttcggagcgccgggtgggctgcgggcgcggcgggactcccggtcttccccggggcggacaccggcgtcaccgcgtcctacggagccgggcgccgagcgggaggcgcatctgggccccaccggggctgcccgcaccgagcacgcgaacgcgccctcccgccctgaggccgccggcgttgcggtcggaggagccactcggctgggcgtggcgcggcggggcggggaaaggggcggggcctgggcggcggaagtgcgcagccgcgcggcattctg

SEQ ID NO: 5 - DNA, 560 bp, Homo sapiens
  source 1..560: mol_type = other DNA
ccgcactgatgtcgccagctcgacaaaagacgggcgacccgagggccaggctggcttcgcctccgatccgcggagaccgggccagcgccacgaacaccacgcagggcgctccccgtccatggccctctgggtgccgaccgcggctcttcccggggacgccgcacgggacgaagacggtggggaggccggcgccttccttcccgctaccagcctgacacccgggcccccgggcctggacagccagaccccgcgacaagggcgccgcggggcgcaggcacggctcccccagccctggcgctgagggggcgcgtgaggcgaacacgggcggattggcctcggggtcccattcgacttcttggtgccgcggggccccggggctccccggaggagagcacctcgggtgcttctcggaggaggaggcggacccggggcgcagcgctggaagaatccgcgtccaacgtctagtccccgaagcctctcgggaggcggggcgggcggcgccgagaaacagcggctgcgggcgggagcggcgggagtgagcgacacagagcgggccgcca

SEQ ID NO: 6 - DNA, 683 bp, Homo sapiens
  source 1..683: mol_type = other DNA
gctgctgagttcgccagcgggtcacctggaagcacgtggcgacacgggccacatgacgtcatcccagcaggcttgcgtcatcgccccgggtgcctggtgacgtcaccagcccgctcgcgtcacgcgcacgttctgctcctcgtggtccggcccggcccgcgccatcaccggccctgctctgcggggccacccgtgcgccctgccgacccggccgccgtctgcagccctccgtgctccaggccgcacacctgagggtgggacccccggaggccgagccggtgtcggatcaaactcggagaccgagcagggcccaaaccgggaccggagtggggacggaggctcgagaccgaggctcgcccacccctcggcgccgccggaccctgcgccactgggggaatttccttccgcgtccagccccggctcccggccccctgggcgggagagtgagccccgagactccgcccagccccgggggtcccgggccccgttcgcccccagcggcccctcccggcgcgttgctcggccccggctgcatcggggagcgcgggatcacccggccctgtccccagcggtgtcggaggggggcgcgggcgggggccccgcatgccattgtcgcccgcggaggccgcgcccggagccgaggcgtgacatgcggagccgggttcacacaccccgcggcggcg

SEQ ID NO: 7 - DNA, 360 bp, Homo sapiens
  source 1..360: mol_type = other DNA
atcagatagataatttgcaaatatttcttcccattctaccagagttcatttttgtagaaaataaaagataggtctcttttattaaaaaacaatcggcaggtggatcacttgagcccaggagttcgagatcagcctgacccctgtggtcccagctacgtgggaggtctgcactccagcctgggcgacagagtgagagaccctgtctcgttttccaagtttactaattttgcaagttggtaaatggaaaatgaaggggtggggatgccgtccgctgtccggagtccccgagccaaatttggccaccagcgcaggctcggcggcacgccccctgacgtgtgtgcctcaggcttataatagggc

SEQ ID NO: 8 - DNA, 830 bp, Homo sapiens
  source 1..830: mol_type = other DNA
cctgggggtcgggcctggcacccaggggcggccgcagaggaaccctgatggcaggtaccaggcggctgcacacagcccacagctgggctccggggtcagcagcggagacagagaagacccctgctcaggcgcaggcgccccacccagcaggcctgacgctgcccctccttccagccggcacccaggccgagctcagccacacctgaagagccgctccggccagggaggacatgcccggcagacctcgccccacggcgccaggcccgggagccagccgcacgcagaggctcaagcccacggccctgggaggcgccctttcctgggcagggtgggcctgactgcctgctccatccaagcactggggcctcgggccgcgcggaggtcccacaggagggtcagagcggcatcttcccttcagggccctcgcccgggcaccccccggccaatggaccacagctgcacccggttcatccaccgccggggaccacccactcggacccgagccggcgccaaggatccagcagaggcctcgggctcgagtctcaggtggagcagccctgggtggcctcctacctctccaaggccaaggcctccctgggacgggtgccccatacccaaggaagtcagtcggcctcatggggcaggggcaggatccacacatggccatgccccgctgctccgagagaggggccagctgtgggcgccgggctctgcaggcacagaggggagctgtcgcgctccgcggcccagggttccgcctggctggcaccacccctggaagggcagccccggccccttgggtcacccatgacatcatcatggacattgtg

SEQ ID NO: 9 - DNA, 487 bp, Homo sapiens
  source 1..487: mol_type = other DNA
gagactccgtattttgaaaaaaaaaagccagagcccactgccgcctacgggctggggtgcctataggtatgggtgggagcggcccgggccacacggcttcaggggcaggctgttcctcacggcccaaacccctgcggaattcactttggccgaggtctgtgacacagcggagtccccctctggggggcactcactttgtggagcccccggttcctgtttgcagaggggggcacagtggcacctcgtccgcccagggtgcacgcagagcctggcccgggccaggtcctggggtgctgagcatggggcctggagacggctcagggaccatcctgggagggccgggcggaggggcagcaactggggctcaggctcaggcagtcccagcagtgactgggaggcagctgccagcctcagccctcagcccggcttcccgggctggccccgaacccaagctcacctctgggttccggctggggttgccaggtca

SEQ ID NO: 10 - DNA, 719 bp, Homo sapiens
  source 1..719: mol_type = other DNA
tggcacagcacggggcgatgggcgcgtttcgggccctgtgcggcctggcgctgctgtgcgcgctcagcctgggtcagcgccccaccgggggtcccgggtgcggccctgggcgcctcctgcttgggacgggaacggacgcgcgctgctgcgcgattacccgggtaagtaaaccgcgtttacttaacgcggaccggccaaggcgtcccgcggaagccgggatgggtgggcgccccccttcccgtgctcagaccggcgttgctgaggtctaaggacgccagcagcgggagccttccggagggaggcaggatcccagagggagtgtgccagctccagccagtggccccggccgggagcaggggtgagccaggtgggagcgccctcactgttccaggtcctgctgggcgggtcgtgagcccttggccatcgcccagccccctcctggagggccctggcctgctgcctgcctctgacctgcacctggggatggttcagctgaccccagagcttcttcctccagggcctgtgggttgggaaggaggctctgtccggaggcccagtgtggctggtggtggggacagcagcgcccagacaccaggcaggcggcctctgaggtgtcgacgggcctccaggggactgtgcactgttgggggccacccctgggtcctgcaggggcagctcctggttgcatatggagctcccagccaggagccctctgctcc

SEQ ID NO: 11 - DNA, 696 bp, Homo sapiens
  source 1..696: mol_type = other DNA
acccggtgtctgggatgacaggcgtgagtcaccacgctgaagggacaaagggggcctccgctccctcctttcaatgcacccagccaggccaagctgcagaggcgcccggcccagagctgggaaggggcgtggcgggacccgcgcttgcagccgcgggacggaagggggcgcgaacctccccgcggcggggcctgggggggcggggccgggaggggcggggccgcgccccgtgctggccaatcagcgcccgccccggcaccgggacccgcctccgcgccgcagctcccggggggtccggcccggccgagcctcggtgtccggccccgcgggggaggggcgcggcctgcggagcgggatcggggccgggtctggggcccctcccggcggccttcgagccctgccgcccggctccgcgccgcccggagcccctcggcagtcgggtgcagccgcacttccggggggccgcggcgggggaggggcgcctgcgggatccagacccgccccccactctcgggccgcccctttcccgccccacggccgcgccgggcgctgcgtcccggggctttgttcgcggcggcgcgggtcgccggcctccgggcgggccgggggagggaggagcggggaggagagagggggaggggcgccgccctggccccgcccccccccgcccgcccgcccgcgctccgccgcctccgg

SEQ ID NO: 12 - DNA, 673 bp, Homo sapiens
  source 1..673: mol_type = other DNA
cccagcattcatgggggtctccacctgtgctggacggcgcagaagcagggctgggcaatccagggaggcttcctggtggaggcagggtcccagaacccctcggtgcccacaggggaaactgaggccccaagagctctgcgaggggctcctcctcaactccctccgggacctggagtctggtgtgacggatgaaggtggctctgagagaccgggccctgggtgcccgcgggggcggctgacactgtcccgaggaggcgccagcaccctctcgtctcccccctcccaagccccggggaacttcccaggttggcctgagggggagcccacaggcctgcagcccatggtgagtttcacacctgaagccagccaggcctgtggggttccccagcacggggctccatggttgaggctctctgggggtggccagtggagacctctcggggactcgcagatgaggagtgattggctgacccccgccctccaaggggcccccatgggacaaggtgctcgccccctgcactggggacaccaagccagcctggtttccccgcccctgccggcgacctgcgggggaccgggctgtgtccgcagtgtctacaccccctcctcacacgggtcggctcaggtcatgaacggtcccagccacctccgggcagggcgggtgaggacgggg

SEQ ID NO: 13 - DNA, 304 bp, Homo sapiens
  source 1..304: mol_type = other DNA
gcgtgcccgtgtgcgccaggccatccagacctcagcgtgtgtcgcccaggctggagtgcagtggcgccacctcgtcttgaactcctgacctcaggtgatccacccgccttggcctcccaaagtgctgggattacaggcgggagccagcagtgccacagccctgaaggtccagactgaggagttgcctctcctgactcaggccgcaggccaggccctactgtgccctggggtctgaacacggtggtcatgctgggggtgcccagaccccgcctttgtgcccagcccacagccagggtccccggcc

SEQ ID NO: 14 - DNA, 639 bp, Homo sapiens
  source 1..639: mol_type = other DNA
gcagtgggctgcctctccaaggcaggctcctacatcttggatttgagaactccggggtgtcacaaaccccagcattcatgggggtctccacctgtgctggacggcgcagaagcagggctgggcaatccagggaggcttcctggtggaggcagggtcccagaacccctcggtgcccacaggggaaactgaggccccaagagctctgcgaggggctcctcctcaactccctccgggacctggagtctggtgtgacggatgaaggtggctctgagagaccgggccctgggtgcccgcgggggcggctgacactgtcccgaggaggcgccagcaccctctcgtctcccccctcccaagccccggggaacttcccaggttggcctgagggggagcccacaggcctgcagcccatggtgagtttcacacctgaagccagccaggcctgtggggttccccagcacggggctccatggttgaggctctctgggggtggccagtggagacctctcggggactcgcagatgaggagtgattggctgacccccgccctccaaggggcccccatgggacaaggtgctcgccccctgcactggggacaccaagccagcctggtttccccgcccctgccggcgacctgcgggg

SEQ ID NO: 15 - DNA, 698 bp, Homo sapiens
  source 1..698: mol_type = other DNA
gaccagggcctctcgggggccttaggggccagaactgccccatggagggtggggtgggccccatatgaccatctttgggccccacccccaccccattttggctctggcaaacccaaggacgtccaggcctctgctgagctgcggagatgccatctctggttggcatccaggttggaagaggccagagcccacggctgttacccctcccctgggacctggagctgccggggctggcacagaaggggccctccccaaggcttgctgggcagtgaggcgggacagcccagccctgcgacgaggtgtgtgggcaggcgccaatcggcacgaggtgggcttgggtggtgacccgtccccacctctctccctgggccccccagagtggcgtcaggggctggggcggggcgccaaggctgtggccccggcttaggggctcctctctgccctcagcaccccttctgtgggcacggcctgccccctggggcctggatctggaacggggggtctcccttctgcagcccctcactcaagagtgctcccttccagagagtcgggcagctgtgcatctgtacaggggggttgtgccgggccctcctggagctgggtcagcggggacagcaggaggcagaggcaggagcgtggcctgcaccttcctggttggcgcgggctgggggcaggcacccaggatcaggcagcaccca

SEQ ID NO: 16 - DNA, 564 bp, Homo sapiens
  source 1..564: mol_type = other DNA
tgcatgtagcctgccgatgagtgcacgcaagcgtgtgcacacaccacctgtctgtgtgggttcacgtacccatcactaggtacacatgttgatgcgtgtctgtgcagtgtctccttgaacacacatgtatgtgtggtaccagtgtgtgcaggcatgtttgtgcatgaacatgtttgcacatgtgtgcttacgcgcgcgagtcgtgtggaggcacggggagcctctgtatccctggagccctcaccaggaggctcaggagccttggagtgggaggctcagggccagccaggagagtggccgccagccctgggcagaggaactggggccatcctctgctctcccaggatcgggcatggcctccctgctgggggctggaccctggctgaagcacccaccttctcccgcagacggcccgtaaccggctctcatgggagcctgttacaggagccagttatgggtgccctgggaaagtgcctcacccctgtggggcatggactctccctgaggctgtcctgggggcaggccctaagggcgtaacttcctggcctaccgccaggttggggg

SEQ ID NO: 17 - DNA, 934 bp, Homo sapiens
  source 1..934: mol_type = other DNA
gcggctgaggcgcaggtagtgcaccaggtcggccgagagcacgtagccgccgcccagcgcgtagggcaggtagtagtcgcagagttgccaggcggcctcgcgccagcgcccccccggcttgacgcggccgcggcccgagaagaagccccagtagaggcggcggcggcgcgcgggctcgcgggcgcgcagctcggccagcagcgcgtccagccgcgcgaaggagtcgtcgtccgccttgagcacgaactcgaaggccacgtgctcgtccagccaggccagcatggccagcaccttggccgcgtcgcgcagcgcgggcagcagcagcaggtccccgtgccgcgcctgctcccgctccagggcgcgccgctcctcggcgcccaggccggccgtgcccacggcaaagcgcgcccacacgtcgcccggggccccgcgccgcgcaagccacgtgctgcggatcacgctgcggcgctcggcggcgcggggcgcgctggccaccagcactgccaggaaggcggcggcgcgcgcgggcgcggggggaggcgggctgcggcccgacatcgccctggggtccccgggctcggccgcgcagcgcgccaggtagagcagcgccgccccgcacagcgccagcgtgcccaggcctagcgccgcccgccgccgccacgcccgccgcagcagcttcatggcgcccgcgccgggccggcggcccaggccggactcgcgagtgcgcaggcgccgccggctcggggcggtgcgcgtgcgcacggcgctcctgggagcgcgccggggccttccgcagacgccgagccccggggcgctcggaggccggcggccaatcggcggccgtcacgtggcctcgggcacccttgtggtcaacctcggagcggccccgcgaccgcttccgcccggaggagagatggtggcgccggcgtcccct

SEQ ID NO: 18 - DNA, 787 bp, Homo sapiens
  source 1..787: mol_type = other DNA
agcaacgtctcagacccaccaaggtgtcccagagggccagagtcagggctgagcatggacacagcctgccctctgcccgtagccgggactgaccctcaatattcagccaccttgctgagagccaggtggcgaggtccacctcctgatcccccaccaggggaccaccctcagctccccgctgtcctcagcggcctctcagggaggcggtgggctgcgcgcctgcccccagcgtcccaccccagcgcaccgctctctcccaatgtgtctggggtcagagagaggtggagaggacgcagcgccccgcgctttctgcagtctgtccaaggggaggtcaggggcatcccggggctgggcaggcacctgcaggggagggtgctgcgcacgcgtgtcactctcgggtccctgaacgagagagctctgagctccctggagcccaaccctccactgagcctccaggggcccgggacgctccatgcccgggccgcgccgcgcctcccctaagggccgggtggggcgtgggagccaccggggtcgccctcagccgggcctgccgccctgggccgtggcacatggggagggaagcgcgcggcttgggtctggggctctcgcgcccactaacggtgcccggagccgcccgccagtgcgcaagcgccgccccgccccccgccccatcccccaccccggggtcgacggcgacagagagtcgtgggcgcggtccgccagtctgcctagagcggccagccctccccctcccccggaccgcgcaccggaagcagaagctaggctg

SEQ ID NO: 19 - DNA, 812 bp, Homo sapiens
  source 1..812: mol_type = other DNA
accccgctgcgggcagaagcgggcggaggttaccgggggcgccctgccctggggtctccgccgccgtctgaggccagggccgctcccgcctccgcccgggcccacgtggcgcccgccgctgcgcctgggaaacctacttaaagtcggtgcccacgtactggagcgcgcgcgcacggagcctgaggccggcgccgaactcatggcggagcccagccggtggcgtcagaggcggcctccagcgcaggaatcctgcgcgcgcgcggacgcggcctggtcacgccccccccccctcccccccggccccggccgctcttgcgcctgcgcggtggcaccgcgccacggcggccagagtcggggagcggaggcggggccgggcttagggagcggctgcaaagtgccggcccgccgccgagcgcaggcgctctacctctatcgcggcgccccgggaggcgcgcaccaaccacgcggtcaccccgcgctctcgcgggcggcccacactccccgagcgcgcccgttcgccgcgttgcggcccggccgggatggttggagcgggcgggcccgcgccctccccgcgccctccccgcgccccatccaccgactgtccccggagacggccgtggcaggccccgcctcacttccggaccggggtggtccctggacgctgcgagaggcgtttggcgacgctccccggcggtgacagcgggcggcgcgcgcgggcggcggaccttggcgacgctccccggcagtgacagcgggcggtgcgcgcgggcggctgactttggcgacgctccccggcggtgacaggcggggcg

SEQ ID NO: 20 - DNA, 642 bp, Homo sapiens
  source 1..642: mol_type = other DNA
agccaagactgcacaggggcctgcccaccctcagccccaccccctggggacggcccacctgtctatacaggaaagactggctctttccagaaccgcagcttcctggaaaaatacgtacctgtaggtgtcgagcctggttcccactagcttggccaccaggggccctggctgatctcctgcccccagtgaggcccattgggctgggcaggtagcctggccatcccagaggggcttgccctgggccctcacctagggtcctggtgcagggtctgggaacgtggctggtgcgggtgccagagacccccagtcctgtacctgctgctctgccacagaagtctggggctgttcttccccccttcagggctcaccccaataggggaggttctggtcagaagctgccacctggtgggtggccctcgggacagtgctgggggcagcagaaaccaccccaccaccactggcactccctgttctccgctccccagcctggggggagggcacagctggaggctggggggcgtccgggcgaatcccctccagctgtccaggtcctgaggatcccgcctcacctttgggggaggtgctggagctatcagcacgtgacttgagggcagggccacagcccaggggcccttcctcacc

SEQ ID NO: 21 - DNA, 792 bp, Homo sapiens
  source 1..792: mol_type = other DNA
tgtgtccagctgcctgttccccacgcgctgctctggacacaggatcaagagagaccaggggccgacgcccccacggacccagacgaccctggccagagctggactgcagggcccgggaggggctcagcccagtggagcgggggcggacggtcccgaggtgcccacggctgcccacgcgcacgccctccacccggggcggccgcacagggcaggagcgtccaacccccggggcatggcggggcggggccgccgctttgtccgaggccggtcctccagcccctccccggcggccgcggcccggcccggcgctgacctccccaccccgccgccgggcacaaaggcgacagcgacgcccccggcctgcgcccaccccggcggccccgggcggcgcacctgaagcgcggggagtccttgacgcactcctcgaactccacggtcatggctgcggcggccgcggcgctcactggcacgaggaccgcggcgccgagcggcagccgcgccggcccggaccgctcgtcccgcccgcgccgcctcggcgcccgcccgccccggaatgaggccgccgcgccgcgccccgccccgcctgtcaccgccggggagcgtcgccaaagtcagccgcccgcgcgcaccgcccgctgtcactgccggggagcgtcgccaaggtccgccgcccgcgcgcgccgcccgctgtcaccgccggggagcgtcgccaaacgcctctcgcagcgtccagggaccaccccggtccggaagtgaggcggggcctgccacggccgtctccggggacagtcg

SEQ ID NO: 22 - DNA, 893 bp, Homo sapiens
  source 1..893: mol_type = other DNA
cggggcatggcggggcggggccgccgctttgtccgaggccggtcctccagcccctccccggcggccgcggcccggcccggcgctgacctccccaccccgccgccgggcacaaaggcgacagcgacgcccccggcctgcgcccaccccggcggccccgggcggcgcacctgaagcgcggggagtccttgacgcactcctcgaactccacggtcatggctgcggcggccgcggcgctcactggcacgaggaccgcggcgccgagcggcagccgcgccggcccggaccgctcgtcccgcccgcgccgcctcggcgcccgcccgccccggaatgaggccgccgcgccgcgccccgccccgcctgtcaccgccggggagcgtcgccaaagtcagccgcccgcgcgcaccgcccgctgtcactgccggggagcgtcgccaaggtccgccgcccgcgcgcgccgcccgctgtcaccgccggggagcgtcgccaaacgcctctcgcagcgtccagggaccaccccggtccggaagtgaggcggggcctgccacggccgtctccggggacagtcggtggatggggcgcggggagggcgcggggagggcgcgggcccgcccgctccaaccatcccggccgggccgcaacgcggcgaacgggcgcgctcggggagtgtgggccgcccgcgagagcgcggggtgaccgcgtggttggtgcgcgcctcccggggcgccgcgatagaggtagagcgcctgcgctcggcggcgggccggcactttgcagccgctccctaagcccggccccgcctccgctccccgactctggccgccgtggcgcggtgccaccgcgcaggcgcaagagcggccggggccgggggggagggggggggggcgtgaccaggc

SEQ ID NO: 23 - DNA, 637 bp, Homo sapiens
  source 1..637: mol_type = other DNA
ttgggttgcatgcttggcaccaggcggaggccccagatgtgagctcaccgggctacagaagctgccaggagcttctcagagctgtggctggtaggaggcaggcagcttgccagcccaggaaggtgacccaggacacctccaggcctttcccagggcagcccaacggcccaaggtcagggccgggcgcgagggcggcctgagcacagagcacgggggctgacagcaggctggggggccagcaggagacggggccccacggcgccccaggccttgtgggtggtggcaccggactggatgggcaccggttcgggtccctgctccaccgagaggcccaggaaggggcggaggcccggggtggtggggaggggccgacctgagccacggctccgtcctgcgcgggagccgggtcctcggccgcccgcccgctccggccctgctcccggcccctcggcgacttccggaccgtgcgggttgggttgggcaggtgcggccgccgagtccgagccgctcacctaggccgtagccgccgtgcgggccccgtccccgcccaccgccccgcccctgattggttggatgctgcccaatcaggaggcccggcgccccgacccgcgtttccggctagcgcaccggaagttgc

SEQ ID NO: 24 - DNA, 578 bp, Homo sapiens
  source 1..578: mol_type = other DNA
cagtgggggtgggggcatctgctgccctgaccccccacctggcccaggaatgctgcacgctgggcagtccctgcagatcttccggaaatggccaagggacgtggctctgctgctggggggtccgcctggagctgctcagtctctgtgacacagcttgtccacctcgggcagaacagccccagcccagccctggacagtcttgtgcaaacagcttccaggggttcaggcgggggcatcccgggcaaggccttgaggtgccaaggctggagttccctggctgtgagctctgtgcctgcccccaggtcatcatgcccggctactgcgtgcagggcaccgtcggccacaagatcctcagcgggcagcggaagctcgagatggaggggcggcaggtggtgagtctcgaccccgcactgggctggcagggccgaggggcacctcctggtggtaaccactgtccacgccccgtggcctctgtagctggaggtcaagatgcaggtggggcatcatgcagctggtgggccaggcccaggagctccgtaggcagccgggcgggcggcgtggggcccacctcgggtcag

SEQ ID NO: 25 - DNA, 346 bp, Homo sapiens
  source 1..346: mol_type = other DNA
ggagtcccaagtagcccctctgaggggtactgtcactcactgcttagccaggctgggcccggcagatgacctaagcgtccctggaagaccctcctgcaaggcaagtctccgagcaggcccagcaggctctgctgctacacgttggcagcgcctactctggagcatcatttagttctcagacaaaaagtgtgagtctgatttttattcagactggagtgcagtggtgcgatctcggctcaccgcacctgggcgcaagcgattctcttgcctcagcctcccgagtagctgggattacaggggtgatccaccgacaggcaatgaggagtcggggaggcccggtaccgca

SEQ ID NO: 26 - DNA, 559 bp, Homo sapiens
  source 1..559: mol_type = other DNA
ctcactccagtttcaagcttgtaatccagcacctggtttcagggacaccaggctgcaccctaaaggcgggcagccccaggggacggggccagcagggagaggtctgctcaccccagcacccccaggcctcccagtgctcagggtcccctgtccctggggactagtgactgggcgtccatcatcctggcccaagggagcccaccgtggcccccagaggagacgggtaaggtcatgcagggccgtgcaccgtgggtggggcggtctcagcgaggaccctgccctgaggtggctcacgtggggggaggccagaggtggggcggaggggccactcacccaacagtcgacgtgagacacgatcacgtggtatcaggggcccatgtcctcggaccttgtccctccaagggtgcggtcaccacccctccccaggcctgaccggtgaggggctgggcctctgctcccacactgcccctccccagcaggccagcaacgatgggggaggccaagggggggcggtccccagaccgtagacaggcccaggcctccgtgatgtcaccgcggg

SEQ ID NO: 27 - DNA, 432 bp, Homo sapiens
  source 1..432: mol_type = other DNA
gctacacgttggcagcgcctactctggagcatcatttagttctcagacaaaaagtgtgagtctgatttttattcagactggagtgcagtggtgcgatctcggctcaccgcacctgggcgcaagcgattctcttgcctcagcctcccgagtagctgggattacaggggtgatccaccgacaggcaatgaggagtcggggaggcccggtaccgcatccgtcggcccgttgggaatccggcccctgggtggtccggaaacgattctggacctgcgggtatatccagggcccgcaccccctgggaggaccggggcctttcgggcccggcggggcctgagccaatgcagaatcgggggccgcgaggacgccagcgggcgctgtgcgtaggaaccgccgggtggccgctgccgatcggggccgacttggggacggacc

SEQ ID NO: 28 - DNA, 779 bp, Homo sapiens
  source 1..779: mol_type = other DNA
ttcctgctggggtcgggtcgggaaggcctccagccccgcgagccccggaacagtaagcgcggacgccccgcggcctcaagggacgcctcggaagtctcccctgccctgcggagaacctcccgccgccgggcgctccgacgcctccgtgcacgcccgcgcccccgcgcgccccgcatccgctcggcctgctgcctggaccccgtgggacccggcagagggcacgcgagtcgggagccttcgcggtggcgcagagcgaccgggcgccacctcagcgccgcgcacccggcgtccccggggtccctccgcccgacccgagcgccccggcgcccacgggcccacagccagcggcgcgcgtcgcatgcgccggatcataatggagcgcgggcccgcgcgcgggggcggggccggggcggggcggggcgagcgatgatcgcctgcgtctgcgcatcctcgccccgcccccgccgtgcgcccccgtgacgtcaacgccgcgcgctcgggcgcccccccgcggccacgctcaggaccccgggccgggcggtccctttaacggcgcggcccgaggggcgcaggcgggagggcggcggggctgagcgcgccctccgtgctgcgtccctcgcgccgctcccgggccgggggcggatgggcggccgcgggccgcggggcagcagtcgggacgcgcgcgggagccgggggcggcggccggggcctgggcggtcgggcgggggcgcccgggggcctcggagcgtcggggccgagagcggtgcgggccgggcggg

SEQ ID NO: 29 - DNA, 610 bp, Homo sapiens
  source 1..610: mol_type = other DNA
tcctggcaaaggttccggtaactgcagcaacagatacctcctgcccctcctgcacagctgtggtcgatcgcaggacagccgcaccccctcgccgtctggcgtttgtgaggaggcctccccacgctggaggggctctgtagggacgtcgaggccatccctccacccgtctctccccaggggctgagtgttgaaggcaagactttgcaggagtctgcgtctgaagacacgacgccgacggcggccgggggacaccgggcatgcgcgtctcatccagggggaggccgagcggagcctctgaccctgccccgcgcccagggttcagcagtgggggtcgtcccgccccagatcccggggtctctgtgcgaacgtgggcatcttggaagagtcccagccccgctcggggcgcacaggcaggcgctctcagcacggcacccgcgccgcttccgggtcggccggcaccgcggagtcccctgggtaacgagcccgccccacccgcgccaggttccggcgtcggcgttaggcgggcggcgtcgcgctggtcgcgggccgaaccaatggcacgcgacggggcggggcggtggcggccgtggagcttcgcgaggagccgccc

SEQ ID NO: 30 - DNA, 554 bp, Homo sapiens
  source 1..554: mol_type = other DNA
ggctccgctgcccaggctgttgtgcggtggtgcaatctgagctcactgcagcctccacctccggcgagcctcccgtctcagcctcctgagtagctgggacctcaggcgcgcgccaccatcgaagctgagaatttccaggcatggcgcggtggctcaggcctgtagggcgtggcggcgcgcgcctgacgtcccagctactaggaaggcagaggccgcggcgagccgaggtcgggccgctgcaccccagccagggcgaccgggcgagaggcaacgggcactttcacaccgacctcgtggccccagggggcggcctgcccctccccgcccgcgccgcacccgagctccccggccgcggggcccccgacccgggtccgctgccctcacggtgccctcggagccacagctgcggccggggccgtgctccgggacggtccgcgtgcgctgctgtttcatcgtccgcgaatagccacgggcgctgcggccccgtggagcacaactgggcacccgcgggctgacgggagacgaccttcgccccggaatcgcaggggctgacc

SEQ ID NO: 31 - DNA, 542 bp, Homo sapiens
  source 1..542: mol_type = other DNA
atggggcccctggtcccttgggcccttggagaggcagtcctctagggccagaccagggccctcaggagaccctgtccttggggacctgatgggtagccctcattacctttcccgtgcagccgctggaggggccaggctgctgcagccaccccaaagagccatgctcccttctcctgcctggccccaggtactgggagacaggaagatgccccaggcccccaggatcccgctgccccaggccttgctggggcagagctgcttttccagatgcagacgcacgtcctgtccagcatttacagaaaggaaggccagaacctcaccctgccctcctccccagcctggaatcgggaggaggggccggcacccacccctgggtgggcttagccagctgggagggggctgcccgagggtgggccccatggagagccctgtgaggccttccaggggcacatcggggtagggtccacaagcatcctttgttccccaggagggcagccgaactggggccctggcagccagcaggggaggcagggccttcctaa

SEQ ID NO: 32 - DNA, 579 bp, Homo sapiens
  source 1..579: mol_type = other DNA
gagccacccccagaccctggcagtgaggggacatgtcggaattcgaaggagagtctcctcatgagacccccatgtagggactggagggagaggctcctcatgagacccccatgtagggactggagggagaggctcctcatgagacccccatgtagggattggagggagaggctcctcatgagacccccatgtcgggactagagggagaggctcctcatggtccactgctggcttctggcctggcctccctgcagctgccacacccggccctggagcctcgtggtgtggggcgcggtgcggtgggtgcagcaggcacggtgggcagagccctccaggtgatgaggggccctggcgcctcacactggctgcctcgggaacactccagatgagcagaggctgctctacttcccaggtgacgacaaaagctgctctgttccaaagagagcggcagaagagaactcagggctctgccactgccagtttaacggccatgcgccctgtgggtgcggaaggggtgcggccatctccaggccccacagccgcccccttcctgctcagcccaggcctggcttgcgtcag

SEQ ID NO: 33 - DNA, 611 bp, Homo sapiens
  source 1..611: mol_type = other DNA
tcccagctctgagctgaggaggccctggaagagggccatggctactggggtagggttctcctgtccaggggacactgctggcccagccccaggggaaatctgccctgggagccactgtgaccccaagactcaagagctcctgtctcaccagtgggaccctccagtcctgctgggggtgtgtcctgggtcctggagtctgggcccctcagtaacaggcccagtgtggtcccactggacttcctccaagaagcccaggtggcgtgggtgcttcgagcctgggataaggccaaggcgaaaccacggtctggacgtccaccgccagcccctggggttctcttgggcctggctgctgggaccccagcacccagagtcacggcagtggtgggcatggggagggcctagcctggtacctccctgctcggctcccgcggctgggggtcggagaggggtggagagcgtgggccgcacagcctcggccggggtccgctcgtgcgcgcctctccggggtctgtgcgcgtggccctccgctcgcgccggagggcgtgggcgtggcctcggcgtgggtgtggccgctcggggaggggcctcccgggggcggggccggcctggtc

SEQ ID NO: 34 - DNA, 419 bp, Homo sapiens
  source 1..419: mol_type = other DNA
agcagatgaccaggggaacagatgtgaactgtcagtcctctgagcccagcctgcacgtagagaaaaacgccctttgtcattttccaaaacctgtttggttgtttgaagggaaatttagaattcattgtatataacattattcaggcttaaaatagtttccaatccagtggacgagtcactccatataattctgtggccgccgcgagcgcgtgaaccgtgggctccggggtggtgccgacgcggctgcgggccgggactgacgttgcgccgggttcgagtactcccctccggagttttgtcccggtgcggctccggtacccagacgcccgccccggagcacgctcctaaattgcggcgccgtcgctatggcgtcactgccctcgcggccaatccaagggctgcgcgcgtgtcccttacgc

SEQ ID NO: 35 - DNA, 646 bp, Homo sapiens
  source 1..646: mol_type = other DNA
tgaccagggcaacagatgtcaactactgacctcattgtatctaacattattcaggcttaaaacagtttccaacgctgggagcgcgtggaccgtgggctccggggcggcgcctgcccgggcaccccggccccgtccacgccccgcaagaggagctcgctggccccgccacgcgggaaggggtcgccccggggtcttgggcgggacggagacaccgaggaggggaggcgcctctcctgagctcttggcgcagcgaccccagggcgccgactcatcgcggaagggctcggcttgcccgggcgccggtgccgcctcgggtgaggttcccgcgagactcttctctgcgtcctggactcaccgcagggcgccccgccgcacggatcgagaaccttggggctccctccagctgccgccaaggccggaactcctcggagcccctagcaacggagcccctagcaacggagcccacgcggatgcggcgcggggctgacgctgccttggctcccgtagccagatcgccgctcccgccccgctggctcccaaagcctgttcggcagtcgcggcgccgtcgctatggcgtcactgtcctcggggccaatccaagggctgcgcgcgtgtcccttacgcgcttctatcgccgggaggaagg

SEQ ID NO: 36 - DNA, 619 bp, Homo sapiens
  source 1..619: mol_type = other DNA
aaataaatatcattttcagttagcctgttattaggttgacaacgcgaggctgcatccaggcagacaggaccagccggcggcctctccaaggaagcccgaggcgaggaagatcctagtcgacgctcgcatttaaacgttaaatgttgaagggctttcataaaagagcgatgtgctcctgcttgtatgagccggggccggaggccggtaacagcggcacgggacgactatgggccccacggggaccgacggcaagcgcggcgtttcgcatcgctcccaaaggcggcggcgacaccttatgacgtcctgttgttccgcacgtcgtcgcgtcacactaggcgccggcgcggggtgctgatgtcaggacgccgccgcttggcgccgtgacgctcagccgggccttgtggagtgcgggtctctgctgcggacgccgggggccggcgcggcgttggccgcccccggcctcgccgagtgcagcgcgcccgaaggccagtgcctgcgctccgtccgcggcccggcgcccagggtgggcggggaggccgccgcgcagtcgccgcacgctacaccgccggcgccgtcgtttcgcgtcgcccgcttccggccaccgcggccgccattttgt

SEQ ID NO: 37 - DNA, 412 bp, Homo sapiens
  source 1..412: mol_type = other DNA
caggacggtctggatctcccgacctcgtgatccgcccgccgcgcccggccggaaataaatatcattttcagttagcctgttattaggttgacaacgcgaggctgcatccaggcagacaggaccagccggcggcctctccaaggaagcccgaggcgaggaagatcctagtcgacgctcgcatttaaacgttaaatgttgaagggctttcataaaagagcgatgtgctcctgcttgtatgagccggggccggaggccggtaacagcggcacgggacgactatgggccccacggggaccgacggcaagcgcggcgtttcgcatcgctcccaaaggcggcggcgacaccttatgacgtcctgttgttccgcacgtcgtcgcgtcacactaggcgccggcgcggggtgctgatgtca

SEQ ID NO: 38 - DNA, 201 bp, Homo sapiens
  source 1..201: mol_type = other DNA
ggagtgcagtgacgcgacctcggctcatctgctgcctcggcctcccgagtagctgggattacaggcggtgcagtggcgcagtcttggctcattgcagccttgaccttgaactccggaactccagctattcttaatgaggatttattctgaatccctcaaaagtttttaactcaaattgaaaactttagatgaaattcttca

SEQ ID NO: 39 - DNA, 357 bp, Homo sapiens
  source 1..357: mol_type = other DNA
atgagaggccgggcgcggtggctcacaggagggcagatcacggatcgcgccattgcactccagcctgggcgacagggcgaggctcctctgggcagaacccggggcgggaggacgggcccggactgccgttaggtggctgcggcgcggcaagtgccgccagtgccagcgagcgcgacgtcgctcccaagcccgccactgcgcaggcgcccggaggctaagccgctcggaacctagctgcgccacgcagggtaggcgacgcagacgctcccgcgtgacgcacccggtgcttgccctgcccatccccgtggcgggggcgtggccatggcgggggcgctccggcgggggcgggccctgggc

SEQ ID NO: 40 - DNA, 559 bp, Homo sapiens
  source 1..559: mol_type = other DNA
ccccacccccgccccgcgggacgccggtgcccggtctcggtcccagcccagagccgctcgcgcctggacgccggccgccccgtcgaacctttgggtctccgagcatcaggaccggtccagacctccaggcccggcgcttagctcgggcttcccgcagccagggcccgccccttcccggctccccgggagaccctggcaagttccctccctccgccccgactgtcaggcgagcgacgcgtctcctgcggcccagctcagctgcctgggccaggatggagcactgcccagcagtgggggcttggggacccccactgctacccttagcgggagccctggcgctgcccttcccgggctgcctggggccctcttctccgaggaccccgcccagcaggccatgcccaggcctctgcccctggcccacgggacgcgggtccccatgcccccggctggagacagcaggcagctcggccaacggacgggccagctggttcccttcaggggcagccttgcgagccactgcctcccctccggatcctccccggaggctctgcggcccggg

SEQ ID NO: 41 - DNA, 386 bp, Homo sapiens
  source 1..386: mol_type = other DNA
atacccagtgagtctgcactttgaggacccactgccagtgtcagcttcaaaatcacattgttggctccagctactgggcggcagagccgctccacccacccgccactaggggtcccagcggtcaagggggtggaatgcgggcgtccatcgcgaaggcattctgctcgcaagccttggcacaggcgcgggcttcgctaccggaaaagtcccggtaggattccggaagccggccacgcgttccgcgcaggcgcaaactgctccaaaagtgggcgtcgctcctccggagtcccgattcctgcgtcacagcccgcgccgaagtcggaagtgcgcccgcacagagcgagcccctgtcgttgtctcgagttctgggccgcgcgccgaagtga

SEQ ID NO: 42 - DNA, 328 bp, Homo sapiens
  source 1..328: mol_type = other DNA
tctgtgacttttcaagtcaagaggaaaaaaagggaattaattgaatccatgggtttggatacccagtgagtctgcactttgaggacccactgccagtgtcagcttcaaaatcacattgttggctccagctactgggcggcagagccgctccacccacccgccactaggggtcccagcggtcaagggggtggaatgcgggcgtccatcgcgaaggcattctgctcgcaagccttggcacaggcgcgggcttcgctaccggaaaagtcccggtaggattccggaagccggccacgcgttccgcgcaggcgcaaactgctccaaaagtggg

SEQ ID NO: 43 - DNA, 809 bp, Homo sapiens
  source 1..809: mol_type = other DNA
aatcagcgccctgaggcgagtcctcaccccgcgcggcggccccgccccccgcagctccgggcccagctgtcagagcagctttccctcaggctgggcggagcgtggccacttccgccaggaggtaaaccctccggggcttagaggccgctgcctccggccgatcccgccctgaagtgccgctggtggaacagcccgggcggaaccgcccgggcggaaccaacgggctgccgcggggggtggggccacggtccccccccttctgccttcaggccccggcggccaacgggccacggggatgcactacgcgcaccgtcgtcctctccctctgcctgcagtggaacggcccgggcggaaccaacgtgcggccgcccggagcactcggcgcgccgtgtccctccccgtgtggctgcactgcaacggcccgggctggaccaccaggcggcagcggagccccgtcggcctgcagtggaagggcccgagcagaaccaacgggggaggggacgctgagcgcgccgtgtttctcctcccgtctgcctggagtagaacggcccgggcggaaccaacgggcagccgcgggggcgttgtgggccgcggcgcgtttccccggctccgtggctctggggcactgaggagcggcgcccgcggggcagcgaggagcccgatgcagggttctgcgcgtcatttccggtcccgcgggcgccccgtgaagcccacctggatccgccagcgctgtgccactccccagtgccgagctccgagctgtctccgcggcctcgcgcccggcccctccaccgcgcgcctctcaggcc

SEQ ID NO: 44 - DNA, 794 bp, Homo sapiens
  source 1..794: mol_type = other DNA
ctctaaagagccctttagccgtaacttcattcctgaaaattatttgggaaagtaacgccgacgaagctccggagccgggggtcctcggggccgcaggcgcgcccgcgggtgtctgctccggatgtcccgcggcagccccgacgccagcctggatacgaaggccccgccccggagcgcgccaccagccaatcagcgccctgaggcgagtcctcaccccgcgcggcggccccgccccccgcagctccgggcccagctgtcagagcagctttccctcaggctgggcggagcgtggccacttccgccaggaggtaaaccctccggggcttagaggccgctgcctccggccgatcccgccctgaagtgccgctggtggaacagcccgggcggaaccgcccgggcggaaccaacgggctgccgcggggggtggggccacggtccccccccttctgccttcaggccccggcggccaacgggccacggggatgcactacgcgcaccgtcgtcctctccctctgcctgcagtggaacggcccgggcggaaccaacgtgcggccgcccggagcactcggcgcgccgtgtccctccccgtgtggctgcactgcaacggcccgggctggaccaccaggcggcagcggagccccgtcggcctgcagtggaagggcccgagcagaaccaacgggggaggggacgctgagcgcgccgtgtttctcctcccgtctgcctggagtagaacggcccgggcggaaccaacgggcagccgcgggggcgttgtgggccgcggcgcgtttccccgg

SEQ ID NO: 45 - DNA, 736 bp, Homo sapiens
  source 1..736: mol_type = other DNA
ccataccaggctggtctcaagctcctgacctcgtgatgcgccgggcccaagtaatctctaaagagccctttagccgtaacttcattcctgaaaattatttgggaaagtaacgccgacgaagctccggagccgggggtcctcggggccgcaggcgcgcccgcgggtgtctgctccggatgtcccgcggcagccccgacgccagcctggatacgaaggccccgccccggagcgcgccaccagccaatcagcgccctgaggcgagtcctcaccccgcgcggcggccccgccccccgcagctccgggcccagctgtcagagcagctttccctcaggctgggcggagcgtggccacttccgccaggaggtaaaccctccggggcttagaggccgctgcctccggccgatcccgccctgaagtgccgctggtggaacagcccgggcggaaccgcccgggcggaaccaacgggctgccgcggggggtggggccacggtccccccccttctgccttcaggccccggcggccaacgggccacggggatgcactacgcgcaccgtcgtcctctccctctgcctgcagtggaacggcccgggcggaaccaacgtgcggccgcccggagcactcggcgcgccgtgtccctccccgtgtggctgcactgcaacggcccgggctggaccaccaggcggcagcggagccccgtcggcctgcagtggaagggcccgagcagaaccaacgggg

SEQ ID NO: 46 - DNA, 421 bp, Homo sapiens
  source 1..421: mol_type = other DNA
cctgggtcctcgggctcacggcctccaggttggagctccctgggcggagagaccccgatgctgtcagcaccctgtgcacgctgaggcagtgctgctagtgccatctccctccagccactggagtcgcagcccgcctcggccgccgcgggagcggttcgagttgggagggccaggtgaggccaggccggcgcctgcgcagaagccagcacttcgccactggccccgttagagaagtttgtttaaaaacatttccccaaattcacctttatggtttatctcataagtaaaagaagagaaaatggctgctgtccgacttacatcggccgagtcctcgtcaggtacctggaaccgcctggccaaggccttgaccactgctgcccaggaaggcccaggttcagaatcaggctcaggttctgaggaa

SEQ ID NO: 47 - DNA, 316 bp, Homo sapiens
  source 1..316: mol_type = other DNA
gtagccgagagtctcgccactgccctccagcctgggcgctcaaataaaataaataaataaataaaattaaattaaataaataagatgtgatgtatttttacattcttttcatctgaatcttaagactcctaggagtcccagctactccggagcagtgatccgagatcgcgtgtctacactccagcctggaaaagatgcctgaagttggagaattaatgtaattttttaaatgatgtttcagcttatctgaatcatgcatttttctgggttgaaaaaacctcataatagcctgatgcttttccgcactttctcaagc

SEQ ID NO: 48 - DNA, 497 bp, Homo sapiens
  source 1..497: mol_type = other DNA
tagaacaacgcttcttcggtgaagttcttttgtacttaatgtattctaatattcagttgacattaaaggcagatttaacacactaaagctgtgtctagattgagcatacatggagaataaaatacgttgaatgttaagtcattagcaaaactggactaatttttctcggttcattattagtatattcataatactatctctaagtatttttaatatagtgggaacttgccttgaaattaatataaatattttacgtctttctgaaacctttttagtaatttggtaagaggcattggcaaagtacctcttttgctaagattttcacagatattgaaatttttccaaattaaaggtttgtagcaactctgctttgcagcttcctgagtagctgggactacagtaacggtttgattatcattaaaaatacttttatctatgaagaaaaaaaaacttataaagaaaatgattaactttctctttgcttcttattccaagcg

SEQ ID NO: 49 - DNA, 331 bp, Homo sapiens
  source 1..331: mol_type = other DNA
aatccatgggtttggatacccagtgagtctgcactttgaggacccactgccagtgtcagcttcaaaatcacattgtggctccagctactgggcggcagagccgctccacccacccgccactaggggtcccagcggtcaagggggtggaatgcgggcgtccatcgcgaaggcattctgctcgcaagccttggcacaggcgcgggcttcgctaccggaaaagtcccggtaggattccggaagccggccacgcgttccgcgcaggcgcaaactgcggcgtcgctctgctcggcgccccggcccgcgccgaagtcggaagtgcagctcacggcgc

SEQ ID NO: 50 - DNA, 403 bp, Homo sapiens
  source 1..403: mol_type = other DNA
gagatttgcagctctctaactttcaaggaactgttgcacaacccaaaatgtgtttttaatttgtgaaaaattaccatggtgtttaaacaaatagagctcagctttgtagctgcgcgctcctgggtgatcactcagacgggtcagtgggaacctttcaacaagaatgacattccagatggaaatagaattctctctcttgggggccttactttatagaatgagagcatctgagcttccctaataggagtgggacatccactctcggatccctcagagcacagaaaccttcagctttgctgtctctgaattccatctgaaagtggcattcagctgacttgctcatttagactgttcacggagtctgaatctgccaacgtggtgttggaggctccaccttgaaaag

SEQ ID NO: 51 - DNA, 792 bp, Homo sapiens
  source 1..792: mol_type = other DNA
ggagcgcgccagccaatcagcgccctgaggcgagtcctcaccccgcgcggcggccccgccccccgcagctccgggcccagctgtcagagcagctttccctcaggctgggcggagcgtggccacttccgccaggaggtaaaccctccggggcttagaggccgctgcctccggccgatcccgccctgaagtgccgctggtggaacagcccgggcggaaccaacgggctgccgcggggggtggggccacggttccccccccttctgccttcgccccggcggaaccaacgggccacggggatgcactacgcgcaccgtcgtcctctccctctgcctgcagtggaacggcccgggcggaaccaacgtgcggccgcccggagcactcggcgcgccgtgtccctccccgtgtggctgcactgcagcggcccgggctggaccaccaggcggccgcggagaggccccgtcggcctgcagtggaagggcccgagcagaaccaacggggcaggggacgctgagcgcgccgtgtttctcctcccgtctgcctggagtagaacggctcgggcggaaccaacgggcagccgcgggggcgttgtgggccgcggcgcgtttccccggctccgtggctctggggcactgaggagcggcgcccgcggggcagcgaggagcccgatgcagggttctgcgcgtcatttccggtcccgcgggcgccccgtgaagcccacctggatccgccagcgctgtgccactccccagtgccgagctccgagctgtctccgcggcctcgcgcccggcccct

SEQ ID NO: 52 - DNA, 674 bp, Homo sapiens
  source 1..674: mol_type = other DNA
caggctggagtgcagtggcgccactcacctccggagtagctgggattacaggcaccacgttggccataccaggctggtctcaagctcctgacctcgtgatgcgccgggcccaagtaatctctaaagagccctttagccgtaacttcattcctgaaaattatttgggaaagtaacgccgacgaagctccggagccgggggtcctcggggccgcaggcgcgcccgcgggtgtctgctccggatgtcccgcggcagccccgacgccagcctggatacgaaggccccgccccggagcgcgccaccagccaatcagcgccctgaggcgagtcctcaccccgcgcggcggccccgccccccgcagctccgggcccagctgtcagagcagctttccctcaggctgggcggagcgtggccacttccgccaggaggtaaaccctccggggcttagaggccgctgcctccggccgatcccgccctgaagtgccgctggtggaacagcccgggcggaaccaacgggctgccgcggggggtggggccacggttccccccccttctgccttcgccccggcggaaccaacgggccacggggatgcactacgcgcaccgtcgtcctctccctctgcctgcagtggaacggcccgggcggaaccaacgtgcggccgcccggagcactcgg

SEQ ID NO: 53 - DNA, 777 bp, Homo sapiens
  source 1..777: mol_type = other DNA
gcccaagtaatctctaaagagccctttagccgtaacttcattcctgaaaattatttgggaaagtaacgccgacgaagctccggagccgggggtcctcggggccgcaggcgcgcccgcgggtgtctgctccggatgtcccgcggcagccccgacgccagcctggatacgaaggccccgccccggagcgcgccaccagccaatcagcgccctgaggcgagtcctcaccccgcgcggcggccccgccccccgcagctccgggcccagctgtcagagcagctttccctcaggctgggcggagcgtggccacttccgccaggaggtaaaccctccggggcttagaggccgctgcctccggccgatcccgccctgaagtgccgctggtggaacagcccgggcggaaccaacgggctgccgcggggggtggggccacggttccccccccttctgccttcgccccggcggaaccaacgggccacggggatgcactacgcgcaccgtcgtcctctccctctgcctgcagtggaacggcccgggcggaaccaacgtgcggccgcccggagcactcggcgcgccgtgtccctccccgtgtggctgcactgcagcggcccgggctggaccaccaggcggccgcggagaggccccgtcggcctgcagtggaagggcccgagcagaaccaacggggcaggggacgctgagcgcgccgtgtttctcctcccgtctgcctggagtagaacggctcgggcggaaccaacgggcagccgcgggggcgttgtgggc

SEQ ID NO: 54 - DNA, 622 bp, Homo sapiens
  source 1..622: mol_type = other DNA
gctgatgagcagccaccagttcagcaagtgcgggctgggtgggacccgcagttccaacaaccccagcctgtggggtgcgcacggctccctggtccccctagaggtgccccaggccaccggggccttgggatcccaagcgtagacctctggcgaggtgggcgtgaggccgatcgcggttcccccaggcgcagggccgccctcccagccccgacggacagccccgagggagcgcagcgctgccgcagctgctctaagtttcgaagcggcggcgggcggggccagctctcgcggggcacctgcactcccctgagccggcccacgtggtccgggaggtcccgcccgcggtggcggtgagttggcgcctaggcgtagacgtggcgggcggacccgggggcgccctccggacgcggcaggtgagtggggacgggagccgggggccgccctcctcggggcgccgacccccgcctacccgagtcgcggacgcccgcccctgtccccgctgccccgccacgcccgccgcctcccgcccgcgcggggtgtcccggcgccggtgggacccggcagacgcgcgggacgccccacgtgcgcggcagcgcgcatgcgtggcgggtgcgcctgcgca

SEQ ID NO: 55 - DNA, 550 bp, Homo sapiens
  source 1..550: mol_type = other DNA
cgcctataatcctagtacacacacacacacacacaaatatatatatatatgaatgaagtagtcgctacttgtagtcccaactactagggtgcacctgagaggtcaaggctgcagtgagccgtgagcccgccactggactccgggggaccagcaggttagagcagctggtcgtgcattgccagtttacctgacgctgatgagcagccaccagttcagcaagtgcgggctgggtgggacccgcagttccaacaaccccagcctgtggggtgcgcacggctccctggtccccctagaggtgccccaggccaccggggccttgggatcccaagcgtagacctctggcgaggtgggcgtgaggccgatcgcggttcccccaggcgcagggccgccctcccagccccgacggacagccccgagggagcgcagcgctgccgcagctgctctaagtttcgaagcggcggcgggcggggccagctctcgcggggcacctgcactcccctgagccggcccacgtggtccgggaggtcccgcccgcggtggcggtgagttg

SEQ ID NO: 56 - DNA, 479 bp, Homo sapiens
  source 1..479: mol_type = other DNA
agcaatggcagccctggggctgaggaaggtcagggcaggggatgccacccactgctgccccatccctggggcctggtcaggcaggagggggcctttcctgacccccaatcccgtctcagcccaagcaaagctgcctcttggaccattctgggtaagccaggcctgaatcttcaaggtcatatccggggcctgccctgagaaattcagctgaaggaaaccacagccctggttttgttttctcatctcgacggggcagctgctggagctccctacacagcgggacacgcgaagggcacctgctgtgtgacctggggcccacgacagtcactggttgcctctgcagaagcagttgactgcctccactctagaagattctactgaggcctggctccaagcattattatgctaatgatcatatgcaatgggtttgcaaaataaccccgggagaagttacagagcttaagaaatcccccaagttc

SEQ ID NO: 57 - DNA, 369 bp, Homo sapiens
  source 1..369: mol_type = other DNA
atggctggcatcctgggaaagaggttgggcccctgcagacgcccctatcctggctttcagcctgggcagggcctgtgccgggtgctggccagacttcacccagtttactggagccaggccacctgtgacccccagaagaggatgggtcagcaatggcagccctggggctgaggaaggtcagggcaggggatgccacccactgctgccccatccctggggcctggtcaggcaggagggggcctttcctgacccccaatcccgtctcagcccaagcaaagctgcctcttggaccattctgggtaagccaggcctgaatcttcaaggtcatatccggggcctgccctgagaaattcagctgaaggaaaccac

SEQ ID NO: 58 - DNA, 749 bp, Homo sapiens
  source 1..749: mol_type = other DNA
tccccgctgtccactgctcagcggcatgggaggagtccgcggccttaccccgacactcccgcccaccggcccccgcccctgccaggcggccctgctcgcagcagcgcgaggagccacggggtgctgccctcctccgcagcccgaggcgcgagcccgtcagccgcgtctgagctcgccgcagtccctgcttgagaggccggggggcacctgcgcctgcccgggaccctgacctgctagcggggcctgttgcctcctctgcaggaagcgatctcgcccgcggtgcccccacccgccccgtccccggagggaccgcccccgcccgcggccttcccgcccctgcggtccccatcccgcccggtccccgcagggccgggccgccgggggtctcccggggcagcggtacccgaaggcagaagccgctcggacacgcgctcggggcccgatgcggtttggacgcgcacaggcgtgcgcgtgcccgtcgggcctggcgagcgcgcgcgacgcgcggcgtgcgtggtgacgcgagcgcgtggttccgaggctgcgggcaggggcccgccgcgcccatcccgatggctggaggcgtctgaggggcggacggaggcggcggcggcggcggcgggagcgggagcgggcggcggccgggagtggagcagccgccgcggcgggactggaccgagcctcgccggcgcgcacctgcccgcagcgcccgcggagcgcgcagcgcggcccgagcgcgacgacctgcc

SEQ ID NO: 59 - DNA, 589 bp, Homo sapiens
  source 1..589: mol_type = other DNA
ggacaccaagcctggaagccaggacatgtggccttcttgacagtccccgctgtccactgctcagcggcatgggaggagtccgcggccttaccccgacactcccgcccaccggcccccgcccctgccaggcggccctgctcgcagcagcgcgaggagccacggggtgctgccctcctccgcagcccgaggcgcgagcccgtcagccgcgtctgagctcgccgcagtccctgcttgagaggccggggggcacctgcgcctgcccgggaccctgacctgctagcggggcctgttgcctcctctgcaggaagcgatctcgcccgcggtgcccccacccgccccgtccccggagggaccgcccccgcccgcggccttcccgcccctgcggtccccatcccgcccggtccccgcagggccgggccgccgggggtctcccggggcagcggtacccgaaggcagaagccgctcggacacgcgctcggggcccgatgcggtttggacgcgcacaggcgtgcgcgtgcccgtcgggcctggcgagcgcgcgcgacgcgcggcgtgcgtggtgacgcgagcgcgtggttccgaggctgcg

SEQ ID NO: 60 - DNA, 668 bp, Homo sapiens
  source 1..668: mol_type = other DNA
ggccgaggcccagcgaatggggcgagggctcctgtgggcggggcctgcggcgaacaaggcttgcactgggcggggcccaggcctgcgacgaacgcggtttgctctgggcggtgcccggagggcggggtttaccctgcgtgtgcgcctgtgggcggggcctgcggccagcggggcccggtgggcggtgggcggggccccataaagccgcgccgccgggctttgctccaacctcctcagagcatggcccgggggccgctggccgcccgcggactgcggctgctgctgccgctcctgccgctcctgccgctcctgccgctgccgcaggtgggtcgggcggcgggttcggccaccgcggggcgggtccctgctcggaccacgcccctcccgggctcacccttgtccccacaggtggcgctgggcttcgcggacggcagctgcgacccctcggaccagtaagtcgggggggagggagccggggcctggccccgccctatggggaggcacgggtggcgaggtcggccgtcccatgccccgcctgctccaggtgccgccgtccccacaggtgcccgccccaggcccgctggagcagcctgtggcacgtgggaggccgcggcggagccgtgcgtccgacggttctggggcgggggtcaccggggccaggcccgcca

SEQ ID NO: 61 - DNA, 606 bp, Homo sapiens
  source 1..606: mol_type = other DNA
cccaggcctgcccctgcacagggagcagcagacattgcaggctgagggaagggcactgggctccctgtggccctcgggaatggaggtcacattccccaggtggggcatggcccccaaggccaagtgctttgggaaagtgggcccagagccagggccaggctccagccccctgggccagcccccagacaccaagttcgggatgcccagcatcttggtggcgttagtccacctggagcccgcctgcgagactggacccgaggaggccagctcccgagggtccccgggccacgcccagaccagcagcagagcaggccacgctcggccgaggttaaggcgccgtgcccgggctgaggacgagacccaccgtcgcctcacgagtctgggccaggtggagctgcggggccgaggcccagcgaatggggcgagggctcctgtgggcggggcctgcggcgaacaaggcttgcactgggcggggcccaggcctgcgacgaacgcggtttgctctgggcggtgcccggagggcggggtttaccctgcgtgtgcgcctgtgggcggggcctgcggccagcggggcccggtgggcggtgggcggggccccataaagcc

SEQ ID NO: 62 - DNA, 483 bp, Homo sapiens
  source 1..483: mol_type = other DNA
cagagtgtgatggcaccatcatagctcactggaacataacattcagaagtcttttttttcatccaggctggagtgcagtggtagagtagctgggattacaggcagctttagaagtccacctcggcctcctaaattgttgggatgacaggtgtgagatcttccatttgcaagagaagaggaaaatccccattttcacgggaaaccgccccggtcctctgggccaacgcgccggtgctgagctccacctccaagccttggccctgggccaggcctggctgtctgggaccccggagacgtccccgccccgcggcctgtggcctggcccttcagccgcgcctcggggcccgcgacctccttgccccggccccggcccgcgcggtcggtggtgggtcggaccaaaccacccgctccagccggggagcagaacgggcgaggctccccctccggccacgatggacatggagctgcccgccccaaaccacg

SEQ ID NO: 63 - DNA, 546 bp, Homo sapiens
  source 1..546: mol_type = other DNA
gcctcattcttccacttcccacagtagggattgggctggaaattccgaagcaaatcccccagggccactgtgctgtcagcgacatcgcgaattaaagtttgagagtgtgaggccttccctttcccagatctcagaactgcggcctgcggcgcagcccccacctgcttcgagggtccccagggatccccaaagtcgcctggccccagctcccgcgaaggcaggagggctggtgggggtctctctcctgacagctgcagggactggccccctccccacccaccgccggcgccgcctcgggacgaggttctgccgcgcccgtgggccacagtgtccacgcggggcttgtgccggtgtcgcctcccatgaagacacccggagggtcccgtctgcggcgcgtgagggcagcggtcccggagagccagaccccggccagggagagctgcccgcgagggaggcgggcggggccgggctgcagggagcggcgggctggggcgggctcggggcgggctccgcgctccgtccgccccctcgcgcccgcgccgcgct

SEQ ID NO: 64 - DNA, 505 bp, Homo sapiens
  source 1..505: mol_type = other DNA
ccacggcagggctgaacaaagtctgacactggggttgaccaccttccctcgctgggactggggcactgccacggccctgggactggcttccaggacggaggctcccgcctggcagcacagatctccccagggaggccagtgccgagggcctgacccagcaggggcgtccttggttagaaagggtcctccggggccttgggtggggcaggcccagggacacaaccgagggtccgtcctgcctgctgtggatcaaggaccgggccttgctgcctccttggatcagccaggaagtcctgtgggtgcccagtggccccttccaggcaccgccccaggccatgttgccaggccagactccagacaaggccacagccctggccatggggcctggagtgggggagccgacgggtgcctgaatccagggctgctgcaggtgcaggttcccacatgcccagctgatgggcatggggtccagcagatctctgcaggcaggtgctcctggaagagg

SEQ ID NO: 65 - DNA, 726 bp, Homo sapiens
  source 1..726: mol_type = other DNA
ctccccagggcctggcatcaaggaggcgccaggcacgacctgcggggcctgagcaggtccactctcaggggagaggggccgaggccaggaactgggtctgggtgtccacctggtgcctgggtgaggtcctgcaggcagcaggtctgggcttcagtggatgcagccagtaagggatgggctggagggcgattgtccagatcaagcccctcgagtaaggcccgcgactcgggccaatgccgcgtccttgacctgggcgagtcggttgcactcacgagtgtggacggcccttccctaccggagtgggggctggggcccagagaacccgagtccggacgctcccgtccgtgaccctggccgggttctctgtcaggggacccctggacggcggggccctcgggctggcagcgcgcgccgcaggagtttcctgggcgaaggccgagaactcgcgtttccagcgagttcccgggggcgccgctccgtcccagaggccggggcccctccggttgccgggcagagccgcgccgcgcgcggtcccattggcgcaggtgcgccgcgccccgcccaacaggtagccccgcccgacaggtagccccgcccgcgcctcgccattgggccgcggccgggtgtcccccgaggattggcccaggtggcggccccgcctcgccctcattggccgcaggtgccaccgcccgccccgggaccgcccgccccgcggattggccgctg

SEQ ID NO: 66 - DNA, 475 bp, Homo sapiens
  source 1..475: mol_type = other DNA
ctggggtgcaggggctgtccctgtgacctggggaggcccctggggcgactgggggcccgtgtaggggcctctcggggccgtccctccagggtcagcagggccataggtgctggagcatcgagagccagaggtctgcaggacactcccctctgtccctctgcacccccagtgcgaagcggcccatggggaagtgggcagaattcccagctgagctgccaggtctcacttgccagtgatgaccacaggccacccagcggcggtggcggctctgggtctccctaggagcccgggctggccacagccaggcacagcacagcccgtgagggggacagggggacccaccgtccccacacacactggtggggtttgtggggtggacacaaccctgggctgcgggacagtgctcggggcccttggccattggtgtcgagcccacagcctggcaggccaacctgcaggaccccgggcttagctg

SEQ ID NO: 67 - DNA, 448 bp, Homo sapiens
  source 1..448: mol_type = other DNA
agaccttggtgaccctgggttctggctgcagcgtgagactcaggcggcagtcactctgctcattggggcatgaggctcaggcagcaggctcaccccagcagctctttggcatcccccctgggaagccatgcccagcctgtgatgagggcggcaccttccctccgccatccccgagtgcttggacttgaagcatccaggcgtgtggccccctgcatcccactgaaccacgggggtgaggcactccctgggccctgctgcagcgtgcgcctgtggcagtgacgtgccctcaccagccacagggatgggggaccacgcaggctggtgcatgcgttggcttgagccttaatgccctttgacctcatgggaggccagagcctgccacccagctgaccaccagtactggtggctccattatgcaggcggaacccagaggcccttagaatggccc

SEQ ID NO: 68 - DNA, 437 bp, Homo sapiens
  source 1..437: mol_type = other DNA
ggcctctcggggccgtccctccagggtcagcagggccataggtgctggagcatcgagagccagaggtctgcaggacactcccctctgtccctctgcacccccagtgcgaagcggcccatggggaagtgggcagaattcccagctgagctgccaggtctcacttgccagtgatgaccacaggccacccagcggcggtggcggctctgggtctccctaggagcccgggctggccacagccaggcacagcacagcccgtgagggggacagggggacccaccgtccccacacacactggtggggtttgtggggtggacacaaccctgggctgcgggacagtgctcggggcccttggccattggtgtcgagcccacagcctggcaggccaacctgcaggaccccgggcttagctgtccgagccctgcctgggtctggctgct

SEQ ID NO: 69 - DNA, 774 bp, Homo sapiens
  source 1..774: mol_type = other DNA
cctccaggctggggccccttgaaggacggtgggccactcgggtggcctgggttcagggccgggctccacagctgacagggagccctgcaggaggggtgcccagcatagccccaaagctgctggggctgggcagggcagaaactgccaaggagtcccagagccctgagtggcgtctggcgagggcccctgtgagggtggcagccactccagggcccagcagggccaagggagaggcaagtggcctgggcccatggggcactgggcacagccaagtgtggcaccagggtgcctgggcggctgctgccaccacgtggccgactttgaggtcgcagagcccggggtccaggcaggaaagcccctcagctgcccccagggccctggcccaggcccctgaggcccaagtgagccacctggaccccgccttttgtaaagaaacggttcaagctttatttactcctggaatggtcctgggaggagaggcggctccgcagagccgggcagtgccggggcgggccgggcagccatcggggtaacggagggggctccggcccgggggctgcccggacgggaaaggggacacgggcggggctcccccacctgggccccccaccctcacgccaggcccccctgtgcggtgcaggacgaaggaaccctggcctcagtttccctacaggctgggatcagggcccctggggttccgactgtctcggaggggggcggcctcgctgcagaggtctggaggcggggccggggcgggggcggggcctggagggg

SEQ ID NO: 70 - DNA, 963 bp, Homo sapiens
  source 1..963: mol_type = other DNA
ccgcgcccagcggccctcggcgggcggggccgagcggggccgagcggagtcgagcatggccgagcgtagccgagtcccggccgagcggagccgagtcatggcagggcgggtccgagcgtggccgagtcccgggcgagcggagccgagcgcggccgagtccgggcggggagcgcgcgttcctggaagagcccggctggggagcgggtcacattcttggccagcgctagggctgaggcaacagcgcggggggcggggccggcgcggggcggagcgggcggcgcggggcggggcggcgcggcggcggcgtgagctcagcgccgggcgctcagtccgagccggagcgagccgccgggaggatgtgcgccgagcgccccgagccccgcgccgccgccgcgctctgagggccgcgggcgagaggcgcctccgccgccccggaagccgggcgggcgggccgcggagccggcgggcgggcgggccgggggccggcggcgggcgcgacgcggccggccagcgccgccgggacgagccgggcgggcgcctcgcggtgggaggagcggggcggcggcggcgcgccgcgcgaggacggcccggcgggccccgcgcccgcgcccccgctcctcccgggcccctcggcctcggccgccgcggcgattcgcgcctcgcggcgccggcacctgcccgcgcgccccccgcgagccccgggcccgcgagcgttggcgttggcgttggcggcgcgcgccggggcatgccccgcgcctagagcccggggggcgcgcgggggacgcgcggggggcccgggcggcggcgggcgcggcgcggggcgcgtggatgtggcgccgggcccgggcggcggcgggctccagcggcgggaccccttcgccccgcccgccttccccttcgcgcccccgggcgaggccgcggccgtgatcggccgtgagccggcggcggggggcggccggggtc

SEQ ID NO: 71 - DNA, 753 bp, Homo sapiens
  source 1..753: mol_type = other DNA
cccgagtagctgcgggtttcgccatgttggccacactggtctcgaacgacctcaggcttttgaaacgcgtcctagcgtttctggacagcaaggcttggtgctgctcctgcgcctgccctcgccccaagtcctgggcttcgggatccccatggcaaccccaggtcccgctggctgtgaggctgcggccggaacccggtcttcccggctaggagcccgcggggggcgaccccctgcagggcttggcctgctgcgggaggagggctcggggaagggtgcgagccgagcccgaggcgcacggcgagtcctgtgggagtgggggacgcgggggcggccctggctccgccgcggcacctggacctctactttagcccagggcagccagcgacctgtcccgtggcccgcagtcgttaccgttccggggcggccgcctaggcgggtcccgacgcggcccgcgggagctcggggtgccctcgcccgccgctgccatcttgccgccgagggttctcttagcgaccagcaacgcccgcggggggtgtggccacgggcctagtccctgagcccgcgcaatctctggagcgaagctagccgggcccggagccagaggacgcagctgcgcctgtgcgcgtttccgccgctgtcgtctcttccgccgggaggcccgcccgccaacggcctgcgcgtctgcgccggaagcggaaatggttggagcccttggccccgccctcgcgccatcttgggggccctggaggcggc

SEQ ID NO: 72 - DNA, 787 bp, Homo sapiens
  source 1..787: mol_type = other DNA
tttatgattttattgcctatttagaatacgatcaaatacagataagcgctgacctggtcgcagcgctgtgggggccgcgactgcccgcttcccccagatgccaagcaggggatcggacgagatgcggcccgggtggctcgagggctgcagcccccgcccggcccctctcccgctcccccgaccctcgcaggccccagggctccgccgcaccccccagcaccccgtcccgggcccgaccccgaggcgcgacccgtacccctcagggccgcgggtcgggaacacggtccccgcggccacccgggccccgacggccctccccgcccggccctcagcgcggccccgcccgcccgcggccttgacagcccggaagaagcggaggcggcgctgcccggccgttcccgcgccacgcagcccttcctggcacctcgcagctccgctacggccgagccgcggtctccctcacggccgcgggaaggaggacggcggggcacgggcggccgcaggcgctgcgctccggctccgggaagctgcagcgagcacttccgctccgtcctccgcggcgccgcctccagggcccccaagatggcgcgagggcggggccaagggctccaaccatttccgcttccggcgcagacgcgcaggccgttggcgggcgggcctcccggcggaagagacgacagcggcggaaacgcgcacaggcgcagctgcgtcctctggctccgggcccggctagcttcgctccagagattgcgcgggctcagggactaggcccgtggccacacccccc

SEQ ID NO: 73 - DNA, 605 bp, Homo sapiens
  source 1..605: mol_type = other DNA
ccagagctcccaggttgcctggtcagccaggaaggacatggagacctgactctaccggggagcccggtggagagcagacgggctgacgctgccacctgccggccatcccaggataggaccgccggaaggaccctcggggcaccagaggccttcgaagccccaatgagtgaggaaggcccagccaaggcctagagccaaggcttgaaccgtgggggacccccgcagcagacactgggacactttgtttcaggtcctgccaggcccctcccactgtgagccagccaggacagcggtgggggatgcctcctagagcaggccctcccgtcaggggcccatcatgagccgaagcctcctcctcagaatcagacgtggagccatagaacacatgatcacctcagcggctccacgtgggcgatgccgggttgcctggtccacggatgaggggttcagcccaagcctctgtgtccaggagacacgggtgcacccgcggggtcagaactccaaaggggcgcgggggcgctgggaggtttggtagccagagggcctgcggggcggggccacccaggccatgccccttccctgtaagaggggccattcctgcagtg

SEQ ID NO: 74 - DNA, 776 bp, Homo sapiens
  source 1..776: mol_type = other DNA
ggcgacctgcgtgggcctccccagcccttcccacccccagctcagggcaggtccagctgtggccagcggctggggaaggttctgtcccctccagcaggcctccctccgctcgtcccctgggagcagagggatcggagcgcctgcgatgtggttccccagagcacctgcggggctcaggccaggcagggtggagggtggagggtggaaggccaccttccgcccgtcctggaaccacgcggcggcttcccggctgccccccacccgccaggccctgcctcccgtgggcaccaggggggcgtccacaccaagccggccgtgttgctcggggcctggaaggtcccgggtctcgcctcgtgcccctctcaacccgcgctgagagcccgcgcagctcaaagggcgcgagggcgggaccgccgcggccggcgctgggagctcggcttcccgaagacccaagcgcgtctccactccgcagcgctgtccccagtgggagggcggcccgtggacgtgcagggagcagagcaggggcccctggcagcgtaggaccccgaggtcgcagcaaccacgcggccgcgagcccatcccgctgcctcgccagcgcccctcgcgcgtgccccgcccccacctcggctcgcgggccccgccccgctcgctgccccgccccgcgctgcgctggttcggactccagccccgcttccgcccgggccctggccccgcctccagccccagtccggccccgcttgacgcagaggtctgcgccgcacgcagagccacgtcgt

SEQ ID NO: 75 - DNA, 396 bp, Homo sapiens
  source 1..396: mol_type = other DNA
cttctgttgcctcagcctcctgagtagctgggacaggatggtctcgacctcctgaccttgtgatccacagggcccagccccagtcttgggtctcttgacagccatgtgcctggccccaggaggagcctgctcttggccgcccggcttcaaaaccaggctgctggggacgctgcacagcagtgcttcctggctggcctctgaccgcagcctgctgtgccctccgccggccctggtaataatcagctggtatttattaagagctgcacacatcgtctggggtctggtcacagtgcaggtctgtgggcctgggacgaggtccgcctgcgccggagcagggttctcagcctcgcccagcagcagcaggtgtgttgtccgacatccttcctctggagggcc

SEQ ID NO: 76 - DNA, 653 bp, Homo sapiens
  source 1..653: mol_type = other DNA
ctccccagtgtatgggcatggccaggacacaggtggctggtgttcagccggggtctgcccacccctggtgtcccggcctggacttggggatgggagagcctgtgctgtcctgtggtggcagtgggacctggagtccctccttgggcgaggcccctgtccaggtcagatggctgtcatccctgcagggcagaaacgtgccctgggcatggggccacctcctccgccacagctcggtgaccgtggagaaaggtcaggctggggctgcagctgcatgagggagacggagagcccaacccaggctcagggacccacatcctgggcctgggctgggagttgtcgggatccggctcggctcccctctccagccacaggggctgggcgctgcggggatgagtccactcagaggtcctcaggatgcggggtgagggcagggaccactccaggcccagcctcggcatctgtggtgggcgcacagcggggaggcccaccccacacagggtcctcggaggacagtaccctgcaggccttccggttgcgttctctgggtcccaggagggccctcccgttggtcccctggggcctgggaaaccctccccagtgcccggcaccagctgggctgcctggggctgggcggggctgaggtcctttgctcc

SEQ ID NO: 77 - DNA, 569 bp, Homo sapiens
  source 1..569: mol_type = other DNA
tgccgccccacaggcctgtgctcccaggagccctgccaggcagctggtggcattctccacgtgcatcccaaggcgcccagagcctctggagaagacgcagggctagctgcttccaaggctgcagcctcccaggcacctgtcttgcccacaggcagcctgcctggcttgcatgccaggctggggctcctcccaggtggggcagggttccccaccttttaacattgaaagtcccacgcccctggcgccctggcgtgcagggccaagcttacagcaggcactcgctgaagggcagggctctctgacagtctgcagacccacgtgcccccttagaagcaggtgggcggcctctgcggcctccctcagcagggctcagagcacttgagttaagcagaacatcagtccagatgttctgtgctgagcccgcccgcccgcagccccgggcctctcggacccctgcccagcactggccctagctcgccctgtagcggccgagacctcagaggccgggggtgggggagggaaggggcggggccggcgcctcattaacaaatatatgcgcatatatctcc

SEQ ID NO: 78 - DNA, 648 bp, Homo sapiens
  source 1..648: mol_type = other DNA
ctggctgccagagtgcgtgggatccctggccagataggggtggggagaggcccctgagggacacctgccagctcgtggagcagccccagtgctgctgtgggtcaggaagcggggagagctgccgggtgcccggctccgcggggagagctgccgggtgccgggctccacgtggagcacgggccccagcttcctggagctgcccggagcccagccaggaagcccctctgtccccctcccctggaggggcagcaggtcccagtcagggaaggtgcccatcccccaggcctctgccagccagcagtgggaagccgctggcggaggggagggcgggggagggggccctccttcctgcccccctcccgtttggcggcctgggaaaaggcagcatattgaggcgcggggctcccggcatcaggccccgggatgctaatgagggcgagcgcgttcccacagcccggacattgtgccgcgcggcccacctgctccttggggagcgcccattgtgcccgcgccaattcacaggcaatttagcgtgcgctaatgggccggcgcctttgtgcggcccgcccggccattggccgcggagtgtgggaacggccgcggcgcccggactccaggcgccaggccgccgcccgcgcctatataggg

SEQ ID NO: 79 - DNA, 539 bp, Homo sapiens
  source 1..539: mol_type = other DNA
gcctgccggggctgggctggaggcctggggacgcctggggctgccccaattcccagcagggaatccccaagcccgaggccttggagctgcccccgccctgggccatgagagctgggagccggcctcccctgtgagggctgcccacctaggtgaccccggagccgcccgggcctggtgtctgctcggggtgggccacggccggttctgtgtcccgtcctggcctgggcagtccatagtgaccacacgactgtagacgtttggcttctggactcaaatccttcaccagatcgtgaccaggatggcaatgaccaggcctcggcctcagccccctgcctggcctgcactggcacagcattgggtctggggagtccccgcgacaggaggcgtggggctcggggtgctcacctgcctccctctccctgctggtaatggtgggccccgggatgggggcaggatatcctgcgggcagccgtgtgcagatggctgggtgctgggtagggccccgtctcgaccctggggtcctgcacagggcctggcgg

SEQ ID NO: 80 - DNA, 561 bp, Homo sapiens
  source 1..561: mol_type = other DNA
ctgggacctgctctgggcaagcacaggcggtgcgtgacagacctgggcttccattgactgcatcacgtccagcagcaggaaggggccacgggggcactggcgtcgtcacgtgggtcacgaggttccatgtgatgcagggagcgaggccgtcacgagggactcactggtgcctgccttggggctcggaggtctccctaccaccaggctctgtggggcagggaagcccagtgagggtccacagggagaccgggcgaggctggcagccttcccagtccgcgcagcgtctctgcagggggagcaagagctgcccttccacccctcccaggggacgggtaggggcactctgggcttttcccaccccctcaccacaggcctggtgggtctgactgcctgttcagcagaacagcgccccggggagcagccgagggtccctgagggggctcccccttctacaggaatggtgcagggggagaactcgcccctccgcagggcccacctgtgtcccccagcgccgctccacccagcaggcctgagcccctctctgctgccctgaggcacagc

SEQ ID NO: 81 - DNA, 614 bp, Homo sapiens
  source 1..614: mol_type = other DNA
gctggccaccctgccaactctcctgcaggtgagggtgggcgcaaaccagatgccactgagtcccccaggggccagggctggaccctggagggggtcaccggggcagggggcggtcctgggccaggcgtctggctgggacctgctctgggcaagcacaggcggtgcgtgacagacctgggcttccattgactgcatcacgtccagcagcaggaaggggccacgggggcactggcgtcgtcacgtgggtcacgaggttccatgtgatgcagggagcgaggccgtcacgagggactcactggtgcctgccttggggctcggaggtctccctaccaccaggctctgtggggcagggaagcccagtgagggtccacagggagaccgggcgaggctggcagccttcccagtccgcgcagcgtctctgcagggggagcaagagctgcccttccacccctcccaggggacgggtaggggcactctgggcttttcccaccccctcaccacaggcctggtgggtctgactgcctgttcagcagaacagcgccccggggagcagccgagggtccctgagggggctcccccttctacaggaatggtgcagggggagaactcgcccc

SEQ ID NO: 82 - DNA, 638 bp, Homo sapiens
  source 1..638: mol_type = other DNA
ctggcaccccagggcgagggcacaggcgaagcagcagcacccccccggggcctctctttatttggaatacagtgtgggggctccccctccttctccagcccgcccaggcccctggagctgtcctggggcctggggagtgaggacccgtgccagcagcacagactctgccaggccgggcccgctcaggtgggagcccaggccgggtgaagctgtgacccggccctcaccccaacctgccaggcacctgacccgcagtgcacttctgggagctgggtctatttcgccccaaggtttggcgggttaaaagatttcatgataaagacatcgcaaaaccaggccacgtggaaaggctaccgccccccactgctgggacccccgccccgcgggagaccccggcccgcggtcccctatgcccgcgacccagcccagtctcgcgcgaggccgcagggagacccccgccgctccctggaccacccctgggcccaccgtacccagccgctccccggcgccccccgggacgaccccgagccggctgcccgcctcccgccgcattccgcacaggcgcaccgcgcaccgagggccgcaccgcccagctccgcctgctgcgccaatggccgacggggtccaagtcggcggcc

SEQ ID NO: 83 - DNA, 572 bp, Homo sapiens
  source 1..572: mol_type = other DNA
gcccaggccgggtgaagctgtgacccggccctcaccccaacctgccaggcacctgacccgcagtgcacttctgggagctgggtctatttcgccccaaggtttggcgggttaaaagatttcatgataaagacatcgcaaaaccaggccacgtggaaaggctaccgccccccactgctgggacccccgccccgcgggagaccccggcccgcggtcccctatgcccgcgacccagcccagtctcgcgcgaggccgcagggagacccccgccgctccctggaccacccctgggcccaccgtacccagccgctccccggcgccccccgggacgaccccgagccggctgcccgcctcccgccgcattccgcacaggcgcaccgcgcaccgagggccgcaccgcccagctccgcctgctgcgccaatggccgacggggtccaagtcggcggcccggacccaggatttggcgccgcgatctcgaggcttggcggtcgggggcgtggccggggcgcgctgcggccatcttgggggcgggcccggggcggagacgagcccgaaggggcggggcctcggcggc

SEQ ID NO: 84 - DNA, 543 bp, Homo sapiens
  source 1..543: mol_type = other DNA
cacacgtgtgtgtacacgatcatacatcagaacatatgcacactgcacacactcatttgcacacatgtgtacactcaggttgcagacttgggagcctcctgagtccgcctgtgccacaccagccaggtggctgccagggttgagactcaagcctgcctggccctgcagatcccttcctggcccacgtagtcaccgcctgtgtgggtacaggaaaggtgggctgggagcccagaagcccaagtggcctccccgacagcgtccctgacctagcgctcagggcccagggggggggctccactacaggagtcccttgacagcacaggagctgagcctcctgggtccagcttgcgaccccaagctgggagcatcccagtcctagaacctccatgcactgcccgggacccggcacccagcgcccgctcccagccagcatccggcccttccagcctcgggccgggctcggggagctccacgcccctctcccctctccggtgctctcccgtccagagccctgctgatgggagcgccggccgtgcagggcag

SEQ ID NO: 85 - DNA, 540 bp, Homo sapiens
  source 1..540: mol_type = other DNA
gccccagggagagacttcccgggctcagggtggtgtctgggatctgatcccagcctggctgcagctcgaagccttggagacctggccggggcggccgtgaggcccagccctgcccagatgccctgacacatgcccaaggcctgggcaggaggactcgttctggggattctgaaacagaagctagaaacctcatcaggcctggagactctgcccagaacccccgtccgcaagcagggctgggtgcagggctcacactctgatcactgcgaacccttcaggggctgtctctgggtgggaccctcctggcagccagcgcccaccaaagaacacccagggtggggcctttgtaaccccccaccgggtggttaggggctgtggagtaggacaagggcctgaccttcctcccagcagcccctggggcccctttggactgaaaccgggcacccatgaggcagggcagcccgggtgccaagaagctctcctgactgtgagcaggagtcaccgcctccagggagcccatgcctggaagccttcaggcag

SEQ ID NO: 86 - DNA, 739 bp, Homo sapiens
  source 1..739: mol_type = other DNA
ggccaggagcctcgcggggcggcgcagagaccccgcatcgcgggcgcgacccctgcctcgggctcaggctgactctgcggcagctccaagtcccgttgccgggcaggacttcggtgctccggaagggtgcggggcagcaacctggccagggcagcgcctcaggccgtcaggctcctgggcccgggccaccctgcctgcgctcagcccggcccctccgccgcagcgcctcggagtttgggggctacaggggaagaggaagcgtctggtcggctcccgtccgagctgctccacctgcgccgctggcctttccgcccgctacgcacctgggccccgagaggccagaggggagtgtccccagtggcccgggtccccgaaggtggcccagctcgggcgctcgcgcagccgggtactcaccttgggggcgcggcggcaggagagcgcgggcggagaggtgcgggcgccctgggacgaccagccgaggacgcctggtgtttggacggctgcccccgcgctgtccccccgtgcgaggcgtgttggcctccgtggcctcgcgagggaccgagggcggcgggtccgagtgccgcccgccggcctgggcagtggcggagcgcggagctggcggcgcctccgctgttgtttttgagccgcgaagcccgaagcagcggcttcggaggagccgggttctggcgcgcgagccccgacgccccctccagcgatcgcagggcggggacgggggccg

SEQ ID NO: 87 - DNA, 593 bp, Homo sapiens
  source 1..593: mol_type = other DNA
gggcgcggcggcaggagagcgcgggcggagaggtgcgggcgccctgggacgaccagccgaggacgcctggtgtttggacggctgcccccgcgctgtccccccgtgcgaggcgtgttggcctccgtggcctcgcgagggaccgagggcggcgggtccgagtgccgcccgccggcctgggcagtggcggagcgcggagctggcggcgcctccgctgttgtttttgagccgcgaagcccgaagcagcggcttcggaggagccgggttctggcgcgcgagccccgacgccccctccagcgatcgcagggcggggacgggggccgcccggactcgcgtccgaactatcggcgcgtgtgccccgagccgcagccgccgccccatcttcggccccggctggggcgggagcagcagcgcgacgcgccgcgacgcaggggcagggtggggggatagtcacctcgcctccggggccacctgggtccttttaaagtgtccggggtgcgggccccgggcgggagcgccgaacacggagccagttccgagctagccccccaatcccgcgccgaggcggcggcggcggcggcggcggcgcgacgatg

SEQ ID NO: 88 - DNA, 477 bp, Homo sapiens
  source 1..477: mol_type = other DNA
ggccccatcagccaaggcgagatccccccatagtctgtgcacactgccccggcgccggcctccgccgtaagcctgagtgaagccgagagggggcgggggccacggagggtcttggcatccccggcaaaggccgggctgaccgggggctgccgctggcctgggcgtctagcccttggcctgcagtcctgccaggttggcatcctcggggtgccctcgggccgctggtgcccggtgtcaggaggccagcactgcagcctcccaccctgtcagcatctggggggctgtgccccagcctcccgggaggactcccaggcggcccctcccagcgtctgcagctccccagggggcggggctcgatggcggtgtggccagccggagcccctcacacggcaggcgtcaggttgagtccttgggggtggcagggagggatggttccagaccccatggcacccagtgtgtccctctcatggggggaca

SEQ ID NO: 89 - DNA, 355 bp, Homo sapiens
  source 1..355: mol_type = other DNA
gccccaaggcccggagggtggctcgggagcatccggcaccgtgcatggacaggtatatatgcaggaggaccccggagcatcgagtctcctgagcctcagcctcaatgctaacctgaggggcggtgcctctggtcccctcgtgagggctgccccaacagtcacccatctgctgcgggtgcccttgttggggccctgagggtgggcagggagccgccttgtccctggagacaggggcttcctgtagagctccagggaccagactcccaacctctgactcagcatgggatggggctgggggagggggaggggtctgggatagcggctgcccctcccccagctctgcccccagccaggg

SEQ ID NO: 90 - DNA, 446 bp, Homo sapiens
  source 1..446: mol_type = other DNA
gggagtgggagccgactctgatccaagccggaatcacagccctggctctcctgcagaggttaaccctgggaggactgcctcccccgggctatgccctcgaggagcgtggggacccagggctctggggttggaagcacctccgtggcctttgcaactgctggccaccctgcaggcaaggcagggcctcgcccaggctccctccaagtatggggccctgggccaggggagccccgcggcccccctcccccgccccgcggcccggccaggacggctcccaagaacacacatgtttgtgcatgtgtgtgctgcacacgtggtcacatgtgcgtccgggtccgggagcgcgcacgctggaatgcgcggggcgggcgggccggcgcggccccctgggggaggtggggcggggctcggggcggggccgggggcggctccctcggaaaggcgag

SEQ ID NO: 91 - DNA, 492 bp, Homo sapiens
  source 1..492: mol_type = other DNA
ccctggagtcaatttcaaaccaaaaccaggtttcaagaatcttgcttcaccctagacagtgcctctctgcccatgggcaccctaggacagtgcctctgtgcccatgggcatggctgctgggaccccgcgcccaccgaaccaacaatgcaggtccccgaagcaggggtgtccagggtgcacgcgggctgcagaggctggccacgccctcctcaagcccttccccgacccctgccctgcgggaagtgggtgaggtagcgtccacgggcaggacaagccgaggctggcttcccctcctgagatcgaggtctggggtccgggatcccagagagctgcctttgcggggtgtggccccctggcgcccggcccctccgcgcaaaggggctgcgccagccccgcggggtctggggcgggactcgggagagccagggcgggtcgggactggggtccgggctgggggcgggccgggggcgtggcggctttccaggctctgag

SEQ ID NO: 92 - DNA, 232 bp, Homo sapiens
  source 1..232: mol_type = other DNA
ctgggccaagccccagccctggctccatggaccctgcctgagggaagagcctccaggctgcacactgacctccaacctgggggagctggtgccggcacctagagggctgccctggcacgtggccccctgatgtagggcctgaatacacacacccagcgtgaagctgcgccctctaagccccacgaccagtgtgtgtggagagagcagccatccggctggacgtgacacatac

SEQ ID NO: 93 - DNA, 678 bp, Homo sapiens
  source 1..678: mol_type = other DNA
gactgctccgtgaccagcaccagccgctccttctcaggcagaggaggggcctcagtccacactggacgcggctgtctcgacttagccaaggccagcccgcctggaagggcagcaggggcggcacggggcgcctgagcgtggcacgagcaccccgggaagtcctcgcaaggtgctgcgcggcggctcggggcgagtccccccaccaaggagagcgcagccccggcttcctccacggctcgatgctgccgggctgggcgtcacagctcgctccctgcgggaccgcccggcgcccgcctccgacgccccgcgccctcggcccccgccccggccctggcccctgcctcacccggaacacgaagtactccttgacgcgggcgcggcgcgtgagaggccagagtgtctggcgcagcggcgtccccgcccccggccgccccccgcccgggccgccgcctgcccccacctcctcgccggccgccagcaccgccgtggggctcgtaccggccgagtccaccgcgaccctgacgccgacgcgaccgccgtcgccgcagccaccgccaccacccggccgcgcccccggccccgccccgcggaccgccgcgattggctccgccttgccggccccgcgttcacaatcgctcccgcccctcgccgggccggaagcgaccgtcacgcgcaggc

SEQ ID NO: 94 - DNA, 524 bp, Homo sapiens
  source 1..524: mol_type = other DNA
cctccgagcagagggatctgccgaaggcgcacctccaggtgcccccctccacacgcgctgggggcacctccgggagctggggctagcgcagggcacagtcgaactgcgagcgctgaccgggatctctgggcagccctctctgtgtgcgaaggctcgcgacagcctgggcccgggcgcgcgagtgcactcgctgcccggcgtgcgaactcccccacggtgcaccagggccgccgccctgcgcgaccctccgtgcagtgcgagcccccgatgggcgcgcgcccccacctgcgctccagaaggccgaagggggcatcccacttgcagggcgggtcacccgctttccccgcgggccaaggggctccaagacgccccttctcgttgtgtaaacaggaagtgagcctgcgcgtgacggtcgcttccggcccggcgaggggcgggagcgattgtgaacgcggggccggcaaggcggagccaatcgcggcggtccgcggggcggggccgggggcgcggccgggtggtggcgg

SEQ ID NO: 95 - DNA, 625 bp, Homo sapiens
  source 1..625: mol_type = other DNA
cggaggtacgagcaggaccctggccggctctcagctcccagaacccagggccaggcggggatgtcagggtctgcgcgatctggggggccctagaggcgccggcggggcctggcgcggactactagcggcctgcgggagccaggggtgcccctgagcctgcgaaacctgcggaccgagcgcccgcgcaggagctcgctccctctgggcccccaggtcccagacccgcacgattcttcgcccggtgccagcccagatgcgcgcgggtgatgaacgggcggtggccgcgatccacgcgctcgctctgccacttatacattacatacacgatataatatatgtgcgacagacaccgtattacttattaaagatatatttgtaggtaaacatatatttacatgtaaacatacatttacatataaatataaatatatatatatgcatgtgtacacacacgcagacacacacaattaaatttgaatttcagactagcgagtaatgaacatacttataactagatttgttgtgaatctgaaattcaaattttactgtgctttaagctggaggtgctcaaaggcctcccggccgccccacaatgccgcgcggaagccggcggcgctgataggct

SEQ ID NO: 96 - DNA, 752 bp, Homo sapiens
  source 1..752: mol_type = other DNA
gtcgagggccctggaagccccgatggcctagggggcgttcggcctgacctagcgcaggtctggtgcgcgcagagaacaactccaggatccagagcccgagcccacaggcggcggccgggggagggagcagggtgctggccgccgcccgggagtgttcgcgtcctgggtgacccctggaaggacgtggggcccaaactccggctggggttgggagagcagcccccagaggctctccgcgggatcctctgccgggcgggaccgtggctccacaggagagcaagccctgcttggcggaaagcagccgttcccctcctcctgggcctggggcggcgcccctcacccctgttcccttggattccaagcgccccgcgcgccgaggagcccagcgctagtggcggcggccagagtccgggggaaacgcaggcgtcgggcacagagtcggcaccggcgtccccagctctgccgaagatcgcggtcgggtctggcccgcgggaggggccctggcgccggacctgcttcggccctgcgtgggcggcctcgccgggctctgcaggagcgacgcgcgccaggaggcggggcagagcgcgcccgggaccccgacttggacgcggccagctggagaggcggagcgccgggaggagaccttggccccgccgcgactcggtggcccgcgctgccttcccgcgcgccgggctaaaaaggcgctaacgcccgcggccgccgcgcctcccctccccgcgcccatataaccc

SEQ ID NO: 97 - DNA, 599 bp, Homo sapiens
  source 1..599: mol_type = other DNA
catggactcagccctcgtgagagccacggcgccctggggactggaagtgtgggtccgcaggccccagtccccagccctgcctgcttccagggggactcgggcccctctgccagggtcaactactagacgggtgcggggcaccactgcagagcccctccctggctgtgccaaggccgtccacgcctgcagggggccccactgccgggccaaacgcacggcacccctgctttgggcaggcagtggaaggcaggccccactcgggggtctagggtcgaacctctggactggtcctggcggaccaccgagttccccgcgcagggggcaggtgcgccccacctgggtgccaagggaggcgacaccatctctcccccttggggtggcccagccttgcctaccatgatctccagggccggggctcagccctcatgcctgggaacagaggctgctttacggggtgagggcctggggccccccgagccttccccaggcaggcagcatctcggaaatggagccggcgctgaccggcgtccccgccctccccacgcagcctccttggtgcggtccaacacatcaccgggcaagctgaggcctgccccgga

SEQ ID NO: 98 - DNA, 478 bp, Homo sapiens
  source 1..478: mol_type = other DNA
cctttgctcaggccagagccctggaggcactctccatgcctgaggtcctgtgactgcaaatgtgcctggggcccctgcggggcccacctcgcacccgcggcccacgtcgcacccgcggcccctgtgttctcaacaccggagccagagggagcgctttgcagccccgggcgtctctgctcagctccgagcaggctctctgccctgctggtccccagcctggaaacagtccttgcctggacgccagccctggcccctgtgcctggcttcgtgccggctgccatcttcctgcacctgggagggtgccaggagctgaccaaggccagtgcactgggcgggaccatccgtcactcctgagcccactaactggggaggggacaggcagagcggggctgggtgattcctgagcaagcatgctgctgtctcacagccgtcctggatatcaccgagggccatcggaggtggcacgccccgtgactgc

SEQ ID NO: 99 - DNA, 298 bp, Homo sapiens
  source 1..298: mol_type = other DNA
cttgaggtaggcatttgaagcctggaaaatcattcccagggagtcggggtgatcgtcttcaagccagcacatggagacatttgagctggaccaggctggagtgcagtgacgtgaacacagctcactgcccaggctcaggtgatcctctcatctcagcctcctgaggagctgggactgcatgcctcccacctgggcatcccaaagtgctgggattacaggtgagcccagaaggcaaccttcaatattgagctttgatggagacatctgtgatgccaccactgctcccaggagcccacag

SEQ ID NO: 100 - DNA, 703 bp, Homo sapiens
  source 1..703: mol_type = other DNA
acagggagtcagcggtccccttgcggcaccaggctgccagaggcctgagccggggtgtccgcccagcactcagcacagacctcacgcctgagcagaaggggtctgtgaccttctgccctgggggctctcctggctggggcactctcttgctggaggacccctctggaagatggtgagggtggggggctctgttcccatccccccgctcctggaaggaaacgcacgggaacggtgtctgtggtccccgacgcttccccggcgcctctgaggctctgggcgcctgaacaccttcggattcccgccgcgagcaccgagcgtgggccacgtgcgggcgccacgcccctcaagccccggaggaggacggtccccgcggccgggtccccgaacccagcattcaggcccagacgcgcccagagcctcccgcagtctcgtcggcgctgcagccgggtccccgcggggctgggaggctcgtggcgtcggaggggctccaggtcggggaccctggaggccccaagggcgagccgtctgggggcagaaagtgcagccctctgcagaccctgcccggcccccctgcacctcctggccccggggctgggcggcctagagccccggccccttccggacgaggcgtctcccggccccactcgccccgccaggcgcccgctgcggccctagcccggccccttctggaccaggcgcctcc

SEQ ID NO: 101 - DNA, 350 bp, Homo sapiens
  source 1..350: mol_type = other DNA
ttcctaaataagatagttacaaatacatatttttaaagaaagaaattctctgtgggcctcaagatctttacaaagaagattcagttaaagcaaccctccggtctcttctgtccagcctttctgggctgaaccaaggtacactatctcctagggttgtgacactggcgtgtccttaaccttggcaaaataaactttttacatttcattgctacccgcggagagagcgagccgctctccagcccctccccggctctacgcaggagaggccactctcctctatggcacgcgcgcactctagcagccaggcttttccggcacaggtcggaagtggcgcgcgctgccccggaagc

SEQ ID NO: 102 - DNA, 718 bp, Homo sapiens
  source 1..718: mol_type = other DNA
gcaatccccagctgcgagggctggaaggggcctgcagagcccacctagccaagcccagcagccgtgaccccgcgtgccagtacctggcactctacccgggtctcctagctctgatgcagggctgtcctgcgaagagggaaggggtgatccaggtcgtcccccaacccccctgcgttctgaagccacgctcaggaaccccaggctgcgggggcccggggtcctagcggctgaggcgccgccccgggcgccgcctgcaccctccgttttggaagaggaaaagcggcacctcctattctccccccgacgggccgtccccgcctagcccagcgggcacctggaagcggagacagcacctcctggcagctccggccagccacgccgaacttcctcgggctgcgcagggcccgcagcttcacgctcttgggcttctggagcattgcagatgtcctcaagccctctgggtcccacaggcggtggcacctgctgcccagctgctcagatccgtcctcgccctggccgcaggggtctgcacctggtgagctctgcaagctggcacaggccgggtgccgatcccggtcttgtgcgcaggcgtcgcccggcgcgacgccacctggtgtgcccaggtgccgtggccccggaaactacacaccctgagggccagagtagcggagccctccccttgtgcgcaggcgcggcctggggtggggcggggtcgcgc

SEQ ID NO: 103 - DNA, 630 bp, Homo sapiens
  source 1..630: mol_type = other DNA
tgccattgcactccagccttcaaacttttgctcagcagaacacatcaatgggccgtcccggccggggcaggcggtcccagcacccgtgctgagctccccggcatacggcacgacggggccgcgccggctcttcggcgacagcaaggccggttgcaccgcgcacccaggcttcgtacccagctcccaggtggggaccgcgcccccgcggcgcccgcgccccgcgccccgcgccccgctccccactccggccctgggccggcgccgcagcggcccggaaggtacctgcttagagggaagggccccgactggcgctgccgcggccccggtggagagggcggctgggtcggagcggtgccgcggcccggggaggcggccaggcggcgcctcagcacccggaccccaggggcgtgcgggacccggctctcgtggacttcctcggcagccgccgcttcctcagacggaactcggggggcgccccttccgccgccccaggccgccttgcaccccaagctgctgcggcagtgacagggaagaagcagacccggccacctctgcccaacaaccaagcccagccctgggccagggcctctgcgcgtgcgcgaccccgccccaccccaggccgcgcctgcg

SEQ ID NO: 104 - DNA, 503 bp, Homo sapiens
  source 1..503: mol_type = other DNA
ccgacgccggaccctggcctcctgggcccaccgacggccccctcccgcccgcaacgtgggggacagctgaggccacttcccgggcgggccaccccaaagcggcatgtcgcggggcagcacagcctgcgacaagcgcgcaaagctccccagcgggaccgcagcacgggcaggcctgggagtccctcgcgctgctcaaggccgctaaccggcaccgctctgcggcacacttcccgccctcctgcaggctgttagccaggggatgcaaggggaggggcccctcacggacgtcccgcccgcccctcacctcgctcaaacatggcggccacaggtgcaccaagggaagcgccgttcacgaacatggccgtctcaggcctgccacgggcgtgggaaacatagatgaacatggccggccacaggccgacttcctgctccagtgtcccaccactggcccaaggcctgtgaccttcgcccgccgcttacgaaagagtgtgctgacgtcggac

SEQ ID NO: 105 - DNA, 719 bp, Homo sapiens
  source 1..719: mol_type = other DNA
tcaaacttttgctcagcagaacacatcaatgggccgtcccggccggggcaggcggtcccagcacccgtgctgagctccccggcatacggcacgacggggccgcgccggctcttcggcgacagcaaggccggttgcaccgcgcacccaggcttcgtacccagctcccaggtggggaccgcgcccccgcggcgcccgcgccccgcgccccgcgccccgctccccactccggccctgggccggcgccgcagcggcccggaaggtacctgcttagagggaagggccccgactggcgctgccgcggccccggtggagagggcggctgggtcggagcggtgccgcggcccggggaggcggccaggcggcgcctcagcacccggaccccaggggcgtgcgggacccggctctcgtggacttcctcggcagccgccgcttcctcagacggaactcggggggcgccccttccgccgccccaggccgccttgcaccccaagctgctgcggcagtgacagggaagaagcagacccggccacctctgcccaacaaccaagcccagccctgggccagggcctctgcgcgtgcgcgaccccgccccaccccaggccgcgcctgcgcacaaggggagggctccgctactctggccctcagggtgtgtagtttccggggccacggcacctgggcacaccaggtggcgtcgcgccgggcgacgcctgcgcacaaga

SEQ ID NO: 106 - DNA, 676 bp, Homo sapiens
  source 1..676: mol_type = other DNA
atctcgggcagcgaggtgcctgcaagcccgggggcgggcgggagcagcctgcacgcgtggggaagggcacgcgggagcgggtggcgccttccgggccgggtcggccgggaggttcgacgcccgaaggccgcagagccaccgcggggaactgacagccggagccggagctggcggaggggcgcggccaggcggggtccgcggactccggcctgggaaggatgcgcgcggactagggcgcggggagccaaggcccagaacatcggtaccgcgctcccttcagccgaggggctgcagagaggggccccgaccccaagtgtcccgacgaggggggacgcctgcgactaacgcggggacagcccccgccgcgcgccaccgccgcaccccaggcaccgggcccccacgcagggacggcgtggaccaccctacccccgaaccccgaggctctggccaacactgaggccccctgtgcctcgaggccgcgtccaacctcccccgcggcgccggcccacatggttccgcccgccgcgggccgcgttacctaggagaccgacccgccgcggccgcgccggaggccacggagcccacgacggacccagaggcccggcggccggtgctcaacggagccacaagcctgaggaccgaggactggccgaggggcgcgccccgtccgctgcca

SEQ ID NO: 107 - DNA, 910 bp, Homo sapiens
  source 1..910: mol_type = other DNA
gggcgcccccgtaaccgggtcggaacctcgaacggcttcgcgtgccatccggttaccctggcaacaccatccggcggcgcccggcggtcccctcgagcctttcgcaaggtggggaccgggacgcgaccggggatggggaagggggctgcaggaggccccgcctgcgctgtcgcccctgctgggcacagcgccccccaccacccgcggcgaccccggcccccgcaaggtggggcggcgagcaggagccggggccaggccaggggctcgagctcccgttcgaggggcggtgagccgggccgggcgggcggagttgggaccggctccgggaggcgggggcgagcgcgcggctgagcagcgcgggcggctctgcggcgggcgcggtgggcgcgggcggcggggccccgggatccccgcgcgcctcctccgcgcggcgccgccgccgcgcgtccccacgccccgcgctccacggcgccctcgccccgcgcgcctctcgtgcccgcctcctgccagtctccgggccgcggccgtctgcagagcgagcgctcagacggagcccccgggcaacttgagtggcgccgatcggcggcggagcctctggcagagccccccgacccggcagcgcggaggggactcgcgtccgtccgcgtcgcgtcaccccaaaccctaagcagcgccgccccatcggcgcggagctccggctggaggcaagagccgcgcgccgggagacacgcaccgtgagcggcagcgccgccggcctccctcctcgccgccccggagggcgaagccgcggctccccagccctttgctgcgccgcgacagcgccggaacacgccccgcctcgctgccgccttcgctgtgccgccggcggagggggccgcgagccccgcgccccggccggaggatgtgcgcc

SEQ ID NO: 108 - DNA, 344 bp, Homo sapiens
  source 1..344: mol_type = other DNA
acagcagcgccccggtggggctgcgcagagggagacgggaccgcggcgcctgccgcagcgcgggcctcgcggatacccgccgccgccgtcccggagcagcttggtggaaagcgcgccccgccggggtctccccggtactcacctgggggctccagctccggatcctgtgccccgcgccggatccccgctagctcctgcaggttccgccagcagcatcttcacctcgtgggacgcccggggccacgggatgggcccgccgccgcaccgattggctggcgctcgcaaagcgcagccctcgacttgggctctgattggctccgcggccctgacggcgacagtgacgg

SEQ ID NO: 109 - DNA, 496 bp, Homo sapiens
  source 1..496: mol_type = other DNA
acacacccctggtgtaggcttcaggagagggggtgccagcctccctcctggaatcacacacacgggtgtggcctgggaccagggactcaacacggtgcaggtggctggcaccatgggagatgggggctgtgcccagagtgagtcaccagagagcctggccccaggctcagcagctggcgtaggagggaggaggggcctccccggagggagaaaaaccccgcagagggtgctcttacctctggcccggggctgtcccctcaaggcggctgccccctctgtgtcctggcacaaagttgccctgggcttctcagcagtgcacagctcagagcacactttagagtcagccagccctgagtccagggctctggggggcagcagtaccccttcccaggggggcagccccggcacacagccgatcccggcacacagccgatcccggcacacagccgatcccggcacacagccgatcccggcacacagccgatcccggcacaca

SEQ ID NO: 110 - DNA, 645 bp, Homo sapiens
  source 1..645: mol_type = other DNA
gggctgtgcccagagtgagtcaccagagagcctggccccaggctcagcagctggcgtaggagggaggaggggcctccccggagggagaaaaaccccgcagagggtgctcttacctctggcccggggctgtcccctcaaggcggctgccccctctgtgtcctggcacaaagttgccctgggcttctcagcagtgcacagctcagagcacactttagagtcagccagccctgagtccagggctctggggggcagcagtaccccttcccaggggggcagccccggcacacagccgatcccggcacacagccgatcccggcacacagccgatcccggcacacagccgatcccggcacacagccgatcccggcacacagccgatcccggcacactgctggcagcagtgaggggagctctcaccagaaccctctgccctgagaaaggggctcctgggccctactctggaggggccgcttggggacaggcccgggctgtctcctcacagcccatccaggaaggtcggagatgtcgggccctcccacctgggtcacgcgctaggcatgcctgagagcaaaggccacgccccgacaccccacggggccctggcgcgccaggcttctcagccctgcggcggcagtgcatagctct

SEQ ID NO: 111 - DNA, 568 bp, Homo sapiens
  source 1..568: mol_type = other DNA
ccttccgcaccacccctaggggtctgcatgggtttcagctgcacccagcctgggcctgcgcctgctgtaaatcagacccacagtgggaacgtgccgaggccggagccgggagcggggtgggtcccggcgcctgtgaaccgagtgggggagcgggccgcgcgctgccctgaagaccctgcctccgcgcccttgggggctcggggcccagcgccttcgcaggcgagcggcggcggctggctctgcccggggtgcgcgggggcggtgtttcctcgcctccccctgcgcccgggctcgccaagccccgactgcccgctcggccgtcgggtccgcgggcgcgcggacgcctcgacggctccccctgccggggcgccccccggtccccaccctcacccggcggctcaggactagtcctggggttgccacagcaaccagagggcatgtgtgccgcccccccgccgtgccgccgtgcctctggcgctgccgccgccaccctcggccggctgcgggactcgggctgcggggcgcggtgggaggagcgcccgggcggggtgggggggcaggcggccgc

SEQ ID NO: 112 - DNA, 432 bp, Homo sapiens
  source 1..432: mol_type = other DNA
gccgtgcgtctggggcagcgctgaggctctgagagggtctcactccgcctcccaagcgctggaaagtcggtggaggggcgtccgctgctctctggcgcccccaattggccgccgaggaaatgaggcggcgtctgtagcccaggctggagtgcagtggcgcgatctcgcagccaaggtcctccggccccgctctgcgcggcgctctggtcttcatgccgggcaggggccagtccgatccttgcacccttgcctggcaccgtccctgggcgtcctggcctctcctccccgcgggctggaggtggagtggccgggccagcgcggaggtcggttcggccccgccgcgcctcaaggcagcagccaccctggggaaggtggatgccggaagaggcgtcgcctgcgggtcacccagaggacacccggcggggaattccg

SEQ ID NO: 113 - DNA, 474 bp, Homo sapiens
  source 1..474: mol_type = other DNA
agctagacccatcagcacagtctcttctggtgattggacattcaggatcctggaatataattcaagtagcccagttcaagggacctgtgggcctggggatgaggacctttgcttctttcaggagaccgctggaattggaatctgcattttccagatctctggttggcactgggagacagcccctgggcatgagcttccaagctggggcttcctggctacaaggaattttcctagattcgattcccactagctggtaatttacagtatagtgaatttccttatttcttttttcttcccaagactttcaaaaagtaaagccaacccctttatttatcccctccgatcgttcgcagtgggacagcccgccgggcctccttccttccccagaaaccctccaggcctgggagaggacgcgttttgcattcaggaaaaaccaatcgctcctggaccctgcgtgccttgcgcgctgcgggc

SEQ ID NO: 114 - DNA, 448 bp, Homo sapiens
  source 1..448: mol_type = other DNA
gcgggcgcctgtagtcccagctactcggggcagatcgcaccactgcactccagcctggggcagagggagggcaggaggtcgccgcacttggccccgcgccccagggcgtctggttttcggggacgacgcagggccggcgagatggagtgtcactctgtcacccaggctggagtgcagtgacacaatctcggctcactcagcctcaccaagtagctggggagtttggacagacgcgggcggcgacttctcccaccacttcccggcccccgcccggcacagagtctggctcagagcccggatgtccccgaggggcggggaggggcgggcgggcggggcgctcccgccaaattccggacagcaacagggcgggccggagttctcgcgagaactggcaggcggcgcgcagctgcgggcagctgcccttcccgggccggcatcggcggcacag

SEQ ID NO: 115 - DNA, 481 bp, Homo sapiens
  source 1..481: mol_type = other DNA
cggggggggcgtgccggagatgtccaggcctcgcgctgcgcgtccctccctgggcgacggccaggccgggccccgtggaacacatcggctgcagcgcgggcggagaccggcgtgggggcggaagccggggcgcagccagagcccgcaatggggcctcggggccgcgcggcctcattggcccggagctgtgacgtcacgccccggccccgcccgcatgtcttgcggagggaggcctcatggcccgggtgggtcccaggctagttgcacctgcagttggccctgcagtgggccctgcactgcaggagacacttcccagcaggagactgggtcccgtcggcactgtggggagcccagcctggggtctggccctagtggccgctcctcactgacccagagccagggaacccggtgtccacgccctgtcgtgtgtggggacggtgagacctgccctgcagacctgaggcttccccaacattttagg

SEQ ID NO: 116 - DNA, 687 bp, Homo sapiens
  source 1..687: mol_type = other DNA
aggcaggcacgatcctcaggaggcgtcctctccagggcccccatcaagaagcaggaggctttccgcctgcatggggccagctgaggctgtcagtctgtgggtgacagcctgtaaggcttcaggcgctgggctgcagaccctggcctctcccggctgggcggtggtgctcagagtttcaggcggggaccactcggcagcccggtggcccggaccccccaggcccggggagcagcgtgaatccgtaactggcccaaccttgccccctggattcccggttcctagaagccgctcttagatgcggcttcctccaggaaggtctccctgagccccagccctggccccaggtcagctccctctggcccccgggcccccagagctccgggcctgggtcttgccccggcgtccgaaggcggcgtccggagtgtgcaccgagccgagctgggagccaggggcgcggcgctgtcaggaggcgccaccagcccagggaggctcgggccggccgcgggcggacgcggggacacgggtgggctgcgtacggacggactgacggaaggacggacgggctgacagaccgacagacggccgcgcctctgagcgggcgggggcggggcgggccgaggggcggtgcggaggccccggcggagacatgcgccctgctccgccccccgcccccggccgcccggcgca

SEQ ID NO: 117 - DNA, 514 bp, Homo sapiens
  source 1..514: mol_type = other DNA
gcagcctggttgaggctgtgcggcctgcaaagcttgggggaggttgtggtgataacacatcccgcctcctgctttcttcctgacacccagtagaaggggaggcacagggcccacaggtggcagccggcagcctaagagcccggagaggggaggctggaccgcctgtccactttgcttgccagggagctggcccttgggacaggctttagatgccagctccatcagcaggatgcaggcttggacctgctggagtcctcccctgtctacatttcagggagctctagaaggcggcggtcttgtgccctgtcagagaaggcagagcctcatagccgcttccctgaggccgctcagcagcggcccctctgccttcctgatctcctggcatggcagccagaagagctcacagaattacttcttctgtaattatttataaagcaaggtttaggcagcctcttcctggccagattgggcagctcaggaagctgggggtggggggtgctccccaccaagcccg

SEQ ID NO: 118 - DNA, 283 bp, Homo sapiens
  source 1..283: mol_type = other DNA
agctgggaaccaccatgcctggttggtgggccaggctggtgtcaatggattcacaaggctgtgcaatacatggaatcagatggctcagataatatctcagtggacaccgggttgtttccatctatgaacatttctagacatctcgttttgtcaattaaaatgatttttaatttactagatgggaaatagcaccttgtagttgtttaactttgagattatttactcataaggctaagctatctcctagcacacctgggaccacaaagggcacagtattggggcc

SEQ ID NO: 119 - DNA, 222 bp, Homo sapiens
  source 1..222: mol_type = other DNA
aaaaagattttttgcgatgtcgtactgggaaatccgggatttgctgcagaacatttgatgtttaccacaaactgcctctaactcgcattttcctcggccctcctggagcttgagggccactgtcagaggagggccaggcacctgcgagcctctgcccaggtggaactccgcccaggtggaactcattccgagtcatggattcctccggaagccgaggaggcg

SEQ ID NO: 120 - DNA, 644 bp, Homo sapiens
  source 1..644: mol_type = other DNA
atttaaagatgtaagtacaaatctatgtgcattgtagaatagactccattcaagggcacatcttgtgcagtaaaacacgcatgtttcagtggcgctcagcgctgctgcaggcggcggtgtagatagtcgccggcctttcctcctccccacctcgtttgtgctgcggaagcaaaggcccgttccattccccgccgatcttagggcgggggtgggaatcaggccccactgccaggagcccgggccgcgccttccgctctgacctcatccggccgcccaggcactgggcgcggcagcgaatcggcggcgcgggcggccgggaacgcccagccgcgcggagagtgagggcccaagtccgccctgctccgccacttaggccgccccagacgcttccctcggggctgccaccgggtcgggcgcggctgccgcggctagcgggccttccccgcaccggcgcggcccaaccgccaccgaaccttctggaagcggcggctgcctgggcccccacgccgccagaatcgtacgcccgcgcgagctctctgcagccttggcggcctgggaggcggggctcggggtggggccggcgcgggggcggggtcggcgcggggaggccgcgttcgattgcccccggcgcgcaggccccgcat

SEQ ID NO: 121 - DNA, 417 bp, Homo sapiens
  source 1..417: mol_type = other DNA
cagtcccagctagctgagattgcaccactgcactccagcctgggcattcttagtataaaagtcttgaaatcacagagttctctacctagctgagtgtaaatgggtttaatttaaagatgtaagtacaaatctatgtgcattgtagaaatagactccattcaagggcacatcttgtgcagtaaaacacgcatgtttcagtggcgctcagcgctgctgcaggcggcggtgtagatagtcgccggcctttcctcctccccacctcgtttgtgctgcggaagcaaaggcccgttccattccccgccgatcttagggcgggggtgggaatcaggccccactgccaggagcccgggccgcgccttccgctctgacctcatccggccgcccaggcactgggcgcggcagcgaatcggcggcgcg

SEQ ID NO: 122 - DNA, 741 bp, Homo sapiens
  source 1..741: mol_type = other DNA
cgggcgtggccgttgccccgccagccggtcgggggaggggagcccggagcagatgggcgggggacgccagccagtttgccgcagcaacggccacgcggcgcgaaggcggtcctgggcgggccactggggcccgcacccaaaactgtcctgcccgcgcgtgactgtcttgcgggcgagagacccctagctccgagggctattccgtttccccacccaaagcctggagtggggtaaccaaaagaaagccgccgaagggttctacgggctccttagagccgggcgtccagcgactggggcccttgtccaggctcggcctgttcccagcgtcgaggactggagcaagtcacaaagcagctgggggtgcaagtccctcccgctgcctcatgggagctcccgtaaccgctgggtcccctgctgcggcccagggcggggctcagagaagagaggagggaccgtagctccagtcaggcaaggcctggccccacctggccctcctgccctcggggtcacgcagcgaaggcccccgatggcgcctttaccactctcccgcaggtgctcggggaaaactgggggccgccaccccgcggtagaggacgcaaaggcggggagcgggatccccgggggcgtcgcggtctcccctcccggctccaccctgcgcaggaacaaaggcaggaggtgggaccagcgggcggccggactccgcggggcggggcggggcgggcgagccgctcccttaaagct

SEQ ID NO: 123 - DNA, 831 bp, Homo sapiens
  source 1..831: mol_type = other DNA
gggtgggctgtggtgcccagcctcctttcagatccggtcctggaggacacgggcgtctgactctgctgcccctcccttctggctcccatcacccaggtgcgcttccagggagcacccaggctcgccagggcatctgccccagactggcaagccagggagcacttgagggcctctggaaggagctccgtgcagggttcagctgggccaggaggtgccaaaccccacccatccttgagccccgggggactctgggccaggactctgtcctgaggaggaagcctcagtgcccctggcgaaccgcgcggacccacctgcactctgcagccgccctgcgacagcagccactgcaggcaggcgaggtggccggtggcggaggcgtcgtgggccggtgtggcgccgttgcgggcgcgggccgcggcggggagggcggcttcctccaccaggaagcgcagacagtgcagcttcccagcgcgggccgcgtggtgcacgggcagcgcgtccagcgggtcgcgcagcgagggccccaggaggcctgcggcgtgcagcgacctcagcacgtccagctcgccctgccgcgccgcctgcagcgcctgctccagggccatggtgccgcgtgcggcgccgcgactccgcactcagcgccttccccaggacgccatgcacgtgttcttgcgggccagaggagcccgcggtgcggccgtcggggatctgcgggccgggaggcggagcggctgtgggcctggcctccgctccgcgctgcctggcgctccgctccgccgcgctctggggccggagcccgcggacgccggcttaagactcgggcccgccccc

SEQ ID NO: 124 - DNA, 411 bp, Homo sapiens
  source 1..411: mol_type = other DNA
agcccggggtggggccaagcccccacgggactccagagggggtgggagcctgcagggcactttcctgagcccctgcaggggtctcagccgtgtggctggaagcccctccacaccgacagcggctgcgggcggcctgaggccatggtccccgctggaacctcagggaccctggaaggcagggctctttgcccggcgacccagagcccttcagggacgtggcagggctgctcctgccgtcgccggcgcctggaaccgcagttagcgggcactgggcactggggtctcaactgttacgtgaggcaaattaggagagaagcccctgggcaccttgccccagtcgcacgagtgtccccgcgtcgcggcgggggcgggcggggaactcggggggggcgggcccgagtcttaagccgg

SEQ ID NO: 125 - DNA, 670 bp, Homo sapiens
  source 1..670: mol_type = other DNA
gccccctcccggctgtgtgcgtccctccgggctgtgtgcgcccctcccggctgtgtgcgcccctccccactgtgtgcgcccctcccggctatgtgcgtccatctcggccgtgtgcgtgctgggccgcaggcgccagggccggggcccggacgctccacaaagggctctttgtgtcgccgcggcgccccccgcgcgggtgcctgaccgggggcgggagcagggtcgtggcgtccgaacctccgggctgcagggggcgcggagcgggcgggctggcgagtggggcagaggacagcccccacccggtcactcaggccggccgcctcactctccctcactgagctgggcctagttgggggcagctgcgatggggtgggaagccacgctgtcacccgaccccgccttacggcccctgaaatccgaggcttgagcgcgcgcgacccggagccgggggccaaatgagaggcctcctctgcccacagtcagccctctcccctctcgggcggggatgaaggtgggggctcagctcccagcagccgcggccaggtgtggcaaagtagttggcgccccctgtggcatccgcgacggctgggggggttcagcctgggattggcgggccccgggtgatgtcaggccgtcggagcccataggcggtaacgcaggtgtcgggtcc

SEQ ID NO: 126 - DNA, 753 bp, Homo sapiens
  source 1..753: mol_type = other DNA
gtggggcagaggacagcccccacccggtcactcaggccggccgcctcactctccctcactgagctgggcctagttgggggcagctgcgatggggtgggaagccacgctgtcacccgaccccgccttacggcccctgaaatccgaggcttgagcgcgcgcgacccggagccgggggccaaatgagaggcctcctctgcccacagtcagccctctcccctctcgggcggggatgaaggtgggggctcagctcccagcagccgcggccaggtgtggcaaagtagttggcgccccctgtggcatccgcgacggctgggggggttcagcctgggattggcgggccccgggtgatgtcaggccgtcggagcccataggcggtaacgcaggtgtcgggtcctgccgcccccacagccaggtgcacagcgggggccaccagcaccgtggcaggtaggagcagcccccggacgggcaaccggggtccgtggcaagccggagcctccgagagcacaggctctggagggggctccctccggccccggacccccgaaagacagggctccgcggagccctggggacccgcagtccttcgggcctagtgagggctaagctgggaggtgccccttcgccagctccccctggcgtcggggctgggccaccccgcccctgggcccgcctcttctggcctcagtgggggcccctgtgccccttggccggtgcccagaacccctccctgtaaggcgggcggagcctgccctc

SEQ ID NO: 127 - DNA, 520 bp, Homo sapiens
  source 1..520: mol_type = other DNA
ctttgctttggggcccagtgactcggggcacttgagttcagggtgggccacggatgaggggtgtggggtgccaccagaccaacagcctctccccaggtgccccccggggattcagggctgaatctgcccagttcccacactcaggccagcccgaaggtgggtcctccatgggggtccagtggtgtgatgtcggctcactgcaacctgccccagccactctagtagctggaactgcaggtgtgcacatagaattacaggcctgagctacttttggcccaacctcctccatggctggggacgcggaggccgagagagaagtcacttgccctggctctaccgagatgcagctctatcctgtgcccctggtcgcagcagggctgccgcctaatgagctcaggtctaggccgagcagagggggcacctggtcggactcggttgggctcgggcggccccgcctccccccgcccgccaggcgggcccttctcgacggcgcggggcgggccctgcgggcgcggggctg

SEQ ID NO: 128 - DNA, 466 bp, Homo sapiens
  source 1..466: mol_type = other DNA
aaggcaccagttgtgcccatttgttggtgccacatgggttccactgtgccatggccccttcaggcatggggcaggctgtgcacacggtgacttcaaagtcaccagtcttctttttaatgtaaacttgtattgagataagtcatcaacgtacatctcagtgaaagagaatcatcttcctcttcattttaattttacttgaagccaggggaggctggtgccacagtccctggccctgaccctgccactgcagatggatgtgtactgtcatcaggccacccctgctcgtggacaagattgtgtgccgggagctacgggaccctggtaaggagccctggtcccctgttcctggtcagggcacgttccaggccagtggccaggccttgtgccgtggctctgcagaaccagctgcaacagctgcgtgcacaggagcccccaggcagtcagcagcccctgcagagcctggaag

SEQ ID NO: 129 - DNA, 539 bp, Homo sapiens
  source 1..539: mol_type = other DNA
ggtgtccctggggctcaggctctcgggcgagccggaccaaggaccctgaggggagtgtgccccatcctggccttcccctgggaaggtacccttctggctgggaggtgaggtggggaccacagcagagtgggcacccccagggctgggcggggatcgagtcacccaggggaggggctccacagtctccaaggtgggggggggtgtcaccagcgccccctgcctccagccctctggcccggggccgcgcagaggcgcagaggtgggggtaccccgggcccggaggcggggctgtgggggtcccccggccgggcagaggagtccccgggtctgggcagaggcggggaggcggggggtcgcccgggcggggttcccgggcggggaggcggggatccccggggctgggggcgagggcccgggcgggagggaggtgtccgccttcctggggggctgggggctgttccgggcccggccctccccggggtccccgcgctcggcgggggcgggcgcggccgcacaatggcaggaagcggggctccgcg

SEQ ID NO: 130 - DNA, 508 bp, Homo sapiens
  source 1..508: mol_type = other DNA
ccccagggaatggccaggtttgggccatctctggaagtgggatccctggcccagccaggagctgccctagtataggcccagccccttggtggacctgaactccacctcctcgagtttctaaactcccgctgctgggagcttttccgaaaagcgggctgtttctggggcaccgcggaggccgcagagaacctggctcagggcgattccggggcgggctaggcctgcgggtctctcctgtcgcgggccctggtcccccctagcccccttccgggatgggcgagaagttaatgaccagggactttgaactttttggagatctgcaaagggctggcccctcggggacagtgacgccccctgagcccggatcctggccaccgcccggcctccagccacctccctggctccggcgcggggcccttcctgggacccctcctctccccggtcccagccgggcggcgccgttggtacatcccggccggtccaggtggtagcgcccgcgcggctaccg

SEQ ID NO: 131 - DNA, 658 bp, Homo sapiens
  source 1..658: mol_type = other DNA
tcacctgtgagtcccagggccggacccagcccatgtaaggagtccatgcagggaggctccagctgagaggccttccagtgaaggggtcagggaagtccacccttagcctttgggagagggacccgcaatgcctcctggtgccagtgtgggctgggggtccagaggcaggctcaggagcactgagcccccgcagactcctttgtgaaagtttcctgaaaatgtgttgagctgtgctcacaggacaggtgcacttctctgtccgcgtttgcacttcaataaagtttaaaactgaaagagccgtggcaggcgagtctctcccggtgacagccctcaccctgcgcggggcagcctccgtgttgccatggaaactgacctcggagacagggctggggtgggggctctgcgtggctcccggcctgcattcctgcggacaggcaccctccgcgtggatggcaccctccaggacagagccgtgcgcgcttcctgagccgccccggtgcccgccctccgggaggtggaggcagcctccggaccgcagcgcgcaggggccggggagccggggagggaggggtgacaccgtcggcgccgaggcccggccgcgctcctgtccccccgccccccgcccccgaggcggggccgccgcggctcctccccgccc

SEQ ID NO: 132 - DNA, 282 bp, Homo sapiens
  source 1..282: mol_type = other DNA
acttgaagctcaagtgggagtttaattttcctgtcttggttcatatgtaagtaaagaggggatgtttgctcctggaagagttcaagttttaaaaaactaaaatgaccttgtcttcccacacctcatagggttgggcctagcagagagagtggttttcagaaagaccttgctaagttaagtattcccaaggctttgccaaagtcttgcgaatcagcagagttcagctgggcagacatgtgctgggctgggaagccaagggtagctatggtaaccggccctgag

SEQ ID NO: 133 - DNA, 496 bp, Homo sapiens
  source 1..496: mol_type = other DNA
ctgcaggccgaccaggcgagccgtgcagagcagcatgctggccagatgcccgcgcctggcatggccaaggagtggcctctaaggaggccagttgcttaaatagaaggcagctgccggatgcttcctaacttcacgggcctgcggtcccactcaggaactgaaccaggtggcacccagtgacccttctcagtttactaagacattaagattctgagcaaatcaaatgcatgcaaaccgaaggtatgcaaatagacatgttttgtttactaaagctttttctgcaggagaaaaaaaatatcccggtgtctctctccggccggctggggtagggaatttgcgtaacgtaaatggagtcctccgtggagcccctcgaccagatcggctggaacctcctagtgtgcttccggaggttgccggcagagggcgccggcggctcggaggcccctcttttcggcagctgggagggcagcggggcggaccgacgggatctcgcgag

SEQ ID NO: 134 - DNA, 432 bp, Homo sapiens
  source 1..432: mol_type = other DNA
ccaagttgattggggactctgaccagtggctttgagcagataatttcttcccagaactggctttcagctgcctttcacacagctccatggaagggaggaggccggcagcttcctaagaacaagaacttgcttttctccctttagagctcagggctgtgaaactctgtcctgtggcgccagcctgggaggccaaggggtacagcccccaggatgcttggggtcccttaattctttttattgaaattgaaaatcccagcactttgggatatcaaggctgttgtcccagccactcagctgcactccagtctgggtgacagagcaagactctgtctcaaaaataataataataatacaggcagaagaatatatatatatatattatacttacacagcttcgtggatttttctaaaccaaacacagctttggagggt

SEQ ID NO: 135 - DNA, 413 bp, Homo sapiens
  source 1..413: mol_type = other DNA
ttgtgatgatcagctcagcggcccagctgcttatctgtctaacttggctggtggtgtggaccccactgccagctacctgggtaaggacttgacgacggcaagtacctgcctgcggccaacatgatggctgggctgagcagcctgagcagcggcttcggctccattcaggactacacgaggcgctgcggctccacctgaccagtgggtcagcaggcacggctggcagccttctctgccctgagggtcgaaggtcgagcaggccgcgcctgggagagcctagaccaggctccgggctgcactccggaggcgggcccagccaagaacagggcgaggcgtcgtccccgcatcccattggccgttctctgcggggccccgccctcgggggccggagctagaagctctacgcttccgag

SEQ ID NO: 136 - DNA, 581 bp, Homo sapiens
  source 1..581: mol_type = other DNA
tgacggcgggactagcagctgcttcagggaggcccgggagcccctagggcgggcagccccggagcctgcagctgcgacgcagactcgtaacgcctgtgtgattgagtcagaagctccttcaggaacacaggagtggggccgactcctggaatccggccccgggtcgcttctttatacgcgttcttgctttggtccagaaaaaagcgacccagccgccccgggacctgggccggcgcccttgggaagtagctcgcctctcccgggttgggttcagcagccgggccgggtgggtcgtgggcaaccccgggaggcccccggtcccggcgcgcggcgaggccgccctcggacctggcacttgtcactcgctgtccccggcccgggcgtcagcggggagacgcagccggccgcggacagcggtgactcagcctgcggagccgggggcgggcgccgcgcgggggacaggcgagcccgcgctcgcggggggcggtggcgcccggcacagaggggttaagggggcggtgcagacgtctccccgcccatcccgcccctcgagagccgcggcgccccgccctatttatagc

SEQ ID NO: 137 - DNA, 446 bp, Homo sapiens
  source 1..446: mol_type = other DNA
aatgagtaatctgatttttcgctttatagctcaatacatcattattcttcaaggctacatagtaagactgaaatatgatgtttaaaaatccctgttattgggaatacagaaaaaccgttcaactatggaaacattattgatttaatcactggacttacgcaagatgggtaagctgacccaggggacgggagtcttgtcacaaagcctgtgcaaggaagctattggccctgctcctgggcccaggaatgctgccgctgccttgaaacaggcggcccgaaagcctgcggttctcatttcgcagctcccatgcgcgtggcctgctctgggacccacgtgggcgggcgccttcctcaggaatgcgttcttttctaaaactgagcaaagcctaccttccactgaggaaaaaatggcctccaagggagggctctttttctgacggcgggact

SEQ ID NO: 138 - DNA, 606 bp, Homo sapiens
  source 1..606: mol_type = other DNA
cgcgtctccgcctcgccctgcgggccggaggatattccaacgctggcccggtgtttttaatgcacgaacccggcgaagagcccggtccagtcccggccccgcgggcccggagcagggagccgcacgaagcccgcagccgctgagcccggcctggagcgggggccgggcggcgactccgccctcagcggggagcggggagcggggagcgatgcccggggcggccgcgacgtcagcgtccccgcccctgccgcccctactcccggccaggcctcggggacccccgccccacaaaggggcgcgaaccccaacgaggaagggtaggtgccagccgccgccgcccttcgcaacccgggccgtcagccccgcccccaccgccgcagcgactcccgcccccgcgcccgccgacactgcccctccccccgcggccgagccggcgcgggcccccgcacctcccccgctcgcgcggcctcgagtccagaagacccgcctccacacaccggggccgccgccgcggagcctcatgggggttggagtgtattggcggggccttggactaccactcccacaaggcaccgcgcccgcccccgcgacgccccctcgcgctgg

SEQ ID NO: 139 - DNA, 372 bp, Homo sapiens
  source 1..372: mol_type = other DNA
cagtgtcccaaggcctctgaggggccctgtctagagaccctcttgtgaggcaggccacagtgaatgtgggtttgcctcattggcacccgccccccccactgtggttaaagcacaccagagcccgtctgccttgtgccacacgaatttcaaggattcatgttcgttatgtcattaaattgatgtcatttcttacttcaaataagttaaagacacgtctctgtgacatttttgtttcagctcagagcacactgagccattccagtgatgtatgtaattgatcactttattaactggcaaaaagaagccttgttgaggtgataaaccgaacttcattacatcctgctcttctgaagagctgaaagcggaggctct

SEQ ID NO: 140 - DNA, 331 bp, Homo sapiens
  source 1..331: mol_type = other DNA
aattttaaagtttatgtgtataaagcgaagctgtttctgtgaaactgtatattttgtaaataaatatattgctactcatgattacatcaagtctctgggagtgtgcacttagcaggatggaaaatgcccacggtgttaaggtaccttgctggtgaattccttagaaacaaaccacaagattgaggattagctcaagcccctagctggaattacaggtgctgatctcaggtgatccgcccctataggctgctttgagaaagctgcagcctcggagtttctgcaaggccttaagggcagtgagctgtctggcctctgaactgacaccgacgtc

SEQ ID NO: 141 - DNA, 322 bp, Homo sapiens
  source 1..322: mol_type = other DNA
agattgaggattagctcaagcccctagctggaattacaggtgctgatctcaggtgatccgcccctataggctgctttgagaaagctgcagcctcggagtttctgcaaggccttaagggcagtgagctgtctggcctctgaactgacaccgacgtcccaaggctaggagttggggtttcgggcctgaattggggcccggagcacccctttacgtggcgccccgggtcccgtccgaccctggggagacgcgggtggctgggatggcaggatgagcgcgccctggaggcgagccaggcccgtcaccacctcccagcggccccgcc

SEQ ID NO: 142 - DNA, 520 bp, Homo sapiens
  source 1..520: mol_type = other DNA
caggtacacatgcctgccagagacaattatatcaggaaccaaatagttattgctttgtcatttaagcagcagtccggatgcaccctgcactgggggcacctcgcgcttcttgtctcccagaggatgacaatctcctggaggtgacttcatgggaggccgaggatctcctgagttcaggagcctcagaccagcctggcgcctggagtcccagctactcgggaggctgaggcatcagtgagccgggattgcgaaaaaagcaaagtttccctttctagtacggctggatctcaggcccccgaggacgcagccacgccgcgtgccacgcgtccattgggagcacgaagagacacccgcgtggtcaccccgccagggctgcctaggcgccgcgtcccgccctaggccgcgcgggggcgcaaagcgcaggcgcactcccgccgggcgcggacggctccgggccgccaggggccgctgtggcgcagccgggctggcccgcgctgtccctgacgcggaggcccctctt

SEQ ID NO: 143 - DNA, 737 bp, Homo sapiens
  source 1..737: mol_type = other DNA
tgggaaactcggctgcccagcgctccacccgggcggccggggctggcgcttctgctttcggccggcggcctcatcctgggacaggcaaccatgagtcatccgctccgcgggtcacatgggcaacgtgaccaaaataaagtttcggtattttcaccgggggcgggcacaggaggcgggcgcaggcgggcggcgccggggccgtggggacgcggcgccgagggggcggggcctggcgggaggctcgcccctcccccacggccggcagcgacgcccggactcctaggcagtcggactccagggcgcggcacccctgcggacctcagccccgaggccccccgcgtccggctccccaccggcagcggcggcgggctgcgggatcccggagatcccggcgcgtcccccacagccaccgggaccccacgcgccagcagcggcttccccgggaacgtccttcagccccgggagcacgcgggaaaagccccagcgtgccaatgagggagcgccttcctcatgacggtcacgctcgggggcggggcttcccttcgccgctcccgagttcctcggcctcgaggaaatattccgtgtcgggcccgtcctgattggacagttctttcgggttctggccactatgggtggtgaccagccaatgggccggatggataggacgctcctcccggagagtagtatgagtggcagccgcacggcccaacgggagctgtgcgtgggccgcggggcgg

SEQ ID NO: 144 - DNA, 395 bp, Homo sapiens
  source 1..395: mol_type = other DNA
cccttttcaaagtattctatttagagttggaaaaaacagcatagtatttaagtactgtatttttcacttctctaagagacccaccaatgacctaggtaggaatatttcagtaacaaatatatacaaggtacagccttgatgccaaggctctcgtaagcagattataatatgatctgcagtgacaaatatttgtgtcaccgatgaactactttagagaaacatggtgccctcaggatcactaggttactcccacgtccccaagcgccagcgcggacggcggtgcggacagggagcgcgtttcagagcccggaccgccctgggacccctgtggccctcaagttcccaagtgacctcgtccggggaggggacgtctcgctctgaccccgccctggacg

SEQ ID NO: 145 - DNA, 556 bp, Homo sapiens
  source 1..556: mol_type = other DNA
aaataaaaaatctgtttctaaaaatcgggtgggctttcaccccactcaccgaaagagttagcggaggatggggatgaggaccgctgccggcagcccgccccaccctgggctcctccccacacccgctcgggcagcgagcgctggcctgagccgcccctgctcgccccgcccgcctctcacgtggaggttgggccggacccgccccgccccacagagcccgggtcccgcccccacgtggctggcagctgcttcagcggctccgccccggcgccgtgccagggggccggacactccagtcgcgcggcacaggcctgaggccgctgagggccaccccgtcccctgcccgcccgccggcctgctgggattggccgagcgccggcctccgcccgagcccgcgcgttatgtaacgcgccccgggggccccgccccctcgccctggcttatataacccgggcgcaccggctcgcgccccgccccagggccaatggaggcctgcggagtcggccccgacgaccaatcgcacggcccgggggcgggaccggtcacgcggcggcag

SEQ ID NO: 146 - DNA, 606 bp, Homo sapiens
  source 1..606: mol_type = other DNA
gatgaggaccgctgccggcagcccgccccaccctgggctcctccccacacccgctcgggcagcgagcgctggcctgagccgcccctgctcgccccgcccgcctctcacgtggaggttgggccggacccgccccgccccacagagcccgggtcccgcccccacgtggctggcagctgcttcagcggctccgccccggcgccgtgccagggggccggacactccagtcgcgcggcacaggcctgaggccgctgagggccaccccgtcccctgcccgcccgccggcctgctgggattggccgagcgccggcctccgcccgagcccgcgcgttatgtaacgcgccccgggggccccgccccctcgccctggcttatataacccgggcgcaccggctcgcgccccgccccagggccaatggaggcctgcggagtcggccccgacgaccaatcgcacggcccgggggcgggaccggtcacgcggcggcagggggcgcggcgccggctgctgaccggcacgcggcgagcctcgagactgcgcgagggcggccccgggggcgagcggctgtgcgcggggccaagggcggggcgcggccgggcgggagttctggg

SEQ ID NO: 147 - DNA, 292 bp, Homo sapiens
  source 1..292: mol_type = other DNA
ctgtccaggcaggagccatgggcccaggcattttataagttatataagaaactcagattggcctgtagccccagctataaaaaaccctcggattttagttagaagcagtggctcaccctgtaatcccagcattttgggaagccaaagtagcagaaacaaaaaaaaagcagctttgattttaacatgtggtagtgctccctgactgcagggagggtgtaactgaaacgcgggttagtcactcacttgccccaaagctagcttaggggaagaaatacagttaagtgtcccgctt

SEQ ID NO: 148 - DNA, 721 bp, Homo sapiens
  source 1..721: mol_type = other DNA
ccccgcccgcctctcacgtggaggttgggccggacccgccccgccccacagagcccgggtcccgcccccacgtggctggcagctgcttcagcggctccgccccggcgccgtgccagggggccggacactccagtcgcgcggcacaggcctgaggccgctgagggccaccccgtcccctgcccgcccgccggcctgctgggattggccgagcgccggcctccgcccgagcccgcgcgttatgtaacgcgccccgggggccccgccccctcgccctggcttatataacccgggcgcaccggctcgcgccccgccccagggccaatggaggcctgcggagtcggccccgacgaccaatcgcacggcccgggggcgggaccggtcacgcggcggcagggggcgcggcgccggctgctgaccggcacgcggcgagcctcgagactgcgcgagggcggccccgggggcgagcggctgtgcgcggggccaagggcggggcgcggccgggcgggagttctgggcggccgggcgggagttctgggcactcgcgcgcggcagaggagccccgcgagccctgccctcggtactgggggcccccggagcgtggcgcttccgagccacccgcctccccgggccccatccctcggcgcgcgggaaagttggggcaggggtgaggaccgcgcggtcggggcgccccagccagccgggccgctggcgtcggactgtc

SEQ ID NO: 149 - DNA, 483 bp, Homo sapiens
  source 1..483: mol_type = other DNA
attacaggcatgagccaccgtgcctggcctatctttgtaacttttgtgtttaggtccacagaaagttttgagcaaagaactaccatgatctgacttatgcagatgcttctggcatcactctgctgtgctgagcctgtggcaggcccgaaggcagacttcaggacgcctgtcggggaccttccacccatccgggcttggaataataatcaactttatgaagttatttcctttctctgaagttgcggcttcacatgaggccacgtgactgttttaaaggaaatagctggttttacgttttatcattcttcagggatggcaaaactttctttatataatacctactttgtacactaggcaacaagacagttaatttattgtctatgacttgttaccttgaaaaattacatcaatgcaaagtgattgccttttagcctccatagccaataaattcattttttttttttttttggaggatatatataa

SEQ ID NO: 150 - DNA, 399 bp, Homo sapiens
  source 1..399: mol_type = other DNA
gacagtctagtgtcaaactccccaagtgttgggattacaggcatgagtcaccgcgcctggtctctttctcctttttttttttttaaagaaaaattgaaatcatggttttctaaaaatcccggaccaggccgacctgggttccaaccctgcgtgcatctctgatgcctggcacatcggctgtgctcaagtaatggcagctattgccgcatatggcaaaatgctgatcactgttttgaatttggtttcattcctctaatctcaaatccagtgttttaaggacactaaatgctttgtcctggagaggacagtagagagctgcttccaagaagcaatttttcatagggctgtcacagagctgtggtgggaatttcccatgagaccccgcccctggctgagtca

SEQ ID NO: 151 - DNA, 545 bp, Homo sapiens
  source 1..545: mol_type = other DNA
taacctggtaccaggtgccaactttagataatagggatatctaattacttctctgtgctctccttaagagtgactatagttaacagtaatctgttgtatattttaaaatgttattattgaagagagtaaaaatgtttaaggtgatagagatctcatttaccctgatttaatcattacacattatatgaaagtatcaaatcaataaatacaacttgagattatgatgtaaatacatctgaccaacttgctctagtcctgtgggtgcagcagcatcaggacccgaatcgggagaccaggcgtgggggagaggtccgggaggcctggaccagtcctcacggagggtggcggtagagactgttaagccccgcgggcgccggggcaggccggactgtgcatgtgggaccgagccgcctcacccagggctgtccagctagaaacccggtgccacccccgcctcagtccgaggtagactcggccggacgtgacgcagcgtgaggccaaggcggcgtgagtctgcgcagtgtggggctgagggaggccggacg

SEQ ID NO: 152 - DNA, 457 bp, Homo sapiens
  source 1..457: mol_type = other DNA
agcccctctgcctggccagccgccccgtccgggagggtggtgggggggtcagccccccgcccggccagccgccccatccgggaggtgaggggcgcttctgcccggccgcccctactgggaagtgaggagcccctctgcccggccaggaccccgtctgggaggtgtgcccagcggcttcattttgttctgtactaagaaaaattcttctgccttggaaaaaaaatcgcttgagcccaggggttcaatataagccttggctaagccttgcttccacactgggctttggagcctgcgggctgcggtcaccagaacgaatctgggcccagcaggtgccaagggctcgacctcccgccttgcatccggcaggccgcacacacccctcggaagtcggcgagatcgctgaggttgacctttaggggctgttactctcagaccagagcacccggcgcatttacgt

SEQ ID NO: 153 - DNA, 479 bp, Homo sapiens
  source 1..479: mol_type = other DNA
tgtcccacagtccctcaccgtcccacactgtccctcactgtcctacacagccagtcgagagcggctcccctctccccctccagggcttcttcggcccacacggccagcggcggcccgcggagaggatgaatttatgggaaatcccgcgcgaagcgcgatgtgccctcagttcgggcaggaacagcggccgaggcccgggtcgccgcgggcttctgaggaaagctcggcgttgagaggctcccagggctgccgcacggctcaggcagaggagcggagctgcggccgcggtcagcccggagacgcctctccgggagacaaagccggctccctgcagcgccgcgatacgccacggtgggcccggcgcaacgcctcggccacggcatcgcccctttaagcggcgcgcgccctgattggctgcgggaggaggcggggcgggacgcggcgacctcacggcccggcggcctatgctatatatagag

SEQ ID NO: 154 - DNA, 709 bp, Homo sapiens
  source 1..709: mol_type = other DNA
gcagactggggcagcccggtgatatgctgtgtgcacacagcgtgcctgttgatcatataaacgatacttttgtcaagtaacaaaggtcactcctcacactagaggagagcttgctgctttcttgtgtgtatgaattatattgaaaattgacaatgatgagtcatatctcagcaccactactggagtaggaggttgcagactcttaaaaggctaagtccacagggagtgggagggaccctctgccagtgcaggctaatgcctgggccgccagggagaggccgcccacaatcgcgggccggaagggaccgcggggggcgtcggggccagccccccgtttcgcagctgaggcggggttggggcggagggcgtgcggccggggcgcagccgacttcgtccatccggggctggagacccagcagcctgggaagggccccagccctgtgggcgccctctccccacgcttgctgctccggaaggaggacacagattccagcgccgggtgccctggaggctccggcctcggggtgggggtcgggccgggggcggggccggggccggggcgcggggccccggctggcggacaggagggcggcggcaatccaggccgccttttgcagccgcccgcggccgcgccgggctctgcgcgccgcgctcctgcctcctcccccgtcagcggcggccccagccccgcgccccccgggccccgcgc

SEQ ID NO: 155 - DNA, 533 bp, Homo sapiens
  source 1..533: mol_type = other DNA
tgaaacccataaattatatgaactagaatatgtcattcttcaaagaaaaagaggtgatgtttggtcttttcctctttcaaataagcagtgctttgtcatgtacactatttgaaaaatattacaagccgctcatcagaatttcgaaagagtccccgggacctgcccgcgccgccagcccggcccagcccggggggcgcggggggcggtactggagcgcggcgggcggcggaggagggccggcctcgcactctgacgcgcccgcggcgggagcccagcccaccgcctctggccgccgcctgcagcgcgagccctcgagccccgggccgcggcgttgtcaaggctcggcctttcttctctgctcattttattaaaaagattaaaaaaaaaaaaaaaaaagcctcccattggccgggcccccggccgcgtcacaccgcgctgtaccaatggaggggcgcgatactgcgggccgggcccgagcggggagtgggcggcgggtcggtgcagcagctccgccgcggctccgccaccatcgc

SEQ ID NO: 156 - DNA, 419 bp, Homo sapiens
  source 1..419: mol_type = other DNA
aaatgaataattcaatgtggaaattataatctgaatagattttccaaggagaaaattatcacttcttttgaaacagatgagtgaattattttgaccttaactccttcgggaagagtgtatgttaacaaaccaacaataggttgatgattcaccaacatgatgtgcatttcaaaaactgctaatcataattgaaatttccacccataaattatatgaactagaatatgtcattcttcaaagaaaaagaggtgatgtttggtcttttcctctttcaaataagcagtgctttgtcatgtacactatttgaaaaatattacaagccgctcatcagaatttcgaaagagtccccgggacctgcccgcgccgccagcccggcccagcccggggggcgcggggggcggtactggagcgcggcgggc

SEQ ID NO: 157 - DNA, 657 bp, Homo sapiens
  source 1..657: mol_type = other DNA
gagaaattccccgggtctgtgtgaaattccagttccaaataattcacatgaatggttcacaagaatccaggtaggtttgatctagttccctagatggttggctgtctcggcctgattctcaccgcagcaaggagaaagggacagggtcaccttggcgggtgccaggcggagcccggccagacgggcgcggctggagggcagcgcgcaggcgcaggcggcgcacgtggccccggacacgcagcgctgcggcggggccagcgccccaaccccggagtggggccgaggcgcgcagcctctcaacgactcgacgccaacggggtctctcggatcgcggcgcgaggcaggaggggcggggcaggagggccgcggcaggcccgggccgccaaagttgtcagcaaggtcgagggccggacgtggggccccagagcgacgctgagtgcgtgcgggactcggagtacgtgacggagccccgagctctcatgcccgccacgccgccccgggccatcccccggagccccggctccgcatcggctcaccggtcctatctggggccagagtttcgcccgcaccactacagggccgctggggagtcggggccccccagatctgcccgcctcaaccacccctttccgggaggtgagggaatgagtgacggct

SEQ ID NO: 158 - DNA, 411 bp, Homo sapiens
  source 1..411: mol_type = other DNA
cagctgaatgagtgccaaacatggggggctgacagtggcctggccttgagatggccggacccggaccagcactcattttccctgccctgcctggaaaggggttcgaggtatttaccaccttcccagtagtgatcccagctattgtagtgagctgagatcatgccactgcactccaggtgacttgggcaaaactgactctccaccaagagacacttgactgtagttttcctggcagggagattgccctcagattacctggtgtcatgtagggtggaggacagctgttgtttgccatgcgttcctgacagaaaccttccagtcattcaccatgagcctgactggtagagactttagaggacaatgctgggcctgcagtccccaggttcatttaaataatctggctataaaaat

SEQ ID NO: 159 - DNA, 547 bp, Homo sapiens
  source 1..547: mol_type = other DNA
cattttttaaaaatcacacctagttagctatggtttttaaaaaatagcatgcttattttaagaaaaggtggaaacgccggcttccccaagtcaccaccaacttgtgaacacgtcgggtaatattagccctaaaaatgccagcccttcctctcacaggactggatgtcccagacacctggcaaagggacctaggctcaggagcctcgggcaccgggcctcaggggcgtggcgggggcggggctcagggcccggggcaacgggacgagcacctgagccagggtcagggcccggaacacaggggggcgcgtgggttaggctctaggcccaggtctctgggccctgtggacaggggatcggggcgcgtgcccagtctcaacgcgggggcacacgggcgggctcagggcctgccggggtaccggggtggggcgcggcgcgtgggcggggctcagggcccggggggcgcagggcgtggacggggttcagggcccggggcccagatgggcgggggagcggccggacgcgggcggggcgggcgcctggacgcgag

SEQ ID NO: 160 - DNA, 796 bp, Homo sapiens
  source 1..796: mol_type = other DNA
ccagccccccgggacccgagagccgtgcggggccgagcctcgtgccccgaggcacgccgagccaagtcacccctgcagcccgcggcgccggaacttgggggcgcagtgagtgggggcagggcgccgggccggcgggcggtggccgtggctcctccgagctctccggactggcaacgtcgcagagacaacaggtcctgacccgggacagaccccacacccgcgtccaggacgtgggtttcttccctcttccaggcgagaggccctcggactgggcgtcgcggcgagccccccggtcccggccccacccgggccttggtcccaccgcgaaggggcgaggagtccccggaagggtcgcgatggccggggagtccgggacctcggctctgggtaggcgcgccccgcgacccagcggcggcgtgggcgaggggcgctgcgcaaactacgcgctctcgctggggaaacgccagcccaggcgggcggcggcggtgaaggggatgaggaccaggaccccgtgcccggcgggactggccccgcaccccacgccgcccccctgcggtgcgcaccgcatctgcgccctaggccgaggccaggctccgacccctcccccgcaccgacgtgattcggatcgcgcggtgctggcgccgcgagatgccgctgtcccgtcggtctggggacagcccagctccccggatcccgggctggagagacgcgtcgcggccccggggcctggtggcacgagcaggaaggaggacccggcggcgggctctgcctgggcttgcctgggcttccgagccgg

SEQ ID NO: 161 - DNA, 297 bp, Homo sapiens
  source 1..297: mol_type = other DNA
ggtggccctttgtgtccggcagcatggtagcccccccgcaggagctcagcagggtctagccaagtgaatacacaggattaggtaatccatgctacacattggaatgtggctcatgagctgggacccaggatcaacccaaacatggaggccaggccacctccctggatgcctggctgagggcagccacatgtctgcagggtgatcccatcagcagtccccagatctctaatgtcaggagatgcctggcgcaacagatcaattgtaaattgttatttacagtttctgagcctttaaaag

SEQ ID NO: 162 - DNA, 450 bp, Homo sapiens
  source 1..450: mol_type = other DNA
tattctgacgttggccaacttcaaatacactataatagaatatcttcacctcatagatgcagtggatataaataatatcaagagcatagatattagtgaaatgtagatgattaggaagtaatgagttttgagtatttattacctttctttgagacagagtctcactctgtcacccaggctggagtgcagtggtgcaatctctgctcactgctgggagagcccgatctggaagcttttgtccccattctggcccttagggcagtgaatgcagatcagaggtcattgatttatctgcattgaaaccttgggttggctattgtaaaaagaacagaacttttatgttctttttaaaaaattccaaactcatgggtcatgatttgaagaaaatttcccttcctcctgcctggcgcacagaaggtagggcagcagcagacattgacctttacctcc

SEQ ID NO: 163 - DNA, 760 bp, Homo sapiens
  source 1..760: mol_type = other DNA
aaggccggtgaggggggctgagccgcggcccctcggctgagccaagccctgccccacgcaaggtccccagcctggcgcacccggctccccagcgccgcgcgccggccatgccaccccagccccccgggacccgagagccgtgcggggccgagcctcgtgccccgaggcacgccgagccaagtcacccctgcagcccgcggcgccggaacttgggggcgcagtgagtgggggcagggcgccgggccggcgggcggtggccgtggctcctccgagctctccggactggcaacgtcgcagagacaacaggtcctgacccgggacagaccccacacccgcgtccaggacgtgggtttcttccctcttccaggcgagaggccctcggactgggcgtcgcggcgagccccccggtcccggccccacccgggccttggtcccaccgcgaaggggcgaggagtccccggaagggtcgcgatggccggggagtccgggacctcggctctgggtaggcgcgccccgcgacccagcggcggcgtgggcgaggggcgctgcgcaaactacgcgctctcgctggggaaacgccagcccaggcgggcggcggcggtgaaggggatgaggaccaggaccccgtgcccggcgggactggccccgcaccccacgccgcccccctgcggtgcgcaccgcatctgcgccctaggccgaggccaggctccgacccctcccccgcaccgacgtgattcggatcgcgcggtgctggcgccgc

SEQ ID NO: 164 - DNA, 360 bp, Homo sapiens
  source 1..360: mol_type = other DNA
ctgtgatcccagttacttgggagcacttgagcctggacaggggactgagtgctctgagaggcagcttgtacagctgtgcgcggaggcgtggccagcgtgtgcgctccgactagatcgtagggagcagccagcaccccgggtccttctgggtcccgcgcgcgtctcggacgcggcaggacagctctaggacgcacggccaccagggggccgaagggaagggcgggggcggaggctcggagctgacccaccgcctcgccccggaagctccgaggccccgccccggcggccgccagcggagggcgtggcctcgccggcgcccccgccccgcccccgcccccgccgcgcgcgcccccgccgcgc

SEQ ID NO: 165 - DNA, 564 bp, Homo sapiens
  source 1..564: mol_type = other DNA
tgagaccctgtctctttaaaagaaaaaaaagcgttttaaacgcccttctaccagttatggatccttaacacgtaccttcatggataaagcattcaggacaatagtgcttacacattacgctgtgcttgctttataaaagcaacacaggtgcaataacttgttcttgcaaacatagtgtgtgaaatcattgtttctgtgtgcttaaaaatcattttagtttgaaaaggaatacatgcattttaaaaaattcaattcaaaaagcgttttttcccacaatcattaaccattgtgaaaggtttgatgtttatccttctagacctttctctgtacctacaaacataaataggcgcagagagaatctttttaaattctgttctttcagaaacatggagctgtggtgtagatgaggtgggactcatgctgtccccagcatcttcatcctcatgtccctgtggaggcctatagggacaagagccctggaagggctggcacatggacagggactgcctcgttgtacctgcacacctagaaggccaacacacacccacagtgtgtaggagtgtc

SEQ ID NO: 166 - DNA, 611 bp, Homo sapiens
  source 1..611: mol_type = other DNA
ccgtaaaatgagagacatcaaactttgtaatctcacagttcaatcaagctctggacagctggcctcgggccaggcactggttttcaatggacactacacagcgagggtgctctcaaaacagcaaagtctttaaaatcttcccagtcccaagtgactgctctgttccacaggacaagtccccagaggctgggacctgttcagggagcagccctgcggatgccaggtgcccgcgccctcagggtctcgaggtccgaggcccccgtccccgtgggcaccgaaacgcgcgctgcaggaggctccctggacccccggcggctgcccactcgtccccgctgggcacttcagaggaggccggcgaggccttgctcggggttcctgggacacgcgtttcccaaagacgcctccggagggacccgagcttcgggccggcaacaccagggcggcggctcgggaggggcggagggggcggccgaaccagcgccgggctgacgcgccccgcgccccgcgccccgcgcccccggccttccctgcagtgctgagtggtccgtgcgcccgaggtcgggggcggggcggggcggggcggggcagggacggccccgcccaccggcgct

SEQ ID NO: 167 - DNA, 500 bp, Homo sapiens
  source 1..500: mol_type = other DNA
ggttgagtatgacaatgacccagtgacataggctgaaatatacgcagcatatactactacttatagggagatcaaaaatccacataatgataatgattattaattatttgagacagagtctcgcttcaggctggagtgcagtggcaagatcttggctcactgcagcccccgctcagccacccaagtagctgggatgacaggggtgcgccgcctcgtccggccaggcgatccgcccgcccgccgtgagccaccgtgagggcctcactgattatctaaggctgtgagatgtaacacgtaatttgtacaccttttgcggcctagggcctcgcgaggcttctctgaggagcgaggaccagtcagtcacagggccagcccctctccccagtcattcgctcggggctggctccgccccagaactgcgcgccccgccccagactcgcgcgcccgtgacgtcacggtccggcccccgccacgtgacggccgcgcgccgggctctagct

SEQ ID NO: 168 - DNA, 464 bp, Homo sapiens
  source 1..464: mol_type = other DNA
cagtggcgcgatcagcctcccgagtagctgggatgatcgtgtttctaaaaagctagtttttcaaccattagagcggctcaaggagctgctaaacagaagctcggtggactgtctgcagccagacctccgggcctggcggctggcgcgggaggcagaaggcggggctttcctacagggctccgtgccccgccctccccgcgccgccttccacctccggccgcgcgggggcgctccccggccggctctgtcgcttccgccgccgccccgcccacccgggctcacccctcgtcccgattggctgcgcgacgggagcgcgccgagtcagggggcgggcccgcgcccgctacaaagcggcgaaggtcacggcgcgaggaggcgcgcgtcgccgccccgcgtcccgcctgcggcccgcgcccccggcgtcaccgcctcctgcccgcctgcccgcctgcccgcctgcccgc

SEQ ID NO: 169 - DNA, 489 bp, Homo sapiens
  source 1..489: mol_type = other DNA
cgggttctctccccactgtcaccccagtgaggccacctgaggtcacctcttcccctgggggtctcgggccactgacgcctctaaggactggggctgctgtgagttgcggccccggggagtctgaactcacttgaagctctgagtcctggggcttcaaggccacacctcccaggctccttctcctcttctccgagaaagaggccggggcacctgtccaggggaggacggtcctcagcagctgaccctctcccctttctgaggatgtgctgagacacgaccctgccgtgggaaaggctgtgtgaccttggccaggtcacttcacttctctgagcgcacttgccctcccccacccctgcagtcgggccgggaccgcccctgagcacttccccgtaaggctgcggtgcacgggctggggagcacttctgcaccctcgcgccattactctttcatggcctgccggaagcccgggggtcagaggcgcccaggaca

SEQ ID NO: 170 - DNA, 473 bp, Homo sapiens
  source 1..473: mol_type = other DNA
tcttcttatgcggataaaatttctcaggtaagaaaagttagccaggctggagtgcagtggtgccatcatggatcactgcagcctcccgagtagctgggggcttgaattcctgggctcaagaggtgccatggagattttctttatagatagaaatcattttacaaaaggacagcttttcagatcccttcaaaatatggcgaagaagtatattttcccatagtcacattttgggtgtgtgtcctgagcaactggcgcttggggtccctgggtgcctagagctgcaggtcgcttaaaggcgcctactttatttcgttgttttcctttgcataaaaagaaaacttgttttgtagaagggcaagcaaggtgcagcttccagaggcacctgggatgatgcccccctgttgtttttcctgttgcaagtgaaaaggaaacatgtgcgggttggcggcaggcggggcgccccggcgcgcccc

SEQ ID NO: 171 - DNA, 254 bp, Homo sapiens
  source 1..254: mol_type = other DNA
ggactgtgcagtgtctcactggcacacaggacagttcttcctggcattatgtgcccgagagggtgcggaggaacatgctagatccagcccatctctgcgccatctcaagggagcatgtgggatatctacctgttgatatctacctaatattattatactacatgtgcacaacgtgcaggtttgttacatatgtatacatgtgccatgttacaaagcacatgaaccagtctatcattgatgaagaggtccgacgg

SEQ ID NO: 172 - DNA, 630 bp, Homo sapiens
  source 1..630: mol_type = other DNA
cagtgcctgcacgcctttcctccactgcgggggggtgccaggggtccagaggcgaggaccccaagatccctgtagggatccacggtagaggaaagtcacaaagattccttcagtgaattcaggacagactccccgggggcaggtcccggggcgggagccggtgtgggtagtgctgcgcggcccttaactgtttaccaggcctctactggggagacgaggaccccgaggttctggggggcgggtcctgggccgcactgctccgccggggtctgcgctcctcggcggagcgggagaaggaggagcgggtccccgggtaccgctcacccggccttaggagcccgggagcgcgcgtagggccatctgcggccagggaaagggatacagtcccccgggcccctcccggccgctcggaacccaccccaggcgcgtccccgcgggcgcgcgctccaggcggggccgacgggctcggaggcgcgcgcccgctgccgggtccgccgcgcgcgctccctccgctcccccgcccctcccgggcccgcgcgctcccagggtccgccgcgcgcgcgcctcgcgtcgctccccatccccgcccgccaccccgcccccggccgggtaccctcgccggacccgaga

SEQ ID NO: 173 - DNA, 373 bp, Homo sapiens
  source 1..373: mol_type = other DNA
acgcaccttttacagaacgtggttgtcataatatcaccccagcagagcaggtggtgcagctggagcgggtgggcaaggctcccagcgcccctcacagccacctgtgcaggtgacctgaacgatggttgatgtttaggtgcacaactgaagcacacagacacaagcacagaggctgcggggtgctgagctacctgttctggtccacagtgtctctgaacacagcgtctcaagactgcttcggccggaaatgccaggccagctgagctgccttcagggcttgccagacacacaggtatttctggacggttgtgcatcctcagcatggggcgtgtgctccaggcccagccctggcagctgcctgggccctcccgac

SEQ ID NO: 174 - DNA, 465 bp, Homo sapiens
  source 1..465: mol_type = other DNA
caagactcttctagaaagagatttttcctttccaaggtgaatccattttccgttaaaaaattaagggactgtccgccggcccgagtgctaccggagatcaccagcggcccggacgccagcgagtggaacatctcggtcgcactctgggggccggaagtgcgtgcgtccagcggaagtgctcccccggcgcggtccgccaggccagtgccctcaggtaggcggggcccctggccctaaactctgggactggcgggcgctctggtggcaattggggcctgttggagcccggccgccgcgggacctacgtgccggacttcaagttcccgcggggccaaaccctcctcactttcaaggaagaggcgtgctctccgcgccatccctcaaggcgtgtccggatgcgggatttttctctcggcctcgctaggacgagggggaaagtgcccccgccccaagtttatatatagc

SEQ ID NO: 175 - DNA, 379 bp, Homo sapiens
  source 1..379: mol_type = other DNA
gcagtgagccgagatctctccactgcactccatgtacacagaaacctgctgggtaatttcttttcggatgtcctggctgggaacccagctgccagctcatgaccaggaggtaagagacgaagctgcggcgttaccgaggtgcgaatcactgtgattcctaggtgcgaatcatcaccagcaatcacttggactccttgttaagaaaaataaactcctatttatttattgaagctgacaatattcaatgccatgagtttgaagatcatccctgggcgcggtgggcagagccaggagcaccgggctgaggcggccgggagcgcagcgctaggggtgagtgggacccacgcggccccacctgctcctcccgcgcgcggcaggt

SEQ ID NO: 176 - DNA, 340 bp, Homo sapiens
  source 1..340: mol_type = other DNA
gtcaagagtgagagtagctaggctggtctcgaactttttaagagctgcccttttctcaaggagcagcacctccagcaaagtagatgtagtcttttacagatgttaagcctaaaggtgccagacctcaagactcttctagaaagagatttttcctttccaaggtgaatccattttccgttaaaaaattaagggactgtccgccggcccgagtgctaccggagatcaccagcggcccggacgccagcgagtggaacatctcggtcgcactctgggggccggaagtgcgtgcgtccagcggaagtgctcccccggcgcggtccgccaggccagtgccctcagg

SEQ ID NO: 177 - DNA, 453 bp, Homo sapiens
  source 1..453: mol_type = other DNA
tcgttggcaccacctagtagtcactaaatgtggcagtgttgacgttccgagtgtcataaacttgaggaaaatgaaattattgaaaccattaacaagtaattttatttgctatatataaacttggggcgggggcactttccccctcgtcctagcgaggccgagagaaaaatcccgcatccggacacgccttgagggatggcgcggagagcacgcctcttccttgaaagtgaggagggtttggccccgcgggaacttgaagtccggcacgtaggtcccgcggcggccgggctccaacaggccccaattgccaccagagcgcccgccagtcccagagtttagggccaggggccccgcctacctgagggcactggcctggcggaccgcgccgggggagcacttccgctggacgcacgcacttccggcccccagagtgcgaccgagatgttccactcg

SEQ ID NO: 178 - DNA, 530 bp, Homo sapiens
  source 1..530: mol_type = other DNA
tcacactgtgtaactgataatttaaactgctgaaaatgagacacttaaagatacaggtccctttaaaaggaaggcggatgttaaaagcaatttgcattttacctaaaatacagccagactttctgtagatggacctacggaggcccatccctgggctctctgggctaggttaatcccaggttaggccccaagctcagaggtagcagaattttccgaacacagaccggtgtgtgggagaggccattatttttccggaacactgtgctcctggagcagatagggacccccttccaggagggcccaatgagcgttcgcgccacaaggccccgccccgcaccgcgcagccccgcccacaggctgagttaaccaattcgcggccccgggccccgccccgcccgcaggccccgccccggcgcccggccccacgcgcccgcctccctccggggcgttgccgccgccgcgcctcagcagcccgcgcggagccagatgccgccccctccgccggtccctcccccggcggcctggcgcct

SEQ ID NO: 179 - DNA, 370 bp, Homo sapiens
  source 1..370: mol_type = other DNA
cctcccgagtagccgggactacaggcgcccgccgccacatccaccgatactttcaaattttaccaatactttttgaacacacttaaaaaagcgcgcaccccaacggaggcgcggcgggcccccgggccgcgggccagcgccaccttctggtggatcttccccgacgcgagtctgggagtagcctacctggctcaggcccgccgcgcccgcagccccagcgcggtcgccgtggcaacgccccgcctttgcccctccccacgtccggcgcggctgcgcgggacggggtgggacggagcaggcgagaggaactcggcggcgcggcgcccgcggcctattggctgccacgtcccggcgccagaagccccgcctc

SEQ ID NO: 180 - DNA, 433 bp, Homo sapiens
  source 1..433: mol_type = other DNA
atagttaaacgaattgactagaaagtgtctttgtcctttgctatttaattacacaatatatatacatcatgtaaccaaatgtttcaaactataattaatgtatggagagttcccaatgcacttctttaaagagaagtagtaagagttatctgtttaaggaacttctttagccaataaacattttgtgtttttcatttattattgaagatcgatccagaaacacacacagagagagagatacctgttactttgtagttacgttttttattaataaatagggactttttaggtataagaaggagataatagaaagggaaaacaaattttagtctttaattttctatttaataatttactgttgggaatatgaatatcgtttttataaatggaaacagaaatagaactaagatagtagttcttatgcttaagttag

SEQ ID NO: 181 - DNA, 415 bp, Homo sapiens
  source 1..415: mol_type = other DNA
cccaatgcacttctttaaagagaagtagtaagagttatctgtttaaggaacttctttagccaataaacattttgtgtttttcatttattattgaagatcgatccagaaacacacacagagagagagatacctgttactttgtagttacgttttttattaataaatagggactttttaggtataagaaggagataatagaaagggaaaacaaattttagtctttaattttctatttaataatttactgttgggaatatgaatatcgtttttataaatggaaacagaaatagaactaagatagtagttcttatgcttaagttagttttttcttttcaaaggaaacttggctgtaacttcaaaagaagatttgattctttatttctggactgcatatatatatataacaaggccatta

SEQ ID NO: 182 - DNA, 547 bp, Homo sapiens
  source 1..547: mol_type = other DNA
agacaaggagtggctttatgtgctttccttcgttctgaaagtagcacctgcttgtgacaaattaatttcacccagcctgggcggcagagtgagaccctaaaaacaaaccaaaattgggtttgatggtctcacttcatcgttaacataaaggaaaaacagtaacacttgtgtcagaactatactcctgccaatggcaacaaatgaggtcacgggtcgttcactcattgtaagatacacctgaggtacaggtgcatggagctcctgataatgtgtactgcgttacatgatctgtaaatcgtgggctacgcatccgctttgcacctatgcgcacacgtgtttcgcggagagtggtgctcagcgttgtgccaggcgctgaatcaggctctgggcagacctcggtggtcatgtccccgcgtcgcccggccacctccgcagagcaagctgagcagggggctggctggaggccgacggcggaatcccctcaacggagcgccgccagggggcgcgcgaggcagggcggagctgcgtactttgtccgcccgcgcgg

SEQ ID NO: 183 - DNA, 578 bp, Homo sapiens
  source 1..578: mol_type = other DNA
atcccagcggtgcagtgagctgagatcacaccactgcattccagcccgggctgaataacaatttcctcctagcaagaaggactcagtaagataagaagcgctgcttcctgggtaaaagactcaagtcctcccgcctgcgctgtctgcgcctgggtctcttcaaccgcagtgagcggtcgcacggctccacatcagggtcgccctgaggctcagccttccccggccccattccgagtgcgcacaggactgaacgagcacgcccggtccctgctccggagcggaggacacgacgcggacccgcacggtgcaccgcagtgacctgaggaaggagcgacgggcgctcgcgccaaaggcgtctacagctgcgccaggcggacggcctgcaggaccgaggtgcagctgggacgagcggaaagctctgcgcgtgggcggggagcccggagcctcgccggggcaacactgatccggcccccgggggtgggcgggcacgagccaatggtgtggcttcatggctccacccccttccattcgattggccggcgccgaaaagccgggcgtgagcggccgcagtttctgga

SEQ ID NO: 184 - DNA, 691 bp, Homo sapiens
  source 1..691: mol_type = other DNA
cagcctgggcggcagagtgagaccctaaaaacaaaccaaaattgggtttgatggtctcacttcatcgttaacataaaggaaaaacagtaacacttgtgtcagaactatactcctgccaatggcaacaaatgaggtcacgggtcgttcactcattgtaagatacacctgaggtacaggtgcatggagctcctgataatgtgtactgcgttacatgatctgtaaatcgtgggctacgcatccgctttgcacctatgcgcacacgtgtttcgcggagagtggtgctcagcgttgtgccaggcgctgaatcaggctctgggcagacctcggtggtcatgtccccgcgtcgcccggccacctccgcagagcaagctgagcagggggctggctggaggccgacggcggaatcccctcaacggagcgccgccagggggcgcgcgaggcagggcggagctgcgtactttgtccgcccgcgcggcccgtcgctcgcgccgcggcgggaaaatccgacctggccgcgcaccaccgccccttctcggccctcctgcgtttgcccagggtcggcccgcagcaggacggcgtcgagtttctggacagaaaagtacccggcagcccccggcggcttctcatcggcaccccgcccccgggcgccccccgcggctgcgcatgcgttggcttaactgccgcgggtgga

SEQ ID NO: 185 - DNA, 406 bp, Homo sapiens
  source 1..406: mol_type = other DNA
cagaggcctcagcttacctaaaattcaggaaagtagatgccctccagctgtgtcttcggccccgaggcggagtacccacaggtgggctcaacagaacctgcctcccctctcggtaattttctgcaaggggtggagagatctttttcagtattgaaaaggccccgtggaggtggcctcccaaccctccaaatcgagaggggtgggtgtgccgtgcaggcctggggctgccaggggcttgcagcagagggagtgaaaccactcagggccttggcaggcatcagtctgacttacctgacataaatcataaccattgtgggtctcattaacttattagcagagggattgggctgagcagaccctctcctaaggcgtgaaaagctcttagcagccttacccgtgaaatatt

SEQ ID NO: 186 - DNA, 292 bp, Homo sapiens
  source 1..292: mol_type = other DNA
tgcctgtaatcccagctactcgggaggctgagcgcgccattgcaccccagcctgggtgggccagagcccggctgccccagggccagcagtgcctgggtgcttgttggaaatgcagcggcctggcctagaggacagtgggtctggcatgctggaccagcggatacgatcgtagcgtctctctctgaaattactggatgagtttcagtcatactatcctaggctaattttatattatgttaaaataggcataattacgtgaagctttaattaaggggttacatccaaccccaga

SEQ ID NO: 187 - DNA, 456 bp, Homo sapiens
  source 1..456: mol_type = other DNA
aggctggcctcagatcatctgtgagccaccgcccccggggcccttgcccacgtttttataaacctccgacagagcgaaaaatatgagcagataattacttctagtttacataaaatgccctcttttaagagaggaacttttttttaatcttagatgtttatttttcaggaggaaaaaaacaaacttttccatagtagcagtattaaaacaaagatgaatatgttgaaggcgcatttgagactttaatgcttactatatttatttaagcgttttgttctgagaccccaaactaattagcattatgcatctcatatgcgaataggaatgctctaaatacagtatacatgcgtgtgcatcgtcatgcaaaataagtctctattggccttatatttgaatcgcgcgatagaacgaaagcggctttaaagtgatttgctgcggaacgaactacatctcccg

SEQ ID NO: 188 - DNA, 387 bp, Homo sapiens
  source 1..387: mol_type = other DNA
tccaatatttaatttaaaatctaacaattaaaaaaatctaacaattcaaccagtgtaaaataatgacgttttgtagaagcctcttctcttcctatccccataatactgtaattgttatttcaaggcctaccaaagtccctagcatatagtaggcactcaatgaatggaactgaactgatgtctaaaaattaatttccaagtttcttcgcattcatccattggcaagtccctaaatgtgcccatggcactgtggggatcatctctactaatgttagccgggcatggtggcgcatgcctgcaatcccagctactcgggaggctgagagccgatatcgcgccattgcactaaggtgacccggacacccgggctcctgggagaaacctcgc

SEQ ID NO: 189 - DNA, 332 bp, Homo sapiens
  source 1..332: mol_type = other DNA
cactgcactccattatagttgtgttttgatcaatatagactgcttaaaagggatgacttaatgaataattcctcctaaaactttgagataggtgcggcgcccaggctggcctcagatcatctgtgagccaccgcccccggggcccttgcccacgtttttataaacctccgacagagcgaaaaatatgagcagataattacttctagtttacataaaatgccctcttttaagagaggaacttttttttaatcttagatgtttatttttcaggaggaaaaaaacaaacttttccatagtagcagtattaaaacaaagatgaatatgttgaaggc

SEQ ID NO: 190 - DNA, 741 bp, Homo sapiens
  source 1..741: mol_type = other DNA
ctactgagcgcccttcctagggcagcggccagagggccatcgaggaaaccccactgcgtgtcccaggccggcgctcctggggcccagggccggggacgcgcggggtgcgggggcgcgcgggcctgactgcgccctgccccgcctcgccccgcgctccagctccagaagccgctgctgggggaacacgaaatccctgtgctaccccaggagccccgagcccgcaggcagcgggcaggggagcagggaagcgcgcggcctggcgggcgcggccccgcggcgcctcacacctgcgcccgccctcgcggaaaagttagcgcggccgcgcgggtcgtggggcaggcgcgcgcggcggccgtcggtcgcgctcgcggggcccgagcggccgctggcagcatgcgagcgcgcgcgcggccgccggcggccggcaagagtgggcgcgtgcccgcgggcgccttactcgggccgcgttccccgccccgcgccgggtcccctcccgccagccctgagcgcaagtccccgcctcctcctcccggagccagaggtttggggaatcgcagagccaatggagccggccgccctgccagtgcggcgcgggcgcgcgcggcgggggcgcgcggcgggggcgcgagcgagcgcgagcccattcactccggcaccgggcggcgggcggcgggcgggcgcaccgggcggcggcggcggcggcggcggcggcggcggcggcggggccgcgctctgctcttt

SEQ ID NO: 191 - DNA, 421 bp, Homo sapiens
  source 1..421: mol_type = other DNA
ttcttcaataaagtatgaaagtgcccctcaaaaggcccttcccccccatctgggggcaaggggattatcactttcactctctgaaataacattatccaaaggatttatttcttgcacaatagattgaatgaaaaactcccttgcaaagttagttctaacattctaacttgcaaaaaagagccagttcttctgtcgaaagtgggaaccggcctcaactcaactcagctgggggggggtgtagaaagcgctcagatgctcctccgcaggccgtgcgactcgccgcgcgcacacgctgagctcagcccgggcggtgggtgagggtggagcggagcccggccccgcgatccggcccgggttttgcatgccacccactcgcccgcccggccgcggagaaggcaactttgggcagcgcatgcgcgcc

SEQ ID NO: 192 - DNA, 315 bp, Homo sapiens
  source 1..315: mol_type = other DNA
gatcagcctggccaacatggccacgggcgtggcagtgaggattgcttaaaatagatgaagtactgtattattattattattaaagggcattttgtgcctcgagattcaaatcccaggtctaccatttatgtggcgcgatctcggctcaggcgcgcgccactaccgcccgctgtttgggctattaaatatgtgaatactcagaaaccttatcattgctattatttagaacaaagttaggggtccaggccttatcctgcctcccaggtggactcggcccgggatcccgagccccgccccctccaggccccgccccgc

SEQ ID NO: 193 - DNA, 419 bp, Homo sapiens
  source 1..419: mol_type = other DNA
ttaaaatagatgaagtactgtattattattattattaaagggcattttgtgcctcgagattcaaatcccaggtctaccatttatgtggcgcgatctcggctcaggcgcgcgccactaccgcccgctgtttgggctattaaatatgtgaatactcagaaaccttatcattgctattatttagaacaaagttaggggtccaggccttatcctgcctcccaggtggactcggcccgggatcccgagccccgccccctccaggccccgccccgccccgccctcgctggccgaggcgcgctttgaaagtgcgcgagctccgaccgagacctgggccggcggttggtcggccgattccctggggagagggtcatcgtggctctcgtcggtgccttccacctctggacaggcaaccggtgggagag

SEQ ID NO: 194 - DNA, 576 bp, Homo sapiens
  source 1..576: mol_type = other DNA
ggcagacgcagcggcttcggaccctgccccgggaagtcagccgtgagaccgggcctagtcctgcccgagcgggctcgcgcgggagcgtcgttagcacggggaggccggtggcgccgaaacggggggccgggcccgcggtgccgcgtagcctgaggcggaggttggccccggacccggacagtgccggagccttcgcttgggcctggtgctcctgcgccccaccccgggccgcgccgagaaactcctccctcggctggcacgcgcgggcttctgggaggcgacggccggcaccgccaggacctgtcgccgcgggccttggggctcgggctcgcagagcccccggaagccccaaaatgaggaacagagggaaacttttctcctgttctaacgactaacataaaatagcaagccttcagggaaagttttttgaatgaatgaactggctatacgaatccagacaagcatttctggaagtcagaactctgacatgtattatcattataaggaaacagttattctgacatgaatgttgttcattcatatctcttttctctttaggaaaagtaaaagatgtct

SEQ ID NO: 195 - DNA, 365 bp, Homo sapiens
  source 1..365: mol_type = other DNA
ctgggctcagcctccagggggaggatcctccagcttcagcctccctaggctgccaggctagtcttgaactatttttgaaaatcgactgaaatatcactgctgctgttaataaaactaaaagctgtattgggggtttaaatgaaatgagtgttcattgcttatttttcctctgctttagataaattaatgcttgtaatctaagttttgttgctactttaaatatatgaatcagtggtttaatcattaaggtgcgttcagcattaatccagccatgatggctgccgcccaggcagcactatgggcatgttagccagccagcaacagcatccaatgcagggtatggaggctttggctcaagcatggat

SEQ ID NO: 196 - DNA, 548 bp, Homo sapiens
  source 1..548: mol_type = other DNA
cagcattaatccagccatgatggctgccgcccaggcagcactatgggcatgttagccagccagcaacagcatccaatgcagggtatggaggctttggctcaagcatggatttcaaatttttctaaactcatggtaagtatattgtaaaatacatatgtactaagaattttcaaaattggtttgttcagtgtggagtatattcagcagtatttttgacatttttctttagaaaaaggaagagctaaaggaattttataagttttgttacatgatgtttgctgattggtaaaccaacacactacaattgatatcaaaaggtttctcctgtaatattttatccctggacttgtcaagtgaattctttgcatgttcaaaacggaaaccattgatccatatggatttttttccttaagaaaatctccttttaggagatcatcatttcaaatgtttatggaagaagcacttcattgaaagtagtgctgtaaatattctgccataggaatactgtctacatgttctcattcaagaattcgtcatcacgcatcaca

SEQ ID NO: 197 - DNA, 265 bp, Homo sapiens
  source 1..265: mol_type = other DNA
gcctcaaagttctggagctggagtgcagtggtgcgatctcggatcactgccaggctcaagcaattctcctgcctcagcctcccgagtagctgggtgggattggtggcaccaggtccttctgacacctgaggcatcccagctacttggtatgattgcagcactgcactgaagcctggctcccagagcagcctgtcctgcctgcctggaactctgagcaggctggagtcatggagtcgattcccagaatcccagagtcagggaggct

SEQ ID NO: 198 - DNA, 546 bp, Homo sapiens
  source 1..546: mol_type = other DNA
atgtcaagagtagcttatactagtttcaaattagcatttaatatttggtaattagcatgcttaatgtgattctgagaagttctttgacattctcataaaattgtcaagaaaaattgcgtgccagtcttttctttagaaactcgtttagaaaagcacttctctcgtacagcctatagggctgtgatgattcttttggaagaaggtcccgcagcccctcgaggccctcggtgcctcccaaccccgagaaggaagcgggggccggtggtgcaccgccccggctgcttggggcggaggaaggacccggaccccttccgccggcccagcccgccccggaacccgacccggccgcccggccccggccgggccccacgtggcccctggagcgggccgcactaccctgctgccgccgacggacggcgcgccacagccactctgcgccgctctgcgagccggtggccaatgagcgccaggcgaggccgctttgccattggcgagcgcgggctccgcccccgccggcaggccccgccccgcgcccgggttaggttg

SEQ ID NO: 199 - DNA, 435 bp, Homo sapiens
  source 1..435: mol_type = other DNA
gtgaaactttgtcccaaaaacatggttttttttggcaagcctcagcctcccgagtagctgggattacagcaggctggaggtgatccacccggtgtgagtcacggccagcctcaaaaacataaccttaaaaagaaatttttgagacagggtttcatcctgtcaccccggctggagtgcagtggagccgagcagctgggactacagatgcgcaccaccactcccggtaatcccggtttgtttgttttttaaatttttaaataaacacgaggataagcccctcgcctggggtccctgctacttcgcaggctaaggtgggaggatctcttgagcccaagagttcgaaacgaaaacctcgtgtcaaaaatatatgtgatagtcaggtcccgccgcttcgacctggcgcatgcgtggtgcgcacgcgtcccgtctcctcgg

SEQ ID NO: 200 - DNA, 349 bp, Homo sapiens
  source 1..349: mol_type = other DNA
tctgtcaggctagagtgcagtggcacgatctcggtgcatgcaacctgggttcaggcgatactcgtgcctcagcctcccgagtatctgggattcaccatgttgaccaggctggtctcgtattgattttttgaaaggatttttaaaaaataatgttgctttgaaaatttttatttatgactagtaattttgggaaagttagagaatctaattaaaaacattttcaaatgcttattaattgtaacaaagggtcgcgaacctctgctagccgctctcgctgcgtcagggtgaactcacgaccgattggttctcccgagtggacccagtccccgccccctggagagggaaccct

SEQ ID NO: 201 - DNA, 223 bp, Homo sapiens
  source 1..223: mol_type = other DNA
ctctatattttaatatattttggtgaccaatcccagacatgcttggcactgctgagtaaaatatcaagtgtggctacaaagtcttttcttctatttctagaacttttctaagttggaagatttcaaatgtgagatagtgttaccaggttgagtaaggattttataaaatactaaataatgatcaataccagatcctcataataaccttttgaacggaattctt

SEQ ID NO: 202 - DNA, 296 bp, Homo sapiens
  source 1..296: mol_type = other DNA
ccccagcctcccgagtagctgggattacaggtgcctgccacgaactcctgatcaagtgtaaattctcccaccatgggcagatttcaagctgctgagatagacatgtatgcacacagcaggcgctcaataaatgcttgtagcatgaataaattaatgaatcctacttcgtattgcagttagtctggaagtagctgcggggcgcagaaaagggctggatgccgggtcaccgcccggccccagctcctggcccgtccccgctccccggtccagcccgcgccgccggcacctgtttccgg

SEQ ID NO: 203 - DNA, 501 bp, Homo sapiens
  source 1..501: mol_type = other DNA
tgtaaattctcccaccatgggcagatttcaagctgctgagatagacatgtatgcacacagcaggcgctcaataaatgcttgtagcatgaataaattaatgaatcctacttcgtattgcagttagtctggaagtagctgcggggcgcagaaaagggctggatgccgggtcaccgcccggccccagctcctggcccgtccccgctccccggtccagcccgcgccgccggcacctgtttccgggcgggcctccagaggccggcgcacaagatggcggctctggcggcctaaagaaggcggccgcggctcagccgtgggctctaacgcggggctgggggccggagacagactccccaggtgacgggtagtaggggcggcgccgcttggcctcgtggggtgtaagacccacttgctgttgcccccggaccttgccgccacaccagccctgtcctggggcggaaccgaaggaaggtcgggccctgctgccccgccccgtccttcctc

SEQ ID NO: 204 - DNA, 543 bp, Homo sapiens
  source 1..543: mol_type = other DNA
cccaggtccttggtcggcccctccaccctgcagctgggggctggcagctggcccccttttgaggggtcccaagaaatgggccagggtactggcctgcccccctcccccatgcccggtcccaggggctggtatggctccgggttctggtgacggcgccaggagcctgggcttggcagctccctccggagggcgcccggggatgcccgcgagtgtccaggaggctggtgacctgccaaggctgggcgggggggggtggtgcctggcccggaccgtctgcaggggcggggaccgacccccaggggtcgctgcgccttgcgcttcccccgcccgcgggcgccagggccgggctgaaccaccgcgcggatcggcagggggagccagcgggtcccagagaccgcagcgcgcggcgtggcgcagggtctcgccggccactgattcaaggcgcggcggcgcggagcccgagaggcgccagggattgggcggcagcgcggctccggagcctggctcggacacccccgcgacccgtggtaggagcccggaccc

SEQ ID NO: 205 - DNA, 661 bp, Homo sapiens
  source 1..661: mol_type = other DNA
ccctccaccctgcagctgggggctggcagctggcccccttttgaggggtcccaagaaatgggccagggtactggcctgcccccctcccccatgcccggtcccaggggctggtatggctccgggttctggtgacggcgccaggagcctgggcttggcagctccctccggagggcgcccggggatgcccgcgagtgtccaggaggctggtgacctgccaaggctgggcgggggggggtggtgcctggcccggaccgtctgcaggggcggggaccgacccccaggggtcgctgcgccttgcgcttcccccgcccgcgggcgccagggccgggctgaaccaccgcgcggatcggcagggggagccagcgggtcccagagaccgcagcgcgcggcgtggcgcagggtctcgccggccactgattcaaggcgcggcggcgcggagcccgagaggcgccagggattgggcggcagcgcggctccggagcctggctcggacacccccgcgacccgtggtaggagcccggacccgcgagctgaggactgggattcgcgcgcagcttcccgcggtctgcttgccctggagcggagggggagccccagcctcctgcggctccgagaagcttccccctgcgacttccgcgaggagacgagtctgcgcagcgtg

SEQ ID NO: 206 - DNA, 312 bp, Homo sapiens
  source 1..312: mol_type = other DNA
catggatgtcctcccttcctgaggggacatctgagcccagctctggggtaatggggcggctgccaccgctacccctgctcagaagttgctctgaggctcagcaggtgcgggaaaaggaggcttctgccttccctgccaccaccctaaaagactaagtagcttaagtagcttatttggagtaatgaggggcccagaagtagagagactgactccctgagcgttgccctctgggaggggcgttcctaacactccaccattgagcagggtggctgggagcagcagttcttagttcctggggccctgagcctccca

SEQ ID NO: 207 - DNA, 716 bp, Homo sapiens
  source 1..716: mol_type = other DNA
ttctcaagatctcagaggacatgatctcctgagggtgggcgacagggaagggcccttcctatctccccacccccacccccagccccgcggctgggctccgccagccccaagtccgccagcgcgcctgcagcctccgtctgggctcggacccctgtacatcgatggcgaccccagcccccgttcgcagccgcgcagcgcagcccgggcaagctcggcggcctgggcctggtcggtgccaggcctccctcggcaactgcggcgcgacccggaacccaggagccttcccggcagcccccgcccagcctcctgccggtcacctgcgctcggccgccgcggcacgatccgttgggccgcccaagctgcaccgcctggacctgcgcttgcctggaaagcgaggccccgccccggcccgccaggccccgcccccgcgccccgcgccccgccccgcgcagcgctgggccagggacgcacccccaccgcgtcgtaggaaaattacctggtgtggggggtggggcggaaggcacctcccctcctcccagcagtcccccaggagcgagctgcgagatgccccaaatcggacccctctttcccagcctcctcggtccgctgaggaacccgcagccccgggcctcgagcagactgctgggactgcggggcggccgggcgcggggccagaggcggggcggggcgggtcgggtcgggggcctttaagaggc

SEQ ID NO: 208 - DNA, 545 bp, Homo sapiens
  source 1..545: mol_type = other DNA
cccagctggacctgaggggctgtctgcaggcaggtcttgtttccatcctgactcagcaggcaacccctgcaggccccgcagggagttggaggggcagcctgggaaggccctgacgggtccccactgggcatctcaccaccccggggaggggcagcccctccagagcctgggaccccaaggaacccacggggattcagacggcccaagggcccccgccagacagaccctcaggaagctgggaggcggccagtcgcctctcaaggcctccccagagacgtgctctttggagaccgcctctgccgcgccaggtctccggatctcccctccccgccgcagcgagcggtccaggcgtcggctacctgggtcaccgtctccgtccatcgctgcggagggcggtcgcgagaggaggagccggagcgctgcgggctgcgcgagtcccggggcggcgagtcccggcgctgtccgcgtctgtgtcggtcccggcgaccgcgcctcttaaaggcccccgacccgacccgccccgccccgcctctggccccgcgccc

SEQ ID NO: 209 - DNA, 617 bp, Homo sapiens
  source 1..617: mol_type = other DNA
aaaagaagcccggatcttccgcagccgggcagagcaccccaggcctccggttctcccatcctcagaacatgatgggaggaggaggctaattctcaagatctcagaggacatgatctcctgagggtgggcgacagggaagggcccttcctatctccccacccccacccccagccccgcggctgggctccgccagccccaagtccgccagcgcgcctgcagcctccgtctgggctcggacccctgtacatcgatggcgaccccagcccccgttcgcagccgcgcagcgcagcccgggcaagctcggcggcctgggcctggtcggtgccaggcctccctcggcaactgcggcgcgacccggaacccaggagccttcccggcagcccccgcccagcctcctgccggtcacctgcgctcggccgccgcggcacgatccgttgggccgcccaagctgcaccgcctggacctgcgcttgcctggaaagcgaggccccgccccggcccgccaggccccgcccccgcgccccgcgccccgccccgcgcagcgctgggccagggacgcacccccaccgcgtcgtaggaaaattacctggtgtggggggtggggcggaaggcacctcc

SEQ ID NO: 210 - DNA, 629 bp, Homo sapiens
  source 1..629: mol_type = other DNA
gcctgggaccccaaggaacccacggggattcagacggcccaagggcccccgccagacagaccctcaggaagctgggaggcggccagtcgcctctcaaggcctccccagagacgtgctctttggagaccgcctctgccgcgccaggtctccggatctcccctccccgccgcagcgagcggtccaggcgtcggctacctgggtcaccgtctccgtccatcgctgcggagggcggtcgcgagaggaggagccggagcgctgcgggctgcgcgagtcccggggcggcgagtcccggcgctgtccgcgtctgtgtcggtcccggcgaccgcgcctcttaaaggcccccgacccgacccgccccgccccgcctctggccccgcgcccggccgccccgcagtcccagcagtctgctcgaggcccggggctgcgggttcctcagcggaccgaggaggctgggaaagaggggtccgatttggggcatctcgcagctcgctcctgggggactgctgggaggaggggaggtgccttccgccccaccccccacaccaggtaattttcctacgacgcggtgggggtgcgtccctggcccagcgctgcgcggggcggggcgcggggcgcgggggcggggcctg

SEQ ID NO: 211 - DNA, 640 bp, Homo sapiens
  source 1..640: mol_type = other DNA
gcctgggaccccaaggaacccacggggattcagacggcccaagggcccccgccagacagaccctcaggaagctgggaggcggccagtcgcctctcaaggcctccccagagacgtgctctttggagaccgcctctgccgcgccaggtctccggatctcccctccccgccgcagcgagcggtccaggcgtcggctacctgggtcaccgtctccgtccatcgctgcggagggcggtcgcgagaggaggagccggagcgctgcgggctgcgcgagtcccggggcggcgagtcccggcgctgtccgcgtctgtgtcggtcccggcgaccgcgcctcttaaaggcccccgacccgacccgccccgccccgcctctggccccgcgcccggccgccccgcagtcccagcagtctgctcgaggcccggggctgcgggttcctcagcggaccgaggaggctgggaaagaggggtccgatttggggcatctcgcagctcgctcctgggggactgctgggaggaggggaggtgccttccgccccaccccccacaccaggtaattttcctacgacgcggtgggggtgcgtccctggcccagcgctgcgcggggcggggcgcggggcgcgggggcggggcctggcgggccgggg

SEQ ID NO: 212 - DNA, 640 bp, Homo sapiens
  source 1..640: mol_type = other DNA
cccacggggattcagacggcccgcccccgccagacagaccctcaggaagctgggaggcggccagtcgcctctcaaggcctccccagagacgtgctctttggagaccgcctctgccgcgccaggtctccggatctcccctccccgccgcagcgagcggtccaggcgtcggctacctgggtcaccgtctccgtccatcgctgcggagggcggtcgcgagaggaggagccggagcgctgcgggctgcgcgagtcccggggcggcgagtcccggcgctgtccgcgtctgtgtcggtcccggcgaccgcgcctcttaaaggcccccgacccgacccgccccgccccgcctctggccccgcgcccggccgccccgcagtcccagcagtctgctcgaggcccggggctgcgggttcctcagcggaccgaggaggctgggaaagaggggtccgatttggggcatctcgcagctcgctcctgggggactgctgggaggaggggaggtgccttccgccccaccccccacaccaggtaattttcctacgacgcggtgggggtgcgtccctggcccagcgctgcgcggggcggggcgcggggcgcgggggcggggcctggcgggccggggcggggcctcgctttccaggcaa

SEQ ID NO: 213 - DNA, 358 bp, Homo sapiens
  source 1..358: mol_type = other DNA
atgttggccagggtggtctcaacatatggaactataagtcctcacatttagctatctcagtcaagggtgagctagataagggctttggccagggcaggatcaccacgcccaattaatgtgtcctgggccagtccccttgtgcagtacacagagaaattcatgaacttaatcctgataaaaaacctcagaggttttttattttttgagacaggctgcagtgcacacgattctcccacctcagcctccggaggagctgggattataagtgctgggatcacaggcgttagccacctcctagcacctcaggtactgggtgtcaggtcctgcctctagggaggggaccgcgggtcaagggtgg

SEQ ID NO: 214 - DNA, 394 bp, Homo sapiens
  source 1..394: mol_type = other DNA
catatggaactataagtcctcacatttagctatctcagtcaagggtgagctagataagggctttggccagggcaggatcaccacgcccaattaatgtgtcctgggccagtccccttgtgcagtacacagagaaattcatgaacttaatcctgataaaaaacctcagaggttttttattttttgagacaggctgcagtgcacacgattctcccacctcagcctccggaggagctgggattataagtgctgggatcacaggcgttagccacctcctagcacctcaggtactgggtgtcaggtcctgcctctagggaggggaccgcgggtcaagggtggagccctgggcggtccggggagcggccgcgcgttcgggagcttcggcccggtgctgagc

SEQ ID NO: 215 - DNA, 538 bp, Homo sapiens
  source 1..538: mol_type = other DNA
cgcccaccccaccagctgggagactctctgtataaagagaacagtcacagtaactgcctcatggagttactcccaggactgagataatccacgagcccagtgcggagcaggggcgacgccggtgcacgcccttaaaacccgagccagaggattcgggcagatgtggctgccgttagtccccagctgagcgagagaaatgccctcaacgttcgcgccccgaagttgaagggaggtggcgcggcgggtctcagcccctcccggacgccgaggcccggcccccgcccctcggagacccgcccccgcatgcggaaccgccctctgcgaggcccggtttgggccgtgcgggaatgggcgtggcctgggcggggcgggcgctaggacccaccggagcgccgtgaacgtcaccgagcggcgccgaggccccgggttgagcgggaggcgcgatcggtccggtcggtggctccccgcggcggggccgggcccgatctcgggcgggaaccgagcgcagagccgggattcccgccgggagggatccggc

SEQ ID NO: 216 - DNA, 431 bp, Homo sapiens
  source 1..431: mol_type = other DNA
tgttagtcattattttttattattttagtaatatcatctctgagtgggcgcccaccccaccagctgggagactctctgtataaagagaacagtcacagtaactgcctcatggagttactcccaggactgagataatccacgagcccagtgcggagcaggggcgacgccggtgcacgcccttaaaacccgagccagaggattcgggcagatgtggctgccgttagtccccagctgagcgagagaaatgccctcaacgttcgcgccccgaagttgaagggaggtggcgcggcgggtctcagcccctcccggacgccgaggcccggcccccgcccctcggagacccgcccccgcatgcggaaccgccctctgcgaggcccggtttgggccgtgcgggaatgggcgtggcctgggcggggcgggcgctaggaccc

SEQ ID NO: 217 - DNA, 452 bp, Homo sapiens
  source 1..452: mol_type = other DNA
ctgaaccggttccagacaccagtgtgtcactggtccaggctgagtaccttcctgggcacagatgggacggcgcggggccaccggcggtgctggttccgggcgcactcagcgaccccggccacacaccccagcctcctgggcggcctcgaaaggggctggagggcacgcccgccagctctgcccggggctcagggagtcttcgaagacttcttccaacggtggcggactggggccccctgcctgagagaccacccggagactcagagaccccagagggcggcgagggcgcgcgcgaggcctgggaaggaggcagcatcctcacttccagcctcgggaccccgcgcaccccgcccctgggcgcgccaggtagcccacctttgtccgggctcgcagccaggtggggcgggaggggcggagccaggggcgggccgaggccgtgccttacctgtccg

SEQ ID NO: 218 - DNA, 622 bp, Homo sapiens
  source 1..622: mol_type = other DNA
ggccccaccgaccccgtcgtgagttatgggaggcacgggacccgactcccagggtcgtcaggacacggcgccccgcgcggtgatggatgagccggccccagcgctggctttgtccgggttgggcccggcggggcgtggcgagagccgcgccgctttctcccttccctaccgggaaagagggcacaggtgcgccgtcagcgccccaggtgagcggccccgggcccctgccctgacagacgcggccgcagctgagcgcgcagcctcgctccattgttggggtccaccgaggaccgcccgccgcggccctttgtcgcccgccctgcgcggggccgctccagaggcgccacaactgccggagcccctcccgtcccacgcgccctgggccgcgccgaggcggctcttacgcaccgggaggagtgggcctgcctcgcccggtgcccgcacggctgctgggctgcgcccgtctgccccgcgccctcgcggcggcggcgcctaggcctctggggagctggcccagaactcagagcgcagctggcgagggcgcgctggccgggtgcgcgccgggcccggccccggggctgcccctcggctgggggcagtcgagcccgccacccgccgcccc

SEQ ID NO: 219 - DNA, 412 bp, Homo sapiens
  source 1..412: mol_type = other DNA
ctgtccaccctccttggcctcccaaagtgctgggataacaggggtgagttggtaataacaagagcctgcataataaaccagtttcagcaagagtcctgctaagtagtactggtttaaaatcctcataaggatcatatgaggtaggtagcctaaatagcccatttgacacaagctgttgccacatcagcacttcccagttgtcctggctgcaggcagtccgaacagtccgcttcctggaatattagccaggcaggatacgccctggggccagcggcccccaagtactgcctgggcggtggcgggagtctggagcttggctgaaggcgcgagctgccgacgccgtctcctagcaaccaagcggcggtcacgtgacccgctccagcccgtttcacgtggtcttgccgcaacgggc

SEQ ID NO: 220 - DNA, 200 bp, Homo sapiens
  source 1..200: mol_type = other DNA
ctggagtgctatggcacactgggatggcgcccgccaccaaacctggccaggctggtctcaggctggccttgaactcctgggctcaggcaatccttctgcctcagccttcccagaattgaatggcagcttttgaatcaagtaacagatgttccaggcatgagctgttccttggagggtgatctggctggagcgggaaggtg

SEQ ID NO: 221 - DNA, 495 bp, Homo sapiens
  source 1..495: mol_type = other DNA
tatggcaacagcagattctggagtctcaggctagataagttacagggcaattgcttttcagagtactttctattccattcttgtcagtaaagacaaggacgctgggaatggcacccagggtgctgaattcgcccctttggagagccccctctctatagggtactagccgggggctcagactctggagtcagacggcttccgagggatgaggcctcagtcccagggctgtgtccgggatgggcccaccccattgttgagaaatcccagcggggccccaggaagtccaagcccatggggttcaggtgctcacccgcagctgctggacacaggccacagagctggtgcctcccgcgccatcactgcagtgcagcctgggtggacggctcgagaccttgccccggggtcctcaggggcctggaatgtttcagctgttctgagaaagggcggcaggcagccgggagaggctgtgggggcagggcacaaggctaagctcag

SEQ ID NO: 222 - DNA, 649 bp, Homo sapiens
  source 1..649: mol_type = other DNA
ccaggccccacccgctgccacctgcgggcccagattggcccggccccaccccccctcgggggtgcgggtctcacgctcaccgcagcagcagcaccacctgcagcagcagcacgcctcacgtgactggccccgggacggtcacgtggccctctcgagctctgggactgagaccaggagtggctgcagcgaggactcgcgtcacatgacgataagcacggcctccaacgagacctgtgggcacggccatgttgggggcggggcttccggtcacccgcgccggtggtttccgcgttccccgcccctgcagcggccacagtggtgcggccggcggccgagcgttctgagtcacccgggactggagggtgagtgacggcgaggccggggtcgccgggagggagatcctggagccggcaaacaacctcccgggggcaaggacgtgcttgtgggcggggagcgctggaggccggcctgcctctcttcttggggggggctgccgcctcccttggctccctgcctggacggaggggcccctgagccaggggtgacgatcccgcccctctgaccggcccaggcccgtgtcctcgccccatcggtgactcagtgacctggtgactggattctcggccacctgggcgccgagacggcttcc

SEQ ID NO: 223 - DNA, 432 bp, Homo sapiens
  source 1..432: mol_type = other DNA
ggacttgtcaactctgggacacaactcaagttttccattctgaaaacgcttgtttcattccaaactcttttcagatggaaataaaagggattctccctcagattccagcagggtagacgcttcgagagccctggctgcggtccccaggccccacccgctgccacctgcgggcccagattggcccggccccaccccccctcgggggtgcgggtctcacgctcaccgcagcagcagcaccacctgcagcagcagcacgcctcacgtgactggccccgggacggtcacgtggccctctcgagctctgggactgagaccaggagtggctgcagcgaggactcgcgtcacatgacgataagcacggcctccaacgagacctgtgggcacggccatgttgggggcggggcttccggtcacccgcgccggtggtttccg

SEQ ID NO: 224 - DNA, 635 bp, Homo sapiens
  source 1..635: mol_type = other DNA
gaaaggtcccggcggacccccgtgcgcagcgggacgcagtgggcgccagggaccgcagtgccccgggcccagcgctcttctccaggtgatcgccggggggaagccgtctcggcgcccaggtggccgagaatccagtcaccaggtcactgagtcaccgatggggcgaggacacgggcctgggccggtcagaggggcgggatcgtcacccctggctcaggggcccctccgtccaggcagggagccaagggaggcggcagccccccccaagaagagaggcaggccggcctccagcgctccccgcccacaagcacgtccttgcccccgggaggttgtttgccggctccaggatctccctcccggcgaccccggcctcgccgtcactcaccctccagtcccgggtgactcagaacgctcggccgccggccgcaccactgtggccgctgcaggggcggggaacgcggaaaccaccggcgcgggtgaccggaagccccgcccccaacatggccgtgcccacaggtctcgttggaggccgtgcttatcgtcatgtgacgcgagtcctcgctgcagccactcctggtctcagtcccagagctcgagagggccacgtgaccgtcccggggccagtcacgtgaggc

SEQ ID NO: 225 - DNA, 363 bp, Homo sapiens
  source 1..363: mol_type = other DNA
ggtcacttgccacttgccacgtcctcagggaaggatgtagaaggcattgagggaaactgactatacctccttcacaaacttcagacacgaagagtctgagcaccccgcagcatgctggaggattatatactaaacaggggtgaaggcagccctgtctgaggccagaggtctgcccacgtggcggatgaggcaggtgtgaggcggcaccagccaagccctctgtttccccgcacgggtaccagcgtcgaggtgagataaccaaggactcttttttactcttctcacacctttgaagtgggagcctcttgagtcaaatcagtagctgcccaaggcagagaggggctgtgacaagccctgcagtga

SEQ ID NO: 226 - DNA, 270 bp, Homo sapiens
  source 1..270: mol_type = other DNA
cccactctgttgcccaggctagagtgcagtggatccacccaccttagcattctttctcattttacacacaaggaaagtagcattgaatggtataacactgagttcagtgcttagcaaacaggccattcattaaacataggtggctcggtcacttgccacttgccacgtcctcagggaaggatgtagaaggcattgagggaaactgactatacctccttcacaaacttcagacacgaagagtctgagcaccccgcagcatgctggaggatt

SEQ ID NO: 227 - DNA, 455 bp, Homo sapiens
  source 1..455: mol_type = other DNA
gcattcttgggtgacttcgtcatctctcaaaatcgaaatctttaaggacctggtcatacccaggcttttaatgaattgccactggggaatcagcagagagagcagctcttccctcggggtgatcagcaccacggacagcggccagggcgcccccgaggacccgcaggcaggcagggtgcacagcggcgagcaggtgctgcgctacgtgcgggccagggaactcgcgcgggtcaccccgtgctccccgcgctcacgtcggtcctcggaaagccggggtcctccctgccttttccagcaacggtggggtgggggcccgacccggcctacaaggtcggctctgcccggtctccacctcccacgtcgcaggcgcggaggggctcattcccgggccctgatctcagaggcccggaatgtggatcagagataaccctgcatggcagggcaggcccgacact

SEQ ID NO: 228 - DNA, 288 bp, Homo sapiens
  source 1..288: mol_type = other DNA
cctcccaaaatgctgggattgacagagtctcactctgtcaggctggagtgcagtggcgtgatctcggctcactgcaagcctgttctcctacctcagcctcctgaggagcagggattacaggcccttgctccccgcgcgcggatttttacagaaacaaagttgttgtgtgtgtgtgtgttgaatccatcagtagcaaaggggcccaaccagacccctgcacttaactccactggacttcactcttccggcctgggaacgagtggtcccgcccccggccgtaaaagacac

SEQ ID NO: 229 - DNA, 455 bp, Homo sapiens
  source 1..455: mol_type = other DNA
tgggttgccgtgaccccagatctcgccgttgcactccagcctctcaggcctgtgatcccacctacttgggaggctgaggctgcagcagactttccttggctcagaggtttgcctcccagggacacaaagggacgcatccgtgcccaccctcaccccttggggaaggacttgctctaagtgcgctacaggtaacgcaacaggggctcgtggctatcgatgccatggagccttggcccagaacctggggtgccctctttctggtcggagtgaaccccccagagaagggagggaggcagggcctgacggaagccccgggagctggccctaataaggagaggcccggacttgggcatatctgcagaacccttccccactaggcaggcgcgggggagggcgtggaggggcggggtggtgccgcccccggggcgggcccagtgcgtggcagcgggacctgc

SEQ ID NO: 230 - DNA, 316 bp, Homo sapiens
  source 1..316: mol_type = other DNA
ctggagtgcagtggcatgatctcggctcactgttggccaggctggtcaatgctggaattacaggcttgagccatcgatatttttttttcctaaaaattgagatagtttagactcgagagccacacgtggctagtgggcccggtgatctgggtaaccatgtgagcttgcgcagttcagtcactggcattgatcttctttcctcaaaggcgactgaagggcagcaggcccatgctcgcttcttacagaatgcaaatctggattccagcagctccggccgacgcccaccgggtgggagtccgagcctctgcgtcgtccg

SEQ ID NO: 231 - DNA, 327 bp, Homo sapiens
  source 1..327: mol_type = other DNA
ctggagtgcagtggcgcgatctcggtcactgcagctgggttcaagcgattctcctgcctcagcctccctagtagctgggatcaggcgccggcgtgagcaaccgcggccggccccaatactgcaggccgtcatgcctgtaatcccagcatcgagaccagcccccagctattgtggtgagccgagatcgcgccactgcactccagccgccgctccggactgccgcctgcgccgagcctaggccgcccagcctgactgaaactgccgctgctgaactcagcgtatccagtcccgcaccggggcccgccccattccaaccaatcaagacgg

SEQ ID NO: 232 - DNA, 433 bp, Homo sapiens
  source 1..433: mol_type = other DNA
aatgctggaattacaggcttgagccatcgatatttttttttcctaaaaattgagatagtttagactcgagagccacacgtggctagtgggcccggtgatctgggtaaccatgtgagcttgcgcagttcagtcactggcattgatcttctttcctcaaaggcgactgaagggcagcaggcccatgctcgcttcttacagaatgcaaatctggattccagcagctccggccgacgcccaccgggtgggagtccgagcctctgcgtcgtccgcttgggacgcgccggcggaggagtggcgcgcggaggagtggcgcgctgagacgccgctcgaagcgccgagtcgcggggcagcaaggcggggcgagccggctgggctcagggtccaccagctcacccgggtcggcgactggtgcctcctcccgcctccccctggg

SEQ ID NO: 233 - DNA, 601 bp, Homo sapiens
  source 1..601: mol_type = other DNA
catccatccatccatccatccatccatccatccatccacttatgcatccatccatccacttatgcatccatccatccatccatccatccatccatccatccatccacctatgcatccatccatccatccatccatccatccatccatccatccatccatccacttatgcatccatccatccatccatccatccatccatccacctatgcatccatccatccatccatctatgcatccatccatccacccacatccatccatccatccatccacttatgcatccatccatccatccatccatccatccacttatgcatccatccatccatccatccatccatccatccatccatccatccacctatgcatccatccatccatccatccatccatccatccatccatccatccacttatgcatccatccatccatccatccatccatccatccatccatccatccacctatgcatccatccatccatccatccatccaccactgattcattttcaaagggcattggaacccccttggggcctcctaatagggccagaagctgcctgcctccgctccccgcagcccaggtgcggcgggcagcac

SEQ ID NO: 234 - DNA, 474 bp, Homo sapiens
  source 1..474: mol_type = other DNA
catccatccatccatccatccacttatgcatccatccatccatccatccatccatccacttatgcatccatccatccatccatccatccatccatccatccatccatccacctatgcatccatccatccatccatccatccatccatccatccatccatccacttatgcatccatccatccatccatccatccatccatccatccatccatccacctatgcatccatccatccatccatccatccaccactgattcattttcaaagggcattggaacccccttggggcctcctaatagggccagaagctgcctgcctccgctccccgcagcccaggtgcggcgggcagcacaagtgttcctggaaccaatttgactggagcctgaagtccacgcgcgcggctgagaaccgccgggaccgcacgtgggcgccgcgcgcttcccccgcttcccaggtgggcgccggccgccaggcc

SEQ ID NO: 235 - DNA, 239 bp, Homo sapiens
  source 1..239: mol_type = other DNA
actttaacaagatctccagggcactcatgtgcacattaacgtttgagaagcacttaactggcatatactactttttaaacatctaaacatggacttcaataaagtgcgtggccctgcagtccccccggcctggcctggcctgggctggggctctggagcctcagcttggccgggaggggactgggttcaacctcttccttccccgcagtgctgccgtccccaaattttggtctattgga

SEQ ID NO: 236 - DNA, 446 bp, Homo sapiens
  source 1..446: mol_type = other DNA
tcatctgccccctgcctgggcaggagacttgagcagcaagatttataaatgcctattgttatatatgtagatacttacttaagtatatataaagtacagactgcattatgtatattacatatctttaaatttttagaatagtcctatgaggtcagttcagagatccagacccaggtggtctggctctagagtctaaactgagctcaggatgagcctgtagtcccagctactcgggaggcttctcaaaaaaaattaaaaaataagaattaaatatatttaaaatagagtctaaataagtgaatgatctagaattctcttggttctaaagcagctgtcagctttgggcctcaccctcacgggacagggaagcctgtcggggcgtgggggaggcgtgtccaaggccggctggccccgccccgccccgccgcctggcctctggcccgctg

SEQ ID NO: 237 - DNA, 432 bp, Homo sapiens
  source 1..432: mol_type = other DNA
atgagccactgtgcccagctcataatggaaagtcctctctgagtggaatatagctattcttactgagatgcgcagtaaatgtaaaatatacccgaatttcaaaaacttactataaaaaagttaacatattgtattagtaattttttcttttggcgacatgttgagatgatcatattttgaacatattggattaaatatattaaaatgaagttcattttcttctttttcgtttaaaaaaaatgtactagctagtaaacagttcctggggcagaaactattaacaggcccctggccagacggacggccaatcgcaccgtccgcgaaccctggaggggcccgcaccactgcaggagcggccgccggcgccagggggcgcctcctcgataactcggcgctcggctggccaggcaccggcgcgtcggccgctcgatt

SEQ ID NO: 238 - DNA, 363 bp, Homo sapiens
  source 1..363: mol_type = other DNA
ccggcggcaagtcccggcttgcagagaggggagtcccgggagagcgcgagtcccggcgagcccgagtgcgcgccttatgcgcgctccccgcgacggcgcagggggaggggaggccgcagcagcccacaactttaactgtcaatcagacttaaggggccgccctctccgcgacgcggctgcccggggagcgaatgaatagggccgcgcagaccaaggagctggatcgagcggcaactcccagcctctgctggaacagagagggagggagggagccggagcgagcgagcgcgcgcgagggcgagcgctgcatttcggagctccaggaccgagcccagggctgctggggcaagaaacttcttgtta

SEQ ID NO: 239 - DNA, 466 bp, Homo sapiens
  source 1..466: mol_type = other DNA
tcctgatcctacctggaggtcccccgggcctgctccacactcggggtgatcacctggcccgcgggcggcccgggcaaggaggaacgtctcgagaaggcagccggctcgccggagtcggttccagcctgcgagccctcagggacaccggcggcaagtcccggcttgcagagaggggagtcccgggagagcgcgagtcccggcgagcccgagtgcgcgccttatgcgcgctccccgcgacggcgcagggggaggggaggccgcagcagcccacaactttaactgtcaatcagacttaaggggccgccctctccgcgacgcggctgcccggggagcgaatgaatagggccgcgcagaccaaggagctggatcgagcggcaactcccagcctctgctggaacagagagggagggagggagccggagcgagcgagcgcgcgcgagggcgagcgctgcatttcggagctcca

SEQ ID NO: 240 - DNA, 488 bp, Homo sapiens
  source 1..488: mol_type = other DNA
accctccagcaggggagacattccggtcgggaagtgccccgccagggcagtccagggagaccgctcagatgagcaataaatatgctcccagctaatcttgtggggaaagcatcgtgaggcacttgggtcaggcttttaaaagttcctgatcctacctggaggtcccccgggcctgctccacactcggggtgatcacctggcccgcgggcggcccgggcaaggaggaacgtctcgagaaggcagccggctcgccggagtcggttccagcctgcgagccctcagggacaccggcggcaagtcccggcttgcagagaggggagtcccgggagagcgcgagtcccggcgagcccgagtgcgcgccttatgcgcgctccccgcgacggcgcagggggaggggaggccgcagcagcccacaactttaactgtcaatcagacttaaggggccgccctctccgcgacgcggctgcccggggagcgaatgaataggg

SEQ ID NO: 241 - DNA, 534 bp, Homo sapiens
  source 1..534: mol_type = other DNA
gctcagatgagcaataaatatgctcccagctaatcttgtggggaaagcatcgtgaggcacttgggtcaggcttttaaaagttcctgatcctacctggaggtcccccgggcctgctccacactcggggtgatcacctggcccgcgggcggcccgggcaaggaggaacgtctcgagaaggcagccggctcgccggagtcggttccagcctgcgagccctcagggacaccggcggcaagtcccggcttgcagagaggggagtcccgggagagcgcgagtcccggcgagcccgagtgcgcgccttatgcgcgctccccgcgacggcgcagggggaggggaggccgcagcagcccacaactttaactgtcaatcagacttaaggggccgccctctccgcgacgcggctgcccggggagcgaatgaatagggccgcgcagaccaaggagctggatcgagcggcaactcccagcctctgctggaacagagagggagggagggagccggagcgagcgagcgcgcgcgagggcgagcgctgca

SEQ ID NO: 242 - DNA, 353 bp, Homo sapiens
  source 1..353: mol_type = other DNA
tcctcccgtctggtcagagtgggaagaggtttggattgggatcccccctcctgcacttcctggctgggtaacctggacgattcccagaaggaagatcctcccctgcagaacctctccccagaactaggtctttgcaggtgaagccctgctgaatcagaatctctgggggtgaggcccagctggaaacggctgccccagattacagggcagctccctgcttcgctctcgctcctccggccccgggaacgtgcaggggggcgggaggcaagaccctccagcaggggagacattccggtcgggaagtgccccgccagggcagtccagggagaccgctcagatgagcaataaatatg

SEQ ID NO: 243 - DNA, 427 bp, Homo sapiens
  source 1..427: mol_type = other DNA
gccgggcagctcggaggcgcagtatcctatctgggccaccaggcggctccgaggacaacagatgagcaaagcccgcttttgcagcctggttctgtccctggcggacaccagccgctgctgggtgggaaaggcctgtcactcccaggctggaatcgctttcctcccgtctggtcagagtgggaagaggtttggattgggatcccccctcctgcacttcctggctgggtaacctggacgattcccagaaggaagatcctcccctgcagaacctctccccagaactaggtctttgcaggtgaagccctgctgaatcagaatctctgggggtgaggcccagctggaaacggctgccccagattacagggcagctccctgcttcgctctcgctcctccggccccgggaacgtgcaggggggcgggaggcaag

SEQ ID NO: 244 - DNA, 383 bp, Homo sapiens
  source 1..383: mol_type = other DNA
tactatagcacacagagttttgtttagttaaccacatgttataggcatcttttaaagtcagcctttaaaactcttgcagaggatttcatcatctggatgtattacagtttatgactttttttttttcctaatgaatgagcaagacaaaggcccttatctcattggactgagctctgtctaattgctaatgcattgcagctgtagctaagcacctgtgtgagcacaaagacagaattctttgtgcaagcccctacagatttaaaatgatgttaggcagctaccataaatgtctttgcttggagcaagcatactagtagaacacagaaaccaggttcttgcttctgcagaatcagctgttctcttacagagagtatttatactca

SEQ ID NO: 245 - DNA, 344 bp, Homo sapiens
  source 1..344: mol_type = other DNA
atttcaaactctgccctgagttaaattccaggagagcagagaggacgtgtccctgctgttctcactgaagccaggccaccttggccccatcttcccagggacctcgggggagggcaactggagaaacgtgtggcttgcagagctgccagaaccttttgagaagcaggttgcgatcagaaactgtgtaaaggccctgaggcactaaaggccaattcccagccggtctggcatctttccccagccataaaagtgtgtttggggtggggccgggcagctcggaggcgcagtatcctatctgggccaccaggcggctccgaggacaacagatgagcaaagcccgcttt

SEQ ID NO: 246 - DNA, 405 bp, Homo sapiens
  source 1..405: mol_type = other DNA
gtggatttcatgaatgaatgcattttttttttgacaaaatctccctcaattgtaatcttggctcactgcatagctggactacaggcagccaccatcgtgcctggctaacttgaactcctgacatcaggtgatccaccttgaatgaattcttgaccaatttcttaattcatgaaatgaatatgcatatgtgatatgaatggatacctggttcccaatcaggattaactgagtggagcttcagaaatgcaatcagatatcgctttttgatttaaaagcttctggacagactcaaagtcttcaagcctggagttcctgcttggctcttcctgaggtctgagctacaatactttgattttttttctaaatgcaattttgtctttatttcaaaaatgttgttttacatca

SEQ ID NO: 247 - DNA, 371 bp, Homo sapiens
  source 1..371: mol_type = other DNA
ttcccagctagcagtgccactgcactcctttgagtccccacaagataacgaagccttgaatatgatctgctatgttagatagcataaaacacaggtgaccattcgatatacacagctttttattctgttctgaaacattttgacaattttgaaccaataaggacaccttaaggtttttttttttttggtctaatatcaggaacagattaatcctatgaagtcgtgtattagcgaaacttcatcagtatttgaggaataaatgaatgaatgagttttggactttcaccctattatttattcttttacttccataaatgtgtatctaattcgatcaattagtaatcaggtatcactttctgattggaagctct

SEQ ID NO: 248 - DNA, 642 bp, Homo sapiens
  source 1..642: mol_type = other DNA
taggcagagaggaaaagataatttttgaactttgttcttgactatatatattacctttttccatttcacaaatggagctaccaggtaggccacacagcttggaagccaggcctggtgactccaggcctcagagcctcagcagctggacctctcagaccagcagctgatccttgcatggatgccagttccatccagaagttcggggccggcatggaaagtgctgactggccctgcaggccacagcgggggccctggcagccacttgcctcgctcaccctccagcctaagatggttcaagtgcaggtgggggagggaagagggaagaccagtcactcactctctctggcgcggcacccgagaacctgcagggattgcccccggagcagagtcagagtgacccaggtcccactccctttggcggtgctttggcaccaggcgggcgcgagggggcagggcgcacgcccgggacacgcccgtcgagtgcagcccgcccggtgcgcgcggcgtcttactgccagatctcggaaatcagctgccagggtggggccgcgttttggcgacggccactcggccacccctgcgccgcgctccatcgcccccgcacgcccgggcgcacgccctccccgcccgggccgccctctg

SEQ ID NO: 249 - DNA, 488 bp, Homo sapiens
  source 1..488: mol_type = other DNA
gatcaaccccttccctgcctcacatcaggacttgaagggatttcatgaatgaatgcattttttttgacaaaatctccctctgggagggcaatggtgtaatcttggctcactgcagcccaggcagccaccatcgtgcctggctactggtcttgaactcctgacctcaggtgatccacctaccttggcccaaagttgaattcactctgtcaatttcttaattcataaaatgattatgcatatgtgatatgaatggatatctcgttcaatccatttcaggattaactgagtggagcttcagaaatgcaatcagatatcgctttttgacaataaaagcttctaaaactcaaagtcttcaagcctggagttcctgcttggaacggtgacagtgcagcctacgatggcatagaactatatgaacaaagctttgatttttttttctaaatgcaattttgtcgtgatttcaaaaatgttgttgtctttacatcatt

SEQ ID NO: 250 - DNA, 649 bp, Homo sapiens
  source 1..649: mol_type = other DNA
catggccaggggccagggaagggtctctgggagcctgctgcccaacagcttctagggcatttggaccaaaatagccaacagcgggacaatctcttggtagctctgtggggacccctccccatatagaagtttctagaatgctgccagtgtcagaggctgacatcagctccctaggctatcagagaggaaaagataatttttgaactttgttcttgactatatatattacctttttccatttcacaaatggagctaccaggtaggccacacagcttggaagccaggcctggtgactccaggcctcagagcctcagcagctggacctctcagaccagcagctgatccttgcatggatgccagttccatccagaagttcggggccggcatggaaagtgctgactggccctgcaggccacagcgggggccctggcagccacttgcctcgctcaccctccagcctaagatggttcaagtgcaggtgggggagggaagagggaagaccagtcactcactctctctggcgcggcacccgagaacctgcagggattgcccccggagcagagtcagagtgacccaggtcccactccctttggcggtgctttggcaccaggcgggcgcgagggggcagggcgcacgcccgggacacgcc

SEQ ID NO: 251 - DNA, 569 bp, Homo sapiens
  source 1..569: mol_type = other DNA
tgggagtggagcagagaccacttcctcttatttttttaaattccagcaattcagaaggaattaaagtaaaagacgtaagttctctggttgctgatatctggtacctgagatcaaggcaatttggcgaccagacgggtcaccgcttggcccggcctaatccaactgcgcacgtcggtgggccacagcatcgcagcgctggatccccgggtcggcagaggcggatggagttcagcctctttttcaaaagccagctctggggcagccccccggagcccgcccgctccggtccccgggacaagggcgcaattgaccagcgcgggccgcctctggcccacccagattttttgtttttaagccatcaaattcaatatttacaggaaaaacttactcttaaaaaaataataataataaatataggttttttaaaatttatatataatttttaaaaccagggcccgcagtcctggcggcccccgcagctgcggccttttggcgccggccaaacagagcccgagggcgggcctagcgcgcccggacggagaccaccttgcggccgaccccgctccccc

SEQ ID NO: 252 - DNA, 462 bp, Homo sapiens
  source 1..462: mol_type = other DNA
tctggggcagccccccggagcccgcccgctccggtccccgggacaagggcgcaattgaccagcgcgggccgcctctggcccacccagattttttgtttttaagccatcaaattcaatatttacaggaaaaacttactcttaaaaaaataataataataaatataggttttttaaaatttatatataatttttaaaaccagggcccgcagtcctggcggcccccgcagctgcggccttttggcgccggccaaacagagcccgagggcgggcctagcgcgcccggacggagaccaccttgcggccgaccccgctcccccgaaagttctcaactgcaaagtttgctgtccggctgcctagggtctgggaagctcgggcaccctccccccaccgtcgcgctcctccaggctgggcctgtggccggaaggaggtaagacccagcgcaagtggcttcctgccgtcgcc

SEQ ID NO: 253 - DNA, 546 bp, Homo sapiens
  source 1..546: mol_type = other DNA
atagaattttacttgtattgatacccttgtaacttttttaacagatcatttgttgtgagagaaaccaataggctgtttccccacctcactaccagtcataccttaagaatgtgataaatacttcctgctgtatttaaaagttaaaatgtggaagtttgatgtccggtccgaagggcgaggcacggacctccctggaccagagcaggttggtggccccgggcggcctcccgttggcggctctcaaaatgggacagcacccgggctccgctacccgtcaccgggccttccgcgcccctcgccccacgccgcgggtgcggtcctccctccagcagagggttccgggcgccggcgcggcccgcacggggccgggagcccttcctgccggccgggtgcgcgcggcgccgccgacagctgtttgccatcggcgccgctcccgcccgcgtcccggtgcgcgccccgcccccgccaacaaccgccgctctgattggcccggcgcttgtctcttctctccccgcagccaatcgcgccgggcgaggagctcctggt

SEQ ID NO: 254 - DNA, 629 bp, Homo sapiens
  source 1..629: mol_type = other DNA
ggttacctcagttcttctgaagaggggatgggactgcagggctcaactcttctgctcccagtagaagaaagggaagaagccccatcgacgccttccttcccggctaagaagcttaggagctggctaaggctgctcctccacctggatgcacacacagggctagggctgtggagaggcgggagcaccagcggcccacgccgaggaagataggcgctccctcctggggtgggcagcgcaggtctggcctgcgggagaggcacgcggggcaccagctcagctcccctagcacggctcggggcaccagttctccagggcgggggctgccccaccgctcaagggaggggacagagggccggcctcggtccaggcgacccctgcccctcgccaggggcgccaccttggccccctcccgactgccgtccgccgcctccgcccccccggggggtgtgtctccgaagtacgggggcgcgggaggccaagggtgcccccagcctccgaccgagaccccctcccgagccggcggcgaatggtaggggcgcgcggtgtccttcttggagcagctctcggcgcccgcccgccggggtctcggcgatcgctctccccccgccgcctcgccaccgccgcggcta

SEQ ID NO: 255 - DNA, 450 bp, Homo sapiens
  source 1..450: mol_type = other DNA
gtgttgatggctgtgaccttgggctggtcactggcctcagctacaaggggatggtagtcacttccaccttctctttagggtaaggatcacctggtcctattgttaaaagagagtttccactgcagcagcaatggcaatgattcagaggctctggagtttgcattcagcagcgtctctggtgactcttcagaacgttgcactgggcagtggcagtgcaggaaaggggagactgactccggcaacgcccaccttccaggcctgatcacctgtcttcagtggagaaacaggacagcggtggacagtctcgacttccggaggatccagcacttcagtaaggtcgggctcggggcagaggagggacccggcagctcacctggggctgtgatgccacctcccaccagcagatggggtcctccctcaagtccaggctccaggacatccggcttttgc

SEQ ID NO: 256 - DNA, 534 bp, Homo sapiens
  source 1..534: mol_type = other DNA
ggttacctcagttcttctgaagaggggatgggactgcagggctcaactcttctgctcccagtagaagaaagggaagaagccccatcgacgccttccttcccggctaagaagcttaggagctggctaaggctgctcctccacctggatgcacacacagggctagggctgtggagaggcgggagcaccagcggcccacgccgaggaagataggcgctccctcctggggtgggcagcgcaggtctggcctgcgggagaggcacgcggggcaccagctcagctcccctagcacggctcggggcaccagttctccagggcgggggctgccccaccgctcaagggaggggacagagggccggcctcggtccaggcgacccctgcccctcgccaggggcgccaccttggccccctcccgactgccgtccgccgcctccgcccccccggggggtgtgtctccgaagtacgggggcgcgggaggccaagggtgcccccagcctccgaccgagaccccctcccgagccggcggcgaatggtagg

SEQ ID NO: 257 - DNA, 575 bp, Homo sapiens
  source 1..575: mol_type = other DNA
cccgcgtgtctacaacaggggggaactggacctgcctcctggggctgtaaggagataattagtctttctaaaccctgaacacccactccagcgggtgggttctgttgtgcagaccaggctctggcctcccctgccaatggctgccatagttggagagttctggacagtggggaattactaatgccaagtgaggtgaagtcacagggcctcccaccagatctcacggtgggtgcactcagcccctcacttagaggatggccgagcgaaggaaaggtcccggggctgctcccctgcccgcccaccccggtcagctgtggggacctcggctctcggcaaggctgtcacaggaggggctttcaaagaccggggctcgagttcggaccctccgtgtccccgggaatgaccgcgtcggggatgcaccgagtggcgggggccgggcgcacaacggggcgacgcggcggcgctccccgggcactggggccagtctgggcgccgcggcggggcgggggcggggcgggggcggggcgagcctcggcagtcgccagcccggacgcgggactgagagccgttcccac

SEQ ID NO: 258 - DNA, 401 bp, Homo sapiens
  source 1..401: mol_type = other DNA
gtggcacgccatagtgggtacagttttggaatcaaacacctgtaaaatggaaattgtatgaaattggacaggaatctgtgtgattagcatcctttccccctgtggggcctgatgctacccatgccataaggaaggagggggaattcctattcctctagactccaaaggacttgatgtatatgtgtttaaaatatatataatacattttcttttatttttgaagtttgaaatattgggatttactcaaacaggtgactccaaagctgcttatttggctccataatgagttgagtgaactggacaatttgccaggaccctccattgttcattttttaaatcatctcaagaggaattgcatgtagactgtgagtcactaagggctgtaaacactccagagagac

SEQ ID NO: 259 - DNA, 271 bp, Homo sapiens
  source 1..271: mol_type = other DNA
gattaggagctgggacagctgttctggtcttatctagggagcatattattataggtacctgcctttattatttgcatttgcaggtggccaggcaaggtgaacattctcctgggcaaaacgcctcctaggttggtaaccccgccccttgctgaatgcccgcatgttacaactctgcaggtgtacacacgtggacaccatatgtacccatgaattccaggaggcgccttcagtcctcggctcgatcctgtgacgccagccagctgcctatcgg

SEQ ID NO: 260 - DNA, 274 bp, Homo sapiens
  source 1..274: mol_type = other DNA
ctcaagcgatcctcctaccttggcctcaggagtagctgggactctcacctcagagcagataaccgataatttgggaggctgaggtaggcagattgcctaagctcagggtcccagctacttggctgagactccagcctgggcgcctgtagtcccagctacacagggggctgccactgcatctgcaactcagaattttctgtttcaggatatttggaaaatccatacttctaagggccttatcagagcaggaccaggtgcactcacctgctcctgc

SEQ ID NO: 261 - DNA, 568 bp, Homo sapiens
  source 1..568: mol_type = other DNA
tttcgtctgtccaaattggagcctgagaccagagatacttatctgaactctttccccagtcctgtccaggagccgttggggaggacatctcctctggggaccccatcaaaatggcgacatcatgatctccctgcccagcggtgcggggcctcgggagagaggaccaccagccccttcccctgtccttcaagagggttcacgtttttccggagaagggggtggggcggcgccccccctcgcttccccgccccccggcaagccccgctcctcacccaagccgcgggggaggagccctcttctttcccgcccggccccggcccccagcaggacccctcccgctcagctgctacagtgggcacgaagaggggcatggctttcggccgcgctccccagcctcgcggggggcagacgacggcgggcggggcgcgcagagtacactcgacccccggcggccgggagcgatcacgcgcacgccgcgcgggcccgggggcgggggcggggcgcgcggtccccgccagggcccaagtcccaccttcgggggcggtgcctggcccggggagtgtcagga

SEQ ID NO: 262 - DNA, 755 bp, Homo sapiens
  source 1..755: mol_type = other DNA
cgcggtccgcgccgacttgcactccccggagccagaactccgtggcggctccgggcctccgtggatccgagcagagactggctgcccgcctgccactcgcaggctgggaaaacgccagccggtgcctcgccgggaaagttctcggcaaagctggggatgagccctcagcagggcaggctcccggtgcagcgcgcccccatccattgcccgcgcgcaagaacccggaatgggccccacctgggccgggactcgggcgtgcgatcccgagggcgccctggggaccacgcatcgggtggggaccctggccgagggcgtgagctgactcagtttttaaaaactcgtcacctcgctgggaaccagcccaggggcggggcggctggcggagctgtgcctcggcggaggaaagcgggtctcccagctccacacacgcgcgtgcgcgcacacacgcatgcacaccgattctctgggccctagggaggaggggggatcagggctctattttctcccgaccccctcttatccaactcggctggcaagggttggggagaacttaggcccagcccccggcacacgctcagcgcgctccagcggcatacgctggggagtgggtgcccgcctcgctcagctgcgatccctcgcctcgggcccgggggtggtgccgagggccgggagggagggtcggccggtgggcggtgcttctccgggctggaggccgctcctggccggcaccgccctccgcctcccgcggtcggcgc

SEQ ID NO: 263 - DNA, 264 bp, Homo sapiens
  source 1..264: mol_type = other DNA
tgaccctggtatggcctagatgctgtctcctggccgggcatggtggctcagcctgtaatcctaggagttcgacaccagcctggttgcagtgagctgagatcacgccacttcattccagctccgagcaccaacaattagtatttttctatatctacctttggcatctttttcaaagtatttctagggtgacatgaaatgggaaaaaaaaaatatttggacacagctcttttttccactgggctttgagaaaacataaaaccaggg

SEQ ID NO: 264 - DNA, 209 bp, Homo sapiens
  source 1..209: mol_type = other DNA
tgactcatgcaacccctggtatgacctagaacaggcttctcagcaactcctggccgggcgcagtggctcagcctgtaaccagcctggccaacatggcgacttgtcagtgagcccactgcactccagcctgggtgtctggaccaacaattagtatttttctttggaaaaaaaaaatttggacacaagctcttttttccactgggctttga

SEQ ID NO: 265 - DNA, 286 bp, Homo sapiens
  source 1..286: mol_type = other DNA
ggcggggccctgggggcggggcgagtcgcggaggtgccgccttggcaggtgcgtcctgagggcggtgaccccagaattgaccctggggacagggcgaggcgcggaggcgtcctgaaggcgcgggcgggacggtaacgcggggccctgggggcggggcgaggcgcagaggtgcgtcctgagggcgggcgcgactcctggggtgacccggggccgtgacgcgggggcaggccctggggcgggggcgggtcctggggactggggcgggcggccgaggcccggaagcgga

SEQ ID NO: 266 - DNA, 184 bp, Homo sapiens
  source 1..184: mol_type = other DNA
ggggcggggccctgggggcggggcgagtcgcggaggtgccgccttggcaggtgcgtcctgagggcggtgaccccagaattgaccctggggacagggcgaggcgcggaggcgtcctgaaggcgcgggcgggacggtaacgcggggccctgggggcggggcgaggcgcagaggtgcgtcctgaggg

SEQ ID NO: 267 - DNA, 509 bp, Homo sapiens
  source 1..509: mol_type = other DNA
taaagggtttactgagcccagtgcgagatagacggcgccgacctgcccaacaggtaggctgccagctctctgggcagcatatccggtctaagccccgcctcgcgctcctgccggaggtcgcaaccctgcaggagacagccccctcccccgccgccctccgagagcccagggcccggccctgttggctcccggctccccccggggccagcagtgactggctgagtcggcctggccccgccgcgtccgcggttccgcgcgtcacgccgggaaggagttaccaaccggctgcagctccgtgctccagttagttcgccgggccgggagcttcccgtccacaccagcgctcgcctgggcctggggaggggaccactcgccgtctaggcgtggacctggggtggttgctatagaaacgaggcgcgctctttggttgcagccaaaaggccagaaggacctcctcgatccaggaaggtgtttccgctcctaccgggagatggccctcgtctagcaac

SEQ ID NO: 268 - DNA, 308 bp, Homo sapiens
  source 1..308: mol_type = other DNA
aagaatccaccttagaatctgcttttagagtttacattccagtggaaggatcaggtgataaactatatcaataaataagacatactatgttagatagtgagaaagctctttatatccgcaagggatctatctcattggctcaaagaaagttgttacctagcaactgttgctagacgagggccatctcccggtaggagcggaaacaccttcctggatcgaggaggtccttctggccttttggctgcaaccaaagagcgcgcctcgtttctatagcaaccaccccaggtccacgcctagacggcgagtgg

SEQ ID NO: 269 - DNA, 449 bp, Homo sapiens
  source 1..449: mol_type = other DNA
ctgaagctagcagttctcagatgttttcgcttttttaaatctcaagactcctttacacacaattattgaggccaggcacacctgtaatcctaacactttggtaattacaaaaaaaatttaaaaaatattagccagttgagggagcctgtggtcccagctactcaggaggctggggaggatcaggattcaaggctgcagtgagccaactgcactgcagagacagagccagaccctgtctctctaaaaaaaattactgaggatctcagaaagcttttgttatgtgggatatatctgttgatatatacaggattataaattaaaagtggctcatacttgtattcccaaacagggtctcactttgtctcccaggctggaacgaagtggtctgcagcgctcaggtgatgctcccatctcagccttctgagtagctagtgagaggtgaaacactg

SEQ ID NO: 270 - DNA, 446 bp, Homo sapiens
  source 1..446: mol_type = other DNA
tgcagtggcctgatctcagctcactgcaagcagtagctgggatagtccttttttaacaaggttatttaaaaagactttactgtagtcccaactactcgggaggctgaggtacgattgcttgagcccagcagtttgaggctgcagtgagctctcaaaataactagctagctagctaagtagctaactaactttactgcttcttgggacatttaaaaatacattatttaaaaaaatgcatttcctatttttctggcttagagaaagatcattttcctcacctgtaatcccagcacttcacagctggcacagtgccggccagtgggcacccccagcctgagttgaggggagagcacggcaggtcctggggcccctcccccgccttgatcctagggcgcccctgacctttgagccggctcgggttccggctctggcgcgtgcacactcgc

SEQ ID NO: 271 - DNA, 348 bp, Homo sapiens
  source 1..348: mol_type = other DNA
cctgttaaaatggaaaaaccattaaagtagcaaatatttattgagtagattctaacgtgggccacagccaactggcttctgtagactagggagggtaatgattttggtttcaatcctaaatcactaagacaggaagtgaattactctgaaaaatatgttttattactaactcctgtactagattgagagttacggagaaggatttatccactcctccacagacttctgtcatcttcccggccccgccccccgctgcgttgcgaaggcggggaaggcgaggcgggctttacggcagccgcgttgcggcggggcggggcgccgggcggccggcgcgcttggcggcagccg

SEQ ID NO: 272 - DNA, 383 bp, Homo sapiens
  source 1..383: mol_type = other DNA
accattaaagtagcaaatatttattgagtagattctaacgtgggccacagccaactggcttctgtagactagggagggtaatgattttggtttcaatcctaaatcactaagacaggaagtgaattactctgaaaaatatgttttattactaactcctgtactagattgagagttacggagaaggatttatccactcctccacagacttctgtcatcttcccggccccgccccccgctgcgttgcgaaggcggggaaggcgaggcgggctttacggcagccgcgttgcggcggggcggggcgccgggcggccggcgcgcttggcggcagccgtgggaggcaggccggcaggcagacggactcgcaggcgtgtggcggcggccgt

SEQ ID NO: 273 - DNA, 449 bp, Homo sapiens
  source 1..449: mol_type = other DNA
tggcctgtggggtcggagtctccagagtccttgggtctctggggagggccagtgcctcgtgggggcccagggtctgtgggggtccccagcaggtggggttggggtctccggagtccctggagtctgaggctctgaggtcccaggggcctgagggccggtgtcccgggcaggcggggtcggggtctccggagtgtctctggggtccctgagggaccgaggagggccggggtcccagggtctgtgggggtctccggagtccctggggtctgagggtgtctcgtcccggagggtctctgaggagccccgaggtccccggcaggcggggtcgaggtctctggcgtccctgggtctggggagggccgcggccaagggtctgtgcgggtctccgggtccccggagtccccaggcgcaggcgggccctggcgccgccccgcctgacatcagttcct

SEQ ID NO: 274 - DNA, 512 bp, Homo sapiens
  source 1..512: mol_type = other DNA
gcagaggccaaggtgggcatgttggtaccggccccagcctgagcagacacacctgacagctggcccaggtggcgtgggcatcccagggcaggcctggcagcaagtccttaccagccaagtcacccaggtgccctgaagtcctgggagcagcgagtgcacttctggagtggatgtcagtatctccattttacaaatgagagaaactgaagctctgagaggaagtgacttgcccaggggtcacacatgagagccacacctgggattccaatcagcgttggccgtgtaccccatgccagggacctcccagtcacttgccccctgcctagggctctgccaaagctggacaggctaagccagaggcaaggcaggggtgccagccctttgcccagggccagagggaggccaggaggaggtgcctgggctggttggcaccttcgatcccagggtccaggcccgccctcggctggcaggtgtgggcacagaggcagctgggattggtcgcagctggcgga

SEQ ID NO: 275 - DNA, 467 bp, Homo sapiens
  source 1..467: mol_type = other DNA
tgctggacccaggtgaggcctgccacctagtggacccagggaggagcatcaggaagggcggccccggcctgtgggaggagaaggctcaggcaggctcgggctgcaggagattccacaccgagtcagagccacctcaggctgagagggcacagctgatctctggctatggggggatagagtccctactctcagaccctgggctgaagggtcagagcccacacttcaggccctgggacttcgaaggggcattgggtggttcaagcccggctggagtgcaatggtgtgatctcagctcactgcaaccgagtagctgggattacaggtgcctgaccttggcctcccaaagtgctgggattacaagttcccttcaccccacactgcccaaatggggagcccgggcagcagctggctccaggcaccccgtgtgcctggagctgggaccttggggcctcgaagggttaacaccc

SEQ ID NO: 276 - DNA, 479 bp, Homo sapiens
  source 1..479: mol_type = other DNA
ggaatctgtaatcccagctacttgggaaactgaggcaggagactcacttgcagtgagccaagatggagccactgcactccagcctcaaaaaataagaatagaatcatttttcctgggtcactgatttggaaattaaggcaaagtgacttgcctgaggccctagcatgagtctcccatgcacttctcatgagatcagaaaagtcttgtgcaataaatgaatgagcttcaatttccaataacaaataagtatcttgtgtttttcagagcaggctggagtgcagccacatgagctcaagagatcctccctcttcagcctccaaagcagctgaggctataacggattccatatttgaactctggacaaggagcaattagctgcgcaagaagtgttgttagataacaatgtctgttgtaccagctcacatacctatgtcctctgaatgttgtaaaatgctgaatgtgaccatcttgatcagcca

SEQ ID NO: 277 - DNA, 242 bp, Homo sapiens
  source 1..242: mol_type = other DNA
acctgggttggcaacccctcggttgcgctggcaagtggcagagctggaatcactcccagatactgatgttactcacagctgtgggggaggcccaaggggcttctgaggctgtctgccaaggtggggacaaggactgatcatgtctgattgcccggtcagtgtctgcgctctccactgtggaggtgccacagcctctgagctggcagacaaagggcgtgtgttctcatccagcgcacttcctg

SEQ ID NO: 278 - DNA, 516 bp, Homo sapiens
  source 1..516: mol_type = other DNA
ccagggacccaggcagtccatcccggccccatcccgggccccagagtccaggctctgcctcccctcccgctcccgtcctaattgctccagctgggagggggaggagccacagggccagccgggccctgccttccagagctcctggagcggcctgtcccccgggacaccgggacccacctgcagagggagaacaaggtgacctgctccactgggggtctccgagacccccattaatcacagtcctggctgtaactgtcaacctggagaggtaggcagtggctacctcccgctcacctccgccggacagggtaggtggggttgccaacccaccactcggggtccatgacggggagggaaggaaacccaccccgacccccccattcccaccccctggcctgtgccaagggggaggggaggcgtcaggtaggggccgcttccgcggggcgggaatcccgcgccccctccccccgagcctcaccttttatggtaaagcggcgcggggcggcggcggagggg

SEQ ID NO: 279 - DNA, 442 bp, Homo sapiens
  source 1..442: mol_type = other DNA
taagcccaaagaaaggtgtcttttttttttttatgtagctgggatcctgagctcaggtgatccgcccacctcggaccgagcccggctttgcccccagcctgggaacggggtcttgtttggaagtcctgacgtcaagagatccttccgccagaaaaaaaaaaaaaaatcaaaatggttttaaaaggtgtcattttcattggtggggctcctagtgcccgccacagtcctccactcaggccggcggggcgggccctggcctcggcctcggtgcgtgggtgcagagggcctaggccgcagctgcttctccctctgccgaattggcggtggtaacctaccagggttatgggttcttcaaaatacaaaaagcgtgcaaaattcggggaacccgggcggcttgcctctgcctcccgcctgcgcgcctagccgcctccctagacgtatt

SEQ ID NO: 280 - DNA, 602 bp, Homo sapiens
  source 1..602: mol_type = other DNA
acctgaggtcaggagttcaagaccagcctggttgtaatcccagctactgtgagccgagaccgtgccactgcactccagcagaaagttgcttcatgttacaatcgctgttcagcagagcggtgagaagggcaacctttttctgatcgctttcaggactggccgtctaggggacaggccttggcagccccaccaggccggggcctggggttgccgctggaggggctaaagaccgctcctgcttcctcagccgccccttgcccggcgcgggaacccgaccgagagcccgccaagcagcgggactccactagcagctgcgcgcctgcgcaccggggccgagcgcgcgagcgttccttcccttcgtcgcccggtccgcgcgcctgcgcgccggctgggaggaactcagcttctccgccttggcaggcgggaggacgcgcgcgcgcccgcggcgagggggaggcagtgcggcggcgggagtcgggccgcgcgcgccagtgggaagcgtccggctgccacagcgccagctccgtcgtagtcgctgccgccccccgctcccccgcccgcccctgcccgggcgcatgcgctgccggagcgcgagggtcggc

SEQ ID NO: 281 - DNA, 297 bp, Homo sapiens
  source 1..297: mol_type = other DNA
tgagactcggtgaagtcaactgcctgccagattggcatatgtgaatctctagggaacgttggtattcttaccaaatccatgtgttgttaaaattatagattatgctgcgatctgcagctttgaagccacaagtgacctgttttcccttttttaaaattaggagaataatactatcttataattggtgtgaggtatgcatgtaaagcgcttaacacagtgcctggcacacataggcgcatgcgtctgtctatgggcgctctcctagcgaggacgctgcgcatgcgccggaagttgcga

SEQ ID NO: 282 - DNA, 295 bp, Homo sapiens
  source 1..295: mol_type = other DNA
ctgtgtctattaaaaataaacaaataaataaataaagtgcacttctctctctctctttctttacctccggagtagctgggagtacaggtgcccgccacctcgcccgtcttggcatcccaaagtgctgggacacttctttttcagtaaaaacagttggctgacttcaaggacatgtgaattaagtagcattacgtatagtgtttggtaggaggcctgcctcccattgagccaactgctctgggccagtggtggaatgcactcagagaatccggatccggtcagtataaaaggtctg

SEQ ID NO: 283 - DNA, 443 bp, Homo sapiens
  source 1..443: mol_type = other DNA
aggttcgaatcccagctctgccacttacgcaactgcgagccccgccctttccaccctcccagctgtgtggggatcaaacggggccgtgctggacagcttgcagccaggagcccatgcccagaaggcattctagaactcagggctagaataattgtcttccggaattctgggacctttaaggagaaagctgccaacttttccccatgggggctggcaggggacagtctgccttgagggaaggagctcctgacgtcacagagcgggcctggggctgctgtgatcagcctggaatgtcaggctgtgagctcagccctctcggcctgcgtgtcgggctgtcagcagggccggcgcacgggatttccagccccctctgggccatggagaggcctaaatttcagacaaggggctggccccaagcccagggacagtcggccttataaagc

SEQ ID NO: 284 - DNA, 427 bp, Homo sapiens
  source 1..427: mol_type = other DNA
ccctgagggagctggggctgcctgtctaagatcacggaggccgaggcagagccaggattcccagcccaggtttgcctggctccaaagcccgcaggctgtgccacacggtcccatccggtcaggaactcggacttgatcctgtgtccagaccctccaggctcaggaagccagcggctctggtggggacttctggcacaagcacctgccgtgtgcctgcgacgtgtcaggagcgtcacatctgcagctcaagtcctccttcccacaccctgtgaatggggagagcctcgccattttgtatgggtgagtcacacccagccccacactgtgcagctgaggctgaaccaggggccacttttgggcaagaggttggggacaattgcctccactcaaaatctgggaccctgggccaccctttgcccctagatgc

SEQ ID NO: 285 - DNA, 495 bp, Homo sapiens
  source 1..495: mol_type = other DNA
agctgcagatgtgacgctcctgacacgtcgcaggcacacggcaggtgcttgtgccagaagtccccaccagagccgctggcttcctgagcctggagggtctggacacaggatcaagtccgagttcctgaccggatgggaccgtgtggcacagcctgcgggctttggagccaggcaaacctgggctgggaatcctggctctgcctcggcctccgtgatcttagacaggcagccccagctccgtgggcactcagggtaattaatctgggagaaggctgactctctacctgacacacagggaggctgtggtcatgctgctctgagacccctggaccctgagtctcaggcacccaggagcctgagtacagctgggcaccaccctctgtgcagctgtgatgggtggggaggctcctgctcccttggcagttctgccctgcacagctctggcctccacagttcccatggtaaaccccggccggcgggcctgtccaggtgcac

SEQ ID NO: 286 - DNA, 434 bp, Homo sapiens
  source 1..434: mol_type = other DNA
aaaatggcgaggctctccccattcacagggtgtggggaggagggtgacgcttctgacacgttgcaggcacacggcacgtgcttgttccgccagaagtccccaccagagccgctgtgagcctggagggtctggacacaggatcaagtctgagttccggatgggaccgtgtggcacagcctgcgggctttggagccaggcaaacctgggctgggaatcctggcgctgcctcggactcagggaggctgactctctacctggcacacagggaggctgtggtcatgctggcgctctgagacccctggaccctgagcctcagccttcagcacccaggagcctgagtacagctgggcaccaccctctgtgcagctatggtgggtggggaagctctgctctgctctgctccggcctgggcagttctgatcggaaaccctggg

SEQ ID NO: 287 - DNA, 417 bp, Homo sapiens
  source 1..417: mol_type = other DNA
ggatgggaccgtgtggcacagcctgcgggctttggagccaggcaaacctgggctgggaatcctggcgctgcctcggactcagggaggctgactctctacctggcacacagggaggctgtggtcatgctggcgctctgagacccctggaccctgagcctcagccttcagcacccaggagcctgagtacagctgggcaccaccctctgtgcagctatggtgggtggggaagctctgctctgctctgctccggcctgggcagttctgatcggaaaccctgggacacctgtccaggtgcaggggagctggaggctccagctcagcctgcaagatgctggggcctgccagggccagacaggcaggtaagggcaggagccagcacctcactttggcctgggactctgcagtgagagtgtcaca

SEQ ID NO: 288 - DNA, 274 bp, Homo sapiens
  source 1..274: mol_type = other DNA
ctatgtgtgagtgagggtctcagacactgacattgattcacacctcaggagctgggatgtgtatgtaaatgcaagtgtgcatatatatgtgtgtgtatgcatgaactcacagcttagggctctcaggccctgaccttcagcccgggcaaccccaggaggtgggggagccccgaagggacagagatggccctcccgcgcgctgcggccacaggtgtgcccgagcctcccggctgcgctcccccgggccccgcccgccgcgccccgcggtgtcgcc

SEQ ID NO: 289 - DNA, 435 bp, Homo sapiens
  source 1..435: mol_type = other DNA
agccgcttctgtcggagagacccatgccagggtcgggggccaggggtgccccttgcccccttcccggattcaaatcctgctgtaacatggggatgatggatgagaattattaataaataagatagtgcatgtctgatccattcccagaggaaatgaacctattctcagatcatagtaggcttataggcttctgaacagagatactcttttcagctcagaccttcaggccagcgttgagctcagtcgcattgagctcagtctcagaggtatgggtatggctcagcgcaaaaccattaaacgtttccacccagagatccctgggggctggcctgcggggagcccgcgagtccagagggccccaaggtcctcctgcccggcccctttaaagacattcctgagggcgggcgttggtgacgtcacgcagggcatgaatga

SEQ ID NO: 290 - DNA, 627 bp, Homo sapiens
  source 1..627: mol_type = other DNA
ggcaccggagcagcccgggaaggtaccagctcctcccatgggccctgagggcagccagatgccgggtgggggtgggggtgggcgatgcccactcaccggccgcctgaggccgtcagggtgcctgggccggggcccaggccccaggcccactctctggacctctccagggaaagggaccgggtgtcgcggccagcccctggtgactcacgagagggcgattggtccgagcccaggtaccacctcccgtttgggcttgggtccgagacagggggccgtgacgctctctctttcctaggctagacacgaagagccgcctttggggtccaggagcaccaacgagcggctagcactcagtaggtgctcaatttgtttatggaatgaatgaatgaatgaatgaattcactgtgtccagatatccgaacaaagccgggcaggggctggcgggcgccccacgctctcccccgcccgtctccagcgcccgcgaactgcggcggcagcagcgcgaggagggggcccgggccgagggcgcagaggaggggccggggccgccgcgggccaacctctcccccagcagctccttccgggcgcagcgctcggcgcgaggctccaccttctcgctgtggcagg

SEQ ID NO: 291 - DNA, 404 bp, Homo sapiens
  source 1..404: mol_type = other DNA
aaccaattccccacagattctgggtaccaagggacaactgtactcacctgataagtggttgactattagtctgtgtacacatctgcatattaatattaggtgcctggcaattgctggtagctcaggggaaaatgcagcttcccattccacaggattgcatgccgggcatagagcatgccctgccacatgtcacatcatctccctaagcttgggaggctctctgtgaagctcccaggatgctccccagctccagtcccctgagcatgctcatgtttgggaagctccagtggtgtctcctaggagcagaagcactgcaggacctgggtgcccagactagccaaaccggttctggggaaggggggcggggagcaggcacgttgagacagccgcctgcctctctctgc

SEQ ID NO: 292 - DNA, 486 bp, Homo sapiens
  source 1..486: mol_type = other DNA
taatactatttacacaggtttgtttatagaattaaatcaggtgacccggtttattcctttcaaaacagtgatttgccagtgggcatttactgagcacccaccttctgggtaacaggcctggtgtccagtgctggaacggtggagaggagctcagagtttcagagctgaaaagtcagctccacagtatttgttgaatgaatgaatgaatgaaaaatacaatccagcgggcctctgactcattttttaaaacttgagccaagtatcagtgaagccagagataagtcatctagaggtcctgcagcaggattaatagagcaataatattaataatagcaacaatcatactatggagggaataacatgttacgtccacgttgcctagtccagagccaccgcgcggcgcaggctgcggacgttgtaggagggacgaacgcctcccggaaccctccgcacatgcgccgcgcgcacctgcgccggagctgccag

SEQ ID NO: 293 - DNA, 232 bp, Homo sapiens
  source 1..232: mol_type = other DNA
catgtctcatgtcctgcttcccgtcatggcctgaaccagtctctcagcatcctataacctagctagtagctccggtctctgctcatcgggccctgtcgacgctcgcggcgaaggcgggtgcggaggcctagctcccccgagcggccccctggccgcccctcgccatcccgccgcgctgacgtgagtgcgcgcgcgtccgccgcgcccgccccggcgcatgcgcgctctgcgc

SEQ ID NO: 294 - DNA, 483 bp, Homo sapiens
  source 1..483: mol_type = other DNA
ctgccctgacataaataattttttttttttttgagacagagcctcactctgtcggccaggctggagtgcagtggcatgagttctcctgcctcagcctccggagaactttaccgtctttaccttacggtagcggatatagtgttaataaatgattagaatactgctttatgagcaggaaatactgtaatgattttcaccctatcagaaataataaaatgttttctgcatcagcagatatttttcatcatttgttggtgtttaaaaatgttttcagaattctgaagataccattatctgtagtttaggaaaactacgactcactttaaaagaaaaaaagttttctttaattgcctgcccttctcgagatgaggacttcccttgaacgcccattctgtaagacagataacgcgttggcccttaagaaagatggcccttgcgtgcctgcgcccgcgacggaggcgcgcttcaaagcgcaggcgcggg

SEQ ID NO: 295 - DNA, 413 bp, Homo sapiens
  source 1..413: mol_type = other DNA
agacattgtatctcccagaatattctgggagaaatcgaagttaagactggaattcttcttcagagtcccgctctgtcacccaggctgaggtgcagtggcacaatttcagctcactgcagcccggctactggtctcgactgacctcaggtgatccgcccgcagagctaccaagcccggcctggaattacttgtgttactaaactttactccccttttgcctctcggtcaactgggccccaggcctaagaaacgggatgatccacacccagaccacgggttacagaggggtctgtcggagaagcctccggaggtcgcccgccacgtgtcttgagccgggtttcccaaggcggtgctgaggcccgcgagctgccgctctagagtcgcaccgcttccgtccgtcggacagaggaacg

SEQ ID NO: 296 - DNA, 584 bp, Homo sapiens
  source 1..584: mol_type = other DNA
cccaggtgaaggcagcctagactagggtatcttagttttcttatacaagatagattcagttgcaatgaaattgttaactgaaattgactttaaataatggcatgacctaaagttatgcaaacatttgccttagataaaatatcaagttttcaaagtttctaatcctgttgaaaaaaaaagtttttctttttctcaaaggcttatttcaaaatctgttaataaatttaaattagaaaataactacaagtgccattgacacattggttattctttttgacctaaggccacctctgggagagctgggggctcttctgaagcctgcccgactgcaccgcgtgcccgtgcctggaagtcagattcggggcggtgcggcagcgcgaggcctgcagtcggggtcgctccagccccagagggggtgtgtctcctgcctcttcaacctggcaggggctgttcaaggcggaggggagagagggatttccccgtccccgctgcacttgtgcagaagaggccgccgggtccctttaaggccccgccgcgcctgcgccttgtatcctgacacgcccatcgggatcctgaggagccag

SEQ ID NO: 297 - DNA, 238 bp, Homo sapiens
  source 1..238: mol_type = other DNA
aacttggtctcacagtggcgccggaagttcccccctcaccccgtcgacgtcgagtgaggagcgtgaggacggccccgggcgcctctaccccggggacacccccccccccaggagatggaaccccgagggcacggcgtggcggcccatgcgggcagctcgcgttaggacccagcggctccggggctggagggcgggcgccagccccgtcgggggcccggagggggactcggagcgggcc

SEQ ID NO: 298 - DNA, 258 bp, Homo sapiens
  source 1..258: mol_type = other DNA
ggaaggatcacttgagcccaagaggtgagcggtgccactctccagcctggatgacagagcgagacatttacatcaaatgtcttctagtgcaaatcttatatagattatagaggcataattaacttatagcgtgggagcctgtgttctgccctgcctgcccccagtcactgagtcagggctttgtcagcttctgacaagcagaaagagcaaatgcggtttctgggattgcaacttggtctcacagtggcgccggaagtt

SEQ ID NO: 299 - DNA, 344 bp, Homo sapiens
  source 1..344: mol_type = other DNA
ggcatgatggcggacggtatggtggctcacacgcctgtagtcccagctactctggaggtgggaggagagcctgggaagtcgaggctgcagtgagccaagactgcacaccggccttcaagaccagtctggatcccagctactcgggaggctgaggcaggagaatcgcgtgccattgcactccagcgggcagggacccggataggatggctccgccccatctaagctcagactcctcccctttctgagaagggggaagccaaatgggcatgcgccgctactgcgctattgcgcacgctcgctgcccacccgggaaaccggaagccgcctcccacttggttgctcgt

SEQ ID NO: 300 - DNA, 386 bp, Homo sapiens
  source 1..386: mol_type = other DNA
ctttggagctcctctgtccagaggtcctggagacagggaacctgcacgcaggtaagacatctctggtgcctttcaggggtcttcactccctgggtctctgtgggcccacatctgaccctgtcgccaggcactgtctcaagtgctttggcatgatcccggctcacgtgacttgctcacggtcgcgcggcctggaagacatggagagctggaccagcacgcacagtccctaaccactgggacgtgctggcgggggctacctccgtgaggtgtgtgtctccggtcgccccgcccccggtgtgtgcggaggagcaggcggggactacaagtcccggcagccccggcgcgggcgctgcgagggccgcagagggccgggcggggcttgcggc

SEQ ID NO: 301 - DNA, 419 bp, Homo sapiens
  source 1..419: mol_type = other DNA
gcctggcatgctggcatgtgcctgtaatcccagctacccgagaggctgggttgggagaaccactgcaaaaaaaaaatcagccattgaaaaaattaaagttagttttattgagtcttactctgggagagggtttcagagagtttctgttagactgcagaggcaggcggttctgtgtgtgctcagaagctatggtcaggcacggtttgagaccggaaggatcacttgagcccaagaggtgagcggtgccactctccagcctggatgacagagcgagacatttacatcaaatgtcttctagtgcaaatcttatatagattatagaggcataattaacttatagcgtgggagcctgtgttctgccctgcctgcccccagtcactgagtcagggctttgtcagcttctgacaagcagaaagagc

SEQ ID NO: 302 - DNA, 337 bp, Homo sapiens
  source 1..337: mol_type = other DNA
gttcaagaccagcctggccaagaggcatgatggcggacggtatggtggctcacacgcctgtagtcccagctactctggaggtgggaggagagcctgggaagtcgaggctgcagtgagccaagactgcacaccggccttcaagaccagtctggatcccagctactcgggaggctgaggcaggagaatcgcgtgccattgcactccagcgggcagggacccggataggatggctccgccccatctaagctcagactcctcccctttctgagaagggggaagccaaatgggcatgcgccgctactgcgctattgcgcacgctcgctgcccacccgggaaa

SEQ ID NO: 303 - DNA, 471 bp, Homo sapiens
  source 1..471: mol_type = other DNA
cccactgggtcccaggggaagggctgggacatgggaggggctggccgaggcccacactgattgtcatcctacatctcagcctctgtgagacacacgtggcaccccccttcccttggtggcccaggccagaaccggggcccagtggccgggtcagtccccacctctccagctctggccacagccaggggcgatgggggtaccgggctgcacccggctttgcacaggcagctccctttaagaaggttccaggatcgtcttctctgggaaggcttcctggcccccaggctgggtgggctggggcgtccggaggggagctagggccctccaacacctgggcgcccaatgacttcgccacgacctcagcggggcgggacgagttaggggcgggaccacgcttgacggacaggcccgcagcccactgcgagaggactggggcgggccgccccgcccaccggccgctggataaggctg

SEQ ID NO: 304 - DNA, 276 bp, Homo sapiens
  source 1..276: mol_type = other DNA
acaaacacttgtcactcagaacaggctgaagcttgctgtgctggctctgcacaagggcctaccctcacctgttggggtggaagttataactctaccacttactagcagtgaatgaggataaaagtcataattgttagtgttttcaggagctgtgctaatcgtactactgttacagctgccaacttacacatgaggcagctgagaggctgctggggagctctggagggtctcctgtcagcaggtgagtctgcttcgcccggggcccccggctcagcc

SEQ ID NO: 305 - DNA, 392 bp, Homo sapiens
  source 1..392: mol_type = other DNA
gcagagaacatcaacttccatgccaggaagctcatctggcaccttgggcaagagctagtcacttttactctctgagcctcaattttccctgtaaaatgggttgtaataataagcccatatacaccttgtattgtagcgagatgtagctgtgatacagtctggaacgtgtcatatagatgctaatggcaccaacctcagagggctccaagcctgcctctctgatatgcctgtttgacataggtgagagatgggactgtgggcatgaggaccaggacccaacccctcagcactgcccagggcccacacccctgacctgagtggggaggggttgagcctctgggccacagaccgcaggtgctgactcatggcctctgctgggcgatataaaggaa

SEQ ID NO: 306 - DNA, 511 bp, Homo sapiens
  source 1..511: mol_type = other DNA
gtttttttttttttcctttttttaaagagaaaaggttaaaaaaaaacgcagggacgccggggagctggcggcggccctggacactttgcagtcgaatcggagaccggccgggccgcacggccggcaagggggctggggctcttcccccgtcgccgggggcagtccgccgtagggattcggctaactagagcccgaggtcggcacccctgagctggggccgaacgggggtccagggggggtagccggggagcaggggctcccttaccacccaggtgccaagggggagtgtcccgaagccttctttaatgaaaatctaggggactcaggggattgcctctggggctcccggctgccctgcgggattccccgaaggagccgcgccggggccagggaggggcgcgatttcctctcccaactcgccccctctccgcccaccctgcggccgccactttggggagggcagaggaggaagtggaggccgggtggctcgtctccgctcccctccccccgc

SEQ ID NO: 307 - DNA, 307 bp, Homo sapiens
  source 1..307: mol_type = other DNA
tgcagtgagccgagatcacgccactgcactctagcctgggtgacagagcgacagggctgaaacccaggtctggtaaaaaaaaaaagttggtgtttctcaaagggcaccaaaatgctttgggggtgcttattaaaaatggatcacctgaggtctggagttcaagccagctactcgggctcgcaccattgcattccagcaatatcatatatcaacagttcctggtgcctagccaggtacctgtggggacttgcttcccaagaaattaacttcctggccaatcctgagctctcagctctgggaaggggct

SEQ ID NO: 308 - DNA, 290 bp, Homo sapiens
  source 1..290: mol_type = other DNA
gggagtaccatcacccttcagcctgggtgctggaggcgtagctgaatctaacttgcaatatgattttgctgaggcaggctggcacttgcagccacatttccaatttgctcagcacagtgccagacacctgtgcctcaaagtgtcagagaaatcggaagtgtcattttcagctcctcactatgtaacatttgttacataagtggcagccgggagagtcacgcaggctttccctgggtactgcagcataggatcagatgatgcaatatgatattagcgtctcattgcatcag

SEQ ID NO: 309 - DNA, 345 bp, Homo sapiens
  source 1..345: mol_type = other DNA
tggcatgatctctcagcctcccgagtagctgggacttcaaggagtccttccaccttgttacaggtgtgagccacagtgctcagcccctcatctttcatgcaggctgggtgcatgcctgtaatcccagcaagaccagcctggccgcgggcgcctgtaatcccagctgctccaggctgggtgacagagcaagactctgtctccaaaataataataataataataattaattaattaattaaaaaaaattacaaagatcttccaggaacgtggggtattggcagcatttccccaactgccgtggaaaaacagggtgtaaacattttttcagactattgtccctttata

SEQ ID NO: 310 - DNA, 464 bp, Homo sapiens
  source 1..464: mol_type = other DNA
tctcgaaatgtggagttcagcatactttgtaaagcttaccactgttctgcagccccgggcactgtgggtctaccgggggctcagtaaatatttggcaaaaaatcaaattaattatgaattaattcactaatacagcaaattatgttccgtgtcacagcaccttgttacatagcacaggaaaaaattattcaaattgtattcatctttcataagtccctgacgcgcaggccgcactgcgtggaaggcccaaagcgcgctcgcgggcccgcgaaaggcgcaggagcgcggagccgaggcgggcggcgaggcgcgcggcgcgcggcgcaggctcgggtgggcagggcagggccaggccgggcggggcgggggcgccggcaacgggtccgccggccggcagggggcgcgcgcgccccgcgccccgcgcctcccgccccgccgcgcgctcgcttgccgcgcggccgcac

SEQ ID NO: 311 - DNA, 465 bp, Homo sapiens
  source 1..465: mol_type = other DNA
ccattgcactccagcttgggtgacaacagtgaaccaagattgtgccactgcactccagcctgggtagaaattctctacaaaaaattttaaaaattagttggatgtggtcccagctactcaggaggctgagatgggaggatcacttgagcctggaagttcgaggctgcagtgagctgtgattgtgccaccgtactacagagggagaccctgtcttaattatatatatgagaaaagtgtactgttacttggggaaatagtatattaattaacagacatttatagtatatgctggctttaagcatgtacctcttacacgtggaaagaatacatgtaatcttctatgattaattttgaaaagataaagtaaatgatatatatgccatgataagataataacgtggatttatattgtactttcatattgggttcatatccatcttacagatgaggactcagcctgggact

SEQ ID NO: 312 - DNA, 319 bp, Homo sapiens
  source 1..319: mol_type = other DNA
acctgtggtcccagctacttgggaggaggatcacctgagatcatccgccactgtgtggcatcccagctactcgggaggctgagagaatcacttgaattgcagcgatgggtgcagcccatgggtgcctgccctgtacccaggccctgtgtgccttcccaggccagcgggcagtggtcggagctcagccctactacgtcctcccaggctggttgatggatggctcagccccggctggcttgactcagtctagctgcttaccgcccttgcccgcccagcaggtcgggcaagtgagtgactcacacacctgggctctgtgtgg

SEQ ID NO: 313 - DNA, 639 bp, Homo sapiens
  source 1..639: mol_type = other DNA
gagtattaacaacaacgcggataatcttaattaatgacctgataactgtaattaattgcatcatatccagaggccctctttggaatttcattggagctgcaaaggcaggggaatgctaggatctcagtctcagcactttgctgctcagtttctgagcctcagttttctcctagggaaaatggggctacactggggtgttgccggtctcaaagccgtcaatgcctgaacccgccagggttgttcttggaggtttggctgcatggctgcaaggttccccatgttgccatggcggcccctggggccggtccaccagcaccctgcgcgcctgcggggtctccccgcggagaaccggggaaggggaggtcgccgtgtggccggggccgggccccatccccgcgggcctcagtttcccccctgtactgtggggggccggtgggctgccgggaccgctgggggctcgcagcgggtcgggggaggccacgtctccctcgcggcgcgctgggagcagggagggggcgcggcggccgctgccccggccaccaggggttaagcggtgacctcagccgcggcgccccgggaccgggcgggcgggggcggcgccgcgtcgcgcacggcggcggcggcgggaccaggcctcgg

SEQ ID NO: 314 - DNA, 385 bp, Homo sapiens
  source 1..385: mol_type = other DNA
cattttctcatttataatttggaataatagacgttaatatttgtaaagtgcttaaaagttggcaatgcaagaatgtctactgttactaatattgccattaagcatttcatttttgtttagtaagccagtttaataaaaataaagctcctccacaagacagcccccgcgggggcagggttggctccagggcccaggaagcccaccggaggcatcagggtgccaccttgggccaggaggaactgtgcccccacgcttggccatggggcaggacagccttcaagggagcccatgcttcctgggcagccaggaggtgatcctggactctggggccagatttcacgacggacacccagcaggtccctgcaggtcccttggcactggcaac

SEQ ID NO: 315 - DNA, 292 bp, Homo sapiens
  source 1..292: mol_type = other DNA
tgaacctgaaagggccagaccttcaagtttcagggtttggctgtatcaatagctcccattttccagtggagggtgcatcaaactgttttctgtactaaagtctctttcctctaaatttcttttcagagaattttgtgcataatgtaaatggaaacttacagattcagcataatacgtatatgattaatgcatttgttttatgtatcggtaaaaatggatctgggaaattttctccctggccagcaggcatggtagagggcgctggggagccccagcagcggggaggttccgc

SEQ ID NO: 316 - DNA, 361 bp, Homo sapiens
  source 1..361: mol_type = other DNA
tcagggactcctgatcattcagttggggcgtcccctcaaacccaccagcaaggagctcagagttggtgagttcagagctgtatcgacggcggcggctggagacgtctgcacctagcacttggcagacccactttgccaagcctcggaaccagatacggttactggggggggctctgactcaagtcaccctaggccggttcccggggagcctcactggatgactccgagagcagccgtgggcgacctgggggccggggactcggcggatccggcccattcaaggcactgggacaaagttggccccctcccctcccccaaaacagaaaagagggaaaaaaatattcgttggcgatttcttttc

SEQ ID NO: 317 - DNA, 375 bp, Homo sapiens
  source 1..375: mol_type = other DNA
aaggcactgggacaaagttggccccctcccctcccccaaaacagaaaagagggaaaaaaatattcgttggcgatttcttttcgaggaggctccttcttccgtctgtccccgggtctcctaggggacggggtatccgcagtctccgggctcggaaactttggccccgagcgccagagcgccagagcgcgagagcgcggcgctcgccactctgaggctggcggcctcgattccggccgcgttcccccggcccccctccgccgcggggcctggtctccgggttctgccaggcgcatcagcccgcacaacttctggccgaggccagccggcagaggcggctccccagcttctggacgcgtttgactgcagccaggggtg

SEQ ID NO: 318 - DNA, 293 bp, Homo sapiens
  source 1..293: mol_type = other DNA
gcaggaggcctcaaagtccaccgccagggctgacttctcggacctgggaagaaaagctgtcaggtctaacttggtctctgccaggaggaaacaatcagttcctcatggcatttccgtgggtccctgggggaaggaaccccttaatcttgcccaatgagggcattcactgccctgctcccaggatggcatctttccctctcgggagggaggctgcctcctttcatcaggctgagggttaggagggggtgagctctccttctccctgcgggggtgctcgcgccgccgggagaggc

SEQ ID NO: 319 - DNA, 536 bp, Homo sapiens
  source 1..536: mol_type = other DNA
aaggaaacgtaacattactttagggtccctgagagaagacttcagaatccaagttttaaatagcattctaggaaatttttacttgggggtaaaaggctcgaacaactggttttgcggccaaaggctttaaatgaaaagctaagcgttggccagctcaggttttatcttgcattgagaagctggccggccccgcgcctggagggcggctgggtcctggccaagaagctggaaggcaggctcattccaggggccgcagcccccgggaagaagcagggggctggccgcgctgtggccctgcggggtcgaggagtctggtagcggacaggagcccgagagaagtcagtcggactcccatcgaacccggggcgcacgccagagggccggacgcagcgagtccttctgccccgcttggctgccgcaggaccgcccatgcatttcaggacttcgcgcactagaaatattttttattagccgaagctaaataagctcggaggacagccggggtgatccgtttccccccgaggatcgtgtgcatt

SEQ ID NO: 320 - DNA, 433 bp, Homo sapiens
  source 1..433: mol_type = other DNA
aatcaaggaaacgtaacattactttagggtccctgagagaagacttcagaatccaagttttaaatagcattctaggaaatttttacttgggggtaaaaggctcgaacaactggttttgcggccaaaggctttaaatgaaaagctaagcgttggccagctcaggttttatcttgcattgagaagctggccggccccgcgcctggagggcggctgggtcctggccaagaagctggaaggcaggctcattccaggggccgcagcccccgggaagaagcagggggctggccgcgctgtggccctgcggggtcgaggagtctggtagcggacaggagcccgagagaagtcagtcggactcccatcgaacccggggcgcacgccagagggccggacgcagcgagtccttctgccccgcttggctgccgcaggaccgccc

SEQ ID NO: 321 - DNA, 443 bp, Homo sapiens
  source 1..443: mol_type = other DNA
cagattaatcactaggtaccaattcatttatcagtgttacaagaacaaaagctcttcctacttaggggctgtaggccacaggctagagcttgaagccgtctttcctcgagcaaaagatcattttaccggcaaaagtctcagataagcttacattctttccttgccagtagatggcaatccaggtgaaagcgttttaggcttcggcctcctcttgagctgtcccaggccagggccattctatacgccgaggcgtagtcaactctgctgcttctgagcaggcgcagcgtctccgatccgttccctcgccgcggctcgaccccggtgagagcaaaggccgctccgcgcgtcgcgtttttgacccatgacggcggcgcgcagtctgacgcgacagattgcgtcacttccgccccctcctgggaggcggcgctgggccggtggcaagc

SEQ ID NO: 322 - DNA, 498 bp, Homo sapiens
  source 1..498: mol_type = other DNA
tttgtaatgtttttaggggagaccgttattccgtacggctccgccccaaggggcagccccctcccgcagggaggccgcttacatgcgttggcggagggaaacccaggcaagccagtctccccgggcccgggaccccgaagccgtggctgtggcggggaccggcgggtccagacgatccggctcgcagagccgccgcccggtacctctcgatgactgaggccaccagctgcggcaactccttcatctcgaaggcggagtaggacgcgggggccgcacagccacctcccagcccggggtcgtgtccgcccccgttgccggggtccccggcgccggagccgctgccgccgcctcttcgccgccgctcgtcgccatcttccgtcgtactactgcggctccctccgggggcttgccaccggcccagcgccgcctcccaggagggggcggaagtgacgcaatctgtcgcgtcagactgcgcgccgccgtcatgggtcaaaaacg

SEQ ID NO: 323 - DNA, 300 bp, Homo sapiens
  source 1..300: mol_type = other DNA
gcaataataacagataacgcttaatgactgcattcaatgagccaggcattgtgctaagtaatttaatgggattgtctcattcattctcacaagtactgtaagagataactaggacttttaaaggacgggatcagtgatctctgaccggcaccccaagcattcctggatggcagggccggcttacacgcaaggatctaacacttggtttaaggctctgcttccaacgactttaaatccttaataattttttaacaaggggcttatctctcgaatatgttccacacgtatcgtagaccgcgg

SEQ ID NO: 324 - DNA, 480 bp, Homo sapiens
  source 1..480: mol_type = other DNA
ggcgtgagccaccgcatccggcctgcagtgttacgatcgcgccactgcactccagcctgggcaacagagcgtctcgggggcggtgttcaggagctgcctcccgacccagttggccttgcaagagcacctgaaactaggccgaggcagcggaacacctcgaggatgtcctggcgttcccccccgccgccccgaagccctcaccgcaggctgggtagccagcccacggagctcccccgctgaatccacgtgcggcggaagacggtgcaccccgttaggaccccggcggcgcgggggactctgggacggccctcgggggctgcccctcgcgtgtgcctgacccaatgtgcactgcagcctgcccctgccaagccgccgcctgcaggcagtccctgaatcccgagcgtcccgtccgaccgagggcctcgcgcgctatcccagctctgtggtcccgcggaggcggagcccgcggcgcggtgcatg

SEQ ID NO: 325 - DNA, 364 bp, Homo sapiens
  source 1..364: mol_type = other DNA
gagcatttacatcatttatatttatgtaattattgatatgattgggtttaaatcaatttttgccctctgtcacccagggtggagtgcagtagagctatcacagctcactgccgctgggcactgagtgctctgccttgatcttacttaggtacagaattcaatgccaattgagcgctccctccgggaggacgaagagtcccctcacccttggggacgttgaggagtgttaaaatctccaagagccatttcgctgcttgctcggtgcaagttggagtcgagctcgtgggcggcgtcgggcaccttcggccgcgccctcagctgcacccgccggtgggcggggcccgagcccgtctctaaagccacg

SEQ ID NO: 326 - DNA, 399 bp, Homo sapiens
  source 1..399: mol_type = other DNA
aggacttttaaaggacgggatcagtgatctctgaccggcaccccaagcattcctggatggcagggccggcttacacgcaaggatctaacacttggtttaaggctctgcttccaacgactttaaatccttaataattttttaacaaggggcttatctctcgaatatgttccacacgtatcgtagaccgcggccgccgtcccggcatgcaccgcgccgcgggctccgcctccgcgggaccacagagctgggatagcgcgcgaggccctcggtcggacgggacgctcgggattcagggactgcctgcaggcggcggcttggcaggggcaggctgcagtgcacattgggtcaggcacacgcgaggggcagcccccgagggccgtcccagagtcccccgcgccg

SEQ ID NO: 327 - DNA, 619 bp, Homo sapiens
  source 1..619: mol_type = other DNA
tctccctgagagcccggggttcccaggggtggggagcgagggacgaatccgtcggtgctgcccgcggccgggcccgagcggggtggtgcacggctggggacaggctcagctctacacgatgcatggggaggatctgcagctactgcagtcgccaccgcccagcccgagccccaggccgcccaggatggtctcggactggccgtcgctgtacatgaaggccgtgtccagttcggtgtggccgcgctccagaaaggcgcgcacggccgcggcgctggcgggcgcgtccatgcggcgccccatctccatggtgcccagcaccgaggcgacccgcggtggcggtggccgggacatggcgagcgcgcgggcctcgggcggcggagagcgaagcgcgcagtggacggcggcgcgggagactacgcgagacgcggcactcagcatagcagcggcgcctgcgcgttgggagccgggggccccgcccatgccggggaggagcgcggaggcagttgggggcggggacaacaggcgcggccccagcggcgcctccaggcccggtcagcccagcgcgcggcgtgggggcggggcctgcggttcccgcgggggcggtggcgcgcggtcagct

SEQ ID NO: 328 - DNA, 696 bp, Homo sapiens
  source 1..696: mol_type = other DNA
gcctggcaaatgactattatttgttctcattgtacatgacctgtgacccaggcccgggacccctacggcgtgggaggaggcagtgtaggccctcggtccctgcagacctgggtgtggagggaggagcgtcccagctcggggctaccacccactccaggctcctggtgactcagcccggcgcgggccgcgctgctggggccagcgccgcgagggcccctcgcccggccggcccgggaaaaacccatcagatgccaaggggccggtcggccggggcagggcaactcctggccaggccagctcgagaggccgcgctggtcgcctttgaggtggggggccactggctgcggattcccgagggccacccagtcccggcccggagcctcgtcccacgatatcgcgccacaaggagggcgcaggagccgggacagtccagcggccggcctgcccccggtccggctcaccacgtccagatccgccgccagggcccagcttctgggtcaaggcccgccgggtcagctgaccgcgcgccaccgcccccgcgggaaccgcaggccccgcccccacgccgcgcgctgggctgaccgggcctggaggcgccgctggggccgcgcctgttgtccccgcccccaactgcctccgcgctcctccccggcatgggcggggcccccggctcccaacgcgcaggcgccgctgcta

SEQ ID NO: 329 - DNA, 455 bp, Homo sapiens
  source 1..455: mol_type = other DNA
aggcagttcgactgcttgagcccaggagttcacacctgtggtcccagctactttggaggctgaggtgggaggatcacttgagcaagatcatgccacccagctatctttaaaaaatgaaaaacattttttaaaagagtgcttgataaacaagagtaattctgcagtgacatagtttactgcatttgcagtccactcaaggaacctggcctggggatgttacctgatgtttacacccaggttacaacaaagccaccagggcctgttgagggagctttctgacgtctccagcctgcccacttgagacagagactgctgtcaaaggggagcagcctgcacagtcgccccccgctccaggctgctggcacacagagacctggcggagggcccactgcgtggctctgccttgggcaagcatgctttttaaaaggagtttttgatattccttctggcaaaaa

SEQ ID NO: 330 - DNA, 234 bp, Homo sapiens
  source 1..234: mol_type = other DNA
tcctactcctgagaagcttctgagtgcacactctggagaagtcgttctccatcaaggcctggggccaggcccacctggtcctttgagcctgtcctgcagaagggtaggcgttctgccttgcaagctgacagttcagagggaaggggaggctgcgtgcatcgtgtccaggccatatgctggatccagggcctggtggccccccaaggccacggcctcacaagggcgattgtgcgt

SEQ ID NO: 331 - DNA, 311 bp, Homo sapiens
  source 1..311: mol_type = other DNA
ttaaatcatctctaggttacttataatacctaatacaatgtaaatcctaggtaaatagttgtactgtattttaaattttgcattattttttatttgattcaaaaatgtttctggtccatggttggttaaatccatggatgcaaaacccacagatacagagggcaccctgtgtatgtatgtgtatgtacgttaatgaatgaataaatcaagtctgtacgcctacaaggtcagggtcacctcgagcctccagacaactcgtcacatctcgcgatatctggagcgtctgcgagctctcgcgagactttcagggg

SEQ ID NO: 332 - DNA, 612 bp, Homo sapiens
  source 1..612: mol_type = other DNA
tcccgagtagctgggacacagatattctgtctgcagctacccgaggctcctcaattcgtgcccgggctcaggtgcagcgcggcgctccagatcctgccgtagcgagcggcagcgctgggctcctgccccgctcccggcgcgctcccccagtgctgggttgggctgggttgggctgggccgggccggtccgcgctcggcggcagttccgggtgcgccgcaggagtgagcgcgtgcacggggtggggcgcggagggccggtcccctcccagccgcggtgccttccgcatccccgcccgcggggactgtggggtgcggttccctcgccgccactcgctgctgcaggcccagagtcggggactggacctcagacagccaggagacctttccgccccggcccgcaacccgtgccggggactcccggcagccgcgccgcgcagcgccgcgccccgccccgcctcgcaggccccgcccccgcaccccgtcggcgcccgcctctcgcgccgttggcgatcgccgcagccccgcgcgctcattggccgcgagctggcggcgtggggggcgggcccgggccgggccggggcggggaaggaaggtggcggcggcccggcgcgg

SEQ ID NO: 333 - DNA, 442 bp, Homo sapiens
  source 1..442: mol_type = other DNA
attctgtctctaataataataataataacaacaacaaaagatgtcatgaacagaagttctcatcctgtgctccaggatcacactggaggagggagatgctcccagagggtcttgggaaggctttccaatctagaagttctcatcctgtgctccaggatcacactggaggagggagatgctcccaaagggtcttgggaaggctttccaatcggagtacaccagggagttcccagcaggccactaggagccacccaggatgcccggcaacctcatgagtcagacaagcagggctgtgtctatctggaagtttccagccaagctaggtacaggacacaggtaactatgcccagtggtgtccctgggccaaggtgaggctggaagctggggccaggagctccactcttcccaggagtcagagaagtgaataagtccctggggcttt

SEQ ID NO: 334 - DNA, 593 bp, Homo sapiens
  source 1..593: mol_type = other DNA
ggctgtgtctatctggaagtttccagccaagctaggtacaggacacaggtaactatgcccagtggtgtccctgggccaaggtgaggctggaagctggggccaggagctccactcttcccaggagtcagagaagtgaataagtccctggggcttttgaaccgggtcgcatgccggcacgggatgaggtgcctggggactcctggtgccgggacgcggcgggctggggcgccccactctcggggcaagtctgcatgcccggccatctttgtcaccccgaggcctggcacggcctgacggcccaggctcttaagaacgggccagggcgcccggctgggctgccctgcctctcgggcgccggccaggcgtcccggccgccccaccacgccgtcggagcgcgccgaagctcagcccggggcgggcgggccaggagagggcccggggcccctgccgccgcggcgccccctcctgcgcacccggagggagaggccgcgcgcgcccgcccgctctttctgcgcgcggccctccccgctgcccccgccctcgcgccctgtttggagggagccaccctgacgtcggagccgctcccccgcgcc

SEQ ID NO: 335 - DNA, 563 bp, Homo sapiens
  source 1..563: mol_type = other DNA
ggagtacaccagggagttcccagcaggccactaggagccacccaggatgcccggcaacctcatgagtcagacaagcagggctgtgtctatctggaagtttccagccaagctaggtacaggacacaggtaactatgcccagtggtgtccctgggccaaggtgaggctggaagctggggccaggagctccactcttcccaggagtcagagaagtgaataagtccctggggcttttgaaccgggtcgcatgccggcacgggatgaggtgcctggggactcctggtgccgggacgcggcgggctggggcgccccactctcggggcaagtctgcatgcccggccatctttgtcaccccgaggcctggcacggcctgacggcccaggctcttaagaacgggccagggcgcccggctgggctgccctgcctctcgggcgccggccaggcgtcccggccgccccaccacgccgtcggagcgcgccgaagctcagcccggggcgggcgggccaggagagggcccggggcccctgccgccgcggcgccccctcctgcgcacccggagggagag

SEQ ID NO: 336 - DNA, 447 bp, Homo sapiens
  source 1..447: mol_type = other DNA
cgggtgtggtagcacacgcctgtagtaccagctaccagatcgggccagtgcactccgaatgtgctgggtgctcagggaagactctcagatcccatcccaaagagtcccaggcacgggagcctccaggcagaggccctgagagatatctgaacactttgcaaactacaaagtgctgcaaagactttgtcttcaaccctgcaggcgggcttgccggtcacctgcagaggccggcacccctgtcgcgatgggtggacgagccaggtcgggacccgcagctggcgagtcagagcctggaaggccccgcgcccccgcgccgcgctccctaagtgctccgcccggccggtggcgaccaggcgcgctcggggcaggcggcgggacgggccgggaccggggccgggacgcggcggggaggggaggggccgggccgggccgggcgggaggagccgc

SEQ ID NO: 337 - DNA, 473 bp, Homo sapiens
  source 1..473: mol_type = other DNA
agttctgtgggcacccaccaggtacctggccccaaagttactgattaaccctaggttttgagaaaatcagacagctgttgtcggcgccagctgacactctctgccaatgcccaggtgctgagcgacagtgtcccaccggtccctgccaccacaaccaccaccgctgtggcccctgctgggggtcattctggctccacagaatgtgcaggttgcccaagctgctggcctgccagcatgccttctgcgccatccctgctgtgcgtgcaggacaacacctggtccatcacctgcccgctgtgccgcaaggtcaccgccgtccccgggggcctcatctgcagcctgcgcgaccatgaggcggtggtggggcagctggcccagccatgcacagaggtatcgctctgtcctcaggggctggtggatcctgctgacttggcagcacacgtggcagcccggcgcctggccgcgcacctact

SEQ ID NO: 338 - DNA, 310 bp, Homo sapiens
  source 1..310: mol_type = other DNA
ttcatgccctagtcttttgagcacctgcaagtgctaggcacagtccctggggctgggcacacagccccacctccagggcttttaaagtctatgggaggccgaggcgggtgggtcaccagacgggtgtggtagcacacgcctgtagtaccagctaccagatcgggccagtgcactccgaatgtgctgggtgctcagggaagactctcagatcccatcccaaagagtcccaggcacgggagcctccaggcagaggccctgagagatatctgaacactttgcaaactacaaagtgctgcaaagactttgtctt

SEQ ID NO: 339 - DNA, 259 bp, Homo sapiens
  source 1..259: mol_type = other DNA
caggctggagtgcagtggtgcaatctcggctcactgcacccgagtagctgggacagcctggtctgtctcagtttaacctaggtggctcagggcaaagctctgcctatttaaccactcagattcagtttcctgtaatttggggataattaaacaagaatgagcgcctatccaactgtcacgttgagtaccatccaccactagagggcggctccagctctctatggcgtctgctcgccgagccccgcaaaagatgggcgcc

SEQ ID NO: 340 - DNA, 362 bp, Homo sapiens
  source 1..362: mol_type = other DNA
cagcctggtctgtctcagtttaacctaggtggctcagggcaaagctctgcctatttaaccactcagattcagtttcctgtaatttggggataattaaacaagaatgagcgcctatccaactgtcacgttgagtaccatccaccactagagggcggctccagctctctatggcgtctgctcgccgagccccgcaaaagatgggcgccggcgcaggcgcggttgctgcgtagtcgtcgccgggctcggcggacgctggggggtcctgcgcctttccctcctgccgctggggactgcaggctaaggccgcggcgaagagccggccgggcagcggcagccggaaagccgaggccgagcgcaagcgg

SEQ ID NO: 341 - DNA, 296 bp, Homo sapiens
  source 1..296: mol_type = other DNA
aatgaaaaagatatttactttatgaattaaattcacctgccctgtctcctatccacccccggactgtggggtgcacacgtgaggcctgcacaggtgctggaacatggtagaggcccaggacatacttcctgtgaatgaatgattgagcggctgaatgatcccaaatgccacattgagcagaagggagcaatccttgctcagcaattggtagtccctttgggtgtgcaagacagtcgttttggcatcagctactgacacgtaaggtttcccaatcctcaactctgtcctgccagctg

SEQ ID NO: 342 - DNA, 225 bp, Homo sapiens
  source 1..225: mol_type = other DNA
ttgtggcttacacaacagacattttattgtctaagggttgattccttctgagggctgtgagggagaatctgctccatccctctcgacatctgtcatcttggattaaattatatctgcaatgaccctatttttaaataagatcacattctaaggtcagcagcagggccctaggtctccatccctgcaaggggctctagagtgtaggaatgaaaaagatatttactt

SEQ ID NO: 343 - DNA, 416 bp, Homo sapiens
  source 1..416: mol_type = other DNA
atgcttaaaacatttaacctgataatcatgaggtatggtgaaacccccagctacttcgctgaagcccaggaagccgaggctgcagtgagctgagattgcaccactgcactccagcctggcacaacaattagatgcaatgcctgattcttgttgggattctggatcggaaaaaagccaacaaattggatataaaaaccattattgggacaataggggaaatttgtatattagatagttttactgtatactagatacagtattgtgtaagattctaagcaggctgtcagagccttaacaaggttctgagcccaggactgaggtggctaaagccgtgacctggatatttcaggactcaaatccgtgactgcccagcccctttggcaggacagccagccacaggccctgattgtgcagga

SEQ ID NO: 344 - DNA, 304 bp, Homo sapiens
  source 1..304: mol_type = other DNA
ccaccaggggccaggctggtcgcctcatgttactagagaggaatatttagtgacatagatgctacgaagctctgcatatataacattttcctaatttggttgggaatcttctacacgggcaacatagtcttgtcttaaaaaaaatggtctcagcttcttggaaagctgaggcaggaggattgcctgagcattctactgcactccagcctgagtgacagagtaagaccctatctcaaaatatatatatatatatgaatataaataaataaatacattaaataaatagaaaaaaaatgtgtttaaa

SEQ ID NO: 345 - DNA, 345 bp, Homo sapiens
  source 1..345: mol_type = other DNA
ttatgtgcacttacagctgagaactcagagaccagggaagggagctctcctaccaaggcctcacggctgggaagtggtggtacatcagtgcgactgcctcagcccaggtgacccagccctgagaggggctcccagagctcggcaaatttggcaatgtgagcaacccacctgccttcagcaggaatcctggtggatcggtttagccagtgtgtttcaacaagtgtcactgagtgatgttttatctttaacatctttcagatggcagatgcatggggaaagactgacgaccagagcacccagcggtggggactgtaccaggaggaggtggagcctcctttttctagc

SEQ ID NO: 346 - DNA, 410 bp, Homo sapiens
  source 1..410: mol_type = other DNA
tggatacacaaatacttactattgtgttacaattgccattgtgttacagtatttagaacggcaacatgctgtacaggtttgtggcctacaggctataccatataacctaggtgtgtagcaggctagaccatctaggtttggactccacaatgtttgcacaatgaaaaaatggttaagtgacccatgtctgtacttcaagggttaagtttctgccagcctcttggccttgctactagaatatccacctggttcaccttctgcttaaaggttatccatgatctcaatccacggggccccgaccccaagccaaatatggttggggaggatacaagttcctgccttcaaggagctcataacctactgaaggatgcttatcatcgaaggtaaatcatttacctaacgtcaagctt

SEQ ID NO: 347 - DNA, 308 bp, Homo sapiens
  source 1..308: mol_type = other DNA
tcctctgaggatgggggccctgctccccgcaactcagataccctagaagcatccactcagagtttagggttccgagaatccatcagtcccacagcctcattttaaaaccagggacactgagagggtcagggcctgacccgggctctccctctcccagacactctcccccagagagaaacagaggcgggagaaggaggccgcgggtccctgtcgcctccaggcggagggcccgaccccacccgacccaggccggttccggtcacgccggaagcacgtggccccccaccctgcggcgttgcccgggagac

SEQ ID NO: 348 - DNA, 262 bp, Homo sapiens
  source 1..262: mol_type = other DNA
cacacctcaggtcctgaactccccaccacccagtccaggattgaggcagcagccatgatgtaggcatctatcaagctgccaagctgaataggcgagtggcctgtttctgctaggaggccaactgtttccaagaagggcaggtgcccattccttaatataaccacctacataccatctgctggtatataccaagatacatacatttgaattggtcttttaaaactggtaccattcccagttctaccccaaactagggattaga

SEQ ID NO: 349 - DNA, 496 bp, Homo sapiens
  source 1..496: mol_type = other DNA
ccgcgggtcgccctggagccctctgccccccaggggggtcagcatgcttccgcccttccccactccccccgaggtcccctcgggaggcaaagccggctgcggggcgggcgcgcaccagctccgggccccgtaaacacccgtgagcgggacggcgggggctgggggcgggggcaggaagctagcggcagcccgggccggccggcgcggccccgtgacgtcgctccgctcgcagggatctctccccgaggcccgcgggtcctccccgcgcctcgcctcggcgccgcggccggcgctcgcagctcccagtctgcctccccgaaccggcgccgccgcccgcactcgccgcaggaccggcccgcccggctcccggggtgcgccctcctcggtcccgcgccctccgggctcgcagggacgtctcctccctcccggctcgcggccccgcccggcccggcccccgcccagagccccagcgcgccgaggatgtgagtcctgctcg

SEQ ID NO: 350 - DNA, 687 bp, Homo sapiens
  source 1..687: mol_type = other DNA
aggccggctctactaagcaaaggcgaggataatgagcgctcctcatgcactctgcttggcagatgcgcctcccaggcctctggggctgccccccggcatcgaggagcccgctcctcctctcagaggccatagtctctccacagggcgcacggcggagacccccgagggcagagggcggcagacccgggacgtccccagcggaggcagcggacgccgggagccaggcatcccgggcgagcccggcgtaatgaggcgctcccttctcctgcgggaggcggggctgccccttccctctccccctccccctcctggaggccctgcgggagccggagtccagcgcagccttccaggtcggactgagccggagtgtgaggccccagtggctgggccctcagggtcggaggctatgtccgcgggtcgccctggagccctctgccccccaggggggtcagcatgcttccgcccttccccactccccccgaggtcccctcgggaggcaaagccggctgcggggcgggcgcgcaccagctccgggccccgtaaacacccgtgagcgggacggcgggggctgggggcgggggcaggaagctagcggcagcccgggccggccggcgcggccccgtgacgtcgctccgctcgcagggatctctccccgaggcccgcgggtcctccccgcgcctcgcctcg

SEQ ID NO: 351 - DNA, 342 bp, Homo sapiens
  source 1..342: mol_type = other DNA
actgcactccagccggaacagtctctgaaccttgagcaagttacttacctgagttggatggtgcctgcaataataggcactaagcgtagccgtaattattatttaataaatatgtttaaagtggccagaataaattccaagtcttgagagtttgctctgaaacttaaacgtatattactcataagagtttaatacacaattattttatttcctgccaatctaatggcgggcgagtcagtcatggccaggccatggagcggtgggtggtcgctcagctccccaatcgctctccgacacccggctggggagacaggacctccctggaggccgcagctccggcgt

SEQ ID NO: 352 - DNA, 392 bp, Homo sapiens
  source 1..392: mol_type = other DNA
aatgtcatatgtggcaggaatggaattcaaaccatggtttactacagtctcaggatctagaacagggattatttctctgctgttgagggaggtcaagtgacctacaccaatatctattttgccaacaaaacaatgaggttgtctggctctctgtcacccaggctggaatgcagtggtgcaatctgagctcactgctagaaacagggttttgccatattgccaaggcagaagttctcattatactgcctgcctcgggatgccgcagtggctgccccagccctgccctttcagcctcagcccttccctcagtgaaggagagactgtcagcccttggagcttggacctttgagatctcacactccctcagtgtgtccaccagtgagagtggttcc

SEQ ID NO: 353 - DNA, 384 bp, Homo sapiens
  source 1..384: mol_type = other DNA
acaccaatatctattttgccaacaaaacaatgaggttgtctggctctctgtcacccaggctggaatgcagtggtgcaatctgagctcactgctagaaacagggttttgccatattgccaaggcagaagttctcattatactgcctgcctcgggatgccgcagtggctgccccagccctgccctttcagcctcagcccttccctcagtgaaggagagactgtcagcccttggagcttggacctttgagatctcacactccctcagtgtgtccaccagtgagagtggttcccatcctgaaagctgcgtacctgagagcctgcggtctggctgcagggacacacccaaggggaggagctgcaatcgtgtctggggccccagcccagg

SEQ ID NO: 354 - DNA, 395 bp, Homo sapiens
  source 1..395: mol_type = other DNA
agtatgtactttcctatagcatataggccctgggtcttgggggtaatggcatggggatccaccatcttgtctccctgccgctgaagccagagactatggatccctttctccttaaatatgaagtcaaaggtcatgtagataggagctctggctatggggtggacccctggccaggagactcttggggtcttcaaaacccctgagactgtggttttcttatctataaaaacggcatttttatcttgttggtggagctgttaaataaattaaaatgttcacattcaggacctgcctgaaccggcaaagaggcgccagtaccagcatagcgcccccacgcgccgagtcggggaactgccgcgggggccggccccgcccaccagcgcctgcgcctgcgc

SEQ ID NO: 355 - DNA, 377 bp, Homo sapiens
  source 1..377: mol_type = other DNA
tgagatgaaccggtaaatggctgttccttgaacccagtctccagcgtgggccaccgagctgggcagcacaggcccgtccatgccatggcccctggagccgtgagcggcaggaaggaggctcatggtggaggtggggcctagttcctggtcccgagccttcccaggccctgtccaggacgcgacggtcaagcccggggaggaccccgcaagctccagggctccagactagggggcgggaggccggcctgggcggagcaaagggcgctcggcctcgttcgccggcctccgcgccttatcgccaaagctgcggctctggacgcccagccgcggcgtatcccgatcacttccgggtagtgctccacgggcacgagccgcga

SEQ ID NO: 356 - DNA, 442 bp, Homo sapiens
  source 1..442: mol_type = other DNA
caggtccctgcgccgacagacctgctggagcccagtgccaggcccgaagccgaggcggctgatgacttcccgcccaggcctgtgagtacctccccgggcctccatgtgggggacggggttctcgaaccttccccgggcttgtggcccgtggccaggcagttcagggctggtggcccctatgacaccatcggggaacccaatttgaacaccccaggggagcaaaaggagaggaagctttaaatctccctacatttatagagggtgggctgggcaccgggcctgcagcaggctctcagcagggcgtagatggagcagccggggcagccctggctaggtcctatggctggaaagaccttgactttcttagcaatggaaaaggaggccactttcctgcgaacgtgacgggaagtcacatggggctcatcgctgggagccttcctcc

SEQ ID NO: 357 - DNA, 212 bp, Homo sapiens
  source 1..212: mol_type = other DNA
cctcctgagtagctgactgtgcccagcctaacacactatttccagctactcaggaggctcagagcctataaaaattcccagtggaaaactgcatcctcagagtctggaacatcgaggtgctccataaatatttgttgctaacagccttttacatggagatgtgtttgaaataagctgaatactttaaagtcttcttgaatgaccatgaggtc

SEQ ID NO: 358 - DNA, 620 bp, Homo sapiens
  source 1..620: mol_type = other DNA
tggagtgcaatgatgcaatctcagctcactgcagagtagctgggattgtcaggtgatccacccgctgtttgttttacaatctcgggtctgggcagcctttccctgagccagtacggggacgtggataaggggcattttcctaggtccctggcccgtgcctgaggcctgggatctctgtagccccgaggtggagtcaagcctggggccccgggccccagtcttagccgcagcctcgggcaagctgcgtagcccagccagggctggcgcttcccgcaagcggccgcgcgtggctgcggggatcactcgggcgaagctcgcgggccaggcggggcgttcccggggccgctcttgtgacgccacgggcgttgcccagcaaccgcgaacgccgcggcggtgagcttgcgggcaggcggctggggcggctccgggctcgggttctgcggcggcgcctgcagcgcggatcccccacgtccccgctcgggccgggcctcagaaacgggcgagcccgggcgcgggaggaagcggcggccccggctcgggtcctgcgacgcccagctcccctccggggcgccccccgaggggtccccgccccccgccgcggccccgcccctgcctcaagg

SEQ ID NO: 359 - DNA, 511 bp, Homo sapiens
  source 1..511: mol_type = other DNA
ctccctaacatctgtcacggtgcctgacatgtagccgacactcagtgtttcagagagcccagcgccgctcttttagccttccatccaaaagacttgtttttgttttggagtgcaatgatgcaatctcagctcactgcagagtagctgggattgtcaggtgatccacccgctgtttgttttacaatctcgggtctgggcagcctttccctgagccagtacggggacgtggataaggggcattttcctaggtccctggcccgtgcctgaggcctgggatctctgtagccccgaggtggagtcaagcctggggccccgggccccagtcttagccgcagcctcgggcaagctgcgtagcccagccagggctggcgcttcccgcaagcggccgcgcgtggctgcggggatcactcgggcgaagctcgcgggccaggcggggcgttcccggggccgctcttgtgacgccacgggcgttgcccagcaaccgcgaacgccgcggcggtgagcttgcggg

SEQ ID NO: 360 - DNA, 447 bp, Homo sapiens
  source 1..447: mol_type = other DNA
cccataaaaatattttcccgataagtgaaccaagttgaaagctcttcaattcttagacaaggttagaccttaatgtagaagttgcatgtgtcattcgttaatagttcattagcacagagatctagatactttttttatattgaggaatttttgtataaaatgtcattgagtctcagaatatttaattatattcttttacattaaaaatatgacagtcttagaagcatacttttattctccttccccttgtgttttcccttaatagaaggaaaaaaaaagtactttaatagagatagagtttaagattacagttaattttcctgactctttcgagaacagtaacaacaaaaggtgcaacagctgccgtggcttatgcactgagtaaccaaatcatctgtcacttacctataaattttatagttatattttttcctgtattaaatttag

SEQ ID NO: 361 - DNA, 750 bp, Homo sapiens
  source 1..750: mol_type = other DNA
tcttttttaatacaacattgtattggaaaatatttttccaagttattacacagcagttataatcttcctaattctgtaggaacataataattaggaatttttaaagaactttcttcttagccatttaatttttttcctgtttaatgcgtttgaattatttggtatggaaaagtaatgaaattttcttgattgttaagacagaaaggatttggttgtaagaagatttatgtatataaattattattatttttttctccagtagcatttatgaatgataactgaccatagttagaaatccagatttttgtatttgataaatttaaatacgagatgatagcatttagatattttcataatgttaggcattcttataatgtttagcttagaatttgccagtcatttggaaatacctaagtcagttgttctcaactggaggtgagtttacccccagagaaattatcctggccctaatggcagtagtgtcactgttgagaaacttgaatctagattttctcaaacgttaggcaaaattattaagattggttaatattattaatatttattcatctagccagtatttgttcaataccatctatggtactctactagatggtggtagaaaaaattgtagtgtttagaaatagagaaacaagatttaaaactgatcatttctgttaagatatgagaaaggatcatttgagcctcagaggtcaaggctgcagtgagccattatcacaccactgcactcca

SEQ ID NO: 362 - DNA, 620 bp, Homo sapiens
  source 1..620: mol_type = other DNA
cggcgcccctcgcaatgggcgccaccacgcagcgccgggaacgcgcgccgacgccccgcgctccgccggcgtccgcccgtccccgcgcgccccctcgcaccccacgcgcgggaggcggggccggcgggggcgcgcgcggggccgcgggtaggggggcggggcggccggaggcgactagcggcggcgggagcggcgccgagaggccgtgcgggacgcgggcgccaggaccggccgaacgcacaggcggccggggagtgggcgcgggctcgctgggccccgaaggcgagtggcggaggccgctcgcccggggcgccgacgccgctcccagagaggagggggcggggcgcccgggtccccggaggtggcgcggtggactcctcctcaggggccctccggcgcgcgcgctcccgcccgcgaccctgcgtcccagcgcgcctgcgtcggcgtcctctgcccgccccgattggctgagggctgcgcatgctccgaggcccgccgcggtccggcgtccgcccgcgccctcccctcactccctcagcggttttcggagccggttcgaaagatgccggcggcggtgactggctgcggcgggcccgccccccgggttctccgcccccgcc

SEQ ID NO: 363 - DNA, 366 bp, Homo sapiens
  source 1..366: mol_type = other DNA
gtgagccaccgcgcccggccgatcactgtgcttaggacaaggcacctagctgggaagaaaatccttataggcctaggtttgaatccatccacagagctcggctcaggtcatgtccccagccaatatgggaggcgctcacctctcagaggttacgcgaagtccccgcggggggtccctatccacgctgcctctccgcccctgcgagcggggctcagcgaacagccggaggctgggccgcaggggaggactctcgcaagccagacctcgcgccgctgtaagccagcgaagcctccctcgccggcggccgaggacgcacccgagcgtctccgaagaatcccgacccctgcagtctccggaattccgaaa

SEQ ID NO: 364 - DNA, 431 bp, Homo sapiens
  source 1..431: mol_type = other DNA
ggagacccttcctgtaggcctgggctgtcggcccccaggctggtgtgtccctcctcgggcagggagggccctgccacaccctgcacctagactgttaggctggagggatcctccctttcaggacctgaatggagctatgtggggggcatcaacagctttgggttccaatcccagctgtccccattcagctgggtggtgagaagccagggtctcacctcgaaaaataacgggaagtgtgagccatggctgtgtcacccttgtccctgaccccgctgatgtgggggctctgcagagagcccagctgggtactcactggatgcctgcaagtccaaacatcctgttcttttttgagaaacagggaaaagctgtagttttttccttccactcatatcgagtgacacaaaaaaacaagcctgtcggggccgagctgc

SEQ ID NO: 365 - DNA, 605 bp, Homo sapiens
  source 1..605: mol_type = other DNA
gaagatgggaaagaagggtccccttcctggcttctgactcttgcagggagggcgacacctttgagcacgggggtgaccaccggaccacgtgtcagggagttctctgaaattttctgaaactcattcacgcttaaagccaaaggggaactgaaaggggacacctcattaaccccctagacacacctaagggctgatgccgggggaggggcttcagtttgggggcccccactcccgacctccggggaagggaggggtccccatctcccccgggcctctcgggtcttggggtctccccgggaggccggaggttgggaaccgggcgccggcgaaccgatcaggccccgcccgcgaaggtggtgcaacgcctggcccggcccatcccatcccggccacccgggcagcgggaccaggcgtctggggcacagcatgcggggcgtgtggccgcccccggtgtccgccctgctgtcggcgctgggggtgaggcgggcgcggcctggagggcgggggcgggaggcgggcgggacccctccccgcgcgggccgctccgtgggccggtctcggtctcgggtgtccaggccggggcggggcgcggcggcggcggcgcc

SEQ ID NO: 366 - DNA, 471 bp, Homo sapiens
  source 1..471: mol_type = other DNA
ctgtttattcacacatatgtgtgactgtgagaatcaaatttggaatgagcagaaatgcactttgcaaagctgaaaagtacgcataaatgcagggattcccgccttgctagaagatgggaaagaagggtccccttcctggcttctgactcttgcagggagggcgacacctttgagcacgggggtgaccaccggaccacgtgtcagggagttctctgaaattttctgaaactcattcacgcttaaagccaaaggggaactgaaaggggacacctcattaaccccctagacacacctaagggctgatgccgggggaggggcttcagtttgggggcccccactcccgacctccggggaagggaggggtccccatctcccccgggcctctcgggtcttggggtctccccgggaggccggaggttgggaaccgggcgccggcgaaccgatcaggccccgcccgcgaaggtggtgcaa

SEQ ID NO: 367 - DNA, 335 bp, Homo sapiens
  source 1..335: mol_type = other DNA
gggaggctggggcaggagaatcgcttgatcctcgcaccaagactcgaggtcaggagttctagaccagccttgccaacatggcccagctagatcatgccattgcactccatcctatggaaaagatgcctattttaactttacaatttatcttttcagaatgggcacgcggggacgctccgggcctccgagggcaaggcagagagggattccccgtcccagctgcactcgcccctaagcagtagaggccgccgagtccctttaaggccccgccgcgcctgcgccttgggttctcctgacgcggcccatccggaccctgaggagccagtgggctgcag

SEQ ID NO: 368 - DNA, 447 bp, Homo sapiens
  source 1..447: mol_type = other DNA
gcttagggctgggctgcctgggccacccccagcgtcccactcacaggtgtgcaggtccagtctcgggacttgaactcccatccactgtctccaggtccagatgctgcctctggtcacccccctgtctggggcctgacctgggttctgacctggggcagaacacagctcttctctgggccaggtggctggcctatggacatggcttcagaggccacctggtcaaagacagaaccccaggaatccctgtggctacaggagcaggcggccgtgggaagacagggccctgccaggaaaccccgggctccctcgccacgcctttcggtggcctgggatgggtgggggcctgggacccaggctgtagctgctcagcacccctgcctcacctggcccctgccctggggagcccccagtctcagaggggaggcacggcccttgagcaatctcagc

SEQ ID NO: 369 - DNA, 349 bp, Homo sapiens
  source 1..349: mol_type = other DNA
ggttgtcctgaagtccctggacggcaccctcttacacacacgcgcgcgcgcgcgcgcgcgcgcacacacacacacacacacatgcagcgccccgggtcacactccagtgcaggagccaggcaggagacaaaggtcgccgaggctcccggcggccccaccggacacaatcgagccctccaggttccccgcgcagcccgggcagccgactcccagcgcgccaagggttaagggcccgcgcgggcgcggggagtgcagcctcaggccgtgattggctgcgccacccaggcccccgcgccctgccattggccccgcggcggccccgcccctccggcactcggcgccgaagccg

SEQ ID NO: 370 - DNA, 447 bp, Homo sapiens
  source 1..447: mol_type = other DNA
aaagacattcttggtttctggcaccaggcccctctgggcctcagttttctcctcgcatgcacagtgcctggccctgagactggcatggattggttctctgggcagacattttcccaagggccactgagaagaccctctgttaggagtcagtgagctctgtcgcagcctgcggacttctcactgcgaagttgcccagagaattcagtgctcagagctggttccccaggagcgggagcagggcctgtagcacccagcctctgtccctggctaggtcaagtgacttggccaaggtcaccagagcagacctgggaagtgcctgcccctcctctggcatccagggatgtcctggggctctggctgggacatagccggacacctgcgggccctttacgtctctaaagagagaaagagggaagggcccctgtctagggggtggtttccctccag

SEQ ID NO: 371 - DNA, 442 bp, Homo sapiens
  source 1..442: mol_type = other DNA
taggtcaagtgacttggccaaggtcaccagagcagacctgggaagtgcctgcccctcctctggcatccagggatgtcctggggctctggctgggacatagccggacacctgcgggccctttacgtctctaaagagagaaagagggaagggcccctgtctagggggtggtttccctccaggtcagagcccaggctcgctgagagaggaagggctgggctggggcagcctgcggggcgggcgagggacgccagggccgcgtcaccccagcccgttcctagctccgctcccggcagggggcgccctggcctcgtggcacgaccggcccgcggggcgcggggctcgggccgggggcggggccggggccgggctggggaccgggggcgggggagggggcgggctgcccgggcctcactcgggccccgcggccgcctttataaggcgg

SEQ ID NO: 372 - DNA, 427 bp, Homo sapiens
  source 1..427: mol_type = other DNA
tctgagctggtgggcagccctgccccccaaagcagctgtgtctgcttggctgctgtgttcccaaaggccctgtccctgtccctgctgtacagtggctataccaggccagggacacacttatattttaagggcctggcagcccctccctaggtgctgtggccatctcccccaggatctggggcagctcggcttctcatctgtataatggagatgactgtccttgatgccgaggcggggtacccagaggcgcgctggggagaaccgagtggggggccccctcggggagcccgacgcacccaaagcttctagcgctcgggccggaacgcgcaggcgcggtgtcccggggccgcgggccgggccgcccggggggcgtggcttcagcgcccccgccccgccccgccccgcgccgtgccgcccgtacctggcg

SEQ ID NO: 373 - DNA, 289 bp, Homo sapiens
  source 1..289: mol_type = other DNA
aacctgattgctaattctggaatcaggagccctgtggtcaggtttccaacttcctgtaaccttgggcaagtctctcatctgtaaaaggagatgataggtccttttctgacatcatggtgaaattctttatgaactatgaaagagtagtatttattttattgaaataaaatgcacgtagagaaaaatgtgtgtatcatacattgcactgtaagtgcgtttctgtgttgtgaacacacacaatgtattagatgatcagcttcggtagatcctgcgcggaccttccggtagt

SEQ ID NO: 374 - DNA, 570 bp, Homo sapiens
  source 1..570: mol_type = other DNA
ctcagggctagtaacccggtgtctgctgacacaagaggggagtggaggggggcgtctccactcctcccctttgctcttcctcctcaccagggcaaaggggaaggggtcgttcgcgggaagggtagaacgctgtccccctgtgtacgccagggcctgggccgagcgcttccccaggtcctaggaggccggcggggggcgggacatgcccgccgtgcagacccaggcttctgggagggagctcccagctggatccgccgaggagcgcggcggctcgagggggcgggaggagggcgtccctccaacagagggtctgcggcctggacggggggcggcggccgggaagggggtgggggaggggctgccccgggccccgggccccgcaatccccgcccggctgggcccggctcggaaagtcccgcgaagcccccgcccggccggcccagggcggcgcgaacaagcggccctttctgcgccggcggcccccggcagctggaccgcggcccgctggggcgcggacgtatccgagctggggcgggggcgggggcggggcggccgcgttgccaaggtgac

SEQ ID NO: 375 - DNA, 521 bp, Homo sapiens
  source 1..521: mol_type = other DNA
gctgttccccggggagggagctcacacaggagcctcaggctctgctcgagtgggcaggccgctcacttccctgggccttggaagtcaggccgaggtgatctctgccgccccctccccacacccgccctgggcccgggttaggctggggcgggggcgagctgcccagtcctgggctggcgagggtcaaccgcgtggcctctgccaggaagcgcgccgagcgcccgggtgaggagggcgtcacagacaagcggagcccatgggggccgtgggccccacctatcccgacctggacagctgggctgtcgcccaggttctgccactgtcctcagtttccccacctgtaaaatgggggcaccgagaaccctcctccaggacctgcggcggggcggggcggcagggcgggggcctccccgccgctcccgcgcccgcggcttgggctccgcagtgagtggggagcggcgccggggaaggagcgctccgcggtcatgtgacgtccccctccccgaactgcggcggcggcg

SEQ ID NO: 376 - DNA, 304 bp, Homo sapiens
  source 1..304: mol_type = other DNA
aggcaagcagctgagtcagaagttagcgcttagattctggcagagctctaattcaaattcaaaattcttaaatatcctcactttagtagagttctttacagtttgcaaaacaattctgcacagtctgcggcgcactggggcatgccgtcccaaagagccaacactggttccgctccacagtctgggcgggcctgtgcgcttcctctacctcagcccgtcgggttaggggcgcgggaggcgcagaggctgctgggaacgcgcatgcgctcagcgcggcggggagtccaccttgtccgcgggcgcg

SEQ ID NO: 377 - DNA, 271 bp, Homo sapiens
  source 1..271: mol_type = other DNA
gataagtccaataaaagcgggcttcggaattacttctgggaagccttttctcaagtaccccgaagcctcccaagactgggatgggggcctcgaactcctgacctcaggtgatccgcccacaggcaagcagctgagtcagaagttagcgcttagattctggcagagctctaattcaaattcaaaattcttaaatatcctcactttagtagagttctttacagtttgcaaaacaattctgcacagtctgcggcgcactggggcatgccgtccc

SEQ ID NO: 378 - DNA, 341 bp, Homo sapiens
  source 1..341: mol_type = other DNA
agatcccaccaccgcactcggagcggcagctgccggcggcgcgcgcgagccggggatcggggaggcgagagcgcctggcccggcggccccatcccatgcccgggcccgggcccccggtcccccgccccgtcccatcccatactccaggccgggtttggcggggagccgggccgggccgcggcccgcgcggagggggctgggggcccagacaaaggcctagtaggctgcgcggccggctggggcgagcagagcccgcggcccgggggcggtccgtgggcggggcctggcgctccggggaggggcggttcgggggcggggccggcgctgcgggggcggggcgg

SEQ ID NO: 379 - DNA, 357 bp, Homo sapiens
  source 1..357: mol_type = other DNA
ggaccaggctggagtgcagtggcacaggtgctgggattacaggtgctcaccaccacggcctcccaaagcgctgggatcacaggtgtgagccaccgctcctggcctagactcaaactctagaagggctgagaccatgcatttttcacagctgtatgaaaaagtgctcaacaagaatttttttgtggaggtggaaatctcatgagactcagaggaaccaggattgaaccgtggtctgcccggttccagtttccgaaagaggaggtcttgtcctgacatgaacaccacctgtccagccacctgttggagggaacgctaggtcctggagttccaccacctgttctgggagtggggcccaat

SEQ ID NO: 380 - DNA, 402 bp, Homo sapiens
  source 1..402: mol_type = other DNA
cgtgttagccaggatggtgtcgatctcgatccacgcccaggcaggagtgcagtggcatgcatgtagagataaggtttcaccatgtttcaaaggcctcccaaagcgctgggatcacaggtgtgagccaccgctcctggcctagactcaaactctagaagggctgagaccatgtatttttcacagctgaaaaagtgctcaacaaaaaattttttgtggaggtgggtactaatcttgagactcagagctgcgcccaaagtcagaaccaggattgaaccgtggtctgcccggttccagtttccgaaagaggaggtcttgtcctgacatgacactccacaccacctgtgcggccacctgttggagggaacgctaggtccttcctttggctgtcacggagtggggccc

SEQ ID NO: 381 - DNA, 313 bp, Homo sapiens
  source 1..313: mol_type = other DNA
atcctgccactgcactccagccctatctcctttagacataaattctattcatgtgtgtgctcatgggttgctagagccatgcctgggggcggaacctctatgcctcagtttccttatctgtgaaatggggaacccttcagagttgttgtaaactgtgagtgcactgtggtgcttgccgcacgcctggaatcccagcatttgtgctggtagtcccagctactcggggatcacttgagcctgggaggcactggctccagcctgggcgacagagtgagaccctgaggccctggagtgagttaaacacacaagtgtc

SEQ ID NO: 382 - DNA, 408 bp, Homo sapiens
  source 1..408: mol_type = other DNA
tgcagtgagctgagatcgtgccactgcactcctgcctacacaaggcctgtggttgggtgtaggtagagataagaagagtgatactcagttctcacatcacggcggactgaatacaggcccggggagtgagagaagcttccgtctctgcaaaatgtgcttcacaagcttgcaacacgcccgtaatcccgcaggtgccagtgatcccagctactcggtgagctgagatcgcgcgctgcactccagttactatcgttcacagtattattacaaatacaaaactcacgagctgcgccggcccgcgcgtgcgcgacaggcgggcggagccagggcagtccaggcaccgccttgacccgccccaacccaactgtgcgtctcctgcgcgctgacgtcaggtgcgtgcccctgtcc

SEQ ID NO: 383 - DNA, 444 bp, Homo sapiens
  source 1..444: mol_type = other DNA
tgtattatattccatcatttatacatattatatttaataattatttattgaagaacatctaagttacttccaattttgttgttataaactctttgtatacttaagcaagaatttctctggggtttatacacaggacaggatttacattataaagtgatatgcactttgtccatatagtggctgcaacaattttcactcccaaggagggttacctgttggattgaatctatagtttttaaaaagtgggaaaaaaattttttgctcacccttgatattatcctatattttatcattggatgtaaactagtttctttgattattaataagatgaaacatctctttttctgtttaatttcagatattaatgccagtcatgtatattgaaaatatattctctcagtcgaaaacaaatacaaactctgatttgtaactggatcaatacct

SEQ ID NO: 384 - DNA, 362 bp, Homo sapiens
  source 1..362: mol_type = other DNA
actgtcagggacagaaacatgtcagtgacagggccaaaattgggaggtgcgagaggcaggatcaggatgcctccaggatgccaagcctgtcccacaaagagtgcgggctggggacgcggctcaggtcgcctctcttttggaaaaacgaagcctttggacactgcggagctccccagcctggccaacatggtgacatcctgtctctactgcgcgcctgtaatcccagctactcgggaggctgaggcaggagcagtggggcgagatcgcgccgctacactccaccgccgtcctagcataggtggagagcgagcgcgtgacgcaggccccgcccccagcacgtgaccgcggcgcgtggggcaggt

SEQ ID NO: 385 - DNA, 408 bp, Homo sapiens
  source 1..408: mol_type = other DNA
catccctagaatctcatgtgaggagaagagggagaggggagaaggcctctcagctctgccagcctggtcctgatggggagcccctcaccagccatggtgggctccaagcccagaggcagggcacccccaggattctggtccatgcagtgacagggctggaaggagaagccagggccctggctctgtagccagggcagcccgtgcacgggtccatcctgggggtccacctccaagtgtggccactgggatggggcacatggaagtttctagaacattgcaacttgacaactttgggccccaagagaccactcagtgccctgggggcttgtgtttatacacacacacacacacacacacacactcagccagatgctggggcaggggagggggcccagccctgctttgggc

SEQ ID NO: 386 - DNA, 412 bp, Homo sapiens
  source 1..412: mol_type = other DNA
gcagagctctctcttcagtgcacatggaagcaaacactaaatatttgttaaatggttcagtttcctcgtatataaaatgaggaggatgggccgagtaacctcagcccctctccggccctaacttagaagaagcaacaggcccctgcctgggcctatccctgctggcaataaataatgaacacatttaaaattcattatgagattattttctgaactggcaagtggcagaggcgggattggaatcaggctctgactgtaagccagcactcaggcagcgggcgtgagctgtgcagcgtgttctccccacagctgctgagttggcagatttacagtaaatccagtgggtccagcctgctggtccatgggaggggaccgtcaggggaaagcccttcccgcctctggggaagggaac

SEQ ID NO: 387 - DNA, 370 bp, Homo sapiens
  source 1..370: mol_type = other DNA
acatggagcatgcagccctggccgtgcctccctgctgcagccagtgtgatgacagcagccattccagatggctattttttaaatttttagtagagatcctcaagcgcctgccttgacctcccaaaatgctgggactagacttgctgtttttttaaatgttggcaaaagctagtgactaagtgttcaccatggcaagtcattaaaatgttataataatcagatgataaagattgctgtgcttctccaagcttttggcaatgaattgcatgtcactttcataatcatgaaaagtcctacaagggacagatttttttaaagattccctgcccccactcccacaccagctgttgctggggcaggacgctggcca

SEQ ID NO: 388 - DNA, 451 bp, Homo sapiens
  source 1..451: mol_type = other DNA
tgcttggcccaccaggtgtgtgaggggtggcagagcaggccccaggatgcagccctaaacccctagtcctgggtgaccggccacctggctgtgtgcccggccgtctgccaggagtaggatatcgatacagcttaagaatctaaggcaccacgagcacgagcgagcatgcggtggatgtgcggcccgcgcgtgtgtccacagggctggtgtcgccgggacgtcccgatggtggcttcgcgcactggggccctgagccctgagtccaagtgcgcagcgcggggcgcgcccccgaaggtgcccgccgggggagtgtgggcgtgcgcacgtgcggcggcggtggccgcgggccgggtggccgcggtgcgggctccgtgtcccccacccccccgcctcggtgctgattggctcggcgccgtgacgggccggcccccgcccggggcggcggcggcgg

SEQ ID NO: 389 - DNA, 548 bp, Homo sapiens
  source 1..548: mol_type = other DNA
tccctgaagggacggccatgcacagacaggtccattccacagcgtgggggtggctggggctttccccactcgcgggccagaggggaggcctggggtctgcctgcaagggcccagcccaccaggccccaccccaggccctcgggtagcgccaaggcccagtctcccactcggaggccccggcccagccccggtgcctgggaaagccgccctttcgaagccgcagggacccgggtggcagggcggcgagggggtgggactccctgccctgacaggtagtgccggcccccgcttcacagcgccgggagagaccactgctgcgcggggggagcccggggtctcagtggcccgggcacgcggggtcgccgcgctccagcgcccgcgctgcccccgggtgaccctacgggcgcggtgtggggacccgggctcgcggcggcgcgcggccgccgggggccgggacgcgcgcggggggcggtggcctggcgaggctccccccgcgcccgcggctcaggtgggccgtgcccagcgctggcggagcccgggtccccgtt

SEQ ID NO: 390 - DNA, 341 bp, Homo sapiens
  source 1..341: mol_type = other DNA
ttttaccagttcttgaacttcatgtaaatggaataattttttgacaatttcacttcgaagagacagactattaaaaagacaattgtttgtgtaataagtacacgcatgtttttgggttagcaagggattcctcgaaaaattaaaagaataaaccgctactatcattattagactggactcaaacctagaacttcataatgtaacccttgttacgtagtaggcaagcattaataaatactggttgaattaacgaataattgggtgagtgaatgaacgaattcctgcggtgccactctagccgcgagaacgccgctctatggctgcgggggaggggcggtccc

SEQ ID NO: 391 - DNA, 647 bp, Homo sapiens
  source 1..647: mol_type = other DNA
ctcgcgggccagaggggaggcctggggtctgcctgcaagggcccagcccaccaggccccaccccaggccctcgggtagcgccaaggcccagtctcccactcggaggccccggcccagccccggtgcctgggaaagccgccctttcgaagccgcagggacccgggtggcagggcggcgagggggtgggactccctgccctgacaggtagtgccggcccccgcttcacagcgccgggagagaccactgctgcgcggggggagcccggggtctcagtggcccgggcacgcggggtcgccgcgctccagcgcccgcgctgcccccgggtgaccctacgggcgcggtgtggggacccgggctcgcggcggcgcgcggccgccgggggccgggacgcgcgcggggggcggtggcctggcgaggctccccccgcgcccgcggctcaggtgggccgtgcccagcgctggcggagcccgggtccccgttctgcccgggctggatggctcattctgctggctgcgcggtggcggcggctgtgtgtgcgccgcgccttgccgccccccctggccccccgagcccggggcgcgcgctcccgcccgggccgtccgggccccgcggcgccgcggcccgaggccccgggaagcgcagccatg

SEQ ID NO: 392 - DNA, 432 bp, Homo sapiens
  source 1..432: mol_type = other DNA
accagttcttgaacttcatgtaaatggaataattttttgacaatttcacttcgaagagacagactattaaaaagacaattgtttgtgtaataagtacacgcatgtttttgggttagcaagggattcctcgaaaaattaaaagaataaaccgctactatcattattagactggactcaaacctagaacttcataatgtaacccttgttacgtagtaggcaagcattaataaatactggttgaattaacgaataattgggtgagtgaatgaacgaattcctgcggtgccactctagccgcgagaacgccgctctatggctgcgggggaggggcggtcccggcgcggcgggagcgcgcttggcgcgtgcgtacgcgacggcggttggcggcgcgcgggcagcgtgaagcgaggcggcttttcggacccacggagc

SEQ ID NO: 393 - DNA, 260 bp, Homo sapiens
  source 1..260: mol_type = other DNA
ctgtgggagggcatccgcagcgagagcagtctctggctccttttagatagtagacttaaaggaagtatgtgatcatctggttattcccccttcccattttaaagaagatgaaaatcgggatgggggacgggaacccatgcctcccgagtctgactcttattccatatcaggttctaggctaagccagggtctcactctccggagtgcagtggcacgatcacggctcactgcagcggcggggcctacagacaaccccgccc

SEQ ID NO: 394 - DNA, 263 bp, Homo sapiens
  source 1..263: mol_type = other DNA
ccttcccagttacgagcatttacgtttaaaccaaatctatttgtcagtattcaggcagaggctaagttttcacttggcagtcctctaagtgtgaacttccatgtaaggttaattcctagctctgtggttctgtttcctcatttatgaactaggaacaacagttatcttcatagattacaggaaccgacaaaaaacacctggagtatatgttattttattagtagtaatatttttatgatgaccttggataagtcacttcatta

SEQ ID NO: 395 - DNA, 460 bp, Homo sapiens
  source 1..460: mol_type = other DNA
atatagctgctttattttatgaatatcaagtatgagccagggagggaaagaggcatttctccgatcgttccaaggaatgattatctagacaaaatcctccggtggcgggacgcaagcgccatggcggagctgggccagtgctgaccagggggcggggctccggaggcggccacgcggcgcgaggcctagattttcggcctcgcatcggcggcagacgaagagggaggagcttcgtccacccaggacccagcgcccccaagccttgcagccaccaagtgtgtgcctgcccccgccccggaggcgccccagccaggggcgctgagcaccctcattggttcagccggcagcctgcctgtcaggccgcctcgccaagcgattgccccgtagctcggagtccctggaagcagttccgggaaaccccgcgtgctgccgggatcgcgtctcagtccatcaggggggg

SEQ ID NO: 396 - DNA, 329 bp, Homo sapiens
  source 1..329: mol_type = other DNA
ggcgcactctctgtatgatgacagcctggattccaaaccaggcttgtctgaccttgaccattttatatggtgctcagatcaattttatttttatagccaaattttactaactttagagttattaatgttattaagttaggatggtataattctgtgacatcttaagaattcttagcccctcagtaatttaatcataaataaaagcaaggcctggagttatgtttgaaaaaaattttcaagccctttcccagcccaggcagagaagtctcctctcatcctggctggggaaagggagagctgcgagtcctcccgttccgaggaactccagc

SEQ ID NO: 397 - DNA, 593 bp, Homo sapiens
  source 1..593: mol_type = other DNA
acatcctgaaggcccgcccggatcagggcctcagacgcccagggtcccttcggtgcgggaggccgctgggagcccctgtagcagacaagccctctgggacgctaaggagggcccgccccccccgcaggggcctggctatctccgctggacgccactcagcccgccgctcgaggggcgcccccttgagaaggacgcatctactgccgaccgcactcccgagtcgccccggcgcggggcggcgcggggcctctcgggagtcgtacagagccgcgccgccgcaggcgctgtcggggctcaaagttccagcgcggcctccgagtctcccctggggagtgggcggctgccgcttccctctccagcctgtagcaggggctcattctagctcagctcaacacaggccagcgcctaaattggcctgacgcttaatcgtgctgcagtctccataagaaaaaagcgagaatactccgccctgactgggagggagtggaactccaactcccggcaggccgcacgcgcactagaggctcttggccaggctgtgggaggcttggctgaggcagctgccggaaaggacccggcctcgagatggcaga

SEQ ID NO: 398 - DNA, 323 bp, Homo sapiens
  source 1..323: mol_type = other DNA
cccctcctccttgctccaaggagcgtggttattaacctctcaacttgctggggttttggcaaccccaagtcacccacagttccggcgcactctctgtatgatgacagcctggattccaaaccaggcttgtctgaccttgaccattttatatggtgctcagatcaattttatttttatagccaaattttactaactttagagttattaatgttattaagttaggatggtataattctgtgacatcttaagaattcttagcccctcagtaatttaatcataaataaaagcaaggcctggagttatgtttgaaaaaaattttcaag

SEQ ID NO: 399 - DNA, 379 bp, Homo sapiens
  source 1..379: mol_type = other DNA
cagccctagtcggcagtgagcctgattgctctctcactactcgagagtgtagttctgggtacacgtggcatgcacaggccgtgtgtcctctttgagatgcaacggtgcagagacgcgggagcccagaacgcttcccagggcccctgggacaccctcgggcgccctccgcgccgcgaccgccgcctgtggccaggtcacagcctccttcggtcccccggcgcccctggaagggccggagttggagggtcccctctctcagcctcgtccctcccctgaggcccgatcggccggcgcgggcaatcagtgcccgggcagcccgccacccctcccccgcacagttgggaggcgggcggtgggggggtgggggtggggagagccc

SEQ ID NO: 400 - DNA, 348 bp, Homo sapiens
  source 1..348: mol_type = other DNA
gcttcagaactaaacctaagtgctcatccgccccaaaggatggtgagccagatgagggaactagtacacgcacgtgttcggttcttcgagataaggaaactgaggttccagaagagaacccgatccacacatccccggggcggcgggggttatcaggaggacagcctgggccgtgcaagtcgcgccaggggccggcgaggggccggggaagcggcctgacgcggtgcggggccgggaccggggccggagcctggaccttggcgggagccgggggcggggccgtcccagctgaggagcggggcggggcgtgtggaggccgggacggcgcccccggccggcggtgaggcc

SEQ ID NO: 401 - DNA, 507 bp, Homo sapiens
  source 1..507: mol_type = other DNA
tcttgtgacaaaaggattgtttaaaagaaacctagagatgttcaaacatttactgagtatttgaccctgctgtgcccccaggcagcttggctccagagctgggacctgtcccagattctgttgccagctctcaaatcagccttgggcaagttacccagcctttcagactgtcagtctttatcatggggatcatcattcctcttcccaggattgttggaataaatgcatccctctgccattaaagggaacaggttcctggcatatgaatgcacatgtgctagctaagtgctgggtctgggctcaggctgggaccccgcgccaaaatgttcaatcccagggaatccgggcccatttctcggggcgctgtgcactgctctggtcgccggctgctaactagcgcggccggcggctggcggcaccaacagcaggtgtggctgcccctttaagcagctgcaatcgccgcctcgaggacgcgttctttccgggagatccgaatttcgcggcacg

SEQ ID NO: 402 - DNA, 426 bp, Homo sapiens
  source 1..426: mol_type = other DNA
gcctgcccttccatagcaggggacagacaatcaatgaaattaccactgttttctacacagaggtgtgtggaaagtgtagaaattgtcccagtgcctccatatttaaaacattgaactcacaaagcacaactgtgcatatatttagttgggtccaggctccttttttccccatgcaaaaagcatgggctcaagttaattttttttccctctggtcacaagataattcctgacgccagtgagtctttggagcaaattctggaagttaatgggcggagaggcccgcctctccccggtatcagcgctttgaatccgcggctccgcggtcttcggcgtcagaccaggggctgtgaacgcccagggccggcgggggcagggccgaggcgggccatttgaggcgtgccttccaggcaggctctataagtgacc

SEQ ID NO: 403 - DNA, 325 bp, Homo sapiens
  source 1..325: mol_type = other DNA
ggaaaagagcccgcctcctggcccataaggccctcggccggaagctctccatcatggcggtgagccatccatggcaggccgagcctgcgggggctacttcgcccgcagcccgaggaatatggagcccgcaatgcctgctgggagcggctccgggcacttgcccggagtgctcagaagcacggtcatttcctggtcccggggacttgagacttgcttccgaataggtgggaaacattataccttttaaacattcaggaactcagggccctcagctgtgagtgtattgactgctgctcttccctgttgcagcaggatcaaggtgaaa

SEQ ID NO: 404 - DNA, 522 bp, Homo sapiens
  source 1..522: mol_type = other DNA
acttacttaaaatattgtataaaattaccttcagactatgtgtataaggtgtatatggaacataaattaatttcatattcagacttggtatgtttatgcgaatattccataatccggaaaaatcccagtcccaggcttttcaggtccctgtagtaacttgcccaaggtcacatagctactagctggtcgagacaggacctgtaatcccagcactttcaacctgggtgacacagcgaggctccgtctcaaaaaataaataaataaataaattatatttgtttacgttgttacagaataaatttgcgtcataatttgcatgattgatttaatgaccaccagctcgtgacactgggaggagagacctcaaggtccggaaactcaaggacgtgctgattcgggagctttcaaaaactatttttggaaaacccagatagcgtcgcctgcagtggctagcactagggagaagccgacgctgcagggctttgccaaggaaaagagcccgcctcctggcccataaggccc

SEQ ID NO: 405 - DNA, 430 bp, Homo sapiens
  source 1..430: mol_type = other DNA
gaagaaacaacttgtgtttaagatgtttttctttcttccagagctagaatctggaagaatctctggttctgctttgatgtgatcaaatgagatgtaatcagtgcaactatttagttgctctttttagtagtagtattagtaatggtaaaacttagtgcttctaatcaaggaaacatctatctatctatacattcatgcaataagtatttatttagtgcctatgtgccagacactgtttgtggggaaaacaagacacatgggctattattgcctcaggattttgaaaatgtgcgcagtttcctcatctgtaaaatgaagatcatacaactcgtttcatcaggttgtcctagggtggctgctaccgcgggtgcctgcggactcctaggacgggcaccagcccgggacccctgcgttggcatttataaggcca

SEQ ID NO: 406 - DNA, 594 bp, Homo sapiens
  source 1..594: mol_type = other DNA
caactatttagttgctctttttagtagtagtattagtaatggtaaaacttagtgcttctaatcaaggaaacatctatctatctatacattcatgcaataagtatttatttagtgcctatgtgccagacactgtttgtggggaaaacaagacacatgggctattattgcctcaggattttgaaaatgtgcgcagtttcctcatctgtaaaatgaagatcatacaactcgtttcatcaggttgtcctagggtggctgctaccgcgggtgcctgcggactcctaggacgggcaccagcccgggacccctgcgttggcatttataaggccagggtctggcccggctctcagcacgcgagcacagggagcgggggtgccggcggcggaggcgcgtacggcccgagcagcccccagcccccagcgcgcacacttgggccaggggcgcgaggagtgcgcggccgccgggtgggcgctggggagcgggccctgggggcggagcctgcagcccaccgccccccacacaccccagccgaggcccggaaggggccaggcgcgcttccgtctccgccggggatgcacggagggcggagctgcggcc

SEQ ID NO: 407 - DNA, 384 bp, Homo sapiens
  source 1..384: mol_type = other DNA
atgtgtcagccattctgtcgccaggctggagtgcagtggcgcggctcactgcaacctggttcaagcgattctcctgccccgagtagctgggttaattgcattatttcatttaatactcactgtgaagtctttaggtccgcatgtgagacagcgataagctcgcgttctaaagaaactccatcctcgtcgggggaggataattcgaatctcagcctgtgagtttactcagcacacctgtggtccttcagtttccacacctaggaagctggaacagcagcagcatccagcgccaggactggagtcatatacgatctggcacctgggaggcgcgcgtcctacgtcagtccccacgcgcatgcgccgcgcagcggcgctttttacgac

SEQ ID NO: 408 - DNA, 445 bp, Homo sapiens
  source 1..445: mol_type = other DNA
tttctttctgttcaaagaaaacactagtgagtcctaagcggctgagggtcaagtgtgactcatatgacattgcttgtgaagggcagcgctaacactgccagtgcctgtcccgctgtgattttactgtataaaccatgttcacacaacctcaaaatggaatcccgaggttgctgtttcctcagtttccccatcttcaaggctggagaactagatgatctgtccattcatgatcctggaatagggcatgaaagccagtggcaatgcctctccttccggtcggccctcctccaggaggcgcatggtgcgcggctgaatgacagggagtagccccgccgcggcagcttctatccagcgaagccgggtccccgcttccgggttccgtactgtggccaggctacttccggcagcgcgatggctgggttcccgggactcgaacggaagttcc

SEQ ID NO: 409 - DNA, 560 bp, Homo sapiens
  source 1..560: mol_type = other DNA
cctagctcggccccgctccgcgctacagccacggctgagcaaggtcactccgctgtcgggggcgcagccggcctcagaccagctgcgaccactttcggggtccgcgccaggcgcggggcgggggcgggggcggcttcggcgcggcgggcagagtccagcggtggggagagggccgggctgcgagcctggcgatccagattccagcccgctgtcgccagctgtgggaccgaagggcaactgtttcacctctagcgggcccggtcgctgtcagtgtctggggctcctccccgtactacccgcagagtttgttcagggtggaggtgcgcacctggccaagtccacgtctacacggcccacccagagtagcctaagttgggcgggattcctaactctgagccaggagtgaccgggctggccctggcatgggcagaggctgagcgggggttggggtggggccccctccaggaccaaccacggtgtggttgcccctgagctggcctcagcctgcctggcaaaggacctcacccttcctcccagctgacccttgagggaaagggggt

SEQ ID NO: 410 - DNA, 570 bp, Homo sapiens
  source 1..570: mol_type = other DNA
aaatccatagtgactggaaatcagtggttttgggtggccagaacacccgacgggggctattggcctcggtggcccggcctctccctggcgctcccgggcccgggagcgctcacctgtcggttccctggactctgcgggcaggcgctggctgattcccggctgcgcggacacctattgtaaacaaacaatcgtggaaggcagagtgcagaccgacccttcccggcaggtgggggctgagagccagcgctggaaccgctagtgtcgggtagttcaagattttgaattcatggtttggcacacaccggcaagtctgaaaacctgcgggtcagagtggggcggaggcgtgggccccctaccctctgccccctgccccctcggaagcgcagccctcttccaggggttgggacgagctagcgcggggacccggggcaccggcaaggacccacccgctactgggacctggcgccggcggcgcctctcgcggggtggcaccgcccacttccgccttccgcgggcgcgcgctgcgcagtcttcgtcacagcgcggaggccccgtcagcacttaaagggc

SEQ ID NO: 411 - DNA, 344 bp, Homo sapiens
  source 1..344: mol_type = other DNA
tgacagagtgagactccatctccaaaagagagaaaaacagtgttctcagcattttctttgcctccttcagaaagtacacctagataaatcttaatcatttttttaaggtatagaactcggaacagtgagtagcaaatcgttgcttcttatagtgcaagttagaaatgacacaactgtttgtgtaactattaatatgacacaagaagccacagaatttggttaatttcttttcatgtggctggtctcgaattcctgacctcaggtgatctacccgcctccaggctacggcggaggggcgggggcggggccgcgcccaccagacgagccatcggtcacgcggggcc

SEQ ID NO: 412 - DNA, 184 bp, Homo sapiens
  source 1..184: mol_type = other DNA
agctatttgaaatgcctcggaattcccaaagagagccgagtgatcactacctgcaggattgctgcggcaagcctctcgagtagctgggactccagaagggcgctcctccgacccgaggaggaagcgactcgggccaacctgtccaggttagagtgggcggagccgcccgcgggcacctgcgcgt

SEQ ID NO: 413 - DNA, 406 bp, Homo sapiens
  source 1..406: mol_type = other DNA
gtcaggagttcaagacctgtagtcccagctactcaggcgccattgcactccagtatcacataagtcaagatttctggtatctcttgaaaaatacagcacaacttccaaatgcttggaatatctgacaatttgcctatactcccaagcagaaaagcttggctggaactaagaggtacctgcccctctctactggcccagatcagggtctggggtgtggggcagatacctctcagctgggccagtagagagggtcaggtacctctaggcatttgcatttcaaagctctggcctagtggtgaagaggcattggaatggcaataaagaaacttgctcccttgactccagggtctaggcccatgccccaccctggccagagtggcaccaggcactcactcatctgtgagaa

SEQ ID NO: 414 - DNA, 407 bp, Homo sapiens
  source 1..407: mol_type = other DNA
tacttcttatttgaatatgattagcatcagaaagtccctatgctcaaaaatacctcttttatcaaattagattaacaaactgcatcccgtaagatgcagcgcctgcactgcactccaaataacgaattacatgagatttataaaaagttggtaaatataaattctgtaacgtaaacttgggtatatatgtgtatacacgaacaaactgtgaatgagactgattttgtaccgtttggcccagaattattcacgctcattgaaattagtgctcttttaaaagattcacattgggttacttctctttcttcccctttttcacttacaagtggggcagaaaggggaggagagcagtcctcattctttcagcaaacttactgtgcacgtaaagggctctaattgaacttaag

SEQ ID NO: 415 - DNA, 430 bp, Homo sapiens
  source 1..430: mol_type = other DNA
agtgctcttttaaaagattcacattgggttacttctctttcttcccctttttcacttacaagtggggcagaaaggggaggagagcagtcctcattctttcagcaaacttactgtgcacgtaaagggctctaattgaacttaaggaccaatggggccgccttcacagggaggcagccgaggcccgaggcgggagggggctgcgccctggcaagtcttttcccccagggcagtcccaagggcggcgagcccgcgcgcacgagagccgagcggtaggaagagccgagagctagcggccggggcctcggcgggccaggggcgcggagaggccgcggtggaccgagcagttactgcccccggccagccccagcaacaggcggcggcccgcttctcattggccaggcccgcggagcctcccggccctgcttctgca

SEQ ID NO: 416 - DNA, 216 bp, Homo sapiens
  source 1..216: mol_type = other DNA
tttaagttctcattaactatttattaataggtataacccacactttttttaaaaaaagctctttggaatcttcctcccacccaggttgggacctctctgaactaaatagtttaaaaatctgtccatttagtagtaaccgcaaagtttggccgctgaggcgcgtgcgccagccctccgcatgcgcaggcggacgcctggtgttctcgcgggaaagaa

SEQ ID NO: 417 - DNA, 307 bp, Homo sapiens
  source 1..307: mol_type = other DNA
tgcaaacagcatgcagtttatagagcattttccccttcaggggacactctggcagcctgagcagtttgcacagtgaagcagtaggtggctccccagctcctcctgcctgcaccacaccacacacacatgactgtggtcagggcgggggcccgtttttcagaaggcagtcagttcagggaagctgagcgccttccccagggcacccagtcagccgggggtggggggacgcggcggacagctccacctgtcgctgctgcccagcaggctggagacacggaatggcccctccccgtactgtctcagtgcc

SEQ ID NO: 418 - DNA, 222 bp, Homo sapiens
  source 1..222: mol_type = other DNA
tgcaaacagcatgcagtttatagagcattttccccttcaggggacactctggcagcctgagcagtttgcacagtgaagcagtaggtggctccccagctcctcctgcctgcaccacaccacacacacatgactgtggtcagggcgggggcccgtttttcagaaggcagtcagttcagggaagctgagcgccttccccagggcacccagtcagccgggggtggg

SEQ ID NO: 419 - DNA, 400 bp, Homo sapiens
  source 1..400: mol_type = other DNA
cctttgtgtgcttggggccaggcaaactctccccaggggcaggcctgaccagagtccaggccccagggcccttctaccttctccaggccctgcaggaaggagaaatcactgaagtttgagttccattttttttcctgggcttcctcacccccaacggcctctctaggggagagctgttcccaagcccaccccaagcgtggggacctgccttgatatggaggatcaaggaggagcatcgggtgccctcaatctcctccgccagaaaagcaaaggagtcacagcttttcctttgctgcaagaaacattctgggggtaaatcccctaggaatagaaaagggaactccctttctccccgccccatgcccgggtggagccagctgccagggcgccaagactccca

SEQ ID NO: 420 - DNA, 469 bp, Homo sapiens
  source 1..469: mol_type = other DNA
gcttgtctcaggcgtgagcgcgcccggctacacactgttgcaaacacctcggtgtcgatacacctactgctgtccaggtgaacaccacagccttccctgaagctctggggcctgccgctccccgggagagaagtacgtggagaagggcagcacggatccgccgggatccccgggggcatgcgcggagctcagcatccggctcagaaacgcgctcggatggcattgaggcccgtcctggaactgatttactgatttttttttccgggaattgagtaaaacaaaacggcgagtttcgagcgcggggaccggcgcgctcccccccccccctccccccgcggcggggctgtccccagggaccttctcagaatcctaggcggcagggacgggcccgcggctctgcgggccattggctgccgactgcgtcacctgcccgcggtgggctaggagacgggagggcggggacctgggc

SEQ ID NO: 421 - DNA, 294 bp, Homo sapiens
  source 1..294: mol_type = other DNA
tgaggcttcaaggaggcctcagtttctccagaacccagagtagctgaattgaggccactgacttcagcccaaggggcgagtgagggcaagctccctcatctgtaaaatatgtgttgaagaggaagggatctaccacggtaggttactttaagaaccaaaagaagtcacttgagtaactgcaaaagattattcaaatattaagatctacctgggaaaagttgctctcttagaaacaggaatcaagttttcctttaagcctccgccctcctcggcgggctaagagttaacagctgc

SEQ ID NO: 422 - DNA, 379 bp, Homo sapiens
  source 1..379: mol_type = other DNA
ggcctcagtttctccagaacccagagtagctgaattgaggccactgacttcagcccaaggggcgagtgagggcaagctccctcatctgtaaaatatgtgttgaagaggaagggatctaccacggtaggttactttaagaaccaaaagaagtcacttgagtaactgcaaaagattattcaaatattaagatctacctgggaaaagttgctctcttagaaacaggaatcaagttttcctttaagcctccgccctcctcggcgggctaagagttaacagctgcacctgttgaggtatacctccagtcgccggcacctgtacctgtagccaatcagcgccagcgctgctgaacactttcccgggcagagaatgtctgtgtcag

SEQ ID NO: 423 - DNA, 571 bp, Homo sapiens
  source 1..571: mol_type = other DNA
gtctctacaaaaataataataatagtattgagaatttttaaaattagtattttcttcataaatattggtggaatgaatgaatgaatgaatactagaggtagacaccttttagcaattgtgtgtacagctgtgctcagaatatatttccagcgttttatcatctcttgtgtttttaaaaaacgttatatatgctaagtattacagtttacattatacatgttactgtacagggtatataaacatgtactaaactatgtatactgttactttagatagaatttttaagcatcttggaagcagcttacattttttctcataggctgtcacctacagatgggtaagggggacaccccctgagctggggtgaacctatgagtagagatcaggtctttgcgcactcgcggagcctgagccagaagggtcggacgcccacgcccctggcaggagctcggtggccccgacgcaggggcaactcccatggtggcttcttcccgccctcggggcctggaattccgcaagcacccggaggccggggggtctccgcgggcgtcccatgcggaggacatggtgc

SEQ ID NO: 424 - DNA, 307 bp, Homo sapiens
  source 1..307: mol_type = other DNA
gctcgcctttaaatttagggtgaaatcagctggagtgcagtggcgcgatctcgactcgctgcctcagcctcctgagtagctgggaccacgggcgctccaggtgtgagccaccgcgccggcccccaaatatgttatttgccctgctggccgggcagtccaaatgacatttcttcatacgtaaaacgggcttcaagtctcacctccatgcgcatgttaattatcatggccgtgataattatgtacattatagaaacattaaccaagcgctgggctcgtttcaggacctctcgcgagggctctggggagc

SEQ ID NO: 425 - DNA, 370 bp, Homo sapiens
  source 1..370: mol_type = other DNA
gccggcccccaaatagccctgctggccgggcagtccaaatgacatttcttcatacgtaaaacgggcttcaagtctcacctccatgcgcatgttaattatcatggccgtgataattatgtacattatagaaacattaaccaagcgctgggctcgtttcaggacctctcgcgagggctctggggagcggccaaaccaggcccacctgccgggcaggtggaggccccacctgctctcagcgggagagggggcaggggagtcgccgctggccgctagggggtccccgctccaggtgagcgccaagctagcgcagccaggcagccacttgcctgcgcgaaatgcctgccaacttctgactggcaggcagtctggc

SEQ ID NO: 426 - DNA, 370 bp, Homo sapiens
  source 1..370: mol_type = other DNA
gctcactgtgagctaaccctgaggcttcagaccctaggcccaggaattggtaccatttggcttggtttcactttgtcagagggcctcttatatatccaatatacagacatgagatgtaagcattcaccgggtaactttatcaggtaacaatcttgtggaaagcataattgttcactatactttcacgtacatgtgaaaagcattattgtgttacatttctgtaaaaatgttttagcatttgtaataatcataagagccttaagagtggctcagggttctttctacctctgagaaactccagctgagatctagcccacacaagaatgcctttctaaggcaagggagtggtgggaacccaggcctcctaaca

SEQ ID NO: 427 - DNA, 143 bp, Homo sapiens
  source 1..143: mol_type = other DNA
atctaacagggattagatgtgctgtacacatggaagcttcactgtgcctcacttgagtgggtaatgactctgccggctaagggaagagactgttattggtggtaataatacctgccaatgtagggttgtacccgccagggcgg

SEQ ID NO: 428 - DNA, 372 bp, Homo sapiens
  source 1..372: mol_type = other DNA
ccgagtagctgggaccaatctgtgctgggattacaggtgtgaagagcctgcctgtttctaccagtgacaggcatgcagacctgtgcttgctaggaccttgtaggagaaggaggcctcgcttacggcgctggagctacttgtgggaggcagctgctgcagcttcagggctgcgctgggatccgtcgtggcgcatcccacagggcctggcctaggaggtggagctgctgctaggcggggcccaggccagatgccatctaaagaatacttcaaggctgttttggctctcccaggcagacaactgagcccagctttgttatctgagaagagaataccattcagaaaaaaaattcttcaaaattcaattctagcagt

SEQ ID NO: 429 - DNA, 348 bp, Homo sapiens
  source 1..348: mol_type = other DNA
cccagagtaggtgattttttaaaaatcaaatcttctaagtggtttgagacagagtctcactctgtcaccaggctgccgagtagctgggaccaatctgtgctgggattacaggtgtgaagagcctgcctgtttctaccagtgacaggcatgcagacctgtgcttgctaggaccttgtaggagaaggaggcctcgcttacggcgctggagctacttgtgggaggcagctgctgcagcttcagggctgcgctgggatccgtcgtggcgcatcccacagggcctggcctaggaggtggagctgctgctaggcggggcccaggccagatgccatctaaagaatacttcaaggc

SEQ ID NO: 430 - DNA, 310 bp, Homo sapiens
  source 1..310: mol_type = other DNA
attagatgtgctgtacacatggaagcttcactgtgcctcacttgagtgggtaatgactctgccggctaagggaagagactgttattggtggtaataatacctgccaatgtagggttgtacccgccagggcgggacccagcctgtgccgtcccacaccttgtgctagctccagctcagctacctgcggccgcctctcctcgggcaatgaggcgccgggaagcccacagcatctgataatatccgggccgccggttgccgggaggtgaaccgaggtaaactcgccgcgcgcggggcgcagtgtacatagtaa

SEQ ID NO: 431 - DNA, 481 bp, Homo sapiens
  source 1..481: mol_type = other DNA
ctgaggtgtgcagatcacctgaggtggagaccagcctggccaacatggaggttgcagtgagccgggatcgcgccactgcactccgttaaattttgcctaccgcaaatatttctaacattaacaaagactgaatttatagacagcttttgattctgtgtaacttaattctttcaagtgtattcaaaaagaacaaattggttacaggtagatggaaaaccccaaacaaatatgtggaggctcttcttcacatttttctttctactgcttataaactagaatacatattgatatgatctcattttatattaccctagaaaacgttttcctttttttcttaataaatcattgccagtgaaatatgttacataaaatatgctaagcaaatcaaattagcgtatctagaattcatgtaatgcattgatttaaatattgattcatcgttctaaataaaattgcttcatttgatgaattgcagcctgga

SEQ ID NO: 432 - DNA, 501 bp, Homo sapiens
  source 1..501: mol_type = other DNA
ctctgccggctaagggaagagactgttattggtggtaataatacctgccaatgtagggttgtacccgccagggcgggacccagcctgtgccgtcccacaccttgtgctagctccagctcagctacctgcggccgcctctcctcgggcaatgaggcgccgggaagcccacagcatctgataatatccgggccgccggttgccgggaggtgaaccgaggtaaactcgccgcgcgcggggcgcagtgtacatagtaaccagccctgagatattcctatgagctgctccggggactgtcctacggggctagcaggaaaaggagatcggctctctccgctcccggtggaaaacgagaaagcccaagccccccacaggctggggaccaggaaccggaggagcgggaggagggcgcgcgcggcgagacacccccaccccggcccccgcgcgcccccgccccggtccccgcccgggtccccgccttgtcctgggctctggcgcctgcgc

SEQ ID NO: 433 - DNA, 478 bp, Homo sapiens
  source 1..478: mol_type = other DNA
agattgtgccaccacactccagcctgggctgcggagtttcctataaaaatacgtgttttcttcctataaaaatcttagttcttagctgaggagagtttgaaactcacactgagctctttctaatttctgagagaagagatcccctctccgagatctctgcctgccagggatatcgccctgggctcctgggatacagctggaatctcgacagcctggggaggaaggagcctttgatcctacagcggcaagagttcttgacacttgccggctgccactttaaagtgagctcgcggaggagtccgacctggaagcctcctgctggacagcggggacaccacggggaggcgccgccactccagtgtgcgggaccctggcacccccggcgcgttctccggcctccccaggatcacctgcacggggcggggccgggggcgggacgccccgggcgggggcgggatcccagggtggcagcgccggg

SEQ ID NO: 434 - DNA, 470 bp, Homo sapiens
  source 1..470: mol_type = other DNA
agaggcaccagggcggccaggcgaggcgctgcgagctggtgcttctcggagtccgagacccgggctggggagagcccgaggcagagcccgaggaccacggctctctggcgggcgtcctgcccagcggcgtgattaccgggccgaagctgagctacaaggcagatttcatgtctgctgccaggctgggaagccgcaggcctctcgtcggcgcacgggccgcctcgcccgcgtacgccaagcctatgggtcacgtcacgcgccacaaaaggacttgcagggcggggcgactcgacggccttccctttgacagaagcccgcccccgctggcgctcgtgcgcacgcgtggcgggctctcggcgcactgagcaggcgcggcctcgtgtcggccggagggggcgggcgcaacgacgcgcgctgcgtcccggcgctcggctttccctccgccggtcccgccctccgtcgcggcggcg

SEQ ID NO: 435 - DNA, 483 bp, Homo sapiens
  source 1..483: mol_type = other DNA
cgagtcgtcaaaaaaaaaaaaaaaaaaaatatatatatatatatatatatttgtgaatatgctggctgccaagagttccccaggcgatgaaaactttccagtaagttgtcttggaaaaggcaactctgcagcgggggagtgggtaggaggcgcctcctagcttccccagggcggccgaggcatgaggtcacctggcacagcaacagcagcagctgcggaggacgcgcaggcgctgcggcgggaggcagtgtcaggctcgggcccctggggggcgtacccgggtcccgcccgccagagcctggccacgccccctaccagctgtggggcgccgcagaggtcctttcttcggctccggagcggtccctccgccggagagtcccgaggcgccgcgccttggccctgcctacagcccgaggccccgcccccggcgcccctcccagccgtttgaagcggctcgggctgcggctggctcagagtgggccg

SEQ ID NO: 436 - DNA, 292 bp, Homo sapiens
  source 1..292: mol_type = other DNA
tagacttggccaagagctagtcagagaaggatggatccgtgaataaatggttatgtcccttgtagattctgtaaatgtcgaggctctgctgaacacagagcagggtcataggcctggggcaagggccctcgtctggggttttttcatcaaagccccacattgatttgggcccctccttacgcaccgagtgcggtgccggacacatagcgcattattattattattaaattaatggccatgcaccttctctgatgcagcagggacagagatgtctgagattcctcactgttct

SEQ ID NO: 437 - DNA, 556 bp, Homo sapiens
  source 1..556: mol_type = other DNA
ggccttgactcctcaaggacatgaagacacaaagggaagctcccgagcatcatgctggggccctgaatgacatgctggggactcagcccccagccctgcagagggccccccagtgcgggcaggccaccaggcaggaaggcccttctcggtgggcaggccgaggccaggcgtgagtgctggcaagccacacatgtggacacctctccctggcaacaatggtggtggaccccagggcagggagctctccggggctctgggcactcggtgaggggcccgcggggctcctagcccgcccaggccaattggggaggccagcctcacaaataaaattcttttttttttttttcttttccaaaaagagaggcagccacagccgtgacatcacggcccaggtgaccgcggcccagccaatgagccaaggccgcgagcaggcttctcgcatcctgtgagccacaaggccaggcccttgccgcctccagggccctgcgcgggagctggttggctcctggtgctccccacccccggccgccctcgtacccaccagagcctgggctct

SEQ ID NO: 438 - DNA, 774 bp, Homo sapiens
  source 1..774: mol_type = other DNA
ttagggtccctaggagactcccttccgcctgtccccggtttggcacaggggccaccgaggctgggaccaaagccgcgcagggctgggagcagcaaaggccgccggccgggcgtggacgacgcgctctttggggcggctcccagtgcggcgtcaccggccctgagaccccgcggcccccagcccggggttgcagaagccggccgcggccagttgcgccccagcgtcagggcggcaagggcgccttccgtgatttgccccgggctcccagagctctcgggggccctgggctgtggcactggggcctcctccgcggggtggcgccttccgcccctccccgttgggcggcctccggcaggccccgttcctccccgcgaacgccaccgaggtgcccgcgatgggggctccgccgattggctgtgcgacgcgtcgctccgccagccccgccccgcgggccccgggggtactaaccccgcgcgggcggccgcggccccgccacttctggggctgcggccgcggagtcggggcggccgcgggcgagcttcggggcgggaggcggcggcagcggcacagccccgcgcgggccccgccgcggcccaggcagccgggacagccacgaggggcggccgcacgcggggccgcgcgccgaggatgcgggactagccgggcaggctgcgggcggccgtcgggccagcgaggcctcgcagcgggcgggccctggcgagtagtggccgggcgccgccccctgcgccctgaggcccgggccccgccgcttct

SEQ ID NO: 439 - DNA, 479 bp, Homo sapiens
  source 1..479: mol_type = other DNA
gatagggttcaatcgtcttcatgactgggccttgactcctcaaggacatgaagacacaaaagggaagctcccgagcatcatgctggggccctgaatgacatgctggggactcagcccccagccctgcagagggccccccagtgcgggcaggccaccaggcaggaaggcccttctcggtgggcaggccgaggccaggcgtgagtgctggcaagccacacatgtggacacctctccctggcaacaatggtggtggaccccagggcagggagctctccggggctctgggcactcggtgaggggcccgcggggctcctagcccgcccaggccaattggggaggccagcctcacaaataaaattcttttttttttttttcttttccaaaaagagaggcagccacagccgtgacatcacggcccaggtgaccgcggcccagccaatgagccaaggccgcgagcaggcttctcgcatcctgtgagc

SEQ ID NO: 440 - DNA, 353 bp, Homo sapiens
  source 1..353: mol_type = other DNA
tcactgaaaagtgctactgcagtatacagttgtattaacctgaggttaccactcaagtaagttttcctgaagggtcagctcacaggggtgtggactacactcctcaacagctgagtccgcctcttgggggaggattagttttataaaggcagtttcagcccccaaacaaggaggggccctgtttaaggaagggactatgatcatccttgcttaaaagttaaactataaaagtgagccatgttagatttctctcactgtctttgcaaaggcggtttccaggactacgcaatccaaaatatttcccaacttccggagacctcccggaaggggcggggcttatggtagcccattcg

SEQ ID NO: 441 - DNA, 484 bp, Homo sapiens
  source 1..484: mol_type = other DNA
ggctgcagtgagccgtgatggccccaccacactccagtcaaggcaattgttatgctttattacaagaagtgtttgaaatgcatcccaaccaaaacatggaagtaaaacatcttttctacgttggtgaggtcccctctctgtcatggcggggtgtggacgcggtcgccttctcctggcgccgcggtacctaggacaggagtcaggccgggtctgcgacttgccggtgggtggcggcaacgaccctgtgggcaccagcccgtcagacggccccagctccgagcccggctgcgagccctctccagcctgcagccgcccgcccggcactgacgtccagccccgcccgtgcagtgaggccagagcctggtgtagccccacgcggggccgttccatcccctggagccccatcgcgcatgcgcaccctggaggcaagcgctcgaggagaagagccgcgcccaccacggaacatctctgcgcatgcgccggg

SEQ ID NO: 442 - DNA, 405 bp, Homo sapiens
  source 1..405: mol_type = other DNA
tggggctccacacattcagtttacactcagtggccagtggctgggaattgtagaaaataaggaaactccaattccttccttctttcagaccttctgccaggcacatggatgtagaactaagtcccaagccccctaaagctcatgccaggggactggactgtccagtactgagcactgtagtgccccaggcagagtcctgggttcaccctaaggctggatcaggatccccaaacacatagatttaaatacaaattcaaatgtaagtaatttcaactgtgtaactgttaaaaagaaagcctcttctgagcttcagtttccttattcataaaataggagtattgatccattccttgcttttcttacaaggatatgctttgttgaatgaatgacaatattggaaaacat

SEQ ID NO: 443 - DNA, 351 bp, Homo sapiens
  source 1..351: mol_type = other DNA
tctccggggctggatctgactccagaggggcgagcccggccggctacttgcatccactgggtagaggcgggggatgcagctacaaggcgccgagactggggtccacgggacaccccagccacgccaagccgggaagtccccgcctcctggagctgaacccgcccctctcccagaggtggagctgcggggggcggtgtgtggaaacctgaaccgccacccacccctgagagggctgcgcggccgaacgaaggccaacggacgccttcctcagcgcccgggcatgcgcagatgtggtgggcgtggctccctccggacccggcgccccgccctccgccccgtgtccgcatgcgc

SEQ ID NO: 444 - DNA, 349 bp, Homo sapiens
  source 1..349: mol_type = other DNA
cagaccttctgccaggcacatggatgtagaactaagtcccaagccccctaaagctcatgccaggggactggactgtccagtactgagcactgtagtgccccaggcagagtcctgggttcaccctaaggctggatcaggatccccaaacacatagatttaaatacaaattcaaatgtaagtaatttcaactgtgtaactgttaaaaagaaagcctcttctgagcttcagtttccttattcataaaataggagtattgatccattccttgcttttcttacaaggatatgctttgttgaatgaatgacaatattggaaaacatctatcgctccctcaagccctcaagtaggt

SEQ ID NO: 445 - DNA, 618 bp, Homo sapiens
  source 1..618: mol_type = other DNA
cccttcctgggaagttttaaaaatgcactggaagactaagataggacattctgcaatattttcagaaatatttataaaagctgcattaaaacatgtaaaaatgcttatgttaaaaacagtatgactactattctagtatgactactattctagtatgaccactattctatttaatagcaatagtaacattatcatcaaatacaataaaatgtcaactgtatttgtgttaattctctaatgataaacattctttttatttctcttaaaaaaaaacaccatgcggacttttctaagtgttactgcgtgaagggtcgccggccccgcgtccccgccttgcaggagcccggacccgccgagcaggctcccggtccggcccggcccggcccggaggccgatgcttcgcggtagtgccctcgcgggtcctgcggactcggcgcccgcggggcccacagcgctgcccagcctgtggacgtggagcccgggccgcaccgccgcacacgccccgggcatctctgcgctacgtcgcgcgcccccacggctccgccccgtggcgtaacccggggcggggccgccacctccgattggccggcgcgctgtcaccacgtcgcgggaagctgg

SEQ ID NO: 446 - DNA, 587 bp, Homo sapiens
  source 1..587: mol_type = other DNA
gcgtgaagggtcgccggccccgcgtccccgccttgcaggagcccggacccgccgagcaggctcccggtccggcccggcccggcccggaggccgatgcttcgcggtagtgccctcgcgggtcctgcggactcggcgcccgcggggcccacagcgctgcccagcctgtggacgtggagcccgggccgcaccgccgcacacgccccgggcatctctgcgctacgtcgcgcgcccccacggctccgccccgtggcgtaacccggggcggggccgccacctccgattggccggcgcgctgtcaccacgtcgcgggaagctggccccggtgcgcgctgacgcggtcggcctggccgagctctccagcatccgcagaagggtccccggcgctgttcctgggactacaatgccatgccgtacggtatgctctagtagggattacaaggcgtaatataggatgttatatttatagggcctatttataagcctctatttaaatcttttctgataggccactataatgattccggtggcttctattggcctcccgggccgtccgtcggagccgaggaggcggggcaggcggctggctg

SEQ ID NO: 447 - DNA, 414 bp, Homo sapiens
  source 1..414: mol_type = other DNA
cagaccttctgccaggcacatggatgggagcacagttccgggaagttggctgcagggttagaactaagtcccaagccccgtaaagctcatgccaggggactggactgtccagtactgattcctcagatgcactgtagtgccccaggcagagtcctgggctttcaccctaaggctggatcaggatccccacacatagatttaaatacaagttcaaatgtaagtaatttcaactgtgtaagttaaaaagaaagcctcttctgagcttcagtttccttatttataaaataggagtattgatccgttccttgcttttcttacaagttgttgaatgaatgacaatattggaaaacatccagcacagccagccttgcagcctgagataaggctatcgctccctcaagccctcaagtaggt

SEQ ID NO: 448 - DNA, 457 bp, Homo sapiens
  source 1..457: mol_type = other DNA
tgtccaacctgtggcccactggccatgtgaggtccaggacggcaacacaaattggtaaaggttcttaaaacattatgagatttttttgggcagggtgtggtggctcacagccatcccagcaatagccaggcatggtgcatgcctgtaatcccagctactcgggaggctgaggcatgaccaacctgggcacagagtgaaactctgttacagaaaaacaaaaaacatgagtgtgtgtgtatatatatatatttcagctcatcagctcctaaggaagccaaaagtttggatatccctggcctgctctcaggccctcaggcccctacggggtggggattggggtgcctggacctggagcctggacagggaccgggcggggcgagaccggccgtcgggggcgcggcccgtctgggggcggggcctgtcctctctcgccccgccccgtcggacgccgcggcgg

SEQ ID NO: 449 - DNA, 236 bp, Homo sapiens
  source 1..236: mol_type = other DNA
cagtgacactttcacatgcagatgggatccagttatggtcccaaccggaacctacctcacagttcattgaattcaggccccaggctgctttggagacctgggaagggccaggaccctgctctgcccagcaggcattccagagcctgggatggagctgcagaagctgcagggagggagccagggggcctggcctggaggccccagccctccagtgcagacttgctctgccctggctg

SEQ ID NO: 450 - DNA, 636 bp, Homo sapiens
  source 1..636: mol_type = other DNA
gccttgcaggagcccggacccgccgagcaggctcccggtccggcccggcccggcccggaggccgatgcttcgcggtagtgccctcgcgggtcctgcggactcggcgcccgcggggcccacagcgctgcccagcctgtggacgtggagcccgggccgcaccgccgcacacgccccgggcatctctgcgctacgtcgcgcgcccccacggctccgccccgtggcgtaacccggggcggggccgccacctccgattggccggcgcgctgtcaccacgtcgcgggaagctggccccggtgcgcgctgacgcggtcggcctggccgagctctccagcatccgcagaagggtccccggcgctgttcctgggactacaatgccatgccgtacggtatgctctagtagggattacaaggcgtaatataggatgttatatttatagggcctatttataagcctctatttaaatcttttctgataggccactataatgattccggtggcttctattggcctcccgggccgtccgtcggagccgaggaggcggggcaggcggctggctggcgggcgggcccgaaggcggaggaggctccgagccccccctccccgtgctaccccctccccccgggtgctggctccct

SEQ ID NO: 451 - DNA, 835 bp, Homo sapiens
  source 1..835: mol_type = other DNA
cctgccccgcgccgctggaccattggcgcccgctggatggggggtgcgcgcgacgcctgcccttcggggagggcggggcttggagcgggctgcgctcccgcccgcgctcggcctctgccccgcccccggacgcgcggccctcagccggctgcggcgcggcggcggcgggagggggcgcggggcgcgcgcgtgggcgtggccggcgggcgtggccggcgggcggcaggaggcggggcggcgggcgctgtcgcagtgaaagcccgagcggcggcggcggcggggacggcggtggaggcggccgggtggctgtgcgcgcgtgtggggcgcaggctcggcggcagcggccggtctggagcggccgctgcgaggaagacagctgcagcgggggaggcgcggccagggctgcgcgctccgcggagccggcggggccgggaacaggtgatcccagtgggagccccgcgccctgccgagttcgaggggcgggagcccgcgctcccgggcgcatctgcagccgcccagccgcggctccggacccaggcatccctgcgctgtctggggcccgggggaagccccctgcccccgcaggctcggaagtgcctgcgctcccggcgccctctccgcggcggaggtcgagcccgggcgctgtcgcgaccgggccgggtgtgcgcgcgctcggggcggcgctgacacgccagccccccatcgcccggaaactgcttctgaagctgaaactttgggcgcctaccagcgcgggcgggagcctagggggcggagggcggcttggtgcgggcctgcgggcgcccctcggcgcggacagccgggacgccgcggacgg

SEQ ID NO: 452 - DNA, 511 bp, Homo sapiens
  source 1..511: mol_type = other DNA
agaggcttctgcagctgccacctggccagaaaagccagggcctctggtagctccagctgctgaggggctggagcctcgccttcccctcaccagaccagagcccggagggtgggggttgggcaggttcagagctgcacctgctgtgcctcccatgcatctgcggaggtggccccccaactgcacatgagggctctggcctcgtgcccggctgccagcagaggaggacacgaggcctcagaggcccccgacgccccttcggaaagcacagggtgtgtggcttctccccagtctggaatcgctctctgggctgggccaggcaagtgggccgcagaggcctgtggggtggccgggactacggacccgaccgcatagacgcgatcagcccctcttggcgttccggtgtagctgaccccgccccgggctctggccgggctgcgaagccgggaaccagcgaccccccgcccagcccctgcggccgccccgcccctccccgccccggccgccccgcccc

SEQ ID NO: 453 - DNA, 412 bp, Homo sapiens
  source 1..412: mol_type = other DNA
caggattctgagcatgcggcccgttgtgactgcatgggctgttcacccatgaaaccagctctgtctctggcagaggggactgcaggctttggactccagcctgggagccaggcacagcccgaggctgtcccacagagcctctgccatctaataagcaaactcattgaatataccgtgtgtgtgtgcccattctgcgcattcttgtgccctcccggggacacagaccccgcgggggcacggtctcgatggaggggagtgtgctccgcggtatcggagcctacagccgccagcgcctcgcccactcgggggccgcgctcccctcgccaccgagctggacccgcctcctgagggtgcgcggaggtgcgcctcggtgcgcagctgcggaggatcgcttccggggggcgggtcagcg

SEQ ID NO: 454 - DNA, 435 bp, Homo sapiens
  source 1..435: mol_type = other DNA
ggagccagcgctcctccggcactgtcccggcaaccaggggtgccccaggctagctcttggggcctttggtccacgtcctgagccactgaccacgggtgcagaaaagtgtttttacacaaactttctcatggtttgtaggtatttttttataatgaggagaaaggaggggcagtggcttccccggcagcagccccatgatggctgaatccgaaatcctcgatgggtccagcttgatgtctttgcagctgcacctatgggaagaagtagtctcctttttaaaaacagtcctcagaggatgcctgtttggctgggctcactcagcctggcagaggaagctgtcacccaggctgggttcaagcaattctcttgcctcagcctcccgagtagctgggattacaggtgcatgccactcaggctgatctggaacctcaggtg

SEQ ID NO: 455 - DNA, 477 bp, Homo sapiens
  source 1..477: mol_type = other DNA
ggcatgagccagccagctcagccaggctccctgtgtcctgggaggaagtgtccccatcccccatgccccttatggggagggagggcgtctgatgctctctctctgcctccccccccatcctgtcaggcacaggtgacgggggcagcccatgcgagcccttctcctgctgctctgggagggccagttccacattgagccagcctggtcccatgggaggccttatctgtccatgtcccccaccaggcctcgaggctcagggtgggagagggccccgggctgccctgtcactccggggcaggttttacgatagaacaagtggtaggacttctctgttgagagataaaatctgtcttaaaaagcaggaacagtctcagcccagccttggcctgacccacagtggaagagctgtggggcataaaccacactgcagagggaaattcccaggtagggagctccgttcttcctgcaaggggatct

SEQ ID NO: 456 - DNA, 491 bp, Homo sapiens
  source 1..491: mol_type = other DNA
gggtctctaggggagcccctgaggactgacctctggcccagatggagctggaggccacgggcccctctgtgccctccgtgatcctggatgaggatggcagcatgatcgacagccacctgccttcagctggggaggaggctgcccggcgcctggaggtggccatgtaccccttcaagaaggggagcagcagctgggcacagacgctggtatgtgtgcactcactgttgggcccagctgtgccagcggggcctccccgctgccattcgaggaagaggccaggtgtggctcatgcctatcgaccccatatctacaaaagaatttttttaattacctgggggtggtggtagcacgcacctgtagtaccaaagcttgagttcaaggctgcaatgagctatgattgcgccactgcactcctaataataacatacacaaacatatatacacatacaaatgtacatatacacagacatacacacaaatatatatgccta

SEQ ID NO: 457 - DNA, 415 bp, Homo sapiens
  source 1..415: mol_type = other DNA
tcccacagagcctctgccatctaataagcaaactcattgaatataccgtgtgtgtgtgcccattctgcgcattcttgtgccctcccggggacacagaccccgcgggggcacggtctcgatggaggggagtgtgctccgcggtatcggagcctacagccgccagcgcctcgcccactcgggggccgcgctcccctcgccaccgagctggacccgcctcctgagggtgcgcggaggtgcgcctcggtgcgcagctgcggaggatcgcttccggggggcgggtcagcgggaggcgggagcgcgaccttccagcccgtagactgggtctacgtgccgggcgctgtgcggagcccgcagctcctgttcccgcgcgagttctcgcgggagccgcagctgtccgtctcacttggcccggggg

SEQ ID NO: 458 - DNA, 738 bp, Homo sapiens
  source 1..738: mol_type = other DNA
cctgagggtgcgcggaggtgcgcctcggtgcgcagctgcggaggatcgcttccggggggcgggtcagcgggaggcgggagcgcgaccttccagcccgtagactgggtctacgtgccgggcgctgtgcggagcccgcagctcctgttcccgcgcgagttctcgcgggagccgcagctgtccgtctcacttggcccgggggaaactgagtccccgaagggtagtaccaagccagacctcaggcttctagtttcggcttcgctgcttgacgggccgggctgccccgccgcgcattctgagacctggccgcggctcggaggcttccgcgcactcgggtccgggtcctgtgggtccaagggccgctgggcaggcggcgagcacttggccgaccttggcccaggtcgggtcgtctgccgcgggggaggggcgactcgccctggcgggtccccgcggggagagggtccgcgcgggtctccggccactgctgcgcgcggcaaagtttcactgagcgcggcggcctccgtgggggcccccgggaccaggggtgctgagcagggccctgcgctggaggagctcccgttctcctgaggggacgcctgtcagcagacagcaactgcagcctccggagggctgcggggcgcagaggtgacaagacccaccggtgctgccggcgaaccgggggaagacgaagcgctcactgtgtcctaggcagacaccgtgctgtgcgcggggatcaccctc

SEQ ID NO: 459 - DNA, 452 bp, Homo sapiens
  source 1..452: mol_type = other DNA
gagaccatgcaactgcactccagcctgacagtgagactccgtctcaaaaaaaaattttttttacatatacaatatgtaaacattacgtataatgtacatatattccatctatggagattgcatttttgcatttccaaggggttttctgaattcacaaagtactttcacaacacactcgagtgtctggtaaccggacccctggtctggagtcgacgggcctgatctcggctcagcaaattttcaatacagcaaaaagaaaatgtacatttgaaccgttcacacagcagcttccgaatccgctcttgaaagagcgggcactcaagggaccggccgcgaaagttagtgcgtgggcggggcacagcgaagggggccagggccttgccggggcggggctggcgcccggggcggtcgcgacgtagccccgcccccagcgttggcgcgagatccgaacg

SEQ ID NO: 460 - DNA, 487 bp, Homo sapiens
  source 1..487: mol_type = other DNA
agaactccctaagggcagagcagactgtgtgctcccaagagccgcgggagtgggggtctcccaactctgcctgttccagtcctcacccttcaggtgctcccagggcaggctgggtgcactcggctgggcagagccggggaagctgcccgagctggccgccctccccgaccctcccagggtcagccgggcccagaagccggagcctgcgcttcccgtcgtcccgaagtgcgagaagcgcggctgcagctctgcgccgaggagccccgggagtccactcccgggcctcgcacaggtgagacgctgcgcggccgacccctctcccgcgcgtgcaacacgtgggcctggcggggcagagctgcttgtgcgcggcgggcggggtgcggggcgctcggcgtcgcctgggcccgcggaggcggctgtagccagagcgcccgaggccgcccgccctcccccggcttggggcggggccgctgcccggctgctgcca

SEQ ID NO: 461 - DNA, 551 bp, Homo sapiens
  source 1..551: mol_type = other DNA
ttctgagctatccaggtcagggagacttgtggctcctttttcgatttttaaaaagaacccagtgctgctctggggagcacgtgctctgagaacaaaagcaacacttaactgctctgtgtagtctatgcatttaagctgagtggctttgttagaccaaaggcgcacaggtccctggtcaccggctcgggaacctgaggagggccctgccaggggctcgggcgtcttaggcacccatgtgggtggcgcactagaaggggcactgctctgtccgagtgctgcccttggggcgaaaggtagggaaggacccccccgccctccccctgcccttgttctcgagaatggggagctggttcggacctagtccggggtccactgcggcccacacctggggatgctccccaggcgccctgcaaccctgccctccgggacaggactacacttcccgaggtgcttcggggtcccggggggcggcgctccacgcgggttgtggggggcgggggcggcacgtgccgccgctctcggccaatgcggagccccgcgcggaggtcacg

SEQ ID NO: 462 - DNA, 544 bp, Homo sapiens
  source 1..544: mol_type = other DNA
gacagctggggcaggtgtcagccatacatcagagcagtgtgcctgccctgagctgtgctcttagaaggtctcctgagaggccctgtaaagccagagtccctcttagcagctcagatcagtgctatttaaaattgaaagtaagcatttagaaacttttataacaattttacaaggtcttgtcaaatgttattaaaacaaagctgaggctggaatttcacctttttcatttcgtttttttcaatttaaacaaattgtagtaaaatatagataatataaatgtaccattttagccatttttgatacaatttagtagcagtaagtgctttcacaatattgtgtaaccactagtattatatagtatatatttttaaaattttacagaagtattaagttagcagcagattaaacatttttttcttaaatgctgaggcccaggctcccacccggaggccagccaggcactgcaaagcctggggtagtgctgtcccgtgtgcccgggccaggaaggctagatgagaggcccgggggcggtttagaatctcaa

SEQ ID NO: 463 - DNA, 220 bp, Homo sapiens
  source 1..220: mol_type = other DNA
gggaggcagaacccactcaagtctgtcactcccctcacagggcactgaccggggaaatccctccatggggcctggagattcagagattctcacctgattccccaccttcttagctgggtcaccttaggaaggctcctcatctgtaagaaatgacagaggctgtgataactcatggccagtaccctgcctcccagccaggagcgaatcagggctgggaggg

SEQ ID NO: 464 - DNA, 308 bp, Homo sapiens
  source 1..308: mol_type = other DNA
atatcgggtctcaatgttaacaacccaagcctggccagaggcagtaatgtgggatggatgcggcccagcagaaatgatcagtctattattcttacaggaagcccgctcgagagcagaaatcgcggcggcacctcttcagcccaggccttgggcggtttcgcacgaccacgcggggctggacggtcgcgtagagagttgtaatgcgcaatctcgcgcactgtacatcgggaattgtagttctagattgaggagaagtgcttccgtccattttgagccttggaaactacgacgaccaaagggccacgggt

SEQ ID NO: 465 - DNA, 652 bp, Homo sapiens
  source 1..652: mol_type = other DNA
ctttctacacagagggcacctgtcagaggccagcgtgggggccacaggctccctcccagcggtaccaacacggtggcacctccccttgtcaggcttcctggggctcccaggagccgctgcgggggaggggaggtggcagtggtcgtctctgctcccactccagattctcctgcgcgcaggagaggaggagctggcgctgcttcagtggcgaggatgggtcgatcagtcccagccggtcctagggagagacactgccccagcctgagggcggcgcagcccaccccaccccaggacggtctccggcctgagcccagggcagccgccagtcggagggggcagacgcggccccagtagcctctggagaccctcttccgaggcaaggagccacatttcggcggcgaggcggcgcaccccgcgcgggagagggggcgcaggcgtcaccccgtcctcactcagcaacacccggcgccgcgccgggcgaaggctggcaaacttctcgcggccggcaggtgggctccgcgggccccatgggcgcaggcacaggtgtgcggggccacagccgggccttttgcagccggcgaccgccccccccgtgcacacgacgcgccgacggcagcttcacacgggttggcgagggccggataaagccggc

SEQ ID NO: 466 - DNA, 495 bp, Homo sapiens
  source 1..495: mol_type = other DNA
tcccatttcaaaatctgtaagatgagggtccatcatctccagcaaaatgctgtgctgaagtctgaggcagaggagggctcagagagaggggctgcccgacccttccatctaggagctgcccaggactccaggaggagactcccttcaacctgggaggtggaggttgcagtgagcagagatcgtgccactgcacaatgggctgtgagtttctcggggcagggaaacagatcactcatccatctgtgttgtgatgtatactagttgcctgatgtatatactagtactcagaaaaatgtctgatgaatgaataaaattcattcatcgaacattttcatcataatccctgacccactagcctagctctgggtacccagtcttgccctaagcctgcctctgaacaggctccagtctttcaggcctggaggaaactcaagccccaccagccgcttggtggaatgctcagctggtcccctcctggggctcatgtgaccaaga

SEQ ID NO: 467 - DNA, 504 bp, Homo sapiens
  source 1..504: mol_type = other DNA
acaccagtgtttccagcaaacagctgaaacaaaaatctgaacagattacagaaccgttgttgtttttttttagacactctgaggtgtttcctcacctgtaaaaacaggataataaaacctactctttggggtttggttaggattaagcaagatcatttatataaagacctaaatgagttgatctttggatgactgaggaatgcggtcctaagtgaccccgggctggctgtggggccaacagcagccgagcgactgcagcagcggcggggaccccattgactgtccagccccgagagcggcaggagcgcggtggatcctggctcggaccaaggcctctccccaaccctccaccaggagcctcgcgggggggcgccgtgggcaccgcagccaggtgcaggcgcctccgcgccctcactccccacgccgaggaggtggccctggctccctgcggccgcagccggggaacaatgaggcgccggcctctgataccaccgcgccggcggg

SEQ ID NO: 468 - DNA, 873 bp, Homo sapiens
  source 1..873: mol_type = other DNA
cagccgagcgactgcagcagcggcggggaccccattgactgtccagccccgagagcggcaggagcgcggtggatcctggctcggaccaaggcctctccccaaccctccaccaggagcctcgcgggggggcgccgtgggcaccgcagccaggtgcaggcgcctccgcgccctcactccccacgccgaggaggtggccctggctccctgcggccgcagccggggaacaatgaggcgccggcctctgataccaccgcgccggcggggcaggggacggcatcctcccagatgatcgcacccagccccgcgccgccgccgccgccgccgtctccgcaactgcaccgccaaagctgcagtctccctcccggcggggcggacgccaggcctccttggtcgggccgcacctccccgcaggcccgccagagacccgcgcggaagatgcaccgggcgttccaccccagcgagccccgcaccccagcccgcagctcggtaggtcggaagggggcgggtagagggaggggaggccgcggccgggcgcgcgcagccccaggcccggacctgccgctgcagacggtccccggggccgcgggccctgagcgcccgctgcggctggagggtggccgagccccggcgtggcgtggcctcgcggttcccgagcccggccacccctgcggggagcagcaccagtggtgcgctccggagcgcgcacacctccgacgactcccggctctgcaaatcctcgagagagggaggaggcgagcggagcgccggccgcgcgcctcgtcggtggcgcggaacgtcccggctcgcgctacggaaagccggaggggggcggggccgtcggcgtaagggggtgtgtccgcgcgcaccacgggg

SEQ ID NO: 469 - DNA, 222 bp, Homo sapiens
  source 1..222: mol_type = other DNA
acctttggccttcaccttgagacataaggtgtaaggacctgggcttggccctggaataatcccatctgccatgaaaggaccttgggactgtcagagcatctgccacagcccagggagggggctgatcccacatacggagcccccaccccaggcctttggaggaagcctggggatcaggaggccttgtttggacacaggtctccacagcgcaggactgtgatc

SEQ ID NO: 470 - DNA, 567 bp, Homo sapiens
  source 1..567: mol_type = other DNA
aggaaggtccgcaggcccccagtgggcaccttgggcttacgctggaaactgattcctctccccagggatacacgtgcctgtctccttgtttcctggcaacaggaagctcctctggccccttccagctgagttggctctggccagcctgggaggcaccaggctcctggcctttgctgccagcccacctctgggagcccagggcttagagagaggtccttctatgagtacttgtgagaggaactgatccctctggagtctggatgcctgaggactgcactctctgggagattatctcgggattccaaacttattcactctcagtcatttactaatttattcatgacacagacatttatcagtgcttggagtccaagggcaccaccccgcgcctccccagcgagggcccgcggggccatgcccttcagtgggcacacttctgggagcccgtcctgagctcggtcactgacgtcgacggccgcctggcggcgctcgagccgctggccgagagtgacgtcatcagaggcggtccggccgagcctgcctagccccccggcgtggcctgacgta

SEQ ID NO: 471 - DNA, 316 bp, Homo sapiens
  source 1..316: mol_type = other DNA
atacaccaaatttgtttttaaatatagttttgataattgttctcattgtaatcctaagcattttatttatttataatacagaagtgcagtggcacgggattcttcagcctcctgagtagctgggattacaagcacccaggtcaagtgatgctggcctaggcacccagggacctggccccctagcctcaggccagtggcactgccccctagcaggcgcgagatgccagagccctagggacgggcgtgggccaatggctgtcgcagtaggctccgcccaggacccagcccggcccctccttaggcctgggctctggga

SEQ ID NO: 472 - DNA, 480 bp, Homo sapiens
  source 1..480: mol_type = other DNA
ccaggacagagcatccctggattctgttcagggtgggaagtagtactgctagtcatggtctcaccccgagctgctctggggccacagccctgcccctccagttctctttattttacatgagggctactttccaaccaaataaagtcaatttttctaagaatgagtctacatgtaactttacttccatattcgaatcagagggtgggtggcagacccttcgtgcagcccgttggcctgggctctgtacccgagctccaagcctgccaggatggtgggggatgcttccactttgttctgccctgggaaggccctggggaggatccaaggcagggacatgtccctgtattcaggctgcacgggatccccagacttcctctgtgggatgcggaggagggccagcttctctccaggttggaattcctcagtagaatgcagacggctggaggtcacagaggcctctgtgatatcaccacgaggggg

SEQ ID NO: 473 - DNA, 435 bp, Homo sapiens
  source 1..435: mol_type = other DNA
tggttcaggcgattctgctgcctcagcctcccgagtagctgggattacaggtcaggatggtctcgataggtttctagatacccagaatttcactatctgaattaatgcaaatggacttaacagttcctccttggtcacaggctgaccactgcgtccaacccagaccaagccttgaccctgactagtcagtgaacccctgcttcaggtgtgagggattctcgtgtccccagccccgcccgcgggccgccagcttcccaacctgcacaggcccagcagggcccctccaggtctaggtgagcagagctccacctagaaagatccgtccggctctctgagcagagggtagcggctcggctgcgcgggaagccggcgcggctcgactcccgattggccagaggcggcagaacggggtggggccaaacgacgcgcgttctg

SEQ ID NO: 474 - DNA, 375 bp, Homo sapiens
  source 1..375: mol_type = other DNA
tgtgtgcctgcagtcccagctactccaggggctgaggtaggaggatcactgaggtggaggctgcagtcagctgagatcacagcactgcactccagcagggtcatagtggagtaaaggtcgtgataaacatatcaataaatgtcttggcatgcctggggtgatcagggagtggccatgacttgctgaaaggattcataattgtcagatttgtaaccagactgcaaatttttttgttaaagtgaaccccaagtttctcttcaaagaatcagtaagttcaggtctcttactctttgattcactattttaaagtttaagctttgacctgagtcaccctggtcacccagaattagcttagactgtgtggttcaaccctag

SEQ ID NO: 475 - DNA, 484 bp, Homo sapiens
  source 1..484: mol_type = other DNA
cctgcctgagccctggaccagggtccacatctgcagcatggagctggggttgagcttggaccaccccaagacctggggtggatcttaagggtcagcttgagcctaggctctcgagccttggagcaaggttcttagagaactttgggtctgaaagcagctcaaaccttccaaagcaattagagcacctcctcctggagagagcggctctcgtggctggggagtgtgcggctggagagggaggcttctgccagaccctctcccgggcctgttccccagtctcacactgagctccagatcagggacagccgcagaaggggcgccctgcgtgggacgggtccgttgcgcgcctggtaaccgagggggaagggaaggggcctctggcgtgcggggcggtgtcgcgcaggtcccaccccgcctgcccgcgccgcccattggtcccgagcgcgatgacttggcgggcggaggaaaccgctcccgagcacgg

SEQ ID NO: 476 - DNA, 554 bp, Homo sapiens
  source 1..554: mol_type = other DNA
cctgagatcagaaatcccagaccatcaagagatgatgatgatgattaacagcaggaaacgtttttgaaaaagtgctcatttaatcctcacggcaacccagtgggggtaggtattatcactgttttacagatataaaggagccaggactcctaattccaaagttcgtgggactgagtctaatccaacacaaaggctctgggaggggaaattgtcttacccaactcttaacaaaacagatttaggaaacatttattaagtacttgcatcattggtgaagtattacagtacttcgtgttacaatactgatggggaaataagctaagagggataattcctcccaaggggatcacacattcaggtcctgaatgtgaggctgccagcagtttcattaacctaatcccaggctccttcctcccgcacctgagggtaggaacggacctggagccctctcagagcggtgcattctgggattcgcccgcctgtgggccaatagaacaggcgactgtatccaccttcgctgtctgcaggttgccaatgagaagtgcacgggtcct

SEQ ID NO: 477 - DNA, 159 bp, Homo sapiens
  source 1..159: mol_type = other DNA
cgagactagcctagccaacatgtttacttcagaaataatctatttctcttcccagttccttgaaatgatggcccagggtctcagagctggtcagtgattaaaccaggattcagcctgcaggatgcatgattccagggccagggccttagaacctagagc

SEQ ID NO: 478 - DNA, 217 bp, Homo sapiens
  source 1..217: mol_type = other DNA
ctgggctcaagcagttggcccacctcagttttttttaaagagacagggtctttctctgtcacccaggctagagtgcagtggcaatatcctagttcactgcagccgcctcagcctcctgagtagctgggaccagaggtgcccaggctgatctcaaactcctgggctcaagagatgggaccacttcacctggcctctaggaccttgcagggcccccaag

SEQ ID NO: 479 - DNA, 321 bp, Homo sapiens
  source 1..321: mol_type = other DNA
ggaatttgtttaaaagaggatgtggtaccacagcctaagtagctggaaatacaggcacgtgccaccacacttggcgtcccaccatgttggccaggctggtcttgaactcctgaccctgggattacaggcgtgagccactgcgctcagccagtggcactagcttctgctagtctactgggctgcagtggagatttgggccagactcacgcacaccagaatttgtgtgaggccaccttctcatgctcacagacagactccctcaggttcccacatggagcagatgccctgtgatgtcacaggcctaaatgtgatgtcactttg

SEQ ID NO: 480 - DNA, 289 bp, Homo sapiens
  source 1..289: mol_type = other DNA
ggaagaattctttacaacgaatcaattaagagcactttctcttttcccagaaaaactctgagtcagaaactctgggaggcagacattcagatgtggtcaggacagatcagccctgtgtcgggggtggggggtgagagcgggtcagctccaagcagccgggtcagctcagaggctctgtatctgctttggggacccctactgagtcggttctgagaagggacaccccagaggtgtcagctttgaaaagccgtgggccctcccaccgctattgtgcgggggaagatgtagc

SEQ ID NO: 481 - DNA, 375 bp, Homo sapiens
  source 1..375: mol_type = other DNA
ggagtgcagtggccttgggataacaggcgcccgcctgacctcaggtgatccgttcattatggcagaaatcttccaaatcctaaacggcacaaaatagattaatattctgcgggcattccaaggtaaggacgctgccttacccagtctctcagcagtcctaagctgccttcgacggccgagaagcgcctcgctggtctcccagcacgtggcctggagcccagcctcccgccccgctcggtcacgtgagcctggctctcacccgcgccggcttccacaccccgcgggactgagaaccgccctcccactagctcgcaggcgcaggcgcagggcagggtcccctcagtttggggtcgcagcgcccaaagatgacgtgtt

SEQ ID NO: 482 - DNA, 404 bp, Homo sapiens
  source 1..404: mol_type = other DNA
tgcggctgcagtgcccagtggccgcgtagacctcgacggccgctctccaccatactgtggcggggtcttgcgcaacgggtgctccacctcgagtgggaccgtctttcaggtgaggcgggggctgactgcagcctgtgcctccagccgcgcgcttcctcctgcttccagaggagcagggcagtgcagccaggcctcgcaaacccctcttctggggcccccagcgggagcaggcttggcgggagccggaacccggagcccgccgactcgcgcacccgactgcgcccccaccccctcggcgcgccgccgtctcccctccagaggaggtgagtttaaaccccgcccacgtgaccccagctgggcaatccggttctaaccggtccggggctcccagcgctataaaaact

SEQ ID NO: 483 - DNA, 601 bp, Homo sapiens
  source 1..601: mol_type = other DNA
ctgcaggtgactccagggagacctgacctgaaaggacccccttcaagggcaggaggatcacttgagggagtcagaaggtaacaaagcgaaacttcgtgtctctctctctctcactatatacacacatacatacatatatgtgcatatatataatatttatttatacatatttatttatatatgtaatatttatatacattatgtaaaatcaatcgatcaatcaatcacgcactatgggtcctgatggtggtaacaactgctgatgcccatcttggcctggggcactgagatcgcccggagatcacagtgttagggtctcaggctccttccaagcctcagcctagatcaggcccaggaacccagtgtgaatgtgtgcttctctcccgttggaaggagaaggaacatgtgtccaggggtacaccactgccagcagggcctctccggcggagccgagcgcgggccgggggctcgcggcaggggcggggccggccctcggggcgcggcgggggcgggggtccgcgctgggaatgccgcgccgcgggggctggggcggggcttctccggctccgcccccgcgcaggtagccaatgggcgcggcggc

SEQ ID NO: 484 - DNA, 606 bp, Homo sapiens
  source 1..606: mol_type = other DNA
tgactttaagtgacaggcagttcccctctctttcaattcgtctgaacaatgatcagtcattcttagcagcagccaacggaccgggcccgctgccagggggtcagggctgggccgaggcggccgcggtctcaggctctggccaattttgcagccgcgggtaaagttcacgctgcccgctcccctcggtacggccgggaggggacggcggcgcaggctccagagatgcgcgggctccgggccgggttttctccgaagccttcggcggcggcgctgcctagcgaaagcggctgagggcctgccgccgccgcggcttgttctctcccctcctcctttgtgaagggaagggagcgagtccgttccacggcctgcgcccgctccgctctccactccgggtttgccaggcggccgcgacggcgctgaggagagtggggcgctctagccgctcagtccggccgaccgcttgctcgcccgcccgctgccgcgcagcagcctcgacccaagccgcagctggcgaggggaggcagggcgccgggctcggcccgcgctctgactctggctcccggcgccccggctgctgccgcgcgccctccagcccgcccgtcctcc

SEQ ID NO: 485 - DNA, 358 bp, Homo sapiens
  source 1..358: mol_type = other DNA
tagatgcaggctccatcttagctgcagactctacaagaaaccagggagtcagggctttgagagctcagcttccttgttttcctgtcagagcagaagtcagaaaatgaattctacctctctgagcttttaaaaaacattctgacttgtcttgagagaccctttttacaaatagatttttgagagaatttgatgtggtgaatttacagagcaaggacagttcatttctcagttttgtctttgcagccttaggccccagtcacaagtgtgtccccactgatttaggtctcagggcctgaaatgagttacaggcccccacagactgatgtgggctggtcttcgcctggagaggtagcaacca

SEQ ID NO: 486 - DNA, 367 bp, Homo sapiens
  source 1..367: mol_type = other DNA
gcttccttgttttcctgtcagagcagaagtcagaaaatgaattctacctctctgagcttttaaaaaacattctgacttgtcttgagagaccctttttacaaatagatttttgagagaatttgatgtggtgaatttacagagcaaggacagttcatttctcagttttgtctttgcagccttaggccccagtcacaagtgtgtccccactgatttaggtctcagggcctgaaatgagttacaggcccccacagactgatgtgggctggtcttcgcctggagaggtagcaaccaccctgagccaggctgtggccagaggctaacccggcccctggcttcgccaacggagaaggatttatcatctgtttcc

SEQ ID NO: 487 - DNA, 387 bp, Homo sapiens
  source 1..387: mol_type = other DNA
ccctgagccaggctgtggccagaggctaacccggcccctggcttcgccaacggagaaggatttatcatctgtttcctcctcattagccacctgaggtggggctgagaggaggggaaaatcagggggatcccccactttcttcacacagggtgccgctgccggccacagaaaccccaagaatgtttttctttggctattcactgacagcagtggggcaagagcactgactctgagacagcagcctccgctcactatttgaaggcggggtaggtgctacgaggcgaggcgccgagcggcgacccccatcccgctcgcccggagtcaacatggccgccgcgcagggaggcggggctgctccaagtccgggcaggagcggggcggggacgc

SEQ ID NO: 488 - DNA, 435 bp, Homo sapiens
  source 1..435: mol_type = other DNA
ccctgagccaggctgtggccagaggctaacccggcccctggcttcgccaacggagaaggatttatcatctgtttcctcctcattagccacctgaggtggggctgagaggaggggaaaatcagggggatcccccactttcttcacacagggtgccgctgccggccacagaaaccccaagaatgtttttctttggctattcactgacagcagtggggcaagagcactgactctgagacagcagcctccgctcactatttgaaggcggggtaggtgctacgaggcgaggcgccgagcggcgacccccatcccgctcgcccggagtcaacatggccgccgcgcagggaggcggggctgctccaagtccgggcaggagcggggcggggacgccgtcggcggagccagcgcgcaggcgcgggccgcgtgggccccggatgg

SEQ ID NO: 489 - DNA, 478 bp, Homo sapiens
  source 1..478: mol_type = other DNA
tcctcattagccacctgaggtggggctgagaggaggggaaaatcagggggatcccccactttcttcacacagggtgccgctgccggccacagaaaccccaagaatgtttttctttggctattcactgacagcagtggggcaagagcactgactctgagacagcagcctccgctcactatttgaaggcggggtaggtgctacgaggcgaggcgccgagcggcgacccccatcccgctcgcccggagtcaacatggccgccgcgcagggaggcggggctgctccaagtccgggcaggagcggggcggggacgccgtcggcggagccagcgcgcaggcgcgggccgcgtgggccccggatggagggttcggtccccgccggggaggtcgggacgggcaggggctgaggaccccgcgccagcttgggagccctgcgcccggagaagcggggagccccgcccctccgccatagcagcctggcg

SEQ ID NO: 490 - DNA, 449 bp, Homo sapiens
  source 1..449: mol_type = other DNA
ctgtcaccaggccgggtgcaatggcacagcctcagcctcccgagtagctgggactatagatgcatattggccaggatggtctctctcaattgtgaaaatgaataactggggcccaatctgggcctgggcccaggacacagaactcgaggccagagggtgtgccacacacctccagtgggcactctggactatgcctgtcagttcgaccctcagagatgggcacgaagtacagaaagagccctcgagtgcgcgtctgctggccccctctttgtctgggagggccggggacctgcggggccccgccgcgggtcagagctgggcctccggccaagcgccatcccgggcccaggcggagggggcgctgcggcgggaggccgcggcgggcggtggcggcgggccgggggcggagcgatggcggggccgccccagtgagtgagcgagcgagcgcc

SEQ ID NO: 491 - DNA, 366 bp, Homo sapiens
  source 1..366: mol_type = other DNA
agcttcagaggctgcttgttaaacacttcattaagcggcactctgaaagctgccacctgcgcattctgggagctcagaggggaccctgagggagcctggatctcacttccaaacacagtctctctatggtcctgtgtgtgtcacagagacatggtggggattaacctacaaggggggatacctggcaggattaggaaccccatcaagcagccaggggctaaagccgtcatgcaggtggggcccatttacctttactgcagagccggaaagggtgtgaggagagggaggcaggtcttgggccctggtcccgccccctgctcctccccacccttctctgggcctggccacccagccaaaaggcaggcc

SEQ ID NO: 492 - DNA, 307 bp, Homo sapiens
  source 1..307: mol_type = other DNA
gccttctcactgagagcccgtttttatccagtggggctcaacagcccctcatcctgtacatgatgaaaggggcatttttacaaaaagcccccagcacagccttccttggggactctgaaggtgtccccacgaggaagagccggccttgggtgggccctccaccgcctctaccctcactgggtgggactgccagcggagagtccgcgggatcccttacttttctaattcgagtctgaagtgaaatgcggctgcgccgcccgcccctcggcgtctagcttcgtccccgccgtgagggcgggacttcctc

SEQ ID NO: 493 - DNA, 248 bp, Homo sapiens
  source 1..248: mol_type = other DNA
gcctttgtggtcccagcactccagcctgggcacaagtgtagtcaaatgtgagtggttgtatcaacttacacacagttccaccatgttgtcatcgactctaaggttttaaagtttgccaacatagtggatgggagttcatcaacacattttggaaaaaccgcaggcttcttatttggtcctcatgagagctttatgaaagaactccctctgtgggaaaggaacacagaagacttcggatcttccagctc

SEQ ID NO: 494 - DNA, 426 bp, Homo sapiens
  source 1..426: mol_type = other DNA
ctgttgcccaggctggagagcagtggcatgatctcagctcactgtttcttttgccttagcctctagagtagctgggactacaggcacattctcagcagacctgtgaaggaccttattcctgcagggggcccatcagaggaggaggcctcctagattggacagtgggcaaagtcctcccagcccccagggtcctggctcccttccctgtagcctgcttctggctgacaacagaagccacttccaggttgggccttgcattcaaggcccacccagctctggggctggcaagccctagtcttttgtgcacacaagagcgggcaccaatggggacacctgctgattgtgcacctggggccttggtgaaggggcagctgagtgagcggcaggtggccctgtgccctgcaccggccacttcgaggtgagaac

SEQ ID NO: 495 - DNA, 224 bp, Homo sapiens
  source 1..224: mol_type = other DNA
tgccccaagatggtgccactgcactccagcttgggaaaacaaacaaaaagatattaaagcgtgtttgtaaatattccttattccaaaattattaagaatttcaagactataacaagggagaggggcaaaacttgtccctttttaacttccaaccaatggtcggcgagcttgccgcacggtcaatggaggcgggcctgggcagccgcgcgcgtgcgtgtttccgg

SEQ ID NO: 496 - DNA, 319 bp, Homo sapiens
  source 1..319: mol_type = other DNA
aagcaaagaggattacaggcgcccggccagtttccccctctttaaaatgtttgcacaccgtggggtccggggctcctctgtgatgccaccaaggtttgcaggctcagcggcagcgcccaggacggcagcccttccactgccctagtgaggtgggaaagggggtccttagagccctatggcccaaggagtcaagcctcctgcgttctagcccaggctctcttcgcacagaggcctttccctttgcacccaaaatttggggagaggcgttttggggaatgccctgacgcccgtcgctccgccccgtgttctataagatgcg

SEQ ID NO: 497 - DNA, 781 bp, Homo sapiens
  source 1..781: mol_type = other DNA
tggccttgcccatgggaggggctaggtcactaggcccgggggtcagagggtcccggcccgccctgtctatgtacccctcctccgagggtccccaggacaggcccggccgcaccagcctctgcccccagcccagtgccaagcctcggacacccggccggggaggaccaccccagtcctgcgtcggctcagtgcaccctcggcctcctgccccaaaggtgcagcccgagagtcccatatccgcgggcagctagtcctggggacaaggaagaccagatcgggcgagccctctccagctgcaagggccctaccccgcgggcggacccagcctccctcccgtcccgacgctgttcctcggggtgagcaccagcgtttgtcccatcccgacgctgccccccggtgagtgcggcccccgcacccagccagtgcagccctaagggcgaacgcggccaccccattctgcgcgcccagcccgggcgcccgctcaggccgctccccagcccggcccgcgcaccccggaagtaggagggtggcccccgaggaaccgggcccgggaccctctcctgtccgggctcagcttcggggggctcccgacaccggcgccgccctggcttgcgcccccctgggcccgcgccgggcttacctgtcccgccaggtgagccgcctccggctcagcccctcccccgccccctcgccgctcacctggggcgcaggtgagcgtctcgcgggagcgctgcacgggccgccgctagggacacaagcgctaccgcgcacctggaccgag

SEQ ID NO: 498 - DNA, 403 bp, Homo sapiens
  source 1..403: mol_type = other DNA
gggtgaaagcgagactctgtaaaaaaaaaaaggcctttaccttggtatgcagagtttattattattattaattttcaggctggggtgcagtggcgcaagcctcccgagtagctgggacaccggccgggcccagcctttcctaggctctggaaaactgccagagcatgagcagtgctgtgcagagttcttctcaatttcttccagcgctaaaaaaaaaaaacagaaacacttccctccctcctgaccctggcggggcggggtgggcgctgtccagtccaggcccggggcgtgccctctagcccaaagctctacagaccagtgtccggagcgttcagaggcggggcggctctcgctgttggcagcggcccggaccaatgggcacgtcgcccgcggcctataagag

SEQ ID NO: 499 - DNA, 460 bp, Homo sapiens
  source 1..460: mol_type = other DNA
atacacggattgtctcagtcattacatcatccctctgacatagtcactattactgtctctacttaacagatgagaaagttgtgaaacaggttaagtaacttgctcaaggtcaattcttcacaggattattcggcgacaggggccgctgcgctgggcgggtgccgacggtctctctagcccgccgcaccggctgctcgctggtgcctataagtgacagcgccgggctcagctaggcttcagtctgctgccgccggggccggggctagggttagttctggagctggaccaggaggagctgcagctgggccggggcggagcgccgcgtcgcgccagggccgcgaggaggggcgtgttgctgctggcccaccgcgagccgcccccagcccgcgccgaggcgccttcccgccaggccgcctgccttggcgcgcctggacccctgccctgggtggagaagctcccg

SEQ ID NO: 500 - DNA, 523 bp, Homo sapiens
  source 1..523: mol_type = other DNA
tagctcttgttgcagcacggcagccctagtaagcaatacaactacttgcatagtagccaggggatacacggattgtctcagtcattacatcatccctctgacatagtcactattactgtctctacttaacagatgagaaagttgtgaaacaggttaagtaacttgctcaaggtcaattcttcacaggattattcggcgacaggggccgctgcgctgggcgggtgccgacggtctctctagcccgccgcaccggctgctcgctggtgcctataagtgacagcgccgggctcagctaggcttcagtctgctgccgccggggccggggctagggttagttctggagctggaccaggaggagctgcagctgggccggggcggagcgccgcgtcgcgccagggccgcgaggaggggcgtgttgctgctggcccaccgcgagccgcccccagcccgcgccgaggcgccttcccgccaggccgcctgccttggcgcgcctggacccctgccctgggtggagaagctcccg

SEQ ID NO: 501 - DNA, 609 bp, Homo sapiens
  source 1..609: mol_type = other DNA
tctgacaaatggcaccctatgggtgacaagtttcctttgtcagaaggtgacacgtcttccttaagaagatacagaacttccttaataaagaggagggtctctcctccatcagacctgctcttcctcagaggtgggcagtgactccgctagggtcagatggacctagtcgctcccatcaccccgagggcacccagagtgtgtgtgagccccccggaaggagtgggctgaggagccccccggggccctagcctgagaggtcccagaattcgggggctgagaggaagtcttaggagctcttaaggcaaccgggcggggtgagcccgctctgcaggaactcctcgacggcgatacgactcccagggtgccccagggcttagcccagctttcccgcccgcccactggctgccggtcccgcaagcggcgaagcccattggccacggcggtgcggggctcccccactagcaggttagtgggcgccgccggcagcagacgttgaccgggcgcggggcccggctagccacggaagcggccgggcgcagtcttcgtagcgtacccgccggctgcgaggcgcagggcggaggcggagactgcgtggcgcaggcgcgttgc

SEQ ID NO: 502 - DNA, 327 bp, Homo sapiens
  source 1..327: mol_type = other DNA
ctttaatccatggccctaggttcaggggtggcctcttgtgcccaagacaacccaggaggttcatggtcctgaagccagacagagggtgtgggaccctcacctagggctgctctgccagcatgtcccgcagagcagggactctgcacagggtggtctaactgcaaagtctgccatcctgccattggggctggaaaagaaaggtttctaacttgctttcaaagcgagcctgctcagtggagctggggccaagctgggcctctccagtcggctgcgggggcgcacccccgggcgctgggagtccaggcccggttttgcatcaggccctgc

SEQ ID NO: 503 - DNA, 304 bp, Homo sapiens
  source 1..304: mol_type = other DNA
ttgctctcagcatataagtggccaagagaacagaagtcacgtcccatcactgggcctcagtagttgtcactattcatagcattgacaaatggctgtagagctagaccttcatggacagatcacacacttgaatgcattggttgcattgagctgagagcacgccattgcattccagccccatcctggttggatagggcagggataatgccctttctctctggggctgaaggaggaaatactcccaccccctgctggctccagtctgggtggggtgtggaggaagtcttgtttcatgtcctcccac

SEQ ID NO: 504 - DNA, 438 bp, Homo sapiens
  source 1..438: mol_type = other DNA
acacacacacacacgtgcgcacacacaactgtgtgtgtcttcctttacgcctgtaatcccagcactttgggaggccaaggcgtggcacgcgcctatcgcctgaaccttaacaggagggaatacctaatttggagtctaattagtttatgggattagaaacaattcatgtcaagtgcttggcacctaagaagtgactgaattagagttctctataagtctccggcgctagactgcccttctgcagccgcggggcataagcggtggggcggggctggccgggcccagaggaacgcggctcggattcccgggggaaggccaagcggggcggaccccatctccgggaccatggggacgagcggcaccagagccggggccagtcggagcggggcgcgcgccgcatggcggaagcggtctctgctcttgttgccgccgccgcca

SEQ ID NO: 505 - DNA, 233 bp, Homo sapiens
  source 1..233: mol_type = other DNA
taaaacagggtttcactctgttgcgcaggctggagtgcaatgccatgatcatcaagcctcagtggcctagtaatggcgtcacccctgacctggccagagggtttgggcagccagagggcaggggccagctagggcccggcccagcggtcatggggcctgggtggcggggcctgcaccgagccctgaaggcagggaagtgacctcgtctcgaatccagatttgtgaagtaaggg

SEQ ID NO: 506 - DNA, 332 bp, Homo sapiens
  source 1..332: mol_type = other DNA
ttgggtgtcagttcgaatccaaggtcaaaccaaggaaggtacctatttgcgtggcagaattggacaagttaaccaggtgggtccacagcattgggtcctggcaagcgcctagggtgcccatcccagtccctccctgcctgcgctcactgggcccgggaggacacctgatgtctctagagagccattacagatacctgcagagcagggcctgcctgtgagcagtccacagtctttggcgtgcacaggggcacaggctgttccgccgccgggagaggctgagtctcaagccgctagggagcggctctgccccagggccgagggtggagctttct

SEQ ID NO: 507 - DNA, 462 bp, Homo sapiens
  source 1..462: mol_type = other DNA
gatactggaataaataattcaggttttgaacggtgctgtgagggcgctattgggctgacatgagtgacgtcacccagctcttatcccagccccggcatcacgggacttgccctggcagcaacttacctgcctggtcactgtcgcattgtcgcttcagtaccccagccattctgacagggtaatggtgacctgaagtcacctggacactccatgttcccaggggccctgacactgccatggttgccctgagggcttctctgagacttcaaggctctcgcaccggcgcctctgaaacccccggcccgcagagggcgccgcgtcaaggacagcgcgggcggactcgggagggggcggggccgcagccacggtcgctcgggcttattactatgccgcgcaacgcgcgctgcgccccagcgcgccgcgcccattggctgatcggaccgctgacgtcaccgaaccggt

SEQ ID NO: 508 - DNA, 586 bp, Homo sapiens
  source 1..586: mol_type = other DNA
tttctttcttttttttaaaaaaagtcattttctgcaacaaaacccacattctttttttgtgttttgggatccttccacctctgcctctgcagtagctgggaccacaggtgcacaccaccacaccgagctaacttaagaaaaattttttttggtagagatggttggaattcctgtacaggctgagccactgcccccagccagttactcagtttttctaaaacttgggtgcctgggggagcctctgaaaggcagtttcctaagggaagggtctccccagtgctcagcccctgaggtgacagggtcatgtgatccatgtccagtggctctggtgacagcagtctgaagtcaactggctgtgagaactcgagtaaggccagtcccgataacctccaattcaatgatcctaaaagagcaggtgcttcggggacagagccgacctcccgctgggggcgcctcctcgctgcggggagctggcttggggctagggcgtgactgtctccctgccaccatcaccgcccgccggccgtgactgcaataagagaagtccgaggcggcttcctcctccctgcccagcaggggcggcggt

SEQ ID NO: 509 - DNA, 314 bp, Homo sapiens
  source 1..314: mol_type = other DNA
gtgacctcggctcactgcaaccctgacctcaggtgacccactcatgcatgagtcctcaactcccgcatgtgaggcagaaccagcattcccaggacccgggccttgccccggatggactgtgcaggacgggatagagcttgtgactcactctccccaccctactttctgccctggctgagaccggagtgaaggagtttacgggcttggccccttggctaacaagaagaattcttctttcaacacggatcgcccggatggaatgccccgaagccccgggtgggtggggcagtgagccaatcagggccattggcggg

SEQ ID NO: 510 - DNA, 332 bp, Homo sapiens
  source 1..332: mol_type = other DNA
ggcaattgccaaaatatagccaatctgccagcagcaggtagcaatatggcaaaatttctcaatgagaatagtgccttccacttgggagaaggcaatgattaaggctttaaagaatgagccatcttgaaactcaagatctatcatgatggcccaaagtgacttaatttccaaagttctgggggtttataaacagcatatggtatgtcacatgacgtgcactttgcacacagcaagtgctcaataactttgaatacccttagcggctccaaaagtcagcttgaagtgcatttttctgccagcaggcagcacacaaatgttcccgctgggcggag

SEQ ID NO: 511 - DNA, 377 bp, Homo sapiens
  source 1..377: mol_type = other DNA
ccaacacctcgagaggcaggggagcccggagggcgtggcttgccttccggaagtcaggcctcgtcaggaatcaccaggtggttggcccactctgatgggggcctgcaggccaccggacgccttaggtgtcttaaattgaggacacacttctaaattggcgggctcctcctgctccgattatgaggagttccagttaactggctcccagagggcgatgcgcctgaggcggagcctaagctcttccgaggtcccggccgggagcctgtcccctccaggtggcgcccccgcgtgacgcgtactccaggagtgggcgaagtgagcgggcgtctagagtcgccgtgcccgccccagcccgcccgggtccgccccgacccgcc

SEQ ID NO: 512 - DNA, 512 bp, Homo sapiens
  source 1..512: mol_type = other DNA
acaaaaatgcagttttctgtgggaacattattccaaattacttaagggaacgatttttaaattttaggaatctagttctccaagatatcccggcttgggatatagcaaggcgaactaacctcgctggtcttaattttctcatcggtaagagggaaaataataatgcttactttgatgaattactttacttcaacatttaaaaaaccgactctccgttatctattctaatgataaaaatatagatagagcgaggattcacatagtatgtgctcaataaacattattttattgtttagatgtggtttggaaaccccaaacactaccaaagcctcccatatttgggcctgaattctcagaacagaataggatgtaagggctgagattcttgtcactgtgcctcggggagtcctgtccagtcccagcggcgcctgcgcactttggaccggggcggggaggacgcgtgcgcgccgcgtgagggcggggctagtgcgcacgcagccttagctccttcg

SEQ ID NO: 513 - DNA, 155 bp, Homo sapiens
  source 1..155: mol_type = other DNA
ccttggtctctttaaagcaaaaaatcctttttaaaaaaattaaccatttgccctttagcttctccgctttgagggcaaaaggctgacggtcaggctggagtgcaatggcgcgatcttgcaagcgattcaagtagctgggattacttaggccaagg

SEQ ID NO: 514 - DNA, 454 bp, Homo sapiens
  source 1..454: mol_type = other DNA
aagcgattctcctgcctcagcctcccgagtagctggggtgctgggattataggcgtgagtgcgcccggccctcttctccctgttttagagagtaagaaactgaggttcacacaatcaaagtgatggcttatcccgtaagcagatttctctttagccttaggaagaatttttcggcgtggtggctcacaggtggatcacacctgtgatcccagcacatgagatcccctcatggagtgtcctggagggacattcgggagcccaggcatgtccctcctatgagacgcagaacaagtcgggccgcgtcccctttttcttcgccccttccccatagggtactgcagggggcggggggcggggcttcggcggggcggggctgcagggctcccgcgggctggcggggcggcttcggcgtgcggggcggggcatcggcggggcggggctgcagggctcccgg

SEQ ID NO: 515 - DNA, 192 bp, Homo sapiens
  source 1..192: mol_type = other DNA
aaagcaaaaaatcctttttaaaaaaattaaccatttgccctttagcttctccgctttgagggcaaaaggctgacggtcaggctggagtgcaatggcgcgatcttgcaagcgattcaagtagctgggattacttaggccaaggccgccccccgtacgggcgtgcgtgagcgtgcgtacgcacaggctgctggg

SEQ ID NO: 516 - DNA, 271 bp, Homo sapiens
  source 1..271: mol_type = other DNA
gtagctgggccacaccagactaatttttaaaaatattttttgagagagggtctctgctaatttttcttaaatacataaatgaacataaaattctaacaatgcatgagtattttgaggaatggcgggacgaggggcaccaccctcacatctttcacaagtctgccccactggggagaatcggcaccattggtgtgcgagtccctgaggtgcgcaattcccgcacgaccgtgggtggtggccgcgctttggagccaactggggcgagcacccc

SEQ ID NO: 517 - DNA, 332 bp, Homo sapiens
  source 1..332: mol_type = other DNA
aggaacaaagaaggcataaacaattctatttttttttttttttttttacctaggctggagtgcagtggcagcatcacagctcactgcgcctgcaggggtagctgggccacaccagactaatttttaaaaatattttttgagagagggtctctgctaatttttcttaaatacataaatgaacataaaattctaacaatgcatgagtattttgaggaatggcgggacgaggggcaccaccctcacatctttcacaagtctgccccactggggagaatcggcaccattggtgtgcgagtccctgaggtgcgcaattcccgcacgaccgtgggtgg

SEQ ID NO: 518 - DNA, 270 bp, Homo sapiens
  source 1..270: mol_type = other DNA
aaaatacataaataaataaaagttaaaataataaaaaattttaaaagttgtttaaatagggtggatcacaaggtgatcgagacccccagctaaatgagactccgtctcaagttgtttaaatacataaaataatcaataagttcataattactgaagctggagccataatacaatgttaagaaaggattaaacgtgtcacaatacacctgatgtgctgaccgtgttgcccctccctcttgggggcaggggctgcacctgcctcctcgggcc

SEQ ID NO: 519 - DNA, 456 bp, Homo sapiens
  source 1..456: mol_type = other DNA
ggtgccggacgccagcgcccactccatgcacacagtgctggaccgcatcgctggcgactctgctggggtctgcgacgaggcctgcagcatgcagcacgtgtgtgccatgcgccaggtggacattgacgcgtgccccagctcccgctgctgctgatggccctgctgggcctgtgcacgctcgtgctgtgacctgccaggctcaccttcttcctggtaacgggtaacgggggcagcgcccaggatcacccagagctgggccttcccgcctgaggttcttttgcgtattatgtttaactcacaaaacaaagctcatcatgcgtttgattctgtgttgtgtggcactcctgacctcaggtgatccgcccgcctgggcctcccaaagtgttgggattacaggcgtgagccggcctctattcccttccgtatggaaatgaggttaactactcggatcgctgg

SEQ ID NO: 520 - DNA, 467 bp, Homo sapiens
  source 1..467: mol_type = other DNA
ttcttttgcgtattatgtttaactcacaaaacaaagctcatcatgcgtttgattctgtgttgtgtggcactcctgacctcaggtgatccgcccgcctgggcctcccaaagtgttgggattacaggcgtgagccggcctctattcccttccgtatggaaatgaggttaactactcggatcgctggcgtgaacccagcggccccgtgctctccgggtatccctggatcgaggcgcacgcgttgttgcaaagtctgcagccctggtccaggctttgggcctccgggcgcctcaaaggtaaaactaggtgaagcctgcgaagcgggtcttcaggcctagcgggcttggctacccccgggagcagggttcgggcggaggacctgggacaaccgcgggcctcgctcctccccggacggggcgggacggggaagtcccgcccaccaggcccaggccccgggccgccccgagggc

SEQ ID NO: 521 - DNA, 287 bp, Homo sapiens
  source 1..287: mol_type = other DNA
ccagagttggagaccagcctgggcatcttagggttgcagtgagccgagatcgcgccactgcactccagcctggacagagcaagcagcgggcggatcacctgaggtcccaggcagtgagccgagatcgcgccattgcactcctttttaaagacctccttaaaagtgaaggctgtagtaccgtcaggactgtgcttgtctccgaggcactaagaggggcgtggccatgggcgtggctcgccgggccggcggagtgggcggagcctaaaagcttccccgcccggtcaccg

SEQ ID NO: 522 - DNA, 181 bp, Homo sapiens
  source 1..181: mol_type = other DNA
cgctgagactggatgccaccccagtgcctggtgcctgggggaaagtatgtccaaatttgaatctaatcaaacctgttttcagaaaatacaggaatatagaacattctactggacaatggagccagttctccctagatctccatgggccagggaggccctgccctgtgaccacagtggctct

SEQ ID NO: 523 - DNA, 136 bp, Homo sapiens
  source 1..136: mol_type = other DNA
gaatatagaacattctactggacaatggagccagttctccctagatctccatgggccagggaggccctgccctgtgaccacagtggctcttggtaccccttgagaggccctagggccacagcatttcctcccaggg

SEQ ID NO: 524 - DNA, 458 bp, Homo sapiens
  source 1..458: mol_type = other DNA
taactccatttatgtgaaatatccagaataggtaaatccatatagatagagggagtaactgcttaataggtactaggtctcgcccccgcactttgggagatcgtagaccatcctggccaacatggtgaacatactccagcctgggtgacagagtgagactccgtctaaaaaaaaaaagtagatactaagtctccttttgaggtgcagaagcgcgcctgcagtcccagctactcggctgcaccactcgactccagcctaataaataaataaataaacccactgaattattcactttttcttttattcttcttattattttttacctaacaataacttaagcacattatttactttaaagtggttaattatatgttatgtgtaattcgtttaaattttaaaaagcccacctacttttaaagtgcctggctgggctgcgagccctttaagaacctctcaga

SEQ ID NO: 525 - DNA, 295 bp, Homo sapiens
  source 1..295: mol_type = other DNA
cattgccaaaagtgcagttatacaatatgtttaacgaaaaaaacaaactaaaatatttttaaaaggtttattctgagcctgtcaccaggctggagtgcagcagtcgcgtgccacgaactccggacctcaggtgatccacccacttcggcctcccaaagtgttgggcggtatcctggacatcagcatcctggaagagccgaaatttcggccctaagcccttgctagcggttggctaagaagaaacccgtctcttgctcgggattcgctgtgagctccgggaagcccgcctccgctc

SEQ ID NO: 526 - DNA, 246 bp, Homo sapiens
  source 1..246: mol_type = other DNA
gtccaagaaggatttaggcctcagttttccttaactacaaaatgtaggggctcaatttcctcactgctctccagagtggacagaagtcagtccatactcctaagcaggagagggaaatctacaggtgaagcctgaatgcatgcaggcttgcaaagcttctgggggtgtttcgcacgacctgaggaaacgagtgccctatacgtgggcccagatccagggctggacttggacagcctcaccggaaat

SEQ ID NO: 527 - DNA, 459 bp, Homo sapiens
  source 1..459: mol_type = other DNA
aatattgagcactgggtgcagtcctaggcttttgccagaactctgaggtcttctccctcagcctgatggctatggggacagctccctctcagccggatatggcttcagaaggcagaaattctgaagtggcctcctgtgggcaaactggctgtgtgtcccctcagacagggtgcctattgaattgaagcccgggctcccgaggacagggctgtgtccccatctcccccaggctggggactcctgaggacagggctgtgtccccatctcccccaggcttggggctcctgaggacagggctgtgtccccatctcccccaggctgggggctcctgaggacagggggccggtgttggggccccgccccaggagctggcttcctggcctcagctgccctgcccacccagcagagcccgggggcagggggtagagcagagtgagtcacacacctgtgcctgggccc

SEQ ID NO: 528 - DNA, 297 bp, Homo sapiens
  source 1..297: mol_type = other DNA
accttgttacaaagtttacaaagtggagcttccccgaggccagggggagcagtctggggttcagttctataattagcagccaggaactgaaaagatgaagaattttagggctgtcactgccgtctggtgttgccaggagaattccgggcgctccccggtgctgattggcggagcccgtgactccagggggcggagtttcccccgcctccccggggaaacagacctctgattgggaccgccgggcttttgtgtccccgccctcccccggggaccgcagcgggctgaactgctggtgtc

SEQ ID NO: 529 - DNA, 285 bp, Homo sapiens
  source 1..285: mol_type = other DNA
gtcttgctctgtcgcccaggctggactgcaatggcaaggatagtgtatttgaaaagtcacatcgatttttctcctgacaacactgagggtagattttttgcaacctcaataaataagttttctcaaacaacactcttgtatcagttccctttttgggtacttgcctcccatagtaccaggaaaggtgcccaagggcacgcttcccgccattttgttcagcttgccgggcaaccggcccctgctggggactacaagtcccgtaagcctccgcggcggtttccccct

SEQ ID NO: 530 - DNA, 282 bp, Homo sapiens
  source 1..282: mol_type = other DNA
tcctgaagaatgggtgttaataagagacagccttttcttggctataagatctgatcatattaggatgctcttgtagctcataagaaacgcatatgagccatacatccatgccctcttgagggtagggaagatgagtatcttttttctccgtacatggaaccgggccaggggagccagcctggccaagggctcccccagcccggccaagggctcccccagcccgggagcgcgccacatgcagatcctgggatggccgccaggggccgccggggggccagaggc

SEQ ID NO: 531 - DNA, 272 bp, Homo sapiens
  source 1..272: mol_type = other DNA
ctcctgatttccggtgatccaccacccttgggcctgggccagaagtgggccatggagacctcgggacccgcagggctgccgcccgacccagcgagcctctgaaggtgcgccgcagcctcccgaaccatgttggccaggctggtctccaacgcctgaccttgtggtccgccacgccaggccgaagattttcataatttggaagcattgcgtagtaattagaatagctgaatatgcactagaaacactgtggacagggtatgattgtttcctat

SEQ ID NO: 532 - DNA, 447 bp, Homo sapiens
  source 1..447: mol_type = other DNA
aggccggggttgcagtgagccgagaccgcgccattccacgaaagagtatagggcagtgcttttaattacattcattcacactgttgtgcaatgcgggccaggcctggagttttaatatcaaattatttctttcacaggtgacagaatttggagagagagtttcgctctgtcgaccaggatggagtgcatcggcgcgatcagcctcccgagtagctgggactggaggtgcgcggcaccatcgccatgatgcccaggccgctcttccaaaaactttttggccagtagtgattgcacagaagtaaacgtcctctgcagctacacatgcaaggtcccgcgggaaggatccactaccgcgagaggcctcccagccaggaaggggtgagaagcctcagtgagtttctgattctctaactgcgcatgcttctgcgcacgcgcaatagacattcc

SEQ ID NO: 533 - DNA, 597 bp, Homo sapiens
  source 1..597: mol_type = other DNA
atggtctcgatctcctgacctcgtgatctgcccacctcggcctcccaaagtgttgggattgtttgttttctaaatatgtaaagtcagaaattaacccaagtaacgagcatacatatatatgtgtgtgtgtgtgtgtatatatgtatatatatgtgtatgtgtgtatatatgtgtatatgtgtattatgtgtgtatatgtgtatatatgtgtatatatatgtgtatgtgtgtgtgtgtgtgtatgtatatatatggagtcttgctcgtagctgcgactaccagcgctcgccaccacgcccgctaattttcgtacttttagtagagagggatatattaatgttgtaattatatctatataaagtcagatgtgtagttttgtttgttttctaaatatataaagtcagaaataaacccaagtaacccagccgcctgggccaggtggtatctggcccgccccattccagcctgaactccgccagcgcccagtgggcccgacccgggccgctgcgctcgggagcctgcgcagaagccgtcggaggcgcatgctctgtagcggtctccgcagccaggattggcgcccgcgcgggccttcgagcc

SEQ ID NO: 534 - DNA, 268 bp, Homo sapiens
  source 1..268: mol_type = other DNA
cctataatcccagctacttgccactgcactctagcctgggcgacagagtgagactcagcaactggaactccagcctcagtgccctgggtttccagaaggccagcctggaaagggtggagtaaaccttggaggctcatgtgctgcctcccccttttgtggcatcgaaggggtgagtcagacaagccgtgcctctgagcctcagtctcctcagctctaagaggggcactcccatggccctgtcaaagggctagaggccccaggccggggc

SEQ ID NO: 535 - DNA, 324 bp, Homo sapiens
  source 1..324: mol_type = other DNA
aaggccagcctggaaagggtggagtaaaccttggaggctcatgtgctgcctcccccttttgtggcatcgaaggggtgagtcagacaagccgtgcctctgagcctcagtctcctcagctctaagaggggcactcccatggccctgtcaaagggctagaggccccaggccggggcctgtgaagtaggggtcatcattagcccccttttacagagctcggtccgacgccctcggtgccccgccgggtacggtggctgggcgcggggagcggggggcggcgccggcggggccccgggcaggggcggggtcggggcgcggacaaaaccg

SEQ ID NO: 536 - DNA, 334 bp, Homo sapiens
  source 1..334: mol_type = other DNA
cggagtagctgcgattacaggcgcatgtcttggccagactggtcttgagagtgagttctgagttcaagctgaggctctgcacttattagctagaactgtctcctctaaatgattaaatggcaaacagtaagcactcaattgttactactgaattgccagttcacaggcaggatacctgtggggtaatgtgtcccagatgatatcccagaagctgcagggtgtacctacatgtcggagggcagtctgcgcctgcgcaagcgaggcgcgcgcccgccggccggaagagccgcgcgtttccgggttggggccgcgcagtcggaccggctgctgagac

SEQ ID NO: 537 - DNA, 541 bp, Homo sapiens
  source 1..541: mol_type = other DNA
tccctaatacagagtctccattatgttagtgtcagatacacctggctatttaatagttttgtaaacttgggcacattacttaagctttctgtttttccagtcgtaaaaaaccgaaagactgatagcgattttgaagttgtcgaaagactttaatgtgtttgaaaatacctaacaagaggtccttaagattcataggttctccggactccttgaatgtatttttcttggaaataaagtccacaatttaacagattatcttggggccagcgatttccccgaaaataaattgtagtttctgtagtcggctaacagaggatgaccaagcccctcgcgggggcgggggcgggtcactcccggacagggcccccatgaagtttccctggggactgtgtgactccctagagggcttcggaggcccctccctcgtcccaaaccccctaggccttaatcctggggcggtgggggcggggaggccgtgagcacggcttccgctcctccaatccgccagagggcgcagcggccggcctctcccttcccgggg

SEQ ID NO: 538 - DNA, 451 bp, Homo sapiens
  source 1..451: mol_type = other DNA
gaccatcctggccaatcctgtctttactaaaatacaaatgtcgcgcgcctctagtgccagctcttcgggaggctgaggccggagaatctgaagctgcagtgagccgagatcgcgccactgcactccataaataaataaataaaaaataaaggtcttaatacttgttaattactattactgtctcggaaacaggtttagagctgtcaagaaattcctccagagtcgtttagagtcaagaccttgctcaaggactcgtgaccagttactgatctatgtaaactttcctccagaggagtcgagaaagctagcttggccctcatggtctctagcgacctttccaacacaagaattctgcttaggaatagggacgcgtcccctttaaggcgccagctctccggcggcggcggccggaagtgttgaagcccggcctggcggcggcggtggcggtagc

SEQ ID NO: 539 - DNA, 579 bp, Homo sapiens
  source 1..579: mol_type = other DNA
atttaatagttttgtaaacttgggcacattacttaagctttctgtttttccagtcgtaaaaaaccgaaagactgatagcgattttgaagttgtcgaaagactttaatgtgtttgaaaatacctaacaagaggtccttaagattcataggttctccggactccttgaatgtatttttcttggaaataaagtccacaatttaacagattatcttggggccagcgatttccccgaaaataaattgtagtttctgtagtcggctaacagaggatgaccaagcccctcgcgggggcgggggcgggtcactcccggacagggcccccatgaagtttccctggggactgtgtgactccctagagggcttcggaggcccctccctcgtcccaaaccccctaggccttaatcctggggcggtgggggcggggaggccgtgagcacggcttccgctcctccaatccgccagagggcgcagcggccggcctctcccttcccggggagagtcagcgctcgcgccgcgcgcgccgcccgcctccgctgttcggcgctctgctttaggcggtggggggcgggcgcgcgcgtaa

SEQ ID NO: 540 - DNA, 460 bp, Homo sapiens
  source 1..460: mol_type = other DNA
cagccagagtgctccttaaggtggtcttcaagagcctttccccagggaagctgtcctgacctgggtgtaagccccaggaagcagaggctgcatctggttttgtgtactagagggtccccccaaatacccgtaactgtccgcagggcactgctctaatcaatctccccaaccaccctctgagggaggtggtacgattttcctcatctcactgagggaggttaagtgacttacacaaggtcactccgccggtgcaggggcgggaggcgggatccacacccaggtccctctgacaccaaagtggcaagggggtgggagggcggcggagcatccctagggagggggcgggaggcctcccctgcccagctccgagccggtggtgcagcgtccgcccccggtcgcgggcgcagactggcggccgcctccgggccacgtggtgcgcgcggcgggcgcgtccgaggag

SEQ ID NO: 541 - DNA, 288 bp, Homo sapiens
  source 1..288: mol_type = other DNA
tggagagagttagtagctcacccaaagtaactcaagaggaaggctttgtcgttagttttaaaatgaaagagcatatgtaagccagctcaggctatgcttgacatttaacttacatcgctaattctcaggaaaacattccaggtgagtctcctcagggtccgtgtcaaattgcttcacacttttgtcatatgacgtcacaccagtcagtccccgccggacgaggctacacctgcagcccgctgatcggcagttgcctgatcagagggcctagcgggcggggcggggcct

SEQ ID NO: 542 - DNA, 443 bp, Homo sapiens
  source 1..443: mol_type = other DNA
tctaaaatagaacaccagatcctatcttaccttctaggtatcatgcttaaaacaaaagccttctttctgcctgttcacagaccctcgtctcaacacttagcttccatttcaggccttacacagctggcacgagaggtaatgagtgacttacccgaggtcactaagcgtttctacaacttggaaggaggaaatagctgcctcatgccccacgtgggtgctgcgggatcccggaacaccccggctccagaccgggttcgacttgcgcgtgcgcacacgcggccagcccctctcctctccttaccggcctaggggaggggggaaacaatcagccaatgggcggacgggccgcgggcccggccccctccttccctccggcgcggcccaatagaaatttactacaatgttgtggcgggaggggcgcgggccggcgggcgggctgcggg

SEQ ID NO: 543 - DNA, 572 bp, Homo sapiens
  source 1..572: mol_type = other DNA
ccccttccctcgcggcagcgacgcgcggggctccgggtgaccttgctggagccggggctgagagcgccagttctggcttgaagcgatgatcgctacaaggaggggatgggcctcgcttcctcctggatagaggggtctagggctggggccccggagcccggcgtcggacctggcagagcccccgcctagtgcggggtcgggcagtctccccggcctccctggggagtggcggctccctgctaggcccgggccttgagcgctccagggtcggggagcaaggccgcctccccgaggtttcggctgcgggctccagcgctaggccctgagcctcctctcctgcggcctggggcgcctgggcgggggccgcgtcttctccctcgccctccctttcgtgggggccacaccgcacgcagctcggctactcctgctgggcccgggatccaggccacaggccgcaggcagggcgcggccagcaatcgggagggcttaagctgtgcggcccggatcccgaggcgcaggggcggtgctgctctgaccgggccacgggccacggaggcctcgggcggaggagg

SEQ ID NO: 544 - DNA, 673 bp, Homo sapiens
  source 1..673: mol_type = other DNA
tgtccgcggcgcgcagccgggtctcattagcgcccctccccccggctgcgcgccgggggtctccacggccggggggaggggcgggccctaggccggaaattcctcccggggggcccggcctgaccgctgagcctggaaatcggtcgccgcgaaactgggccgaccgccggccgccctggctcccccgctctgcattcctgcctccaggggcgggagggcgcgaaggccgggccgcccccttcgggctcgccggcggggtcgcagctctcctccccggaacaagcccgctcccccactggcgaaggggcgcctgttcttaggagtacccggcggcacccaaggcccgcccctccccgggcgctgctttcgctgagggctttgcggagtcgccccgggctggcccgccctcggaggcgaccggggcagagcagggactcgggccgcctcctcctggaagctccccgggcgcctgggatgaggggctcgtgtcggggctcctgggtcccgggtctcagaactcgggccacgggtgcccggagtcaccaggcgcgcacagggcgcctaccgccgcctttcagcggcggtggggccgggcccggcgcgggtcggacggtcccgggggctggaggcggggccggggcggggctggggccgggccgtggagacccgggcg

SEQ ID NO: 545 - DNA, 482 bp, Homo sapiens
  source 1..482: mol_type = other DNA
ctgtaatccctgccaaggcccagctactctgcaatgcagtgagctgaggtcgcgccactgcactccaaagtaatttactcggcgtcatctatttaagcagtgtcctcttaaaaataatactggtctcatttattgggcacttgatatgacaaaactactaagtgctttatgtacgtattctctgtaggaactactctcccccttttacagaaaagataaaggaggagctaggtttgattccaaagctccaccagctggctgcggaaggcggtgcaggaacccctttggcgagctcgcgcgaggacgtgccgcagcgccgcctgtcgatcaccttgccccgccgcacgtcggcgcgcccccgggcaagctcctcccccagtcctggccgagcgggaagcgaacgcgcgctctctccggttaccttccgcctcggggaagggcgggggaagtggaagcgcgcgctcgcgagctgcgtgctcgcg

SEQ ID NO: 546 - DNA, 274 bp, Homo sapiens
  source 1..274: mol_type = other DNA
tctcttcagactacagcattgcactctggcacgagccacagctcgatctggggtgagagaggattatccccattgtaccgatgagaaaaattcagagtttcacctgcccaaggtggccaagctaggaagtggctaggatttgaacctaagttttgtagggaagtctcggtgagcactcaatatattatgtgaagcggcctcgcaagctccgcacccccggatccctccggggcccacccggcggggcaggggcggggcgcaggcgcgcggtcgc

SEQ ID NO: 547 - DNA, 478 bp, Homo sapiens
  source 1..478: mol_type = other DNA
attctaattttacaggttagaaaatctgtaatccctgccaaggcccagctactctgcaatgcagtgagctgaggtcgcgccactgcactccaaagtaatttactcggcgtcatctatttaagcagtgtcctcttaaaaataatactggtctcatttattgggcacttgatatgacaaaactactaagtgctttatgtacgtattctctgtaggaactactctcccccttttacagaaaagataaaggaggagctaggtttgattccaaagctccaccagctggctgcggaaggcggtgcaggaacccctttggcgagctcgcgcgaggacgtgccgcagcgccgcctgtcgatcaccttgccccgccgcacgtcggcgcgcccccgggcaagctcctcccccagtcctggccgagcgggaagcgaacgcgcgctctctccggttaccttccgcctcggggaagggcgggggaagtgga

SEQ ID NO: 548 - DNA, 477 bp, Homo sapiens
  source 1..477: mol_type = other DNA
acagcagcatggctgagagccgggcctggggctctatcctggcaataacacttcttagctgtgtaacttcagacaagttattttacctctgttctttaacagtagctgctttaaaaagttgtcaagaggattaactgagaaacctcatctaactcctttgctgagactgagaggtgaagtcacttatagcaaacccaggtaacctggctcctaattatgaccttggcctggaggccttagggctgggccgggccagagcttcaaggcagcgcgggctccagcccctggcagctgccgctctagttgcttctgcaagcaaaggagcccttgtggtcagaggggcctctgaagcctgggccaggctctcccttcagcccaagccccgccctttgggggggctgggggccagggcgggctgcccccacgtcagtcgtcagttgggggccacctgacccaaaggctgggcgggcagtgggg

SEQ ID NO: 549 - DNA, 567 bp, Homo sapiens
  source 1..567: mol_type = other DNA
aaaggacgtacaccagagtgtcttcccactggaatgtaaggtccattagtaattgttgaataaatgaatagaccccaataaatatttgttgaatgaataggtgtccagcccctattcaattcaaaccaaacaactttgattcaaatctcggtgctgtcaaatactgttgcataacagtatttatgcagtataattattgcatacctaatatatgatgattaaatgagtccatgtgggttaaacactgaaaaactttctaaaagccggcgtttccaaccccaacaaccgctcttggccaggtgatgacagaggccgggtgtccctgggtcaccgtccctgagagcgctgggcgtgggccatgagcgtgctcgcccgtggagacgtccgtgggcgtccagacccagccgcggggcctcatggcggggaggatgcgggagcgggggaggggcgcgccagggctagcgggcggccggacccgctgcagcacccgccgtggccagcagggagcgccgcgagaccgccgaacccgcggccgggcctgacgtcagcgccccgcttgctccggct

SEQ ID NO: 550 - DNA, 137 bp, Homo sapiens
  source 1..137: mol_type = other DNA
cgggagcctgctgtgctatggggagccctcctggtccagcacagctgataggaccaggggagtcactcaagacaattcctctcattttctttcagcaggaagagaagatggaataaggcagccaggctggcctgcag

SEQ ID NO: 551 - DNA, 277 bp, Homo sapiens
  source 1..277: mol_type = other DNA
agcctagcccagggcctggcgcacagttggaagaacaagcttctccctgcggctcagggtggaggcttctagcactgtaaaatggggatgcaggaaatgcctcctagacaatagctaggtgcagaccccctcctgggaatggcagagggcagtggggtgctctgaggcaggctgctgccctgtccccactccccagctgtgacgaccttgtccctgcctgtctaaggggcaggaaggaagtgaggagggcagccagcagcttccccttctctgccct

SEQ ID NO: 552 - DNA, 539 bp, Homo sapiens
  source 1..539: mol_type = other DNA
gctctgtgctgtggggcgcacagctggtgtggaagcagctgcgctcaggtctgcgtggcttttcctctgcagatccacagtgacagggcccaccacccccatggtcccctggggagaccgaggcccagagagggccgggccctgatctgaggtcacacagcccctgggtgtcctggaggcatgaaagcccgtggtcttggatgacctctggcccactggctcggcgacttcagggagccaggcccgggccctggtatcccacgcgggacccttcccttctacctagcacggcggccgcggaggtgcgtccggcgggctccgcgacctccagccccgggatcggcgaggccggctgctcactcaggtgtccgggtgcccactcggcagcgcggggctccctctgggtgggggcgggggcggactggggtcagagggcgcggagccccgcggggggcgcactggggcccgccccgccccgggcccctcctccgttccgcccgcgctgggggcggcccggcggcggcggcggcggcgcacgc

SEQ ID NO: 553 - DNA, 254 bp, Homo sapiens
  source 1..254: mol_type = other DNA
caaccaagggccctgcagggagtgcagtggcgcgatgggtgttggccaggatctcctgacctcgtgatccacccgcctcggcctcccaacgtggtgggattaccagctgtcatcagcaaataacctcttctgagaaatgatataacacatgaaagcgctgggcacctggcatgtggtcagggttctatcttgccccaaaacacttggttttgagccccagtaaatgggaaacacattcattgattcagcaaatt

SEQ ID NO: 554 - DNA, 430 bp, Homo sapiens
  source 1..430: mol_type = other DNA
cctgcgggaccgtgcccggaccacgttcatgggcatgttctgctctggagaaggagtcggacatttccttcatcactgtctctctcaggggggcatacagtaggccctcctcggccaaatggggcaccggaggaggctgggacgcaggcctttctccctgggaatgcccggcatcttgaagaagggagccgcaggggctgggtcttgccgccagagaccccaaggctccgctcctgccgggagcccaggctccacagctggggactcggggcccgcctcccaccccttgctgtcagcaccctcagctgagaagggcaggttcagactgcacaaccgaggcgtcgcctccagactcaggcagtcagctccaggtccccgagtcgctgcgctgaacggcgctcatgacgtcagcttccaagttgcgtggcgc

SEQ ID NO: 555 - DNA, 535 bp, Homo sapiens
  source 1..535: mol_type = other DNA
gacggagcctctccgtgtcgcccaggctcaagtgcagtggcgttctcctgcctcagcctcccgagtagctgggactacaggtgccctattttgagtttagtttgagacagtaagactaaaagcacttgtacaaaaaggggtttgaaccctgcacctctggggccagggcagtgcgggtggccgtccgcgaaccctgctagctgtggtgctcgggggcaagcttccgagggcgcggcgggcgcgaggagcgcgtccgagactcggtggagcgtcaccggcgcaaccccgcgtgcccagctccaggccgtgttctcccaggtgcgggccggcgggaccccgccttcggccctggcggcgcgcgctcgcctagcgggcgggcactcgcgcgcagcgtttgtgttgcctgcgagtttcccgagttcacacaggccctgggttggcatggcaaccaggcaacctgttccagagccgccagccttctccgcacatgccgctgccaccgccggggccggggccggagcctatcccaggatgc

SEQ ID NO: 556 - DNA, 420 bp, Homo sapiens
  source 1..420: mol_type = other DNA
tgtttttccatctgcaaaatgggttaataacgttcctaacaggctgcttggaaatttcatatacgaaacactttagtacaagagtcaatgaatgttagctgctatttagttgttaataatactagtaggatgcttaaacccgggtcagggttttgagcccaaggtcctcaactctaaagtgtttatgtgctttaactctgcatgagctgagggccaaaggccgcctgcttcttcacttaccgcttgcagcaaggctcccggcgtcgcctgctgctgcccggctcctgggccagaccccgctcccaacagcatcatgccgctgccgcttgactggaaccagcggcaactcttcagcgccgccactgaccgcgctgccgctctcaggcgccacgcaacttggaagctgacgtcatgagcgcc

SEQ ID NO: 557 - DNA, 312 bp, Homo sapiens
  source 1..312: mol_type = other DNA
ggtcagctcagccgcagaccgagccgctggtgactgtctccgccaccaggcagtgagagagcgcgagctaacgaggagtccccggcgtgggcaccagcccgctctgacgctaaccatggcatgcgccctagctctcgggcaggccagggcctggggccaggcactggcgctgacgcaggctagcagggcgccactggctggtccccacccacctcggtgggttgggggatgggcgcaccagcccctcctgggtgagccctagcctggggcttcctatttcgggagccgggggcgtgggccacgtctcctcgc

SEQ ID NO: 558 - DNA, 186 bp, Homo sapiens
  source 1..186: mol_type = other DNA
tcgaaaggttagactctgacaggtcataaactggctcaccagtggtgggagcagacatataccagcctactacaattctcttgcctcagcctcccgagtagctgggattacaggtgcccgccacccatgttggccagactggtcttgaactcctgtcagcccaagccaggctgacagtgttggctt

SEQ ID NO: 559 - DNA, 508 bp, Homo sapiens
  source 1..508: mol_type = other DNA
gagccctacctccttagctagggaccagtttgggcatccctagggagttggcatgcacctgtagtcccagctactcaggagcctgactgcagtgagctatgtttgcaccactgcactccagcctgggtgacagagcaagaccctgtctctgtgaggtatgtatcctcactttacagaccgggaaactgaggctagtgacttgccgatattgagcagaggccctgcgccaagcactgaggagtcagcggtgaccacctcttggctttggtgacagtgtcctggggtcacacggctcccgaggtcgatttcatgcgagcccgggccacgattgggtcaggttgcgccgctcgcgtggccgcgggaatccccgaccggccccttccctagggtccctcctggcgcacctgccccaggtgagtctggggaggccccgagcgccgccggaaagcgtcgagcggcttcggtaggtggggcggggccggggcggggccggggccggggaggggcc

SEQ ID NO: 560 - DNA, 457 bp, Homo sapiens
  source 1..457: mol_type = other DNA
gggagggcaaagggagtccctgatgccttccccggggccacatgtgaggctcaggcctgggcctggggcccaacctggcgggacccattgtttgggtcccaggccagcctgggcaaagagagggcctctgcagggggtgccagctggtagggcccttgcctttggaccctatgagccgtactcctggaattccattcctaggagctggggtggctaggggggcggcacccaagcctaggggccacagggatgcccactgtgaagtccttcccagtgatccttcctgcttggggttcccctaagggaacggcttccgccacaggagacccagcaggacaatcgtgtgcttgtcgtttctccaccctgcaagcccatgagttgtggggtagttacccaggcgcccctcccttccgccactgctggggcggtgcagagggcgggcggtacaaaaagcgcc

SEQ ID NO: 561 - DNA, 343 bp, Homo sapiens
  source 1..343: mol_type = other DNA
ataacagttcgtaacattcatttattcatttattttaataatcgtgtcagtgtggcaagtacatggtgctgggcaagggcctcgcacctcagtttccccatttatgaagaaagaggcactagataattcaattttcctggtactaactggtacccagccatcgcctctccctaccgggaagagtcggtcggttccccgttgtcagggcaaccgcctggccaccggctcatctgcggaaactcaggagctactcctccgtcggccgacagcacccaagaggacgtccaatcagatgcgggcccagccccaaagccgagacgaggggcgggtttgagagcggaaa

SEQ ID NO: 562 - DNA, 457 bp, Homo sapiens
  source 1..457: mol_type = other DNA
gcctgggtggcccctcccccaccagccagagagattttgcaggggagggagctgagaggggcagaggctcaaagcccagctctgcctctgctgccatcatatgcaacagcttaataaatcgttatttgtggcatcgttgggagctagctgttacagcagcatccggagctaggctggaggcggtgcaggcatcctctctgtcctcctcagttaggtgaggcagcaaggagaggcggggctgggctccacctctgcactgtggccctctgaagctgccaggcccgccggcacacactaagtgcgcccagaatgcgggggctagaaggaacgagcgtctccctccgccctgcgggtctcggggctggaagacagggagccaagaccgtctgggggctcccaccccgccctgcccctcccgccggccctccctccccgcagcgcgcagcccggcggagcc

SEQ ID NO: 563 - DNA, 374 bp, Homo sapiens
  source 1..374: mol_type = other DNA
tgtgcatgtccgtgtacatatgtatccattcatatgcagaactccgtcctcagggcacaagggtgttcaaacccatgtgggggaggggaggccggttataatgagcccctacctcccctccagccgctggcttggctagtgccgcagcaggtggccgagaggcacagcctgtctggcttccgccgatccaccatctcccccagcccctgtatggctgggaggggaagtccgttggggttctaaattctgtcccccctagacccaaggggaagtctgttccctgggagcaactgtgagctaatagctggtccatctggcctgaagcctgagcagcaagcctagacaggcctgggctgggcctcagatcctgggct

SEQ ID NO: 564 - DNA, 802 bp, Homo sapiens
  source 1..802: mol_type = other DNA
gtagcatccccgtgcctagcgtgcaacataaacatgtcacattgcagtatacatatgtggctgctacatgagttaacacatgtggcacctgtaagcttgcatacataatgcattcaggacttgggcacatgttaatacaccgtgcatgtgtgtggcacttgcatgcacctacccagctgtatgcatatgccacctgcatgcacagggacatgcaatatgcaatgcacatgggcctgcagggcccgggacaccctggcggcgcgacaagcctccggcatgggtaggggcgtcgcggatcgcctcattctgcggtccaagaagcagcgggctgggcgggggcttacccagggcttctcccgcgccggcgcctggggcccaaggcggggaggtggggggcacgatcggctcggctggcgctgttccccctttaacaggaggcggcgcgcgtcgcccccgccccttctcccgcggctcctcgcgcccggcccggcgcgcgccccctcccgggcccggcccgcgcaggcgccgcgtcccgcctcggccgtcactcggcccggcgcgcgctgcgggcagcggccggagcggccggaggaaccgggttcggcggcagcggcggcggcgctcagagaccgaagaggatgcggcaccggctctcagagcccggggctgcggccgccgcccgcaaataggaggcggcgcgcggcgcgggcggtgctcggggcggggggggcggcgcggcaaggaggcggcggcggcggcggcggcaggagcccgcgcccggcccggcgccgcccgcccgccc

SEQ ID NO: 565 - DNA, 93 bp, Homo sapiens
  source 1..93: mol_type = other DNA
ctggagtgcaatggtgccatctcctgcctcagcttcctgagtagctgggatcctttatccaattcttcatagatggtaataacgtataactgc

SEQ ID NO: 566 - DNA, 367 bp, Homo sapiens
  source 1..367: mol_type = other DNA
acaatgtcaaccgttttagaacctggaatatatgtaatactggaaatatatatactggaaacaaagacttcagatctctgatctgacctccctccactgctcagccgttggagagggcgtggccccacactccgcgggcccgcgcgcagactcccgccccctccacgccagaaaggggaggagacacgtgttccgctagcgccgagtcacgtctcccgcgcatgcgcatcaagctctggcctggcgggagcggaggcgacttctcggacgccgcggcggtgcgcaggcgccgtggccggactggggactttgttctccgcggagaaacccaagggcggtgccggtggctggctgcgcacgcgcgccg

SEQ ID NO: 567 - DNA, 357 bp, Homo sapiens
  source 1..357: mol_type = other DNA
agaatttaccaattttgttgactattaatgaaatatctactaattcattcaattaattgaatactgctattaagtgccaagcactgtgccacggtgttgacaatgagaacacttaggctcacacccctaggggagcggagaggcggctccgcaccctcctccggtcgccgccgccccggtccaggagagcaggaggtgggttccgttcccctccctcttgagtctcttcaccagcagctgcaggaagggcagagcgcgcaggcaccgcctccgtccgggcggcccctttaagaagcgcgcgccagcttccagcccgccttgtagtagcggcgcggcgggagcgcgcggctgataccc

SEQ ID NO: 568 - DNA, 150 bp, Homo sapiens
  source 1..150: mol_type = other DNA
ggctggaatgcagtggcacaagtctcgaactcctgatctcaggtgatccgccctgaggtaggcgcctgtaatcccagctactgtgcagtgagccgagatcgcgccatcgcactccagcctggggggacaagagcgctctttaagtgcgca

SEQ ID NO: 569 - DNA, 375 bp, Homo sapiens
  source 1..375: mol_type = other DNA
gaaaaggctcatgaatatgcctgaagcctaactcagcacctttctgagttaccttgactgcctcagggaaactgggtgaaagaccaggtaattactaagttacctaaccttttccgtaaaatggggataacagatagtagttatttctatgagtggttagttcaaggaactctattgttattaaaagcctcctttgggctggagtatgggtctcctgagtctcagcccatcctcgccaggcgcaaggctttccccgccctgccggggcgcccgcctccgaggccgccctcgcttcgtccttcccagcaagctccgcgccggcgccggctattgattggctgaggcgggagcaggcggctggccggcagcagttac

SEQ ID NO: 570 - DNA, 498 bp, Homo sapiens
  source 1..498: mol_type = other DNA
ccgtaaaatggggataacagatagtagttatttctatgagtggttagttcaaggaactctattgttattaaaagcctcctttgggctggagtatgggtctcctgagtctcagcccatcctcgccaggcgcaaggctttccccgccctgccggggcgcccgcctccgaggccgccctcgcttcgtccttcccagcaagctccgcgccggcgccggctattgattggctgaggcgggagcaggcggctggccggcagcagttacgcagcggcggccggggccgggatgttctcggcctgtggggaaatcacgccaactccccgcgtgggccgggggctgtctggggatatgcgcatgcgcgggcgtgcctcgcggcttgagggcgcgcggggcgtgggtggctgcgcgcgcggggggcgcacgtggggcctgaggggcgggggcggtgccgggagtcccgccacgtcagtctccggccctgagccaatcccgcgcccggc

SEQ ID NO: 571 - DNA, 355 bp, Homo sapiens
  source 1..355: mol_type = other DNA
cattttgcaaggccttgcaaatgcatttatacctgtaagtgtacgtaatacacccaggtcttgactggagcagggcttgcttggtcagctcaggccctcctagctgctctgagacctggaaaaggtgtccctaggcagagccctggcagggcgctcagagctggggatttggtcaggagccccttgggcatcgcttccccggaccaggccaatgatgcttctcagtagccttatcattcacaatcacccaaaggattatttctgaacagtggtgcctgggtgcctggcctccagtgtccaaaggaaagggcttctgatggctttgccacaagctcccatgcagcagttgctgggt

SEQ ID NO: 572 - DNA, 453 bp, Homo sapiens
  source 1..453: mol_type = other DNA
gcaggtgccctcaggagcagtgcccatggctcccccaaccccaggaagccactcctgcccggggatggggaaggtgggctgggtggctgtgtgcactgccctgggccagctcacttgagcctgctgagccgcctggccaaacatgagcgggacctgcgccaggagcctctgccagggcagctgcccccattgatctggctgcaggcagcagcagtcacactgggtcagcctcctttccctgaggactggagtcaggtgccagggaatcgcgtggtctaccttatgacctggtgctccccacacctgtctcctaggcctggggggtggggaggctatagggcactggactcactccattttgtaaggaactgtagcttctctctgaaaaaaatcttttttgcttagcatacgcggggatgctcctcccaagaaggtcactttctctttaaatgc

SEQ ID NO: 573 - DNA, 385 bp, Homo sapiens
  source 1..385: mol_type = other DNA
cccctgagggagtgagggacgctctgtcttcgagcgcggctgcggagctgagcgatgagtttggcacatggctttggagcccgggcttgggaaatagatccccggtcgccccagccgctcctggggagcacaggctccggcgagtcagtggcagggaaccccagccgaccggaggcttggggggcgctgctggaccggggacctcggagcagcccagccacaggcgcagcctttgtcggaggcccaggcagccagcggccaaccacccagtccaccctggctgcagctgaagcccagcagggactagggtgggggaaacccacaatgaacccagggtagtaaataagggtttagttaagacatccctaatctgactggtcccacc

SEQ ID NO: 574 - DNA, 464 bp, Homo sapiens
  source 1..464: mol_type = other DNA
atttagaatttccctttgtgagtactttagctgacatcaatcatagcaaagcttacagcgcgagtgcgcgcgcacacaccccagtgtgtctggcggggactgcaacctcagtccacagacggcccgagaccctcgtccccggccctttgcacaggtgcgggcacagccagaagctgcacctggccgagaacgccgagcctgaggagcagtccgctgcgtaggcgtcccacgcaggcccaaaactgtgacttttacggccccccaggtgctatgggggaggaaagcaagcggctccgtgtcctgcttcgcggccccttgcggctgcgggggctggggggacgcaggtacgcctgtcgccaggacgcctctaccctggacggtaggaggttgccgtgggaacggctggggcaaagcccacgcccgcgcatgctcaggagcgacgccgaccaatgacgtacttcgca

SEQ ID NO: 575 - DNA, 301 bp, Homo sapiens
  source 1..301: mol_type = other DNA
cactgtgcccctcttgttcagagaagaggatagtaagagggaactagagctagtcagccctctctcactgatgggaatgaggtgtttcaagcataaggacccagagaacactaatccctctaaggaggatccttccagggcagagggaaacagactgaagtctgtgcctttgccttgaagtccaggaagccttggttgacatagattgagcacttactatgttctaggcctaatgctaagtgctctacgtatcagatggttattattataatcgccatttacagatgatgaaactgaggct

SEQ ID NO: 576 - DNA, 283 bp, Homo sapiens
  source 1..283: mol_type = other DNA
cccctggccattggtgactagtgggattttcaatcctctgcctgtagctcaatccaaatttgtggataagtaatcccacagtactgcactccagcctgggctacatggcatggggcattgaccccggagccagctgggagccatggcccagtcctccttagggaacagctcccaaagctgatccccaattgagctcagccttgtgctatgtttaagtgtgatctccccagggcagatgggatacctctgccttcctgggtgagagggcaggactccggcaacc

SEQ ID NO: 577 - DNA, 431 bp, Homo sapiens
  source 1..431: mol_type = other DNA
cttgaagtccaggaagccttggttgacatagattgagcacttactatgttctaggcctaatgctaagtgctctacgtatcagatggttattattataatcgccatttacagatgatgaaactgaggctcttttccgagaatttctagtgagtaagtggtggggctgacccagacctgtttgactccacaccgagagaggggcctttcacagagacgcacctcagtataagaagagggtcgggcccaggtcggctcatgaacccgctgcaggccggcggaggcccgcttcagcagcggctgcgtgccaccccacagagcggcttcgcctcggctgcgactggcggctaaggcaggcccatccaggagtccggcctctggggccggctacctacccagagacgccgccatggcaacgccgctgtcttctactt

SEQ ID NO: 578 - DNA, 397 bp, Homo sapiens
  source 1..397: mol_type = other DNA
gtcacccaggctggaatgcaatggctcgatcactgcaacctctgcctcccgggttcaagcgattctcttgcctcagcctcccaagtagctgggactaccgtgttagccaggatggtgtatgttatgtttgaaaacaaagtttaaaaaagggcatccacagctctgtcctgtcagtgacttgctagaactcaggtctcctgactcccaggccagggccctggaggctagtcctttcctgaagggctgtaaggacaaggggtggctaggcagcctccttcctgatctcagctcccttaacatgagtcttgggaggagggccaagactagggccagaggagcagggttcctccggcccccacccagatgggccacgtggctcccaagttagcagtccagg

SEQ ID NO: 579 - DNA, 403 bp, Homo sapiens
  source 1..403: mol_type = other DNA
agctgaggtgcacacagcaagttcttggacctgatgaggccagacctggccctcagctaatgatgggtgccccctcagcctggccccaggggaaatggaggccttctgtcttccacctgttgcaggagatagtgccaagccctccacctctgccaggggctgtggccttattaatgggtgttgtcctggcctctgactacagcaggggccgttactatgccctcttgaagacatgaggttgtcctgtctgcctcctgaaacaggctgttttccagcattctgtctgtaagagggatggtagcctgccattcacctacccctgagatgacatgggaattgaacatgcatggtctgctcacctttgctgccagacagaaacaaaagggcactgcaccataagctg

SEQ ID NO: 580 - DNA, 480 bp, Homo sapiens
  source 1..480: mol_type = other DNA
acctggccctcagctaatgatgggtgccccctcagcctggccccaggggaaatggaggccttctgtcttccacctgttgcaggagatagtgccaagccctccacctctgccaggggctgtggccttattaatgggtgttgtcctggcctctgactacagcaggggccgttactatgccctcttgaagacatgaggttgtcctgtctgcctcctgaaacaggctgttttccagcattctgtctgtaagagggatggtagcctgccattcacctacccctgagatgacatgggaattgaacatgcatggtctgctcacctttgctgccagacagaaacaaaagggcactgcaccataagctggggcccttgcccagatgcaccctggagggcagaagggagggtctatcagacatcctcccctcccagtgtcaccctgggacagtaggggcccggttggctgcggagccctccggaggaggc

SEQ ID NO: 581 - DNA, 177 bp, Homo sapiens
  source 1..177: mol_type = other DNA
tttgaggacagcgctttccaagcactcggggcttcaaagtgagggccccactctgcttcaaggcacacatatcactttatctatggagttctgcttgatttcatcagacaaaaactgggggcgtgcacacctctccagtaggggagggctctcccaggcttgggtagaggtcccatc

SEQ ID NO: 582 - DNA, 408 bp, Homo sapiens
  source 1..408: mol_type = other DNA
tgccctcctatcataggatagacgcctacttagtcatcctgggtgactgcatcaggactttgttacagtgcctctggtgcaaagaaagcattttaaaaaccctgtacaattaaaaaattgaatttaattactttgtgtaactttgaataattcacagaagtctgaacttctttatcctgtccttaacaggttccgggactgatggtacggtccccgggcggctccccacccatctggcagaccttggtacaggcccagggggccctcggcggcctctccgggctgcccttgccccctgccgagttccgggcccgtgtctgcgcaagctgattggctggagcggtgcccgggctgcgcggctataggtgagcccaggaggggacgggcggggcgggccggaggcccgcc

SEQ ID NO: 583 - DNA, 391 bp, Homo sapiens
  source 1..391: mol_type = other DNA
gcccggctaattatttttaaaagcactggtcgggaaggactttcttacctctctccttccctccacaacaccctagagagggagcatggagggtggctgtcacttctgtgactcacctgccagccagtgctatagggtagggctctcagtctgggggtaggcttaatgctacaaggtacctctgttctgtgcctttttaagttaactacccgctccgagacgggattttcaagccggtaagtggctttatccaccccttgggctacaaacaggggattggttggcggtggaggggagcaaagcacccccaccatacctcccttaggaacaaacacccatatttattggttccttcttctgctggatacaaaaatatctaagacatgatctt

SEQ ID NO: 584 - DNA, 465 bp, Homo sapiens
  source 1..465: mol_type = other DNA
agacgcctacttagtcatcctgggtgactgcatcaggactttgttacagtgcctctggtgcaaagaaagcattttaaaaaccctgtacaattaaaaaattgaatttaattactttgtgtaactttgaataattcacagaagtctgaacttctttatcctgtccttaacaggttccgggactgatggtacggtccccgggcggctccccacccatctggcagaccttggtacaggcccagggggccctcggcggcctctccgggctgcccttgccccctgccgagttccgggcccgtgtctgcgcaagctgattggctggagcggtgcccgggctgcgcggctataggtgagcccaggaggggacgggcggggcgggccggaggcccgccccctcccccctgggtcggacgctgagcggagccgcgggcgggagggcggacggaccgactgacggtaggacgacgg

SEQ ID NO: 585 - DNA, 751 bp, Homo sapiens
  source 1..751: mol_type = other DNA
ggggccgctgaggcaggggcttggcccatcctgtggggcgcacccagggagtgcacctggggtccccgggggtccggacgtggatgcggggtcgggtggggcgcgggccttacctgaccgggcgtcgctaccgcctccgggctgtcctgggactcgggggcggcggcaaggccacgggagtctccggcctcagggctgcgggggctcctgggcgctcatgtccaagccccggggcgctctgcgcggggagtggcggtcaggcctctcccgggtcgccgggcgccgccgcctcgcgcccgccccctgggccgtcgctcacctcccggcggttgagaccggtcccaggctagaagcagctgccggagccctggccgcgggagaacgctccggtccaggcggagccgggcaggtctctgtggcgtgcccgggcccgggcgtcgaggagggcagcattgtgacccgggccgcggcgcgctgacgccccctgccgcccctggcactcagcgcgggccagaatcggggactggaggcctctggccatggcgcctggagacggggtcgcgcagaccccggacacccgaggggggcgcagcaggccagggcaacccgccgcgaggcggcgtccacgccgaggagccgcgcattcccggtccacacagacgcggcggagcgccctcccaggcgggactacaactcaatgcctggcacgggggcgggctcggcggtggggcactgcccattttggccaagg

SEQ ID NO: 586 - DNA, 708 bp, Homo sapiens
  source 1..708: mol_type = other DNA
cagctttgagggctgtcctcaaggggctgtcccttgaagggacccttggtagcaccagctggggttcctctgccggcctggggcaccctgatgcagacaggttgtcaatgcctctgagccttggcctttcaatggggatggagatgcccttcaaggtcacaaagtcccccacgtgggactttaatctgtctgtccccactcagaatgactgactggcaaggcagagccctccgctccccggctggccatggcaggcaggcagggacgtgggtgggacctctgaccgctctccaggccggagcgggtgccgagcccagcgcaggggccctgcagcccatctgacgagcctggtcgtgtgagcccttcgaaggggagactgccagcggctgcaggaccaaggcgttgggggccgctccaggctgcgggggcgcccaccggagaggtggagcggagaggatggaatgactgcccgtctccttcctccaggccccccgccccgccccgcccagctcgcgggaggactggcctcgctcctgcccacaccggactctacctgcccctgggattcgggtggggtggggggtacccgaccgccagcgtcgcctgctgcgcaagtggggcctgcgagccaaccccgcctccgcccctcgattgggcgcgcatttaaatgtccggccccgccccgagctccgggcgcttatatatagg

SEQ ID NO: 587 - DNA, 688 bp, Homo sapiens
  source 1..688: mol_type = other DNA
aaagaacagtttgtgctgtgctttattaaaatgtgcatcattcttttattttaaaatggcgcatgcgacctcagcgtggtggcccgctgggggcctcgttcccgcccagctcccgcggagccgcagggagcaggcgcactcacgtggcgcgggcccgggggctcccgcccatggcgaggtagacgtcgatgggcacgtgcagcgcgacaggggccgctgaggcaggggcttggcccatcctgtggggcgcacccagggagtgcacctggggtccccgggggtccggacgtggatgcggggtcgggtggggcgcgggccttacctgaccgggcgtcgctaccgcctccgggctgtcctgggactcgggggcggcggcaaggccacgggagtctccggcctcagggctgcgggggctcctgggcgctcatgtccaagccccggggcgctctgcgcggggagtggcggtcaggcctctcccgggtcgccgggcgccgccgcctcgcgcccgccccctgggccgtcgctcacctcccggcggttgagaccggtcccaggctagaagcagctgccggagccctggccgcgggagaacgctccggtccaggcggagccgggcaggtctctgtggcgtgcccgggcccgggcgtcgaggagggcagcattgtgacccgggccgcggcgcgctgac

SEQ ID NO: 588 - DNA, 314 bp, Homo sapiens
  source 1..314: mol_type = other DNA
tggactgcattgctggaagcccaccaggcattaggcccctcactctaggctggagtgcaaagtagctgggattacaggcacgtgccaccacacaggctggtcaggagggctcatgggcactggcccccagagcccctgtgaagagaatctggtgacttcagttgagcccccagcagaggtgactccatcagagagcagtgagagcatctccctcgtgtgaggcacgagtaggacctgtcccaaaagctgctgggtgagactggaccctcaccccctgctggccacaccggcggcccagagcccaggcctccagc

SEQ ID NO: 589 - DNA, 152 bp, Homo sapiens
  source 1..152: mol_type = other DNA
ggatttctccagaccacctccacctggcgttgttctgagctgggccacagccgcaatatgggcttattcatcgtccagaggccaccgtacccgacgtttgcgcggtgccggcgcgaggattgggccgagcgcctcgggggcggtccttgagg

SEQ ID NO: 590 - DNA, 531 bp, Homo sapiens
  source 1..531: mol_type = other DNA
tgcatgttttaattaactaaggctaaaataaaacctttgcaaatatgtttctacttacctgttcagaaggtctgcagtgacacagaagtgacattgagacaattgtgaatatcttgtatcctcaaaatgcatataattattcctgaatcaaagttacaaactgtccaatatgaatgattttgaacaagttttgataattaaactaatttatagaagtaatgcttctacagtaacagtgaaaatccattgatttactattttagcaaatgtataacctgatatctgtactctaaatattagagacgtaaattcttgcattggaaaagacgcaacttgctatttttactaattttatatttctggacttaactaagaattactattcaaatgaaatgcttctgacctgtacaggtttagaaaaggttatcctcaactaaaataacagtacaagggaaaattctgtggaaatcttttgcatttgacgttgctaaacttaagtacaataatgtcacatgtacttatacagtaatt

SEQ ID NO: 591 - DNA, 542 bp, Homo sapiens
  source 1..542: mol_type = other DNA
ctgcagtgacacagaagtgacattgagacaattgtgaatatcttgtatcctcaaaatgcatataattattcctgaatcaaagttacaaactgtccaatatgaatgattttgaacaagttttgataattaaactaatttatagaagtaatgcttctacagtaacagtgaaaatccattgatttactattttagcaaatgtataacctgatatctgtactctaaatattagagacgtaaattcttgcattggaaaagacgcaacttgctatttttactaattttatatttctggacttaactaagaattactattcaaatgaaatgcttctgacctgtacaggtttagaaaaggttatcctcaactaaaataacagtacaagggaaaattctgtggaaatcttttgcatttgacgttgctaaacttaagtacaataatgtcacatgtacttatacagtaatttaaagtacaattttaaatttcagctcctgactaaaatcatgatccctagagaatctgggcaccccggtgtctctggagcgtg

SEQ ID NO: 592 - DNA, 614 bp, Homo sapiens
  source 1..614: mol_type = other DNA
gggggccccaccgctggcttcgccagctgcgaccgaaatcggtcccagggaactggcgagccgttagcacgccccgcggggagttccctcttcacgccttcagtaccggggactgcactcggctgttaggccatgtcgaggccgcggctcagcccaggcacccactgccctcctgggtcggccccggcaccctcaccttccttgtcggccatggcgggcaggcgagccggggtgcaagagctcgctctgtgcgcgcggcctccagcgcgagggctgactcgcgcaccttcgcgccaacatcagccaatgggagcgctcctaatggcgggatgggcggggaagccgcgttcgcgaccaatcgcggagtagctttccgcggggaccgaggcgcgcgctccgcccctccccccacgcctccccttccagcgattgcgcgcgccggcgttgacgggactgcgcccggtcagggtcacgccgcggcaagaggcaaggctattaagcttacgaccctttcagagtactgaccagtcagacccagacgggtttcattcaaggtgcccttcaacgtttttccttagtctttggaaagaactagtaatgtaactccgggccga

SEQ ID NO: 593 - DNA, 630 bp, Homo sapiens
  source 1..630: mol_type = other DNA
taaaatttttaaaaacaaatttaagttagcggccaaggggccagccaggccttcggagcacgctcgtgcgcgccgaaactcacaagcccgacgaggaggcccgagctccgagccttgtgggtaggaagcggtgtccccacgctcgggacactggccgggggccccaccgctggcttcgccagctgcgaccgaaatcggtcccagggaactggcgagccgttagcacgccccgcggggagttccctcttcacgccttcagtaccggggactgcactcggctgttaggccatgtcgaggccgcggctcagcccaggcacccactgccctcctgggtcggccccggcaccctcaccttccttgtcggccatggcgggcaggcgagccggggtgcaagagctcgctctgtgcgcgcggcctccagcgcgagggctgactcgcgcaccttcgcgccaacatcagccaatgggagcgctcctaatggcgggatgggcggggaagccgcgttcgcgaccaatcgcggagtagctttccgcggggaccgaggcgcgcgctccgcccctccccccacgcctccccttccagcgattgcgcgcgccggcgttgacgggactgcgcccggtcagggtcacg

SEQ ID NO: 594 - DNA, 375 bp, Homo sapiens
  source 1..375: mol_type = other DNA
ctgtgtgcttacatgtaaagagagaagtaagcctcggcccggagttacattactagttctttccaaagactaaggaaaaacgttgaagggcaccttgaatgaaacccgtctgggtctgactggtcagtactctgaaagggtcgtaagcttaatagccttgcctcttgccgcggcgtgaccctgaccgggcgcagtcccgtcaacgccggcgcgcgcaatcgctggaaggggaggcgtggggggaggggcggagcgcgcgcctcggtccccgcggaaagctactccgcgattggtcgcgaacgcggcttccccgcccatcccgccattaggagcgctcccattggctgatgttggcgcgaaggtgcgcgagtcagc

SEQ ID NO: 595 - DNA, 720 bp, Homo sapiens
  source 1..720: mol_type = other DNA
tagttctttccaaagactaaggaaaaacgttgaagggcaccttgaatgaaacccgtctgggtctgactggtcagtactctgaaagggtcgtaagcttaatagccttgcctcttgccgcggcgtgaccctgaccgggcgcagtcccgtcaacgccggcgcgcgcaatcgctggaaggggaggcgtggggggaggggcggagcgcgcgcctcggtccccgcggaaagctactccgcgattggtcgcgaacgcggcttccccgcccatcccgccattaggagcgctcccattggctgatgttggcgcgaaggtgcgcgagtcagccctcgcgctggaggccgcgcgcacagagcgagctcttgcaccccggctcgcctgcccgccatggccgacaaggaaggtgagggtgccggggccgacccaggagggcagtgggtgcctgggctgagccgcggcctcgacatggcctaacagccgagtgcagtccccggtactgaaggcgtgaagagggaactccccgcggggcgtgctaacggctcgccagttccctgggaccgatttcggtcgcagctggcgaagccagcggtggggcccccggccagtgtcccgagcgtggggacaccgcttcctacccacaaggctcggagctcgggcctcctcgtcgggcttgtgagtttcggcgcgcacgagcgtgctccgaaggcctggctggccccttggcc

SEQ ID NO: 596 - DNA, 452 bp, Homo sapiens
  source 1..452: mol_type = other DNA
cccaaaatgctgggattacaatcttaaaaagaggagttattagccttattttcatgatccagcttctgatgtcacattgccaaagtaggaagggcatctccctggcttcccaggactgtgtcctgggactggcccctgcccctctgggggcctctgcccacagcagcagctctgggctcctgcctggctgctgcaggctccgagctctttccccagggaattacgctaggcagccaggaggcttgcaggtgggcaccctgccaagtctagtctggtagcccctccacctaccatctggcagctgggacccctgccttaactgggcagagcacccacggactcctggcctcagttgcctttctgtgcccctgcaccccatttaaggggtgggggtgggaggaggacatggagagcagcccctccccctcctctgtctggagccggtgctctgc

SEQ ID NO: 597 - DNA, 358 bp, Homo sapiens
  source 1..358: mol_type = other DNA
tacatgcatgaactttgaaaacattatgctgtgcaaaaagtcagacacaacaaacatattgtatgattctagttacaggaacagattagtcgggagccgtggctcacgcctgtaatcccagcactctgggaggccaaggagggtggatcacgaggtcaggagatcgagaccaccctggctaaccccagctactcgggaggccactgcactccagcctgatggttgcacaaccttgtgaacatactaaaacccactgaattgtgcactttaaaagggtgaattttatagtatgtgaagtacatctctaaaaagaaaacaaggctaaaatgtatactaggggtaagcaatataaatattt

SEQ ID NO: 598 - DNA, 635 bp, Homo sapiens
  source 1..635: mol_type = other DNA
gcaacggcccgggacggtgtcgccttccaggaagggcctttgcgtctccctcccccggggacaccgcgaattcccgcctcccggcggaaagcgggagaagcgagagttttctccccgcccctcccccaggggccctcagcaggcctgtgctgtgcgctcctctcccggggaccaccgtcctcagatctcccagggagcgagacgcggcagaaaagcccgcggctatcttcccgccagcaacagcctcccgccgagccggccgggacagaggcggcccccacccccactgggcaggggactgcagacggcgctcccccagggagcttcccttttcctcagcggggtgaggggcatctgtcgcccgccgacttggaggtggaggggcagggacattccctcgccatcacctcaggagctagaacgcgcccttctcgcagcagggcgtgggcctcccaatccctccaaggggcggacggcgtgcgcaaccccctggagaggcgcctgggcgaacgactgcggccgggccaacaccagggggagggcttggcaggaaaccgtcccgcctctaggagggttgtgccccgctcaggcgcctcagccccttttccggccgctgccggaggggtccaggccga

SEQ ID NO: 599 - DNA, 391 bp, Homo sapiens
  source 1..391: mol_type = other DNA
agtataatcattgattgacttcataattttaagatgtttttattatttcaagcatataaaaaagtataggcagccctggggttcaaggctgcagtgagactgttttctgcctgggcaacaaacctgagaccctcaaaataacaataatttaacagtgtaaaagtaacataatgaacattattatacctagcatgctgctttgtcagatgagatattgttttcttaagaaataaaacattgggagatcaagaccatcctgaattccggcctttcatgcatattttaataattttgtgatatatgtatccatacataatacgtggtaccaggctggagtgcagtggaccaagcccagatggtctcgaactcctgacctcgtgatccgtaggat

SEQ ID NO: 600 - DNA, 352 bp, Homo sapiens
  source 1..352: mol_type = other DNA
tttccagtggacaagacttgtaaaaagaactgaaattatctgtaacagttttgcaaattccttcgaagtaactaaaaagctgcagcaacaggtttcttttcaaaaagaaaatgtgctttaaaacacttcaggcaggtctggtagagcttgggtgacgccgcctccagcccttgaggagccggagaaagggtggcccaggcccaacctttggaggatactggcaacggcccgggacggtgtcgccttccaggaagggcctttgcgtctccctcccccggggacaccgcgaattcccgcctcccggcggaaagcgggagaagcgagagttttctccccgcccctcccccagggg

SEQ ID NO: 601 - DNA, 362 bp, Homo sapiens
  source 1..362: mol_type = other DNA
cagggagggagtcctggattcaaagtttggctccaattgactgaccgaccagcagtgagatctacaggctctctcagagctgcgccagcgccgagtccgggccccaggcctgacctgcaggttccgggtgataaggtgcaggggctgggagcgtccccttcctgggtcaccgtcgccgccgcgtgccgggaactgtcacgcgagtccagccaggttgcatcagctgggctcggcgctccgcttactcggcctggacccctccggcagcggccggaaaaggggctgaggcgcctgagcggggcacaaccctcctagaggcgggacggtttcctgccaagccctccccctggtgttggcccggc

SEQ ID NO: 602 - DNA, 303 bp, Homo sapiens
  source 1..303: mol_type = other DNA
cgtaagccttgcatgcagtggtgtgctcagctcactgaaacctctgcatcccaggttcaaatgattctcatgcctcagcctccagagtagctgggattggtggatccacccacctcggactcccacagtgctgggattacaggcgtgagccagcgccctggcctgcagtggctgctcccagccagctctcactggctgccagattccaggcaccatcatgaggactgagaaggcccagcgctggacttccttttctcccctgcagggacgggagtagactggaggcctgaagaggctccagtc

SEQ ID NO: 603 - DNA, 568 bp, Homo sapiens
  source 1..568: mol_type = other DNA
ggctgagatgagggaagggggctggagccactccccttctcagagatgctcttagagaggagctggccccggccaattctagagtctcacgaatctccggagagtcagatcagcctgtgttcaaatcctggctctgctgcgggtccctggacaagtcaagtagcctgtccaagctgcaggctcctcctgtgcaaagtgtgcagagtatgactttacagggttgccctgagaatttgccctcactctccagtggcagcctctgccccagccgcaaggcctcgggtctaccgtggaatgaggggatccctaggcccagggaagggaggtcctctctctaccctgggaaagggcagaatgaccgcggcgggggcgcggagaaccccgctgggctcccgctcggtgagagggcgggagccgtgggtccgcgaagccccttcctccccggcagaggacctaataggcagcgggggcgggagtgggggcgccctccggtcctcaccccgcccccgcacctctccccgcagcgggggcgccccgccccccgggcgcccgacgtggacgcggccgc

SEQ ID NO: 604 - DNA, 238 bp, Homo sapiens
  source 1..238: mol_type = other DNA
ggagccctggggtgccaggagcagatggcaaatgctgccggctttacctgcgaagtgccccaaggccctggatggcccaatggcagttaccacacatgtctaatatcgacatgtatattgagacagacccctttgagcccatttcttcatggggacaacagcatgcggagaatgcacaggatccccaggcagatgttctgccctcctgtcatggcggtggggaagggggcgtgtctgg

SEQ ID NO: 605 - DNA, 529 bp, Homo sapiens
  source 1..529: mol_type = other DNA
acccctttgagcccatttcttcatggggacaacagcatgcggagaatgcacaggatccccaggcagatgttctgccctcctgtcatggcggtggggaagggggcgtgtctggtcccctaccccgggaatgggcgctccacgctcccagctccgttagttgggaggtgcccagggtgccaattcggccctcgaagcgacgtgcggctcagagccggcctgggatcgcccccggctcaggagagagacctctaccgtgtccctccattccggccaccagagccgaggtgccgaggagaggggcgccgcgatcctcctccccgggcagggtgctccctcgagggggaccggggaactgagggcgtccccttctctccggggcgggggtggggggcggagcccagcgcgccgctccccagcccccagggctggcggggacccccccaggggaggggctccgggtgagcgctgcggggcgtctccctcgcagtcccgcccgcccctcctgccgcccctgccgcgcgcgccgcag

SEQ ID NO: 606 - DNA, 512 bp, Homo sapiens
  source 1..512: mol_type = other DNA
agagcagtactaataaagctcctactatgtgctcttggtctacactttgtccatacagacagtctggagagtttccaagagatggagtggcgagatctcagctcactgtaacctctgcgatatggccaggcaggtctcgaactcctgacctcaggtgatctgcttgcctaggcagccgccgcgcccggccgaaagcgctgaccttcggggacaggaattggacttaaagcgcctttttcagcttgcctgaggcagccttgggcccgggggctttccgcccaagacaacccccaacttgccgcgggcccgcgcggggcggctcctcagagccttctagagcgggcccgccgccgccggtgggctgagggagggcggctcggcgccgggcgggccgggcggggcggcgcctgactcagcgggcgggccatgggctgctcagccggtccgaccggccgggaggggcacgagccgcgggggcgctgcggggccgggcggcccggggggtgacggga

SEQ ID NO: 607 - DNA, 458 bp, Homo sapiens
  source 1..458: mol_type = other DNA
ttgaggcttcagtgagctgtgatcacgccactgcactccaggaaaaaaaataaataaatttcaatcgtaagctatttttttcttttgttatttgcaattgaatctcccccagtcagaggtccttccacaagtttggtaagtaagagactattatatacatagggtttattaaatacatcagtgaatgaatatattctttattaatttatgccgtctgcttaataaacagaaagtgaaccagttgggagtcaccatctgatcaacccctgctttttataaataatgtaactgaaccatcatttacggatctctgagagtctccctgaccggcaggaggcggagctccgccccagctcgctcggccccaccccgctcggccctgcccagcgcactcctagaccggggcgcaagggcgaagcgcctgcgcagggcagcggcgcgcggggcggaggctttat

SEQ ID NO: 608 - DNA, 235 bp, Homo sapiens
  source 1..235: mol_type = other DNA
gccatgtggggaaaattcggattttgttgtacatgattaaattatcttatacaacaggggtattccaggatacaaattggttgcaatttatttaaccaatctctgtgttgcaattaacaactttgttacacgaatttgaaacatattactaatttgtcttctaagagtgattttacccatttaaactcccacgcgcaatttaataggatttcaatgcggaacgggctgacggacg

SEQ ID NO: 609 - DNA, 276 bp, Homo sapiens
  source 1..276: mol_type = other DNA
ttgactgttcttgtacacttaggcaccaggctcttgagcagggtattcagttgcccttgcacaaaaaggttctctgaagacattttagatgcgttttattaaataaaaagaattttattacaaaagtaatacaaggacatgtcattggaagcagaaaaggcttcctgggcggcggccctgtagttctgacttccagcgtgaggtagccaccgccggcacccggttgccagggctacggccaagcggaggtagggcctcggcactatgggcggggcc

SEQ ID NO: 610 - DNA, 317 bp, Homo sapiens
  source 1..317: mol_type = other DNA
gtataatgattatcttcaagaaagggccagatgttagccatttccaaacttctccccaagcactccttactttatattttatgcagaagttgtattccaaatatattcttgttcgttttaatacaaaatatgattttttctacatcttcaaatcgatgatccagaaagatgctccgcctcgccgcggggaccctaagcgaggggggtggggcggggtcaaccggctggtggccccgcccctcccccgcccgctgcgggggcggagttgcttgggtcccgcccacgggggcggggaggcagccgcggccaccggcagc

SEQ ID NO: 611 - DNA, 408 bp, Homo sapiens
  source 1..408: mol_type = other DNA
ttgatcacttgtctgaggggaggagtcactatctgcagcctactcctaaagagtagggagtgatgcttgtctacataaattatttggaattcttctgcacagacaatttattaatttattatctcattgaatttccgctctgtgccaggcactgtgcttggggattgagaacaagcagtccctatgctcacagtgttttttaatagctgtgccagccaaccagctattaaaaacagtggttgatgtttactaggtcctctatgaatatttactgaatttggaaaccttcccgggggactgtgcgctccctgagggcagggccagccctgatccatcctggcccagcggtcggaagccggtgaagggatcctggaaccggctgcctcctcaggtagaagttggaagctg

SEQ ID NO: 612 - DNA, 372 bp, Homo sapiens
  source 1..372: mol_type = other DNA
cctgaaaccatttcccaggcctcttgtagccaggtggagccatgtgactttactccgtcagctgctgaggacaggagcatctatgaatctatgaatcacttcatagagcttgtgacagagaccatatactccttctctcccaaatgaaaatatttactatctagccttttatttaaaaaaaattgtgactgtaatcccagcacctttacctgtaatcccagctactctcacttaggttgcagtgagctgagatcgcaccactgcacgccagcccgggtgacagtgtgaggcaataaaataaaataaaataataaaataaaataaaataaataagctgtgattggccaagcctaggtcaggtgcttgcacctc

SEQ ID NO: 613 - DNA, 433 bp, Homo sapiens
  source 1..433: mol_type = other DNA
gggccagatgttagccatttccaaacttctccccaagcactccttactttatattttatgcagaagttgtattccaaatatattcttgttcgttttaatacaaaatatgattttttctacatcttcaaatcgatgatccagaaagatgctccgcctcgccgcggggaccctaagcgaggggggtggggcggggtcaaccggctggtggccccgcccctcccccgcccgctgcgggggcggagttgcttgggtcccgcccacgggggcggggaggcagccgcggccaccggcagctcggattcggctggttccgggagcggcagggtttggggccgggatccggcagctgagcgggccggcacccctcctcttctctgccggtcacagccaatgtacggctcggcctggctgcgacccccttaagggctccacc

SEQ ID NO: 614 - DNA, 554 bp, Homo sapiens
  source 1..554: mol_type = other DNA
ctggcgtgtccagcaccttcctgcgcctcgcgctcctgagggtggggactgtgtcacgtcgcgcgcgtgctgaatccacgacagcgcaggttcacccggtgcgcttggggaccgtgtgccaggcacggcgggccgcctgcctcaaccgcgagcccgaggccgctcacggaggtgtgaccggggcactcgggccatgacttccctctgatcctcggttcccagtgggagagcagggtttggcacgaactgagctctcggtgactggtcgttagtcttctgactgacccccaggcccctcagggagtgaacggtccaaggcgggagtcgcgggccgccccgccaaggagcacttgcactatcagggcagcctcctcgtggcgtggcgcccgcctccctaagctgagccccgggcgtccctaacccgccttccggagggcgcgaggcggggctcgccgcacaaaggaagcgcgcggcccgtgtccgccccgcccctcccgcggccccgcccctccccgccccgctccctcgccccgcccccggcggaggcggccgcg

SEQ ID NO: 615 - DNA, 540 bp, Homo sapiens
  source 1..540: mol_type = other DNA
ttctattagagaagggattctaagtccaatcctaaattaaataaatctgatacaatgagactagttatagctgtataacgttgggcaatttgcttaacttcccaaagtaattccaccatgttgagaagactgaatttaaaagtttctaaagtaatgagcttcagtataaatcagtgtaacttgacctaaattatgggcataactattctgcctataaaacgctgtacaaattatgtacaaggattttctcaactgcacagcacacctgaaattgtgaggaggtcaaaaatgatcttagatctccacttctttctgcagcaaagtgtggatctctctggctgagacaaatctctccatccgcaaggtgggctgcgcgtggtcgccatgtggcgcgaggagatgctcccgggggcaccgggctccggcacctccccactcccccgcccacccgcccgttgccatggccaccggttcaggctgggagcagcactaaggcgtgttccgcccaatccccgccctagggtgaccattggctgctaa

SEQ ID NO: 616 - DNA, 464 bp, Homo sapiens
  source 1..464: mol_type = other DNA
ttcagacacaagcagcttgacttcagagacttttacctaaatagtctcataacaccctgtgatgtaagttctcttacattacttgcattttatagatgaaaattccaaagacaaaatagatggcagtaatttggttgagttgggatttggatccatgtctgactacaaatttatatgaggattattttgtaataatgattaacattcttccaacacctaggaagtgctaacgtgtattatctcattgaaagttcacaaaactagcttagctgtaagctggaaattaaagctacaactgtccagttctctcggtctgaggctctcacttcgacccctcagtagaactgggcccccttcaacaggtcccgccccgcaaacggagggggccgcccccggcgctcgcgcggttccttctgtctcagacgttccattcccagggtggcgccgctcggactccgcgtccc

SEQ ID NO: 617 - DNA, 501 bp, Homo sapiens
  source 1..501: mol_type = other DNA
tgttaatgaaactcagttttctagtcctataaatttggggctatcatactagtggaagggacccctcacatgagagtgggtgtgctacaaattccatttcattttcatgaactccagtgttaattaataaaatctcacatttcttcagagaaatgaagagttccaactcaaccaagtgctcaggttttaaattagacaactttgtcctgacaggaaccaagtcacagctgtcacttttagagttactactaaacttgtatggcatgagctgccactgttcaaggctcagcctgtctttggaagggatgatgaggcatcctgaacagcctagggattttaagcccctaaagtgcagcaaaacccactgcctccaggaagccaaggagaattatttctgggggacatagctgcctcatagcctactatgaatgaaccatcatctttcatgagaggcaaaacctgtacacaaatgcccacaggtgtcagcactgaaaaggctga

SEQ ID NO: 618 - DNA, 330 bp, Homo sapiens
  source 1..330: mol_type = other DNA
cctaggaatttggggataaattgtactagtagagtgggaccgcactgggtcaaatgaaccggttccctgggatggggtaggaggctattgtgaatgaggctcataagcatcgccccttttcccagacaggattccaatttccaaacgtggaggtggaggtggcgctgaagaggaacccccgcgcctccacccccagcatttggagcggcggagaagcggctccggagtgattaatccggggataattcaccccctcccgccccccggcgcgaaccccgcgaagcgggattggagcgagtcatttccgagagcgcagcgcgcctctccccg

SEQ ID NO: 619 - DNA, 267 bp, Homo sapiens
  source 1..267: mol_type = other DNA
tactagtacaatttatccccaaattggctgcctctaggccccaagggcttagtgtcgctctcggcgagctggcgcgtgcagtggaaaggcacctgcgatgggcaccccccggcttagggcgcctgatttggccaaaacggagcgttgggccaagggggcaggccgatggcgagccaggctgggggtggctggcgacccaggttggccggctgtcagcgtggccagggagtggaggcttgtccctacttcccacagctggggagccag

SEQ ID NO: 620 - DNA, 333 bp, Homo sapiens
  source 1..333: mol_type = other DNA
tactagtacaatttatccccaaattggctgcctctaggccccaagggcttagtgtcgctctcggcgagctggcgcgtgcagtggaaaggcacctgcgatgggcaccccccggcttagggcgcctgatttggccaaaacggagcgttgggccaagggggcaggccgatggcgagccaggctgggggtggctggcgacccaggttggccggctgtcagcgtggccagggagtggaggcttgtccctacttcccacagctggggagccagcccggtggccctgggcgggcgaatctcctcagaatcgcgggcctggtccccgccttgctgggtgcc

SEQ ID NO: 621 - DNA, 353 bp, Homo sapiens
  source 1..353: mol_type = other DNA
tgtgtgcatttcacacatcattcattcaataaatataaattgaagcactgctgcatgtgtgtgcaacactgtgcccataattgtggcccaagtgacctggccaaaagaccgtgtctgtgcactaaggtttggcctttttaacccaaagacaacatgccttccctgtatctcagaaagaaaaggcgttcttttcccactttcacagagaaggcaagaaatcacacagtgagaaagtggcagagcttctcccctgaggctcagcgccctgggaggagccctcagtttcctgagcctcatcagaagcagtctggggaggctggggcccagccaatggcagtgcaggtcccagctcc

SEQ ID NO: 622 - DNA, 407 bp, Homo sapiens
  source 1..407: mol_type = other DNA
acaacactgctgaggcctccagagctgggtctctcattcataaaagcctcatctggatgcatgctcctaactttggggcattttggggcattgttaatgatgccagcactgcaaacataaaccagtatggagccaccatagtgccagcaatatctctgtggagatccagggactcccaagggaggctggaaaccctggggttttccaaaagattttattagttcctagtcaggacacactagtaaataagacaatgtgtccttatcgctatttactgcaatggtatttgtaatagaatgaaataaaaaactagaaacagccttaatttttatcagagtaggactgataaaatatattacagtacatatactattcagctgtttttatttgctaagtgaaaaaaagca

SEQ ID NO: 623 - DNA, 528 bp, Homo sapiens
  source 1..528: mol_type = other DNA
atgctcctaactttggggcattttggggcattgttaatgatgccagcactgcaaacataaaccagtatggagccaccatagtgccagcaatatctctgtggagatccagggactcccaagggaggctggaaaccctggggttttccaaaagattttattagttcctagtcaggacacactagtaaataagacaatgtgtccttatcgctatttactgcaatggtatttgtaatagaatgaaataaaaaactagaaacagccttaatttttatcagagtaggactgataaaatatattacagtacatatactattcagctgtttttatttgctaagtgaaaaaaagcaggactcactgtgccccttcccgctgtgggtacaaggtctgaaagcccaccggcctccctggaggccgaggtcgacggcccgtcgcaccgggagggggggctcccaggggtgccccacgcacggtcaaggtcccgcgccaagcggggaccgggctgggccggaagcgggcacggtactcgcg

SEQ ID NO: 624 - DNA, 372 bp, Homo sapiens
  source 1..372: mol_type = other DNA
cccctgggaatgctcaatccctgcaccagccagtgagggaggaggcttggctggttcctcagggtatccccaggtccccaagcagcgtctgcagcacagcagatgctcactgaatccacctgtgatgcctgaatgcatgaaggcaggctccgccttgtgtagcctgcccagacatggggatgtttgagaattcagacgcctgctccaccatgtatgctggaggtgtggatcctggcctgggagaactctccttccctggccaaagaaacgacaggagagtttactagaggagaggaagggtaggtcagcccctcttgcccctcccccacctccccggagtgggtttagggagtctgcacctcccagtcccgc

SEQ ID NO: 625 - DNA, 713 bp, Homo sapiens
  source 1..713: mol_type = other DNA
gtgggcgagtcctgattgcagtcggacctgccgccgcggcacttaacagtcggacagcccagcccatggccaccgatgcccccatttcacgcctgaggaagcggaggctcagacgggccaccagcccctccggaggctggcccgggagcgcctggcagcgtcgggtctaggagccggctccctcctgctccctcctccgcgccgcccggggtgtgcccgccgtctgtgtgcaccactgctgagcccagctccggcgccctcgcctctgctgtgggccccggggacgcggggtcaggccaccgcgttggccaggccgctgcaggtaagtgctggacggggcggggcgaggctgggcgggaccctcaggggcgccaagcgctcctggcgaccccctgcggcagggctggggcttgagcctgccagtgcgctgggatggggcgcgaagcgggggtgcggggagcccgccaccccgtacctcttctgggcccattaggggtcccggctgcgggaaggttccgagacaccccctccccaagtccgcaagctcccaagctgcctaggatggagggaaactgggaggagggcagctgggggaaccagaaccggctccaccagtccccagcctagacttgggaaggaaattctttgccagtgaagctcctccctggggtggcccaggagggagctgcaccctggtgggcagccatgggggt

SEQ ID NO: 626 - DNA, 347 bp, Homo sapiens
  source 1..347: mol_type = other DNA
tgtgatcccagctactcaggaggctgaggcaggggaatcacggttgcggtgagccgagatcacgccattgccgagcaaaataaattgtacccaagaggtcatgtaagacttaggttttactatatttgaattatttttacactaacaatagccacttaaagcactaaaatatactcttctaagaagagcttcttgagacctaggtcttagaagacgcgttgaaaaaaatgactggatgatctttcactttttccacgcagcgcgacgtccattgcagtggggccctccctgcgctccgagagagccggcggccagtgggcagggtcacagggcaaggtcccgcgggc

SEQ ID NO: 627 - DNA, 448 bp, Homo sapiens
  source 1..448: mol_type = other DNA
tattcctaatgtccatcagtagtagatgattaaaattgtatcatattcataaaatagaatactatacagcagtcacaaatcatacacgtatctgtgaaacaatgttgaattaaaaaaaccaaatctcaattttgagcaagttttttcatttatatctcaagagattaaaaaattatacctcttagggttaaatggagcaagccaagtattatttaatatcatgctcaatgtggcacgtgcctgtaagcccagctactcgtgtgccactgcaccccagcctgggcaacacagtgatactctgctactcagctcaggtccggagcctgacggctgcgcaagatgcagaggacttggttcctattccagtgctcctccggtaggggcggaggccacaccacgtgacgaggcgttgcggcgggggcggtgccaggtgggctacgcggctggg

SEQ ID NO: 628 - DNA, 627 bp, Homo sapiens
  source 1..627: mol_type = other DNA
aattctgcagttgcagtgcaaaagagtgtggctgtttttaaataaaacttattcatgaacactgaaatatgaatttcatataattttcctatgtcacacaagcttctttaaaaaatgtttttatcataaaaaatgtaaacaaacattattaaaatcagacatctggccaaatttggcccatggtttgcccattttcaaacacctttcacatttcattgtcagccgagataaattagagggaaaagatatctcaggcaaagagacttatttaataattaatggttattgatttattacaattttataaattaatttactaatttacaaataactttctgagctcttacatgtcaggcactgtgctaggcctgttacaaactctggagaactgagttatccccatatggggtcttccgcacccagacacccacccgtgtctgccagcactccgtattcctgtttagtcagttaccagtgtccccacctgtaagatgggggcgccctgccccagtactgcagcctcgcgaccccctggagggtgggggacggtagctcaggcgagagtcttccggctgccccggggagggaggaaatgagccggcggcgggttttcggcggggccaaccc

SEQ ID NO: 629 - DNA, 416 bp, Homo sapiens
  source 1..416: mol_type = other DNA
tataggaatagtcctatacttttttaggtgttgaaagtattgtcaaaaaacatttaaaatatgccattatttttgacatgctgaagtgcagtggtacacagactcccaagtagctgggattacaggcgctttatggtcttgaattcctgaactcaagcagtccacccgcctggacacccagcctggggtcattttaattttaacgtactaatgaaagaagttaatttccttttactaggaatttaatgcaccatttcaaggtcgaagaaatggagatttatagaagtcctgagctctgagtcaagggtcctactttggctgccagccagcggtaagatgcgggccgtacagggagctgggaccaccctgagccagcggccctgcgcatgctcaaccgcagagcacgacgggagagg

SEQ ID NO: 630 - DNA, 416 bp, Homo sapiens; identical to SEQ ID NO: 629
  source 1..416: mol_type = other DNA

SEQ ID NO: 631 - DNA, 534 bp, Homo sapiens
  source 1..534: mol_type = other DNA
tttacaaggaaattaacttatttatttattttttggaaagttactttgaaatgaaccaacattggaacacttgttctattttatggaatgaagtgctgccagattctagaatcacaaataaagctaattgagatatttaaattaaatttgttgtaattttgtcttttaacatcaccaatgacaagaatgttcacagaagcattattcctaatagatgtccatcagtagtagatgattaaaattgtatcatattcataaaatagaatactatacagcagtcacaaatcatacacgtatctgtgaaacaatgttgaattaaaaaaaccaaatctcaattttgagcaagttttttcatttatatctcaagagattaaaaaattatacctcttagggttaaatggagcaagccaagtattatttaatatcatgctcaatgtggcacgtgcctgtaagcccagctactcgtgtgccactgcaccccagcctgggcaacacagtgatactctgctactcagctcaggtccggagcctgac

SEQ ID NO: 632 - DNA, 301 bp, Homo sapiens
  source 1..301: mol_type = other DNA
ggctggtatttcgccatgttggccaggctggtctagaactcctgacctcaggcctaacattgtaattttttaaaagtaccttagtctgtgaatatttacattgtgattggtgtttgtaaacgtgtatatatacacacatacacacaagggctctttttgaacaagtttatgcaatgaactcaatttctgattttgaatcggaaaacatctgtttttctgggcaaggataccctggttatttgctcgcaagtgaaaattgccctggcatacccattcaaatttagtaattgcaattggctat

SEQ ID NO: 633 - DNA, 242 bp, Homo sapiens
  source 1..242: mol_type = other DNA
tcttagacgcaagatttattagacatggcacttctaatcagcttgttagtccagtggtacaggaatgagaacgatgaagtccttcagatgcatgtggttctgcaaaagccatgttgccaatatttacgtactaatttagacaatatagcaaagttttatatgaaaatttatggtaaatgagtttttctgctggaagagacctaaataatccagcccctagattctggagtagccagcatttt

SEQ ID NO: 634 - DNA, 544 bp, Homo sapiens
  source 1..544: mol_type = other DNA
tccccgtcccgctaccagcctgtggatgccggcaggggctggagggaggagggttcctggcggtcaccacctgtcccgccgcacgacagggcggcgatgagatcacacttcacgatggcgcggtgatgtcacggagagatcacgtcaaatatggagtctcgacagggcacgatggtgtcgcgatatggcgcgatggagtcgcgatggtgtgtcggcatcgatcagcgccggctcggagaggccccggctgggatgcaggggagggcccgaagggggctgagctcaccaggctgcggccccgagcggcgaagtcttctcccagcgcgatgctccgggagcctcgggccgctgctcacgccgcgttgcggctccaggctgctgcagctctgacgaatccgcggctgcttcactccgggctctggccacccgagtctgggggctggggctcgagcgacaaggtgcagactgcctctggagagcgggcggcgagaggctgggggcccagatcgcggccggcattgcccttcccgggggaggggcggga

SEQ ID NO: 635 - DNA, 600 bp, Homo sapiens
  source 1..600: mol_type = other DNA
gcagcgccccgaaccccggctgtctgcctggctctcaggggattaggcccaggcccgagagaagcggggttcagcctgggacccaagctgcgcacctgcaaggacagaagcagctggctgccctggccgagccaggggcgccacctccggacccggccagcgcagccgctgacatcgccagcccatggtcctcggcctggcagccagccgcccccggccacctaccggggctcagggccacatagcggggccccggctctcggcggcctccgcctcctcctggtccatgggctcggggacccccaaccttcgctcccctcacccggaggaggaggaggaagaggaagaaggtagtgcgggctccccacccgacagctacctctcgcctcagcctccctggacagcgacggcggccggaaacatcccgcccctcccccgggaagggcaatgccggccgcgatctgggcccccagcctctcgccgcccgctctccagaggcagtctgcaccttgtcgctcgagccccagcccccagactcgggtggccagagcccggagtgaagcagccgcggattcgtcagagctgcagcagcctggagcc

SEQ ID NO: 636 - DNA, 540 bp, Homo sapiens
  source 1..540: mol_type = other DNA
ttgacgtgatctctccgtgacatcaccgcgccatcgtgaagtgtgatctcatcgccgccctgtcgtgcggcgggacaggtggtgaccgccaggaaccctcctccctccagcccctgccggcatccacaggctggtagcgggacggggaggggttaattctgctgctgccgccgccgctgctgctgctgctgcagcctctacccgagggaggtggctggaggggtggggtccccaaaggggcctccaagccttccttcaagcgtactctgcctctgaagaagggaggggaaaggaagcctggggtgtccttttctcccatgtcaggtgtccctgtggagggagatcccagcctccggtgccagggggacagctgagcagtggggccagctcccgcccacccccaggagactggtgaggagagctgtccggctgagcagcagcatgcatggggtgaccttggaccagggtccctatttgcagatccagccccttaaaggggcttctggggggaggtcagtcctgaggagtccacccctccag

SEQ ID NO: 637 - DNA, 386 bp, Homo sapiens
  source 1..386: mol_type = other DNA
cttgcttgacagccagggagtgcctgccatggtaacacaggaacatgtagcctgcgcatgttagtgtaacaatcacacgttacacacagtcactcaacagtctctgggtagcctggcttggcttggaagttttcagcccaggccagaacctaaacacacgcactgacactgtgtgcgcatgagcagataggctggagtcttcatccaaagtctcttgaggtgcttagagactttgctaggccagctgcgagctgcgagcccagaaggcggctctgatcaatgtgggctgaatagccactgcctcccctgtggcagccgctggggaaaagggagagaacatgcgcgcccccggaggcccggcgcgcccccgccactataactggagt

SEQ ID NO: 638 - DNA, 427 bp, Homo sapiens
  source 1..427: mol_type = other DNA
ataaggtccaaaatagtaactatttctacaattgaaacattcccaatttacatttactgttgagcatgataatgactttcaccacatagagtcaaattagaaacacatctcttccaaaaattacagaaatatttttctactttttcttgctggagtgctcaccgcaacctaggtgatccgcctgccttggggattacagatctttaatccaaccatatactatttttgtgaaggatggaagtaaggctcaagttaatttttctccaatctggcttggtagggaaacggctgcctggctacctccacttttaaaatcttagtgtgtaagcaagtgacctgcacagcctgctccggaggagagcacccggcgccgcgcccgctttgccgcgacagttgtacgtcatccgagagcgccgtggaagtcgtg

SEQ ID NO: 639 - DNA, 371 bp, Homo sapiens
  source 1..371: mol_type = other DNA
gcggagagcccccgtcccgggtacaggacatcagccctgagccctgtcccaggcttggagtcccactctgttgcccagactggagtgcagtggtgcagtcttggctcactgcaaccagggcgtgagccaccgcacccggcctcagtgactttagtcaagtataattccaaattgtggtcagagatctctccgagaagagatctgaacagagccccgcggctaccgccttaggggttgtcccggcggtggggaagccattgagggtgacctggaaggcctgggtcaacgcggccccgcgcgggggcgaagcggttccggcgcaggggcctggcgcggggctccgcggaaaaccgaaccggcccacgtgggac

SEQ ID NO: 640 - DNA, 390 bp, Homo sapiens
  source 1..390: mol_type = other DNA
cccggccctctttaaaaaataaaagtgggccgggcacgcctgtgaggggtatgaggcctcccagcgctactcaggaggctgaggcacgagaatcgcttcagtgagccggcgcaaaaaaaaaaagtgtgtgtgtatacacatacatgtgtatgtgtatatatgtgtatgtatatatgtgtgtacatatgtgtgtgtgtgtgtatatatatatatatatatatatatatatatatatatatatattcagtggtaagtgtcaaaatccccacgggaaccttggaattcgtgcccaggaaccctttggcaagtgtcaggctccgctaccagcagctgcgatggaaagccccctctggattggtgcaaaccatctgggtgggacctccactctgg

SEQ ID NO: 641 - DNA, 288 bp, Homo sapiens
  source 1..288: mol_type = other DNA
aaatgtccatcaacatgtgaatgaatatacaaattgtcatatatccatagcagtaaaatggaacaaactttttttttctcctttcttgtgatttacacaacaacataggtgaatctcaaaatacttattccagttatataaaatactataaaatgaaaacttatctatggcgacagaaagtgtgtatatttgtttcaaaactcatcagaccgcacactttaaacgtgtgtagtccgagtagctgggacggagggaggagctagatcgtgcatgctcagtccttcctct

SEQ ID NO: 642 - DNA, 282 bp, Homo sapiens
  source 1..282: mol_type = other DNA
gtcactagagtgagccctactctaataggactgctgtccttataagaagaattgtgagaaaataaatttctgttgtggtactttgttacgttatgccgtagcaaaggaatacaagatgctgtgcctgctgggctgaccacttgtctgctaaggggaaggcatccaagaaagcaagacctttctctctctctctggagtgcagtggcccgatttcggctcactgaaacctctgcctcccgggttcaagcgattcagctgggattacaggcgcctgaatgcatc

SEQ ID NO: 643 - DNA, 439 bp, Homo sapiens
  source 1..439: mol_type = other DNA
ttgtctgctaaggggaaggcatccaagaaagcaagacctttctctctctctctggagtgcagtggcccgatttcggctcactgaaacctctgcctcccgggttcaagcgattcagctgggattacaggcgcctgaatgcatcattcatcagggtccattcccgtggtgccttccgttccactcacagaagtgccctggggggatggcacgtagcccccagagccgttggccaccggacggcctcctcgggtggacggggcagagcgggccagcgggcgcgtgcccgacacgtccaccgggctctgcaccctccgggcgcgcgctcgttccccgacccgcctcgccgcctgccgggctctgtggaccccgcgcccggggccgcgcacgccccctccgcccgccgggaccctgggtccgcgcaccccgcgcccccttccct

SEQ ID NO: 644 - DNA, 264 bp, Homo sapiens
  source 1..264: mol_type = other DNA
ttgaaaagtatcctttggatgtcaaccccaaaagtcatttaagtctctgtagctggttcaaactcgtggaggcagtcgctttgcagccaaggccagggcccctgggcgctggagtgccagggggtcgctcccgcacctctactggcgccctcccgccgggctgcatggcgacgggtgaccgccaggggccgctgccttgggtccccggtgcccccgcccctctcctcggagcgcccccgttccggtccgccccctgggcccggc

SEQ ID NO: 645 - DNA, 472 bp, Homo sapiens
  source 1..472: mol_type = other DNA
catacatttattgtttaatattatatggtaagtactttaaaatggtaaatagtaaatacttgtgttattcactaacatttacaaactgtgtaaggtacatgctgttctctcaatttttcagataagaaaattgaagcccagcacagtgaggggaactgaagataggatattctttctccttttcctctttaaaaaattattttgattaaaaaaaaccgtattactgaaaaattatgaatgattcctcagcctgaataaaatagtatgtttcattaaggcaacaaatatttattaaggacctaatatttgcctgacatccaccatagatgggtggtccggaaaaggcgtctcagatgtctttcgttgagacgcaatattaaagagttttaaacatggaaattactcttttccaaactataatacattttttttttcctaaaaatggtcaattgcggtggtcacttgaccgcct

SEQ ID NO: 646 - DNA, 556 bp, Homo sapiens
  source 1..556: mol_type = other DNA
ctttcgttgagacgcaatattaaagagttttaaacatggaaattactcttttccaaactataatacattttttttttcctaaaaatggtcaattgcggtggtcacttgaccgcctgggtggccctaccccagcgggctcggctcggggcctccgcggcagttcggggtccttcacccgccggctccgccgccagccgcgacgtcgtcgcagacaggcaccgcccccactcgtgcggcgcgagtagtcctgcccctccgcgttgtctccggccggcacggcccggcggggtacggccgagcccgccgcatgtggcccggctcccggacacctccccggcgtcctccgcgccggccgctcctgccccgacgtcgctccggcacggctcggggcccagaggcgaggcgaggacgccgggcaagccaggcagcggaactgacgccggcgagcttccggggcggccccgggcaggtcggcggcggcggcccgcagtcgtggaggagcggtgggagcgtcggcggccgcgggcgatgcaacttccggacgggactcccctct

SEQ ID NO: 647 - DNA, 682 bp, Homo sapiens
  source 1..682: mol_type = other DNA
atacaggaaatataagaggaatttatgattggatatatactatgtctatttggattttgtttttaaaaacaaagacaacacattttaaaaaaatgtgatattcagtttagcatttttattcattaaatgttattaagagtcttcatttaagacatttaagaaaaagaatgttgtttctctcaagaaatttgtaatttggtagaggaaataagacatgtaagaagtatgagttagtatttctgttatacctgaaagtgaatgagcactaaaagactttgtgataacacacctctaagaatgttgtaattaacatgtaatgcagagttctttgtgaggtcaggaagactcgtagagtgttacagttgaaaggaacctcttaagaagttaactaatccaataccttttttatttatagctgaaatccagaaaggttaagggataccagaactccagaatcctgacttggtagtcattaggaagtattttaatctaaaacaattggtaaaattttggttagctgtagtaaaaataacatacatataattttatttatttatttatttatttatttttgaaggaaggatatttgcattacatgttaattacaacattcctataggtggttttttttttaacatgttatcagatactgctttaagatactatctgttgaatagatcac

SEQ ID NO: 648 - DNA, 515 bp, Homo sapiens
  source 1..515: mol_type = other DNA
cagcccaggcctcccagcctcatgggggctggggggttgtcaatgtccttccctagggacgcactggacgccctgtgcaagcacctggcccggctgcaggctgacattgcctgcaaggccaactccatgctgctggacaccaagtgcatggacacacggcgcaagctgaccgtgcctgccagctggagctggcctagccttggaggactgcagcagaggatctcaggccggctgttctctgccccacccagcagggagagggttcttgaacaccctcctgtctatggaggagcaaagatggggaacactactctgggctgggtcagcactcctgggctgcagcagcgcggcctctacctggctgtgtcccagttggcccctggtccgccctcctgatgcttaagggaggcccacagggggcaagggtggcgggaagtgcgcggcgccgcgactccgggccgctgggcggcgctgtgggcctggcggcggagtggaaactctaggccccagggagc

SEQ ID NO: 649 - DNA, 412 bp, Homo sapiens
  source 1..412: mol_type = other DNA
caggctggagatggggtttcgccatgttgcccaggctggtctccaaggtctcggcctcccagagtgctgggatctcaggcctgagcgaaatcctagcctcaagcgctcctcccgcctgggtctctggagtaggcatacctttatcaaaataaaattgtttatctctactaaaaattttttttttaatttgtggtggcacgcgcctgtggtcccagctaactcgggaggcggttcaggctgcagtgagccgagactgagccacagcactccaacaaatgttcatttaatttgtaaatcaagaggctcggccggccgcccctcgcctaccctaaaggcctccggggacgccgcccgacgccgccgcggttgccaagcgaagcgcccaggccgcgttggccgcggggggttgggg

SEQ ID NO: 650 - DNA, 61 bp, Homo sapiens
  source 1..61: mol_type = other DNA
ggcagccccgcaggcctagcccaaagcctgcgcactgtccttgacacggaccatgccaggg

SEQ ID NO: 651 - DNA, 367 bp, Homo sapiens
  source 1..367: mol_type = other DNA
ccatcacctgaggtcaggagttaccagcctggccaacatggcttccagcttgagccaggatggcgccattgcacattgcacctatgctaagcgccatagacttgatctttagttttatcatctggaaaatggagatgacaataataataacttgttaaagtgttctgagcattaagtgaattcatgtctaaagagctcagcctagtgcctggcagagagctggcccagcgtgcagacccccgcgactttgaaaattgcttgtgaataatatctaaattcggaattgcttctcagccttttgactgaaatctccagtgtaatctctaaataccacccagggctggcactccacggacgccatgctggg

SEQ ID NO: 652 - DNA, 269 bp, Homo sapiens
  source 1..269: mol_type = other DNA
cagccaatacacgtttcttttatgcctttactgggcattggctttagcaacttgcctaaaactgagtaggtcattaaatatttttctaatgaagaagccaatagcttctggagctgaatcgcaacagcggaagacgccgaaggctgcggacgccacccagcggccaggatgctgcccagcgcaagctgggctctaccaggcaggcgcgcgcggagcactccggtgcccacgtcggccggaccactagtcccgtggtgccccgcgggagg

SEQ ID NO: 653 - DNA, 395 bp, Homo sapiens
  source 1..395: mol_type = other DNA
tggccgctttctggagctgcttaaagggggcagggccagggtgggcagggcacagctgcccctcctcctccccctccccactctgccccgggctgggcctggcttggcttgaagccctcaccgtggattctggagggggtcaccaccccctcatcgacagacccagggctaggaccacccagtttggagccgggagggacccagcgctgcgcaggcagcaaggctcccagacctgtccccagcccggggagagaaagcgaaaccctttcaggggtctccttgtagaatttggactcgaagctgccctctcagcccccagggtgggaaaggggagtcccagccctgctccccctctcccccagtccccgcggcgggtgagtcacccgagcggtcct

SEQ ID NO: 654 - DNA, 575 bp, Homo sapiens
  source 1..575: mol_type = other DNA
tccccactctgccccgggctgggcctggcttggcttgaagccctcaccgtggattctggagggggtcaccaccccctcatcgacagacccagggctaggaccacccagtttggagccgggagggacccagcgctgcgcaggcagcaaggctcccagacctgtccccagcccggggagagaaagcgaaaccctttcaggggtctccttgtagaatttggactcgaagctgccctctcagcccccagggtgggaaaggggagtcccagccctgctccccctctcccccagtccccgcggcgggtgagtcacccgagcggtcctcaggcgctgcggcggcggacgcagggagctagcgcggcgaactcctggagccgtggagcccgctcggccgtggccgtgggagaggcgccgggaggctgcgggcgcggggctccggggcgggggcggcgcgaacggcgcggacggcgcgggcgcggggggctgggtcccggggcgctgctggggtggacccccccgcctcgaacttggtacgcgccagcgagaggccaggcccagcccgggcggtacaatagggt

SEQ ID NO: 655 - DNA, 317 bp, Homo sapiens
  source 1..317: mol_type = other DNA
tgaaagcatcacagatgacctatgagatgggtcttaaatgaacgcagagattctcaaattttggcccggagtgggtggggctcagactctccctccaggctggttccaaaatggtgggggcagtggcgtcagcaacgcccccgccccttccgccctcctccatctccaggccacccaggcggggggaggggacggccccgagcaacccacgtgaagcgcgtgacgcaaagcggcgggcccaacgctcgcctggcagccaagtcggccggaggcagcgggtctacgccgtcgccgtcgtcggagagcggagacgctgg

SEQ ID NO: 656 - DNA, 384 bp, Homo sapiens
  source 1..384: mol_type = other DNA
gggaaggaggagggtaggaggcaacgcccctccctgtgccccaccctgagggcctgatgaagatatgttccaggaccacctcccgagactcaggcaagggctgccttcctccagtgcggggaggactgcttaggccccaatggtggcttccaaagtgggggtcccagccgggtgaagtctcccaggccaaggggaaccagactcaacctcagctgagacttcacctcccactccccagagaagaccctcactctaggggacaaggcctctatcccagggaactccacctcggggaagatctgactccggaggattgacaaaccctccactccagagagggtcttttcagtggaagagtcccctgccctagaagccccctaatcc

SEQ ID NO: 657 - DNA, 529 bp, Homo sapiens
  source 1..529: mol_type = other DNA
tctgtcagaggtcctggaaccaatcccccatggatattgagggatcattatattcacaaatgctttgtaaactataaagccatgtgtaaaaattagttctgatagttaatctgagagtcccttgcaggttttaagtctgaaattagacctggcagccacctagtgtgcacgggtggtctgcagagcgtgggtggtcactcacctagagtgttgtcatttcaccccaggtgtagtcagataaatgaagttctcttttcagagaagcgcaagtggttggaatttttctgaccagcagaaggactttcgcctggaggacctgtcaccagtgtgaagggacaggccaggctccgcacagggcctggtccatcccttcatcagtgagggctttgctaggggttgctctccagcagcaaatgctgttttcctggacagactatccagtgcagccccagttacctacagctgtggcaccctgtctccagccatgacttggcagatactggctagtctcccagcagggaccatggtg

SEQ ID NO: 658 - DNA, 489 bp, Homo sapiens
  source 1..489: mol_type = other DNA
acacaagcttagacacgtgtgcccacacatggtgactcacacctctgggacaagggagtggggctacggccgctggtgctgctgccactgagcccttctggctcttagagggccccagtgagtcacttgcctgatgcaatccctttaaagggccatctgctggtgcaagaagctgattactgtaaacctccctggtcaaggcttcagggatctccaggttgaaggttgccatcctcggacttttattggccgatcttccaaccgctggggacttcaacctcggcagggggagtctgtggggtcgggcggggcggtgcctccgtcccagcctcgccgcagatatagatcagcagtaagtaccgccccattagagcacaggggcctcttgcctgaagtcttccgcccatcgtcaagatggcgccccaatccgaaagccgtggggctggagcgcaggcggagggcggggcccgggggggcggggccgcggct

SEQ ID NO: 659 - DNA, 411 bp, Homo sapiens
  source 1..411: mol_type = other DNA
tccggaatcccttgaagcccttcaactgagttgcaaaaagctgtttctataactccgagtcctcacagtgatccccgcgttatccctgtttggacagaaggggaagattgggcaatttgcacatagtcacccagggattcaaagccaagttttttggaatccatcagacttgctcaagtgctccatgcagagtgtggcacactgcctatgtggagatgacaaatgcacatacaacacaagcttagacacgtgtgcccacacatggtgactcacacctctgggacaagggagtggggctacggccgctggtgctgctgccactgagcccttctggctcttagagggccccagtgagtcacttgcctgatgcaatccctttaaagggccatctgctggtgcaagaagctgatt

SEQ ID NO: 660 - DNA, 332 bp, Homo sapiens
  source 1..332: mol_type = other DNA
actttccttgtaactttgaaggctaaagcagaggggacttccttatcctgccagctaaaacaggatggtttggagatctagctatctctcactcttctgatttatcggaatatcagataaacaacttagtttccacttggtgatgtagaactttagcatacagcctcccaagtaggtgggaccagaggtattacaggtgtttggctaatcttctgaagaaatttttcagctcagggagccccatgccggagcctgggaaggagcctggcccaggtcgccgccgggatttgcggagcacgagccccgcgccgcgaagcattccgtgacgcggt

SEQ ID NO: 661 - DNA, 489 bp, Homo sapiens
  source 1..489: mol_type = other DNA
cccctatctttataacaaagggtaggttgcaactaagagctaggcaccaactgaagttaggctcctacccggaactgagagagagcactatcttccttagagaaaaacattccggggttgtaaaactggcaagaggtttatttaccttttaagaagatttacattcatcgctacaagttttctaaagtaaatgctctcagaaaagtaggaaggagtcttttccctttttgcgccagggaaaattaaattttctttttcccgtaaagatttactaaatgctcactatataccaggtggtcttatcttgctccagaccaggactgtgcgattccaaactcagcgactttagtctccaggctacgaggctgtcccatccttgggtagaaggctaccgcaggcgccatggacctctggcccgagtgccctccaaaaagtggcattttagaatcgatcacgcgcagcgggaacccggtctctgagctccgcccg

SEQ ID NO: 662 - DNA, 334 bp, Homo sapiens
  source 1..334: mol_type = other DNA
acctgaggtcaggagttccagaccagcctggcgggcgcctgtaatcccagctactcgggaggctgaacttcccagagcccccaggcgcatcctctgggaaccttcatggagtatgaaagtctaaaagaaaagtcagttaccatttttattacgagccgtgattccaacccaggtccgtcaggaacctgaggccccgcgccagcggccggggtcccaagcgccgggctggctgtgtcgagaccacccccagccctggcccggccctcgccccagccgcgcccaacgccgcgccggcctctggctcggaccaatccccccgggacggcacggcgtt

SEQ ID NO: 663 - DNA, 589 bp, Homo sapiens
  source 1..589: mol_type = other DNA
tgaatacccaggattctggttatattctagaactacagccctggtctgcagcatcacacctaaccttttttgggttatgaatccaataaactatgactttctcagaaaatgcaaagaaaattatttgtagttttagaagaatcatgaatacagacaataaaagacataaaatgtagtctatttcactcaattacaaaatattcagtgttgcagaaccattgtgggtaaacattcctaattatgggctgagtattgggttacacaattccctggaacctggaacacacccttctgagtactgtgagccgggtgagccttccagccagggcctgcctccaagtgatgctcccccagggcagggggcataaggatggcacccagccaggtgggagcctgggccctgcccagcctcaaagctttgagctcaggaggcaggggagggggacatcgttgccacattccccagcgcaggaaggctgcccgggcctcaccagcttccctcacaggctccttcctgggaggaaggggctgcctgtgccctcgaaggcgcaagggaaggtgttgcaatccccagcccccgggcctgtca

SEQ ID NO: 664 - DNA, 596 bp, Homo sapiens
  source 1..596: mol_type = other DNA
ttgaaaaaaaattattattgctaataaacaacgttgtttttctttttcagtttctctttattctttctcaggagaatgagggagggggcaccagcccttcctgcacagttacgggagagggctgagagggagcgggcccggcgcccacgcccccctacatctaaggcgtgagcggtcgccccaggacctgtgcgcggtcaagtccacagggggccccagccccaactctgctgccaggaggaatggggttggggagggaagccggttcccgggtcagtctcccgctgccaccgccgtccagccagcgcccgccgcgtgggagccgcgaggccaggctccgcagacggcgggctcccggtctcgctgctcccggcgggcgcgtctcctccagctggtccggccgctgggctgccgccgtctcccagctcgcggtgccagctctcgcgctccacgcctggctcccgggctccgtgccctcgcagtagaagggactggggccgggagagtcctcgttctccgggcgtccccctacaatggggccagggtccccttccccgccccccgcgcaggtgtgagcgcgcgagtgtgcgcctcgg

SEQ ID NO: 665 - DNA, 295 bp, Homo sapiens
  source 1..295: mol_type = other DNA
gctctccatcctggttcgagtctggggcagtttagcctttgcagaatttctcaagggtaacatcagctgtgctcatgagtacagatttcaggaaaagtgtacctggccccgggggtggccaacctctgtgtgagcacagtgtgtcttgagggggccaaccatggacctgcctccaaggtgcgtggaccaacctcccctggtaccgccgtccgcacctcggtcatcccgctcggagctcgtcgccgccgcagccttgaggctccgacccccgcttgggccccgtccggcgcgcagc

SEQ ID NO: 666 - DNA, 402 bp, Homo sapiens
  source 1..402: mol_type = other DNA
gctctccatcctggttcgagtctggggcagtttagcctttgcagaatttctcaagggtaacatcagctgtgctcatgagtacagatttcaggaaaagtgtacctggccccgggggtggccaacctctgtgtgagcacagtgtgtcttgagggggccaaccatggacctgcctccaaggtgcgtggaccaacctcccctggtaccgccgtccgcacctcggtcatcccgctcggagctcgtcgccgccgcagccttgaggctccgacccccgcttgggccccgtccggcgcgcagcggccgcgggggcggggccgcgacgcgaggagcggagcaggaaggggcgaggcagccccgcccccggggcggtctcccgggacggccccgccccttgcccgcataaag

SEQ ID NO: 667 - DNA, 348 bp, Homo sapiens
  source 1..348: mol_type = other DNA
tgaaaacaacgtttacaccttggacttaacgataaaaacacatattaggtgatttacagcaaatgtattaggtagattctattactcaaaacacttatcgatttggcaccactgtgaagcaaatggattcgcgagctcttccggagtcgagcgcgttttactccaggtgcagagtgaggaaaaccgcgtttcattcactgagccggcggcgagctctccgagaaggaccttcgagagccccggccttagcgaagctcggcacggcgctgcacgcgtctccggaagccgcgcgcgcaggcgcagagcgggggggcgccccctggcggcgcagggaccgcccccaacctc

SEQ ID NO: 668 - DNA, 464 bp, Homo sapiens
  source 1..464: mol_type = other DNA
gagaagaaagaaacaattattccttttgaaagctaatgatttgaaaagctaatgatttgcccatgggtttctatttccaaatgtaaatgtaattatagtttgcacacaattttgtattttatcgttaacaagtcagggtttttaaagtttgtaaatggtttactaatggccacataacacccattaattattgtttccacgttttgtaattactaataatgtggcaacaaacagccttgagaggtttgctttttggagtgcagtggtgagatccctgctcactgcagtgatcccgagtaactgggattgcaggtgcgcgccactgacctcagtgatccgtcagcctcggcctcccaaagttctgggattacaggcagccagaagtttgtttttgaaacttgaaacgctgcggccacacccactagggagcgaggatttctgggagcctgggcaccccggaagcg

SEQ ID NO: 669 - DNA, 350 bp, Homo sapiens
  source 1..350: mol_type = other DNA
tcatttagccgggcagtgagccgagatcacgccacagagagagactccgtctcaatttaaaaatcaaaacaagcccctccttcacctccccagaacaaacggcagttttgtgtgactgtcctctgccagcctacaggaggaaaagtaaggcttacagaaggatgttccttcaggaggaagcagccagatgacttcctttgggaatcatgagaagtcaggagatgactcctgtttttcaggtgacaaaattggaacttcaaatcgctagctagacggagcatagaaccccgccccacttcgaagctccgcccaggccaagaagcgcggggggttccatggtgacggcaaac

SEQ ID NO: 670 - DNA, 341 bp, Homo sapiens
  source 1..341: mol_type = other DNA
tgttacttttttagtctatgtactaaagaaaagtattcattttttttctctgaaattctaatttaattgcctaccaataggtgatatttgagcttaggattgaatgacagctatgcaaagaaaagtttgaatcaatctcttcattctaagagtcaaacttaagcttgtgccactggcctgggaagaagcttctactgggagcctggccgcgcgttcaggttaaagctggagcgggctggggctccacgcagggcgacgcctaggcggctggagcgggggcggagccaggagggtgacggcgcgcgccgcgcgttcacaggaagtcgctctgaggccgagag

SEQ ID NO: 671 - DNA, 409 bp, Homo sapiens
  source 1..409: mol_type = other DNA
tttcccaatctgaagtgaagctggagaacagctgtttgtcttcatttcattgaaccctcagaacagatgaaatagagccagacatgaatctaagtgttattgtatgatctccctcaccttggtatttcttctgaactgggaagatgcacagagtgtggtcaagaccaccaggctctgtggagcctgttccttgtcactttccaggttcctgatggggaaatgcgtggaatccccggggcgcggggaggggtctgccccagggtcctggggacttgtccctccgccagccccgcgctcggagcgcagagcgccagcttcgggcaaggacgtgtggactcccgggccggcgctccagtccaggggggccggctcgcgggggggactgcgaagggggggattccctccctgg

SEQ ID NO: 672 - DNA, 608 bp, Homo sapiens
  source 1..608: mol_type = other DNA
ttcatttcattgaaccctcagaacagatgaaatagagccagacatgaatctaagtgttattgtatgatctccctcaccttggtatttcttctgaactgggaagatgcacagagtgtggtcaagaccaccaggctctgtggagcctgttccttgtcactttccaggttcctgatggggaaatgcgtggaatccccggggcgcggggaggggtctgccccagggtcctggggacttgtccctccgccagccccgcgctcggagcgcagagcgccagcttcgggcaaggacgtgtggactcccgggccggcgctccagtccaggggggccggctcgcgggggggactgcgaagggggggattccctccctggtgctcgcagaggactggcccctctccgggctgggagctccggccgagcggaggcgcgacggagagcaccagcgcagggccggagcgaccggccagagtagggcatccgctcgggtgctgcggagaacgagggcagctccgagccgccccggaggaccgatgcgccgggtggggcgctggccccgagggcgtgagccgtccgcagattgagcaacttgggaacgggcgggcggagcgcag

SEQ ID NO: 673 - DNA, 323 bp, Homo sapiens
  source 1..323: mol_type = other DNA
gctgagtctcaaggcgggcggcgactggacggccagaccggcgagctcttgaagcaggctcctgatgggcaccagctagaagtcctggcaagcctggaccttcctggaaagtccttaacgccctgggcagtgggtgggggtgacaccccagtctgctgggtgcctgaggatctccatcagtcagatggccaagatgagacgggatgacaacccgtacctcatgtaggctgtgagcccgaactccctgggcacctaggacgtccacctacacaatgttccatggcggcactacatcgcgactcagtagccaggcaggcccgcgg

SEQ ID NO: 674 - DNA, 500 bp, Homo sapiens
  source 1..500: mol_type = other DNA
ccccatttttcatagagaaaaatgaagtaaagtggtcatgtcagatctcattaaaaggtgacatctgagcgagccctttctgaagggtgtcacctaaccccaaggggctcctggcctccgcccagggaagctctccagctcgcgcagagccttggggagccgcaggatctcgatgttgtagaggttatccacctccttgaggaggttctgacgggcgggcgaatctgtgcagctcgtgtccccacccgccagcatcccgcgaccgccccaggaggccgcgacggcctggccccttaccttcacggtcgaagtctttcagaaaggaggcgagcttccgcctccgtaaggagtttactgcccttcctaggagccatggcgctcggcggaggctgcggggagcgccaggcacgtacctgcggtccaacctcgctgtgccagtgagagagagcgggtgcgacagcgaggccgccgccgtcgcgggtacccgccctggccggctg

SEQ ID NO: 675 - DNA, 492 bp, Homo sapiens
  source 1..492: mol_type = other DNA
tccgacaggaccgcggctcggcggggctcgccgtctacacgcccattccccagagctgcctcctgccctgggctccctggagcctggtggccgcggctcatgctgcagtcaccgtgtggccagctgccaagcgccactacttgcacctgaagtcgcagccccgcgctgcgcacccagtcgaggcgccaacacgcgaactgggcgggagtggccggcccgcgggggagcgaggaacgacagggttccccccactcgctgcccagactggccgcgggatagcgcgcccgccggggctggccacttgcccgaagttcggcctgaggagcttggggccctgaggagcgccgacgtaggcagccagctcagtcagagggtcacggcggcccctcggctactcagtggcagccaggccaggccctccagagcttggggtataggcctgccagccggccagggcgggtacccgcgacggcggcggcctcgctgtcgcac

SEQ ID NO: 676 - DNA, 388 bp, Homo sapiens
  source 1..388: mol_type = other DNA
gccgaaaggggggctcccgaccttcgcaccatcggttcggtccccatccaagtcccttgatgactcactgggggtggacaagaccccgcccccccctgaccgccccgcccctgtgccgcctcagggccgccgtcggcgccgcgggacctgcagtacagcctgagccgctcgccgctggtgctgcgactgcgctggctgccgccggccgactcgggaggccgctcggacgtcacctactcgctgctgtgcctgcgctgcggccgcgagggcccggcgggcgcctgcgagccgtgcgggccgcgcgtggccttcctaccgcgccaggcagggctgcgggagcgagccgccacgctgctgcacctgcggcccggcgcgcgctacaccgtgc

SEQ ID NO: 677 - DNA, 362 bp, Homo sapiens
  source 1..362: mol_type = other DNA
ggctgaactctgccaggattgctccaccagtcccctggggtgggcggagtggggtgatcaaaaggggaacccccgactctgagcagcaggagcccagcctcggaagcgcgttggtagggcaggaccccgtccctcccgggctggctttaggctgcaagtgttgctgcctccccgagggtcgcccctcctagcaccttgcctgacttctcaggaatgaggagctaaagccctgccagctcccacagctgcccccacggtttggagatctgcaggacaccttcccaccctctgctggcggggattggttggcatcccgcggcggtgtgagcggtgagactccgccccccgctggctctggggtc

SEQ ID NO: 678 - DNA, 429 bp, Homo sapiens
  source 1..429: mol_type = other DNA
aataatgtcaatagcgagtgaaaagcttattatctacagactcactaggaagtgagtgtcagatggggcctgtcctctggagcccagaatccaggaagaaaggcgcatcctccctgactctaggaggttctcccaggagagaccgccctgcaattgtatggaacacccggcaggctgggcagtgcagcgagctctggagagtgcgccctgacccggggtccaggcccggtcagtgtgaccttgcgcgagtcacggtcgtcctccgcccgccaggccccggacggcgtctgcagggtccgattcctggggatttcccgacgccccttcccccgaggttcaggggctgcctggggtgccggggttggggagagaaccaccgacgcgcgcttctttcccccccgcgccgcctctcccgcgctccggaaggcc

SEQ ID NO: 679 - DNA, 535 bp, Homo sapiens
  source 1..535: mol_type = other DNA
cagggtcactggtcctggcagggagcccctcaggtactctcacacggtagactagcagggctccagaggcgcacccctggcttgacgcccatgtgcctctggtctcagggactacaacagctgcaccgctgtgatatcatgatagtgggggcctccccagcacaaatacgccaagggaacagggtccctgcctttctcgtgtgttgctgcttcccagcagcatgtagggcccggggcaaaacccctcccgcggtgccgcccctagcggggccgggtcggggcggccttacctgtagacgtcggccacgcggccgaggcatacggccagaggcttggcctcgctgcgacccttgaggcggtacacagcgcgcagagccgccgagcagctcgccgcgcaggccaggccgtacagcgtatcggtggggacggccaccacggcgccggcgcgcagctcggccacggcggcccgcagcgcctcggtccagccggcgcgctccgggctcgcggcctgcacggccccgctccccgggagccg

SEQ ID NO: 680 - DNA, 649 bp, Homo sapiens
  source 1..649: mol_type = other DNA
ctggcccctttactgaagggagtcccctagggctccgcagctccatcgccagcatcctttggaaagccgcctctggcggagacagccggctgggggggcgttttcgaaacctctcaccagatttcccccctccagggtaagctagggcttggccagcctagccagtgggcagaccccaccccaccccagcccagcccagggtgggcactaaccccgccaccagccggctccgggcgccggcggcccagctgccgtaacatctcctcgcaggctgcgatggtgtccaggagctgccgctgccgctgctccaccgcgtccagcagctgctgggcgcgctcctcccggggcggctgtgggggtggcctcccgccgagccccagccccgccttcccgcggtccacgccggcagcctccctgcccgggagagagcgagagacagacggtcagggccggcgcttgcgcggggccaagccccttcctcccgccccgacgggccccctctcacccccgtgaccagtctgagcccgggccgcccccctccccagcgctgcgttagggcttcgcaaggctgcgccccgccagctgcccggcgcagaggcggggccgagtctcctggaccggaagctggctgggagcgtcacttcctccc

SEQ ID NO: 681 - DNA, 673 bp, Homo sapiens
  source 1..673: mol_type = other DNA
agcagggctccagaggcgcacccctggcttgacgcccatgtgcctctggtctcagggactacaacagctgcaccgctgtgatatcatgatagtgggggcctccccagcacaaatacgccaagggaacagggtccctgcctttctcgtgtgttgctgcttcccagcagcatgtagggcccggggcaaaacccctcccgcggtgccgcccctagcggggccgggtcggggcggccttacctgtagacgtcggccacgcggccgaggcatacggccagaggcttggcctcgctgcgacccttgaggcggtacacagcgcgcagagccgccgagcagctcgccgcgcaggccaggccgtacagcgtatcggtggggacggccaccacggcgccggcgcgcagctcggccacggcggcccgcagcgcctcggtccagccggcgcgctccgggctcgcggcctgcacggccccgctccccgggagccgcaacagccgggcgccgggggccgccggagcgggactcggcgggcggaagaggcgaccgctccgggagccagcaggcccctcgctcaacacgctggcagccaccgccggagacatccgcccaggcccgcttccgggaggaagtgacgctcccagccagcttccggtccaggagactcggccccgcctctgcg

SEQ ID NO: 682 - DNA, 497 bp, Homo sapiens
  source 1..497: mol_type = other DNA
gccactctgaatattcgagagaagcagtggcagctgggaggatctaacagctagatcctccagggaaggaatcgcttcctgggtacgaatgcccactacttcaactggcccgggcatgagtcccgccgtagccgcgtcctcttgcaggggtgagaaggggaagaggcggcggcgtcctctccagctgggctccggggtcccggcaggagaaacccgggaacgtcgcggccgtccaggctcccctggcgggttggagccagggttctgactgccaactgtggtccttcccgctgcggctgtggctgccagggcgagggcggtcagcggtgccgcgagggcgacaccctccgggccccgcgtggccaccccgggcgcttccccacgcggatgaacccacctcctgggcgccttcccctcggtgaattggaggctgcagcagaggcgccagggaggggcggatcctctgtccccaccttcctccggaaagaggaagcgga

SEQ ID NO: 683 - DNA, 344 bp, Homo sapiens
  source 1..344: mol_type = other DNA
acccggctaaatttaaaaaaatttttttttagagatggggtctcgacatgagccactgtgcccagtccctgccttatcttagatggggaaattgagtcccaagggaagaaaggtcttcctcaaacagccctgtgtggcagggagtcccagtgttgccacctgctagctgcaggacttaatgtcaaaaacctatccaaggctcagtttctccacctggaaaatggggagaaaataaaaatgcattatattcttcccctaagataaaatgtgaccatcttccttctgggtgggaagctctggccccatgacctagagggcccagtgtaccccagggcctaaggggt

SEQ ID NO: 684 - DNA, 526 bp, Homo sapiens
  source 1..526: mol_type = other DNA
gggctctagacccgagccctccaaacctggactctgggacttaggccctcttcaggtctcccctgggaagttgacctgccccaccccatccccgcggttgaggctgtgggggcagcagatcaggagcccactgataaggggccctagggtacagggtgctgcccagcaggtcgccggcagaggggtgagattggctcatcccccttccagattctgcaataaagcggaggctcagaatctctgcgacctcaccgggccatggggtgggaagtctctccccatgaaggggatccccgccacagctaccctccctccctgctggcagagggccctcgagcaaggacctggttccgatccccagtctgggcccagatcccaaggattagcaagggcggcccaggatcctctcgcggccgcacgttttttgccaaaaaaggcaaggatgcagctgcacacgccgcgggaacgattccatgaatgggtcacgccccgtcccccgccaacagtgattcaagtcaagggtgga

SEQ ID NO: 685 - DNA, 310 bp, Homo sapiens
  source 1..310: mol_type = other DNA
ccgagtagctgtgactggcgagactgagtctcattctgtcgcccaggcgcgattctcctgcctcagcctccggagtagctgggactacaggcgcctgccccgcctcggcctcccaaagtgttgggattacaggcgtgagctaccgcgcccggcctcacatgtgaatttttttaaaaacaccaagaaagagaaaacgttctcataatttatgccgctgaacctcaggttcttgggttgtggccatctccataacatggactttaagtcccggggcacttccggcactcgcggcctgatgcgcaacgtgggg

SEQ ID NO: 686 - DNA, 517 bp, Homo sapiens
  source 1..517: mol_type = other DNA
ttgtttccacaaattaaggacctggaggggcctcgtgtccctagcaggcgccagtcctccctcacggacacagggaggaagccagaggctcagacaccgcagaggtcccctcccctatcatggggccgaggattagggtctcttttgctactcaaagttgtggaataaaaccctggaggggtcctctcccatgttttcagagaacaccttggtgcccgctgacaggctctcctccaggctggattaaggccgggctgagtgtcacccctgccgaggaggccagaggactcccccagtggaccatggtctgcggggtctcgtgtcgccggcctgagatggaatacagcagtctccctctggcagctggggacaggggcggggtcccggccgcttgcgggcgggaggagggggccgggccgactggcggccggtgggggcggggtctggcccccgcggcgggctggggggccgggggcggggtccgggcggggcgggcccgcgctcacttcctcgggga

SEQ ID NO: 687 - DNA, 516 bp, Homo sapiens
  source 1..516: mol_type = other DNA
ttgtttccacaaattaaggacctggaggggcctcgtgtccctagcaggcgccagtcctccctcacggacacagggaggaagccagaggctcagacaccgcagaggtcccctcccctatcatggggccgaggattagggtctcttttgctactcaaagttgtggaataaaaccctggaggggtcctctcccatgttttcagagaacaccttggtgcccgctgacaggctctcctccaggctggattaaggccgggctgagtgtcacccctgccgaggaggccagaggactcccccagtggaccatggtctgcggggtctcgtgtcgccggcctgagatggaatacagcagtctccctctggcagctggggacaggggcggggtcccggccgcttgcgggcgggaggagggggccgggccgactggcggccggtgggggcggggtctggcccccgcggcgggctggggggccgggggcggggtccgggcggggcgggcccgcgctcacttcctcgggg

SEQ ID NO: 688 - DNA, 448 bp, Homo sapiens
  source 1..448: mol_type = other DNA
tgtcagccctcttcttgacacagatacctcactaaaaatgtagatttcctttgtaggtgataaatttatttctacaaaaggaactcctgtatctgcagtttccagagaaatatatattttggggtggcatattctggcctcccacagtcatattggagtgcaatggcgccatccgactcactgcaaccaagtgattgtagctgggcaggctcctgacctcgtgatccgccctgtaagtgactgcacatgcgcacacgctaagcccgcgccagccacgtgttcccaggtgcccacgcgggccaagcgcgaaggcgagatccgctagcgaataagaactggctcttatagagtcacgagactatatctgtcccagaagcagcctgcggtgactgcctctgttaaatgacgtacttcctgaaagccggctttctaaaccgccggcggctag

SEQ ID NO: 689 - DNA, 314 bp, Homo sapiens
  source 1..314: mol_type = other DNA
tcctctagatttctcggaaagaagataagatgttctagccttcccacataatatttcgtagccctgaaggcaggcaggccatagcggtgctctgggaggcgggccggggcggagggctgagggcccgagccggggctagaggcgcggccgggccgccctcctcgtgactcctcctcggctctgagtcaggtgattccggcacgtgacggggcaccacctaccctgctgctctcgagtagcagctcgggcggccaataagcggctgggcttcggctcggggcctatgagagccgggctccggggggcgggccgga

SEQ ID NO: 690 - DNA, 398 bp, Homo sapiens
  source 1..398: mol_type = other DNA
ttaacaatacccaccctacaggggtgttgtaaggattaaaatttaaaatacccgtgttttctacctcccgggccctgcctccggacgccaggacagaggtgcggctccgacagccagaggggcgggcatacgcagcctccctcggctcagcctgctactggggatgcagagcgtcctggtcgccatgaccggccggtggtttgcaagtgcgcaggcgcgcgcccccttccgcgcatgagcagtgctgctccccgccagtcgcggtctccggcgccagctacgccgctgccgctgtcactatggcccatcgcgcgcgcggcggaggcggggttgccggactcccagcgccttcttcctgctcggctcccgggctctggccactgacccccggtgtctcc

SEQ ID NO: 691 - DNA, 676 bp, Homo sapiens
  source 1..676: mol_type = other DNA
gtcaaagtgagaactggagagtacgtctcagtttcgtaaatgaccggagctgggtcccagggggcggaggtcttgggcggtgccaccgggcacctgcctcccggcaaccgcgtggacacagaggtcggggtccccgcgcgggccgcgcctgtgcgctcgcacggagggacggagcgcaggcgggccccggccgccgccctcccgggcgtccccgctaccggccacctgagaaccggggagggggcgggggactgggcgcagccctgctcaccttctgcgctgcgccggagtcccatgagcagaatcctcggcttggagctgtcagcgccccccggacagccgaagtcctttggaaacgaatcggccgcgccgtaactgccggcgaggggcgtctcctccgccccgtactgcagggacatggtgctggagccgccgccgcccgcgccctgacaggccaggccaggccgagccaggccgccgcctccccagtccgcctccgccgccgccgccaccaccgccaccgcccccggcagccgccacagtccggcccgccccccggagcccggctctcataggccccgagccgaagcccagccgcttattggccgcccgagctgctactcgagagcagcagggtaggtggtgccccgtcacgtgccggaatcacctgactcag

SEQ ID NO: 692 - DNA, 437 bp, Homo sapiens
  source 1..437: mol_type = other DNA
tttaaatgatatcctttcgaatgtaactgattttgggaaaatcacatgttcagaatttctcttgaagagaccacggaacacaatcacgtaagtttttctagactggcatcctgatgtgtcttgagtataatcacatgttgctacctagtaaataaaatcttaagaagatccggcccggattggactcgactctactcttaacaatacccaccctacaggggtgttgtaaggattaaaatttaaaatacccgtgttttctacctcccgggccctgcctccggacgccaggacagaggtgcggctccgacagccagaggggcgggcatacgcagcctccctcggctcagcctgctactggggatgcagagcgtcctggtcgccatgaccggccggtggtttgcaagtgcgcaggcgcgcgcccccttccgcgcatgagc

SEQ ID NO: 693 - DNA, 659 bp, Homo sapiens
  source 1..659: mol_type = other DNA
ttataaatctttaaaattttgcattttgatagttaaaaaataatatttcacttaaatatgtattctctgttcgagtttattaataatttatgagttacacatatgtaattcagataacacataatatagaaacatgaatatattgtgcatgtatgtgtgcctatacaaatatatatatatataaataatatatatataaaaatatatatgtaaatatatatatatatatatatatatatatatatatatatatatatatatatatttgtccctggtgaaatgtttgtatttaataatgacctaaaatacaatgtaattgttaataacatatctatgaaatcggacatgacccatttattaaccaagaagttattatctagtaagaaagacttttttggttctagaaacatggtttattgcacaaaaaacaatgacattttatcctgtcattttaaatttgacatctctgaattatggaggaatcattcactcagtaagcattctttatctgtgctgtccaaaaaagcagccattaggtagatgcagctctttacatttttattaaaattatttaaaattaaaaattcaattgctctaatgcaagtgttcaatagctacatttggctactggatagaattgttgcagaagctgttttaaa

SEQ ID NO: 694 - DNA, 430 bp, Homo sapiens
  source 1..430: mol_type = other DNA
ttttcagtcttggagacccagtttctgttgatccggggtgaactcaaacacatttaagtctcttcagatgattctgatgtgaggccaggtcattatcagtggaccactattgaaaaaaaaattctacacgaagcagtgaaagccttttttgagaaatgcccacaaattagggcctgggccaactgtccttgaattaagggggaagtggctcagggtcactgtcaccatcaacaaagatgatgtgtttaggataatacaagatacaggatgaaatttctgcaccattgtgtattattattactattacaaatactataatagggtacacaaatatatgtaatatgttaaatagctgtggggcggcccagactctggtctgagattctcttttttgccctagttatttacctgtaaaatgggaataataaag

SEQ ID NO: 695 - DNA, 436 bp, Homo sapiens
  source 1..436: mol_type = other DNA
tcatgggtacagaaaggctttatcctttcttttctgttgaaaatttccacaatatcaaaagcactttacagctggtattgctgtaaaggttctcaacgttttaaagtaacatatccctttgatgagctgcttaaggtatgggtcagctatctcaatttcatggggttcatggacttgctaaaggacaagagagaaggaggtttttggagtcaccagacccctcccccacgcccgcgcagcgcaggtgcgaaaaccttaggggccacccgggcgcgacagccccaaagcgggggggatgggaccctggttcagcagggggcgccccgggccgggccggcactgaccagcctcgcagagccaccctcttccggcctgcccccctctgccgggcgatggtgtgcgcccgtgacgtcacagaaggcggggccagcgccgc

SEQ ID NO: 696 - DNA, 269 bp, Homo sapiens
  source 1..269: mol_type = other DNA
atgtcatctacgcgatgtcagcctcccgagtggctgggattacaggcatgccaccgattacaggcgtgaagtagagtaggaggtcagggaccccgtattctcaaaatgctttgaatgaataatcagagctggcaaagctatttcaccaggggccatggtgtcaccaatggcctgccaccggctccctggcgccagcccaggagcaagactgccaagcaggccggcccagcccagctgggaggggatttcctcagcctccctcctcctgg

SEQ ID NO: 697 - DNA, 252 bp, Homo sapiens
  source 1..252: mol_type = other DNA
cgccaggctggagtccagtggcgcgatctcacctcacaggcactcgctgccatggtctccaggcctgagccactgcgcccggctgggggcctacatttgaccccacgtggtgatccatgtgcttaaccactacaagaactcactaatggctaggccttcccccaaggtgctgggattgcagacgtcagccaccgtaccaggccaacgggctcggttgaaggtcggcttccggcgtcgcgctgcaaacacggc

SEQ ID NO: 698 - DNA, 656 bp, Homo sapiens
  source 1..656: mol_type = other DNA
agcataattcctgaaaacctgatgcagaaaatcagattttcttctaagcttgtaatgatgctttgcaaaggtttccttaaggcttgaaatagtattcactattttccatttagctttaaagcatactgtattcagaagttgatatcacaatctttcttttaggaaaacaaattagcatgccaagaatatgaatttttaattgagcagaatctcttttaaaaaaataaagtgacctaacactttccattaaaagtgatttttatcccaatagaaagtatattggtgggaggccaagactcaggagttcaagacagcctggcaaactgcacgcctacccagctactcgggaggctgagacaggttacagtaagctgagatcacactgttgtactccagcctgggcgagtgacttatatcaagacaccagtctttagcttgatatttctgcttttctatttttaaaatccttttgtgaaatatataaaaatgcaaaattgtgagagttaacaattcttctgtagctatcaattgtcattgtctgaatacagtcgaaaaacatagatctgctttaagacatatatattaattaagtttcctttggattctcagcagttgcggctggtccgtattctgcgcagcaccgtgaatttttagtg

SEQ ID NO: 699 - DNA, 652 bp, Homo sapiens
  source 1..652: mol_type = other DNA
gaggatgaccggtgaatctgagaacttcccggaagagaggctggaaggtatcttcccttttcctctaggccctgccatagcgtctagaaggagccctttcctggcctcctggccgcccaggacaactctgggctcgagtcagatgcggtggccacaacttcattttgggggtgactgccacctctcagaagtgtaagtattcttgctgaggatcaggccacaaccaccacgactaacttgatgtgtctgctgcctccagaacaccaggaggcaggagcgcgcagggttgacccttgcggaatcccgggcatcgaagcggcgcctctacaggccagcagcgcccaggcgacccagggacagacggggactcctggcttccccgcggggcctcccagggcacctgcccaaggccacccagcgcgcggcagccgagacgcagagccggacctcccagccgtcgatgaaggcggcgaccgcctagggccttcccacggctcggcggcgcgtcaccgcgggggcgagggggcgcctgggcgcccggagctgcggcgcaggaaagggccctgggaaagggcggtggcggcgcccccgaggcggggccggggcggggccggggcggggcctgacttcccgactgggagccttagccgcg

SEQ ID NO: 700 - DNA, 424 bp, Homo sapiens
  source 1..424: mol_type = other DNA
cacaggaacattctgtcccccagcaagcaggccttgctgtggggcctcaggtcctggcgggtaaaaaggaaaagatccaggatgctctcatgcagcttcctttggagccttaggaggaggatgaccggtgaatctgagaacttcccggaagagaggctggaaggtatcttcccttttcctctaggccctgccatagcgtctagaaggagccctttcctggcctcctggccgcccaggacaactctgggctcgagtcagatgcggtggccacaacttcattttgggggtgactgccacctctcagaagtgtaagtattcttgctgaggatcaggccacaaccaccacgactaacttgatgtgtctgctgcctccagaacaccaggaggcaggagcgcgcagggttgacccttgcggaatcccggg

SEQ ID NO: 701 - DNA, 736 bp, Homo sapiens
  source 1..736: mol_type = other DNA
ggcgctccaggtcaactccaggagccttcccagtgagtcagtcgagacgtttccgcggggattctcttggcaggcctgcaccacaggtggctcccgagtgctcgggaagggccccagagcttctggcccagctggaggcaggaggcggagcctcctccgcaaagctggatcagtaccggggacgcacagctagggctggcgggggcggcccgactggggcgctgcctgggctcacgcgggagccaggtcgcccgcagaagcgcatgcaggggccacgggggccaggaggcggtgaggggccgcggtggccggaacccgggccggctgctgcgggcagaggaacaggccccacccgcggggcttggctggcaccgcccggctctccagacggggctacggccgcgtgtcgggcccggtggcgaccacggcacaccacggcgaggcagccgggtggcaccactggcgggaccgggacggcgccgcggccttaggatctctgcgccgaggcccgcggcgggagccacgacggccctgaccacgctgacgcccaggctgcgggctcctcgcccggaccaaccgccagccacgccgaggtcgcacctcggggtcgccccacccgcaacacctgccgccgcccggggctcctagcgggcgcggcctccgcgcccaggccccgcccccgcgcccccattggtcagtcccgggggtgggcgggcggcacagacggctgagccgg

SEQ ID NO: 702 - DNA, 398 bp, Homo sapiens
  source 1..398: mol_type = other DNA
tttttataattatccaagcctagaagaaactttaaacataggaacagaaagtatttctgtgcccttaaacactcattgaagctttaccaaaatgtgctcatcttttcagaaaatcccttattttaacttattttatgtcgcagtggcacgatctggccagccccataccatttaattttaaacctcatgcgtgtgtgcagccctggggtctcccgcagccgcgagctgggcggtcctcccggcgccaggggtcgctgtagcgccgcgcggccgcgccgggtcgctctcgcgtggccgccccgcctcgggcccccgggccgagtgggcgggcacgactgcgcccaggtcgcgaggcgcccttcgaccagcagcgcccggggcgggcgggtataaatgga

SEQ ID NO: 703 - DNA, 496 bp, Homo sapiens
  source 1..496: mol_type = other DNA
cacaccctggaattccaggatggtagttccgagctgggcaggtgggggcctaggaatgcgcgccctctgctgaccaccagggttcagagtccctgggagtctctctggcctgggtccccaccccaggccaaggtctcgacctgagaccacccgagcctggtctgacttcaagggcccctcctaggtggtgtggaggagctgccgggttgggcccttcactgagctcccgctgggagcaggcttctgctagtgagaggagccatgcatcacctcctgcccgtctgccggatggactggcctcggaggatgggcagctagcttttggaaaacagcgcctgccccccctcaccacccaaccggctgctggcgtgggtcggtcggggaacccaccgtacagcagtagcagcagcagcggcagcgacacacgggcgaccgagagggccagtgtgacctccccccgcccggcgggcggggagcccagctcacacgcacagcc

SEQ ID NO: 704 - DNA, 527 bp, Homo sapiens
  source 1..527: mol_type = other DNA
cttcgccgcgcggacagaagccccgcctctcaccgctgctcttcgatccctgccccgcacgtggcccagcccggggatgtctggctccccttttgcccccagtttggcttaaaagggtgagctctcagacgccagtgcagcccaggcggccggcccgggctgtggggagacccccaagtgcggggaggaggtgttgccggggccctgaaagcttccagacccgctcaaccgcctcgggtttgtgtcaacatccgaggccggagactggcggcggctggggaccggctccgtctgcgcctagcgcggggctaggtagaggctgggacgcgccagcaccctcctctctgccccacggcgtgaggggagtggatgcgtgggcagagatgtggactgctgaccagccacctccggcccctcccaatttcgggtgggatatgggtgtgggggggggtctcatcttgtgactcatcccctcttccgcccccacccatgctggggcccaggaaaggaaagggtttttgagaatc

SEQ ID NO: 705 - DNA, 309 bp, Homo sapiens
  source 1..309: mol_type = other DNA
gattgtaaatgtagtaggaaagcagccacagtcatacttaaaggaatgagcgtggctgtgtccccataaagctttctttacggacactgaaattttaatttcacataattttcatgtgctaagaaaatatacatatatattttgtgagagtagcccaagaaaatatagtttttttattttttccaactatttcaaaaggtaaaattcattatcgtttgcccataataatttctcccccaacacggtgcgcactgggaagcgcgaggaccacggcccagtgcatccgggtagcgggatgccggttggacc

SEQ ID NO: 706 - DNA, 590 bp, Homo sapiens
  source 1..590: mol_type = other DNA
cagacgccagtgcagcccaggcggccggcccgggctgtggggagacccccaagtgcggggaggaggtgttgccggggccctgaaagcttccagacccgctcaaccgcctcgggtttgtgtcaacatccgaggccggagactggcggcggctggggaccggctccgtctgcgcctagcgcggggctaggtagaggctgggacgcgccagcaccctcctctctgccccacggcgtgaggggagtggatgcgtgggcagagatgtggactgctgaccagccacctccggcccctcccaatttcgggtgggatatgggtgtgggggggggtctcatcttgtgactcatcccctcttccgcccccacccatgctggggcccaggaaaggaaagggtttttgagaatcacttgtaagccgggggctgagcctcagggcaggggtgcagatgggggtgcagccctcccgcttcccggcgactccgggaaggtcagcgcgggcaggcggggcgcgctcctgcggccgggcctcgccggccacccggtccccaccccgctccagaggagccaatagccgtgcaacctgcccgggatggg

SEQ ID NO: 707 - DNA, 643 bp, Homo sapiens
  source 1..643: mol_type = other DNA
gagaacatgcctcgcgcgtggcaagtgctggcgctccaggtcaactccaggagcctcctgccaggcctgcaccggggccgtggcgactgagaagtgcacaggtggctcccgggtgctccagaagggccccagagctcctggcccggctaaaggcaggaggcgggtgcgcgtctcccccgcgaagctggatcagtactgggggcgcagggggcgcacgccgcgcagcgagggctggcgggggcggcctgcctggggcgctgcccaggctcacgcgggagccaggtgggggcgcgggggaaggaggcgcctgcagcatgccatggcgacccgcgcacgcgacggcggggcggccgggtggcaccactggcgggaccggaagggcgccgcggccctaggatctctgcgccgaggcccgcggcggaagccacgacggccatgaccacgctgacgcccaggctgcgagcccctcgcccgggccgcctgcccacccgccacgcccaggtagcacctcggggtctccccacccgcgacaccggccgcagccccgggccccctcgcaggcgtggcccccgctcccaggccccgcccccgcccccccattggtcagtcccggggtgggggcgggcgacgcggaccgctgggc

SEQ ID NO: 708 - DNA, 286 bp, Homo sapiens
  source 1..286: mol_type = other DNA
cacctaacctcaggtgatccaccaccaatatgctgggattacagctgccctggcctgagaactgggcagacctcattctctaggcagaatttgtcccaataagtcagacaaaaaaacaagagacctatttataattttatattgtaataagtactgtaaagaaaaataaggcgggtggactgcctgagctcaggagttcgagaccaccccagctactcgggaggctgaggcaggagaatctagttgactgcagtcacgcaggcgcatagacggttgccatggggac

SEQ ID NO: 709 - DNA, 505 bp, Homo sapiens
  source 1..505: mol_type = other DNA
tgtctcttaacaaaatatatttaaaatttaaaaagaagattatacaaagcagggcaaaacttgaaacaacttggtcctgcagtattttaagcgggggctaagccagcgcctcattttacagatgaaactgaagctcaggaaggttacgtttcgggctctaaatcccggaatcttcgcttcgatgcgccgacgggtgaccagacggacgccgggaccagccaagttcagggctgagggccgccaggtggcgcgtttccctccccctacccctcgcggcggctcgggcgcacctgaacccagcggggtgcgccggggccctaattccccagctcgagctcagccggctggcaccgccaagcggccgccgggccgcatcagccctcgggcgagcgctgccaggaggtggggccggccccacctgtcgactgcccgtagtaggcagggagagggcggggtttgtcccatagggcccgccccccagtccctgggtcccgggcgcgcgacg

SEQ ID NO: 710 - DNA, 370 bp, Homo sapiens
  source 1..370: mol_type = other DNA
catgtagtaaaatggggataataatagtaccaccctcacggagctcccttctggcaggggcagccactgctttctccccattgcccggatgccaagggcaggacggtacgtcctctaggcttgaagaaggagagaggccctgactccagatttgcccctttcctaggcctggggctcagaagtcatgggtggtaggcccgactccggaccttggggacctcggggacctcgggcagatcggggaccccgggcagatcactttcagcctgcggcctgcttctcggattgctaggagccagcgcaggcagatgccggttccggggcttggaaacgtggctcggtggcacagagccgccgggcgaggcggggg

SEQ ID NO: 711 - DNA, 450 bp, Homo sapiens
  source 1..450: mol_type = other DNA
ttaagctcatgggatttagagtcagacagatgtgtttccttcaaagtttcaacagttactttctgaccttggcaagttattcagcttcctcatttgaaactattaggtaaatggtagctgttattttaagaacttatcaacttgtgtcacagtcgttcagcccaattttttctagaaataaatctaagcgaagcctcccctgcgcgcggcagccaccgtgcgccgcctgagcccacccagccctgggcgaggctgcctcaggcagagtgggtgcaggatctgctttaatctcggggaccacaccctgcgcgccgggaggaagggctccaaaaccacagggcggaggcttccgcgcggccccagccctagtggggtgagagcggagggttccctaccttcccagccccgcgactgccagccgggctggggctgacccaccgcgccctcact

SEQ ID NO: 712 - DNA, 350 bp, Homo sapiens
  source 1..350: mol_type = other DNA
cggcctatactcattttttataaaactggattattccattgtatagtggatacactctaatttctttataaattatttaaactattttttgatgttttgttgaaaaaaaacttgaagaaaacgtgccaattcgcagtgagtgtcctcaccatcagcactgaatatatgttagaggcggtctacgagagcgcagagccccactcggccagcggggtctggcgggggacctgtcgcgctgaaagctccagggtagggccgacgcccatcaggctgggcatccgttcgggatgcgcaggttgcgatctgcaaccggcggcgccacgcccaggcgggcggagcgcggttcccgg

SEQ ID NO: 713 - DNA, 661 bp, Homo sapiens
  source 1..661: mol_type = other DNA
gaagcctcccctgcgcgcggcagccaccgtgcgccgcctgagcccacccagccctgggcgaggctgcctcaggcagagtgggtgcaggatctgctttaatctcggggaccacaccctgcgcgccgggaggaagggctccaaaaccacagggcggaggcttccgcgcggccccagccctagtggggtgagagcggagggttccctaccttcccagccccgcgactgccagccgggctggggctgacccaccgcgccctcactagcgtggcctcgtcaccgagagctgacggccgcccggattcccgccctcagagaatcctgaagaccctttacggactgcagcttaaaggaaccggccacagaggaactggtcactcttctgttctagaggagcttagccagggacttctgcccttcctgggcccgggcctcgggggcgattccggagggcgtggcctctcttgtgagcccgccctccccgtgtcgctcccgccttgagggcggggctctttcccaagtgccctctgtgagagccgggccgctctctccggggcgtggcgaagaggggcgggggagacttcctgcccagtcgcgggccagcctagcgcttcagccggcggctcatttccggtgggggcgccgcgcccagtgagggcccgga

SEQ ID NO: 714 - DNA, 366 bp, Homo sapiens
  source 1..366: mol_type = other DNA
atacggaagtaacacattttaatacagtcaaatctaaatattttctaatgaggcgggcggatcacctgaggtcagccagctgctccggaagctgaggcgttgcactccagcctctaaaaaaaaaaaaaaaaattcttccctatttttgacattataaagctatttttattttctgaaaaatgtttgcaagaaatctaatcatttatttcccttttggaaaaaatgtctctcccatgacctcaaaggggtctaggtgggcatagcctctagccagttgttgtgagagcacccggagtccgagtgacggaatcaggcgggcgcccgcgtcgctaaggagtgcgtcacagtgcgcgggcggccgggggc

SEQ ID NO: 715 - DNA, 337 bp, Homo sapiens
  source 1..337: mol_type = other DNA
tcccagctactcgtaggttgcagtgagctgagatcgcaccactgcactccagcccctcaatacaactcagttttttttattatgtgaaaacagctgcaacagctgctgtccatttgaattgttggaaatgtagatctacactaaccaagagagaagccactagccacaggtggctatcatgttggccaggctggtctcgaactcctgggctcaagtgtgtaaaatgatcttgctgcactattcacatttcaggtaactagtggttaccatattggacatggcagataaagaacattttcattattgcaaaaagttgtaccccaggccggtgcctggt

SEQ ID NO: 716 - DNA, 512 bp, Homo sapiens
  source 1..512: mol_type = other DNA
gtgacttttaattatactaattactctcagagttgagaaattcaagatattaatttcaacacatctttagcatcacaatatcacagtaatttaaatatattttagttgtagctatttagctcactttattgtaaataataattatgctaattagcaacgatagtatgtttaaccaattaatcatcagattaactttcggtcagaataatggacttcaatttttaagtcaaagcatatttcacttctgaattccaagagagaaatggcgtatgtacctagataaagtaagtgaggtagctctaactcagaggcacgcctcctcaggcgggagccgcggcccactcagtcagttgcggcccactcagtcagttccggccccagccccgactacctgtcgccttgttgggggaccagtcagggtaagccgctgacccagaggatggaactgcgtgggaacacagctcagccgggcccggaactcggcgtttgggtccccgccctctttgggccgg

SEQ ID NO: 717 - DNA, 288 bp, Homo sapiens
  source 1..288: mol_type = other DNA
taattgtgaaaaagtcagattccaaagcattttaccaatatcagttcctgcctggaggatattgcctgcagcaagatctgcagagcccgaggtgctctcggcctgggccctggagaggaggcctgaaggtcccgaggggaacctcagacggccttatgccgacccgcaccccggtcgcccctcgaggacagagggtgggcgcaggaggctggaccgagcggggcggagctggatgcctggcgccggcctccctcccggcaaccccgccggtcctctcaggtgacagcc

SEQ ID NO: 718 - DNA, 392 bp, Homo sapiens
  source 1..392: mol_type = other DNA
atagtatgtttaaccaattaatcatcagattaactttcggtcagaataatggacttcaatttttaagtcaaagcatatttcacttctgaattccaagagagaaatggcgtatgtacctagataaagtaagtgaggtagctctaactcagaggcacgcctcctcaggcgggagccgcggcccactcagtcagttgcggcccactcagtcagttccggccccagccccgactacctgtcgccttgttgggggaccagtcagggtaagccgctgacccagaggatggaactgcgtgggaacacagctcagccgggcccggaactcggcgtttgggtccccgccctctttgggccgggtgtgtctgtgacactgccagcagcgcgcagacaccgcg

SEQ ID NO: 719 - DNA, 292 bp, Homo sapiens
  source 1..292: mol_type = other DNA
tgtgattacattgggcccatctagttaattgccatgtaaagtcctgcattgcaggcatgctaaactgcctgcagcctcacgtgtcaaggcttgttcttagatgacatctaaactagacatctaagctagacaatttatttttcagtctcatctactagattataaactttaagagggcagtgcttagcaagcgtccagaaatagaaactgagtatttgctggagctcacacagtccgttctgtgaaccctcagaggattatggcagagacgtccaatgcaatcatcatgata

SEQ ID NO: 720 - DNA, 276 bp, Homo sapiens
  source 1..276: mol_type = other DNA
agaaatttctcagtaacatcgtgctcagtgaatgaatgaatgaatgagtagaaattatctgtagcaacggtggctttggatgatgatgtttaataatcatttttaagcacaaaaaactcgctgttttgtgagggtatcaacaaccctcaggttacataaggatgatcatagggtcgttgtgatgcaaagcgcttaacacagtgcctagcgcatagtaagagctcagtaaatgaggacacgcagggggcgtgcccaccccttccctccggcgcggtg

SEQ ID NO: 721 - DNA, 581 bp, Homo sapiens
  source 1..581: mol_type = other DNA
cgcggggagctgacggcagctgccagggaaaccgggacgcaaggccagcagacaggccggccagagggtcatctgcgtccggcacccaggaggctcgtggtggctgagggtctctggccccgcagcctctcttggaggcgggcctgtccctaagcccgccaaggggcgccgcgccgaggggctgcggagtgggggacggacgcccccgacccgggaaggggcgtccggcggggccggaggagagggctctccccgctcaggaggtgcccctgggcgggggaccgggagtcctcaaccccggactgaggcaggggtctctgggggcgaggagggcgcgtcgccctctgcccccgccggcaccctggccatgacaggcaagtcggtgaaggacgtggccaggctgtcctggccaacctgctgctggaggaggaatcccacctggcgggccaggggtccagccgcgccggggtggtgggggtgggctgcggtttctgaagcttaggccgcccaactcggcttatagagttctgggccggctgtccagagagagctcccagcatcttgcaaagctggggatgaac

SEQ ID NO: 722 - DNA, 487 bp, Homo sapiens
  source 1..487: mol_type = other DNA
tgtaacagttttgaattaaaattcatatttgagatttcttttttgttgctataagcatctttattatttggcaatcttgaaacaagatacttcagtagtgcctaaggggaaaagatcctattaagttaatgcgaatctatcttttttcctggtaggaaatcaccactaaaacgtctcttgggagaggactgttttcctgggatttttcttaatataagtaacagtcttataacatctgcgtttcaacactcatatccacttattatataattctttttatattaaatgcccagaattggcaatccatagatgaaaatgtttagatagtagtaatcattgcacaactgtgtgaatatattaaaaaccactgtattgtacacttaaatttaaactaaagaaaagctatggtaaaaattatttcacttatgttctagcagaaatgtctgataatctaatattgtagtttaggccttgaatcacagggctg

SEQ ID NO: 723 - DNA, 644 bp, Homo sapiens
  source 1..644: mol_type = other DNA
gccttatttagggcttcaagataaattttggggaatccaaacattcggcagctagcaagtactataattgtattctatttcctcatttgttgtttaataaaacagcattacagtataatcgcttttgtggaaaatatataacaatgcatacaccaactgttagcaaggttaccgctgcttgctgaaattacaggcaataatttttttgtttttgtgtattttctggcatttcagaaatacaaggtaagcaataaacatgagaacttttattgaatactagaagagaaaactgttgtggtattcttttaacaatataccggaatccattcaactgtctgctgagaataaataactggcatgtacataatatttagggaaagtgctatggattattttacaccaccttttgtcaggtttcaacgtgttaaaagagtctggggcccaagaacgcaggctccatctcctcccgcaggagccaggctgagatgctcgcagggatcggatactgggagcccctgaacgcagccaacccggcgcgcaccggtgggggcgtctgcgctggcggagcggctccccgggaggacgctgggatctagccagccgctgcgcaggcgcactgggccccgactgcccgccgcagcgct

SEQ ID NO: 724 - DNA, 631 bp, Homo sapiens
  source 1..631: mol_type = other DNA
caataaacatgagaacttttattgaatactagaagagaaaactgttgtggtattcttttaacaatataccggaatccattcaactgtctgctgagaataaataactggcatgtacataatatttagggaaagtgctatggattattttacaccaccttttgtcaggtttcaacgtgttaaaagagtctggggcccaagaacgcaggctccatctcctcccgcaggagccaggctgagatgctcgcagggatcggatactgggagcccctgaacgcagccaacccggcgcgcaccggtgggggcgtctgcgctggcggagcggctccccgggaggacgctgggatctagccagccgctgcgcaggcgcactgggccccgactgcccgccgcagcgctacgtgggagcttggccgcgcagtgccggaacccggctgcagcggtgggaaggcgggggcgtgccggcccagcggcccgggcttggggagctgggcgagccgggaagcgcgagttccgcccgcggccaccctgtcgcgcgcggtgctctccgcagccccggagtcgtgctcagacaaaggctggagagctgggattccaaatccccccaaacaaagaattgggttgtattcgtttg

SEQ ID NO: 725 - DNA, 464 bp, Homo sapiens
  source 1..464: mol_type = other DNA
agagacagtcttaaaccaagataatgtctgagacaggcaatttgatgcagtctgtagtgcctgtaatcccagctactctggtgaggcaggagaatcacttgttgtctcaaaaacaaatttatatattatatatatatgtatatatatatacacatacacacacacacacacacacagtattccagaattttatttttaaattttattgttgtttttctatttgttattgtcaattaatttcaatgtaattaagttccaagaaagcaggaactgcgttttgttaataactgaatgaatgaatgaatgaatgagtgaatgaatgaatggcggcgtgggtgggtggccgctacccacggttccggacggccctcgggggcgcgctcgggcggcttccagcttccgggttcgagggcgcgcgctgcttcccgggagagggcgggctccgtggcagccccctgtgggcg

SEQ ID NO: 726 - DNA, 328 bp, Homo sapiens
  source 1..328: mol_type = other DNA
accgatgatggctgtatgatgccacctttgtcgtcaagtatctgcttttggtaaaataaataaataaataaatataaataagaaaataattatacttatctttggtttatatttcagaataaaattgtgttatatttatcaataaaaggttagttaaaagtaagccacggatggccaagcggagacgcggcacttcaccgggggcagcgaggggcccagaccttgctcggattgtcccggtgccccagccgcagcctcgcgaggtaggcggcgccgcgagggcctctgggaaggcggtccgtgggcagccgcggggcactctgggact

SEQ ID NO: 727 - DNA, 329 bp, Homo sapiens
  source 1..329: mol_type = other DNA
accgatgatggctgtatgatgccacctttgtcgtcaagtatctgcttttggtaaaataaataaataaataaatataaataagaaaataattatacttatctttggtttatatttcagaataaaattgtgttatatttatcaataaaaggttagttaaaagtaagccacggatggccaagcggagacgcggcacttcaccgggggcagcgaggggcccagaccttgctcggattgtcccggtgccccagccgcagcctcgcgaggtaggcggcgccgcgagggcctctgggaaggcggtccgtgggcagccgcggggcactctgggactg

SEQ ID NO: 728 - DNA, 259 bp, Homo sapiens
  source 1..259: mol_type = other DNA
tctgtcgcccatgctgcagtgcagtggcgggatcacggctcactgcagtctctactgtcaagaaatgttaggaaatccctatcccatgatagccttatttttctgctcaccttaaaaacaaaacttcttaaaagtattgcgtataaattttcatcagacactggtgaccattgacagtggctgagtaagagttttcataccgccgattttactttccagtatttaaaaatgctgtgtatccttttaaatgaaaacgact

SEQ ID NO: 729 - DNA, 221 bp, Homo sapiens
  source 1..221: mol_type = other DNA
gaaatgttaggaaatccctatcccatgatagccttatttttctgctcaccttaaaaacaaaacttcttaaaagtattgcgtataaattttcatcagacactggtgaccattgacagtggctgagtaagagttttcataccgccgattttactttccagtatttaaaaatgctgtgtatccttttaaatgaaaacgactcctacacccgggaggagtccagg

SEQ ID NO: 730 - DNA, 357 bp, Homo sapiens
  source 1..357: mol_type = other DNA
cagtcctggctgcagaagaacccaggactccaggagtctctcaacctcaggacatttcgggcctgacgtctcttctcatgagacgccacatggtcgaatgttccctggggggcaaaatcgccccaagtttaaaacctctaaagggacattataaagtctttctctttttccatctgtaaaatggaacgttcctggaactgcttcagggcagggcagggcagggggcgccgtggtgcctgtgaggtccttgaggcttccccagaccccgcttcttggaagcctcatggtccggcccactggccccgcccatccacgcggccccgcccccggcaggccccgcctccccttcgcctcccg

SEQ ID NO: 731 - DNA, 292 bp, Homo sapiens
  source 1..292: mol_type = other DNA
taggctccagtgtcatttgtaaaatcaggtaattccattcattgatgactatacctacaggttttgatagatcaagttacttaacctttttgagcttcagttttatcatttgtaaaatggatacaatcctgatgcttggaccaaacgtaaggttacaagctaactattcttggtaagtactgttctttattctagaggacatcactttacagtttggtgctaaatgctcaaggtgccagtagctgtctacttgaacggtggtggaggtcactgggcagcgcctcctcgcatc

SEQ ID NO: 732 - DNA, 318 bp, Homo sapiens
  source 1..318: mol_type = other DNA
tagatcaagttacttaacctttttgagcttcagttttatcatttgtaaaatggatacaatcctgatgcttggaccaaacgtaaggttacaagctaactattcttggtaagtactgttctttattctagaggacatcactttacagtttggtgctaaatgctcaaggtgccagtagctgtctacttgaacggtggtggaggtcactgggcagcgcctcctcgcatcggtgcaaacggcgtggccgccatcttgcttgtgcccccgctggcattgcccgactccgtaggagcgcgggggcggctcctgctcttcctggac

SEQ ID NO: 733 - DNA, 377 bp, Homo sapiens
  source 1..377: mol_type = other DNA
tttcccttaaaggggacaaataactaccaactacctaatatttgctaatgtgtcaaaactacttgtatggtcctgagactcaataatgtataactgttctattaatacaatcagattttgtcactttaaatctgatacttataggctcggacagagcacttcggtgtttccaagcctggaaccctgagggcctgcacaccccaatcttgggccatgcatgtaccaggaaagaaagtgagtgtcccccattcccaggccatggcctaaccccacgcctgcgccgcagggggtcattgccccagccgccctagccgcgcataaggtgccaggtccgcggcctccccgcgccgtcgccttccgccaatgggagaaagccc

SEQ ID NO: 734 - DNA, 417 bp, Homo sapiens
  source 1..417: mol_type = other DNA
ccagctggagagggaatgccctgggacaaagtatccccggcttagatgcccaaacccagttccctgacctgggagtggggcaggggagcaggcccctccatcggggaggatcctcttctgggcagggtggctcttcccccatcacgagtgggagaaagacacacccaggcccactgtgttccacacaccctgatgctgcctagcagcccgtgggctccaggccttgcgtcccaccccgggctggccttcggggccacactgccccacgcagcggtggcgcgtccggcttcccggccccgcgcgctgcccccgccacgcggttcggcccaggcaccaactcggccgcccgtgcgccctgccccgccgcctgcgctccctcccgatttgggaaggcggccgcggggcgggctgacatgt

SEQ ID NO: 735 - DNA, 437 bp, Homo sapiens
  source 1..437: mol_type = other DNA
atcctggaaccagtctcccatggataccaggggatgattgtattcactaaaccttaaaattttcctatttaaattagtttgtgttttaaaataaagtgcttagtgactaacataatgacagatgcaactattgtatggccattgtttttcttctgttaatgctcaacagaaaactgaagatggtcacaactttccctggtctattgccataggataccgtagcagtatcttacagacatctttgatggccaatcagaagcagttaaattaccttaaattttttaaatggaactctgacagtaactaacaaccctttggcttgtttttaagaacaattctaaattttcaatattctgttttagaagcacatgatgccctagtgcagctgctatgtgtctcaaggtaactttaaagcagttcagccaatgggaccactg

SEQ ID NO: 736 - DNA, 320 bp, Homo sapiens
  source 1..320: mol_type = other DNA
ctagactggccacttttaaaaaaaaattattattactatttttattttatttatttattctttcgcccaggctggaatgcagtggtgcaatcttggctcaagtagccaaaatggcctactattattatttttataagaaacggggtcgcagtccccgcgctgggcactcactgccccggtaatgagctgctcagtgtgcctcccagggtccctcggtgcccagcacagtgcgtggcacagtcggtgctcaaagcagccgccttcggggcaggtgtggggaggagggaggccgacgaggagccaacgccgcgcgaccctcc

SEQ ID NO: 737 - DNA, 524 bp, Homo sapiens
  source 1..524: mol_type = other DNA
gcctactattattatttttataagaaacggggtcgcagtccccgcgctgggcactcactgccccggtaatgagctgctcagtgtgcctcccagggtccctcggtgcccagcacagtgcgtggcacagtcggtgctcaaagcagccgccttcggggcaggtgtggggaggagggaggccgacgaggagccaacgccgcgcgaccctccgcacttccgtcttggaggccagggtggcgctgccgccgtccctcgcccggaggcagagatgcgctggcgcatcaccgccaggaaggccaggcgtgagcctcctccccttcaagagagtaagcttgggccacaggctgggacggaagcacccggcctcgaacctacggcggcacagttcagcggaggcggcccagcggtcctgtcccgcgcctgcgcactccaggccccgccccgccccgcgccctccaggcccggcccgccctccaacctctgcgtgcgcacagcctagagcccgcctccgtgaaagactgccgggc

SEQ ID NO: 738 - DNA, 464 bp, Homo sapiens
  source 1..464: mol_type = other DNA
ctggctgctgcccgggcgggcaaggagagggcagaatgcactctccccagagcctcgcactgccactttggtcatcttcagaaaggctgctttcaaggaaggcagcttctctacgctgtcaaacagctttttactgcccccaattggggcttccagaagcagtgtgggcaagcgctgccagccttctgcagaatgatgagcactggtcagtcctgtgctgataaagactgtgtccctggacagcagcctctgtctccagcacagagaagggcctggcgtcagggggagccctggagcctaccatgtgcctcctgctccatcttgggagcagctgggccctgtcagtactcagtagagcctgggattgtgtgtcccacagccaagctgcatggtgggtgggccgctggttccagtgtgtggtgggacccacagcgcacccagcctgcctgtggctggccaagaag

SEQ ID NO: 739 - DNA, 470 bp, Homo sapiens
  source 1..470: mol_type = other DNA
agtgtccatcaatatatgaatggatttaaaaatgtggtatatatacacaatggaatacattctgccttaaaaaagaggaaattctgtcatttttgacaaatgtagaatctatgtagttaataataatgtattatgtatttcgaaatagctaaagagagaactttaaatgttctcaccacaaagaaattataaatatttaaagtaatggatatactaattgctatactctggtgtgatcattccacaatgtgtacgtatattgaaacatcactttataccccataaatatgtaaaattattgttggccaattacaaatacttttgataaaaacaaatcatgaatgaataggtaatttattcaccagacatttaatgagcgcctgttactatactacttactggggtcgtgaaataagtggaagggtcttacccttatttctgttttctcaatgaatctgaattaaagtcat

SEQ ID NO: 740 - DNA, 675 bp, Homo sapiens
  source 1..675: mol_type = other DNA
ccctccccggcaaggcttctgggccagcagaggggcaggaccctggcttacttcgaagccaagacatcctgtcatggccaggacaggactggaaaggggtctgaagccaccttcttagtctcaaaggagcctgtaagccaagcaggtgaagtaccttcttgttttggccttgtttgcaaacaaggaaacaggcccaggaaggatgcccttggccatggctgcatagctgggactagaactcctgccccaggccctggggtgacagggcaggggagtcaggcatgagctgtgtccttcacagagggaggcaggcccagagagggctctgactcgcccaaggccacacagccttgcgtgggcctttctccgaggagaggggttttgctcatggaacctcctcctccacactcacagccctgggcgagacctgtggagcagcttgaggaagtccagctggactgcgaggggcccctggggactgccagggagcctcaggactcccagaggtgctccaggcacagagggaggaatgggccttccatctccctccccccttcactgcagaggctgggtcgggccaggcgcccggggaggaggcggtgtccctggctcccagcccgccggtgcagcggggcagggctggaccagaagggcaccgtgcctggtataagaggc

SEQ ID NO: 741 - DNA, 219 bp, Homo sapiens
  source 1..219: mol_type = other DNA
agcccaagggccaaggacccttaaatgcacaattgatctttgatactcaccaaagtggggcataaagtacaatgaatgaagtttcaagactaattccacttctgggagtagaagaaaacacctgtgctgccaatcagaaatggtcaggaccaggatcccaagactttgccccatctctactagcctgtaatcccagctactcaggaggctgaggcatga

SEQ ID NO: 742 - DNA, 574 bp, Homo sapiens
  source 1..574: mol_type = other DNA
gacgtcagtttcctgcgcaaggttacagtgagggggacaaagtgaggtgcattgtacctggcccatcacgggctcagtgcgtactcgttgacacagggaggaccgaggacgctgacactccctagggcgggtggctgtgcgaagtaactcgcccaaggtcaccacacggccagccactagcccggcgggagtcgcccgaggcgaggcccacgtcagccggtcttgggggcccgaccggtggctcctccaccagccccacgcggcctcagagcgtcgaacccgagtcctcggcctcggacgcagaccggagagctggtccgggcgccaactgggcccccggacccgggtcggcaggccggcggggtacggccgggccgggttcccgcgcgccctccctcctccagcgcgccgccccgccccccgcgcgagcccaacggccgaggcgcgcgccacctcgcagcgggaggcgcgggggaggggccgggggagcccccgccccgccccccgcctcagccgccaccgccagctcggtggagccccccgccgcccgcccgccgctctcccgagccgcccg

SEQ ID NO: 743 - DNA, 495 bp, Homo sapiens
  source 1..495: mol_type = other DNA
gaatcgtaaagactctaactaaggttctcccttcaggcactgttgaggctccccggcccctgatctgcagccagaggctggtgaggtgtgacacgcttgctgacaagagtgccctgtctcgtctgacccgtgaacatgggtgttcaattagtactgagaagctcatcagtgcaataaatatttatgacttgcatttgcattttttctctccacgtatatatatataatatgtgtgcatatatatgtgcatatatatgcacatatattatacatatatgttgttttttaaaaagcaccaataaatgataggcatgggactcctgcgctggctgtgtctttaaaaggttaaaccccctttcaaaaaaggtctggacttggctctggattcagaaaacagctgctgattagattctgtgtctgcaggctgaatttagcagcacgaattcaagagggatctttattcagaggaataactgttcccggcgcgagcatgct

SEQ ID NO: 744 - DNA, 370 bp, Homo sapiens
  source 1..370: mol_type = other DNA
aaccactggggcagtaggttatgcattgcctagaaggctcaggtgggccggggcccggaagagaaaactaagattccattagaattgatgtgacgtatcctaaatcacacagctgcagcaggactaggatttgaatgcgggtcaatctgcgctggaaccagagaaaggaccatgggctgacctgggccaaggacacctcacacccacacaggtgtcttgaggagtgatgatggtgtgctccaaggcccccatggagagcccggcacatggcaggcactcggtgttcaagcactgtgtcggcttgtcagagagccagctagctgtcaaccccaccccagctggccagttaatgagtgaccaggactcctga

SEQ ID NO: 745 - DNA, 392 bp, Homo sapiens
  source 1..392: mol_type = other DNA
tttatggcagaatactattccattgtatggatagaccataatttgctcatccatttgtcaatacatttgtgtacaagttttagtacagacatgagccgggaaccggctggttcacacgtgaataaggccaattcaccgtggagtctgcgccggggtcccagctgcccggggcccgggtaccaggggtcggggaccagcaacgccggcgctcagcgtaaccgctaccctccccagccacggcgcacgcgcctcttccctgccaaggaaggggcggggagtaggcggggcaaagcgagcatccccgccctccgggccgatggacccagtttgaccccggcggtgggggcggggcaagccgcgcggccaggaagggggcggggcccggggtctgg

SEQ ID NO: 746 - DNA, 384 bp, Homo sapiens
  source 1..384: mol_type = other DNA
ggacagcctgtgactcagacagaccaggagctgctgtggctgctaactgctggcattgagctaaatgtttttaaaacctcactaccccatgaggtaggtattatttttggttcccacaggggacacaagtggcccaagttcacacgcctcacaactgggcagtgagggcttcctcgcggcaatcaaaccactgtcgggctgggcccccctcctcaagggcagggtctgccggccccacacagcagcacagggcagtcgtgaggcaggacccagcccggctggtgctcagggaggggccggggccccccctgcctggctctttcgagccttatctgataaggcctgacaggtgagcagtgacagaggcttccaggttactcagta

SEQ ID NO: 747 - DNA, 323 bp, Homo sapiens
  source 1..323: mol_type = other DNA
gcgcgccaatcccagctgcagtgagctgagatcgcgccactgcactccagcctgggcgggagagcaggattcctctcttacatttatcatctttctccttatattagaatgaaagctccaacaagcactaaaatagtgtctggcaaccttagtagattggcaaatatttgttgagtgaatgagtacatgaatcttcagaatcttgctagtcttataaagaaaaggaatatgtgaatccctttgagactatgtcaaaaaccaactacactggaatgtaattaagtgtgaaattatagggcagattatcagtgctaatagtttag

SEQ ID NO: 748 - DNA, 423 bp, Homo sapiens
  source 1..423: mol_type = other DNA
ccaactacactggaatgtaattaagtgtgaaattatagggcagattatcagtgctaatagtttagactgatagtagtaccataacctgggtagggcctttagaggcggtcccggaatccgcggaaaaggcgtccgctttcctggggcaccattccttcggggcatggggccccaggtatccgtgggcagggtccaaagccaccgatgcggggttgcctttgctgccactccgagggccccaagtcgctcggaactgccggccgctagatgacaccggctgcgccgatgcagagcctcgggagtctcagggcaccgagggatcctgcgtgcgtcgaagcgaccgtgaccgcgcagggacttgacgccgctgacgccgggccggcggcgcagcgacgccgcaggaggcggtggcggcgagggcgg

SEQ ID NO: 749 - DNA, 610 bp, Homo sapiens
  source 1..610: mol_type = other DNA
aaaaaggcatattttaatgaactgcagtctccaaaaatggctaacttcaatcctgcagttatttagaaaggaaaatctggcttcaaacactattgtctgcaggcgccagtggtccttctaaatgcactttcaaattatctgaatgggaggtgggtaagactcaacttccccctctcctacatcctcccccacccccgtggggcttcaggctagtgggacgtccccgaggccctccctgtccggggctcagcaggcgtccgcccgtgtcccagcccccgagcgcccgggatcgcctgggagacgcatccgccgcccactgcgcatctctggcccgtcagctcggaaaccctccgagcctcacagggccgccgccccggcccctcctgctccggctgtcccaccccagcccgcagcgccacgtccaccgggtgtccggggcctgccggggctgccctcctccgcctcgcctgcgcccgccggcggctcgctccccggaaccccgggtccttccccggcaccgcccgccagggtcgcttctgcagccgccagcgcccgccgccgcgcgctgattggctggcggggccgacggcggcgctgagtggccgggcgg

SEQ ID NO: 750 - DNA, 229 bp, Homo sapiens
  source 1..229: mol_type = other DNA
tcccggatgccgggaatgccctgctgctggtctacctcaggcgatccgcccgcctcggcctcccgaagtgctgttagatctttgaaggaactgggtcgttttgaggtgtcccttgcagagtcaggggcaacggctctgtgcaggccgcgcacacccgctcggctggggcttcgcacacgcagagtctgcagcagtgaccccggcgtcacgtgacgatcgcggggctgcg

SEQ ID NO: 751 - DNA, 541 bp, Homo sapiens
  source 1..541: mol_type = other DNA
cttctcaactcgggttccccagctgagatccgtgggttgcttccaggcctagggcacgcacctagcggattgagtgcctgggccgcagcctgcaactctactgccaggaaggtgcctgcagccgcagcctcctggtagctcctcagagcctcggcctccaggctcagcaagcccgaaagggctgggcccgaaggccgcacgtagccggcggctaggaaggcctcggccgaggttgcaccgcgccgcccgctgctgaagttgtccaggaagcgcaccggccgcgcttccagtgggaccttggtgccgcctgccacccgccggccctgcgcgcccagcctggccgcgaagcgcagcccagcgcgcagcaccgggaggctgggggaactcggctaccggatcctccgccatctgcagcgcagcggccggcgcctgcgcacgtttcgcggccgccgcgccacgccgtgtacgcgccgcgccgtactgcaacgagggggatccccggctgggtgcgcgtttcctagcctgggtgaagaactggcca

SEQ ID NO: 752 - DNA, 562 bp, Homo sapiens
  source 1..562: mol_type = other DNA
attaacccaagattggttatatgaagcgcccatcacctgcagtgggcccccagatgactggatcttgtgttcaggcatttcacttctcaactcgggttccccagctgagatccgtgggttgcttccaggcctagggcacgcacctagcggattgagtgcctgggccgcagcctgcaactctactgccaggaaggtgcctgcagccgcagcctcctggtagctcctcagagcctcggcctccaggctcagcaagcccgaaagggctgggcccgaaggccgcacgtagccggcggctaggaaggcctcggccgaggttgcaccgcgccgcccgctgctgaagttgtccaggaagcgcaccggccgcgcttccagtgggaccttggtgccgcctgccacccgccggccctgcgcgcccagcctggccgcgaagcgcagcccagcgcgcagcaccgggaggctgggggaactcggctaccggatcctccgccatctgcagcgcagcggccggcgcctgcgcacgtttcgcggccgccgcgccacgccgtgtacgcgccgcgccgta

SEQ ID NO: 753 - DNA, 246 bp, Homo sapiens
  source 1..246: mol_type = other DNA
ttagatctttgaaggaactgggtcgttttgaggtgtcccttgcagagtcaggggcaacggctctgtgcaggccgcgcacacccgctcggctggggcttcgcacacgcagagtctgcagcagtgaccccggcgtcacgtgacgatcgcggggctgcgtggccagttcttcacccaggctaggaaacgcgcacccagccggggatccccctcgttgcagtacggcgcggcgcgtacacggcgtggcgc

SEQ ID NO: 754 - DNA, 265 bp, Homo sapiens
  source 1..265: mol_type = other DNA
ttagatctttgaaggaactgggtcgttttgaggtgtcccttgcagagtcaggggcaacggctctgtgcaggccgcgcacacccgctcggctggggcttcgcacacgcagagtctgcagcagtgaccccggcgtcacgtgacgatcgcggggctgcgtggccagttcttcacccaggctaggaaacgcgcacccagccggggatccccctcgttgcagtacggcgcggcgcgtacacggcgtggcgcggcggccgcgaaacgtgcg

SEQ ID NO: 755 - DNA, 474 bp, Homo sapiens
  source 1..474: mol_type = other DNA
accccggcgtcacgtgacgatcgcggggctgcgtggccagttcttcacccaggctaggaaacgcgcacccagccggggatccccctcgttgcagtacggcgcggcgcgtacacggcgtggcgcggcggccgcgaaacgtgcgcaggcgccggccgctgcgctgcagatggcggaggatccggtagccgagttcccccagcctcccggtgctgcgcgctgggctgcgcttcgcggccaggctgggcgcgcagggccggcgggtggcaggcggcaccaaggtcccactggaagcgcggccggtgcgcttcctggacaacttcagcagcgggcggcgcggtgcaacctcggccgaggccttcctagccgccggctacgtgcggccttcgggcccagccctttcgggcttgctgagcctggaggccgaggctctgaggagctaccaggaggctgcggctgcaggcaccttcctggcag

SEQ ID NO: 756 - DNA, 442 bp, Homo sapiens
  source 1..442: mol_type = other DNA
aaggaatgtctccctgagtaggtgatactttcagaaaaaaacacttgcgaggcactttattatataaagagtaaaataaccagcaaaaatttgtgaagtattctcacatgactaaaatcgagtttgataattaactagaattttgcaataagagcatctaaaaagatgatataaattgagtatgttaaattttgtgtcatttataagtttttattagataacgttcatcttacctgaattttcagtgcttaggacttctaaagggcttcagccttagcagtttcttcctttttacaataataagctggatccaaaacacgtggctagtgacacgatctaggcctaaaattcagagctcttgagctagcacttcccatgttaccatggttacagctgtctccaaagccaatggaatggttcccgccggaaggacgcgtctgcg

SEQ ID NO: 757 - DNA, 588 bp, Homo sapiens
  source 1..588: mol_type = other DNA
ttagaacagcaagtcctattaatagttagtggttttaatcacttggtaggtacagtgagctgagatcacaccactgcactccagcagatatcacttcatcgatcagcagatatgtcatgattacttgcaacctaaaaaaattgatattgatagcagcaacataaattataagacatattctgtgagtaaaataaatcctggataatagaattaggggcctctctagcttccagaggaatccttttatttctaaatatgcaataaaaggaacaaagacttctttggactttaaaaaagaaacaagagccctttgggagacttttcagataaaagttgcaaactttagaacagacagaaaagctttttttttttccattgtacataattttcattaagtatatcatgtcatttgttattttagaagatacaattaccagctgtttcatttaagtgctcataactagataacaacaggaaaagtaaaatatacattgtagagagtctgactctagtcatatatacatagacttctttttgttctttagaaatatcttggattttccaagatatatatacatacacatacat

SEQ ID NO: 758 - DNA, 438 bp, Homo sapiens
  source 1..438: mol_type = other DNA
agggctactttagattaggtctaatgttgcctctcaggaggtaacatctggggtgagccaatatttcagacagaagtaacagctattggattttattctaaatatgggaagccaggagttatttttaaaataaataggaagcacaagagttattttaaaaataaaaaataaaaaactctagttgctttatgggaaacaaaactggtagcttttgtggcagaacaaacattatctattgtcctgacttgtgttcacactagctagagcaagatcaacttgtactgcccttagtacatgccaggcagagtctctcagctagaccctagcagtctcagcacacaccgcacggggcgacagcttccgggggcggagcctggtctcgctccacgtctaccgcgcctgctccccggacgaaatccgcggaccgggctttaggtt

SEQ ID NO: 759 - DNA, 568 bp, Homo sapiens
  source 1..568: mol_type = other DNA
acccacgctgcagtggggcccacttggaggtggaagagagttaaacattcccctactcccggagcgggcagcctgaaccccgggaatgtgcagaggccactgctccgcgccaggctgctctagagttgggggccagggcccagtgttccaggagcaatccgccttccttcaggctgatgccagaaggttggggcccccagctccccaccaggccccttgctggccggcagccagcgctggcccagcctcgatagggcccttcctttcccttctgtcctaaagtcaaagggcagaaaaccccttagatcagccttgcaagagcaaagtccatcctcccagggcttaggacacccgaatcaggttcctaaaggggtttccctgtggggaaaggcccagagggcagctgggtcattcctctcagcccctcccttccctatccctgcggaacggggcggggcagggacaccacctgggccatgggccggccctccgcccccagggggctgggcatgagctggcggctgctgtgggcgggccctggccttttccagcccctgggcctccccct

SEQ ID NO: 760 - DNA, 372 bp, Homo sapiens
  source 1..372: mol_type = other DNA
atgaaaaaacaaaacaggctagcttgttcaataaatgtgagttgaattaaatctgattatactggaaaggaagacacatttttttaaatatatgcctgggggctgccatagcctgcgtggtacgctcttcaaacgcatacgtttaaggcaattccgccgtaatgttctcagatcttcacggggggctaaggcgtcttcgagcccccttccaatcccgggtccggccgggtaatccctggagacacaaccctgaacgtggggcccgccagcccggcggctgcctcgtggaagtcacgttccttctctatggcggccggcggaggcaggaacactggccagtgaacaacgctagggcgggtcgctcgtagggct

SEQ ID NO: 761 - DNA, 596 bp, Homo sapiens
  source 1..596: mol_type = other DNA
aaatgaagaacttttctttgtgtacactaaagtgttgtgtaaaccttcctgggcactcaagttgcagttagaggaacctttggtcccagaaggtcattcgaatcagccaccgactcacaatgacagtcggctttactcgtctgtaaaatggagacaagagttcgctgccccggccgcgccgcgccacggggtccccggcccggtgggtgtggtaggggctcaccagggccaggccgccgggggtcggggtgagctccaccagggctcctgcgacacacacccaggaacacaagccgtgagctcccgccgtcggcctcccgcggagccccgagaccggctgcctcgcgggagctgacttcccgcagctggcggcgctccttgcctttcaaggaccccctcggtccgccccggcgcggcggcgtcctccatgacagcgcctatcctccccactccctgggctgtgcgagtaggaagagcctgcgcataaaggcgcctgagctcggaggcggggctccggctgacgcgccgggattcgctgagggccggcaagcctcgtgggcatgcgccgcccggcttggaaggtggggcttcgcccg

SEQ ID NO: 762 - DNA, 720 bp, Homo sapiens
  source 1..720: mol_type = other DNA
ctaaccccaggctggacctttggggttagcatctaactgggcgaggaaggtctcctgccagggagcagctctccccggctccgaggagagctccccagccaggaggccactttcccctcagaaggaccccggccgcctggttccaggcaggtctgcaccttgaagtaggcgacctgcaggtagttgtaggggctccgcttgcggaactccagctccatctcttcgctgagcgagtgggcggccggcggcccgaggcagcggcgcaggcaggcagcgcgacgcagagctcaggtcgcgcagggcggcggcgcccgaggcctgggccgggctgggggaccagtcggggtccagctcccacgggaagtcggcggcacactgggtgcggcagcgcaggcgaagggcgcggagggctgcccgggagcgcagcgcccgttccatgctcaggaccaccccgggccagtccccgcgcgcgtaggctgcggtcccctcggcgaagagcagatcaggcgtcaccatgccccatcctgcctcggactcgacctcggcttgggaggcagcggccacgacagcctgtggtcaaaggccggagtcctacccccggcgaaggcccgcccccgggcgaagccccaccttccaagccgggcggcgcatgcccacgaggcttgccggccctcagcgaatcccggcgcgtcagccggagccccgcctccgagctcaggc

SEQ ID NO: 763 - DNA, 391 bp, Homo sapiens
  source 1..391: mol_type = other DNA
tgagatagggtatcactgtatcacacaggctggactgcagtggtgtagtctcagctcactgcaacctctgcctgggctcaagtgatgtagttgggagtacaggcatactgtgcctggcttgaaatataatttttctaaaggcatttttttcagaataatctgtccaaattttaattgggcaatacctaatttgttacatatctgtgattcataggtactaatatagtgaaaaaacctggcaacatttactatctaagaacatacattgtttgcccaaaatgaaaatgtcccagacatgactctaaaaaatatacctgtgcttaaattatttcactcattttcttcattaagggagggattaggaaatgagctcagtttgtttacaacccac

SEQ ID NO: 764 - DNA, 733 bp, Homo sapiens
  source 1..733: mol_type = other DNA
ctgggccgggctgggggaccagtcggggtccagctcccacgggaagtcggcggcacactgggtgcggcagcgcaggcgaagggcgcggagggctgcccgggagcgcagcgcccgttccatgctcaggaccaccccgggccagtccccgcgcgcgtaggctgcggtcccctcggcgaagagcagatcaggcgtcaccatgccccatcctgcctcggactcgacctcggcttgggaggcagcggccacgacagcctgtggtcaaaggccggagtcctacccccggcgaaggcccgcccccgggcgaagccccaccttccaagccgggcggcgcatgcccacgaggcttgccggccctcagcgaatcccggcgcgtcagccggagccccgcctccgagctcaggcgcctttatgcgcaggctcttcctactcgcacagcccagggagtggggaggataggcgctgtcatggaggacgccgccgcgccggggcggaccgagggggtccttgaaaggcaaggagcgccgccagctgcgggaagtcagctcccgcgaggcagccggtctcggggctccgcgggaggccgacggcgggagctcacggcttgtgttcctgggtgtgtgtcgcaggagccctggtggagctcaccccgacccccggcggcctggccctggtgagcccctaccacacccaccgggccggggaccccgtggcgcggcgcggccggggcagcgaa

SEQ ID NO: 765 - DNA, 376 bp, Homo sapiens
  source 1..376: mol_type = other DNA
ttagatacttcatatgaatggaaacaaggccattgtcctatttgctccagcacttagaagctgtgtgacccgggacaaccttatgtgtaaatggggataataatatacacgtatacattatacacacttattatgaggaattagttaataaatgtgacctggaaaattacagccagctattttaatttacatcctttttcaaaatgaatgaagaaggtggcaatcatcaatccccacttttcgaattaagaaattgagcctcggaattcgaattctgagcaattccaattccaggattcggatctagctttgccgtaaccaccacccaccccggtgtggctccgcccctgccccgccccggcaccggcttgccccg

SEQ ID NO: 766 - DNA, 303 bp, Homo sapiens
  source 1..303: mol_type = other DNA
tgggagaacacccatcctgcctggaggcaagtatggctcgctggggagtaggaaccgagtcccaaggccacaacctccaggagctgctgtgcgttgcccactgtgcggcgtgcggcacccagcgcggaaccgtcctaatgggacgctgagacccagagggcgcccagggttttcccactgcggccggcctaactccgccgcagcagccgctcctggggccagggggccgggccccatagccagccgggcccgccccccaccgcccggccccccgaccccgccccggcccgcccggccccaggg

SEQ ID NO: 767 - DNA, 305 bp, Homo sapiens
  source 1..305: mol_type = other DNA
ctacttaccactatgaaccaccgtgctcactcccattgggactcagagctgaaggtgcaagcctggagcattgggctgcacagccttccaaggctttgtagaaacatggcctatgaggtgacatgctagcagcttgcctgcaagtctcgtgtgggccaccacataattgggaattatgtacaatgggctccatctttataaagttcaaaggacataaaaatgtgtaatgtattgttaatgatataattatggagattatgaacatactgcttataaccaatcttccaatttactctgatttgaaa

SEQ ID NO: 768 - DNA, 239 bp, Homo sapiens
  source 1..239: mol_type = other DNA
gacagccacctggctgcgtgggccgggggccagggcgagggtcgcggcggagggaccacaaggccccttggcttcccactcggtccagggagcaaagcagcgtttcccgcgaagtcgtgtccgcctccccccgcgacctcgggcccaacccggacccacctcgctcccgccgctcgatcagggacagcgccgcctctgtaggcgagggaagaaggatccgccctactactccaggattg

SEQ ID NO: 769 - DNA, 372 bp, Homo sapiens
  source 1..372: mol_type = other DNA
tataaccttacaactatataaaacatacatacatatatatgtatatatgtatacacatacacatgcatgagaatatatgtatgtatatataatatcctcacagtaattctgccagggatttttctttgcactgaaatatttcattagccttttattattttaaaaaataaaacctgaaaaaaaagacctagtcctggatgcacgcggaacccgggaaaatccctgcaagttataaacctactctaggcttcgttggacgtctacaggacggtcaagagtaaagaaggaaatttgagtacgaggttgtgtaggttggctatacagattctacaacttccgttttccaatcctggagtagtagggcggatcctt

SEQ ID NO: 770 - DNA, 308 bp, Homo sapiens
  source 1..308: mol_type = other DNA
ccgctgcactccagcccagagcgagactcttggccaggaactcgcccaggatcgcggccgggccagtatacccttttgagatgggtatatcggccggtgcaaaagcaaggcttggcgccgagtgagacgcacacttgccctgagtcacacagcgaatgccctccgcggtcccaaccctgagcgaggcagtggttagggggggccccggccccggccactcccctcaccccctccccgcagagcgccgcccaggacaggctgggccccaggccccgccccgaggtcctgcccgcgtcgccagccaatgg

SEQ ID NO: 771 - DNA, 375 bp, Homo sapiens
  source 1..375: mol_type = other DNA
tactcctaggcttattctgagaggtgctggcgcctcagatccaccgatctccggtaccggattcaggccattctaggaaatccagacactgagctcacaagaagggaactctgagtttgtctttcccaagcacaggctgatacccagacaggtaattgaccctcttggcgaggcgcagggtgcatctttcctgggacaagaagcacgacattgaggcctggcttcagaagcggattcatcggattccgactccgaatccgagagcgggggagtgtccatctcgccgccccaagcggctagcagagggcggccctggccgctgctgcctgccttcagccccctactcccacgccgtggctccacgtgccacggcaa

SEQ ID NO: 772 - DNA, 344 bp, Homo sapiens
  source 1..344: mol_type = other DNA
gggctgttctagaattatgactggcctccaccattattttgtgaactgataataacaagataagggtgatcttgtttttcttttctagttcatacacatcaggaggagaaagcaatgagggacagcctacaacagctccagccagcctgcccttctgggccccttacacagcccaagtgcctcactatgggccttcaagtaatcaatcattcaacaaatatgtattgattacgtcctacatactagctactgaggtcatcaggtaaatacataataggcaattaagcatattgcagtgccatgggtgcaccaaagaggcaagtcagggaaggcttcctggagga

SEQ ID NO: 773 - DNA, 237 bp, Homo sapiens
  source 1..237: mol_type = other DNA
tttcagacaaggagactgaggctctaagagacgaactctcctgggctctgcagggctctgggctgactgcagactgggggacatgctttcctctggaggacaggttaaatcagcagccaggtgcctggccatgttcctaccggtgggaaggactggagctggggttcaaatccagagccctccttattaccaaactcatgacagctcctcccgaggaaccagtggtgacagctgagg

SEQ ID NO: 774 - DNA, 301 bp, Homo sapiens
  source 1..301: mol_type = other DNA
gctgggagccacaggctgtcaaagcctggccccctggctggggtcacgggatcctgagatccagatgaaggcagttacacacacatttgtaggcaatttgggcggacgttcagttgtttatcaacctgagcacctgcctgcctacccataaagttcttggcaaaagcttgggggagaggtagaattatccctccccactggaggcgctgccgcagcccgccctctgccagacctgcagcttcagccccgctccgcaggtgagtcaagctctgccttgacccgcccacctgtccaggttctg

SEQ ID NO: 775 - DNA, 232 bp, Homo sapiens
  source 1..232: mol_type = other DNA
tggagtgtgatggcgcaatcatggctcactgtagcctaaaacttctgggctcaggcagtcctcccccctcagcttccccagtagctaggactacaggtgagcattgctgggagccacaggctgtcaaagcctggccccctggctggggtcacgggatcctgagatccagatgaaggcagttacacacacatttgtaggcaatttgggcggacgttcagttgtttatcaacct

SEQ ID NO: 776 - DNA, 378 bp, Homo sapiens
  source 1..378: mol_type = other DNA
gttgtcagccgtggcagacttctgctgccccagtaataagctgaagctttcattagcagcttaagctgaggctccccgggactgcttaatgtgagcccttgtggagcctcagggtgccctcgagcacagcaagctcaggtgtatgtgcttctcaggcccacagaggtcctttgtgttaaacccatgtaactgtctgtgtcctggggcacatacatgaggactcatgtgggcccggggggaggggagaccccagaacaatgtcccccaccccaccccccgcggaagccctttgtgccagcaagactgagtaaaatcagtccagctgtccccagacccatccccagccttgtgggggccagattggggggcctagaggct

SEQ ID NO: 777 - DNA, 269 bp, Homo sapiens
  source 1..269: mol_type = other DNA
ggccccgaatgccaggctgcgcagttatttattggactttaagaatgcaatgcaagagcatagcacagcatggctgttatgcagatctctataatggaaataacaagactattgcttcagcatagtaagtgctcagtaaaagttgctattctgatgctattataccattctataatcgttagccctcccctggcccctggccccagtgtggtctggatgggccccagaggggcagggacagggacagctgtatcgggcccagcttcctg

SEQ ID NO: 778 - DNA, 357 bp, Homo sapiens
  source 1..357: mol_type = other DNA
actcaagtcattattagagcactagattgagtgcgagtcagacctggattcccacaactctaaggtcctcacatctttaaagccccatctaagcttatcttccagatagctgtttgtaaaacaacaggcagggttcctacccggcgccaagggaacggctcaagcgccttgggcactctcgtgtaggactgcaggttctcggaccctgaagcacccggggccagacattccgagctgaggcagcgcaggccccacccggccccgccctgccccgccctgtcccggccggcttgactttccccggaaggcccgcccccttcgccggagaggccaatgggctagggcaacggttgcgac

SEQ ID NO: 779 - DNA, 547 bp, Homo sapiens
  source 1..547: mol_type = other DNA
tatataccagtccagctgtctggaggacacacactggctgccaaagtgattcagccagatagactgctgagtgcacggacggtggcatgaatatagaaaaaaatctttagttgcttctagaataaacctaacgcttagggctcctcgtgcgccctcagcacacgcagtgtggtctcgcccgccgctctgcgctcgccctgcaggagagggagctctttgaaggcaaggccgaacctcccccgagccctgagctgggcctgccgccacagatgtgcagtcctgccggggagcagtcacccggggacagggccgggccccgggctgcacgtcgggaaggtgctcctgaggtggccaggccgctgcaactggccagggcgggcccgggcggcgagggaaggggtgggaagcccgggccgcggcgcttcctgctgggacccggcggcacgcccctgcccccgccccggccgagcctgcgctgccggcctccggccctgccggccgcccaatcagcgggcgccccccgcgcggcccgcccctccccctctgg

SEQ ID NO: 780 - DNA, 603 bp, Homo sapiens
  source 1..603: mol_type = other DNA
taagctcagatcttctaactccaaactgctagttcgatgagtggcatttgagtaaggtactaaatctttctcaatatataaggttccttgcatgttccttagcatttaacgaatatatcatatcacctttctggtttattacatgtgattctcacaacacactataagacagatattttataatgtttttttcatgaaattaaagctgcttttctaaaagcatgagccctagaactaaataaattcatgctgtttatggtattccaatgcctaaagaaatgcaaaaaccagcatctactgccgtgttatacaagttttgttaacaccgctataagtgcggaccgcgtccctacacagtccgcagggccttccgggctgggctggtccctgccgaggctacgcagcccggccacccccagacctagaggaggccaacgccacgcctgcccgccggaccctccccctcggatctcggggcccagtgctgcgcccgcccgcccctcacctccggctccgggcgctccgaggccatcacacagccctcccgcgccggcccgggccagtgagggtgttcccagcaggaaccggaagttggtgggaggg

SEQ ID NO: 781 - DNA, 171 bp, Homo sapiens
  source 1..171: mol_type = other DNA
ggggtctgcaaagcaatgcaaaactgtcttgcaaacctgcctgacaggattataagctgcttagggccttagcccgactgtctcctgtcaggaagcttgccagccgtacgccccctgcattgcggcggccgaggcggctgccaccctcccaccaacttccggttcctgctg

SEQ ID NO: 782 - DNA, 335 bp, Homo sapiens
  source 1..335: mol_type = other DNA
ttgaactcttgattggttaaattacctttccaaacgacggccagtgccctgggatcagatgacctccctggtccaatcagctgaggctaaggaaaagggacagctcacccatagctgctccaatggggcggtttcccttctgaaagtgcgcttgcagcgcgcgtgcacacacacgatatctcagaatttccaaagaaaaaaattgcatattttaaaatttggatatttggtcatacagctttcaaatgttgcttaacgaacagatagcatttttacttcgcgtccggctctcaggccctggagctcggcctcggcgcgtcgtgaaggcccgggct

SEQ ID NO: 783 - DNA, 458 bp, Homo sapiens
  source 1..458: mol_type = other DNA
cacccatagctgctccaatggggcggtttccctctgaaagtgcgcttgcagcgcgcgtgcacacacacgatatctcagaatttccaaagaaaaaaattgcatattttaaaatttggatatttggtcatacagctttcaaatgttgcttaacgaacagatagcatttttacttcgcgtccggctctcaggccctggagctcggcctcggcgcgtcgtgaaggcccgggcttcgcttttctaaccacgaacagtgctcgttcgttcgcagggccagcaaggagagccccgcccccgcccgccgcccgccgcccgccgcccgccgcctttggatcccgcggactccgcccggcccggcctccccaggcatggcgccgctgcgctcgagctctccggcctccccgcgcgggtgcgggccgcgggcagctcgggcttcgaggccgtcgaggtggcctggccgt

SEQ ID NO: 784 - DNA, 161 bp, Homo sapiens
  source 1..161: mol_type = other DNA
aacattaaaaatcacttgtactccaaaagctattgaaattttttaaatgtgaaagaaagaaaaggttcacatgtgtaatcccagcacttcagcagagggcccctatgcttgagcaccgccctgtgacggcagacaggagggctcaggctttttgccagaca

SEQ ID NO: 785 - DNA, 236 bp, Homo sapiens
  source 1..236: mol_type = other DNA
gtggagtttctgcaaagccagtcttatctttccagtgacccaatcccaactctggaattgagaatcgaattcagagtgcattgctagtcactattcacaacaaaattactacttctgtctgggcctcagcggctccgcggctctacgagcgagagtgcacgaggggaggggcgccgccgggggcgcgcacggcaggggcaggggcgcgggcgcgagcgcgaggggagcgcgcggct

SEQ ID NO: 786 - DNA, 670 bp, Homo sapiens
  source 1..670: mol_type = other DNA
gtatgtgacactgtgtgagaccgtatgagacagtgtatatgacactgtatatgtgtgagactgtgtgtgtgaaacactatatgacactgtatatgtgtgacactgtatatgacattggagactatgtgtgagacactatgtatatgtgacactatgtatgtgtgtgacactgtgagagacactgtgagacaccaagacagtatatgtatgagacaccctgtgtgtgtgacacagcgtgtgactgtgtgagacgtgtgtgaggcactgagactgacactgtgtgtgaggctgtgtgagagtcagtggcagcagcctgcctggagggaccctgggatggcgcctgcccgggtgagtctccagtccactgtgactcagtcattcccctccccagaaggtgatgtgtgtgggtcccgccgcctgccgacagccgcaacggcgttatcacccagtactccgtggcctacgaggcggtggacggcgaggaccgcgggcggcatgtggtggatggcatcagccgtgagcactccagctgggacctggtgaccgggtgtgggtgcgggcacacacagacgtgggccccggccccgagagcagcccggtgctggtgcgcaccgacggtaggcagtgccaccggggcgggaggggaggcgttctgcctcagacaccaccc

SEQ ID NO: 787 - DNA, 317 bp, Homo sapiens
  source 1..317: mol_type = other DNA
tggagtgcaatggcgcgatctcggcccaccgcctcctgcctcaacctccggagtagctgggactacaggcgtgaaaggagagcctccctcatggtctgtcctaatgctcagggcagcttcccgcgccacgggattttgttttgaaaaccgagacagagctcggaagctgcccctatttggcctatcctttctgaccaggagcccgcctatgattggccagcttcgcgatccagctagaggctcactgcccggcaacagcccgagccggcgctcataggctgagcacagtgtatggcttgcagccacccgctgcgcag

SEQ ID NO: 788 - DNA, 323 bp, Homo sapiens
  source 1..323: mol_type = other DNA
tctgggttcctgtagtgaaaggacgagagaggggctgagcactggaatgctgtggctgcactggccccagtccatagaggggtcaactatgctcacctgcaccgactaggctgaggtgctggtacttgccccaacccctacttttcttccttgcctatgcagggcaaacaaaatgtgaaattctgccctcagctgagctgagtctgtccaggcctggaaccgtctcaagacagtgctggcaaagctgcagtattgagatgctgccacctctttgtcttcccctaaaggagaacatggggttaaacaggtttttgctcctcaag

SEQ ID NO: 789 - DNA, 402 bp, Homo sapiens
  source 1..402: mol_type = other DNA
aaggagagcctccctcatggtctgtcctaatgctcagggcagcttcccgcgccacgggattttgttttgaaaaccgagacagagctcggaagctgcccctatttggcctatcctttctgaccaggagcccgcctatgattggccagcttcgcgatccagctagaggctcactgcccggcaacagcccgagccggcgctcataggctgagcacagtgtatggcttgcagccacccgctgcgcagatgccgactttagaggaggcggagtttcggccttcgcctgctggaaaagcagtaggatcggccagtggcgacagcaggagctgagcctaagccctggcggggctttcattgccgctgtagcagtgaattggtcctttccaatcttcaaggccaatggac

SEQ ID NO: 790 - DNA, 642 bp, Homo sapiens
  source 1..642: mol_type = other DNA
cagcagtttttactcaacagctgaccagttttccagaaactgcactttttttttttggtcaacctaatgctgcctatgcagtcgggtcgaccccttaggcagctcctcccagaagcctttttgtagggcaaactgccttccctttgtaaggtagggcctttggatccaaggttgcagtttaaagacgaattaagttttaaattccgccccaggggcttggaggccttgtgccacgcgcgcttacccaccagggcccacggaggtccgaagctttcggcctcagtgagcggcgctcacgacctggagggcgagacgttccccgcgcgggcgacgaaacacgctctcgaggggagagagccgtgcgtcctctgggccgtgggaagagggttcctctagacagctcgatgtgcccgggagagacacccacgctgaacctgcaagctggggtgctccaccagcgcgaacctctcgccccgcactcgccgcagcactgctctcgtggtaggcggggtgggcgggacggcaaatccgcggctcctgcgtctattgggctgctcggggcagcgcagctccgcattggccaggccctcgctccgcccggcttccgcgagcccattggtcgcaggcgcccgaccgggtcgc

SEQ ID NO: 791 - DNA, 317 bp, Homo sapiens
  source 1..317: mol_type = other DNA
tcccagtgaagctgatatttaagcttaatcatgaaggagtgacataatttatcgtgtctacggtcactgttcgggacagttcccactactggggaatggttcccactggatggttcctgcaaagaattgggcacagtggctcaatgcctgtaatcccaacactttgggaaggagtttaagacctgcgtctcttaaaaagaaatctgtgagaatccagttaagttccttttacagattttacccttaaagccttaatgtggaaatgaaacttgattcaaggtttaaacaccttatcccagccactcgggaggctgagg

SEQ ID NO: 792 - DNA, 251 bp, Homo sapiens
  source 1..251: mol_type = other DNA
gtcctttagtaaaattctgttttgtttcacatatttcagtaccatggtaaacaaggttatcttgagtgagaccagccagcaaccagcatggttgttctccagccagacatcagctgtgtaggtacatccatttcgatttaatcaaagctgtgttttataatgattgatggtcaaaccaatggcttgatctagtttaacatataatttaggagtaaacaaggcaggcctgcctcccacgtgttgggtccccc

SEQ ID NO: 793 - DNA, 347 bp, Homo sapiens
  source 1..347: mol_type = other DNA
aacattttatagaaaggtaagtgaccctgtaacttggacaggtgagccacacactgtgcagcctcctacccaccgctgcctggtggtgtgcagaggtgttgaggcccagctggccttccctggacatgggcagtttcacatacagtacacacacagggtgggtggagcaggtaagtggaaccactccacctgacttgcacccccacgggctgtcagcacttggcaggacatcccagtcctcagataccagaggtttagcccgctgctgggagcctctcaggccttctctcagaaatgctgccagaagcccagcctggtcctggacaagggacctggtgggcagctct

SEQ ID NO: 794 - DNA, 339 bp, Homo sapiens
  source 1..339: mol_type = other DNA
gctgctgggagcctctcaggccttctctcagaaatgctgccagaagcccagcctggtcctggacaagggacctggtgggcagctctctgtacagaggtctccgcccagcctccgctgccgccgctgcatcatcgtgggcaatggaggcgttcttgccaacaagtgactatgacattgtggtgaggtgagctccccaaaatggcacctcgggtgagtgtcgtggccccaacccggagaataggtccaggtgacctggactccctattctccatgcctgggatagtctggggtcatggtgccttcccaaacacaggcccaggctctgagtgggcctgctct

SEQ ID NO: 795 - DNA, 255 bp, Homo sapiens
  source 1..255: mol_type = other DNA
caggacacctgggtttgaatccacttgcagccacttgcaggctgcttgaccggcacaggcaggaggctgtgctgtgctgtgcttggcacaggctggcacctgctgtaggggcttcccctcagctatgcctaaggtcagcacctttggaggacaagacgctgaagagctgctggtcactgggcgcccgggctacagaggtgaatcagatgtgagtccctgccctatcatttaattcttacaatagcttgtaagcta

SEQ ID NO: 796 - DNA, 538 bp, Homo sapiens
  source 1..538: mol_type = other DNA
tatttttaattttctaaaaaagatttgctgatctgggaggcaggatttcatccgccgcccccaggcctggagagtagattgcatcaggccagggagtgactcagccaccccttgctgttggacttcagtgactcacactgcctgcccgcagggtgtctataacctaggtgcttcatgacaagaagtggcttgaagtctgtgggaacaaggtccttccgccagcactggaaaggggtatgaaggttcttttttccctgtcttggcaactggagcaaaggcccaactgatcacttcattacggagtttctgcggtgggcccagcacatggccgccaagggccccaggggcagcaaggccttggtggagcagccagagctgtgcctgctcagcagccagtctcagagaccagcactcagcctcattcagcatgggtccttgatgccagagggccagcaggctcctggctgtgcccagcaggcccagcatgcaggtggtgggaggcagcaaggctgctgccggaatcacttctccaatcagt

SEQ ID NO: 797 - DNA, 173 bp, Homo sapiens
  source 1..173: mol_type = other DNA
gagccctggccatgcaccagaatcacctgtgcaatttgaaaactgcacatgtccccaattgccagttggttgacaattcccaaattgttggaaaggcacactttgcactaatgaattttcaaaattgcgtgttccagattggggcctggcagccccacataattaggcatctg

SEQ ID NO: 798 - DNA, 276 bp, Homo sapiens
  source 1..276: mol_type = other DNA
gtggctctgggtctagataactcttagagtgaccagcttcctctccggcagcctggggtgaaggccaagaggacccctctccttagacaacctctgagcttctctgtggaaaaaggggattaaaccctcacctggagaaactggggtggcaggccggtcccccacgcctctccacgctgtcccactgcccctggcctaggcagcaggtgagtggttccagtgacttctctgaatggtcggtgcactcaggtgattcctcccctgggctcccagagg

SEQ ID NO: 799 - DNA, 236 bp, Homo sapiens
  source 1..236: mol_type = other DNA
ggggcctggcagccccacataattaggcatctgagctgctgcagggcagacatgcacgtaccagcagtcagccgccccacgcagggaccgccaacctcgggggacctagccaagctaggggggactggatccgaaggtggggcggggcaggggcgctcccagccccaccccgggatctggtgacgctggggctggcaccggacggctgcggcggcgggcaggaggctgctgaggga

SEQ ID NO: 800 - DNA, 586 bp, Homo sapiens
  source 1..586: mol_type = other DNA
cagaccagatctatggcatggtctgccaccctgtcttgtgccaggggcaagataagccgatttcctcatctcatctgaaaatgatgaataaaaagtaagctactcttactctagttacacataaagttacttccaaaaaccttacgaaattccccgagcactgtccatggtatgcacctttgctgggccggaggatgcccccggcagcggagcgccaggtcctactaaggagttgggccgcagcgccccgcgccggtctgacccggaatgcctgctcgccgcggtaggccgaggacaggcggggctctgcaggtccccaacccacgtgctcccggcctcctccgcagggcgccgccttccggctaggcgcaacagcggcggggcctagactcggccgcggcctggggcggcgagccgctccaccgcctgctcaggggagtgcgagctggcgcgaggacagttccgcgcagttccgctgggccgtgccggcctgtaccgggccgtgccgagccagaactggcagggccggggacaggcgctcggggcagcccgcgccttgccgaggtccctgccccgtcccggccgg

SEQ ID NO: 801 - DNA, 239 bp, Homo sapiens
  source 1..239: mol_type = other DNA
ttggacaaataaaatacttagtatgccaaatggtgatcagtaagtttgcccagcaaacgcgcttccctgccactcagcaaggtgaggcagagggcacgcgcggcgccacccgccacaggccgcacggctgccagagaggacgccttaggggcccgcgagcagcgccttgctctagacgggcggcggcgctgcgcggggaaccggcgtggggtcacgtggtaccggcgcatcacgtgggc

SEQ ID NO: 802 - DNA, 385 bp, Homo sapiens
  source 1..385: mol_type = other DNA
aaacactaaaaatgaagtgcctaatgtacagtaagtgctcagtatttggctgattaaatagcaaatgctttcactgcatgcgatatccaaagaactactttgtaaagttttgtatataaattaattagaccctcacaacaatcttattaagaggtactattgtcacaactccccattcttcagataaggaaatgggcacgagccggtcggcaccaagtttaaaattatgtgaccagtctgagcaacatggcaaaaacgctggatgtggtggtgcgcctgtagccccaactagcagtggccgcgggtcggctgaaccggactcccagcgcccgagaggagtccgcgccttcctcgatgtacttccggctggcctgggactcaggct

SEQ ID NO: 803 - DNA, 236 bp, Homo sapiens
  source 1..236: mol_type = other DNA
actgcagtccaggccgagtcctcagtgcggggagcaggctgctgctgctgactctgtgcagctgcgcagaggaagggtaaagaggcctgtacgcctcagcctcacttctgatctgcatgctgggtggactctaacccccaaacagacttgtttggggtcagggctctgactgaccaccatggcctaggcagtggtctctgcctccagtgatcccagggcccagggcttcctgggga

SEQ ID NO: 804 - DNA, 298 bp, Homo sapiens
  source 1..298: mol_type = other DNA
agaggaagggtaaagaggcctgtacgcctcagcctcacttctgatctgcatgctgggtggactctaacccccaaacagacttgtttggggtcagggctctgactgaccaccatggcctaggcagtggtctctgcctccagtgatcccagggcccagggcttcctggggagttcgcgctccaagggtccgtgcctcctgggtgcccgggttcggccgccggcagggcgggctcgcagcggcgcgcggcgggtgcgggcgtgctggaggcgggggccgcgggggcgcgcgcgcgggcgcg

SEQ ID NO: 805 - DNA, 459 bp, Homo sapiens
  source 1..459: mol_type = other DNA
ccaaacagacttgtttgtcagggctctgactgaccaccatggcctaggcagtggtctctgcctccagtgatcccagggcccagggcttcctggggagttcgcgctccaagggtccgtgcctcctgggtgcccgggttcggccgccggcagggcgggctcgcagcggcgcgcggcgggtgcgggcgtgctggaggcgggggccgcgggggcgcgcgcgcgggcgcgcgggccgggcctgcccctccgaggcgccgtagcgcgggagggaggcggcggcgctgtggtccgtgggtccgccggtccgtgggtctgcccggccgcccggccccgccctgccccccggggcggctcggctccatggcccgcggcggcggcggcggcggcggcggcgggaggcgacccgggggccgcggtggccgctgaccgggcggcgggaggcggcggggccgggccatgggg

SEQ ID NO: 806 - DNA, 358 bp, Homo sapiens
  source 1..358: mol_type = other DNA
actgacctcccactacagtagtggtgactatagtcatggtgacgacaccacagttgcattctcctaggaagacgccccatcaccctggcagtttgggagtccccatctgggggtgtcaggtacagccctagggcttggtttctcccagcccgcacccctccgtggagcctgagctgctctggtcccacccagtgctaggcctgtgggctcagatggttccgtggggggagtgagccaccctctcgcctgctctgccccgttgttccagttacttgctgggaacaagggaaaaacccactccagctccggagcacccgtgctgggctgcatggggactggcctgcccagcccggcagtg

SEQ ID NO: 807 - DNA, 433 bp, Homo sapiens
  source 1..433: mol_type = other DNA
tggggggcctcctgcctgggcaggctcttcaagcccagtcactgtcagggtcgggccagcccctgcactgcctcgcagagtggcctgggctaggtcactccaccccccttgagtcccctagggcctggaagggtgggaacccccttgctcccaggggaagctttggtgcgccccctgctgaggagcagccccaggaggggaccagaggaagtctggttcccgcctccctgtctgagagaggaggcaggagtacattgcacagaaacttgtgtgggtgctttagtaagggacagtggaggcgacgaagtaataaatgcccagggccgagcccaaagtgcttgggtcagggctcggtggagcgccgaggtgagtctgaactcccagccggcacgcgccgcccgccggaccaaacacgggagggggcggggccctc

SEQ ID NO: 808 - DNA, 627 bp, Homo sapiens
  source 1..627: mol_type = other DNA
tcccagggcccagggcttcctggggagttcgcgctccaagggtccgtgcctcctgggtgcccgggttcggccgccggcagggcgggctcgcagcggcgcgcggcgggtgcgggcgtgctggaggcgggggccgcgggggcgcgcgcgcgggcgcgcgggccgggcctgcccctccgaggcgccgtagcgcgggagggaggcggcggcgctgtggtccgtgggtccgccggtccgtgggtctgcccggccgcccggccccgccctgccccccggggcggctcggctccatggcccgcggcggcggcggcggcggcggcggcgggaggcgacccgggggccgcggtggccgctgaccgggcggcgggaggcggcggggccgggccatgggggacggaaccgtccgcagccgccggagccgggagccctgcccaagtcggagcggcgtcccctgctgagccccgagcgccgggtgagaggagggcgcgcgcggcccccacccagggccccgagattccagacccagccccgcgaggggcaccccgagcgcggccccgagatcccaacccaggagccggtgagagaggcgccggcggccagaccccggcctggctgcccccaccccgcccc

SEQ ID NO: 809 - DNA, 336 bp, Homo sapiens
  source 1..336: mol_type = other DNA
ccagaattcatgcacgtgtccaacggtcctgtggtaagccaggccttctgctgactgaccagtttcccactacagtagtggtgactatagtcatggtgacgacaccacagttgcattctcctaggaagacgccccatcaccctggcagtttgggagtccccatctgggggtgtcaggtacagccctagggcttggtttctcccagcccgcacccctccgtggagcctgagctgctctggtcccacccagtgctaggcctgtgggctcagatggttccgtggggggagtgagccaccctctcgcctgctctgccccgttgttccagttacttgctgg

SEQ ID NO: 810 - DNA, 300 bp, Homo sapiens
  source 1..300: mol_type = other DNA
agggtccaaagtagaaattgcctctgtgggctgggccccttccctgagcagatgccctactcttctctctgtttcacagaggaggaaaccgagccagtaggacctaggccttacccagcaatgcccacagtctcactccaggggcctggagggctaactccagcctcagccccccatggcttcattccagcctagcccgaaggggcccagggccccagctggagggcagcgaggcaggggcggagaaggggactcctttgtggcgctcactcgagggacttggctagatctcccaagcct

SEQ ID NO: 811 - DNA, 277 bp, Homo sapiens
  source 1..277: mol_type = other DNA
cctgtctgggggcacagacacaacaggttgcctagatccaggtgtgtgtgcacacaactcacgcaagattcccagatctgatcaacagagagctgtcttagctcgcatttcagggaatgcctggcagtgcctctgataaattaataaactggaatctccaacaattggttggaaaaaaattaaactgtttcctggccagaaaatggtgaggactcagggtccaaagtagaaattgcctctgtgggctgggccccttccctgagcagatgccctactc

SEQ ID NO: 812 - DNA, 268 bp, Homo sapiens
  source 1..268: mol_type = other DNA
aaccaggtccagacaggctccagcctggtcatgccagttcaacttcccctggagcattgctggggacccggcacagtgatcctgccctgggcttcttaggtgcctggtacaagggagtctacagacgccatactgcaacacattggcattagattgtagtgtcctctagtggacactttgtgaatttacatagtattatttactggagtgtgtgtgtgtgtgtgtgcacgtgcacgcacgtatgtcttcaccatgctgggaaatactg

SEQ ID NO: 813 - DNA, 272 bp, Homo sapiens
  source 1..272: mol_type = other DNA
ttgcgcaaactggccttcttaatgccttaacattcccttgagggatacttctaagcttgggcccaaagagtgcagctagctcctgtactagtgaagtgccacgaagctggcctccagtgttcaaatcattaactcatttaataaaaaaatagtaaatgtcccacgcaccgtgctaatgttttacaaggattcttggtatttcatttacacaggtgccattaaagtgacttccaacaccgaccggaagtgtttctgtcggccgcgttccgaat

SEQ ID NO: 814 - DNA, 372 bp, Homo sapiens
  source 1..372: mol_type = other DNA
acctaaaattataatagttaacaactttattactcatttcttaaattgacagcaaggactttgttctgtcctaccttcagttcgtacagacaagggacagacacagactgtaagccctgctggtggaggctctcctatcggtagaggccctacacccaccagcctcctcctggctggagttggagacctgggtgtcctcagtccccacttgggtgaaacagttgctcaggcctggggcagggctgcgagggcggcgcagggcgggacgggtggggcctgaccccgccccttggcgcaccgatacccgcctgcgacgccgtggtggctggttccctgtctcttcagtagagagtctagacccgaccgcaggct

SEQ ID NO: 815 - DNA, 204 bp, Homo sapiens
  source 1..204: mol_type = other DNA
ttctgtggtttccttcctcagaaaaaatccaagaagtcctctgagaccagcaagggctcctgcttgcttagcaggatgcaggaggacctgaagtcttttgctccaggacgggacaaaaagctctttaacccactgctacccagtgacactggccagggataccgtggccttggaagtggatgccattcaccaacccggcccgca

SEQ ID NO: 816 - DNA, 254 bp, Homo sapiens
  source 1..254: mol_type = other DNA
attccctgatatggggattaccatgaccgattgggaagctgtcaaagccatcattcccagctaaacagaagtttcctctgaattacttgttgaatgaacgaatcatgaggatagaaagtttcattttaaaaaaattcctttcacagatcagaaggccggcggccgggactgcagcccattggtcaaaggggtcggcagcgggctcagcggttggccacagcgcccgcccgtccgccgcgtcggtcggggtcaga

SEQ ID NO: 817 - DNA, 388 bp, Homo sapiens
  source 1..388: mol_type = other DNA
tgcaggcgtgagacttcttaaaccaggatttattttggtgaacttctgctatccaagacttgttaaccacgttttctctataaactagtggtaatattattatctccagaattaatcttaggagtaaatgaaattatgtaaaggaggatgatatgaaatgatctgaaatgaactgtaatataaacatcaataaaacaccaataaaaaattttattctcacatctggataagttacagttttattaatattcatttattatttattattatagtcaaagagtaagatttttctgggatggtcccttttggttcaggaaaggaagaacaacctctttagttcacaatggctcgcgaccccaagacttccaagcccttagtgcctaatgta

SEQ ID NO: 818 - DNA, 368 bp, Homo sapiens
  source 1..368: mol_type = other DNA
caagacttgttaaccacgttttctctataaactagtggtaatattattatctccagaattaatcttaggagtaaatgaaattatgtaaaggaggatgatatgaaatgatctgaaatgaactgtaatataaacatcaataaaacaccaataaaaaattttattctcacatctggataagttacagttttattaatattcatttattatttattattatagtcaaagagtaagatttttctgggatggtcccttttggttcaggaaaggaagaacaacctctttagttcacaatggctcgcgaccccaagacttccaagcccttagtgcctaatgtatccagcgctgagaggcagcactgctccttctct

SEQ ID NO: 819 - DNA, 518 bp, Homo sapiens
  source 1..518: mol_type = other DNA
gctgcctatgcgtccccagcctgggctgacaggaccaaggtctcagcacacactggtgcagagagacatggctgcaggcccaggtgctcacatgcgcacacatggctcattgtgtagaccccctgcagggtgccaagaagctctgccctcagtgcaacacgatcacagcgcccggagacctgcggaggatctactgtctgccccaggcaggcctcgcctcctgtacatacttgcacacaggttccccatgtacatacatgcacatactcaactctggagccagagtagaggctgtggcccaggcactacctgctggctcccacctatggtttgggggccatacctgttccagctctgttcccagagtagtggggcacggctcctaagatccagccatgtaatatagaccgtgtatgtttacaatgttgtctggaagcagcgcctccttcagggttggctgggagctcggcccatccacccacacgccccaagggacatgatcctctccttagtcttag

SEQ ID NO: 820 - DNA, 252 bp, Homo sapiens
  source 1..252: mol_type = other DNA
cgcctggcatgcaaagagtctctctccctctcccgttaagacatgggagagggagggccctagggcctaaggaaccttagcacatagtatgtaaatatgctggcacatagtatgtaaatatagataaactcaaccccactgggtggaggttgggtcggctccagccctcgcagttgcggctggtagacactcttccgccgcgtaggataggactctgttcggacgagtgctcacctacatgagagggtgggg

SEQ ID NO: 821 - DNA, 344 bp, Homo sapiens
  source 1..344: mol_type = other DNA
agttctacccgacggcagagactgcactgttaaccaccgggcttctgcgaggatcggtgaccccgcgagcctcctcgccaggggcggggctctctgagcctctctaagtctaggacctgccagaccctatgagggggcggcccgagggagggcggggccgcatgaggggcggggctacagctgcgctcgcaacccaggccagcagggctgatccgggatctcgatggtgtagtccagctctgccgaggccatggtgaaggcgccggcccagagcacgggtctccagccggaactcccgcttgcgcacccgtgcctcacccgggcgcctcctgggcgccgcccaa

SEQ ID NO: 822 - DNA, 437 bp, Homo sapiens
  source 1..437: mol_type = other DNA
tagaaagaagtagacataggagactccattttgttctgtactaagaaaaattcttttgccttgggatgaactatgtgtctagttcattatctccatttcctggtaccatgcctagcaggtactcaataaatatctggtgaatcagtgtctttctggaaatttatacataactccttgaatgaggcactcactatttaataagaaaaactaagtcaagtttctaatctgtggttttgttcctaagtgttgggatctccaacttgctcgaggtcactgaacttgcaattgaagaagctacgattcgaaccgtttcgggaacccttcccagaaggcacagcgctcgggggtgtggccagacgcatgggcggtgccaagctgcgtctcccccaaggctccgcagggcgccgctgactggcggaagccgcgggatttaaact

SEQ ID NO: 823 - DNA, 215 bp, Homo sapiens
  source 1..215: mol_type = other DNA
agtagctgagtgaataggcagcaaataactgcagatttcttttttcttggagtgcagtggcgggatctcggcgcctcaggctcctgagtagctgggattatgaggtcaggtaatccgcccacctcggccccaaagtgctggggttacaggcgtgagccaccgcactctgtcacattttgaaatacaaagttgggacaaatttaatatgtctgaac

SEQ ID NO: 824 - DNA, 290 bp, Homo sapiens
  source 1..290: mol_type = other DNA
gccaggctggtctcaggcctaaaaattttttttaattaaaaaatagatatccttctagctcagaaaagtgatcccttataaggatgaccagtcattaatattcagcttcctaatatttatccgattgatcaagtgcgcagacccccttcccccagcccagggtcggaggcgagtcgccgggggtcggcagaggtcagcagcctgcgagaccctcctaggctcgtggccctaggcgcggcagctgacacgtaagtctcgtcgcccgacgttgtttcggttttacaaaccga

SEQ ID NO: 825 - DNA, 373 bp, Homo sapiens
  source 1..373: mol_type = other DNA
ggcctggcgcggtgggcgggcggatcacctgaggtcaggagttcgagtccagcagactctgctgaaagatcttaaggtagctggggagttctcttcactgcaggaagctgggattacaggcgtgtgccatcacacccggctgcttacaggctgccgccttgacctcccaaaggaactctgcagcctgaccttaaggcctcatggggctgaagaacctggaggagtgtgccagggccatttgtcctccagtaaaacaaggatcatcgatgttgtctacaatgcatctaataacgagctggttcgtaccaagaccctggtgaagaaagtggtacgagtcccactatgcgctgcccctgggccgcaagaagggagc

SEQ ID NO: 826 - DNA, 330 bp, Homo sapiens
  source 1..330: mol_type = other DNA
ctcgactgacctcaagtgatccaaggtaactaggtattacttcctccagaggtgaaagtggccactcaaatcttgccagatctgagcctggccaagcccccaagcccctgtacaagaagactgggagtgtggccagtgcacattccagccttggaagtcccgacggtgtgatcagcagctggtattattataacagtttatcagtatagctggcatttctgccactcgaaggccagcccaaccctggggaagctggatgacagcttcaatccatcaatgataggcctcagtccagcctaactttatggactgcagaggtacttaagtctg

SEQ ID NO: 827 - DNA, 405 bp, Homo sapiens
  source 1..405: mol_type = other DNA
tgtctgtttccatcaagcagaatgtaaactaaatgagggctgcaagcttgattagttttattagacaaggccaggaggcctgtggtcctgggcctctgtctctggccctgggaacccgtgtctagcatttgagaaaatgcaattcccaggttgggagttccagaccagtcccagctgctcgggaggctgacaagaaaaaagaaaatccaattcccattcactttctggcctctggctgctgacccaggcccgggggtattttcagaggaaggattgcggaccccggtggcaaggcagccctcgggccaggcaagccaggcgcgagactgtgccttccttccaggccctaaagagggcagcactgggccgggccccgggcgagggcgagggacacacgcggtccgg

SEQ ID NO: 828 - DNA, 472 bp, Homo sapiens
  source 1..472: mol_type = other DNA
cccagctgctcgggaggctgacaagaaaaaagaaaatccaattcccattcactttctggcctctggctgctgacccaggcccgggggtattttcagaggaaggattgcggaccccggtggcaaggcagccctcgggccaggcaagccaggcgcgagactgtgccttccttccaggccctaaagagggcagcactgggccgggccccgggcgagggcgagggacacacgcggtccggaaagcgagcgccgcccctgcctctccgctgctggctggagacgcccccagatgcccgggccccactcggacttcaccccacgagcgggaccggacagggatcagctggcccctgcggcctggttgcacctgcatggtgactagctgccgggctgcgccccggggcgcggcgaggaggcggggtctggcctctcctcgactcgctgctaggaggcaggcgttcattgataaaacgct

SEQ ID NO: 829 - DNA, 409 bp, Homo sapiens
  source 1..409: mol_type = other DNA
tcggaaagaaagtgtggccctacccactggagagtctccgcgcagaggtttttatacaagaaaaataaagtgaagtcatcccaacactttgggaggctgatcccagctactcgggaggctggcggagcctgcaagccgagatggagccactgcactccagcctgggtgacagggccctttctcagcgtaagcctctggacttacacttggccggcgcccccctccctcctcctccctggggccccgcgggcgggagggaggcgcggggtggcccagcctgggtggtctcccgccccgccccctgcggcgccgttacctagcagcgggccgggccgcgcggctagggtaatttgcgggcccctcagccaatgggagggcgtcgccccggccagctcccttttctggagct

SEQ ID NO: 830 - DNA, 530 bp, Homo sapiens
  source 1..530: mol_type = other DNA
ggagagtctccgcgcagaggtttttatacaagaaaaataaagtgaagtcatcccaacactttgggaggctgatcccagctactcgggaggctggcggagcctgcaagccgagatggagccactgcactccagcctgggtgacagggccctttctcagcgtaagcctctggacttacacttggccggcgcccccctccctcctcctccctggggccccgcgggcgggagggaggcgcggggtggcccagcctgggtggtctcccgccccgccccctgcggcgccgttacctagcagcgggccgggccgcgcggctagggtaatttgcgggcccctcagccaatgggagggcgtcgccccggccagctcccttttctggagctccagccgcctcccggggactgcagttgccacctcgagccctgctgtggcattccgcctgcgcgcgggacccattcctcctccagccgccgcggcccacggcccacggagcgggtgaatcccggcgccgcgccccggacccgcagctccc

SEQ ID NO: 831 - DNA, 242 bp, Homo sapiens
  source 1..242: mol_type = other DNA
ctagaggcgaccctgcccggggaacagctggcgcgaccgcggacagccccttcccctgccactgacaggagtcttgagtcactcctaatcccaaggacactggagatcattattcattttaatgtgataaaggctggggctgtcttgagcagagctaacctctgcacctactataggtccaggctatagtatggacctgtacagcaagggcagcagccagggcagccctggagctgtcgctg

SEQ ID NO: 832 - DNA, 231 bp, Homo sapiens
  source 1..231: mol_type = other DNA
gctggtcttgaacgcccggtttcaatcctctcggcttcccaaagtcccgggccgggcgcggcaggcgcctgtagtcccagctcctcgggaggtgagccgagatcgcgccactaacccctgcaggggcattcggtgctagccggtcttagacttactccctgaggagtctgggttcccggcaccctgacacacgtgtcgaatgctcctcggtggccccgccatcgcgcgcct

SEQ ID NO: 833 - DNA, 550 bp, Homo sapiens
  source 1..550: mol_type = other DNA
atagacatgattctcactctcatggagttgacagtcagacattaaacaaatatataaaaatacaactatgtaaaaccaaaaaacacgcaaaagtgttttgtattctaggatgcaacccccgtggcgataagatcttgatgccccattgtcaaggcctcctgtcacatcagtataacttcacggaggcggctccttggggtgcgcgggcgggcgggcgggcgtgcgagagcgtccggcgctcctctcccctccgcggtcgccggatccgcgagagcgctcggctcgcgttctaggctgtttgcgcctggagcgcgccgcgggcccgcgctcgctcccgcctgtcttcgcgtccgcggcggccaggacaccgcgcgccgcctcacgctaccctgcaggccgcccgcgtctgccctcgcggcgcgctcccgggcccggccgcggttccccactcgggccggctggctcgcgggttctctcgccccgcccccctcggcgccaccgctgggcgcttgcgcggggcgcgtggccgtggccagggtctccgccgcag

SEQ ID NO: 834 - DNA, 485 bp, Homo sapiens
  source 1..485: mol_type = other DNA
actatagaaactcttttaatacagttcttggaacgttttaaagttgtagagattagtttgtcagcaaattctgaaataatctgagctttcttgatcgagcaagaaacagtaacttacaattgcgtgttgtttagtgaagatagacatgattctcactctcatggagttgacagtcagacattaaacaaatatataaaaatacaactatgtaaaaccaaaaaacacgcaaaagtgttttgtattctaggatgcaacccccgtggcgataagatcttgatgccccattgtcaaggcctcctgtcacatcagtataacttcacggaggcggctccttggggtgcgcgggcgggcgggcgggcgtgcgagagcgtccggcgctcctctcccctccgcggtcgccggatccgcgagagcgctcggctcgcgttctaggctgtttgcgcctggagcgcgccgcgggcccgcgctcgctcccgcctgtcttc

SEQ ID NO: 835 - DNA, 86 bp, Homo sapiens
  source 1..86: mol_type = other DNA
ccactcaggctggagtgcaataagaacatggctcactgcagccctgggactacaggtgcgttaattcaagttcacattatcacttg

SEQ ID NO: 836 - DNA, 522 bp, Homo sapiens
  source 1..522: mol_type = other DNA
gtaacccacgtgttctacacacaggccttggagtgagtcttctactggcttgtatgagcggagaaagttggactagacgacctttgaagggcttgaggatctagagcctggcagtgctattactactaaccgttatgagctcccaacgctccaggcttttgcagccggagccgcggtagttcaggcggaaggagcagtcctctgaagcttgaggagcctctaggccttcccctctcccagagcgcagaggctttgaaggctacctctgggaagccgctcaccgtcggaagctgcgggagctgaaactgcgccatcgtcactgtcggcggccatgacaccgcggcggggtctcgccgtcgggtcgccgatgggtcgaacttccgttcagacgtcccgggtccggcgcggggaaggcagcctggcgcgcgctaattgcctattggcctgtgctgccggctcgcagcccgggtggacccgagccacgccccctggagtgcgccggaaagccgggcgcgctagagc

SEQ ID NO: 837 - DNA, 372 bp, Homo sapiens
  source 1..372: mol_type = other DNA
gcctttgtaacccacgtgttctacacacaggccttggagtgagtcttctactggcttgtatgagcggagaaagttggactagacgacctttgaagggcttgaggatctagagcctggcagtgctattactactaaccgttatgagctcccaacgctccaggcttttgcagccggagccgcggtagttcaggcggaaggagcagtcctctgaagcttgaggagcctctaggccttcccctctcccagagcgcagaggctttgaaggctacctctgggaagccgctcaccgtcggaagctgcgggagctgaaactgcgccatcgtcactgtcggcggccatgacaccgcggcggggtctcgccgtcgggtcgcc

SEQ ID NO: 838 - DNA, 305 bp, Homo sapiens
  source 1..305: mol_type = other DNA
ttaattcaagttcacattatcacttgtggagatcactgagctctccatcctcgtgctttaagctcagctcaggcggccccgcgttcccgccgcgagagcaggagagaaagattacctcccgcgagctctagcgcgcccggctttccggcgcactccagggggcgtggctcgggtccacccgggctgcgagccggcagcacaggccaataggcaattagcgcgcgccaggctgccttccccgcgccggacccgggacgtctgaacggaagttcgacccatcggcgacccgacggcgagaccccgcc

SEQ ID NO: 839 - DNA, 354 bp, Homo sapiens
  source 1..354: mol_type = other DNA
cccccactccacagttgagggctggcactaaagacccccccactcagctcctgtgggtaggtaaagggagagttgtgacaggcctctagcaccagagccacgaaattagctgtctttatggctagcaggagggatggccacatctccttgaagttgttgctttgcacatccgcctttgtaacccacgtgttctacacacaggccttggagtgagtcttctactggcttgtatgagcggagaaagttggactagacgacctttgaagggcttgaggatctagagcctggcagtgctattactactaaccgttatgagctcccaacgctccaggcttttgcagccggagccgcggt

SEQ ID NO: 840 - DNA, 232 bp, Homo sapiens
  source 1..232: mol_type = other DNA
ccaacgtgggcaccagcctgtgggaggatcatcttaatccaggagtttgaggctgcaagtgagccatgatcgctccattgcactccatcatcctcaaaatctgttttcaagctagctgaagtgttacctcctctaagctttcacttaaccgaatctcatagtcatgattaattgctaggtgcttgagggaggggcgtggccagccgagaccccgcccccaacccccctgctg

SEQ ID NO: 841 - DNA, 262 bp, Homo sapiens
  source 1..262: mol_type = other DNA
cgccactgcactccagcctgggcgccattgagcactgagtgcggccatagcactgctgtcactcctgcagtgctgtgggaggaaggaattgaagttgctgcagtaccagttgctgtgttgcaatggcgcaatcgagtagctgggattacaggtgccccactttttttcatatttttagtatttttagtagaaatgggccatggctccaactgcctgagctactgagaagtgtggccctgtctttttggcaggaaagaagttg

SEQ ID NO: 842 - DNA, 265 bp, Homo sapiens
  source 1..265: mol_type = other DNA
tggcaaaaggttaaacatgcgacaacttttttttttttctgcaatggctgtcacctcaggtgatccgcccgtctgtccctgttgtcacatggacactgggctgcaggaacccaggaggatcagaggctcccgaggggacaatccatttcccaggtaggaaatgggtccagtagcgggaccatattgcctatgcgcgatgcatcaagaggcgacctcagtttcccaggtggcgctgcggcagccagtccaaagtcggactttcaaa

SEQ ID NO: 843 - DNA, 323 bp, Homo sapiens
  source 1..323: mol_type = other DNA
ctcctaaatcctttaggaagttccaaggtgactttgccggtccctttcttcttgtaaattatataggtgacaatctgagccacacacgctacaggtcatatggtgtctcccgttaatatggtggcaaaaggttaaacatgcgacaacttttttttttttctgcaatggctgtcacctcaggtgatccgcccgtctgtccctgttgtcacatggacactgggctgcaggaacccaggaggatcagaggctcccgaggggacaatccatttcccaggtaggaaatgggtccagtagcgggaccatattgcctatgcgcgatgcat

SEQ ID NO: 844 - DNA, 180 bp, Homo sapiens
  source 1..180: mol_type = other DNA
ctctgagagtcccagctgctcacctagcgggggatacccaaggtatcccctttgaaagtccgactttggactggctgccgcagcgccacctgggaaactgaggtcgcctcttgatgcatcgcgcataggcaatatggtcccgctactggacccatttcctacctgggaaatggattgtcc

SEQ ID NO: 845 - DNA, 336 bp, Homo sapiens
  source 1..336: mol_type = other DNA
gtctcaaaaaaatgtggaatagaacaaactttagttttaggaactagactttatattgtagatctagttgcatactttaaaggtttccaggggagcaaataattaattatgatttgaaatgtctgaggccttttgccttgtgtaatgttttgactcaagattgtaaagtcaatgaatcagcctattttcctttacaacagaaagcagcactggttttccgcagagatctaggattaacctgtggggcgccccaacgagggaaagcgccgagtcattccggcggggcgcgccgggcggggctcgggccacatccccctcctcttcgcgagaaaggca

SEQ ID NO: 846 - DNA, 488 bp, Homo sapiens
  source 1..488: mol_type = other DNA
caccatcttggccaggctggtcttgaactcctgacctcgtgatccaccagcctaggcccttggtttatttttctaagaaacagactaacactgatctcactagtagcattgttaatattaaacaagatagctaatagctttaaagcgtctaagggttcagagggaggagccagctgcctcccgctgcaagccccgagctttgaatcaagcgcggtagtttcagctgtagccaatcctagaacaaaatctttttgcgtcagttgttgctgaggcctagatctcacccagatcagttcctcagaggacggagagaaagtctaagtcaccttcctcagtatccggaaggagactctcagctactcgccctgaacatgcagagcagcactggcttccctgtctctggtcctgtcaggagttgtagtgtcaagattccagttcttcttatgcgacttgctggagaagcaggaagtcctcgtatataaaagggc

SEQ ID NO: 847 - DNA, 463 bp, Homo sapiens
  source 1..463: mol_type = other DNA
ctgtaatcccagcactttgggagtccagggcgggtggatcacgaggtcaggagttcaagaccagcctggccaagatgaagatcgcgccactgcactccagcctgggcgagagcgaaaaaaaaaaaaggaatattccttttccaggattattatgaagattcaataaaaccatgtttattaagtgttaagcacagtgcctggcacataacgtgctgggcggggtctatggtccagacagggggaccaggcactttccagcgcctggatctgcagacgaactaaatgtccaacttagggcatctcccggaaaagcgcctgcggcggcgcctaggcgcgcggtgcaatgtgggccagcaaaaggcgaggctggccccgccccttgcaccgcccacgtggccagcgccacctcctcgaggaccagaggtggagacttcctcgggaggcggcgaaggcggtccaccct

SEQ ID NO: 848 - DNA, 164 bp, Homo sapiens
  source 1..164: mol_type = other DNA
cctgtaatcccgcagagctcattgcagtgagctgagatcgcgccactgaagaaatatgcggtcacctcagagctcctccatatattttatccctgcttttagaggctattaaatgaccgcctagtctaggaggcagctgctttttcctctttattaatagtcag

SEQ ID NO: 849 - DNA, 309 bp, Homo sapiens
  source 1..309: mol_type = other DNA
agagctaagaagctaaatagcttgattctttctctgaataaaacactgctagtttctataaaaatccttgaacttctcatggcacccccaagctactgattgtgccattgcactctagcctgggtgacattctgaatctgaatctgcatttttgaaagatgcgtagatgactcgtaaattaaaatttgaaaagtactggtataagagatctcagagggtctcttattgaggcctggcctctcccatgctaaccatagctgagaagaaatggctttggaaagaatggcttcttgcagtctccccttggag

SEQ ID NO: 850 - DNA, 237 bp, Homo sapiens
  source 1..237: mol_type = other DNA
ctggccggtagcatgcaccctgcagtgagccgagatcgcgccactataaataaataaatgtcatacccaaggtaatctaagttttcttttatgttatctgaaaagactatcttgtcaggtaatatcagtactattaaaactttagaatactacaaaggaaccttaaacactgtgtccttccttttccttattgcagttggaggacaacgaaggctgtcatcaaaatggtcttgccct

SEQ ID NO: 851 - DNA, 488 bp, Homo sapiens
  source 1..488: mol_type = other DNA
tccccggactaggtagttagtctgtcatggcagcgccgccccttccagtatgtcgcaagcgcaggctctcgccggaatcccgcccttcgcttgggcgggggagtgacgcctgcgctccaggggaactactactcccagcgggtagcgcggccgacgcagccgcgcagcctccggggccaggccgtgtggcccgctggggacttcctccgaaaccggtttgcaagtccttgtagaggtagtttcggcgcgcactggcccgcgcccaggccctggaagtgggcaagggactaggcttgtccgtgcctcaggcggcacgagtgaccatgcgccgcctcaagcggcgaagaaggttcggccgaacgttggcagcgtagggaactggcgtccgggagggtcgccggagcagtcccttgcgcatgcgcttcttcgggatgggagggccgtgctgctggtcgctcctcctcctccacccgctctgcccctcctgg

SEQ ID NO: 852 - DNA, 197 bp, Homo sapiens
  source 1..197: mol_type = other DNA
ggcgggattccggcgagagcctgcgcttgcgacatactggaaggggcggcgctgccatgacagactaactacctagtccggggagtgccattttaacccttaatgaagtttataataaaccctgttttgcaaagattgtttcagtattctgctgcctgggagccctggaatagaacttcaaggaccgttcaacatct

SEQ ID NO: 853 - DNA, 447 bp, Homo sapiens
  source 1..447: mol_type = other DNA
ggccctgtctcctgcaatcccagctacttgaaaataaaaataaaaataaagaaatgagattttatgttagatatatacttctatatatatactcacaagtatgtggtattgagtttgatgtaaaatatttttgttcaccgtaggctgggatcaaaacagtttgaaccactaatgtgacacatggggtcaacagtgaaaaaaactggacttttcagtagagaaggaccgtgccaggtgttcggctcgtctctgcttacccccagaggcttgcagctaagccccaagccctgggccccatcagtgggcactgagaggcgccagcggcccagtctcccgcgagcggaagaacctcgcgcacgcgcagtgaaacccagggcccgcgaagcgtccgaagtcccttccggggaactgtacgtttcccccgccctctccggccggggctggtcg

SEQ ID NO: 854 - DNA, 443 bp, Homo sapiens
  source 1..443: mol_type = other DNA
gtaaaatggaaatacaacttacttcatgcacagtgtgtggtatgcagtgggcactccatagtgggtgaaggctttaagcaaggcttaggccagagctgagctaccaccacatgttgctgagggcagcaggtcaggctacccaggccacagcagactgggctgggctactgtccggaatatgagaatgcgcagatttgcctcctaagtgtgatgtgagaaaaaagcatgcattagccttctattcattattgggtccccagcactgagcttggcccagtccgcagccgctgacggcgcgccgagagccccgctcgcttctggtcctccgactgcgcgccagggccacgggcgggtcctttgcgaccgttcgctggcgcgtgcgcgggaggcggcgcgcggccggaggtggcgggcgggctcccggtgcgcgcgcgtgaggggcg

SEQ ID NO: 855 - DNA, 379 bp, Homo sapiens
  source 1..379: mol_type = other DNA
gaaccactgtgaaataagtattattagtaggctgtgcactggattactgttatccaaggatagaactacttgcaacatttcatttctgttcttgtaagacttaggatcttctaagaataataaaaagaagtaagcccagtcgctcactgtcactcaggttattgggtggcagcctgtaggttcaggctgcagtccaaggcaggaggattccttgagcccaggagatcacttgagcccaggagttcaaggctgcagtgtagctttcgtgatagagcgagaccctgtctaaaaaaaaaaaaaagaaataaataaacccttacatttgtggttgttttaacatttgcctggttaacaaaaaacacttgtttgcataacaatt

SEQ ID NO: 856 - DNA, 445 bp, Homo sapiens
  source 1..445: mol_type = other DNA
gacaacttgtcaagggtgcggagaaaggagtctccccagagacctcacagaacgtgccccctctgtgtccgctccgcggccaatcaccgggcagaggcgtctccgggcggaccgcaggagccccgcctgtctccaggcagtttgagcccccgagcgctcgcccagcctgatcgccgccttaccggccggcgccggctgtctcctgattggcccgcttggggcgcgcagccgtctcccacgcaggctccaggctccggcaaccggcctgcctggctcgcgtgctcccggcactgactcctggagtgcggccagcgcccggatctgaacatgttctcagcgtggaaggggcggtggtgatgcctgctgtcccccctcccggcgcggttgggtggcgcctcagcgggtgggcagcatggggcggggagggtgtcccctccgcgccgtt

SEQ ID NO: 857 - DNA, 395 bp, Homo sapiens
  source 1..395: mol_type = other DNA
ggagggcttgctgagacctgaggaactgcgaaatgcctccctcagaaatgtccaattggccacgggcacatccgacaacttgtcaagggtgcggagaaaggagtctccccagagacctcacagaacgtgccccctctgtgtccgctccgcggccaatcaccgggcagaggcgtctccgggcggaccgcaggagccccgcctgtctccaggcagtttgagcccccgagcgctcgcccagcctgatcgccgccttaccggccggcgccggctgtctcctgattggcccgcttggggcgcgcagccgtctcccacgcaggctccaggctccggcaaccggcctgcctggctcgcgtgctcccggcactgactcctggagtgcggccagcgcccggatc

SEQ ID NO: 858 - DNA, 445 bp, Homo sapiens
  source 1..445: mol_type = other DNA
cagcaagttaattagctgtttctgaaatgcatggaaatattcagcattttcatagtgaagccaatctcccagatttaagctttggggcctgtgacttatcttagaaattacacatgcactgtaattccaagacttggagggcttgctgagacctgaggaactgcgaaatgcctccctcagaaatgtccaattggccacgggcacatccgacaacttgtcaagggtgcggagaaaggagtctccccagagacctcacagaacgtgccccctctgtgtccgctccgcggccaatcaccgggcagaggcgtctccgggcggaccgcaggagccccgcctgtctccaggcagtttgagcccccgagcgctcgcccagcctgatcgccgccttaccggccggcgccggctgtctcctgattggcccgcttggggcgcgcagccgtctccc

SEQ ID NO: 859 - DNA, 295 bp, Homo sapiens
  source 1..295: mol_type = other DNA
acacaagtgtgggcatgagtgcatgcacacacacatactacacaggcttctgggtcccagggccgcagggcattcacttatatttacatgtctggcccctcttgggcccttgagcatggcccaagcacctgaggagcccagcaccgtctgggcatggtgtgtcccagtctctggcaagagttcctgaaccccagggggccaggccaccaaaggtctcagggttcactcccttccctagccccttgggaaggtagcctggacggtgcaacacgtattagcccatgcatgatgcaac

SEQ ID NO: 860 - DNA, 289 bp, Homo sapiens
  source 1..289: mol_type = other DNA
tcacttatatttacatgtctggcccctcttgggcccttgagcatggcccaagcacctgaggagcccagcaccgtctgggcatggtgtgtcccagtctctggcaagagttcctgaaccccagggggccaggccaccaaaggtctcagggttcactcccttccctagccccttgggaaggtagcctggacggtgcaacacgtattagcccatgcatgatgcaacctgccagttctggaaaacactgacctcagagaatgatgcctttctcagacactcacagtcagtcaca

SEQ ID NO: 861 - DNA, 489 bp, Homo sapiens
  source 1..489: mol_type = other DNA
aaatatagatagatagttagatagatagatagatagatagatagatatattttttttttttttgacaggctggagtgcaatggtgcaatctgggctgagtagctgggccatgttaaccaggctagtcttgaactcctgacctcaggtgatctgcccacgcctggccaacaatatatattaaataaggtgtctccacacataaaatcaggttatatgtatagatcagttgacaaaaatattgtgaccagagggttaataatgagaattgactgtatataaataggtataatgatggcatatccttgtaacagtgtctggcacgtagtaagtgctcaaaaaacattgttaatattgttactatatggaccgcctctagggcctcttttcccaaggggccaaactgaggctgtctggctcttgggctggcttttaggccagacccaataggaggggccagggcccacgacttgtaataaagggccctgccct

SEQ ID NO: 862 - DNA, 348 bp, Homo sapiens
  source 1..348: mol_type = other DNA
ccgcacctctacatcaggcgtgctggagcaggaacatgagaccatggtgccacctacctcagtcatttccttgaaagtgagtgagagacagagaaagagaaagagggagtgtgtgtgtgtgtgtgaaagagatacttaagtacgtacatcagatattattctgttaagaatttagtgtgcgtgtgtgcgcacggacgcacacacacacatgcattcaggaacactagcacatgtttatgtatgtaactgggtgctgcagcatgagcagatgcatgtgcatgtgagcatgttgcccaccctggccacgggtggggccagcaggcgggcagaaggaggctttaaagcgcc

SEQ ID NO: 863 - DNA, 395 bp, Homo sapiens
  source 1..395: mol_type = other DNA
atagaatctggagctaggctgagtttcaattccacctctgacagggatagtaatagcgcctatagccagcgcgcagcgtgccactgcactccaagtcatggggttgttgtggaattaaacatcatcagtaaggtgctgtgcatgccccaggactaggtaacggccttgcccaggacgctgtgtccaagggttgcagcccctctgacccgtgctggggagcgggctgctctcgtgcaggcagccccaccagccagccgggctgcgaagctgcctagcacggtctgaacaccccgacgccgctgccgccaccgccgccgccgccgccgccgccctaagcaccgcccgtcgccctctcaccccgcggcagcggcggcggcggcggcggcggaagcggg

SEQ ID NO: 864 - DNA, 253 bp, Homo sapiens
  source 1..253: mol_type = other DNA
tacaataagaggatagttactcctatttagttaactctaaacaataacgttatgggccaaaagaaaaaaaaaaactaaaagttattttttgccaattgaattaaaagcctaaacaaaccagagttttcatggctgttcattacctgttaaataaaacccacctgtaatcccacacttgaagtcaggagttcaagaccagcctgccgctgacagagcgagactcctcaagcttaaggagcatcttgcttgtaag

SEQ ID NO: 865 - DNA, 158 bp, Homo sapiens
  source 1..158: mol_type = other DNA
cacctgtaatcccacacttgaagtcaggagttcaagaccagcctgccgctgacagagcgagactcctcaagcttaaggagcatcttgcttgtaagcaatccagggccagaggttgtgtgcgcagcaccccgtacggcgccctcctcccgcccccgcgc

SEQ ID NO: 866 - DNA, 256 bp, Homo sapiens
  source 1..256: mol_type = other DNA
gcacatataatgccactagagattggatgattaaatctctgactccgggggctcccattgcccgagcccgccacgtggcagtctgggccgaatgtgggtgggcgaggcctgactccaaccccggcccccagctgtccactacaggtggcgggccgaattccagctcgcaggtaggcttctctccagaggccgaactcatcgaacgcagccaatgggtgatacgacggcagcgcggcgggaggttcgattgacccgg

SEQ ID NO: 867 - DNA, 311 bp, Homo sapiens
  source 1..311: mol_type = other DNA
aattaactcatgacattgttgtgaagatcatgcttataatctgtttaaaacaatgcccagccataataagctcgctaaatgttggttaattcctgtaagttggtcccagctactcgagaggctgatatcatccactgcactgcaagatcttggagtataccaaaactgtctctttttatctttacttacagaataactgaatcttgacatccaagaatctagtataattatttgtacatagtaggtattcaaggtataatataccttattttaaagttggaagcctttcctggcaatgcttagcaggcctc

SEQ ID NO: 868 - DNA, 394 bp, Homo sapiens
  source 1..394: mol_type = other DNA
ccaggtcttccgaacctccatgtggtagggattcctcaaacataggtcatatttttacaagactttagtccacaaaacattttgccttacctcctcaggatctccggattaacacgagcagcaatccggcgatctggccggaagtgcggcacactctcgtggtcgcgattggcatgtactaccagccgcaggcagaggaggaggctttgctaagaaacatcccctccaagtataattgatctaggagtttatctaaaatagtagctcctaagagacttggaaagtgtgctaatttcttcgaaatttctttagaataattcacattggcggtccgcgggcgacactctcgggctcgcgcacctccccaagatggcggcgcccgaggcctggcgcg

SEQ ID NO: 869 - DNA, 678 bp, Homo sapiens
  source 1..678: mol_type = other DNA
ggccgggcctcctaacctcggcccctgccctagggcagccgggccatcgctgtctcctgcccggcccagccgagtgtcagttcgcgcggcccgccgcagcctcagtcgcccgggcccagcctgcttcgctccagaccgggcctcctggcctcgccccccgcgcccccgagccaggccgcggtgcgggtcagccgcgccccaggctgggccttgccccgggcctcccggcctcgccccccgcgccccccggccgctgggccgccccttgctatgggcgctcaccgcccgcccgcacagctcgaacagggcggggggagcgttggggcccgaggccgagctcttcgctggcgccgcctcccgggacgtggcctccatggtcgttgccgccgctacctagcaactccgggcgcgccaggcctcgggcgccgccatcttggggaggtgcgcgagcccgagagtgtcgcccgcggaccgccaatgtgaattattctaaagaaatttcgaagaaattagcacactttccaagtctcttaggagctactattttagataaactcctagatcaattatacttggaggggatgtttcttagcaaagcctcctcctctgcctgcggctggtagtacatgccaatcgcgaccacgagagtgtgccgcacttccggccagatcgccggat

SEQ ID NO: 870 - DNA, 439 bp, Homo sapiens
  source 1..439: mol_type = other DNA
aatattatttagttttgtgtttgtgaaataacaactttttttttttttgagacggagtcaggctggagtgcagtggcgcgatctcagctcactgcaaagcctcccgagtagctgggaccgggatacaactttaagtcttataagagtttttatattgttttatactcagtacctgttttaagaaaaaaaaaaaaagcccggcgccaggcccgaaaccaggccctggcctgctaaaaatcaactcataacttaaaaaccgatgttattcatagattccagacattgtatagaagaacactggtgcatgtgaaatccttagagttgtgagcccttaaaagggacaggaatacaactcgtgaccgggaagcgaggtgactgacggccggcttaaacctgccctgtggagcgtccctgtgggggactccagacagcttgagtg

SEQ ID NO: 871 - DNA, 448 bp, Homo sapiens
  source 1..448: mol_type = other DNA
catgtggaattattgtagtctagaagacacaaatgttactaaattagtaataatagaatcgctatttaaaagtcaatatagtttaatactgcacatactcagccttgtaatattatttagttttgtgtttgtgaaataacaactttttttttttttgagacggagtcaggctggagtgcagtggcgcgatctcagctcactgcaaagcctcccgagtagctgggaccgggatacaactttaagtcttataagagtttttatattgttttatactcagtacctgttttaagaaaaaaaaaaaaagcccggcgccaggcccgaaaccaggccctggcctgctaaaaatcaactcataacttaaaaaccgatgttattcatagattccagacattgtatagaagaacactggtgcatgtgaaatccttagagttgtgagcccttaaaaggg

SEQ ID NO: 872 - DNA, 281 bp, Homo sapiens
  source 1..281: mol_type = other DNA
gacagagtctcactctgttgcccagcctggagtgcagtggcatgatctcagctcacttgccggccagcctttttcttgaaaaatgaacaaagtgagcctgtcacttcaaggaaaataactgacagtatttgttgccaataagaaaattccaaaattccacacaaattgcgaactgtgtttttaaatgatcattcaacaattgttaccagaaaggggtcccgatccggaccccaagataaacaaggggtgggttattcacgcctccacttggggctcactgc

SEQ ID NO: 873 - DNA, 296 bp, Homo sapiens
  source 1..296: mol_type = other DNA
tgttaccagaaaggggtcccgatccggaccccaagataaacaaggggtgggttattcacgcctccacttggggctcactgccccgagtagctgggactgcaggcgccagcaacctccaggagggtctcgatctcctgacctcgtgatggtcctccctggtcccccaagtgggctaggggcttcttgggagtccctcgcccaggcagagtcaccttcaggggactcctggctgggcggagtctgtagaggcccgccgggtggcgctcaccacctccccggaacacgcgagtctcctg

SEQ ID NO: 874 - DNA, 168 bp, Homo sapiens
  source 1..168: mol_type = other DNA
ctttggcgtcctcccaaagtgctgggacagagaccctgtctttaaagtcgggtatagtggtgcacgagactctgaaaggagtcttacttggtctgctttattcattgatgatgctgtgccatgcacataatactccatcagcgccattgctggtggaaagttacctca

SEQ ID NO: 875 - DNA, 306 bp, Homo sapiens
  source 1..306: mol_type = other DNA
atcttgccttgcctgacctggaaggctcaacccctcaaaccagggggtgttttgccctcccccaagggagaatttggcattccagatcctccctaagccatatgaggtagctacgaacaacaccacaggtagggttgtttgtgatcattcacgcacacacactacctcctcaggaaaaagaaatagcactcgaatataaaattttcttttttttcttctcaaggcaatttacttctatagaagggtgcgccctcacagacggagcaaaggtgagcgcacacctgggttagacctataggctaaact

SEQ ID NO: 876 - DNA, 262 bp, Homo sapiens
  source 1..262: mol_type = other DNA
cctccctaagccatatgaggtagctacgaacaacaccacaggtagggttgtttgtgatcattcacgcacacacactacctcctcaggaaaaagaaatagcactcgaatataaaattttcttttttttcttctcaaggcaatttacttctatagaagggtgcgccctcacagacggagcaaaggtgagcgcacacctgggttagacctataggctaaacttgacatattgattcttttaagataaatttagaactcatatcta

SEQ ID NO: 877 - DNA, 420 bp, Homo sapiens
  source 1..420: mol_type = other DNA
tacctcctcaggaaaaagaaatagcactcgaatataaaattttcttttttttcttctcaaggcaatttacttctatagaagggtgcgccctcacagacggagcaaaggtgagcgcacacctgggttagacctataggctaaacttgacatattgattcttttaagataaatttagaactcatatctacagaggacggccggggctgtggtgcccaaccggtgctaaactcaagcttgggaggcgcccttccccacccgcctgctcggcttggcggggagcgggatgtcgctgggggcgatgccaggcgggccgcctctgatagcctctaggctctggcgcgcttccccgcccctcccgcgcaggcgggcgtgggatcccggctgatccagtccgggttttgcggcggagcgggcgggctg

SEQ ID NO: 878 - DNA, 549 bp, Homo sapiens
  source 1..549: mol_type = other DNA
cctcccagaatctctataactggcagtgtgggcgtacaccagccgagcctctgcccctcttcctatgagccggttcccgcctggagggagcagagcgctggtaagagcaggaccatctcaggcccaggattttccgtcccggcgacacgcgagttccagcccgcggcctcccggcccagaggccagagcggctgctaggagcgcaaaccagcgcacccgcggggtgtgtgggcgtgtgtgcgcgcgtgtgtgtgcgcacaaccttgaagggacagtggggacgggagtccgtcggggctcccccaggtcacctctacggactccagctgcccccaggcggcctgcggcttccgcggacccaaggagatccctggaccgggagccagagctcgagtgacggacgcgagcccggcgcacagacccaccgactgtcgggccaccttggtcgggagctgggctgcggcaccagcggggcggggcagggcggggacggccattaggaagcgcccgggcccgcgccgggcgcccgggaaacgcagtttaaaactc

SEQ ID NO: 879 - DNA, 491 bp, Homo sapiens
  source 1..491: mol_type = other DNA
ggcctgcggcttccgcggacccaaggagatccctggaccgggagccagagctcgagtgacggacgcgagcccggcgcacagacccaccgactgtcgggccaccttggtcgggagctgggctgcggcaccagcggggcggggcagggcggggacggccattaggaagcgcccgggcccgcgccgggcgcccgggaaacgcagtttaaaactccagcccaggccccgtcgcgcgtagatggcagcggaggcggcggcgcgggccggggtgaccaggtacgagcgggcggggctggcgggccgagccgggagcagggaggacgcgggccgtgagaacccggggacagcctcccctcttgcggtcctgcagtcccggacccactgggcgccgaggcgaggacgaaggccttggcccgcggagacgcaggcacccgcggagaacgcttcggatccgtcaaatacaaaaaagccttgagccctgggcgggggctggg

SEQ ID NO: 880 - DNA, 303 bp, Homo sapiens
  source 1..303: mol_type = other DNA
cataacaacagtattcttatcagtattcttatgtctctgtcgcccaggctggagtgcagtggtgcaatctcggctcactgcagctggaaagtgctgggattacagggtgcccagccctgggtgaatttgtaaatcacaatgactaacagaggtactatcatgaaccccatgttgcagatagagaaactacacaaagctccaggtttcagcctgccctgggcagtctgactctagagcccagagcccgctcccttccgatggagggagcttctgacccatcagaagagggcagagtctgatagg

SEQ ID NO: 881 - DNA, 352 bp, Homo sapiens
  source 1..352: mol_type = other DNA
gagcgacgcgctggggctccttccagccacagggaggagaaaagaaggagagctggccgtcacactcttttgccccaagctctaggctcctggatttgtggtgggactctctgagccaagacaggatctgtgtggggccacgcccactgattgccccgcagtgcaggaccagaagcatcaggctagggggctttaggtatctacacctgggagcgggggcgggcaaggcaggactggctccactgctcctgctccccaggtctgggtggggaggaacatgaagcacccagtccggccctgggggccctggggaagcgtggggtgtcagccaggctcccttcacagtctgtag

SEQ ID NO: 882 - DNA, 286 bp, Homo sapiens
  source 1..286: mol_type = other DNA
gcagggcctctgaagacttgaactctattgggaaatctagcaaagtcctgaatgttcactaatattccccatcactcggagtcagcgaatttacagttgtttttccccaagaaatgaacttttaaaagttttaaaaattttgaaatactggggataaaacttttaaatgtacaaaaaaaggcattttaaaattcgaaagcgccggaggaggctcagctcgagccccctgccctcaggcggccctgggtagccatcagggcgcaggcgcagctccgccccctcaccc

SEQ ID NO: 883 - DNA, 531 bp, Homo sapiens
  source 1..531: mol_type = other DNA
cccagggaaggagaggtcaagcccaggctttggccataagcaagcctcagggtagggctaaaggctagagtcagggctcacacttgccagagcccaggtcagaggtcagccttatactcagccttagtgctcagtctagggggatgactcaggtcttagaaacctagctatagcagagtgacccaggacctggaatccatggtgatacaggggtcaccgctgggactagaacccaggactcctgcctctgagcctagggccctgatcactgtccctttgttctgaatctgggatccttaaattctaggaggcaaagtaaatttgcctgagctctagagggccctcctgggtgcctatactcttctacctcccagtgccaggcacatagtagttgctagaggagcccagctggcagcgggagggccctttcctctttcagggtgaaaaaaaaggaaaggacatttttggtagaaaagttccctgctgctccctgggaatccccggtggccggatggactacgggatatccca

SEQ ID NO: 884 - DNA, 416 bp, Homo sapiens
  source 1..416: mol_type = other DNA
cgcacagggcagggctcagggctgacagtactgtcccagagagcccactccaggactggccctgttctgtgagcaggtgggacacagagatgttaatgtcactgtccctgaccctaaggactcttcaaggagtaatccaagtcacataattatctcggcctcagtttccttatttgttagatgaggactacatcgagtgcctggcactacagcgagtgccaggggcaagcgggcagcctccctggaggaggcgggccgtggcatacacagggcggcgagagcgcgcagtgccggggccagagcggcgcgccccctcctccccgccccgcctcgccgctatcccgcgcccggaaccttgggcgcgcggaacctcggtgccggagcgcgggcgcggcgcactcggagcgggatggagc

SEQ ID NO: 885 - DNA, 309 bp, Homo sapiens
  source 1..309: mol_type = other DNA
gcagccaactggtccctgggcctgggggccacggtgtgacctgagccaggccccctccctggggcttgtccctcaggggtgaaggactcagctcatgaacggtcccgatcccttattgggtcccgtctgctccagaagatgaggctgcctccttggtggaggtccaaggaagcaccgagagggcgggcagctcagttagtcctttctttcggagtggaggggagtcccctttctccgcccctccccgccccgtggccgcggcgtggcggggccggggcggagctggcgtcgcccggggcaggagggcag

SEQ ID NO: 886 - DNA, 237 bp, Homo sapiens
  source 1..237: mol_type = other DNA
tcagtgagcaagttcctgactcaagtgagtgctgtgtggggaaaaatctacccccaggagtcaagcatagtttcttcaaattggcgatgatatgattctcacctccagagatgtgagggtctgttcagtgggaagccccacagggcctggggcctcctcactggggacaggtacctgagggacaatggcccttttccataaggggcctctcctttagagaacaaagggcctgggcat

SEQ ID NO: 887 - DNA, 488 bp, Homo sapiens
  source 1..488: mol_type = other DNA
tgataacactccctctagagtataaataaactgcaggaataaacttgcatttcacatacacaatgaataattttttagtgtgaggattaaaaaattgtttggaagacaaggaccctggttatttaagtaagctctcaataaatatttattgactgaatgaatgtgttaattaatctgaaacgcgcctaaacttttaacagcctgtgtgagagtcgctgatgaactttcgaagtaggtcgagcagccgggcgctttgcctgccccgcccgcgctccgcaggatgcaggactccacccggctcaggttcgcagcaggtcccggaagccctcctgggggcggggccaccctaatcggcaggtgggacccagccccagccggggcagggcccctttaacgcccctccgccacgactttcgccccggcgtgacgtcaccccagcgggcgaccaatgggagtgcggcttactggcaggcggcgcaggcggccgc

SEQ ID NO: 888 - DNA, 244 bp, Homo sapiens
  source 1..244: mol_type = other DNA
ggcaaggcagtggtctgagacagaagccgcttaagtggctccatccagccaggagggattgaatttgatgacctctcatcaccctgaaagttcttgtctctgaagatccagctctcttaagggttcacattgaagggggagaaagcataggcaagctgagcctcagcagtatgtaaacattcatgattacaccaagaattgccagcccagccttggctgctgctggctgcagggagtggctagg

SEQ ID NO: 889 - DNA, 328 bp, Homo sapiens
  source 1..328: mol_type = other DNA
ggggaaaggctttcacatctaaaatctctaagagggaaggaaactcccctccaggattacgcgggggtcctgccctctgagcctgaagcccagaggcttatcctgatattccagcaggatggcctggagggcagcttggggcatccagccccctcctatccctggactccaggacaagtgggaaatgtgggtcacatggcgccggcctgggccacaggtcaggagccacctcggggctgaccgcactgtctccaaacatcttagagggctctgatctgagaagagggtcctgccccagggtctggctctgctcctgggccagtgtcta

SEQ ID NO: 890 - DNA, 446 bp, Homo sapiens
  source 1..446: mol_type = other DNA
gatccagaaccggaggcacctggacttcctggacattctcctgggtgcccgggctacctgaggactggtcccagagaggtcttcaacctagacttctaagatcccccaaaatgttggccttgtagaatcctagaatcttagacttcattcattcattcattcattcagtaagttctttattcatcaattctagaaactcactgagttctgactctgggtcatttccgtgctaggatgcagagatgggaaagacctggcccttccttccagatgcttacagtcggggagacagtaggtagatgttgaccaaaatgtcttcctctggcaggtggtattctatgtgcccagtgagcaggtcctaatccaccctctgaaaaggagctttcactcgatgaagatgacatcaaactgtcagatgcagacctgggctgaagtggacacattca

SEQ ID NO: 891 - DNA, 658 bp, Homo sapiens
  source 1..658: mol_type = other DNA
ggttaattcatagcaacagttgctatttaacctactttacggttggcaaagcaatcattttttaaatattaatttctgtttagtacagattgtatacgactatagtactagactgaagtaggactaaaattgctctaggacttactctggtagaaaaggtagacctaatacctaacatgatgtagaatttttttaaattgtcatgtatatgaattgagaaaaaaaatcatgctatgcatattatgataaaataaagtacttgaacagctgctatattagcatctgtttgtccatatcatcatccagttactagaaagacataattcccactcttcactcaatatatagatggaagtggtttttatggtaaataaaattagatttgcaataagacaaaagtaatgattcagggcttggttaatgttaagtttaaatgtacatatcatgttgagaattttctttgaacacataacaaaaaaaaagtgctacgaatgaacattattgcaatgtagtaaagcagaatgcaaattccttgaggtcagcattcaagtctgttttcctcacacagtaaatgctcattaaatatttgtgaggtagctgatgaagcttttctcccactttggatcatccatagtcaattgattctgaactctgaggt

SEQ ID NO: 892 - DNA, 317 bp, Homo sapiens
  source 1..317: mol_type = other DNA
tggattggagtaaaggtcattctgaatcagatccaggctcctgctgtctcccggcacttaacttgagccagaaattgtccccatattgggtgaacggtgtcagaaaccacaggtccctgcaatttccagttggattaggccattcttgaattaccataaatacctgaggctaagagtaatttatttttaaaaaatatttaattggctcatggatgcggagaatatcttctccatttacatagggtgtacacctagtaaatgtctttgtaactttatcctcttcatttacatagggtgtataccagggtatttaaacc

SEQ ID NO: 893 - DNA, 404 bp, Homo sapiens
  source 1..404: mol_type = other DNA
tggctccatgttcagagctgtcaatgaacacttaacgtcttagcctaaatcaatgaataaatgaatgaataaataaatgaatgaaataaatactaaaaccatcactttcaaattatttttactacattcatgggcatgagacccaagcagccacgaggctctgaacccagaagagcatatgctcggtttaataaagtttttatcgattcataaattatatactgtatagtggaattactatatgtatcggcagcttgaactagctcatggtacacgtaccacctgggaattttggtagaatgccagaatggaaaagaaaatctcttgcatagccatttataatttgtgataaggaagaaaaatgacctcagctttagcattattttacaatataaattcagatc

SEQ ID NO: 894 - DNA, 336 bp, Homo sapiens
  source 1..336: mol_type = other DNA
gaaagcattctccttgagaactggaacaagagaaggatgcccactttcaccacttctattcaacatagtactggaagtttgctgatgatatgattatatacctaagattttgggataatgtgtcattgtaggttcattaaatgtaacaagtgtttaatttttctgtgaacttgaaacttctctagaaagataaattctaaagctttcatatgggtgtgagctgtcatgcacatggctcctatctgtctagaatccaggtctgctggccaacatctcagcagttttcaccctgcagacttaatatggcattttgaaagcccagtgttgcccaggggg

SEQ ID NO: 895 - DNA, 678 bp, Homo sapiens
  source 1..678: mol_type = other DNA
ggttaattcatagcaatagttactatttaacctactttacttgaggttgacaaagaaatcattttttaaatattaatttctgtttagtacattctgattgtataattacatactattgtaggatgaaagatagtactagactgaagtaggactaaaattgctctaggactttctctggtagagaaggtataactaacatgatgtagaatttttttaaattgtcatgtatatgaattgagaaaaaaatcatgctatggatattacttgaacagctgccatgttagcatctgtttgtccatatcatcatccagttaatagaaagacataattcccactcctcactcaatatatagatggaagtggtttttatggtaaataaaattagattgcaataagacaaaagtaatgattcagggcttggttaatgttaagtttaaatatacatatcatgttgagaattttctttgaacacataacaaaaaaaaagtgctacgaatgaacattattgcaatgtagtaaagcagaatgcaaattccttgaggtcagcattcaagtctgttttgcacacagtaaatgctcattaaatatttgtgaggtggtagacagctgatgaagctgttctcccactgttcccctaggtggatcatccaaagcgattctgaactctgatgggcggga

SEQ ID NO: 896 - DNA, 387 bp, Homo sapiens
  source 1..387: mol_type = other DNA
ggctctggctccagggcctccctgttccaggggctgacgggcccagggcttcagggccccagatcgcaccttgccatctggggtgtgtttccagggaccacatctggggccaaggggtcagggcctgggcatgggctgtgaaagaaggcactgaagcgctctcggcggagtctggcagctttgagccttccccaggctcctgagcgcccactgggctcagtcaaggcaggagcgactgtgtgtcacccctttccccactgccaggaaaaggaggtgaggctgggactctcccactcgaatgccagcccaagtgagctgggcaccagccaggggaggccaggtctggcagctcattaccatgggagggagggcacgttctctccgacg

SEQ ID NO: 897 - DNA, 227 bp, Homo sapiens
  source 1..227: mol_type = other DNA
tacatccttgactctttcttctttctcttaatcagtagggagacgagaaaggacctgaacagatcagatatttctgtaggaaagtacatgtagcggcagccggagacctggctgaggaggcaaccgcgtagacaccgttcgaaaatgttccagacagcctgtcgtagctattccaaacacctgcaggttgggggcggacaggaggtaattcccagccattgaccccc

SEQ ID NO: 898 - DNA, 329 bp, Homo sapiens
  source 1..329: mol_type = other DNA
acagtaaagaccctggtctctgcaatgattcatcagctgagccgcagagaagactaagagtagattagtatttgcagaatgcctagaatagtgttattcctgggctctgggctcagcctgaaacctagcagaataggcattttatgtccctattgacagggagcgcgtccaacgctccccgcagcgcgttccggagccggtcctagcgccgctgaaattgccaaattaaaatgaatcatttggcccataatggccgaggcgcttatcgggggcgggcggacccgcggcagtgccttatctctgcggcgcacacggccccggcgcgcctc

SEQ ID NO: 899 - DNA, 354 bp, Homo sapiens
  source 1..354: mol_type = other DNA
agcgcgtccaacgctccccgcagcgcgttccggagccggtcctagcgccgctgaaattgccaaattaaaatgaatcatttggcccataatggccgaggcgcttatcgggggcgggcggacccgcggcagtgccttatctctgcggcgcacacggccccggcgcgcctcggcccatgctaacgaggggccgggcgggcgcggggcgggcgggggagcgggggccgcgggaggggccgggccgccgccgctcaggaccgggcctccccgtagcggacgccggggggggcggtgggggggcattttccacggacgcccccgccccggctgccgccgcccctcccgcctcgcaaacag

SEQ ID NO: 900 - DNA, 449 bp, Homo sapiens
  source 1..449: mol_type = other DNA
gttccagctactcgggaggctatcgcgccactgcactccagcgaggttgcggtgagccgatatcgcgtcatcgcactccagcttgggaaaaaggaaaaattaaaaatgtacattttagaataaaaattaaaaagtaagaaactggaataactctaactttcttgtcttttgaaactgttcttcgggtgtccgcttccagtcgccgaccaatccattgcgcttgcggaaagccttgacgaaatgaaaggtttaaatcctcggatccttgatcctggagcgccggtggcgcccgcagttctccaagaagacttgggattggtcgagcgcggaaccagtgcggggcgctgattggtcggcacaccaacgtaacggcgaccgtgcgcggctctctagcaccacccccgctccctgactggcgaggtttctgaccagtcagcaggcgtggcgcg

SEQ ID NO: 901 - DNA, 196 bp, Homo sapiens
  source 1..196: mol_type = other DNA
agaaggccttttaaaggcctgtatgcaccagtgcagtggtgctattacggctcctaggctcaagtgaacatcccagtagctgggatcacaggcacgggtcacggtgcccggtctcgtcaaaacggaaactcattgcgagcagagacaataggttttgctctctggcgcggaccgcacgagtgtcgccgagacgccg

SEQ ID NO: 902 - DNA, 289 bp, Homo sapiens
  source 1..289: mol_type = other DNA
gtgcagtggtgctattacggctcctaggctcaagtgaacatcccagtagctgggatcacaggcacgggtcacggtgcccggtctcgtcaaaacggaaactcattgcgagcagagacaataggttttgctctctggcgcggaccgcacgagtgtcgccgagacgccgccgccgtgcgaagctcctccccttccgacagggccgcggacgcccgggcagccacggcggcggggccgcggcgggcgccggctcagcccgcccctttctcccgccgcctccccgccccgcccc

SEQ ID NO: 903 - DNA, 759 bp, Homo sapiens
  source 1..759: mol_type = other DNA
ccaccagtccgcgtccgccgccgagccggcggaggttggccgagcgggtccttagcccgggcgccctctggcggccgcacggggaagctgcggcccggtcgcgcctggcgggcttcgcctccctccgcgcgtgtgagggagcgagagcgagcgagcgcctgccatgcccatcagaccccgcctcgccgcgcccgggcgcggagctagccctgactccctgccgcccggcccgtcccggcccggcccggcgcggccccggcccctcgcccccccgccccccgcgcagcggccccagcccccagcccggcccggctccgcgccgctctcccgcccctctctccctccctcccggccgcggagcagcatggcggagcccgggcagcggccgcgcggccgcccgccgcccctctgagccgggctcgggggcagccggtcgccccagagccgccccccacccctgccgcactgcgcgcctcctggagcgccgcgcacccctgggacccttgcgtgccccgggtgcccagcataaccccgggacccttgcgcaccccgggttctcggttctgccccaggaaccccgcgcgcccctggaccgcgacgcagctccgggaccccgcgcgcccccggaccccaacacgccctcagcacccgggggctcggccagcgaggttgagcgcccgggggaggggcccagccctagagggtctccctcttccaacagcggagcccgccacgccccagagggcgcccagcatcctg

SEQ ID NO: 904 - DNA, 69 bp, Homo sapiens
  source 1..69: mol_type = other DNA
gtttcagtgatcatctcataggaaaggcccctagactatttccttgataggatagatttccacgatgga

SEQ ID NO: 905 - DNA, 211 bp, Homo sapiens
  source 1..211: mol_type = other DNA
cagggtttgcagaggttctcaggagcacatcttagtgcccaagggcatcctgggactgataggctgcctgagtcccagagatggtcttccctggacccagggagcatctggctctgccagtataggtaaaagacaattgtattgaactcttaagaaaattggactccagtgtgtgcctgtgtgtacacatgcatgtatgtgtgtgcacgta

SEQ ID NO: 906 - DNA, 381 bp, Homo sapiens
  source 1..381: mol_type = other DNA
tgcatgtataatgtattttgcaatacaaatgatttttaacatgatatgcaagcccctctcctcaggaaatttaaataggaggactaacaataattattattcttttacaattgggaaaactgaggccacagtgggtcgccactagcccaaggtggctcggcgttcgtcaagctccgcctccagcgctcgtcccagcgcgggtagccctggagtgccccgcgcggcctctcttcgacaacgagtctgcgccccgcgctcagctgcttctccggcggaacccaggctggaccgcgggccccggcctgggggccactgctgccaccgccgccgccacccaggtctccccgcctcactcgggcccgtggccggggtcactccccg

SEQ ID NO: 907 - DNA, 286 bp, Homo sapiens
  source 1..286: mol_type = other DNA
caggtactgttcacattattattaagataaacgtgttttatacacttctgcatgtataatgtattttgcaatacaaatgatttttaacatgatatgcaagcccctctcctcaggaaatttaaataggaggactaacaataattattattcttttacaattgggaaaactgaggccacagtgggtcgccactagcccaaggtggctcggcgttcgtcaagctccgcctccagcgctcgtcccagcgcgggtagccctggagtgccccgcgcggcctctcttcgacaa

SEQ ID NO: 908 - DNA, 281 bp, Homo sapiens
  source 1..281: mol_type = other DNA
gaggagaggggcgccactgctccctcagaagctggcacaactggaagataagccccagttctggtcagaacttctgtctgactgaccttaaaacactccaaacttcggcttccaagttgttgcaatgcaattaagcaatataatcctgcacgcagatcaagtggggggagcctgggtcctggggagccgcccccgccccccccagcaccgtagcgagactcgcgccccccgccggatccccacctccgcgcccgccccgcgggctgagctgcccgaccggg

SEQ ID NO: 909 - DNA, 229 bp, Homo sapiens
  source 1..229: mol_type = other DNA
cttggaggggacccaagcccctccaggctctctttggcaagagacagagcaaagacggagtactattccgaggagaggggcgccactgctccctcagaagctggcacaactggaagataagccccagttctggtcagaacttctgtctgactgaccttaaaacactccaaacttcggcttccaagttgttgcaatgcaattaagcaatataatcctgcacgcagatcaa

SEQ ID NO: 910 - DNA, 389 bp, Homo sapiens
  source 1..389: mol_type = other DNA
cccagactctgtgttccagagtctgaaaatagtagcaatcagctcaataacacatttgtgtcatgcaccacgctgcactatggagtgtcactactgaaaggtgggaacgtcagcaaaaggataagtcttttctcgcagaggggcaaggagccagaaccctttgggcctctgtacctgtcccacagaaaagccagtttagctagtctgggcggtcgccgtcaggaaagcgccatccctacagacctggcccctgtcggaggttgcggaggagcagcgccccggggcccaagtcccagctcaggcccgggctcgcgccgcgggggcggggccttggacgcacgctcctcccaggcgtccctcccgccctcagccgcgcgccggccacccgc

SEQ ID NO: 911 - DNA, 407 bp, Homo sapiens
  source 1..407: mol_type = other DNA
tttttttttcagaattttgtaagtaagatagttttcctgtacttcaaattttctttcccagaaagacattgaaaaagtaagcatacactgactctggaaaggaaacttttactttcagctactgttcttgcataaagtagacactaaaggttattgactatcaggtcatatctcacagagaacattcgacagtgaattctgatagaattttcctataaaaattgatttaatgtttctacatgataaagaaaaaaaaaaaaggaaaattaagctttaaattttctcaaaagcttttacatatagtataccattttctgggctttttcctaaagaaggatggtgtgctataatcatattagggcagagcacttcccaccccattttgctaattcaattgaggggcaaga

SEQ ID NO: 912 - DNA, 577 bp, Homo sapiens
  source 1..577: mol_type = other DNA
caaaatcacttatttagttaagcaaaatgaacactctgcacaggttttgaaatgaggctgttgtcaaaagcatgttttacctttctctaaaggggtaggagaatgtgttttagtggatttttaaaaattcagatcatgttcctatccaacttgaaaaataaattcatttaagtaaatcattcatcatcctcagttttagaggctgacagctgccccttgtttattaggaaatagttttctgagacaaacttgtatgaacctagttcacggagcaagcttaatccccaacttgcttgccttactaaaaatcagcaatatctggaaataataaagttaaattgtagatgaattagcacattaaagtgcttttgttgtacctttaagcctacaggcagatcattaaatatgcatttcgctagaatgtccgagaggtggcattgcaagcctccagtggctgttgttgcttcagccgggccttaattaccagacacaagaagcagttcagaaatctggtctctgttgttgtagatcattaacatcgtcaatctggcagtagctaatttaaatagcacctgat

SEQ ID NO: 913 - DNA, 555 bp, Homo sapiens
  source 1..555: mol_type = other DNA
ggaggtcgcagcgagccgagatcgcgccactgcactccagcccgggccacagttcaaaataataaataaataaataaataaataaataaataaaaatagactgactatattcaaagctggattcaagttttatcccatttgtaagatgtctcagcttaaaaaaacaaatataactgcagcagtagaaaggttttccctgttatttctcataactaccttatcaattaaaaaaaggcagaagctgtattttgctgaaacattgtagagaaaaacatatatttctgaaatgctgtttcacaatctggtccccgcctcagctagggggaggcgctatcctcgagacttgaagcttccgcagctgcaggttgcagtctctgccgccagcgcagagatcctggccgggtagtcgcgcgctcagcgcagccgcaaagcggcgctttgcgacctcgcgacagccgtggcgctggccaaccaggggcggaggcggcggccagggaggaagcggaggaggcggaggcggccgcggcgttcgcccgcccgctcgctcgctcggtt

SEQ ID NO: 914 - DNA, 461 bp, Homo sapiens
  source 1..461: mol_type = other DNA
cccagctactatggaggtcgcagcgagccgagatcgcgccactgcactccagcccgggccacagttcaaaataataaataaataaataaataaataaataaataaaaatagactgactatattcaaagctggattcaagttttatcccatttgtaagatgtctcagcttaaaaaaacaaatataactgcagcagtagaaaggttttccctgttatttctcataactaccttatcaattaaaaaaaggcagaagctgtattttgctgaaacattgtagagaaaaacatatatttctgaaatgctgtttcacaatctggtccccgcctcagctagggggaggcgctatcctcgagacttgaagcttccgcagctgcaggttgcagtctctgccgccagcgcagagatcctggccgggtagtcgcgcgctcagcgcagccgcaaagcggcgctttgcgacctcg

SEQ ID NO: 915 - DNA, 584 bp, Homo sapiens
  source 1..584: mol_type = other DNA
gaaatggctttgttagaaaacacttcacacgacttattttaaattttgctttaaatttaattattaattaaggcttcagagttcgttcttacatatgccatgtcttaagttttcataaaattcagtctacacaagacttgctttttgtgagcactgtgcccgcggccacccctgcccaccgcgccgtcgggcatggatctggcaggtgcgaggccgaggccagggctcagcgaaggacgccggagcgcgcgcgcctagaggaggcagcagcagccgcagcctggccgcccgaactttgcgagcctggcgggggagcacagaggcgggccgacctgccccgctagcgctcgcagcgtacgctgcggagcctcaaagaccctgcggctgggggttcgcgtcacagactcaagcccgccagcagaagggcaggccggacttcgcggggccgaaccccgctccagctggggacaggccgcctagccggcaggagggaccgggcgggcggagcgtgcgagactgcgagcgcgagcgccagcagggcggagggcggggcgtgggcggcgcccggccttcccgctcccgcg

SEQ ID NO: 916 - DNA, 426 bp, Homo sapiens
  source 1..426: mol_type = other DNA
agcagctggaagttcccgggggggctgcccagtgcagccgcaatgctgccgcgagctgccccagcagtccgggctttcctcgggctgccgggagtcccgggacctggcggggccggcatgacgggcttctcgggggcccgccgcacgcccggcagcctccggagacgcgcgccgagcccggctcccacggcctctgaggctcggcggggctgcggctgcctggcgggcgggctccggagctttcctgagcggcattagcccacggcttggcccggacgcgaccaaaggctcttctggagaacccttcggcgaaccgtgaacaagggtgggtgaatcagagatctgtagcgtaggtacgtgacagctctgcctacatctgacgtccgcagagaggagcccctctccaatggcagatcttactagtat

SEQ ID NO: 917 - DNA, 278 bp, Homo sapiens
  source 1..278: mol_type = other DNA
cacctgttgaatgaacgtctatcaggagcactttgagctgctcattcaaccaaggagagagcatactctaccttgggcagtgtgccagacagatgattcagcttgatcaggctgtagagtctcccataatgattagcctaaccatttaaggattgtcttaaggacagccttgaggagacatgacatgatccgatttaaattttaaaaagataactctgtcaactgtgccaacagtttaacattgactgatccattccgatatgggtttatataaatag

SEQ ID NO: 918 - DNA, 263 bp, Homo sapiens
  source 1..263: mol_type = other DNA
agagtctcccataatgattagcctaaccatttaaggattgtcttaaggacagccttgaggagacatgacatgatccgatttaaattttaaaaagataactctgtcaactgtgccaacagtttaacattgactgatccattccgatatgggtttatataaatagaccgcctagtggagagggggatgggcgccgccggagccgccctcgcctcctggcgccgggggcgggaccagagcacgcacggcgcgatgacgcagtgccc

SEQ ID NO: 919 - DNA, 454 bp, Homo sapiens
  source 1..454: mol_type = other DNA
aaccatttaaggattgtcttaaggacagccttgaggagacatgacatgatccgatttaaattttaaaaagataactctgtcaactgtgccaacagtttaacattgactgatccattccgatatgggtttatataaatagaccgcctagtggagagggggatgggcgccgccggagccgccctcgcctcctggcgccgggggcgggaccagagcacgcacggcgcgatgacgcagtgcccgagccggcctcgttctggctgccgccgtctcgctgaggcggagtaggatgaggcccgcggccgtggctccggcgtcggcgggggcagcagcagctgaggcagcagctgaggcagccgcgacggccgcgcccccccccgctgacctggattaggcccagcagctccgtggccgccgccgccccgcgggggggcggggtggggaagtgcttcgtctc

SEQ ID NO: 920 - DNA, 84 bp, Homo sapiens
  source 1..84: mol_type = other DNA
gggcttgggaaaccctgggtgacagctgctctgagctggggcgaaagcccaccagcagttgctgggccaccccgctggctgggt

SEQ ID NO: 921 - DNA, 393 bp, Homo sapiens
  source 1..393: mol_type = other DNA
gatgattatcagatcacgcctgtaatcccaactgggttttgaaaaagacatgtttcaatttgcctgggaagatctactgatgcatcgagggaatttcttttaactaacttctgggaaataggatttcccttcagggagagtatcaagcctctttctggaacattctttcactcaaaggaggccccttgagaagactctcatttttatatgggaaagctgagacccagaaaagtcaggggtttgctttcctttcattcattcattcattcattcattcattcattcattcatttacctaacagatatttattaaaaaaagattcttgcttcctggaagcttatagtttagtggaggggccattggcaaagtgaatttgaaaggccctgggcctc

SEQ ID NO: 922 - DNA, 324 bp, Homo sapiens
  source 1..324: mol_type = other DNA
ttattggacacgaaatttgtaggagcaggccttctagcccctggactgcacgccaggggatcgcttggtggtggtaatttaaaataaaaaccaaaaaagatgggtctcctctgtcccctgaagtgggtcactccagggcctggcctggcctgcagcctccaccctcaggcccagacacatcagccccctgctgctggtccgaggggctctggaccgagtgggaccggccgctggcccccttggagcgcttgcccagggacctcaggcccgctctcagggaggcgcaggtccagggcggggaggagccacgggtcccgccctgcc

SEQ ID NO: 923 - DNA, 531 bp, Homo sapiens
  source 1..531: mol_type = other DNA
cctggaggtcatagttgctccagggcctttgtgaagggacagctctaatggcagccacatgctctgatgagttggggccaggagatggtgactcttcatgggccagtggctgagacaccgcctcagggctcggtgcacagtggacattgtgggtgacccccacacaggcactgggaaatacaattatgggaggcagtgtgaactgccagctagcagtgagtgctaaaccgtttccccgccttctggtctcctgcagtcactcagtgggcgagataatccaggcctgactgcacgaatgcccccattaatgcggctcaggtccgaggagggagcgagctcccggcccgggcggtgtctgcgcagagggcgccgggctctcacctgtcggagcgggggtgggggccgcccagaacccccggcggtgcgggagcgcgggtcgccgcgggcggccatggccctacggtgcgggtggggagaccgaggctcggcccggccccgccgccttccccgcccccggcgcgcccctccccg

SEQ ID NO: 924 - DNA, 366 bp, Homo sapiens
  source 1..366: mol_type = other DNA
gctactactgattccgtacttactgtgtacacattaatacctaaatatataacccaagaacatatgtaaattttttaaatggctataaaactgacagagcttgaagcaatcgggatcttgtttaatgcaagtcactaactagactcacagaaagtgaatacctaaaagtcagtttcaaatttgagttttgggaggacccttccaaacatgggttctctgcttgtcagaacagtttacatgaagcatgtacgtgactcctggtttctgagaaaacatttttttcgggccccaatcgggacgcgccaccagctctggaactggcaggtgtctgtcaccttatcatcccggacaccatgtttacattgt

SEQ ID NO: 925 - DNA, 508 bp, Homo sapiens
  source 1..508: mol_type = other DNA
tgacgatatagaaatatattgaaaacagttctaaatgtgacaggcaccaggcaaatacatttttgcttcccctttccaaatggattttggctgtgggagggaatgtcttcttttccaatatactagcagatggttaaatatttacagttagacttggattctaattcagctatataattagctgtatgaccttagtaagacacttatttgtgtttcagttccttcattcatacaattcaaaaaataagagtatatataaagtgccattattattttctatcattatctcatttagtctttgtaagtaactgggcctctagttagccgggttttccaaggcggccccgggggcaggctctggtccggtggccgagactccggcgccagggtttgggcggcgccgcggccggctccggcgggcgggcaggcgggcggggccaggcggggcggggcggggttaggggagacgcccgcccgcccgccccggcctcgcctgcggccgctccct

SEQ ID NO: 926 - DNA, 506 bp, Homo sapiens
  source 1..506: mol_type = other DNA
acgatatagaaatatattgaaaacagttctaaatgtgacaggcaccaggcaaatacatttttgcttcccctttccaaatggattttggctgtgggagggaatgtcttcttttccaatatactagcagatggttaaatatttacagttagacttggattctaattcagctatataattagctgtatgaccttagtaagacacttatttgtgtttcagttccttcattcatacaattcaaaaaataagagtatatataaagtgccattattattttctatcattatctcatttagtctttgtaagtaactgggcctctagttagccgggttttccaaggcggccccgggggcaggctctggtccggtggccgagactccggcgccagggtttgggcggcgccgcggccggctccggcgggcgggcaggcgggcggggccaggcggggcggggcggggttaggggagacgcccgcccgcccgccccggcctcgcctgcggccgctccct

SEQ ID NO: 927 - DNA, 508 bp, Homo sapiens; identical to SEQ ID NO: 925
  source 1..508: mol_type = other DNA

SEQ ID NO: 928 - DNA, 486 bp, Homo sapiens
  source 1..486: mol_type = other DNA
tttgaagatgaatttcaagtaactgggtattccaactgaaggttgacgatatagaaatatattgaaaacagttctaaatgtgacaggcaccaggcaaatacatttttgcttcccctttccaaatggattttggctgtgggagggaatgtcttcttttccaatatactagcagatggttaaatatttacagttagacttggattctaattcagctatataattagctgtatgaccttagtaagacacttatttgtgtttcagttccttcattcatacaattcaaaaaataagagtatatataaagtgccattattattttctatcattatctcatttagtctttgtaagtaactgggcctctagttagccgggttttccaaggcggccccgggggcaggctctggtccggtggccgagactccggcgccagggtttgggcggcgccgcggccggctccggcgggcgggcaggcgggcggggccaggc

SEQ ID NO: 929 - DNA, 375 bp, Homo sapiens
  source 1..375: mol_type = other DNA
caggctggtctcgaacgcctgatctcaagtgatctgcctgcagccaataaatgcttaaattgcccctgtaaaaagttaccttttcactcaggcgggaatttaaaaatttatgattttttaatgtacgatataatttactatttattttaccaaaacagcgaatatttattaaatgaatggatttgtggaatgaatgcataaatgaatatcagatatgaaatcttttgtcatggccagtaaaattatttattaatatgttcataatcttttttctttactctaatcccatgacagattataaataatcttaatagcagtattcagttgccggcaccgcccaggacccgcccaggacccgccccgccccctgcggcc

SEQ ID NO: 930 - DNA, 433 bp, Homo sapiens
  source 1..433: mol_type = other DNA
gatcaataagttaatcacttatgtttgtgattccttaagtccagacttttgatataatctgcagttggagctgaaaatataggcgctcacgcttttgtttagggtgtaggtgaggcacgctggcgcccgcgggcccttctccagccgctacccagtgggaatccgcggggctgaagccttcccccagcagcgccggcgccgcagaagccgcgtgtccccaggcgcactcccccaaggtgaacccccgccccccacggaggcggctgggtcgcgggtctgggcggggcgctccggacgccctcccgccgctgcgcacccctcccgcgagctgccgcaggtgacccatggccaatcgccaggggtctctttgccaggagccgccagggccagccaatcggggcgacccctccgccggggaggggacggggtgtcc

SEQ ID NO: 931 - DNA, 183 bp, Homo sapiens
  source 1..183: mol_type = other DNA
tatgtatgagctatgatctcttaccccatggtgtcagtagagcagacgctgcagctgctcgataaaaattggtactgtcgggccgcggcgctcgggagcagcgtccatccggcgggtgtcccgggtctgacgaatgggaaaatttaaaactttggaattaattctcttcagtgggcacgctgg

SEQ ID NO: 932 - DNA, 130 bp, Homo sapiens
  source 1..130: mol_type = other DNA
aaaatgattttggtatctgactcagaatcatgctgacaccacgttatgggggacctggagggtgagggccggggcggggcgaacacagactccgcccttgggcggggcctggatgcggccggagcggagc

SEQ ID NO: 933 - DNA, 342 bp, Homo sapiens
  source 1..342: mol_type = other DNA
gcaggtggccgcgcggcatcctggggcttgcaggcctacaattttagggaacctaataaaaacggactttccaggaagaaaaagaccggacattttcacctgtttgttatacagcgaaggggaaaataaccagaagctttacactttaggtcctaagtccaagtgcatgtctgcacggcacgagcccacgcaccgcagaacaggcttgccaggtctcctcagagaccctcgcacgcccacggcggacgcgaggagcaacggttctcccgaacctctccccccgtcccgggacctggacctcgagaacagctctcgtacccttctttcagagtttgaaaaaaa

SEQ ID NO: 934 - DNA, 378 bp, Homo sapiens
  source 1..378: mol_type = other DNA
gtccaggtcccgggacggggggagaggttcgggagaaccgttgctcctcgcgtccgccgtgggcgtgcgagggtctctgaggagacctggcaagcctgttctgcggtgcgtgggctcgtgccgtgcagacatgcacttggacttaggacctaaagtgtaaagcttctggttattttccccttcgctgtataacaaacaggtgaaaatgtccggtctttttcttcctggaaagtccgtttttattaggttccctaaaattgtaggcctgcaagccccaggatgccgcgcggccacctgcaccgctcccgggataggctgccccggagagggagaggcggggtcggctgtatcacgtggatctgctcccgccgccgccgc

SEQ ID NO: 935 - DNA, 529 bp, Homo sapiens
  source 1..529: mol_type = other DNA
gttttgagggttaaaacattatcaaccacagggaatggttcacgatacacagttactggtaactattgttaccactcccgaggggaccgccattcactagcttcggttccctggactcaagggcgggaagtggtaacctcagcttccctatctgtagactgggagcatcaaatgacactgctgttccacctgcctcctgggacagggtctgggcggcaacagggcgggcccgctcgctcccacagggggcggtggtgctggggaccttcccacaggtgccgacccccagctgcgccgccggtaaccgacaggccaagccagccgcctccgcccccgctcgccgcaccacggcggaagtggcagcctgagcagcggcctatggccgtgaagtggcgggaccgccgggggtctcacctctgcctcagccgagacagagaaagacgacggcggcggcggcggcggcgggagcagatccacgtgatacagccgaccccgcctctccctctccggggcagcctatcccgggagc

SEQ ID NO: 936 - DNA, 437 bp, Homo sapiens
  source 1..437: mol_type = other DNA
cattaagagagctactaggtaattattaaatgaatgattcctggagacattaggccataacctaaggtaaggtgagattgccttataacattttttatacataaaaaatactggttgcatgctgctatctgctgtgcaacagaatgtcataggaattcttccatggaggggtgttacataaacccattagtgaaatttagggaaatttcacccagaaccaataaaaattgtaactaacatttattaagtatcttcaacttccccagggtcataaagctatatatacatgacatagtgttggtatgtgtctgacaccaaaatcactacacattctagtataccactctgttaaaaaagtgtatttggaaaatttagggatcagaggatttggagaattttctttcaaatatggggcatctgtaaacagaatgattcca

SEQ ID NO: 937 - DNA, 599 bp, Homo sapiens
  source 1..599: mol_type = other DNA
cttacctttaagttgtttatgaatttcaggactggcatatatatatatgtatgtattttttttatctgtagaaaatttcttaatgatctacacagtagataaaaaaacaaaaaaaaaggtttgttctcactcttctttcatccactccctggacaagaacgttcacgtatcttcactgaggggcttccggttcccgggaagcggagtcccgggccggccgcgggccgcgggctacgcagggagcacggggccctcgccgcccccaggccgcgctccttagcgttccctgcggctcgtgcccagcgcggccgccgcagtcccgacgccgtagccggacgtggggtccagggggcgctgtggcccagcggcgccggcggcaggagcggccacccgacgctggaggcttcgctgaggatccccgcctgccgcacctcggtcgtcccgccgcagccttgcgcccccggcccggctcggcggcgctcctccgggatccgcgtggctgccgcggcccgggcgccgatgcggctgggcgggtgccgggccttagcagcagtagcagccgcagctgcggctaccgcagctcctacaggagtgggagg

SEQ ID NO: 938 - DNA, 639 bp, Homo sapiens
  source 1..639: mol_type = other DNA
tcttattttttattaagcatatcattttcacatctgataatagaatatttgtaatgtcaggaaattttttcagtttatctttaaaattaagtagtgttcattaaattatctccaagatacttacgtgttctgaaaatactatgattatgtgttagatattttatactgataatataatattcatagtcttagttttattctgattagcttcaactactaatcttgttcaaggctaaattaggcccttaaagaattttacattgtctctaagcagttatagttgggctaccataacttaatggatataaaagcaatatttgaagagcctttgtcttttgcatgcatgcctgtccattgcttctatggaaacttgtgaaactcaagaattctacatgtatagaaaaaaaatcacactagaaggacattcttgtgctattataaggcaaattatatacttatgaattaacacaattaaagtcatttctcactttgcattatccattgaaaataaacgtgcaaatcattgaaacatttaacttttggcctttcagacaataaaatgtctctgttgctaccttgtatgcaagccaggtctttgaatccaaaggtataattgtgtttttcctttaggatcaaaca

SEQ ID NO: 939 - DNA, 521 bp, Homo sapiens
  source 1..521: mol_type = other DNA
taatattgaggactcctgatcagttaactggactctgcaacagtccatcttgcaggattgagaactggtataagctccattatgaaaagcttggcagaaaacgggtatactccgtttctctctgcctgtctgaagttttcaacggaccggaaaaggatactttcaggtgctgaattagaaacatatggggccccatttccatttccccaggcttaaaggacatggacaagcaggtgagccccgcccctgtctctcttccagggcggagcttgggtaggccccgccctcttgctcggtggggcggggcgagggctggaggcggggtaggtccagcgagcgagcgagcgcccagcgcctcgggggctgggcgcagcgacctcattggagccggccggtggacgccccggcggaaccgcccgaacgcgcctgcgcgctgcgaaccccgccccggtgtcacctgttggagccccccgcccgcgtagccgtgcacatgcgcactgccggccgccggccagtggggt

SEQ ID NO: 940 - DNA, 292 bp, Homo sapiens
  source 1..292: mol_type = other DNA
ggtccacagattgtcacaggacatggatttaaagccatgatatttataaatactggaaccggcccagatctaagaatagtaagatcatgaatattaacgttaggtccttaaagaccttcaacagattgtgtcaaagtgttatatcaaaatttttctggctgagaggcgctccgcgcgcttccacttacctgtaagttggatgctgtgcgcatccttcactgtacggttgaatgcagtttcactaaacagcttaggcgaccatcttgaagccggaaacaccgtaggccacgcc

SEQ ID NO: 941 - DNA, 252 bp, Homo sapiens
  source 1..252: mol_type = other DNA
gaaaaggaagtggggccaccagacttctcttctgaaaagatccctccctgggcgcaatttacgtccgtaaaatggggtaaagtggttcctacctgagcatcggcaggaatgctcctccgccttcccccctgcaaactcagttccctgcagcgcgggaagaggaacgctcttaacagttcagaacagtgcctggcactgaacaggcgctgactgagtctacagatccctcgcagcccgctggacgggcgtggc

SEQ ID NO: 942 - DNA, 580 bp, Homo sapiens
  source 1..580: mol_type = other DNA
gcagctaaagaaatgatttctaaaacctcttttggaactgcctgccttttcaaaggaaaaaaggtgtgggtgggggtcgaccctggcggcttcctctgccccgctccctgctccgaagcccgcttgggcttccgagggtccgccgaggctcgggccacgcccagtccgagtgccaggccagagggtacccattccaggccggccttcctccccagggggagcagccttgggagcgaggcgccgaggcggccctcgggctcggcttccagctcgggggcctcggcagagactggaaccagactggggcagcactggggcgcccgccacccccacccactccgggcgaatcagcgcggctaacccgcggcgcccaggcgggctgcgggacctcgcgacctccgctcggcggccccgcccctgcccgcgagccccgggtggctccctcgcgagctaacgagtgtctctcgcgcgctcccttccctccgcgtgggtgtgagtgcgcgacccgccccggtgtaaacggtgcctgtggggccccccgaacgaagggagggggcacccctgaacccttccctctgcg

SEQ ID NO: 943 - DNA, 592 bp, Homo sapiens
  source 1..592: mol_type = other DNA
gtcccagcctgagtcacattataagaaaatttataaggcactatcttgtaaatacttaagatttaacatcttggactgggcacagagcacagaggttgtgtgctttgtccagctttgaggtcagagatgactttaaataattatgtaggcagctaaagaaatgatttctaaaacctcttttggaactgcctgccttttcaaaggaaaaaaggtgtgggtgggggtcgaccctggcggcttcctctgccccgctccctgctccgaagcccgcttgggcttccgagggtccgccgaggctcgggccacgcccagtccgagtgccaggccagagggtacccattccaggccggccttcctccccagggggagcagccttgggagcgaggcgccgaggcggccctcgggctcggcttccagctcgggggcctcggcagagactggaaccagactggggcagcactggggcgcccgccacccccacccactccgggcgaatcagcgcggctaacccgcggcgcccaggcgggctgcgggacctcgcgacctccgctcggcggccccgcccctgcccgcgagccccgggtggctccct

SEQ ID NO: 944 - DNA, 438 bp, Homo sapiens
  source 1..438: mol_type = other DNA
gtgatgtgctgcccagatcccccagctgctaggagtgctgttagcacaaagccacagggccatcttggcccttgttgccccacttgccaggtggccccacatgataaaggcaggatgacctggccatcttagctcatctgatgggctactctagctctagagtccctgtcgagcattcattcacctgaagtttgcaggcaccattcaactgttaaaggcgtgaccaggccagcctaaggcctgggacaagagggagactccggtctcaggggacagaatcctgaaaccctggctctggggtccggggcaggggtgcgctgcctcaggacagacggtgaaactgaggtccagagccggacatccaccgcgcggaggaacgcggcgcgtcctgccttgcgggccgagcggcgccagagccgcctcctcccgccccccgcg

SEQ ID NO: 945 - DNA, 271 bp, Homo sapiens
  source 1..271: mol_type = other DNA
tcagtcagtctgactcctccatcagactctgatccctctcaggggccctagggcccacccaggtcagggcagcggtagagctgggctggagcccagatcccttcctcctgtaatttttcaaaatgtggggaaggaggttaccgtctgggcccatccacccttgtcccaggccagtggcaggcagtatggtggacattgtccgtgcacgatagctctcagcgacttcctactaggccgtgcgaacatccccgggcccctgggtttttgcgga

SEQ ID NO: 946 - DNA, 489 bp, Homo sapiens
  source 1..489: mol_type = other DNA
tgtaatttttcaaaatgtggggaaggaggttaccgtctgggcccatccacccttgtcccaggccagtggcaggcagtatggtggacattgtccgtgcacgatagctctcagcgacttcctactaggccgtgcgaacatccccgggcccctgggtttttgcggaggtcccagccccgaatgccccgagactcccggcgccggctcggtgcaggtaaggcgcccgcgccctggcctcgaattcccgccccgccactctggccgcgtcgtgctgtcgttgcgcacccagcgccctcgtgcaggcagggggagcgcagtcaggcagagccaggcgagcacgcggctcccggcccagctccccgcgtccgctccggctcctgccgcgttccagcagccgtcactcccgccgccggcccccgccgcccgccccgcctgcccctacccctccgcgcgggccgggcacctggccgccgctcggtcctcggggccccg

SEQ ID NO: 947 - DNA, 183 bp, Homo sapiens
  source 1..183: mol_type = other DNA
gcttctgcactatgccatttagcttgaggatggggtacatccccagcactcaccacagggcttggcacacaccaagtggatgtagatctagatattaataatattggtgagggccagggacggtacctgagccaccacatgtagctgtgccggaagccgcagcagaagacagcggccgcctcg

SEQ ID NO: 948 - DNA, 524 bp, Homo sapiens
  source 1..524: mol_type = other DNA
ggccaggctggtctcgaactcttggtgatccacggcctcattcattcttttatttttttaaaaaaaattattattgcataccaacaaactacttaatttctctgtactttagttttcttatctgtagaatggggataataataatacctacccacagtgtcactgtgagtgtttttacagtgacatgatatataatgagaattaaatgagttaattcatataaagcatttagagcctggaacaaagttcagcactgtttgagtactaggtgttataacagtgacgttgctacacccttgccattcattgcttaggtaaactcagactgctcactgcactttgtcagctacacctggcacatatagaagctcctctaaagaaggcggtagccctggaagcgtggctgccagcgcccttaacggcgcgatggctgctgggaagcacaggctcgcttggctcgccccgggatcccgggagagcgccgcggttggcgtcggcgtcagccccacgccccgccccgcccc

SEQ ID NO: 949 - DNA, 281 bp, Homo sapiens
  source 1..281: mol_type = other DNA
agtatacactctacaaaatcatcattctatccattctttttgaaaagcctggcatctgttaaggctgaaccttttagaaaggcatggcgatccaatgctagtagctgtttggccatgttggccaggctggtctcaggcccaggggactcttctataagagggtgctgtataaaattatacttcctaggaggtcagatgcttgtaaataatttattctccaacaaatctaaactaggaattccttggcagtgtgggagtaaattccctgtgctggacactga

SEQ ID NO: 950 - DNA, 248 bp, Homo sapiens
  source 1..248: mol_type = other DNA
ttcatgacggacgatagaatctaagctggccgggcgcagcggctcacgccccgtgtttgtaatcccagctactcgggaaagagttatgacaatagtagtaaaccgagagcgatgctctaatctctcgtcatgatgtaatatttaaagcttttcatattttgaagggatgggctggggggggcgggaccccctcgtctgagtctgcgcattgagagcggaggcgggtccaggcgcgggctcgcgcgccc

SEQ ID NO: 951 - DNA, 363 bp, Homo sapiens
  source 1..363: mol_type = other DNA
aatgctgcaatgtacagccatgaacacgtgtcatttcacagctgtgtggatttatctgtaggttaaatttctaaaattggaatttcttgcatttataattttgatataaattaccagttgcttttcatttaaagacattcacattgtgtttaagagaataattttttttttagtggcgcgaagctcactgaggtgtttaacagagacagggtttcgtcgctcaagggactcattaaatgtcatttcatttaaaaaatgaaattgagcatatcgacctcctccgctcaagtctccctgtccccgggaggtgcggaagacgcttggcccataggtggagcaattggcgaaggcttcgcccgacgc

SEQ ID NO: 952 - DNA, 425 bp, Homo sapiens
  source 1..425: mol_type = other DNA
gcaaacggttgcattcttctgactttgatcaatggggtagagaaatagtcacttatgcattcatctagctcaatgaatctgcatttttacataagataaaataccggcacctaaggtcaggagttccagaccagcctggccatggcgcgcgcctgtaatcccagatactcgggaggctgaggcaggaggaggctgcagtgagccgagttcgcggcattgcactccagcctgggcgacagagcgagactccggtctaacatggaaggctgtttctcataaagtctctgtcttccaaattccttttcggagaacttttgttcacaaggtttaaattcatgaattcactagagatggggacaggttgactcagtcccatgcccaagtccgcaaattagggattcggctgcctaagggctcctacgcac

SEQ ID NO: 953 - DNA, 374 bp, Homo sapiens
  source 1..374: mol_type = other DNA
ccctagtagctgggactagaggcgcctgttcagtaagtacagaatgttatccttttgaatccagaacctttctctgtgaataggtctggaaaacaactcattgttgttgggaaaataggaaaaatttcccataccagctaaacttttagggaatgtgaacttccaaatccttgtttattttcttttaatacattaaaaatggtaaaattaaattatttttatgccattttccccccttcggtgttttaagagaagttactatttacacaaacgtggcctcttaatcaaatgctttaatttaaagtcacccttttctggcttgagaaagctggagctcagtggctcagtgtgcagaactctgctggcagctgaga

SEQ ID NO: 954 - DNA, 491 bp, Homo sapiens
  source 1..491: mol_type = other DNA
cccacgtgtgacttatgcatccttctccctcagtgggaggacagccaggtgaggcagctgtggatgccctgcccacaggccagaaggaccaggctgtgggcccagggccaacaggaacttttccgggaagaggcccagcagggtcttggctggcggccccattagccacggcccagggagcggttgcaacatcctctgtaatgaggaagatacagctcagaggcactgggtcgaaggacccctctccccagccctcctttcaggtgtcggggcctgtcgcggaccagacagcccgccttcccggtctcccgggtgggggttcggggggcgtgccggggctgagaggggtcggtgcggcggctctgcctccccgggaagtgggaaccggccaagtcccgagcggggaggggcaggctttctcctgcccgcgcctggggggaccctacgcctgtgtccgaaggaggccggcgtccagcagatgctcccggggc

SEQ ID NO: 955 - DNA, 390 bp, Homo sapiens
  source 1..390: mol_type = other DNA
ccaaataccctctgggtggaattttgtaccagcaacaaagtagatgctgttatcatctctattttacagatggaggtcacacagctagtaagtggctgggctctgtcatctttaaaaaataataggcccagagagcctgcagggtgcccagcaccagcaggtcccctggactcggcctagccctgacttctgacctctgtgaccatggccaagggaggtctcagcctccctttctgaaaaatgaaggtgggaaccctggttccctatgattggcatagctaaggcagccacaggcctggggtgatattaatagtacttattttttgattctttctggaaggaagcaggaacgcttggctttgaggcctgaactcctagaccacgtggtct

SEQ ID NO: 956 - DNA, 411 bp, Homo sapiens
  source 1..411: mol_type = other DNA
tgacaggaagcctcttccacttgtttccgctcggaaggggtgaagtggtggccagcgggaaactccaggtttccaatgtcaatgaacagtaacatccgttaccgtttactgcttgcaccatgcactgtgcataacatgttatcttatctatctacttcttaggtgaggaaatagaggtttaaaatttagtccacagtctcgcaaggatggagcctggatcaaatttccagtttctgtcttgctccaaaaaaggggaaggagcggctgcggcgctcggtttcccgcctcctagggaagggaagggagacgagcagcgcggaggctggggcccccttccgggcggggcctactagtgggcggggcctgtcagtgagcggcccctgcccggaaggagccagtccggggcggagc

SEQ ID NO: 957 - DNA, 269 bp, Homo sapiens
  source 1..269: mol_type = other DNA
ctcaggtggtctcttgatgtgacgttacaagaagacttgaagcctggacaggagccaggaccaatacattctactttttaaagcgtattggtttcccctgggcagaggggcaccaccgaatcctggagtcaggcttccgctggcctgagcacaggttgctcgcagtgggccaggcgagcagcggcgcgcagaagtccctgccccgcggcccggccccggccccgccctactgagggtgcgcagacggcacccgccttttacgacgcgcc

SEQ ID NO: 958 - DNA, 439 bp, Homo sapiens
  source 1..439: mol_type = other DNA
aaagcaggttcctattacataattatgatcttgattgccctgggcctactcaactgtaaattttttccagaacagaggacaactttaccctgaaaagaaaggacctctttggtcagtggtcctccccaggtccagcgctggagattttcagccaggcagagaattacgagtgggagatcaaatactctaacgtctcccagctcactgaggactccggggaggtcgggtggcgggccttcggcccgaggtctttaagcgaagtcaccagacccggggttcaaagcccagaggtaggcaggcggctggctctccgcctcaggcctggagagaacccctcaacctcgctcccgcgtccagctggaggggcggagctggctggccccgcctccgggttgaaggaacccctccacgcagcgacgacgggacctgacgtcacttc

SEQ ID NO: 959 - DNA, 545 bp, Homo sapiens
  source 1..545: mol_type = other DNA
cccctagcggcagggatggcatcccttccgtgccctccccttgcgggccccccctggttgcccctctgactaggggcctggagcgtacttaacgacgatgaatagtctgtgcaccctgcctcacgtccccatgatcacatgagcgtgcaacatgcacagatccagccggagcccatgacaggtgcaggggtccagccctgcgcccccagggaatggtgaggggctcgcctggcccatccctgcgtctgcagagcccagcactcaggcgagcccagagcagggccggcggcagcgggagggagcgcgcgcgctggcggcggccgcccagggccggggccgcgcgcccagcctgagcccgccccgccgccgagcgtcgcagccgaggagccggggcgggcggcagcggcggcggcggcggcggcgggggcagcggcaaccccggcgccgcggcaaggactcggagggctgagacgcggcggcggcggcgcggggagcgcggggcgcggcggccggagccccgggcccgccatgggcctccccgagcc

SEQ ID NO: 960 - DNA, 538 bp, Homo sapiens
  source 1..538: mol_type = other DNA
ttacagctatcatgaaattaatttcatatacttgagaaagctactttaatcaccacctggaggaaatcaagttagaactgaggcactgacctggtgagcaaatgacttaaatattaaattaaatattgactattttgcagtttatttctagacaattttgccataggttttccacaattgagacacacaaaaagaaagctttacagtacatataaatagaatttttttttttgagatgggggatcctcccacgtcatgttgcccaagatggtctaggcttgcaaagtgcagggattacaagccggcaccactgcacccagcctgaaatttttttaagaaataatttcaaggtactataaaaaacaatttaagaaaatgatagtcattggttctatcatgattccactcattagctacatgactttgagcaagttatctagctgaaacaagagtcaacaggctttgtgtgaacaataaagctttttaatcaccagggtgcaggcgggctgactcctttttcacaggtgattaaaaagct

SEQ ID NO: 961 - DNA, 500 bp, Homo sapiens
  source 1..500: mol_type = other DNA
aggctgaaagccgctctccgcacccattctccccagtgtgggtgaggcgggctgcagccctccagaggaagaggtgccttctccttcctgcagaagacagcaggggcggacagcgcgggcctaggtgcgcggcccctagcggcagggatggcatcccttccgtgccctccccttgcgggccccccctggttgcccctctgactaggggcctggagcgtacttaacgacgatgaatagtctgtgcaccctgcctcacgtccccatgatcacatgagcgtgcaacatgcacagatccagccggagcccatgacaggtgcaggggtccagccctgcgcccccagggaatggtgaggggctcgcctggcccatccctgcgtctgcagagcccagcactcaggcgagcccagagcagggccggcggcagcgggagggagcgcgcgcgctggcggcggccgcccagggccggggccgcgcgcccagcctgagcccgccccgccgcc

SEQ ID NO: 962 - DNA, 508 bp, Homo sapiens
  source 1..508: mol_type = other DNA
aactatgacgtttgtgctaacttttcagatgtcccaagatttgggttgttttacaaggataacgaagttcatgatgaggttaagcaatcactgaagctagtgctagaaattttttttaatttaattttttagaaagaggggtcttgcagaattttttatttaattttttagaaatagcaggacactatgccaggcttagctacaatattctgtctattttactttaaaatattctaagtatgcttggaaggcatcaacatccagaaatgcattcctacatcaagactctacgggaattactgtaagtacccactgaactcttgagaatattctggaatatcctggaagcatctctgcagggatacagtttgcctcttacagtatttttctttaaatttgcaataatgaagaatttattcaacccaatccatttcctgctgcagttcccgggacacactgcgagccgctttgttacaagtgtatccaatgtccccgagggacttgtggg

SEQ ID NO: 963 - DNA, 505 bp, Homo sapiens
  source 1..505: mol_type = other DNA
tgcatttccttagtcagtaaatcactgaatctatttctccagagatctcactgaggtctaaagcactgagtatattaatgataacatttgtatagcatattatttacatcctcacaacatcaccaggatatttttattttcatccttatcttactgttgaagaaatattcaccaaaggcatctctagagaattttttttttatttcagtaaaattactgacttttaggtgacttataaagtaatagatcaggaagaccttgactcccagcattctgtactttggaactccgagtcccagaatgcccagcatgcagcgccgccacctgcttctggcgccccgctggaccctgcttcgaagggaccgtttggcgtgtctgcgcggcagtcctggcctgttgagcttgtccagacgaagcctcgcagggatgggttggagcctgggccgggcttcgctcaggcagcgtttgaggcagacccagcagggtcctcctggggccttcctgc

SEQ ID NO: 964 - DNA, 383 bp, Homo sapiens
  source 1..383: mol_type = other DNA
ggtgctgattaggtcccatcacagctgattcatgaactgagattcattctctttgtaaaatgaggataatcaccccaagatagcaggattgttctgagaattagagatcctgcatgtacaaagcctgatcatgatcatcttaaatacactatatatggctattattagatgtaaagtctttcagaatgtaattgactcatcatgtactttctcaccagtgaaatttttgtggccaaaagaaactgaccgattttatatttccttaggaaaagagctcgggagaagggcgggcgggagcgggctctgcgcgccgcagcacgcaggtttctcctgctgtctctttaaggaggcggggctcttcccggaggaggcggagaggttcc

SEQ ID NO: 965 - DNA, 274 bp, Homo sapiens
  source 1..274: mol_type = other DNA
gggaaaggagccacctttcccttgaaagattcaagggaaactggaaacggctatagaagaataagaatcttcaaagctgccatagaggctctctagctttcacaaagggataacaccagcaatatatttgttgttgccatgtgactggtttcagttagaaaatgccaacctaaggaccaacatgccttcatattgcttcctcatatgagtaagatgcattgtcaaatgcgtcacttccaaaggcagcatatattcatcaagtgttgaccccatt

SEQ ID NO: 966 - DNA, 367 bp, Homo sapiens
  source 1..367: mol_type = other DNA
aatggtcccatttctgtctctgccctgggaggtttgagatccatatcccctggggagggctctgctcgagcctgtcccggcgcctgtaatcccagctgcaagatcgtgccactgcactccagcctgggcgacagagcgagacaacaaaaaaccatggatgtttgttgggaaaacaaagatctttgttgggaaaaacatctttcattagtaaaagaagagtttgtgtataaagaataactgagagcatctaacaggttctctttaagtgtggtctttttaagtacttgttttttaaaaaattaatcagagggagaatttaagattggaattctgtgttaggaattttctatctcatgaagggctgcag

SEQ ID NO: 967 - DNA, 617 bp, Homo sapiens
  source 1..617: mol_type = other DNA
gcccgcggccgccacctacctgtgcccctgcccggggcagcgagcggcagctcctcggtgacggctccctcctcccgcggcccggctgacggggaagggctcagcggggcaaccaggcgccgtgggaccgcgggaccggcgggggcgggagcaaggctgggccggggaggcgcgcgtgcgcgggccccggcacgaaggcggggccggacctggaggcggggccaggcccagggcaggcgacccgagggccgagggtttggaactcgcagaggtgggccctgcgcgtgcgtgctcgcgggagggtgggtcccctgggtcctgcgggccccggggatagagctgagctggcagcgcgcgccccgggactggcctgggccgaggccgccgcgagggggcggggctggagcgagcgcgcccgggaactcggtggagcgagcgcgcccgggaactcggtggaggccgcggtggcgctcggggtaggagcgcgcgcccggaaactcagcggtggccgcggcgaaggggcgggagttggagcgcgcgcgaccccggactccacggaggccgcggcgagcaggcggagctgcgggtcgggacgctctgcgtggggcaggtttcga

SEQ ID NO: 968 - DNA, 617 bp, Homo sapiens; identical to SEQ ID NO: 967
  source 1..617: mol_type = other DNA

SEQ ID NO: 969 - DNA, 561 bp, Homo sapiens
  source 1..561: mol_type = other DNA
ctcccacacgcaacccggggccccgcgagcggcccggcccgcggccgccacctacctgtgcccctgcccggggcagcgagcggcagctcctcggtgacggctccctcctcccgcggcccggctgacggggaagggctcagcggggcaaccaggcgccgtgggaccgcgggaccggcgggggcgggagcaaggctgggccggggaggcgcgcgtgcgcgggccccggcacgaaggcggggccggacctggaggcggggccaggcccagggcaggcgacccgagggccgagggtttggaactcgcagaggtgggccctgcgcgtgcgtgctcgcgggagggtgggtcccctgggtcctgcgggccccggggatagagctgagctggcagcgcgcgccccgggactggcctgggccgaggccgccgcgagggggcggggctggagcgagcgcgcccgggaactcggtggagcgagcgcgcccgggaactcggtggaggccgcggtggcgctcggggtaggagcgcgcgcccggaaactcagcggtggccgcggcgaaggggcgg

SEQ ID NO: 970 - DNA, 457 bp, Homo sapiens
  source 1..457: mol_type = other DNA
ctaaagcctcagacttgtggaggcccaaattatgtaaagaatatataaatgcccccgaccttaggtacaatttatagctagattaattaagctatttctggcctcaaagagaaggcgggcccgcgtcagacctcccgccgcggcccttccacggcccggccaggccccgctcacctgggactcccgttagctctgggcgccggaccttccgggctcgaaacctgccccacgcagagcgtcccgacccgcagctccgcctgctcgccgcggcctccgtggagtccggggtcgcgcgcgctccaactcccgccccttcgccgcggccaccgctgagtttccgggcgcgcgctcctaccccgagcgccaccgcggcctccaccgagttcccgggcgcgctcgctccaccgagttcccgggcgcgctcgctccagccccgccccctcgcggcggcctcggc

SEQ ID NO: 971 - DNA, 218 bp, Homo sapiens
  source 1..218: mol_type = other DNA
ctcccacacgcaacccggggccccgcgagcggcccggcccgcggccgccacctacctgtgcccctgcccggggcagcgagcggcagctcctcggtgacggctccctcctcccgcggcccggctgacggggaagggctcagcggggcaaccaggcgccgtgggaccgcgggaccggcgggggcgggagcaaggctgggccggggaggcgcgcgtgcgcg

SEQ ID NO: 972 - DNA, 545 bp, Homo sapiens
  source 1..545: mol_type = other DNA
aaggcgggcccgcgtcagacctcccgccgcggcccttccacggcccggccaggccccgctcacctgggactcccgttagctctgggcgccggaccttccgggctcgaaacctgccccacgcagagcgtcccgacccgcagctccgcctgctcgccgcggcctccgtggagtccggggtcgcgcgcgctccaactcccgccccttcgccgcggccaccgctgagtttccgggcgcgcgctcctaccccgagcgccaccgcggcctccaccgagttcccgggcgcgctcgctccaccgagttcccgggcgcgctcgctccagccccgccccctcgcggcggcctcggcccaggccagtcccggggcgcgcgctgccagctcagctctatccccggggcccgcaggacccaggggacccaccctcccgcgagcacgcacgcgcagggcccacctctgcgagttccaaaccctcggccctcgggtcgcctgccctgggcctggccccgcctccaggtccggccccgccttcgtgccggggcccgcgcac

SEQ ID NO: 973 - DNA, 601 bp, Homo sapiens
  source 1..601: mol_type = other DNA
gcggcctccgtggagtccggggtcgcgcgcgctccaactcccgccccttcgccgcggccaccgctgagtttccgggcgcgcgctcctaccccgagcgccaccgcggcctccaccgagttcccgggcgcgctcgctccaccgagttcccgggcgcgctcgctccagccccgccccctcgcggcggcctcggcccaggccagtcccggggcgcgcgctgccagctcagctctatccccggggcccgcaggacccaggggacccaccctcccgcgagcacgcacgcgcagggcccacctctgcgagttccaaaccctcggccctcgggtcgcctgccctgggcctggccccgcctccaggtccggccccgccttcgtgccggggcccgcgcacgcgcgcctccccggcccagccttgctcccgcccccgccggtcccgcggtcccacggcgcctggttgccccgctgagcccttccccgtcagccgggccgcgggaggagggagccgtcaccgaggagctgccgctcgctgccccgggcaggggcacaggtaggtggcggccgcgggccgggccgctcgcggggccccgggttgcgtgtgggag

SEQ ID NO: 974 - DNA, 380 bp, Homo sapiens
  source 1..380: mol_type = other DNA
gccctaagagagtcctgggctttttatttcccaatgcaaaagaaaaccgggtccttggacctgtccctcaagattccagggccttggtttactcagcagtgggacaggctgctaggaacccaaggggttgttcacgcaagcaaccagcattcacattgccacgtttctaaatgaaacaatttaaaattatatttgctttataattttagtggaaaatgcatattctttcaatctaggtcacctatgtagttgaacagaatctgggagtttcggtgaatagcctggccggagaggggccctcctgcctttgcctctgcttggaaggcagctgacaggggcctgcccacagggagggtgtggcccgggcaaggcctcctgct

SEQ ID NO: 975 - DNA, 308 bp, Homo sapiens
  source 1..308: mol_type = other DNA
ttaggaggttcgaggattccaacattgggggaattggcccaatattggaacttccaacctggtaccatcctcctcgttcccagcactcaggagcccgggtaggggcacccaacaacggtctgacgtgagaccaccaggcagccctggtagctgctgttggcgccctccagactgcaacctcgtaggcttctgtgttgaaactaaacagacgcttcctcccagggcggtagttcctctgaagaaactccgccggccccacattccccagaatgcactgcgaagaaatgcgggccccgcgaagggaagaa

SEQ ID NO: 976 - DNA, 394 bp, Homo sapiens
  source 1..394: mol_type = other DNA
tttttccccaaagtaacacaattgagttctctggaagaattcattaagattttctctttaaaagaaagatcttccgaagaattgttaggaggttcctgaggattccaacattgggggaattggcccaatattggaacttccaacctggtaccatcctcctcgttcccagcactcaggagcccgggtaggggcacccaacaacggtctgacgtgagaccaccaggcagccctggtagctgctgttggcgccctccagactgcaacctcgtaggcttctgtgttgaaactaaacagacgcttcctcccagggcggtagttcctctgaagaaactccgccggccccacattccccagaatgcactgcgaagaaatgcgggccccgcgaagggaagaa

SEQ ID NO: 977 - DNA, 246 bp, Homo sapiens
  source 1..246: mol_type = other DNA
cccctgcagcccggcaagctcccagagggtagtgcacaagggaagggtcgcagcccgctccggacgggccctaccttagggtaggtgtgccggtggcagacggtccccgaacctccggccaaggccatggtcagcagcagcagcggcgggagccccagttgggtcctcacccagaggctcccctcacagcagcttcttcccttcgcggggcccgcatttcttcgcagtgcattctggggaatgtgg

SEQ ID NO: 978 - DNA, 488 bp, Homo sapiens
  source 1..488: mol_type = other DNA
ttttaaaatatacagttaatctccagaatgtcagacctggaaaggtcaatgtggactgtccagtcaaaaccattcacttcccaggaaatagaggggatggccagccatgcctagaacttcagagtttcaatgtcttgcccaaagccacagagggtcggggtcggtgagaggaacacggtcccttgccgcccgtcctggggcctcaccctcgagaaggcggcagaaccttgggtccttgtagccgcggtcccagggcggaaagatcggccgcgccagccagggcacgtgcatcttccccgccagggatctcgtacaccctatccaggggaggaggctccgacttccgcgtggagcgcacgccccactcatacgccccgcgtctcggggccccgaagcccccaaggccgagctgcccggagccagctagcgcccgccttgcgggcccggacgccaatgaccccgccatgttgccgcgcgcagggcctgct

SEQ ID NO: 979 - DNA, 342 bp, Homo sapiens
  source 1..342: mol_type = other DNA
cacgcattcactaaacatatttactatgtgccaggcactgttctcagtgctggggatatagcagtgcactcactgagctcatagggctcagcgcagcgcctgacacacagcaggcagctgacagacaggtgttgagcaaggagcaaaggcgcatcttcattgctctgtccttgcttctgggacactctcacgctcaggagagggacagagcgacagaggcgctcgcagcagcgcgctgtacaggtgcatatccgacactgggcctcagaaagggaagtgccttcccaagcgcagtcaaccttgtctaagtccaggtctgaagtcctggcacgtgagggtagg

SEQ ID NO: 980 - DNA, 757 bp, Homo sapiens
  source 1..757: mol_type = other DNA
gccaagggccattttcgcgcggctccactttggggtttctagtaaaggagcagccgcgcgcctcggcgccggctcgagccgcccagctctcagcgtggagccccgggcccggcgctcggaagccagactgggcgagagggaggcccgggggcggggcgggctgggggccgggctggtgcgggccgcggcgggggggagcgagcggcgaccgcttgggggtctgcgccccctcccatcggacgctgccgcagcgcccccctagccccccagtggtccacgccgcggggagcgcgggtcagatccccctcctcgctggggcgaggagaccagggtgcccccagcccgatccacgtcgcccaccgaggctcgcgcccccggacgcccccagttcgcctgcaggagcaggcagcggctccgcggaggcggccgcagcggggactgccgcggccggcgctgtcagggcgtccctcccagccggcccgggcccgcccccgcgtgcgccgattggccgaggcggccatccatcgcgggacgttgccgcccgcctcgctccctcgcccggggagtagaccagcggcggcggcggcggcggcggcggcagcggtgctggaggcgcagagggcggcgcaggcggagccgggcgggcgcgcgagcgagcggagagcgggcggccgtgcgggcggcggcggcggcacccccaggccgagccggcgcggaaggagttccagggcgatggggccgcggccggggctgacgc

SEQ ID NO: 981 - DNA, 649 bp, Homo sapiens
  source 1..649: mol_type = other DNA
gtggcgagcattccgcgtcgcgggccgcccaggtgacgccccccatcaacttgccaagactggcaaaccttggaaatttgggagagccaagggccattttcgcgcggctccactttggggtttctagtaaaggagcagccgcgcgcctcggcgccggctcgagccgcccagctctcagcgtggagccccgggcccggcgctcggaagccagactgggcgagagggaggcccgggggcggggcgggctgggggccgggctggtgcgggccgcggcgggggggagcgagcggcgaccgcttgggggtctgcgccccctcccatcggacgctgccgcagcgcccccctagccccccagtggtccacgccgcggggagcgcgggtcagatccccctcctcgctggggcgaggagaccagggtgcccccagcccgatccacgtcgcccaccgaggctcgcgcccccggacgcccccagttcgcctgcaggagcaggcagcggctccgcggaggcggccgcagcggggactgccgcggccggcgctgtcagggcgtccctcccagccggcccgggcccgcccccgcgtgcgccgattggccgaggcggccatccatcgcgggacgttgccgcccgcctcgctccctcgcccgggg

SEQ ID NO: 982 - DNA, 152 bp, Homo sapiens
  source 1..152: mol_type = other DNA
tggggcagcctagcgcccctgcactgtgcccacgggggcctatgtgttgaagcttgctgcagaacatggtcagacctgtgccttaaacacatccctcttgccaagcttggccagcttgtcattgaagttcagatgcaattagtgctctgtcc

SEQ ID NO: 983 - DNA, 341 bp, Homo sapiens
  source 1..341: mol_type = other DNA
tcacgtacccttcctcagcccgaggcctgtcacacggcaggcccaaggggctgttggcaggtgccacttttagaaaagtcacactgcctatttaaaggaagtgaggtgtcctgtccccaaccagcaactgctggatgcctgcggcctggagctgaggagctggtgggcagcgctctccgggaggttgctggcagctccttggcctcctgccaccttccagcctgaccccttgtggacggatggctgggatcagggacctggacccccaccagcccccttccgctgggtgcccagtgggcgggcacaggccccttgacgtggctgtggcctagctggcagcc

SEQ ID NO: 984 - DNA, 485 bp, Homo sapiens
  source 1..485: mol_type = other DNA
agagtgcagtggcgcgatctcagctcacggcaccgagtagctgggatccaggctggtctcgaactcctgacctccggtgatccacccgcctaggccccccaaagtgctgggattacaggcgtgagccacgcccggcctggggagggagtggtaccaccatctcttaccaacccagcgcatcctgctcagaacctcatcccaggacacagtgcgtggtctggcacatagtaggtgctcagtcaagctgagtggccggctccgcatcgcagaaggcggctcaggggcgctccgcccggactttgcctggtgcggccgcccgcgtttccgcctgcgcccagcgcccggggattgacgccttgcgggcggggagcctggcgccggcggggcccaggcctgtgtgatgtgcagcctgggcagccccgggtgccgcacccgcgccggaggggcggggaagggcagagccgtccaggaactctacagcgccg

SEQ ID NO: 985 - DNA, 259 bp, Homo sapiens
  source 1..259: mol_type = other DNA
ccctgatctcagtcctgagcccagttccctcctcgggaaggccgagggctctgcctctggggtcctcagaataggggcagcctctaacctgcatgaagtggtgactcagccccggtagataatctgttaaccataatctcagatgaaaggaagattattgccccttacgcagatctaatcatgcaggattccctgagtctagtgcctccttttggaaggaatcctgactcccaagcaggggcagacagccaggggtcgg

SEQ ID NO: 986 - DNA, 363 bp, Homo sapiens
  source 1..363: mol_type = other DNA
ccagccaaaggaaggatttttgctggggaaagaaggagactgggggtgcaggggaccccctgtccagatttcctgtgaagtccagcttgtctgacaacaggttatagattccattatcattttgtaaatggtgaagtttctattagtatccaatcatcttaattagctgagctattgctcatcatcaaaaggattttctttagaaagatagccgtagagtcttgcttttcttatcaaaagatctatatctgtgcctggaagatgagaaactcagtgtttataaagaccccatctcttctccccactatataggtgggagcaggggtggtcatggtgacctcagcccgtaacactggcctgggc

SEQ ID NO: 987 - DNA, 183 bp, Homo sapiens
  source 1..183: mol_type = other DNA
ggctggtctagagctcctgggctcaagtgattggagtacgtagtagctggggccaagctggtctcatttttatgatgactgctttgaaatccttgtcaaaaattccaactgagacagtcttgctctgtcacccaaactggagtgcagtggtagtggtgcaatcttggctcactgcaaagctgc

SEQ ID NO: 988 - DNA, 180 bp, Homo sapiens
  source 1..180: mol_type = other DNA
gctcacctcagcctcctgagtagttgagacggcaggcacatgcctacaggcgtgagcccctgcacccagctgtttctgcatcactttcaggtggcccccacctgtctaggggacctggaaggctcttagcatttgagctgaaacgcctgcctctttggaggcagtggggtgagtgacctt

SEQ ID NO: 989 - DNA, 248 bp, Homo sapiens
  source 1..248: mol_type = other DNA
gtataagagataataattagcaattgttgataaggaggaagtaatttgcccaacacccctgacctacaccaggggccgcctggggctggtgtccgctccagtaccatcagaccctggaggccctgcagacacctgtctcacaggccttcctgctgatgggtgaaggctggcctgtccacccagcagcaggatcccacaggccctggggccttggatgaactctgggaaggcccatgagcgagcacggg

SEQ ID NO: 990 - DNA, 337 bp, Homo sapiens
  source 1..337: mol_type = other DNA
ccaggctccccaaggctgtagccccggtgcagggacctgcagccatttgctggccggtagagaggctgcaggaagccacagcggctgcctaaccaggcctgcaagctcagagacagaggtctgatcagtctctccttagtgctctggcagaagtttaaaactttttggggattcgggttcacgcaccaccccaaaagcattcgaaggccgggcgaggccaggcactgccgaggagggcgggccgggggaggagcgtattggccacgcccggccacgcccccaggccggcggaacccaaggcgcggggacctgcgctgccggggggaagggaacccgc

SEQ ID NO: 991 - DNA, 566 bp, Homo sapiens
  source 1..566: mol_type = other DNA
ggttcacgcaccaccccaaaagcattcgaaggccgggcgaggccaggcactgccgaggagggcgggccgggggaggagcgtattggccacgcccggccacgcccccaggccggcggaacccaaggcgcggggacctgcgctgccggggggaagggaacccgcgccgccggaaggagccgctcgcttcacggcgctgggacccgggctggaaggcagggcggatctcagacgacgtcatggactcgttcctggaaaagttccagcggtcctggggtctccccacgtgtgtaggggcgtcgtccggactcgtggggcacccgggctctggggcacctcgaggttttgagtcgcttcttaagctgagaacctaggttttggagtcaggcctgtgactccaccacttaactggctctgatatgagtcagttacttaacttaagggcgctcaattaatggtaattgctagctgtgatgatttgcaaatcatgatgagtaaaaaaactttggtaatgagctcagtagaaaagcttattcatgtagttcattcttaaccatttacaggaattt

SEQ ID NO: 992 - DNA, 463 bp, Homo sapiens
  source 1..463: mol_type = other DNA
ctgactgacagattcttttaaattttgatatattttttgcattttgtttttttaaaaaaacaattgtattaaaatactgtttatcttggtgactgtgtcctctctagaacacaagctacactgaacgcagttaattttgtctgtttgggtagcagctcaaaaaatattttgtgaagtttgaatctgtgtcttaaagactgtcttgggcactgtaataaaggtctttctcaaactgtttcacaattttatactatttaaatggaaagcccgtaaaaatcataggatagattagaaactacactgcccagtgtgtcgtcatggttacactgtcgccagtggggcctggcaggggcaggaagagcacccctagaaagcaaggctgccctggccaatcacgcgcgcctagcgtggggcggggccagagcgcccctgccctcggccccgcctccgtgagcgcggcttt

SEQ ID NO: 993 - DNA, 208 bp, Homo sapiens
  source 1..208: mol_type = other DNA
tgctcttgcctgaagcacccagcgcggagcaagcagaatatggaggctgctagaggctccactgtgagccacagcaggtcacaggctccgtgggtgcctgaggaactgagagatggcaaggagtgagccctccgtcagcagaggctgtgaggttcttccctcacagtgggcactctggccccccgcaccgcagctcccgtcgccacct

SEQ ID NO: 994 - DNA, 484 bp, Homo sapiens
  source 1..484: mol_type = other DNA
ctggtatgtcatgtttagcttctaaactaaaataaaattccatatgaaatgcaaatggcgctggatttcagctttagggcagggcaacactgcctggcacagagcgggaagtgtacacaatggagctcaccctgcccaggactgctgtgtagcccgggaaccgcctgtccggccaaagggtgactgactcagggccggggcgcctcccagccctccggcggaaagccactgcccgcttaaggcgcgtttggaagaggcggccccgcagccccgagggcctggggccctgagtcccaactgcccacccagtccctggcacccccgcctcgcgcggcggcggggagaaaagggtggagcggcgactcccgcagcctcctggtccgatccccggcgcggctcgccattggtcgccgcccgggtctcggcccaccgaacctcggcgacccgagccaatcgcgaggcggcgggcgatcccgggctcccc

SEQ ID NO: 995 - DNA, 548 bp, Homo sapiens
  source 1..548: mol_type = other DNA
ctaggccatgccagtggcaagctggccccagtcccccggcttgctggcagctggttcacacgcgcgcgcacgtgccttcagtagccacttaacctgcatgcttaaggcattcaatcctcacagaactgtgagttagggattgttcagagaagttaggtgacacatcttcagtccctctccggggcctccactggctggggcagtgacgccggtaacggggagcttaacgccttcctccccaggaactagggtcctggagggacgggaggggtctgactgctgtgaaaaagcagggcagtctgcagaaacacctcggcaagtgactttccccctgggctcgggactcctaagccctgtccggctgagccttaacggctcggaccaagcccgccctggagcgctcgcgggggcgtgacggcccccaggacccaaggttccgatccgcgccaaggcgttccggtcagcagcagccccgcggctcctcgggccccgccgcgctggcaagccccagtccccgccagcccaatcgtgctggcgctttaaggacg

SEQ ID NO: 996 - DNA, 544 bp, Homo sapiens
  source 1..544: mol_type = other DNA
ctgtggacattattgacaggaacaatcaccacaacatgatgtaggtgccacccacctcctgagctgttttaaaatgactgctgacagcaagttcttgctgctctccaatctcatcagacagtagaatgtagggaaaaacttttgcccgactgatttttaaaaaggaaaaaaaaaatgttttactatgtggccttccaaaataggtagtgtttgcctatgtggaaacaacagcaaactaacaccaagtgccagagtcctggatgtgttcatgttctagtgaacacagcttgttcaggaacaaacactaaaacgatttgagtagaggctgctggtcacaagttttgttttgtgttttaaataaaaggaaagagcaagtttgctcagtcaagtgatcagatcccgaatctagattcccagaagaaatcgagggctatcatcctgtgatgttgaaatgtcaattgcaggatgctgtgtgcttgctgcgtgcccaccaggatttcctgtgagggccgccaccagctgacggaaagcagccttctgtaca

SEQ ID NO: 997 - DNA, 292 bp, Homo sapiens
  source 1..292: mol_type = other DNA
aacccactggttaacaaagtggaaagagcatgccacatgtcttgaacatggtgtgtaaaaggaatctttgcaaattgaatcttctggaaagctgagcaattctgaatctttgcaaacttttgtagtataattgaaatgcatgtaggctcatcaagcaagcaatctcttcaaggagcagctagttcgaggagtccacagtacgggtgagaggcgggagaggaggagcccctagggcgccggcctgccttccgctctggtggcgtgatctgcgcgccccaggcgtcaagcaccc

SEQ ID NO: 998 - DNA, 430 bp, Homo sapiens
  source 1..430: mol_type = other DNA
tatccatagttccaagtggtgacttagatgctttcttctgaagcagaagcatctcaaatttccgtgctgacaccaggtagtgtagggattccccattgtaaaaaaagaaacctttacaagccctggttactgctctttaattattagtttcagtcaagaggaagataaaaggaaactatcatttattacgttcctactatgtggcagtgtgctaaggccatttacatatattataaatctatttttcctattttttagtgtgagaactaagactcagcatttatttatttatttacttacttacttacttatttatttttttaagagtctcactctgttgcccagaccgaaagggacacctgacctcaggtgatctgcccacctcagtgcctagccaggctcagcatttgctgtatctacaacattgcag

SEQ ID NO: 999 - DNA, 334 bp, Homo sapiens
  source 1..334: mol_type = other DNA
acctctgtaactcttacaaaagctgtacgcttctccaaagacagaggtccagactaagacttctgtgcttagagcacagaggcaaatatactcaatgtacatcatatctcttggttaccttgagccaattgcaggtaatgtaatttaaattcctccctctgatagtgacagaagataagataggattttcttctaaaggaaaagtcaatcgaaaattcttttgtcctgaaagtagttaaagaacattccagagagattctacaatatgtttgacaaaagccttcttttcactcttagcgacagtacagacctgttccgaatgtgactcacacac

SEQ ID NO: 1000 - DNA, 442 bp, Homo sapiens
  source 1..442: mol_type = other DNA
gtactacaagtttcttagttgttagactctgcttctaaaaagtaaaagcatcactttctgtgccagcccttactagagtcaggtaaatctcagaatctcgagatttgctcagacttttctatagttaagttcttgtctctcccttaaaaaaaaagatacacaccacacacacacatacacatatatacatataaatatatttggttgtatatttttgttgttacaaaggggcttaaaacacccaactatattagcgctttatttgtgtctgtatatttcataaatagaaaattaggacactcctttgcaaatactgaatattctcctgtgttgtcatcagtgttgatgatgaatctagatcatcacgggggaattctaccggatctattacctgacagcactctataagcaagtgggctgcttcctctttgtttcacagaca

SEQ ID NO: 1001 - DNA, 430 bp, Homo sapiens
  source 1..430: mol_type = other DNA
gttagattgtctgaaactcaagcaaattccccatagtagtagaattactcttggggccaagcagagcacttcctatgtactggagtcacaggatttctcaaaatcagtacccggtgttggatgttaagatcttaaacaaacaaacaacttgttttccttaaaaattatattttcagggtaatacaattcaagtcacaataaagacctgaaagcctggtgaggaaaaatgcattttagctgtacagccctaacttttacttccagcaagaaaatgtttctttttatttatatatatttttttggccttaattatcctacgtcttaggcagcttaaggaattctctttttaaaggacctcgtgaaataatcacagcagcagccgccgcggcagcagcaccaacagcaggaggagcagctccggagttgctgg

SEQ ID NO: 1002 - DNA, 492 bp, Homo sapiens
  source 1..492: mol_type = other DNA
catgctaggcactatagaagatacaagggaaggcccttgccctggaaatgtttattctctatctggaaaaaagattaactcacataaaataattaaaaataagatgccagcctctaaggaaaaatgttagattgtctgaaactcaagcaaattccccatagtagtagaattactcttggggccaagcagagcacttcctatgtactggagtcacaggatttctcaaaatcagtacccggtgttggatgttaagatcttaaacaaacaaacaacttgttttccttaaaaattatattttcagggtaatacaattcaagtcacaataaagacctgaaagcctggtgaggaaaaatgcattttagctgtacagccctaacttttacttccagcaagaaaatgtttctttttatttatatatatttttttggccttaattatcctacgtcttaggcagcttaaggaattctctttttaaaggacctcgtgaaataa

SEQ ID NO: 1003 - DNA, 391 bp, Homo sapiens
  source 1..391: mol_type = other DNA
gtatcacatttcggtactatatgtttatataagcgcgtggtaaaactacatatttatataagcatgtgctaaaaaacactcgagcaaataccgtgactgagattttttggaaaactgcacagagctgcgtgccttgaggagcttcctagaggctctcctgccactgcccctttggccagggccctgccccgcgtccccggcccccgctgtcgctgcttcgggttccgccgcaggagcctctcactcccgggagcgggcgcctcgcgctccctccctcggccccgccccgcccgccgctcgcccgttgcttcccacctgggcccgaagcgcccagcgccctctcccgggaccccgcgcccgccccgcgcccctcgcggctcggggtccgccc

SEQ ID NO: 1004 - DNA, 248 bp, Homo sapiens
  source 1..248: mol_type = other DNA
tctggtgatcagccggaatcacctgttagaggaaatggccctcaggcggggtctcctcacctgtgctccaccccgcctctccctggtcaggacaggagaaactggcaactgaggtttgggtttccatctcctcctggttccaaccctggctagtactacctatgtgaccatgggcagagtctcactctgtccccctggagtgcagtggcatgattttaaaatgcaaaaacagggtgctcctttatgtt

SEQ ID NO: 1005 - DNA, 299 bp, Homo sapiens
  source 1..299: mol_type = other DNA
ctggttccaaccctggctagtactacctatgtgaccatgggcagagtctcactctgtccccctggagtgcagtggcatgattttaaaatgcaaaaacagggtgctcctttatgttctgtccagcctgcatggtctgggcacaaatgccctggagagtgagtgactgtcagactgcaggtggagtactctccccagtcccctgcaggctggagccaagctgggaggatggcggccggccctggcccagccccaggcaagggaggagcctcggcccagatggggcaggtgagcctgggctc

SEQ ID NO: 1006 - DNA, 593 bp, Homo sapiens
  source 1..593: mol_type = other DNA
ttaaaatttctcctaactttgagatcagtaatgataatattcccaaggatattgagacagctatacaaccttgggcaagttagttcttcattaattccatctaaatggaattaataatttccatctcatatccctgctatgaaaattaaataagacatatgaaatgcctgccacatagtagccattaaattattgtctgtatgtatttaccatccatctcaatttaatttaatttatgtcttgacattataattctagagagtgcttctggagatgtctatttaagacaaacagataccctggatctcaattatgaaaagtggaaagtccattgaattacacatatatttcaggatttagatgaccttcatgtaatggttagcatttcctacgaccaggaattctagaactgcatcttttgaaaataagacctctttgctaagctggtattagttaaatatctcacacggatattgtttttcaaaaggtctaaagggcagtggcctttggtgcctggaacacttttagagtatttaggtaatcaataccctggttactatttaaccatatttgaaagagaatcaagtgagtaa

SEQ ID NO: 1007 - DNA, 530 bp, Homo sapiens
  source 1..530: mol_type = other DNA
catagtcctcctaattttacatatgaagaaacagcatagaatgtgccaggcaatgttcaacatgttttgaacatgttgtgaagattaaataaatctaatttatttaataataataattataattaattataattacaataataattaataataatctaatttatttaatcttcacaacaacccggtgaggttggtattattattatccagtaattttctctggccacacaggtagatgggttctagagccctacagcctcttactggaggcaaacatggaattcaaaccttggcctgtctgagtaataatagctgacatatctgagcgctgaacatagctgttctaaataacgtgtttaattctcaccacttagcaagtgcaaaagtaattgtggtttttgccattaaaagcaatgacaaaaactgcaattacttttgcaccaacctagtcagtggcagagaatgtgaataaacaccatgctgctacagatttttcattattcttgtgcaaagtctgtttccagtcacta

SEQ ID NO: 1008 - DNA, 442 bp, Homo sapiens
  source 1..442: mol_type = other DNA
gaaggacctcctacttcgttttccaggatatccctttcaaagtaaaagtaacttacacattttccaaaagcatagtgtttatgtcctttgacatagtgtttatgtcctttgagatgttttcattgtgcacagagtgtaaacataataaactaatatctgtgatataaagttcacgaaattctccttggcacttaaaatgtagttgatgctcaagaaatatgttttggtgaaatgaatgaaacatactatacacatattcagaaccaggaagccttttggccggtactgccgtagagactacaacgggcccagggccatgtcccgccttaagccacacggaggcgctagagcgccacagtctccgcggggcccggggcagctgggagaacgggcgccccggccggtatggcgggcaggaagtgcgggtgcgcgcctgcgcata

SEQ ID NO: 1009 - DNA, 468 bp, Homo sapiens
  source 1..468: mol_type = other DNA
ctcaccaagtataactggtgattaatggtcatgagcgtgatttttaaattgcaaagacgtctacaaaataaattacacaatcataagttatattcttaaatatttgttgaattttaaaataaaagttgttcagcacttaggtgaaatgctgaacttcagtgctgcacgacccttttctttaaaaaacaaagagagttgactttcattttatcagtgagagcaggcccgggcgcggtggctcacgcctgtaatctcagagctttgggaggccgcggatcacctgaggtcgggaggtcgggagttcgagaccaggcgtgggccacttcccaaggtctccccaggcctctgggggcgcctttgctctggaaaccccgcctcccggcacgggaggggccggacgacgcttcaatcccgccccgtgacgcgttaggccctgcccccgggccatcttcgtctcgcgggatctct

SEQ ID NO: 1010 - DNA, 467 bp, Homo sapiens
  source 1..467: mol_type = other DNA
ccccgcgccctttcccccacggtcccggaggatgaagtggggtgcaacggagactcagctgagcgtccaggctgtcggagtgttctcaacgtggggggccgactctcgggagaccgcccctaaacttaagtccccttaggcaccttaagggcggtattcccgcccccccggaagtgcgggggggtggcagcgtacttggattctcagcctccagccccgcgcggtggcggccgccggtggatgacttcgggccccacaagtggggcccaaaacaactggccaggttccctggcctcccgggtccctgcaggttgcgagcgtccgcccgctcgcggcagccaccgggccgattacctcatcccgtgagcctccgcgggcccagagaagaatcttctagggtggagtctccatggtgacgggcgggcccgcccccctgagagcgacgcgagccaatgggaaggccttgg

SEQ ID NO: 1011 - DNA, 382 bp, Homo sapiens
  source 1..382: mol_type = other DNA
tattaagcatctaacactttacaaagcattttcatatgtcttaccacatttgttcttcataatgttctgaaaaggtaagatgaatacatcttattattcctattgaacacacagctgctaagtaacagatttcacctgtaagaccaagataagagcacttttcagtgaaattattacctttcacaggtgtgtctttggaaaatcacttcgatctcagttttcttttctaggaaaacaacatgttagctaaaaatttcggattccccacatctgtagaatagggtacataacatgcaattaaattaggtccgtgtccagtacctctcaaagttttgtagattagcattcaagaattgtaaccatgcaatattcttatttcttc

SEQ ID NO: 1012 - DNA, 596 bp, Homo sapiens
  source 1..596: mol_type = other DNA
agctaaaaatttcggattccccacatctgtagaatagggtacataacatgcaattaaattaggtccgtgtccagtacctctcaaagttttgtagattagcattcaagaattgtaaccatgcaatattcttatttcttctggtgtttagtaaagtgcggagagtccgcctgggtaagctccgcaaggtgagtccccagagccgggaactcgcagcctgagcagacgcagcgtagccgatcttgggtccgcgctcctcccgccttgcccagccctgcccgcggttggctaggccccagggaacgctgcagccgcggggtgggcaggcgacggccaatcccacgcccggttcaggccgcgctttacaggggccgcgctttacaggggccgcgctttacaggggccgcgctttacaggggccgcgctttacaggggccgcgctttacaggggccgcgctttacaggggccgcgctttacaggggccgcgccggcgggggcgggatcgcgcgcaaggcggggctgtagccgccccgggaccgccctgctcaggcgccgtggggttcggcgcgctaaaatgtaatttcagattggacaagta

SEQ ID NO: 1013 - DNA, 606 bp, Homo sapiens
  source 1..606: mol_type = other DNA
acatctgtagacataacatgcaattaaattaggtccgtgtccagtacctctcaaagttttgtagattagcattcaagaattgtaaccatgcaatattcttatttcttctggtgtttagtaaagtgcggagagtccgcctgggtaagctccgcaaggtgagtccccagagccgggaactcgcagcctgagcagacgcagcgtagccgatcttgggtccgcgctcctcccgccttgcccagccctgcccgcggttggctaggccccagggaacgctgcagccgcggggtgggcaggcgacggccaatcccacgcccggttcaggccgcgctttacaggggccgcgctttacaggggccgcgctttacaggggccgcgctttacaggggccgcgctttacaggggccgcgctttacaggggccgcgctttacaggggccgcgctttacaggggccgcgccggcgggggcgggatcgcgcgcaaggcggggctgtagccgccccgggaccgccctgctcaggcgccgtggggttcggcgcgctaaaatgtaatttcagattggacaagtatgctggtgcgcaggctcttagcgcgcacgcccagaaagag

SEQ ID NO: 1014 - DNA, 322 bp, Homo sapiens
  source 1..322: mol_type = other DNA
aaaataaaattgctcatgatctatggtcccgtgagagcttatttaaggagcactgatattttccttattaatgtggcatatttgccacgtgtgcaaatgaataggaggaaatcagctcttccttcctcgaagtagagacagctcactgcaaccgcgctgacctcaggtgatcctccacatgtagcgaggcggcgtgctaccgcggaaggagggaagacgcctgagcccagccggtgccctgctgcccctctgcctcttcggccactggggctgagctcgccgcgcacgcgcgctcgcttcccgcgcgcacagagcccacgag

SEQ ID NO: 1015 - DNA, 291 bp, Homo sapiens
  source 1..291: mol_type = other DNA
aggaggaaatcagctcttccttcctcgaagtagagacagctcactgcaaccgcgctgacctcaggtgatcctccacatgtagcgaggcggcgtgctaccgcggaaggagggaagacgcctgagcccagccggtgccctgctgcccctctgcctcttcggccactggggctgagctcgccgcgcacgcgcgctcgcttcccgcgcgcacagagcccacgaggggtgcgcggccaggtcactcagggcggcgggggctcaggtgcctggcagcgcggccggggcccaggaagg

SEQ ID NO: 1016 - DNA, 425 bp, Homo sapiens
  source 1..425: mol_type = other DNA
gtcccagctacatgtgagctgaactccagcctgggcgacagagcaagactctgtaataaaatattgtaagcagaatatgtgactctatgttgagtacatgagtgtgctcaccatttgtgaaacccaggctggaacctggaggtcccacagtcttgggtccttcaacaaatgttaattaagcacttattaacactttcaaatacaggacctcgtttagatgttctccttcataattttgtcaaaatgaaataataatctatcagaggctcaaatgtctgtggcgctctaacccatgagctttctaaatagaaaagaaatcccgggaatccagcgcctggcatcttcgcagggtgctgcgaaggggcgggctgggaggcggggcacggctgggagcgaggcggggcggggaccgtcgcctgctggga

SEQ ID NO: 1017 - DNA, 527 bp, Homo sapiens
  source 1..527: mol_type = other DNA
gggctatttaattaaattacaatataaccaattgataaaacgatgcagttgtaaaataacatggctgggtgaagatttccaagacatattattaagtgaaaattgtaacgatgcattggggaaaatatttagcaattagcaagttttaaatatgacaggtgaaaaaatatgcattgatattaatctgactatatccatcaaccatttactgattgccctttggatcaaaagaaaaacctaagaaactttactaggtatttcaagcttcaaaataccacaatcttggtggcttaaaacaatagaagtttattctctcagttctgggccagactctccctgaacactctagagaagagttcttgccggtttcagcttctagcagccacaggcctccttctttatcttataaagacaacagtcatttaatctagaatgacttcatcttaacttgattacatctgaaaagatcttgtttccaaataagctcagattcacaggtaccagtgattaggacttgaacatatttt

SEQ ID NO: 1018 - DNA, 289 bp, Homo sapiens
  source 1..289: mol_type = other DNA
cccaacttgtttcttttctctttaaaataaagtaaaactattttgtttataactattaacttgtagtactcaacgttattattatcaatctataatattctggtgcccaggctggagtgcagtagtaccatcctggctcaggatggtctcggaaggatttactgtgttggaatctcaacggcagccagagcctgggtccattgcctaggcagtgccttagcgaccagggcggaacaggcgccgcccgcgatgcgggccctgtgattggccggattcctgggctcggtcc

SEQ ID NO: 1019 - DNA, 364 bp, Homo sapiens
  source 1..364: mol_type = other DNA
tcagtgaaatgtagttttttgctcattgtccaatgattagaagagtggacaaaccgggatttgcaaacatccaaaggctgtgtttcttcccatccccgttcataaacaggcaatgagacattgctgtccagtctcttcttggaagaaggtgttggatctttgtgctataacatctattatgacattaacttcaaagcattcgactgggcgtttgatctaccggcctgcttttctgacacatgctggaaaataaaagtaggaaaccaagaatggttcagtcatacttgttaaacatttacagatgttgaccttaaaattaagaattagaagcacattctgggtgcccgcagtttgtagtttcaaa

SEQ ID NO: 1020 - DNA, 601 bp, Homo sapiens
  source 1..601: mol_type = other DNA
aatataacgaatacaagtcattctctccattacttgaaatgcagcaactgtctggactttttctcactttaaaaaaaattatttttacaaccattcttattggtagaaatcagaagtgactttctctgattaaggaagagctcatgtcaagtttagcctgaattgtgctaaaccgatgactgattgctttgtttacaaagaatggaaaagtccaaaattaatgtatttaaaagtaaaatatcagtaatgtatttatttactcacataaatcatacatctaaaatcaagagacttgaatgctgccatctcttgtttatcttccttcatgactaaattaactaatgagttaattttcaaaaaataaagtaaggaaagagaaatattttttcctggaaattttttttttaactccttggaaaacctgttcttgttcccagatttagtttgagacttttccaacagagatgtgtaagacagcaaaactgaactaaacatttttgtaaatgcacggctcacgttcttgagaaaatttaggctaatagcctgtggcgatcctattaaatctctttattctccttaaaaaaaaaaaaaaaaaaaagag

SEQ ID NO: 1021 - DNA, 372 bp, Homo sapiens
  source 1..372: mol_type = other DNA
aacatactttagcaaacctaaaataattgcaggaagctcttttggcacccttccagaggtgtcccctaaggggacatccctttcacatatttttttcctcctaaaaagtaaaagatgtcacagctaggattgtgtgcataattacctctgccgacgaatctattcccatgctttgagccttaccgcttttcaaaacggttctctacgtgcccacgcggtggcccggggggtgcggggcaacctggcaaagttgcccaagtcctccaccgaggtccgcggaggtctgcagcgggggtcatccggcagcctatagctgcccgggagtacagactgtaactgctcctcactgcgttacccagtaatgcgctgatc

SEQ ID NO: 1022 - DNA, 433 bp, Homo sapiens
  source 1..433: mol_type = other DNA
cctaaggggacatccctttcacatatttttttcctcctaaaaagtaaaagatgtcacagctaggattgtgtgcataattacctctgccgacgaatctattcccatgctttgagccttaccgcttttcaaaacggttctctacgtgcccacgcggtggcccggggggtgcggggcaacctggcaaagttgcccaagtcctccaccgaggtccgcggaggtctgcagcgggggtcatccggcagcctatagctgcccgggagtacagactgtaactgctcctcactgcgttacccagtaatgcgctgatcgagcgagcgagccagcctgcgagcgcgagcggccgcggaggctcgggacccggctggccgcgcggcgccgcagccgccccctcccccacaccccctcccccccgcggcggcggcgcgagcgggcg

SEQ ID NO: 1023 - DNA, 505 bp, Homo sapiens
  source 1..505: mol_type = other DNA
aggattgtgtgcataattacctctgccgacgaatctattcccatgctttgagccttaccgcttttcaaaacggttctctacgtgcccacgcggtggcccggggggtgcggggcaacctggcaaagttgcccaagtcctccaccgaggtccgcggaggtctgcagcgggggtcatccggcagcctatagctgcccgggagtacagactgtaactgctcctcactgcgttacccagtaatgcgctgatcgagcgagcgagccagcctgcgagcgcgagcggccgcggaggctcgggacccggctggccgcgcggcgccgcagccgccccctcccccacaccccctcccccccgcggcggcggcgcgagcgggcggcggctgtgcggtgcggtgcagagcggaggcggaggcgggcgcgcgggcagctcgcgggcacccggccgggccggcgcgggagcgggaaagggtgcgctatgcctttaacacccgcgtacagtaggcatgtat

SEQ ID NO: 1024 - DNA, 522 bp, Homo sapiens
  source 1..522: mol_type = other DNA
tcagaaactctgagtgccggttcattctgttttaataactactacaggtgattcagatgctattcaaagtttgagaaccaccaaagttagtgctaaagttcaaatttttatattgttagacaaaaaaaagattaaacttaactttacgaaaacattttttcctcactgtttttagaacataatttaaaaaaaaatcttcaacttttcacttaatcataaactatttgcactttttttttttaaaaggcgtaatgtctctcacagtttttaagttagccttccaaaatccttctctaaagttacaggaggacattatgtcaattagtaatcattccgactgagtcacttagtgattaagagggctaactgcgatgatgtcaggaaagcattgattccaacctctgacgccgctggcactttcagaggagcgggtgaagcacctgattgcctaaaccactccaagggttcgtgggggaaaattcgcctcggcccttctccctcccgctcctgggcggaggcgga

SEQ ID NO: 1025 - DNA, 521 bp, Homo sapiens
  source 1..521: mol_type = other DNA
gccactgtactccagcctgggtggcagagagagattccatcttaaaaaaaaaaatttacttctcgtaaaacattataccagtgttctcaaagtgggggtccctggactagcaacactatcagaaactctgagtgccggctatcattctgttttaataactactacaggtgattcagatgctattcaaagtttgagaaccaccaaagttagtgctaaagttcaaatttttatattgttagacaaaaaaaagattaaacttaactttacgaaaacattttttcctcactgtttttagaacataatttaaaaaaaaatcttcaacttttcacttaatcataaactatttgcactttttttttttaaaaggcgtaatgtctctcacagtttttaagttagccttccaaaatccttctctaaagttacaggaggacattatgtcaattagtaatcattccgactgagtcacttagtgattaagagggctaactgcgatgatgtcaggaaagcattgattccaacct

SEQ ID NO: 1026 - DNA, 444 bp, Homo sapiens
  source 1..444: mol_type = other DNA
atcaatcacagtgtttaacaattactgtatgtactctatgaataagatacctgaagatatcgtttatttttctcgaaggtgtgacatcacaaataaaagaaaattaagtgaaatcatcactgtagttagagtcaaattagtttcttcagagagtaaatgatacagcaggcaaatactgctggatttctttcttccactaaatgagaagaaaataatgactcccacatttacacgttttagaatattttattttgcgtcagcgaatagtgttaagcggattgacccaacgcggccgtcagtggcggctgtccccaccacgcgcggtctgatccttggagcccgcctcccgcggccccgggctccctcccccgccccctgcgccaccccggtgccccgccccgggcggggagagtcggggcgaggggagggcctgccaggtgaggc

SEQ ID NO: 1027 - DNA, 479 bp, Homo sapiens
  source 1..479: mol_type = other DNA
tcgcgcctctgcacttcagcctgggcaacagagctgtctaaaaagcgcaaaaaaaaaaggaaaaaaaaagttatttagtagaatttgtattctagctctggatataatttggatgtatttattataactgtaaattaaaaattgtattgtttaataccttttgagtagactttttaagtattactcatatgatacagtgatcacatagatgatttttttattctgcattttacaaagaaagattatactgtataattggtagatacttctgaagtcactgtaattgtgagtgaaatttaagaaatctcaaccattttttgaattagaatgttactgagatacaaatgaatctcgcatgagctaaaatcaactgctgtttccttttaatttgcatttgaaagatgtaactaatgtgatgatcattaaaatgatattaattgaagctggccacaataaatgaaatagagctattatcctga

SEQ ID NO: 1028 - DNA, 103 bp, Homo sapiens
  source 1..103: mol_type = other DNA
ccactgcactccagcccaggggttgcagtgagccaagatcatgccactgcactccagcagtgcaagggccctgtcagatttgagtctggacagcaattgctta

SEQ ID NO: 1029 - DNA, 241 bp, Homo sapiens
  source 1..241: mol_type = other DNA
cacttagtgaacttagcggtcgcaaacattttgacgaggtgggcggatcacctgacgttcgagacccgcctggccagtcccagctactcgggaggctgaggcaggagaatcgcttgaacagtggccagacctaggttccagtcctggctggggcaaggaaaagcgctatcttttcaaaaagtttttcttctaagctcatgtatcaaggggctgttggcagctggcgacgcggggcgaagcc

SEQ ID NO: 1030 - DNA, 356 bp, Homo sapiens
  source 1..356: mol_type = other DNA
agggtttgggctgaacgtatcctgcttaactgcagcacttgagctgaggtcacctcgaggcctgcctgccgctcctgaaccctttgggagggctcgcgcgggaaccctgggaagctcccgcggccggagctgttctttcgtttcctcctgcggccgagaaagggaagacaggggctgaggaccgggcctcagctctacagcatactgaaagcccaagcgcggcggcgtccagccgggcttggtaaccccgcccgggcgcgtacgcacgaacggaggcggggcttaccgcgagggcctcgctccggaagccgcaccctccgcggcgtccccgaaagcgcgcactcgagcgccaatga

SEQ ID NO: 1031 - DNA, 432 bp, Homo sapiens
  source 1..432: mol_type = other DNA
caggggctgaggaccgggcctcagctctacagcatactgaaagcccaagcgcggcggcgtccagccgggcttggtaaccccgcccgggcgcgtacgcacgaacggaggcggggcttaccgcgagggcctcgctccggaagccgcaccctccgcggcgtccccgaaagcgcgcactcgagcgccaatgatcgcgcgcacgaatggttaaaaagggtgtgaggctcgagcccgccagccaggccgctagcacctcgcgcgcgccctcagcgaggacccgcacgagctgcccggctctgtgccaactacagtcccagctggctccggagcccgtgcgtgccaggggcgagtggccgtcgcgagacggctcctgcctttcgtgtctctgcagcgtggagactggaaccggcccacgttcaatcgcagcgctggcgc

SEQ ID NO: 1032 - DNA, 417 bp, Homo sapiens
  source 1..417: mol_type = other DNA
tttaaaatttcatccttaataagcatttcacatggctgaactcagcacactgaaaccatttctaggaagcgctgtcttctgaattgattctgataaaaggtttttctcgagagccaattttgtaacattttgccaggtgcagtatcttccttgtgttacatccaaaatatttctcagcgtgaaatagttttaaattctttataagatgacacgactcgattccgatttttcaacaaaaatcgccaaggtttaagacacgcggcgttctaaacacttcttgctttctccccatccttcaccgctctcgggaacggaaagaaagcgcagcgaccaggctgcccggtcgggggaggctggcggcggcgtcctcggcccacacccccgcgccgggcgccctcgccgcggagttggcctatt

SEQ ID NO: 1033 - DNA, 634 bp, Homo sapiens
  source 1..634: mol_type = other DNA
cattaagacatcatctttaaaaaaaaaatgttattaatctcctctttttgttaaatgtatattatcaaaattgttactaagctaacaaacttcagaaaagaaggtatttaagattcaattctagtttggtcctagatgaccacatatccattgttccttcaacgaggaaatgtctttaatgacacttactatatatgggattttgtgacaaacaattatagtgacaaaacatataattatacattgatttagttttttggaatggatcactgtttccaaaagaactaaagtacagtttgagaaatgcatacttaattcattacttttttcccctcaactttaataataaatttacccaacaaaaaagtttatttttgacttgtaaatctcttaaaatcataaaaaagtaaaattagcttttaaaaacaaatgtgtagtttataatacagcaaagttaaatacaatttcaaattacctattaagttagttgctcatttctttgatttcatttagcattgatctaactcaatgtggaagaaggttacattcgtgcaagttaacacggcttaatgattaactatgttcacctaccaaccttaccttttctgggcaaatattggtatatatagagtta

SEQ ID NO: 1034 - DNA, 428 bp, Homo sapiens
  source 1..428: mol_type = other DNA
gagctcacctggattttatatatatatatatatatatatatatatatatatatatatatatatatatgtatgtatgagagacagagagagatctctgtttgagtaacgatgctttaatccagtggctctttctctataagaaaaaccactgtttctttaaaaagctcggccagggctttggttaaagcacttcgggaaagccaagctccccctactccgcgacctctcggtcgtgcaggctccgcggcagcgaagcggctggggctggcgcctcgcttccctcggctcccgccggccgcagccgccttccgcagccggggttcccgccgggattgacgcgctgggggaggaggcgcgcctcacggcagggctcgttcctggctccggccgccagccccagcctcccaggtccggagcccggactggcg

SEQ ID NO: 1035 - DNA, 750 bp, Homo sapiens
  source 1..750: mol_type = other DNA
gggattcggcagctgcacaccgaaggtgcagcccgcagaagtccactttgaacctggcccgagggtgcaaacgcgtgaaggaggggcggcctcccacccgccccgagccgccgcgcgttggtggaggagggcggaccccgcaccctctaggggccaagaggggtgggcggagagacgggagggggcgaaacgccgcggcggcccccgacgagcccgggggtgttgggaagcggccgaccgcccttccataaacctccgcagaagtccaggcccgggccgccgaggagcaggaggaggcgggcgcgctggagtccgcggccctctccgctccctgccgaggctcagcggcgggcgcgggctgaaggccggggttcgagggcggcgcgaggcctccgctaccccctcagccacccccttccgccccgccgcgagccaggccgcgggatcccggtgccggccccgccacacccacccgcctcctaggccaggcctgggaggactccgcggctctttctcgggcggcggcggcggcgcgccccacgccggattgggcgaaggcgcggcgctcggccatggctgctgcggcgacggcgacggcggcggcggctgcggcgggccgggtgcggaccggcgggcgcgtgcctcctcgctcgtgctccctccctcgcggcctccgccagtccgggctccggacctgggaggctggggctggcggccggagccaggaacgagccctgccgtgaggcgcgc

SEQ ID NO: 1036 - DNA, 440 bp, Homo sapiens
  source 1..440: mol_type = other DNA
ggctgcgcgcagcactgatgggccagcacaagtccgactcagtgggtcccgcacttggagtggccggccagtgctgctggccccgggcagtgaagggcttagcacccgggccagcagctgcagagggtgcgcagggtcccccagcactgtcggccagcctgcaccatctcgccaggcctcagccgcctccccgctgggcagggctcgagacccactgcctgccagtggttcctgcgcggccagaagctccccaatgggtgccaccccctgctctgcggtgcctgatcccattgaccgcccaagggctgaggactgctggcgcacagcattggactggtggacagctccacaagccagctgcagccaataagcaccctgtcaaaatgggccaatcagctctctgtaaaatgggccagtcagctctctgtaaaatggaccaa

SEQ ID NO: 1037 - DNA, 368 bp, Homo sapiens
  source 1..368: mol_type = other DNA
aagcatcttcggaccgtaggctggagtgcagtgggcctcaggctcccgagtagctggaattacaggcgcccgccgccacgcccggctaattttttagttttaatgcttgaaaataatctgaatatggaaaatgagtgcacatatcccttgatgttttataaataactcacaacaggaaaagaaggcatcctggctttttttttttttttttttttaaatcaaagttgcgaggaaggagggccgcaatgcatgctggatcttgcagttcctacgtgactgcatggcctgctggtagttgaaggtttgtctatcagagagacaatgctgcagaggcctttacgccgctgctatcgctactgccaatcgca

SEQ ID NO: 1038 - DNA, 428 bp, Homo sapiens
  source 1..428: mol_type = other DNA
cggtcttttagatataatcatattttagcacagttgaagaaactgctagccaaatatttgctaacacttacaaattataggggccgtccatgcgttaacttactacgtgtagtggctactcgagggcagggctgtccttttgcacaacgcacattcgcaggcatgtggctagaagaaagtgaagcatttctggctcctcgagggcacaggcccgctctctgctcagtgcagcaagccagggcccgccccgccgctccggccttggccaccacctgcccctagcctaacccggggctggggacgcctcctaagccggccgcctcctgtccaggccaggttgcccgcctcccctcacgctcgacgggctcgctcccgcaccgggcgcgcgggtggtgcgcgggcacacggaggcggaaggccggaggggc

SEQ ID NO: 1039 - DNA, 351 bp, Homo sapiens
  source 1..351: mol_type = other DNA
actttgcaataagcaattttaaaatataagtatattttaggatcgtcctcaaatattcttaactccctcacatggaaatcccaaggcagaaatgtgccagaattttattcttttcctttctgtgacgagaaaccaaactaaagctaactccggcccgagactgagacagggtggaaataaaaccgcatttacatgtacattttaggtacatacatggaccaaatgtttatgacgagacagcgagctgtttgctacctaattctagctcacaaacaaggaagcgcagccagagacagctgtgccttcgtcgcggggaggatgtttccgcccggccgcggtgggcttgacgca

SEQ ID NO: 1040 - DNA, 274 bp, Homo sapiens
  source 1..274: mol_type = other DNA
aagtttctatagggtagcaactattttatgcatctcaatataggatgatgaaggatatgaaagatctattcccactatggtcattctcaataatcagattattggtcatagaaacttatttgtgtaagaagtgactttatctggaatccttattcaagttagacatatttacgaaatctgtcagctactcacataatatcttctcttcagcgcgcgctggacgttgcgtcaagcccaccgcggccgggcggaaacatcctccccgcgacgaagg

SEQ ID NO: 1041 - DNA, 175 bp, Homo sapiens
  source 1..175: mol_type = other DNA
aacttatttgtgtaagaagtgactttatctggaatccttattcaagttagacatatttacgaaatctgtcagctactcacataatatcttctcttcagcgcgcgctggacgttgcgtcaagcccaccgcggccgggcggaaacatcctccccgcgacgaaggcacagctgtctct

SEQ ID NO: 1042 - DNA, 300 bp, Homo sapiens
  source 1..300: mol_type = other DNA
ttgcaacctggtgcgggcaaatgagccctggttttggagccagacctgtggcaatgagacaaggcattttattctttgaatttcagttttgtaagcataaaaaggggaaaaataaatttagtaaggtttagatggagtctccaacctctgccccaacacttagaggaggagttgcggggcgctcccctttcccctcccgccggacctgccaggaggtgggctggcgcggagggagggccctgtcccctgtccctttaaggaggagggccaaacgccggcctagagtgcggcgtagccccc

SEQ ID NO: 1043 - DNA, 439 bp, Homo sapiens
  source 1..439: mol_type = other DNA
atatatcagatttactgaaaaactttttttttttaatttcccctatagtggacccgcccaatcaagtcagttaactttccttggccggggatgtttcaaacgcctgccccccagaaaagattggcacccgcctgctgagatctgccaacctgacgccccagggggatgggtgctctcgccacccttgccccacagtgtcgggctccgagccagcgggacgtgaccttgggaggctccgcgcccgcacctcccggcgccccgggagtcaggcgagcaggtctgccgggtcccgtggccactttccccagcccggcgacctccgtcgggcctccaggccagaagagcgagcggcggcagcgcgcggaagcggccggccccgagcgagggagggcgccgcgggccgcacgtcgcacacgcgccagggtgcacagcggcgcgg

SEQ ID NO: 1044 - DNA, 343 bp, Homo sapiens
  source 1..343: mol_type = other DNA
tttggagcctggaaaacagatcttcaagatcaagggctgttcattcttcaggagccattatagtttttgtaaattatttaacctacctaagctagataaataaagtactattaaaatgaataaaaatatccatttaagtcaaatctcacttatagaaatgttttacaaaagtaagtgaataattagccccaacttatcaatcgtctcgctctgtcgccgaggctagagtgcagtggcgggatctcagctcactgcaagagtagctatatatcagatttactgaaaaactttttttttttaatttcccctatagtggacccgcccaatcaagtcagttaacttt

SEQ ID NO: 1045 - DNA, 371 bp, Homo sapiens
  source 1..371: mol_type = other DNA
ccagagcaagactgacaggtgtccttgcatcttcacactttttatgatcaaaggccattatgggtatttatgaattacaaaatccataaatcattgtagaggtctttaatgatcccttggctcaatacaaagaagataaatcgatacagtattctatcttcacattcttgtatgatagcaataaatgtgccattacccagagtcacacagctaacagtgacacagctgaggctgctagaacctgggtctactgtcgtccaggcgtgcccgagacgcgggagccgcgaccgctttctgcgaagtcggggctgcagcagagggcgctgggtcgccagcctgggccgcgtctcccattggtcggggctggggcg

SEQ ID NO: 1046 - DNA, 506 bp, Homo sapiens
  source 1..506: mol_type = other DNA
acatttacttcatttgaatctttcaagtaaaaaaaaagtatttaataaatatttgtaaaatgaatggactaaatgcatccggattctataaaattagtaaaatagacaattgtgatgccgtaatcccttaaagagtcgttggaatcagagaaattttaagcagttccctgttatgacataatagcatgcacactactgtgaatggtaacttaagatattgttatgcagacctgtacctaccagtcacttactatatcttttgatagtcaaagaaaaaggaaggataatttcgaagaaagacttcgtgggatgtacagtccatgttcgtggcctgagaaggcgtggtgttgccttgaccacgaatctcattggcctttcaggcctgccccctgtcgctgattgggtgagagcggccaaccccctgcctccgtctctcggcggccccacgggggcctgttggttggcaaccgatttgcttcctccggtgcgtggctgcggggttgcac

SEQ ID NO: 1047 - DNA, 398 bp, Homo sapiens
  source 1..398: mol_type = other DNA
gacaaacaggaaggttaaccttgcctctccatgctaagacttgtgcttaactaagcctcagtctttgttacctaaaaaattgggaacacccccgagcccagtgccgggcacacggtggcgctgccaggcagacagccagcgtcctagaacttaaaggactttttggctggaacctgggccgggtgggctccctggcgcggacggaggcggggagcgctggcgggggtctccgtctccagccacgggaaggtccgtgggctcccctgcccgggctgggccggtccccgagcagagagagaggctggtcccccggcccccggcgtcccggggggcaggttctgaggcgggagcgaggaggggcaaccgggggaatttccccgcctctcttgctaaatcac

SEQ ID NO: 1048 - DNA, 450 bp, Homo sapiens
  source 1..450: mol_type = other DNA
ttatattttcatttccatgaattgatattttgatattgataacagcagtctttgagaccaagacttccaaacttttttctggaaataatttttttcttcctcacccagaagaacatttattttctggatgtagttcagatttcttctaaactttatctcacttggtgtgaaactagaggtatagaggtaagtcaagagcctctggggagcccctgtactggtacctgctcagccccggggaggggaggggacattcctcctgctgcacccttggaggctgcgggctttcctgggcctcggagagcggctcagcgaaggccctcagctcaggagcctgattaggagggacctccccgcccccgggccgcgccccgccccgccccctcctctgggtcccggtcgccaggaccccgcggcccgcgaggcagctctccccggcctcgccccgcc

SEQ ID NO: 1049 - DNA, 531 bp, Homo sapiens
  source 1..531: mol_type = other DNA
aatttgtagtatttttaaaaaatctttaaaacattttgtttttcttttaattagtgttaaatgctagtgtacttgcatgctacacaattaagatgcatggtctacactgtaattaaatttacattttaggaactgcactttgccatcgggagccagccgggctgcaggaggcgccctcctgccacccctccagccccatctcgggtgtgggaagaccgagttcgcgcccgcagcccccgggccgccccagcgcgggagtttcgaggggagccggggggccagccggggacaggcgcctggggctgagtctcccggcgaagccaccgcgaaggggccgcatcccccagagaacgaccctgggcgttcgcgaaggcctcgcagagagggggagcccgcctgcgcgtccgcgccctcacaggtgtccgggtggcggcgcccggccccgcctgcggacccgcgagaggcgggcgcgggcgcgcctgtgcgccggggccgggggccggcgggggaggttcccgcgaggtggttctc

SEQ ID NO: 1050 - DNA, 487 bp, Homo sapiens
  source 1..487: mol_type = other DNA
tctacactgtaattaaatttacattttaggaactgcactttgccatcgggagccagccgggctgcaggaggcgccctcctgccacccctccagccccatctcgggtgtgggaagaccgagttcgcgcccgcagcccccgggccgccccagcgcgggagtttcgaggggagccggggggccagccggggacaggcgcctggggctgagtctcccggcgaagccaccgcgaaggggccgcatcccccagagaacgaccctgggcgttcgcgaaggcctcgcagagagggggagcccgcctgcgcgtccgcgccctcacaggtgtccgggtggcggcgcccggccccgcctgcggacccgcgagaggcgggcgcgggcgcgcctgtgcgccggggccgggggccggcgggggaggttcccgcgaggtggttctcgggctcctcctcggcgcctctccccgccagcaggctgctggctgcggcgccgcctc

SEQ ID NO: 1051 - DNA, 450 bp, Homo sapiens
  source 1..450: mol_type = other DNA
ttcacgggaaataataaatattgattttcactttatcagtattcctggcagctgcacggagtaaagcaccagcataatgcgcatggaagtcctgtcctgaacacaggtgagggacatccccggctagatcctaagcgcctagaatagtttctggcacacaataaacatttgcagaatgaatcaatgaatgaatggtcacgctccattttggcgcacagagaccgcggtccccaggcgaccgcgaaagaaaaaaaggggtttctctacctcgcgtggttcgcttcgcccccgcagccctcgctgggtcgcagggagcacgtgggccaggcaggcggagggggcggcggccagcggctcgcgcggagccggtctcccgggcttacgtaaggcgcgagtcccgcgcggccggccggggctccgcgactgggcgggcggaggcggcgccgccct

SEQ ID NO: 1052 - DNA, 725 bp, Homo sapiens
  source 1..725: mol_type = other DNA
catttgcagaatgaatcaatgaatgaatggtcacgctccattttggcgcacagagaccgcggtccccaggcgaccgcgaaagaaaaaaaggggtttctctacctcgcgtggttcgcttcgcccccgcagccctcgctgggtcgcagggagcacgtgggccaggcaggcggagggggcggcggccagcggctcgcgcggagccggtctcccgggcttacgtaaggcgcgagtcccgcgcggccggccggggctccgcgactgggcgggcggaggcggcgccgccctgcaggatccgggctggaagcctctcggagtgctgcctggcgaggcgcggggctcgggctcgtcgcgcgccccatggccggggagcgcatccgccaaccccgggcggaggtgggcccctccgagcgcgcgcgggcggcgggcagcggcggcagctgagactccgggggatgtgacagccgccgaccacacgttgcccacgtgcgaggaccgggcaggggctcagcccctaggccgcccggtgcgtggggcggcgggggctggctttgagtcacccccgcttgtgccagcttccccggctcggcggagactggcttggggatgcctggccgcccggcccccttctcggacgcggcgtggggagcgagctgggactggccgggccgacctctgacccctggaggccgagtcggcagggcggggcacggcgcgcttcagcagct

SEQ ID NO: 1053 - DNA, 525 bp, Homo sapiens
  source 1..525: mol_type = other DNA
gcctatagtcccagctactccagtgaactgagatcatgtcactgtactccagcctgggtgacagagtgaaacctaaaaaaaaaaaaaaaaaaaaagccatcctttttgtctgtcactgtctctctcaatggacaaagtattatagtaagctatcatttactgagactatttcatcatttacatgtaacagcaaaacttatcaacgtattatttccattttacagattgggaaacagagacttagagagttggccaaacacacatgtgtgcatatacatgcatgcacacacacggatcataatcatatttctggacctagctttgtaaacacaatgacatgcatggaattcaggattttttagatgtacaaataagtgggcttacttggtttgcatttttgacatttgaaaagaaattccatgttgctcatgctcatgaatgtgcctcaggcactggaagatcttctctcagaccacatggactccagagactgtggcaaaagcctgccactggtaaaataaaggg

SEQ ID NO: 1054 - DNA, 328 bp, Homo sapiens
  source 1..328: mol_type = other DNA
cttaaaaaacaatttctgagtgaattattgccatttattatatgtctatataaccacgtgttgaataaatgattgaattaatgaatgaatctgagctgtggaatgattcaaagtaagtttgaattgaatgactgaaagatttacttgaatcagtcactatgtccatgcagcagacacagcccattatattgctaacagcctgtgagcagcgtgaggaccgagggctggtcctgtgcactgttgtatccccagtacttagcctgtggttccctatcctgagggaaggaaaggcaagcctcggctccagatccggttccatgccatgttt

SEQ ID NO: 1055 - DNA, 389 bp, Homo sapiens
  source 1..389: mol_type = other DNA
tacacagcttaattaacttcatgataaattctcttctgatctttggccagaattgtgaaagatccttgtctatcttgcttcccaagcaggccttcaagctagctaacagggatcatccctattctggagaatgtgcaaaatattgctcttcctttatatcctagcatagatatattctaagtcagacccctggtcctcaaagcttcgcaggccgccccgcgggccagcggctttggcgctgccctgctgcgcggcggggcgacgcggcgacacctatccgggcactcctcagccaggaggtgctggcctggggcccggagctcggcagggccgggcggctccgcggcgttggcccagaggacgcgcgcccccgcccggccgcgtctcct

SEQ ID NO: 1056 - DNA, 305 bp, Homo sapiens
  source 1..305: mol_type = other DNA
tttaaggttcatgaaagcttcggacacaaaagcttatatggtcttcgtcagtaaagcgttgctattaagcaaagcaaacctgagtgttagggaggatcccccgctgcgtgcactgcgttctgagaggccggggagagactctgggcccgcggtcggggcggagccaaggtcccaaccctggggcgggaccagcaggggaggcctccgcgagctaggggtagcgaggtctggagccgcaggcgctgcctccgcgagggctctgagtagcgaggccgggtctgaactatcaggcgcggcctctgcga

SEQ ID NO: 1057 - DNA, 320 bp, Homo sapiens
  source 1..320: mol_type = other DNA
ttgctattaagcaaagcaaacctgagtgttagggaggatcccccgctgcgtgcactgcgttctgagaggccggggagagactctgggcccgcggtcggggcggagccaaggtcccaaccctggggcgggaccagcaggggaggcctccgcgagctaggggtagcgaggtctggagccgcaggcgctgcctccgcgagggctctgagtagcgaggccgggtctgaactatcaggcgcggcctctgcgagcaggcgccgcgtttctgcaccggcgggggcggggctctgcgtggccggggcgggctcgggatccgcggggcg

SEQ ID NO: 1058 - DNA, 323 bp, Homo sapiens
  source 1..323: mol_type = other DNA
agggaggatcccccgctgcgtgcactgcgttctgagaggccggggagagactctgggcccgcggtcggggcggagccaaggtcccaaccctggggcgggaccagcaggggaggcctccgcgagctaggggtagcgaggtctggagccgcaggcgctgcctccgcgagggctctgagtagcgaggccgggtctgaactatcaggcgcggcctctgcgagcaggcgccgcgtttctgcaccggcgggggcggggctctgcgtggccggggcgggctcgggatccgcggggcgactcccggtctggcttgggcaggctgcccgggc

SEQ ID NO: 1059 - DNA, 323 bp, Homo sapiens; identical to SEQ ID NO: 1058
  source 1..323: mol_type = other DNA

SEQ ID NO: 1060 - DNA, 340 bp, Homo sapiens
  source 1..340: mol_type = other DNA
agggaggatcccccgctgcgtgcactgcgttctgagaggccggggagagactctgggcccgcggtcggggcggagccaaggtcccaaccctggggcgggaccagcaggggaggcctccgcgagctaggggtagcgaggtctggagccgcaggcgctgcctccgcgagggctctgagtagcgaggccgggtctgaactatcaggcgcggcctctgcgagcaggcgccgcgtttctgcaccggcgggggcggggctctgcgtggccggggcgggctcgggatccgcggggcgactcccggtctggcttgggcaggctgcccgggccgtggcaggaagccgga

SEQ ID NO: 1061 - DNA, 446 bp, Homo sapiens
  source 1..446: mol_type = other DNA
ttaacatctgctataaacatgtagatagtatatatacgagtacgccagctttatacttaatatcagtttagtaaacatggtttacttggagagtgtcgactgtgttatatatccatttgaagtactacacatgatcagaaactaccaaatcatgatcacgtttatgtgtgaatgtgttaggagctggaaataattatattactatgtcaatgtgatcttatttggaagtagtatctttgcagatataatcaaattaaaatgataactggtttaaggtgggccctaatccaatgactggtgtccttataagcaccaaagattgttggcaaccatgctggcaaccactgagtgttaggaagaggcaaggaagggtgcttccctacagccttcagtgacaccttgatttcagaagtccagcctccagactgtcagaagataaatttctg

SEQ ID NO: 1062 - DNA, 399 bp, Homo sapiens
  source 1..399: mol_type = other DNA
ttaaagaaggagggctttcaacatttagaagatgtggaccaactggctgccctctggtgacacctttgactataagaaatatattttagactgggtggcttaatttagtttccacagttctgaagactgggaagtccactggtttgcaggcctgctttctgctctcacattggagaacagagggagagaaacacagagagagtgtgtgctctactttctctcttctttctcacggtgcaacatgtgaatttgaaagggacatcaataaaatgagtaaattgctacatttgcttgaatttgttttattttagtaaatgtttttattgataaatgattcacataccataaaattaacattcttaaagtgtaagatttcatggtttttagtatattcagaag

SEQ ID NO: 1063 - DNA, 458 bp, Homo sapiens
  source 1..458: mol_type = other DNA
acttaaaatttatttattattttattcatttaacaagtataaatggagtacatcataaatggcgtttgatcaagactaatctatataaaggctttgtagaaggaatttagggtttattctaagctcttaaaaggtttcaagcatgcgtgcactcaaaagatctttaccgaactagcttttgcaaaagttaaaattctgtctttaaagaaataaaacagtaaagtttctagggtatatattatatagtggcttcttaacacaatataagctacctacatagtaattttaaaattatcactacttatctatccctggtagaaatcatcttatgttctaatattcacaattaattaattttttgacctaaacatttaaaatagcaatgattttgaaatagtagtatgtctttcatttaaaatgtaactgttacttttcttttagtcacctatgactcagat

SEQ ID NO: 1064 - DNA, 614 bp, Homo sapiens
  source 1..614: mol_type = other DNA
atttatagcagcaatggtcttgaaccccatgccagtttgatctttgtctagataatggggaaagattgaaggtttttgaatacaacaagattgtcatgactttatttttcttgtgctttagcagcccttcttaagcgctgcagtaaatatttatattttttcctttcaatactgccatcatattttgtgaagaaactttcattgatgtttctcttgcttaaagtaaaacaaaaaatgcccactactaagctggaaagcagttttcagttgtatgaagactattatttaaagtcttttcttgcctagaaaagaaacacacaaatttataactctacaatttttattttccatgaaagaagttgatgtgtgcagaactttcagtacccaatattgtaattgcactatttataatcttaccacttgagttttacttaaggcaatcattgtcaattaaaaacaagtagagaaatatgtctaattgggaacatgttaaggatgataccagacttaattaacagaagtaattagactcattactgaacagttcattgtcatggatgtttctaatgcaaagtacaatatgaaggaagtaaggatttaatccttcttttctt

SEQ ID NO: 1065 - DNA, 489 bp, Homo sapiens
  source 1..489: mol_type = other DNA
ctattaaaagtgtggcccattattagaaatgcagaatctcctgctcatttgtttaaaaaaaaaaaaaaagtctcacctgctttcgaaatataatatttaggcagttcctcaaatttatgaaaagtgttctcagaattgaataagtgtgatttttttttaaagatcacttgcacagcatgctaaatataggaataattgaatgtatatttcaatattgctaagagagtaaatttctaatgttctcataaaaaagttaaatatttgagatcatatgttaattagtgtaatcattccaccttatattcaaaaatcataaaaccgtattgtaccctataaaaatatacaataatttgtcaatatataatcaaaataaaaacaaaaaaacatctcagtggggaacagatgtatcttttcatctgaaagagggaggctgggctcgagccagcccctgcgtagggggagaacagataggtaactcttttacatttc

SEQ ID NO: 1066 - DNA, 540 bp, Homo sapiens
  source 1..540: mol_type = other DNA
tgtatgaataccaataaagacgcatttaatacatagacaaataatgagtgaacattttaatcagactgttcaagagtactttcaaaaaaaattttgctacgtcaaacatcattgaatttcaggattgaaagagtggtgtcttcagccttcctgataagcatgacgaagatgctggcggaagcacagttgtagcattttacacaactgctgctgcagagttctggaagtgggaaccccagtgcctatctcaagcctgcggtcaccgacgcgggtccggggtgggggggtactgccagggaactcgcggcaccgcgtgcttgctgagttcgcctgggctctcggcctccctgcgggcaggggtcctccctccccagcgccgggtctctcctcccgcaggcccgcggccacccgcagcggcattccccgccgccgcccccgccacctgcgcgaccgccctagccgctcgagtccgctcctcccgctcaggggcggctgcggagggcgcggggcgcacgcgggcggccacccgactcttccctc

SEQ ID NO: 1067 - DNA, 273 bp, Homo sapiens
  source 1..273: mol_type = other DNA
caatattgccggtatagacttttcataaaaacttcaagactatattgtttctacttcctcatatgccttttaaagtatagaagctgtattccaatatatatctacatgatgcatagtgcttgactttggagagcttaaacagaagaatgagggtaatgtttattgtaataaagattgggcattaaataatcagctctttcattcaaaaatggaattcagaaggctattttagctagctttttttagacagttagcctcacaaattttgtttct

SEQ ID NO: 1068 - DNA, 360 bp, Homo sapiens
  source 1..360: mol_type = other DNA
cccgggggtctgcgtcccctgcgcccgtgtgcgcttattttgcaaaactcccctggtaccgtgcccgcggaatattgcacagtccccgcacccggctgaggagcgcagcgcggcagaccaagtggggcgcgtcgccagcgcctgtgtctccctggcgcgggttccccaggctagcccgctggcccgtccgcgcgcgcgcccccggcccgcgcgccccttcccggggctcctggcctcgcctcagcggctgcaggctcttcgtcgcgggccgggctgcacgcgagcgccctccgggcagactttcgtcccccacccccgggagcgcggaaggctcactcgcagcgcatggtctacccgcgc

SEQ ID NO: 1069 - DNA, 622 bp, Homo sapiens
  source 1..622: mol_type = other DNA
tagagtttataaatgctatttctctcaaaaacagtcgtgtatataggagagtccaagtacaactctctgtagcttcattaattcatctagcatttataaagttatttcagtgcttattaagatagatttcttaagccagtaacctgaagtatttgtttagattcacaaacttttggatataaaatgacatgttaaggatatgtaaaaagaattttaattatctagcaaaaaaatgtgattttcacaacaatattttttgtgtgaaataccaacaatatttccagaaagtctagagtcttagggcaacaaattggagcccccagctttaatctgcagagtgttacctgaaagtccggttcagaatttccctgtgatcctggcacttagaagggaagtttcattttccctctaattaaaggaaagatttaagggagagaaaggaatagcctatgcctcttactagaagttattccaacatgaacacaatcctcaggatgaatgactgcctagactttgaacgtaatggtcccgaattttgactgtttcatttagaagaaaagcaaaatgagaaaaagctttcctcatttctccttgagatagagtctgagaaaactctttgtct

SEQ ID NO: 1070 - DNA, 531 bp, Homo sapiens
  source 1..531: mol_type = other DNA
cgatggcatgactccgggctgaaaaagagccaattgcaagttggggctggggaatcccactgcagtaaagctctagtgtttccccttgcctgtgctttaacgctgacaaggagaagctttttgctaaaataaaataaaaattaatttaaatcctcagatttctaatgtgagttagaagatgtaacactaaatctcaaacaattcaccattctttcagtaaatgaatgttcatatttcctaacacggaaaggttaaaagagtttaatacatttgtcgaatgcaatctaatatgcatattaatgtacatgctgcataggaagtacttttcaaataaaataaattaattccattcccattcattttactatgaaaagaggctaaatgcactggcacattcttgtggccatggtcctaaccttttttaaatgtttgcttaaatgttcagaaaatcgattaatcaaatgcatcatcactttgatcaattagagcggctggatttttgtgcagaggctgcatctgcagaattctgga

SEQ ID NO: 1071 - DNA, 596 bp, Homo sapiens
  source 1..596: mol_type = other DNA
agaaaattaagttcatgcaattatattttccaaatgaaaatacagagacagctttttttaaaaaaaataaaaataaaagtagtggtactgcctctgcagttcattgtcaaagattgattatctcctaatctaaacatcaacacattatccttttgaaattaagtataccaagagtcaagactcttttacttctaggagttaattctatataacctaagttcctcagctaatatgacatgttatgtattcaaatgtcttttatttccttagtttgtaatggtcactaaaaagaaggtagtggataccagtgaaaaacactattttaggatgacttaaaagaaattatgttattttatgatattctgattattctctaacttcataactaattgaaaaagaaaagaacttcaggtctcacagagctctttcaaagtaaatgatcttaaatgacttcacttcctgcttacaagtctcaatattaatgatttttgacgttacaagttgaatttgcttactggttactactatggacacaatgtcttgtagtagtactagggctcctccctcgtgaatgagattaaggcctttataaaaga

SEQ ID NO: 1072 - DNA, 286 bp, Homo sapiens
  source 1..286: mol_type = other DNA
ctggtcatactgtgagattatacagggagaaatgcccactgggaaccaagccagggctgggcccttctgaaaggctccatggtctctggagagcagtcaggtgacaaggcgcgtcacagagactgcagttggcagctgcagccccagtcggttgcgagaaagctccccacctggggaagcgaggccgctcccgtgtgcgctcggcggggaggacgcggtggcggcgggactcgaactcggtcgtcgaagggcgccccgcagggtcccgtctgtagcccggacggcg

SEQ ID NO: 1073 - DNA, 240 bp, Homo sapiens
  source 1..240: mol_type = other DNA
ccgctcccgtgtgcgctcggcggggaggacgcggtggcggcgggactcgaactcggtcgtcgaagggcgccccgcagggtcccgtctgtagcccggacggcgacggaattattaagtttttcttaaaaaaacaaaaaaagaaagtaggtgctgcttttaaggtggcagcccttgatataatctcgggcacccagcaagcgccgaggcagcgcaggcggtgcagctcggccagcttgccgt

SEQ ID NO: 1074 - DNA, 473 bp, Homo sapiens
  source 1..473: mol_type = other DNA
ttgggatgggcaaaaatatctatttctcttcttccggaatcccaatgtattactgatcaagagccatgcccttggctagatgcttggaggcataggttggggaggcccaaaccaggcttaggctggggtcaaagcttcttagacattaacaggctcagaagagtcttgtccggtttgtaacacattggagttaagaccaattatttaacattttagaatctcaattttccaaatcctttaaagggaaaacattgagttatatttacctccacattccaccgcctgtgccttggagggggaatgtctttgcgcttcggatttcctgtgctaggaaaccgcagcacttcccactcctgccggctcagagtgacccccagtgggcagtgaagatgagatcctctatccttagggcagctcagagggccactcagcggccaagtccggccggggagggccgagggctctgtttgagg

SEQ ID NO: 1075 - DNA, 426 bp, Homo sapiens
  source 1..426: mol_type = other DNA
ttcttctgcagaaatgcagaattccaggccagggacagggatcctcccacgcgctaggaggccccaccccgactgaacggggcgaggcgaactcactccgcagcggattcccagcgcggcgccaccaccgcgaaggcaaaagctgcgcatgcgcctttggcagccggcggagagcaagccaggcgcgttctgcggcagcccctccccggaagttaagggtcttccgggcggtacactgccgtgaggacacctcaggagcccctcatttgtggaggctgcacttacagccgctgccgctgctgccgccgccaccttcgctgctgccgccaccgcctgaagaagccccatccatccgcctgcagccgggagactcagagcctgggaggggcctgaggcccgggccgcccgcctccttcttccgccgcc

SEQ ID NO: 1076 - DNA, 401 bp, Homo sapiens
  source 1..401: mol_type = other DNA
agaaagatttattttatctcagagtctcgctcctgggggtggttggccagcctggacgctagttttaaagcctaggagcttcaaggtctacagactgagttagggtagggcccctttccaaatccagaaatggtatctattaatagaagggctccctccgggtcccagggggatggactacggtttttagcgccggaacttacaacccgaagttctgctgcttgtgactgcctgccggagagactggcatggtggcgaccagctggggagtggtgcaccacccctttagctcctccgttagcggctcgggccgaggctccggaatgtttgccgggcgtcatggcgacggtggagccctggctcaacaagcggccgcgcggttggctggcggcggaagaagg

SEQ ID NO: 1077 - DNA, 304 bp, Homo sapiens
  source 1..304: mol_type = other DNA
tccaccctgtttcgcatttttaaaaagatggtcgggaatttttagaaaaacatttaatgagccttaagtcatgcaatttgtaactacataagttcttctgcagaaatgcagaattccaggccagggacagggatcctcccacgcgctaggaggccccaccccgactgaacggggcgaggcgaactcactccgcagcggattcccagcgcggcgccaccaccgcgaaggcaaaagctgcgcatgcgcctttggcagccggcggagagcaagccaggcgcgttctgcggcagcccctccccggaag

SEQ ID NO: 1078 - DNA, 260 bp, Homo sapiens
  source 1..260: mol_type = other DNA
aattctggaaatttttggcccatcagttctcaaacactggaacatataagaagagtaatataatcttatattacttgagggagtttggattttctccaccctgtttcgcatttttaaaaagatggtcgggaatttttagaaaaacatttaatgagccttaagtcatgcaatttgtaactacataagttcttctgcagaaatgcagaattccaggccagggacagggatcctcccacgcgctaggaggccccaccccgact

SEQ ID NO: 1079 - DNA, 553 bp, Homo sapiens
  source 1..553: mol_type = other DNA
cagtcttttgaaataaagactttcaaactggtttagtaaaatatgttagtgactgttttaatgtcaccttttctggccatcatcagcattggcatcacggccaattggcagctgtaggccaatacattaaaataaactttcaagttacaggcaagatgatatccataaaacagtcaattttcagtattttaaattttgtctagttgtgcaaaattcagtacataactatgacagcctctctagagatttggggatatagaattttacatttcctatccgtttttcagcaaatgcatttcaaaaacgacctacatgtaaaatattacgtatttttcctcccccctccgcctggagtggcggatcagctggagccagcgaagcgccccgcgcggttgcccccgccccctccgctcttcccggggagggctggccgcggggccgcgcgcgcgcccctgctccggcgcgtgctcgctggtcttttccctccagtccagcccagccggggcgccgcgagggggcggagtggggtgtggtgggcgcgctcgggcggctc

SEQ ID NO: 1080 - DNA, 593 bp, Homo sapiens
  source 1..593: mol_type = other DNA
ttctggccatcatcagcattggcatcacggccaattggcagctgtaggccaatacattaaaataaactttcaagttacaggcaagatgatatccataaaacagtcaattttcagtattttaaattttgtctagttgtgcaaaattcagtacataactatgacagcctctctagagatttggggatatagaattttacatttcctatccgtttttcagcaaatgcatttcaaaaacgacctacatgtaaaatattacgtatttttcctcccccctccgcctggagtggcggatcagctggagccagcgaagcgccccgcgcggttgcccccgccccctccgctcttcccggggagggctggccgcggggccgcgcgcgcgcccctgctccggcgcgtgctcgctggtcttttccctccagtccagcccagccggggcgccgcgagggggcggagtggggtgtggtgggcgcgctcgggcggctcctgcgcgttcccgccgaggcagtggcggcgggagcggcagagacggcagcggccggagtcccgttgctgagtctcacatccgggttctggccgtgacccagctgcggccg

SEQ ID NO: 1081 - DNA, 597 bp, Homo sapiens
  source 1..597: mol_type = other DNA
ctaatctattaaagttcaatacgtaatttctttgcttaaaccgatcataatgatttgcttctgttatacaataatgactaccattctaggaatcctacaattggaaatcaagtcttttaggctccaaacacctactttttgggatatgtcaacatttttcttaaaacaaacaaacgaaacttctcaatctgaaaagtattgtttggtgttttctgggttcagaaaatatgaaattttcgttgagtgtttactgttgacatcgatacttttgaagggtttttaccccctgcaagagagactaaaagagcattcagaattagtctagacgcacctgtaacagaggggtagttgcggcaccccaggtacgcgccccgcggagagacccagcgcgtgctcgtgcgcaggcgcagggcgactgtcacccggagtctgctcgggcaggggggtcgccactgccccttgcccaggctaagcccggcgcggccctactctctgaccccgcgttgcacaatgcccgagcaaagtctccaggggtgtgaaccccggcgtccctgcccctgggcggggacaggcggcggccaagcggggagtcgaggc

SEQ ID NO: 1082 - DNA, 517 bp, Homo sapiens
  source 1..517: mol_type = other DNA
aaatttggatatgcatcagataaggtacattcttggaatgatgaacaattaaaatgtaaccaatattgtgaaattccccatcattttaaattaaatacaagctgttttcaagtcagtcatttttagattatggctctaaaaataaatgattcccatggccttagtgcattttctgctcacacaagtgagcaataaggacaaatggttccttaaatacagcagaatgtatgtatctccattatgtctgtgtgcagccaagtctgctacacaacttgcgtaatacagtggtgattttactaaccacattttgttgttgctgtttttaatatcataagccatgaaagcaatcttccatcaaatattcaaatataaactgttgagcttctttttgaaattcgatgtttccaggaaagcacaaaaaaacaaagtcactgttccccagtccctctgagaagagaactctgctctctaggcctttcagaggtaggcagagctcggcaaccggtttctacggacc

SEQ ID NO: 1083 - DNA, 539 bp, Homo sapiens
  source 1..539: mol_type = other DNA
atggaaataacattttaagtgctctgtaggctatacaggaatattatgcagccgatctcacttagaatctgaatctgatatacagtatggtgaccatagttaacaatactgaattatacagcatacttgaaatttgcttgaatgttctctctgcaaaataaagagtaactaaataagatgagagatgtattaactaacttgattgtataataacttcacaaaatatgtatgtatcaaatcatcatgttgtatatcatcaaattgtagaattttattcatcaattatatttcaacaaagctggaaaactaaaaaaagaaacaagtgtataattaataacaatgctggttgtaaattaaaactaagcgtcatatttttggtgtcaaaatgtttgacatttttaagaaaacatgtataagtgttctgcctcttggatgagaccattttaaattaagctgtaaaaaaaaagtgttcactttcagtaatctggattttcgggctctgctgacatttccattgacctcagaagtgaaaatctaaa

SEQ ID NO: 1084 - DNA, 282 bp, Homo sapiens
  source 1..282: mol_type = other DNA
ctgaatagaattttccttaacagcagttttcttctatgtaacaaattagcaaataagaaaatgtccataattgttcattagaccatgaatttataggtcatccataatttattgggatacaaaccaaacttggaatgtaagctcaactttcattatgctttagcatgtgaatgaatgatttaaaagcacatgttttaatctgattgtttgcatgatattcaagcttataatttcaacacctgagtgctaagcatagttaccccacactagtctcgtagatct

SEQ ID NO: 1085 - DNA, 680 bp, Homo sapiens
  source 1..680: mol_type = other DNA
caaacaaaacttcctatttaagtaggtcaaaaaagggtttttgagggtctagaaatcacattgctttcactggaccactttgatcacaggatatttgtcatgtgagatttattatgtcaacttatcatcactgctttgaacaaaatgattatatgtatttttttagactagagacaaattgtaaaagacaagataaatgagtcattgctttccttgaaaagctatccaaatatattttaaagtgctgtgctttaatgtataatttgtgaaatataaaccatattatcacaatttccatttttaacacttcttagattcttatctaagactaaatgcacacatattatgggaaatttgttctaatcggataaaatacaagatgtctttattcatttaaaaataccaaattaaaccatgcacagtcatgtttccacttaatcatttgtttaaaattttaaatatctttgactttttaaattttaacttttggactttatttacaatgatgaaagcacatttgttattcaataaaagcctctgaatatttgtttctaacattgctattaagtagaagatgttattatcttaatcaagccaatcaattcatggaataaactttattgagtggttactatgcaccaaaaaggatccttgtaacaagaaacctggcctgtgattcc

SEQ ID NO: 1086 - DNA, 711 bp, Homo sapiens
  source 1..711: mol_type = other DNA
caaatgatttctacaattatgtatcatctcattacaaagtaatattaagattctagattctacgatttaaaagattttagtaaaattattcatgtagataaattactaaagcatgtaaactacagtatgtcacaatcccataaagacaatctactgtacattgttgattccaagatgtacatttttcatatttaacatctcaaacattgagagcggttagttgtccacttctgcgggctcagcaaacctgtactgggctaaaaaaaattcgatagataatatacatatgtttaaaatctaaattttatttagagatatctaaataaaatctctaaactaaataaaattttagtttaaaagattctaaatgttgagaaagcattgttattgtttattatttcttactagcgcataaataatggtatatcttataattaaggaagtcttagatttaaagaaatctcaggcctgtattccctgcactttgggaagccaaggcggtgagagtctgtctttacaggtttaaatacagtttttttctaagtaatattgtcataaatattatgtcatgaatattatgcagagctgcctgtactctgggcagtttaacttttttctcattttttagacagcaaatacaaatggaagttccaggcactccagtgggcggtcttgtgcacagcccacttgggaggcctcggcgctcaggtg

SEQ ID NO: 1087 - DNA, 551 bp, Homo sapiens
  source 1..551: mol_type = other DNA
ataaataatggtatatcttataattaaggaagtcttagatttaaagaaatctcaggcctgtattccctgcactttgggaagccaaggcggtgagagtctgtctttacaggtttaaatacagtttttttctaagtaatattgtcataaatattatgtcatgaatattatgcagagctgcctgtactctgggcagtttaacttttttctcattttttagacagcaaatacaaatggaagttccaggcactccagtgggcggtcttgtgcacagcccacttgggaggcctcggcgctcaggtgtggtaagagctgggcggtgcagagcacagaacatctgcgaggaaagttccctgatggctctttattatccgcagtggcagaatcccacccgagcccgcttcgacccgcggggtggaaaccacgggcgcccgcccggctgcgcttccagagcgagtcctctccgccctgcggccacgccagctccccgcgcccaccccggagttggtggcgcagaggcgggaggcggaggcgggagggcgggcgctggcacc

SEQ ID NO: 1088 - DNA, 551 bp, Homo sapiens
  source 1..551: mol_type = other DNA
tttaatgaattttaatattctcaactagtatcaatgctttgtcattattaagtgttgacactcgaaatgttctcaaatgatatgtattgagcgcatgtgttggaataattgtaacagggtttctataaacagtgcttcctgaggctttctagcggccacgctcccatgtgatagtttcacgagaggaaggcctgagcagctcggacttggcacaggcagggtccagcctacccgcggccggcgcggcgcctcagcaacaccccctcccccggaagtttgtgcgtctcagatgtaaggtctgggagtcaccttgacccccctggagcggtggggaaagttagccctctttcgcgagtcagttacgccgtcacggttttttggtttcaaggtagctgaagagcaggtggcaggactccgcccaccacctcgcctctcaggcgcgcgcgaagagttgtcgcgcggtgcgtcccgacgcggagagtcgcctcaggagaactacataccccacagtgccttgcggcgcaggccgctcccggatgtgtgcctggcgc

SEQ ID NO: 1089 - DNA, 358 bp, Homo sapiens
  source 1..358: mol_type = other DNA
agtgagatgggcgtccagaaggatccttgtttgggcaaggctctttgagaaaggagtctgggttgccagggattccctgcgatttcccagttacaccgggcaggtgggaaaccgttctgctgttttttcagtccaacccttgggtaaactttgccccggtaacctgcttactaataattactagacttcagtgccgcaactattattgcttcagcccaagctgaggccacctctagcctctgccggataagagtgcgcgcgggacccgccttcccctctcaacctgactccaggagctggggtcaaattgctggagcaggctgatttgcatagcccaatggccaagctgcatgcaaat

SEQ ID NO: 1090 - DNA, 351 bp, Homo sapiens
  source 1..351: mol_type = other DNA
cagccttattcaaaataaggcagacaatgtctttattagcttaattctgcaagcattttttaaaggtaataaagccttgaggctttagttagaggcaaaaatgcttagtaaaaattcagaatgtagccatgaggttttatatatcaaaacaccccaataaaatcatgccttatcttatgaaatgtttatttttataatacgaacatcagaaaaatcaagttcaataaaatatttctgagaatatgcattcattcagtaaccaaaaaatgtgtattttttcttgaatgcctagcctgtgtcaggcattgcctcaggcactgggaaggccccaagacagagcttctcatagct

SEQ ID NO: 1091 - DNA, 361 bp, Homo sapiens
  source 1..361: mol_type = other DNA
ctccatttcaagtgtggactctgcccatactctagaagtccgctgagtggttttcttggactccaagaaggcaagatggctcctccaattctataatccgcagtctccatagtttctggaacagaaccctcacagccctggggaccgctggcacaggggcaagcgaggcgttcgcagtcagggcggccccgcgcgggggcgggtcgtagagtgggggccctcaagtcctagaacttcaggtcctgccaggcctcgcccctcctcctgcggggccacaacgcgggctccccggcccgggacagcacagccagggcgtccgggcgggaggcagggcccggcgcggaggaaggagcccggggcc

SEQ ID NO: 1092 - DNA, 319 bp, Homo sapiens
  source 1..319: mol_type = other DNA
tccacaaaagattatggggcacctactctagcattttgttaggcaccatggggggtacaaagaacaacttggtccctattccccaggagtttacagctcagtggtggagacaaacgtgtacacaaatccttacaatagtaaaaatgtaaatacaaaattagaaagattttttaacactagtgagtagaacatgttctctttaagtcgagctgagactttattttttaaaaaaacagactcgggagccaggcgccagcacccgccagagctctgagccccgaactggtgaggcggcgtctgatccgcttccctgctcctt

SEQ ID NO: 1093 - DNA, 421 bp, Homo sapiens
  source 1..421: mol_type = other DNA
gcacactaaatttaaaattgttaatgagtttctcaaaaaaaatgttaaggttgttgaattgatgctgtatactctcagagatatgcagaatttcattctcagcaaatcgtgcacaatgtgcttccataacattttatacttctccaatcttagcactaatcaaacatggttgaatactttgtttactataactcttacagagttataagatctgtgaagacagggacagggacaatacccatctctgtctggttctatgtaatagatatttttaaaaataagtgagtggggtgactgggatcagctcaggcctgacgctggccagagctcaacttctgttccccctccctcagctgaaggggtggggaagggctcccaaagccataactccttttaagggatttagaaggcataaaaaggc

SEQ ID NO: 1094 - DNA, 494 bp, Homo sapiens
  source 1..494: mol_type = other DNA
aatcactttactaagggattcttagcatcaaagcatgaagtctgtgctttgccaaggagacctaagactgagttgtcatttgaaaattgacttctgttgaagatttattttctaagatcctagtgaaattttaagtgtataatcacgatccaaacataaccaacattcttatacagtggtagagtttagggaagcaatttgacaagttgtacacaacctttccttgtacttaagaaagactacctataatccattttattacccaactggttctgaatgatccattttactgcacaaaccgtattttcttgtcttttcaaatttcaaattccaaataatttcgtttggggcggtcccaggccagcagcccgcgccagctactggagccccaggacgcagccgagcggccctcgccgactccttcccgagcctggctgtggcgtcacgtgacccgcggcgcggccaatccgcgcagccctctatgctattcaaat

SEQ ID NO: 1095 - DNA, 639 bp, Homo sapiens
  source 1..639: mol_type = other DNA
ggaggcgctcccggccgcctctttgctgagatagcaggacagcctgaggagccacgagctcagcgtcactgagctagtgcgggtgcaggggcgctcaggcaggcgcacaggccgggagccgcttctgccgctcaggcggccgcgctgcagaaagccgcgccgcgctgcccgagcgcccggggctggcccgcgagcgggaggagccggcagccgcgctccgccccgcgctgagattcgtgccacctgcctcgaacaccacggaggcggcctctcgtcccgttctcgaaaagcagccaaaatctccttgacatttttcacactttgaagcagctgcagctggtccatgagcggcgcctcctcgcctgccaatcctggcacctgtgcgccgagccactgcaccgaggaggaccctactccgggtgaacaccgggcttgaagccacggacacccagccccagtgcagcgggttctcgccggcgggacctgcagccgcccactcgggccaccgccaccgcctcctgcagttgcggagcgctcagcccctccgagacgcccgctgcgccctggcccctggggatcctcgccctgcacaggcgcggcaacgggcagttctgggggcggggagggagctgcgcctcc

SEQ ID NO: 1096 - DNA, 540 bp, Homo sapiens
  source 1..540: mol_type = other DNA
aatactaacataaaaataccatgagttctattttatttttctgagaaaatcttacttgtttgtatgctcatgaaattaaaaaccctgttacatatgttcatctaaaaggaacattttttttggacaatttgacagaatgattagtgttatggactgtctaaaatctttaaatgtaatatttgaaactatagtgatgataattaaaaactgatggaaactacggtcatataaataaaatgagataaaattaaaatagaagaaatggtattttaaataaataagctaaaccctatgggacagcttttctttcccccagaagtaggaagctatattataaattttaaaatatggtttcccatcaaatttaaactacactaatataaaggtaagaaataattttttttaatacattgtcttggtcagaaagtatctacagagtagagtttaatagattcaggctctgcttgtagtacacaagcagccaaatgtatttgctagatacattagcaaataaatatgaccgtgttccaataaaacttt

SEQ ID NO: 1097 - DNA, 570 bp, Homo sapiens
  source 1..570: mol_type = other DNA
atcttaataattacttgttgaatcaagaagttgtacatttcagatgaaaattttaatttcctaggaaacaccgacttacattgaacaaaattttcattttattatagctcaagattctagttacttatttcaaaaaccttatgccggttagtaaactgcctaaagttaacagtttctaaagtaaagaagcagctgagatttgaacttgctttttagggctcaaaaatccaagctgtctgagctttgatacacagaacatttattaaattttaaggatttttgttttaagaacagaaaatttcttttactccgtacgcgagaggggagaagagagggttctctttccccacaccctcgccacggtggaagcacagcccgttaaacgcacttacttgattgaagtaattccaggacgctagccaacggaaaaggcttctctgtcctccagcccaggcgctggtgctgacgacatctggactgcgaaggcccagcgcgaggccgcgagcccagcgcccagagcgcgcgctcacgaaaggagcggggcatcccaacggcgccacctttaagcgt

SEQ ID NO: 1098 - DNA, 386 bp, Homo sapiens
  source 1..386: mol_type = other DNA
ttcaacttagaaaatatactcattattccttgtaagtagaactctgcacagctgcatacagaaaacatataattttagctttggtaaattatgttgcttatcccacagaatgtgggagcgccccgtttaaatttagaccgtatttttagcagggtccctttaacagagattgcgggttgcctgggccaaaggctttctgacagggtaccgaggtaccgcgcggagatcctgccccgctatccgcttcaggcgcagaagctgcagccccacccgtgacgcttaaaggtggcgccgttgggatgccccgctcctttcgtgagcgcgcgctctgggcgctgggctcgcggcctcgcgctgggccttcgcagtccagatgtcgtcagcac

SEQ ID NO: 1099 - DNA, 598 bp, Homo sapiens
  source 1..598: mol_type = other DNA
cagtattttctttagaaatatatacttgaatatatttaagtactataaactgtgttcgcctgtaatcccagaactttgggaggccaaggcgggtggatcaccagagggagaccagcctggccaacatggtgatggcaggcgcctgtaatcccagctactcccgaggcctaggtaggactgcactccagcctgggcgacagggcgactctgtaagtcatccattgtgaatgaatgtacaaaacgcttattaataagtgtaatattaaaatatatcttttctgaaagttttagtgacaaaacaaattagttacagatttaatgttaccaaaattcatgtacattgaaaatttcgggacatttgtaatcggatagctctgtagatgattatcagtatataaagacatcgtgagcagtatttaataagaggaggatgaatgctttttttaaaaaaaaagtttatacgtgcctcttcgctcttccaaaaaaacacctttctgcaggcgacggctgctgggcctgcgcggggtggagccgacgctgacgcgccctgcgccgcaaagcattggtggtctcgagctcgcgcgctctcatcccctcc

SEQ ID NO: 1100 - DNA, 411 bp, Homo sapiens
  source 1..411: mol_type = other DNA
aacaaatttctactgtgtggctttcagaaatctaacattctaagtttactgaaagcagcgttcaaaatttaaaatgtaaagatatatagctccaaaatttctgtctcacgacaaactttgaagtgggcaaggaggatacattcctttgcacccctaggattccagaagcctggggaggcacaccctaggtggagaggggctagcactcctcaccgtgattatctttctgcccgatatgtgcgtgcggatgagagaggagagtctcctcacatcccccttgaagacgcactcgtgcaccgggtagtgtgcggggccatccgcgacgacagcaacggggttggtgccggccagaggagctgccttcagctgtagcaccgagggcagccgccgcttcctcatccccgggcccgc

SEQ ID NO: 1101 - DNA, 275 bp, Homo sapiens
  source 1..275: mol_type = other DNA
ccactgcactctagcctggactacagagactcttagggaactaatacaattatatttcagttaccgaaattcattcatctaataaatatttgagtggcctccctggaagtactggtgctgtacatattagcttcgtacatacggcacgtcagtaaatgttgactgagcgaccgcccacaaaaagcgcggttggcgggggtcggctggcagctgggagactccagctctgggcggcacactgcctcggaggcgccggcgcctagtctcttcactcc

SEQ ID NO: 1102 - DNA, 530 bp, Homo sapiens
  source 1..530: mol_type = other DNA
ctaggattccagaagcctggggaggcacaccctaggtggagaggggctagcactcctcaccgtgattatctttctgcccgatatgtgcgtgcggatgagagaggagagtctcctcacatcccccttgaagacgcactcgtgcaccgggtagtgtgcggggccatccgcgacgacagcaacggggttggtgccggccagaggagctgccttcagctgtagcaccgagggcagccgccgcttcctcatccccgggcccgcagtgagcggatcttctccccggtcatcgccgccgccaggggcaagggggggaatcgggaggctcaccgctggcgacggagctggcgctgcggcggcacaaggcggagcctccagcctgggacaaacgcatctcccggggaagagccggctctcgcctaggcacgaagggacgcgcgccaggtgcccacgacaccaggatctcagtctcgccgtcgcagccgccgtcgctgcctcttgctcctctcgcgagagctcccccaggagtgaagaga

SEQ ID NO: 1103 - DNA, 576 bp, Homo sapiens
  source 1..576: mol_type = other DNA
actctcattagaaaaagttgaaaaacattcatttttcagaagctttttgctattcaaggcaattattgagttaactacaccaggagagaaattaatttgctaatttgtagaactacagagtattacctagcaaattcagtagttccaggcaggagtgcaatggcaggttcaagcgattctcctgcctcagcctcccaggtagcttgccaggctggtctcgagcctcaggtgatccacccgacaggcgtgagcgcctggccagtagtttagttctatacttgaattgatggattgcattctatcttgtaaaatttgaataaaaagtaaatacagtgtttaccagtgaagttatttactcattacatattgatataattgataatcactacatattttatcatattgaattcaagacactgtgataacagatttttttgaagcaaaatcctgttttaagtctgtttggagagctgggccccaccgaaactaatctgagtaacccctccttcacaggggtttgtcagataacccaggcttgagccaatcaccgttctctgggacacacttaaggaggaa

SEQ ID NO: 1104 - DNA, 340 bp, Homo sapiens
  source 1..340: mol_type = other DNA
ctgcagggatgttgctgttgtgtaaaagcaaaagcattgtttctctctgtactttaaaagaagataatgatgcttgaaaaagctcaagattgactaacttttagggcggctgtaactaccacagtaaaagaaggctatttatgtggtctgtttcgggcgaacctccggcctgaggtcacagagacgcccgggtggctctcaggagccagcatggcagcctcctcaggacgggtggggcggtcgcggtgacgtttcaggcaacgcctctgctgtcagccgggagacgcgtcgggcctgcgctcaatgggccgcgctggtcccgccccactgtgatcgtgag

SEQ ID NO: 1105 - DNA, 353 bp, Homo sapiens
  source 1..353: mol_type = other DNA
aagatgttacgaggcaagcaagtatgcctattttcattcaatgtttattatttcaaaggcaaagtttccatatagattaaggccttcataacatctgaataccttttctagttcttattgtatgaagataagaaggggagcacttaagtctacaggcactgtctaggcctttttataatcactctagagtcacaaagcagaaggacttcaggagcgctcaggtgcgcctcggcagtttgcctgggaactggaggagaccccagtgggctcccggtccggccaggagcagggcgtttcgagaccgtctggggcttcccaacccgggcgccccgccccctcggccttataaaggg

SEQ ID NO: 1106 - DNA, 402 bp, Homo sapiens
  source 1..402: mol_type = other DNA
acccttgttccagtggaatgtggtacagaggcagcctaaatttttaagacactggtaatttaaacagtgttgacaatgtctcagttttaaaattaccagctggttcccatgtataagttgcttacttatctgttacacctatttatgtatatataaaaataggtttccaaacgacaatgtgtatgaaataacagaatttttatgccttattaaaataatttctctaaacacttgaagaggaagcggaagtactttactcttgggtcctcccacctgtagggggctctccgaggcttctagtgccacgaaggcctcctgccgttctagaaaagatatttgtattttaacttttccatgcgcgagtcaggcagtgtggggacagccccgagttgccgaaagtcc

SEQ ID NO: 1107 - DNA, 354 bp, Homo sapiens
  source 1..354: mol_type = other DNA
cctcccagcgcgcctgcgtgccgcgcgtgcacaggcccccgcgcgcacgacacgcgctctgccgcaaggccttgcacctcctcgtgagagaactagttggctgctcgctaactagtcgccggcgtcatgatggcgccgaccacaacttggaggacttcaaacttacggtccctggcggggttgctaaggaaacggccgcttggcaacgcgcgcgagcccgggagccggcggccggcgcagcgctccgcgctgcttctgctgctgctgttgctgttgctgctgctgctgctgggattgcagccgccgccgccgccgctcgccctgcctcctcccccgccgccgccctcactcgcc

SEQ ID NO: 1108 - DNA, 581 bp, Homo sapiens
  source 1..581: mol_type = other DNA
ttaaagcagcaatataatgttgttatacctcattaaaccaagtagtataaaaacagaatgaaaacctgctataaaactggtagcaatttctaatttgacttctagcattcattttaatggatctctgtattaggaggtccttgaactgtttctgaaacaatctgagacaaaggtctcagttatgtgattcttcattctgaacatttaaaaaaaaaagtctacagtcttctgagtttctgaaaataaatttaaaaaaagaagtctcctaaaaactttcctgaaatcttggtgaattcaaactgtatgagattattttatttggtgcaaaattgcactgaaataggaatacatacctagtaatttggttttattttaatttgccaaacttcatttggttcatttaccattgaacaatattttaaaagcattcctttgcattcttcatactgggtaattattcagtatatttgtttattacttaactagttttcacttactgattttgttagaaaactacacagatgacttctactgaattcttgctcataaagatgttttataagagactcccagtgtaatgg

SEQ ID NO: 1109 - DNA, 342 bp, Homo sapiens
  source 1..342: mol_type = other DNA
tagttggctgctcgctagtcgccggcgtcatgatggcgccgaccacaacttggaggacttcaaacttacggtccctggcggggttgctaaggaaacggccgcttggcaacgcgcgcgagcccgggagccggcggccggcgcagcgctccgcgctgcttctgctgctgctgttgctgttgctgctgctgctgctgggattgcagccgccgccgccgccgctcgccctgcctcctcccccgccgccgccctcactcgccggcgcgctcgcctcctcgctagatggtgtgcgagccgcccgcgccgcctggttcccgggaagactcgccagcaccagggggtggg

SEQ ID NO: 1110 - DNA, 548 bp, Homo sapiens
  source 1..548: mol_type = other DNA
caaacttacataggctgttagaatataacataaaattctgacagtgtgcacttttagtagacagttggaatctctttattgataaacaaaatgatttagcattttaattagttaacaaacagaacttgtcagctagaatctaatagtcctgaaagttttactgttatccaagaattagtcccagtattttttaagcagtcactgcaacacaaatataatcacttttattagacagtgtcatagccaattttttgataacaaatttcttccttttaattttcataaagttcaaaatactgtgcttcgtatcttttagatttatttaaagcaacttttattaatgagctaatcaatgcataacttcactagtaagcatttttaatatctatactactaagaataaagtaaagctagctactcttgcccaggagaactccggtgctccgcaattttcgctgggtggcttctcgcagcgatacttccggagggtccctagcagccgcgccgcacagcacgcatgcgccctggggtgcgcctccgcccggttg

SEQ ID NO: 1111 - DNA, 397 bp, Homo sapiens
  source 1..397: mol_type = other DNA
taataccacaagttctgtttgggattgaaatatatttcttaaatcttttattacttactaattgtgtctgtgtaaagatgaagtggtctgtaaaaccaagaaacctcgtgttctataacaggaaacctttatatttcctaagagtgttattgaacattctagattaatctgcatatacaaccaaaaatatttggattcaaagaaaacttaaggttgaaagagcagagattttaaatattcagactgtgtatgtatcatgggaactgctccattttgtcacccaaactgctcaccgggtcaactgggctgcaagcccttatgagttggagacatggcggcgccagccaaggcgctccgggggcgtggttacgtgggcgacgcacgcaaccgggcggag

SEQ ID NO: 1112 - DNA, 534 bp, Homo sapiens
  source 1..534: mol_type = other DNA
taatatgacattagcattattctaattagccaacattattttaatccttacaactatgaggtcagtactgttattaggctggagtgcagtggtgcgatctttcctgcctcagcctcccgagtagctgggacacggtctgtatctcctgaccttccatagatgagaatctgaggtactcaagagttaagtaactggcccaagataactagtgtggtagttatatttaagatttttttttgggaatccaagttctaaaaatcttttttcgaaaggaactatgaatgtttatatttatcagtcttctagtgttacagaattactattttggggagaatattacctcatcatttattacgaaaggcaaatccttaaggttatataacacctaaatttactgtcatgacaaagttttagtaggtttctattaaataaattgtgcttttttaactttgtttttaaggaaatggaggatcaacactttgtgcccttcaatgtttggaaaagctatatggagataaatggaattcttttacc

SEQ ID NO: 1113 - DNA, 613 bp, Homo sapiens
  source 1..613: mol_type = other DNA
tatatagtgaaaaatttaatgttttcttttcagtagaaataggcatacaatatgcatacaacaataatatctagcttggatattacttccaacttactagtaactttgtgttttctcatccataatttgtgaataatatctacctagcagcactgtatgtatgagattaaataatgagatatattttacgaattgctatttgtagaacttaatgttttacattctgatctatgattcttatggtcggaataatccacaatagtataaatcttggtctatgttgagaatttcttcatacaaacataattatgtagctcttatacattcatttctattagttatatgctagaggtaatgaatttttattatttatttatgtatgtagacacattctattgagaaaatgatcttgaaaacaggtctatgtagttttaacagctcttttgtcgatgtaactgaatcattttctagatttatctgttaaataaatggtccatgaaagtatgtatgggtagataattgatggaagcaaataatcctattgaaacatttgctatttatttttgatacagttcttttaaacagactgattttagccagactatcaaagtat

SEQ ID NO: 1114 - DNA, 424 bp, Homo sapiens
  source 1..424: mol_type = other DNA
tgtatgcttaacccatgttaactacagatcctttgtgatggataagtatttatgctttttcaattccttaaatttaccagttttacaataagctctgttgtatttctaaattagcttcatagattatttttatagtgaacgcattaaaatagtattgaagtttaattttattgaaaaacattgcattacgtgttataatagaaaagtatttctcatatagcaatatgtcactggggcagccattcccagtgggcagccagatgtaaattatcttagtgctgcataatactacaatactgaagcaaatacatctctcttttaatagtgcccttattatatattcccatagtacttagtattgccttatttagaaatcctcatcatttttctgattatttgttcaactacattgtaagaagaccat

SEQ ID NO: 1115 - DNA, 462 bp, Homo sapiens
  source 1..462: mol_type = other DNA
taacaaggaccttctatctatggcaagagcattgacctagtcaaatttcttcttgatcagaatgtcataacaccactagttctatatgcttatcaatgattaagaataatggtatttatcaactgccagcatttagaattgataatgactgataataataaaaagcagactgactttttggtcaattttattattagtgcattatggccagcactagacagactgccttgatttggtgatcaaaaaaaaaaaaaaaaacctgtgatgggtctttgttcctttatttgtgcttggtaattacagtggatgtagaaatactataattgtactgaggaaaagacagtctctgtagaagtgagtactcgtttggtcaataataaaattagttctttatcaaagaaatcaatccttacttcatacctttggaaataatgctattatgtgcagacatgtttgatgtgg

SEQ ID NO: 1116 - DNA, 526 bp, Homo sapiens
  source 1..526: mol_type = other DNA
ctaatgcatcacacacacacacatgtaaacgcattatgtatgtgtgtatgtgtatatatatatatacacctatatatacatatatgcagtcaaaattaaatgctactcctttatttagcaaatgattggtaaagtcacagtgatcagcaagacaggcagagttggtgaccatttcagcaaagcgtgataaatttatgatacagggtctcataaatgaatacatgaatgaataaatgggtgagtgaaaaatgttaagtgtgatccctgagaataagtcagaatttctttaagcccagagtgattctggggaacaggtaaatatatcaacatcccttccagtgatagatgacagacagtaattactatctgcctttggccagggattgttctttttaaaaaaaatctggttcaggcaacttaatatagcaggtgaagcattcagacccttgatgaatcaggtctgctcttggagctgctgcttgtacttgctaagagccagaatcaaggatgcagttctatgggaacc

SEQ ID NO: 1117 - DNA, 575 bp, Homo sapiens
  source 1..575: mol_type = other DNA
ttgcttcaagtttgacttttaaaaggttgaatatagaaagaatagaatgtccatctttaaaaaatgctgagtttatcacacataggagcttgaagataattttcccttatttttagtacattcactaattagggaaagtattgttagtttttctaaaatgaagaaaattttgccagcttaagaaaaaacatgagtacaattgtcattatgttcaaaggaatgattatgtttcatttaagaaacgcaagatatatgaaattaagatatttttatttttaattgacagataaccttgacactaagaaattaattcagacaagtgattgtgtttcacagtaaaagtataaatacaactctaaaaataataatatattaatctgcttaatatgcttttcagtttctgaagcacttttcataaatcttatttcagttaatttaataatagttttctagaaaccaagagaaataggaactccacatcttgtgagactgtccaggctaactaaacgaactcaaaacaagctcatttttctctagataatggctatttattcaccaagagatgtcatagtcaa

SEQ ID NO: 1118 - DNA, 234 bp, Homo sapiens
  source 1..234: mol_type = other DNA
tggtcagagaaagtctcttcctggctgtgtgatcttatcaggtcacttctgtcgtatggaacagggcagtctgttccctagagatttgctgctgaactcgctgaaactttagcctttaggtttaatgaaactcagtataaacatccaacgatgtgttaacagggtgtttatgtgggcactaatcccccacagctggggtgggacctacagctgggctgtgccctacagctgggc

SEQ ID NO: 1119 - DNA, 279 bp, Homo sapiens
  source 1..279: mol_type = other DNA
caaaatgcatttactaccatcctaaattatatacgatcgtacttttctctgcgtaaaactactagagttgtagcggattccggcattcaataccttagcaagctacaaagtctttagattcccttagtattcatataataaaatcaaattttctaaaaccctacacttaaagaatcgggatctgtattttaaaagatgctcctttaagtggtgaaaaactgatctcgcatgttcagaaactgcacactctccctgggggcagcccacatcctgggtgga

SEQ ID NO: 1120 - DNA, 227 bp, Homo sapiens
  source 1..227: mol_type = other DNA
tgtgggcactaatcccccacagctggggtgggacctacagctgggctgtgccctacagctgggctgtgggaaggggccctacctgctgggctgtgggaaggggccctggcaaccgctgggcgctgctgcaggcactgacaactaaggagagtttttaaaaccacttaccagaatctagatgggaattaaaatttcttcagattccgcctcgctccacccaggatgtg

SEQ ID NO: 1121 - DNA, 387 bp, Homo sapiens
  source 1..387: mol_type = other DNA
cttttccaaaggcagaggaagccatgaggatcccttaaggcccacggactctgagactagactcccctcagggcactgggctcctctctgccccagggcaggttcagaaatgctgtccaagagtcaagtcctggaattggggaccccaaagtctcagaggcttaccaaggcccttgatgtagtacctgggtattggcaagactggattttttccattaaggcagcataccttctggcctgtcagctagggcctagaacagagcttcatgatgctgaagatgcaagacaaaatcctcctgagtcttctctcttctgtcctcaagcagaaggaaggaccttgtggagttttagagacgaagaccacttagctctcacagaacatcactg

SEQ ID NO: 1122 - DNA, 609 bp, Homo sapiens
  source 1..609: mol_type = other DNA
aatgttagctaacttattagtaaatttccccatgggaattaagaccttggcagacaaacagtaaacttctgcttacaaaaggtttttgcaaactgaccactttcacatttttcctgaaacatcaatttagacaaagcagatgtgaatttgaagtgaataaacctttttactacagcaagacgaaagtttatccttttattcgtaaaagaaaaaaatatagaattactattaaaagtctgaaggaatttcagagtctattaaagttatcacttctttaacattacccaatctactctatccattagagaaaatagggtacacatttttcttaaagggacaaatactcattcttttgaaactcttcccaacgtagtgtcaaaaaaattaactacattgctttatgacggtaacataaaaagaataaaattaaaacaatgcacgcttttaaaattagttaagaaaatggctggggcaccatttttttctgtcactattaattattacccattttaaactgcaaatttgcagtgtaatgttctgttgctcagaaaaacaaacaaaaaatttctccctggcctggagccactccctgggtaagggccacccaag

SEQ ID NO: 1123 - DNA, 342 bp, Homo sapiens
  source 1..342: mol_type = other DNA
gattaatttaacatttagtacaagatcacttccctggcaagcctttcaatgcaagtaagtcttaggttccaagagaaacattctcattcaaacacagaaaaagtttaaaccagggtacttttatgcttttgactgatctttttataatgaagcatttgtaacaataaaagcacacagatgtttacaaagtctctttgattttaaatagcatgaacatattaatgataactggacacaaataatagtagattattttaaaggtaatcatggcctatttgccaaggctcctttgaggctagcaaggctagtaggacctcagggaaacacaatgtgtttatgaca

SEQ ID NO: 1124 - DNA, 554 bp, Homo sapiens
  source 1..554: mol_type = other DNA
tggccactgtaaccaagtgggccctcactaagcttcagggccagaacacagccttgcaggtgtctgcccgtgggctgctcgggaggggcagaggcaaccgcgcgcttcggggctcatcgcccgcgtggaattcgggctcgctatcctcgaggaggctgtggaggaggacggctcctgggccgggtcgcaagggacagtgccgtcctcccgcaggtggccagacctggccttttgagagggggcttcgaaggcccagaggaaggcaggccggaggcagactccatcagactctgcctggctttctccggccccagatggccgcggtctctccgcgccccccagcagcccgccgccagtagaggcgaggtcagcgctgggcgggcgctcaggggacccagcgctgccccctccagcagcaggagcagcacagcagccgccgccgccgcagcagccaccgcgtccacagcagcgcaagaggggggccagcggcgcggccgagagcagaggggcggcggcgcccgccccagccgagccgagccgagctgagcgcgcag

SEQ ID NO: 1125 - DNA, 288 bp, Homo sapiens
  source 1..288: mol_type = other DNA
catcttttctgtgtttaaaatgttcagaataagaaattggaacaaagacatgaatagacaattcctaatcatctttaagagtctgaatatagcgcttaatatagaattttaacagctaaattagatgaatttatgaaaagaaaatgttaagttagtataagatttagtataagctaccatctcaaagtgactccagggaattcctcagggagggtcaaatttacctaaacaattaaattctcttttaaattttaaggaaacacaagtatgctttcgctttgggggccg

SEQ ID NO: 1126 - DNA, 380 bp, Homo sapiens
  source 1..380: mol_type = other DNA
tgaatatagcgcttaatatagaattttaacagctaaattagatgaatttatgaaaagaaaatgttaagttagtataagatttagtataagctaccatctcaaagtgactccagggaattcctcagggagggtcaaatttacctaaacaattaaattctcttttaaattttaaggaaacacaagtatgctttcgctttgggggccgccgcgctgcggtcagcctcggcgtcccacagagagggattgcccggagaggggatgcgacccctccccaggtcgcagcgacggcgcacgcaagggtcacggagcatgcgttggctacccggcgccggggaccgctgccaccccgcctagcgcagcgcccgccccatcccgcccac

SEQ ID NO: 1127 - DNA, 297 bp, Homo sapiens
  source 1..297: mol_type = other DNA
cggccgcttgaattcagtttatggtttgactctgaaacaaaattgataatatccctttcccaaaaagaccgcttttttgcctggggaccaggtcatgcagcctctggctccaagtttctgaaatcactattgtaaaacctaagataagttcttgagatatttggcttctgcgatgatttcttaaaagcaactcagatatttaaatattatttaaaactgtttctagacaaagagcgatcagtggggtcctacggggcctgagaggcgcatctgcgcaggcgcccggctcctaagtct

SEQ ID NO: 1128 - DNA, 228 bp, Homo sapiens
  source 1..228: mol_type = other DNA
gatgatttcttaaaagcaactcagatatttaaatattatttaaaactgtttctagacaaagagcgatcagtggggtcctacggggcctgagaggcgcatctgcgcaggcgcccggctcctaagtctagggcctgttaagagttgagcagcccgatttctgaacccctctaaatttaaaatctggtctcgctttaagatttttaatgggatcagaagaaaattcggtac

SEQ ID NO: 1129 - DNA, 401 bp, Homo sapiens
  source 1..401: mol_type = other DNA
agcgatcagtggggtcctacggggcctgagaggcgcatctgcgcaggcgcccggctcctaagtctagggcctgttaagagttgagcagcccgatttctgaacccctctaaatttaaaatctggtctcgctttaagatttttaatgggatcagaagaaaattcggtacttaatcacttccggtaatcttcatgacctgttatagtgactgcagtgtaaggaactgcttatttaatacatttgaacaacttttggggtacttagaaggtgctttgaaacctgcatttgattaagcaagaattcgcttgcaagttaagggttagatttttttattttttaaaaatatgctttctatgatttattttttacttatctttttgaatgaaaagtgaacaacaagaaa

SEQ ID NO: 1130 - DNA, 465 bp, Homo sapiens
  source 1..465: mol_type = other DNA
taagagttgagcagcccgatttctgaacccctctaaatttaaaatctggtctcgctttaagatttttaatgggatcagaagaaaattcggtacttaatcacttccggtaatcttcatgacctgttatagtgactgcagtgtaaggaactgcttatttaatacatttgaacaacttttggggtacttagaaggtgctttgaaacctgcatttgattaagcaagaattcgcttgcaagttaagggttagatttttttattttttaaaaatatgctttctatgatttattttttacttatctttttgaatgaaaagtgaacaacaagaaatgctggtggtaattctgaatctaaagttgattattactactttagctctagaattactctgcagtgacacaatcagttcactgttacaatttttaaatggaacgttttcctattacaagatgaaatcaagtgaaaatt

SEQ ID NO: 1131 - DNA, 319 bp, Homo sapiens
  source 1..319: mol_type = other DNA
ctgaaaataaggttttttgatggaaattgagatttttctcaagtatgtttggaatgccctgtgcaataatcattccaagcatattgagataccttatttaaggaattttctaaaggtcaccactgcaaagctggagtttgaacttctagtgttaactgatttatatgttagaaaatactatcttttgataatataactatctttcctatatttggtcacaagatcaaccttaggtgggttatgctgtgtgagcattacacgttctcattgtgtcaatctgatacctgcaggcctgagcctgcctgcgcctgcgcagtgc

SEQ ID NO: 1132 - DNA, 469 bp, Homo sapiens
  source 1..469: mol_type = other DNA
cctgtaatcccagctactcaggaggctgaggcaggagaattgcttgaaacaaaaatctaaaacaaagtctttaaattttggttaatattgtatgacattctttattggcaggttacttaacctatgtaagcttcagtcaggcacagtgcctcaagcctcacttgagctcgggagttcaagaccagcctggctgtttctataaaaaatacaaaaaagctcaaggccgcagtgagcgtaccactgcactccagcctgggtgacagggtgagaccctgtctcaaacaacaaaaaattgaatttattcactctagcaatcattgtctgcttacataatagcctacaaaggataatcaatgtatttattaccattatttagtctactgaagaaactgaattcttagaaaattaaatatattgtatcttagctttcatttcaaatgtcaccagttacatactggaggaatctcca

SEQ ID NO: 1133 - DNA, 689 bp, Homo sapiens
  source 1..689: mol_type = other DNA
gcaaactagacggagcttctagcaagtgaaacttttttaaaatttttctgacagaccaagtggtaaaaatctgtgtgtgtacacggaatgctctctccctcgtttactctccttgtagaataactgcttctcttagccggctcttgcttggagcagggaagtacacatacacagtttataaacatatactgtacaatcaacatgtacatatataatacaatatacacatgtgtgcatcctgtatctgtatactgtatatcatgcatatacaatttcataaacaagcttgtaccaggaaaaggcaataatttatatattatacacacatacatgtatatgtaaaatatgtacacacacacaaaatataccatacagagtgtagtgctcacttattagcggtaaattattaattttagataagcccatcacagagtgaaggctcaatcctctcaactttgacaaagtgtgaaacgtctgtaacgtactctgccccccgcgggacccaggtccccgcctgctgcagagcgcactctgcgcacgtcgagccgcgaaaggcactgaggagccgccggcgccggcgcccaggacggcacgtgacccgggggcggggccgcgcgggccgcgggccagtggatggggacgggggcggggccgcggctcggggggcggggtctgtggcggcgcagctt

SEQ ID NO: 1134 - DNA, 617 bp, Homo sapiens
  source 1..617: mol_type = other DNA
ttaagacaactattttcactgagcaatttcacaagaaatatgtttttagctaaattagacatttaacaaatgccatttgtaattcagactttcccaacataaaacaatacttatgtttttttaattttaattgaagtcctgaatgtgaaactatcgccgtctaagccatatggttttatctctagcagacagaaattcttcatccaaaaggaagaatcagctgtgacgtgctgaatgtttttaaaactttaagatcatttagatgaacatgtaaattgtaatattcaatgaaaataataaatgaaataattgagatgaaatattatctaaagaatgcatgagaataactgaatctgataaagtaaaattaaaattaaaacggaataataaataattttttaagaaaaataatttcatcatgtatttctctatgctacgtacataaacgcaaacgctataaatagagttattgacatttgggaggttgatttgtttttatcaacatcgcaaaacagaaaatttaggttgcagattttctacttctttaaagataaataagccccagaaatttcactactgaaaagattattatttggccagcaggcggcggcaggcgg

SEQ ID NO: 1135 - DNA, 503 bp, Homo sapiens
  source 1..503: mol_type = other DNA
attttggaaagcaacatcatttatagttattaaaatgttttggaatattttgaccccaaattcctagttcaggaaaattatacaaaagatactctttacaatattattttcatagtaaaacttaaaaactttgcattgtgcagcagagacaatatcaataatggatggaattttatctcaccattaaatgttaaaattgtgaggaagcaaacgtttatgtcatactagatgaaatgcataaatatatacaccagctgttttagttccataattacagaagatactcaagaaactttatccaattaatcatctttttgtgccaaaattcaaaaataaataaataaataaataaataaataaataaaataaatattttaaagtttaagtattttacaacctccaaactgaaaatgcagttaacccggactctcgagctccacaaaaccgcagactcgaagaggcgcggatggtgtcgcaaaaacccgcagcgctactttacggca

SEQ ID NO: 1136 - DNA, 710 bp, Homo sapiens
  source 1..710: mol_type = other DNA
ttttcctgggagttcctcggagacccggaggtaaccgaacggtcgcaggttcctacagaccccgaccctgttcccttggccacctggtccccggtagctgcatccctgggcggcgcacgcagtgaagcgtcgcgctctggcgccggtgccgcaccgaggggtatgactacgaccgcacctcgcgccagcccgcgcagcgtgaccggcagccgccgcagacccggctcggggaggcgcggagcgcggcgcgctgaaccggagaggcgggccggctgctgccttgcgttcgccatgcgccccacccctggcggccgcgctgcctggcagcccgggaagccgcggcacagctgctcggcgcctgcagctccggctcgggggctggaaccgaagcgggggcggcgggagcgcggagaccacagcccccggggagaggcggagggggtccctggccgagggctgcaccgctgctcggcgcggactctgccagccccagcttcagccccggctcaggtcgccgcagcccgggagcctccccgcttgcgccccaaggcacgcgcggcacggcccggagtggttcgggttgaggcagccgcgccccgtcccaccttccccacacggggcatgtaatgaaggggcttgtagaagcgcactcgcccgctcccccgagggtagtcgcctttcccgcgggttgccagggaagtagaagcctg

SEQ ID NO: 1137 - DNA, 689 bp, Homo sapiens
  source 1..689: mol_type = other DNA
cttcgcccaggggcagggactggccggggagggcctcggcggcgcccgacccgcgggcgctgcacgggccgcggttaccagcaggcggtgtagtgagcgcgcctgcagcagcagcaacagcagcagcagcggtcgccgccgccgccgccgcccgccagtcccaacccgctggtgctgcagcgggaggcggggacccacctggaagcgccgcggcgccgctatcgagcttcctgcagcggtggccacccgagcaagtgccgtggcgggggcggagagcggccacggcggcggcgcctccccaagtggcccgttgcgtccgaccccgcgtgacccggatttggagccaaggaggcgacgactgcgacggctgcgacggctgcgacggcgaagcccccacgtggggcgggggtgcgcgcgcacgtgtgcgcgggcgaaaggggtgggagggcgtcgggagcgcgctcgctcagtagcggcccacgtgacgggcacgccgaaatgtttccacgtgacagggaggctgcctggggcagcgcactgtttaagatttctgcttttctgtacaaggggaaaggaggagacgtataaagcggaaagacttcctactgtctcagtgttttaaatgttcactactccgttagtgaagtgctaaactcgcgagatgcgagtgggtttgtatcgcgagatct

SEQ ID NO: 1138 - DNA, 496 bp, Homo sapiens
  source 1..496: mol_type = other DNA
ccatggagataattaactagttgactacttattagtccttcagttgattatcacactaaggccttatcctaaagtctatattagatactcaagatctaaaaattatctgaaggttggtatagtgaaagatccgtaaccttaggaataaatgataaatcctgtgactattaggtttttcctgggagttcctcggagacccggaggtaaccgaacggtcgcaggttcctacagaccccgaccctgttcccttggccacctggtccccggtagctgcatccctgggcggcgcacgcagtgaagcgtcgcgctctggcgccggtgccgcaccgaggggtatgactacgaccgcacctcgcgccagcccgcgcagcgtgaccggcagccgccgcagacccggctcggggaggcgcggagcgcggcgcgctgaaccggagaggcgggccggctgctgccttgcgttcgccatgcgccccacccctggcggccgcgctgcctg

SEQ ID NO: 1139 - DNA, 447 bp, Homo sapiens
  source 1..447: mol_type = other DNA
ggaacataatctttcagctcataaatgatgaagttatttatcttcattaatagcactgctttgtgccagacacaattctggggatacagcaatgagcaaaacagtttactaagtccctgcttttaaaaattttacatttctggcagccctctttctgccagcggcaagcacaaaggcccgaagtggttcgagcctgcgttcataaatacatgtatggatgttctcctggttgcaagggatggactgcaacccgccctcggaagaccaaacttcgcccaggggcagggactggccggggagggcctcggcggcgcccgacccgcgggcgctgcacgggccgcggttaccagcaggcggtgtagtgagcgcgcctgcagcagcagcaacagcagcagcagcggtcgccgccgccgccgccgcccgccagtcccaacccgctggtgctgc

SEQ ID NO: 1140 - DNA, 546 bp, Homo sapiens
  source 1..546: mol_type = other DNA
ctcagtgaaccgaggataggacattgtggtgcaaattgaggcctgagtgtcaatcgttaatttatttcatttttaccataaaaataagtagaagcttttatattttctacgcatcttgcatgatactttggtacatgctcccatttaccaaaaagtcagatgtcatgagacagattgaaactggcaattttaacaattttttattaatataaccttttttattcatagatttgaaaatcgagtgcattttaacagatactaaggtttcaataaatatttgatttgatcctcttgattttagcctaaggagaaaatggtgagataaatttcttctttgcataggtttgaattgggataagttaagtctaatatttctttgctcaagtttggaaacctgaggccagtagggagccggcctgggtccccgcacctgggcctggctcccgtggccccgcccctggggcgggctcccatcgaggctccgcccccacctcccctatcgccggagacgcctgcggcggccccggagacaccggaaggagccgc

SEQ ID NO: 1141 - DNA, 382 bp, Homo sapiens
  source 1..382: mol_type = other DNA
ttgagacagagtctcactctagtcacccaggtgggagttagctgggattacaggcaggtgcctggtgaactcctgacctcaacgccttggcccgccagttctgatggaatgttttgactgaagactgaacgtagaaacagtaacctgagagaggtgactactctgccaataaattgcctcggttgcctaattcagtgggaaacatcaataataaatgcatcatctataccgcctcttaacactcattcatctgagggctgagatgtaatgagcatgtgtatacacatttttttttttgtgttacgaactacaatactagttttttttttttttttttaccggtttgtaaaaggatgcaatcatccacttgagaggaaggagc

SEQ ID NO: 1142 - DNA, 355 bp, Homo sapiens
  source 1..355: mol_type = other DNA
tttttcaagtgcagtgaagaataaaaatactccgagtgtgcatgtctaatagtcaaagatgcctttatgaagctttagaaagaccaatgaagaaaaaggtggaatataaagatatttgtacttatataaatatattccttcttttctctccttttagagttaaagactgatgaagtgttcccggaaactggttgcggcagcttcagcccggtaaccatggcggaggcagccttccttccccaggcctggctggaggtggaggcaggcccaaagttagggggtcagctcgcgcacctagggccgggctggcggaaagttggcagccactctccacccccactccgggtgataacgg

SEQ ID NO: 1143 - DNA, 406 bp, Homo sapiens
  source 1..406: mol_type = other DNA
aaaaatactccgagtgtgcatgtctaatagtcaaagatgcctttatgaagctttagaaagaccaatgaagaaaaaggtggaatataaagatatttgtacttatataaatatattccttcttttctctccttttagagttaaagactgatgaagtgttcccggaaactggttgcggcagcttcagcccggtaaccatggcggaggcagccttccttccccaggcctggctggaggtggaggcaggcccaaagttagggggtcagctcgcgcacctagggccgggctggcggaaagttggcagccactctccacccccactccgggtgataacggcggaggtggggggtgctgcagccggcgctgggcccgcctggaatgcgggaactgcttgctgctggagacggcg

SEQ ID NO: 1144 - DNA, 642 bp, Homo sapiens
  source 1..642: mol_type = other DNA
aacttcaccaaatttactgaaattagtttgggtacttttttagcaagtgatatcaaatctgaatctttaataatggagttagacaataaaagacagttgtttttaattagaattcagaatttgatttttatattttactggctttcagcttcagtggaatgctaaaaatgagatttcattactatataacagtgaaatttctactctcatattttctgtaatgtcatttttcatagttaggttttagaaagtatcggttcaaacacatttctattttctgtttcaataaatattttttatattgcttattgcaggaggttattttattttactttattctcgtgaaaatatttgtttgcattttttcatttaaattgtatttattcacattaaccacatttcacattaactataactaaaatacttttctgtatttgtaacctaatttaaactctgcatataatgtgatttagtctaatttttggacatgtgctcacattaatttatttaaccatctagattaaagaaatgcttgcttctgatgatgaggaagatgtatcttctaaagtagaaaaggcttatgttccaaaaaattaaattgcaaaatagaaacataaccaagtatcaaacttttttttcata

SEQ ID NO: 1145 - DNA, 378 bp, Homo sapiens
  source 1..378: mol_type = other DNA
cagggtttcaaacttgagcccaggagttcaagggtacagtgaactgtcattgtgccactgtacttcagcctgggtgacacagcgagacctggctcacggtgtggcgccactgcactccagatcaactaccttcagctagttaatatttatagagtaatacactcagtaattgctgaatacacattcttttcaagtgaacttagtatgttcatcaagctattctggatcaaaaactttttctataccatgaatcttgggaaaaagagctaaaggttatcacaatttattacttgcttgaatcatgtcagtattcaattaactgctatttctatttataaaaatacataatatattacaaataaattaaaatttattata

SEQ ID NO: 1146 - DNA, 313 bp, Homo sapiens
  source 1..313: mol_type = other DNA
cgcctgttgtcccagctactcgggaggctgaggcaggactgcactggccatggacacatacatatactaggttattaaatctggcaactttaagaacaatcattttccacattattttaaacaaaaaacttaaaatacagtctgtaagtaaaatacagggacactttaccgcgcggcgtctcggacgcacttctcctggcgccctccgggcggcagcgctctcgagacatacctccctgaggcagcgaccggtaggaggtgccaaaagaaattctgttctcgcgaagtcttaaacttaagaaacagcaagaat

SEQ ID NO: 1147 - DNA, 360 bp, Homo sapiens
  source 1..360: mol_type = other DNA
ggcctgaggccggaacagactgacactcccgcccagactttcaagtcaaaggctactttttccattaaattgtgtgagacacgcgagtgccgcagaagcgggagaaagacttcaggccttctttgcgtagcacgcgtcggggttctaagtggattaggcaccaagaacacaaaactgggttctggtctctgaaacgtgcttaagggtagcggcctactcagtcagcggccaattaccgtccgccaccaccgccaccagctgagccagaagaggggggaggcactatggttgcactataagagccgctgccgccgttttcctctcagctacattcttgctgtttcttaagtttaagacttc

SEQ ID NO: 1148 - DNA, 350 bp, Homo sapiens
  source 1..350: mol_type = other DNA
agacacgcgagtgccgcagaagcgggagaaagacttcaggccttctttgcgtagcacgcgtcggggttctaagtggattaggcaccaagaacacaaaactgggttctggtctctgaaacgtgcttaagggtagcggcctactcagtcagcggccaattaccgtccgccaccaccgccaccagctgagccagaagaggggggaggcactatggttgcactataagagccgctgccgccgttttcctctcagctacattcttgctgtttcttaagtttaagacttcgcgagaacagaatttcttttggcacctcctaccggtcgctgcctcagggaggtatgtctcgagagc

SEQ ID NO: 1149 - DNA, 565 bp, Homo sapiens
  source 1..565: mol_type = other DNA
ccaaaatctccaacaatgaatatatatttataattagggaaatgtgtttttgaaagaaaaaatatttctcatattactgccccttaagtgatatccaaattttacattgatgcagttgcagactgcagcaccacagttaaatcctcagttttagtttagttgaagtaactaagttcagatactaaaatttcaaaaataagtatttgtttgccagaactatgaactcatgtatactagaaataactagttagctaaaatcatgtttaagtcctttacttattttaaaataacgcatttgaattttattatagatactcccttaacaatgtgaaactagtacacaaactttctggaattttgaagacgacataaattacttggaaatcctaatgttttggtattatatacttaacagacaaatagcttaaaattaaaaaatccctaaagtagaattgtcgttccttttatctgtatattaactttaacttcttttaacatagtatggagtacataaatatatagttgtgacatacccatttgtcctgtttaattaggaaataaagac

SEQ ID NO: 1150 - DNA, 348 bp, Homo sapiens
  source 1..348: mol_type = other DNA
ttatttttcttacttacccgtggaacaaagaatcaggaataaatattagagatgctgatttcccagctacccatccaagaatttgaaaacttaacaatttaacttaggatgtaatcatcaagagttttttctggccaatattaatacattttaatgtaagttagccaaaatttattagcaatacagtttttgaaagtttaacttttaagagttgcaagcttttttctaatcatgcttatctcttcaattagggttgaaaggagggaggtaccttccggtacacctttcatgatgacccctttgaaattttcttttagtgcctttggtttcagcatgaatggatatcca

SEQ ID NO: 1151 - DNA, 280 bp, Homo sapiens
  source 1..280: mol_type = other DNA
ctcctggagactagataaaaacctaaaagaattacttgtatttggtaattaagatatgatagtgatttcactccactgaaattgcatagtaagtgaaatttcagtgatcacagtgcttctaagagcagagaagtgaggaaatttcgtagctaataattcaagactgttttgctttgacttcagccctgcagagagacgtacggaccttacaactctccagatccatcccgggggaggctgggcgggcgggcggctgctccggtccaggggtggaggtcgg

SEQ ID NO: 1152 - DNA, 583 bp, Homo sapiens
  source 1..583: mol_type = other DNA
gacctcaggttgttgagattacaggtacctctgaaggaattttctaatgaggaaaaaaaatttataactattgttattcttttggaggttaaagttttaccttagtggtacctttaccatctggtaaaaggctgctcaattaatgtaccaacatatgtcagtaaatgatggctgccatttccaaaaaatcttctaatagaatttgaactatatcttcttcatccaaagaagtacttaggaaacatcttcctgcctcatagaatgaagaactttgttacacatattttgaatgtgaattctgtataaagatgtgtaaattcttttttagagataaaagagaaaaccattcactgtattttatttcatttctcctgattcagatatttttagtaatttgcttatatgtaatatttctaatgaagtgctagactatccaattacttaatttcttatacctttagataatcagtatgaaaagttcccatttataatggaaatgaaaattcttaactaaactatacatgtaatatgtatttctagaagagaataaaaacccaagtcagttattagatttaaatcacct

SEQ ID NO: 1153 - DNA, 369 bp, Homo sapiens
  source 1..369: mol_type = other DNA
agataaaaacctaaaagaattacttgtatttggtaattaagatatgatagtgatttcactccactgaaattgcatagtaagtgaaatttcagtgatcacagtgcttctaagagcagagaagtgaggaaatttcgtagctaataattcaagactgttttgctttgacttcagccctgcagagagacgtacggaccttacaactctccagatccatcccgggggaggctgggcgggcgggcggctgctccggtccaggggtggaggtcggggccctgacccgacgcagccaggcggaagcgcggctgccattggaggctgcttttacctgcgcggggcccggggcgcaaagtccgaggcgccggggggagg

SEQ ID NO: 1154 - DNA, 600 bp, Homo sapiens
  source 1..600: mol_type = other DNA
ctgttaattcacctaaaagtataggtttatcctgggaaaagtctatctcattttagaaccctcatagctttctgatttttaaactatatatagtattaccttactgttgaggagtaaatttttatctttgtatctccaacattgatatgaacatctggaaaatagtagttgctaaaatatttgtttaatatgaactcatcaatgaaagacatatctacttaacataatgcttggtatatcatagattctcaagcaaagtttactgaaaaaatgagtaataatcaggagtttatacatgtatctcagtatactataaagcaataattagctctgatgttataatttcagaatatactactgtagaagtgagaaataatttttttaaagagattacaagtaagtgttctctctctatgtccaaggcagagaacgagtatttcctttactttccttgagatgaaatacaaactttaaatgcttccttgaaaattatgaaatcctttcaaccaaatggctgcagggagttgaaatctgagctgacgtctgagtcagacagttggaatagttttcatgagtagtactacttgtgccattgctgat

SEQ ID NO: 1155 - DNA, 472 bp, Homo sapiens
  source 1..472: mol_type = other DNA
aaaactgcaatcattcctttcaatttccaggaattggtagtggcaacattttactacaataatttagctacaagcaattacagaataaaatggctcaaatcgtaattcctaatgaaaaatagattacttcatcataaatttatctccacgaaatttattagacgcatatctcttggggtatacatatcactagaaattctctctccagtggacttctaaaatcactgaaatattactaaaacagtcccagtcctctgtgtgacagtgaaccctgaggctgcgatttacaatactgggcttgaatacctgtttttaattcccacagtcatgcatccccagagatggcttggggataaaaatgagtttaaaaccaaactttctttagcggctaagtgcagctctgatgcatccgagcacggtgccctcttctctcccagtactgctctgtgcccatggaaaagggggaagaggc

SEQ ID NO: 1156 - DNA, 478 bp, Homo sapiens
  source 1..478: mol_type = other DNA
ccaatgctgtcactccattccagacagaccgtttaaactttgatttgctattttcattttaatttttatgttttaaatcttaattcagcaaaagccgaatcatcatctgtttgttccagtgctttgaacagcatccagctccacattttttttttgtactttaagaaatagggatatagtgtttactgtacgcagttgttctgaggagaaattaggaaaagttacacaatgccacgtacaactctaaattccaattaataaacaagaaatgttaactattagctttactgcagtttcttcttggtagttatcatttcatgcctgcctacatacatacaaggttttttttctttctttctcttcctagtgaggaaaaagaaagttagtggcagttggcatgctgccagctggtttctttctttctcttcctagtgaggaaaaagaaagttagtggcagttggcatgctgccagctgagt

SEQ ID NO: 1157 - DNA, 573 bp, Homo sapiens
  source 1..573: mol_type = other DNA
cattccatctatatttataaaagagattggcctgtaatttttcttgcttataaatctaagttattctctggaagaacatgtgtaagattgtgtattatttattcttcaaaatttggtagaattcagcagctaggaagtcttaaattaattatgaatttagtttttaaaaatagctatgagatagtcaaattttgtatttacttttttctagaaatttgtccacttattctcaaatttaattttacaaagttgtttatcagcagtgttttacaaattttgttaatccttttgaaaactgtctgactttttgaagtgaaagtctatataattaattttcagcctttctccatttctaatacatatgtttaaacttatatgatttttgtaacattttatcttcattgtataagttttaacaagtatcttttgtcatttaattaaatttcattatgatttcttatgtgaataatggattatttcaaattatattttttattttccaatgtattcttgttaaaaaaattggcatatactgtctgttcaatattatagtactttgaaaatttttgagac

SEQ ID NO: 1158 - DNA, 585 bp, Homo sapiens
  source 1..585: mol_type = other DNA
tatttacttgtaatattggtgtcctcatcataaagttattaaaataaacacacgagatacatgtaaattgtcttgcaaataatgtctataataatataatttttaaagccaagtatataatacctcataagctgcttaaaatatttttatttgatgatgctattgtttttaatagggccagcaaattaaaaaaacctttttagggcaggcaggtaatttaaattttttataaaagcattcacgttcctataaagacattacataacaaatgtgcggtgacacaggttgttttatatcttataaatgaagtctcctcattttcctgtggtcaataacattctacataaggaactatactacagtagaattaattgatagcattaagagatgtaaatgaatttgagatacatattctagaggtagaatgtgcaatactttttgtatgtccatatacagaaattggttgcattttccttaaataaaaagattttttaaaagttagtgagctttctttcaatttttttaatataaatttactgtctaaaagctggatcagcttatgctcctttgttgatgaagcttcaa

SEQ ID NO: 1159 - DNA, 306 bp, Homo sapiens
  source 1..306: mol_type = other DNA
tgcatgcacagaatattatgatacatatattaacatgcaaagcaatttctgtgaattttacctgaaattgagttgataatggaaaacacaatctaaccgcaaggtggggcctgagcactggcatgccccattgttctttaggaaaatttattggcgagtatattaaaaaaaaggctatgtcttgaaatttaggagagaacccctgaaaccctgcgcctggggataaactcccaccggcgcgtcacggaggacggatccgggaccctgccgcgcccgcccagcggcgcccggtcccgggtccacagc

SEQ ID NO: 1160 - DNA, 376 bp, Homo sapiens
  source 1..376: mol_type = other DNA
ctttctttaaatcaactttatttaaacttacatataatacaattcatctaacttatatacaataaaatgcaccagttttaagaatacagttggataagttatgacaaatgcatgcactcatgcaacagaatattatgatacatatattaacatgcaaagcaatttctgtgaattttacctgaaattgagttgataatggaaaacacaatctaaccgcaaggtggggcctgagcactggcatgccccattgttctttaggaaaatttattggcgagtatattaaaaaaaaggctatgtcttgaaatttaggagagaacccctgaaaccctgcgcctggggataaactcccaccggcgcgtcacggaggacggatccg

SEQ ID NO: 1161 - DNA, 723 bp, Homo sapiens
  source 1..723: mol_type = other DNA
aatctaaaacagttcaatcaatatgtattttataacttttgctacacatgccttctatatttttaccaaactttctacaggataaataggaaaggatatgaaaacctatgagagtatttttatatactgtgtagagtatttgaaacctgggtcaggcatcacctgaagtaaagctattgctatacctaagagttatgagaaccagtaaatacatttccttttctataagctataattgatatccaatccatatccttattgcaatcatatagcatagatataattatttgcatgtacagaagcagggaaataatcttagttaagcaagttgcccaaggtcaacatttggcaaatgtcacagttgaggtttaaagctatgtgtaactaatagagcttaacctcttaaacattacaaaatgaaatttccccactacaaagaggggaaaataatctggtttcaaaatcagattatacagctaaatgatcacctgtttttactggctttgcatggacaaataatccatatgatgaaatgataaagtcatgaaattttggaatagttaggtcttttataaggatatatcatatgattctgttatgctttatataatttatttttgtcataattacagtaaaatgagtcctaaattgtcattttgttgatcttagcttcaccataagtcttcctacagaaaaattgttttgattagtatttaaagtatg

SEQ ID NO: 1162 - DNA, 638 bp, Homo sapiens
  source 1..638: mol_type = other DNA
ccatttgttgaaatatatttaacctatatcacttggttgatcaattcagtcaactagttggtttgactgatttatctgcagatcctttacactggcaagagtaatgatcatatttgccctctcctctttctcatttttaaaacaagaatatgaatataaaaaagatgctaaatgaataagttaataatcattgtttatttaaagatacaactgtattgtacaaagagagggatttcttttacccgaaaaacaaaaataacaatttaaagagatttttaaaaagctcccattcagtagtacaattgggttcttttcagataattaatcattaagaaatatttaagtactattttctatttacattgcagtatatatcacctctttgaaagttaacagggattaattttctttcaaaataaatattccacttaactaattaaactcagaatttcatccaaatttgtgtacctggccactaataaaagatttttggtatgctgtctaaaatcctaatgacaaattcaaacatcagctaatctgagtatatttttctctatgattaaccagttcttaatgacaacatttcttatcttacaactgtgacatgaagagggagctgtagctcttctgagacacag

SEQ ID NO: 1163 - DNA, 636 bp, Homo sapiens
  source 1..636: mol_type = other DNA
tgggttgaaattacaagtcaaatgcatgacctttcactttgttttgatcatgttatacttgcatgacaaataatacatataattttggcatgtttctaaaatcctgaattccatttacatacatgactataaagagatatgtagccaaccaacttttttttaataccacaatcaacaataaaataaattaactgtctactgctccttagggagcaaaaatgatttcctttccttaataagtttacagaaagcttctcctattatccttttctctttagaagaagtaaaaggatcataactaacacatgtatttggtttgctattagaaaatttaaaagcaaaatgtacaacatacaacatacacagcgatattcattttgattgtttgaggaccttttgttttgcaaacagttgctttagaaaaggtgaaaatacagtcattctcgatgtttaaataaagctatatttttaagacaggaacataaaaagagcccatttttgctaaatggttagatttaattagaagcccaatcctgattcagcaaataggtatttgccagtagcaatgagcattgtgtcccagtgcgtgggtaaatcatgaagtcactgggtacttttttgcttaggaaattcctg

SEQ ID NO: 1164 - DNA, 651 bp, Homo sapiens
  source 1..651: mol_type = other DNA
aagaaattagattatcaaaggttcttttttaatctgagaattacaatgaaaccaccaaaagaacatgttctagttatttggacacacgtacatttaacctatgctacaagtcaagaacaaacttgaccagtagttggatttttagtactactctgacaaaatactgataggtatttaggatcttcatgtattttgaacaatctgctgttgacatattaataacattgtttggaatgattcctgaagtatgatgcttgcaacattcctgcagcaccaaaaagtacctattgtttctgaaagcaaagcagcttaagttttatcctactttctaggttttaaatattggagaatcatttttttcttgaaaaaaaggtaaatatgcttatttaattgatggctgcattcattagtagaatcagtggtttacaaatacatctgaaaacatagctgcttccagctcagaaattttgcaataaaaaaaaaatccatgtttgaattttgtggcatgcacaggacacttaactggcttttaaacgtgacattgagagtaaagagcctgagtttaatcaaaaactatagtcaataaaagtttagctggctctactcgcaatttaaaaaaatgtaactttcattaacgatctcaggtccctg

SEQ ID NO: 1165 - DNA, 468 bp, Homo sapiens
  source 1..468: mol_type = other DNA
aaagacgcatcccgggcgcctctccgaagtccaggccgggagcaagctcctgggcctagaggggagggggccccgagccgctggtcatccccctgcgctcagcctcggagcgccgcgcttcgcggcgctcctccagaaataaaataaatgtttttaaagtgcatgagcgcgcgccggcggagcgcgcggaggacccagcgcgcagtggaggggcgcgagctggcgcaggccgcctccggggcgcgttccacggccgtgcgcgcgcgtccctcgccgccaccgccgcccggacagccctgcggccgccccgccggcggagccggggccggcctggtcctcgggcggctgcttggccaccgccaccgccgtccgaagggcctcctccccgccgcttgggcgcacagccgcagcagctgctcaagctggaggtgactccagttcagacctcgcggagagtctgtgtcagga

SEQ ID NO: 1166 - DNA, 716 bp, Homo sapiens
  source 1..716: mol_type = other DNA
atagtacagactgaacaatatggtattgttagggcataaatgcctacgttcatatatttacaatgaaaatacaagcaagatcaaattaattcattgattgttgcatgcctgaataaaatcatcataataatgaaaaactgttctcattttttaaggcacaattcaagatgtggtttactttattaagttgtcccccataaaaagcagtttctaaataagacactctggcattgacattagaagaatcttcattttaatctctgtgttgtaattttctttgtaaagatacacaaaataatttgtcctttctaagctcaacttatctgtaagatggggataaaagcttctaccttacaggtttgttgaaagattaaatggtataatataaatgcctaagataataagtgttcaataaatagtagtgaatattgttattgttattgtttgtgtatagtatattatttattgaatatacatgtgacacgtgacttaataaaactttagactatgcattctttcaggataggaaagtttaataaaccgatttacaattatttgttgattgaacacattaactttcaccttgacttttaaaaagaatagtcttggcatatatgaaaaaaaattcaaaaaagttttttctaaatgaccttgttttaaaatcacttaactttggtatcctgaaatctgaggattccaccaagataatatgataa

SEQ ID NO: 1167 - DNA, 490 bp, Homo sapiens
  source 1..490: mol_type = other DNA
taaggaattcatgtgttaggacttcttccagttctatacaattcattttatgagaagacatgattgcttcccgttttcaagaaaaagaatattctttaatttctatgtaaatctttatcgaactaggtcagagctgtccctcaagatgcttagataaaagatctgaagactctcttcaaagattcaaggtggccggaggcgctcaggccagcgcctctcgcatctctgaggaggggcgccgcccaggcgctcgaggcagcggcccctcccctcctgtccccaggacctcctgactccgagggggcagaggattccccgagtccttccgtcgccgcccccggcgcccgcgcctctcggcacgtcgtgcacccccggccgcagcaggcgaatggtctggcccgtcggtagccgccacccgcttgggcagcgacagctgttccaggcactccgcgtcgagcaccggagtcccgagccgtggctgccacgggcg

SEQ ID NO: 1168 - DNA, 412 bp, Homo sapiens
  source 1..412: mol_type = other DNA
tttctacagggaaaactgtacacttgtcctaaggaattcatgtgttaggacttcttccagttctatacaattcattttatgagaagacatgattgcttcccgttttcaagaaaaagaatattctttaatttctatgtaaatctttatcgaactaggtcagagctgtccctcaagatgcttagataaaagatctgaagactctcttcaaagattcaaggtggccggaggcgctcaggccagcgcctctcgcatctctgaggaggggcgccgcccaggcgctcgaggcagcggcccctcccctcctgtccccaggacctcctgactccgagggggcagaggattccccgagtccttccgtcgccgcccccggcgcccgcgcctctcggcacgtcgtgcacccccggccgcagca

SEQ ID NO: 1169 - DNA, 629 bp, Homo sapiens
  source 1..629: mol_type = other DNA
cttgggaacatagaataaattgggaagttacagtctattttgaatttggaataaatggaaagtactctaagatttatattaataaaaacgcaactaacaattggtaatgtatttattttcagatctacacagaagttgctaaatacaatgctgtacatcaacagaagttctgcagaaatagtaaaattttcctttatctccacgtgacggggcctaataaccccgaggacaacgtcgaccgtgcctagggaccaggcttttcctgtggccgatgcggggcagatgcagacccaggtgcggctcctctcggacctggaggccgcgtggcgggccgctgaacagtattccgcgactgcactccagggcaccgggaccgccagggtgagagctcagcgatgggcacgcgagcgccagcccgggcgaccgcgggggaagaagcggtccacgccacctcaggcccccgccccaggctctgccagctgggggtccaccgcccgcccccggggtcccgggcctgcgcgtcacttccggcgcgcgcgcccgcctgcgaagatacagtcgggccagggcctggcctgggcgcgcggctgcccgggggcgcgcagagagggcggaccgcgcgaaggggg

SEQ ID NO: 1170 - DNA, 748 bp, Homo sapiens
  source 1..748: mol_type = other DNA
gcgcgcctataatcccagctactcggatgtctgaggggcgagaatcgctggtcgcagtgagcagaggtcgcaccactgcactcgaggtgtttctaagtgagatcactaaatttttaaaattaacatagaaggaacttttttctctcaattgaaatttcttatggtggattttatataatttaaatcttgtattttgttcttttcaaattttagaatgttttaaaatgtaccttatattgataagcaatactgacatactaagtgtatgtagttcctgtatgtattaggcctaaatcaatgaattagaaacattcaattttttaaagtgctatttcacattgttttatttatacgtgttataaatttgttttgcaagagttttttcatacccatttcatactagtttttttttatgaaaagttagctgcttataaggattcataaaatctgtatattagttgatttcctagaaaaaatacaacctgtctttagcatgttgtgtcatagacttgtcatacatgtttaactagttttctttttaaagaatgtttagcctactatatatataaagctttatatttaatgctctcattagcctatatattaatattaaaacacccaaacataaagccttttaggcagatattgcaagtttttaaaatcctcaactctagctgaaaagtgttttgctaagaaaagctcagtaatgtgctgttttatattaacaggaaacagaacagcagtagtg

SEQ ID NO: 1171 - DNA, 475 bp, Homo sapiens
  source 1..475: mol_type = other DNA
aatgtgttgcttagccctaccaaggccatagccttagaaggcagacagtggttcgtcacaaataaatgtttcttaatttgttgtttttccagagccatgaaatcattgttttgataattcttgtttcttaggaagatttcctaactgttaaaatggcaagttcacgtgctgaagttctacttaacaaggaaccattctatagattctttgtaccattttggtacaaattttggatctctggtaatcaaaacaatctgttcaccatgaggaattttacatttctgcaataattgccagtaatgctgaatttaatggaagtttacaaataagttattctatgattctcctttaaaaatgcagatatacatatatgtatataatattattctcttccataacacagaatgtttaaatggttaacatttgtgctgcagtatagctttctggctcatgaaaaatgaaagctatcagcgat

SEQ ID NO: 1172 - DNA, 579 bp, Homo sapiens
  source 1..579: mol_type = other DNA
gagccatgaaatcattgttttgataattcttgtttcttaggaagatttcctaactgttaaaatggcaagttcacgtgctgaagttctacttaacaaggaaccattctatagattctttgtaccattttggtacaaattttggatctctggtaatcaaaacaatctgttcaccatgaggaattttacatttctgcaataattgccagtaatgctgaatttaatggaagtttacaaataagttattctatgattctcctttaaaaatgcagatatacatatatgtatataatattattctcttccataacacagaatgtttaaatggttaacatttgtgctgcagtatagctttctggctcatgaaaaatgaaagctatcagcgatatatcagtgaggtccacagctagcagtaagagctggtgctccttgccaggtttgaagaaaacagcaattttttcatatctttgaaagatgtaaaaagcgtagattagtgcttaaatttaagaaatctggtaatttataatcatgtggctctaaaataaaaaggtattttatttgtctggtggattaaagctttag

SEQ ID NO: 1173 - DNA, 267 bp, Homo sapiens
  source 1..267: mol_type = other DNA
ctctctcttcccagctgctaagagaggctggagaaactgcactccagcctgcatctttagcttttctctgactaactctcagagttgctttacggttcttatataatgaatcaatcaagtacaaagtgctttgtaaagagagctataaagcaccctgcatgtgtaaggtgcaactgcaagaatattctgtgtgcaagcttaaaacttcattggggttgtctgggggcccccgcccctccgacccccgccgaccggcgctggactaca

SEQ ID NO: 1174 - DNA, 394 bp, Homo sapiens
  source 1..394: mol_type = other DNA
gtaactaatatagtaccgggtactcatgaattatgctttttgtccaactgggataaacagttaaaattaaacctcccagaactaattgttttcgttttgtttttgctggcttcatttggcaggataaatgccaaaataaaagtttgcatcctttccgaaatatgttacttcctgcataatgaagtaaaaggtgctttccttattcaagagattacttaaaaatctctaaaaaaagagtaacatgtgttctctggttaactcttatttttccctctggggagaaaaggaaatagtttacagcttgtttttctttgggagaattctgatttcttgcactaattgtgctgaaggtagttagcaaaagtggctgagagccagcctggttttatttcac

SEQ ID NO: 1175 - DNA, 568 bp, Homo sapiens
  source 1..568: mol_type = other DNA
ttcagatgatatgaatgccattcagtagctatgatcaatatggaaaatgagtaagcttacttttcaacagactatgttgtgcattgaaaaaaaaattttatcacatcatataattaagcaactgtgagaggcttcttcattgaatttgttttctaagaaaaaagcaagggccttttttaaggacatagattatgtcactcagatttttttaatattgacattattggcttcaattaaagttgtatcatcacacaaattaaaatattagcaagtttctaaaacatgaaaaatagatactatcgaaataatagctttattttggctctaagatttggcaattgactcatatttggccttaccagaggaaatccaatatctttttttaagcaggaaaatatcaagttggcagttctgcactgtgctatcaatggaaaaaacctcagatgtaatccttggttggttgtttcctgaacaaataattcagtactcctttattatacactggttgcttaatcagaaacttggttccaaaacaactgagtaaaaatcatgcacagttaaaaatgga

SEQ ID NO: 1176 - DNA, 525 bp, Homo sapiens
  source 1..525: mol_type = other DNA
gactatgttgtgcattgaaaaaaaaattttatcacatcatataattaagcaactgtgagaggcttcttcattgaatttgttttctaagaaaaaagcaagggccttttttaaggacatagattatgtcactcagatttttttaatattgacattattggcttcaattaaagttgtatcatcacacaaattaaaatattagcaagtttctaaaacatgaaaaatagatactatcgaaataatagctttattttggctctaagatttggcaattgactcatatttggccttaccagaggaaatccaatatctttttttaagcaggaaaatatcaagttggcagttctgcactgtgctatcaatggaaaaaacctcagatgtaatccttggttggttgtttcctgaacaaataattcagtactcctttattatacactggttgcttaatcagaaacttggttccaaaacaactgagtaaaaatcatgcacagttaaaaatggactttctttctagatgacttctcatta

SEQ ID NO: 1177 - DNA, 333 bp, Homo sapiens
  source 1..333: mol_type = other DNA
ggcatgggccactgcaccagcctgatacttttaagatgttaagatcataccattcttttcctcaaaattctataagagatcttcatctcacataattctccttgataaccagcttttctcagattaacaaaccttggctcaatgtaacgttttcaatgaagcctactctgagaatcctatttaaaattgcaacgtactttgggagtccagcactgcactccagcctcattttaggtttccctcaagtaaaacgtaaactaatccaggcacggtttttgttgttgtttatacagctgggcaaactgcctaaaactttgcgaccccggaagtaat

SEQ ID NO: 1178 - DNA, 357 bp, Homo sapiens
  source 1..357: mol_type = other DNA
ggaaacacaaaaataagttttattttaaaaagtacaataagcattaattctccagagtaaatctgctccccgcccgcccggctccgctgggtacgcgacagcgacctccgcgcctgctctccgcctcgggtcagcggggctgggggtgtcacagagagacacgcctgtacggggcgggggtgtgcgggtgactcacgccgggtgcacagtagctcctacctctccctaatcggcccctctggagaggaaaatagcctccagcagccgccgcgcccaccgactgctccccctcctccaggctcgcgctcggggccgggtgtggagctggaacggcgcgcatgcgcaccgagggtggct

SEQ ID NO: 1179 - DNA, 521 bp, Homo sapiens
  source 1..521: mol_type = other DNA
agctttcacattctttttacatataatgtcatttcattccgaaaaacatataatttactttgaaataaggaaataaagcctcagtaacttaagtgagagccagaattcaaaccctggttttaaccccaatcattacatccgtatgaattaagtaaaatgctaaacttacgatgtacatttttgcgaactgatataaactgttgagtaaataaattagattttgttgaccagtgcaattacacatgcttccctaataaaaaatttgaaatccattaatgataaaattattaacattaatggaatgtggaaacacaaaaataagttttattttaaaaagtacaataagcattaattctccagagtaaatctgctccccgcccgcccggctccgctgggtacgcgacagcgacctccgcgcctgctctccgcctcgggtcagcggggctgggggtgtcacagagagacacgcctgtacggggcgggggtgtgcgggtgactcacgccgggtgcacagtagctcc

SEQ ID NO: 1180 - DNA, 339 bp, Homo sapiens
  source 1..339: mol_type = other DNA
ctgtgcttttaactttcagaataggtggaatacccactcagcagagaatttatccccttcagggaattcagccggggtacttgatttttaaccaaaattagatgcttgaattcaaaccacgatcttaactaagacctgatatccgtaagtaaaaatttttggtattccagctttcttttgagtagcaaaagaaaaacaaagtcttttgatccccttggtgatacccatttgagtcgaacggccctctcggcgccgcagacactggctgcgcccggggacgctcgaagcccgacctcccacgcccgccccggagtgccccgacgcgcagcaggccccgcc

SEQ ID NO: 1181 - DNA, 339 bp, Homo sapiens; identical to SEQ ID NO: 1180
  source 1..339: mol_type = other DNA

SEQ ID NO: 1182 - DNA, 355 bp, Homo sapiens
  source 1..355: mol_type = other DNA
tttttttggttgctgtccatgattaaaagtaaaaattaaaaactgtgcttttaactttcagaataggtggaatacccactcagcagagaatttatccccttcagggaattcagccggggtacttgatttttaaccaaaattagatgcttgaattcaaaccacgatcttaactaagacctgatatccgtaagtaaaaatttttggtattccagctttcttttgagtagcaaaagaaaaacaaagtcttttgatccccttggtgatacccatttgagtcgaacggccctctcggcgccgcagacactggctgcgcccggggacgctcgaagcccgacctcccacgcccgccccggag

SEQ ID NO: 1183 - DNA, 266 bp, Homo sapiens
  source 1..266: mol_type = other DNA
actgtatcagagactgtaagggtggagagtattcttcattcagaacatctaactggcacgtaggtgacacctctgagccatataaaagaatttagaggtcagttaagtctctggcctgcaattcacttcactcaggagttcctgctggttctgaagcaggaaacccatggttcattgtctcgcaccaagaaaatttagaccagctctctctagggagagagaggggcttcccagagaaggctggtgggccccaccctaatcttatt

SEQ ID NO: 1184 - DNA, 568 bp, Homo sapiens
  source 1..568: mol_type = other DNA
catggaaacatttggaaccgagtttccattcttcattaagcatgtttaacacaataatagtgagatggagaaacaaagttctgttttgcctggcatcatggtgtgtagataagctaagcttgcacaaatggcatgggacataaaggagtcattaatttcattcctaagtgacaggaaagcaatagccatgcctctggttggtttgtactttgccctgatcactgaggacccgggatggtagcatcaaggatcaccgctattagctgtgtgactatgaaaaagtcattttgcctgtaataaaaaaggttattgcaagaaataaatatcccaaaatgactacctgacatcacaaatgatcaatttaaggttgtcatttcattggaaaaacttgatttgtgtctgtggcccaaagaaattgttactaaagtattcatttttcctcattattatgattggaaagtgtcctctccaagattcatgttggaacttaatctccaaagcaatcctattaagaggggtcatgaggactgctccctcatggatgggattaaagcccttaaagaatagc

SEQ ID NO: 1185 - DNA, 482 bp, Homo sapiens
  source 1..482: mol_type = other DNA
aagacatttttgcataaactgagttcacgacgaccccggtccctgcagagtcccggcccccacagagccccggccccggacgctgcaggcgtcagaagggggcgggggcgtaacaggtgccgcagccgcagctgcgcccgcagcgcgcgcggaccgcagggataaggctccacggttgctcgcctagcaactggcggagccaatgggaggcggcggggcctgcggcgccggcgcgcgggggcggggtgggaacctcagcccgcagcggaggaggggccgcgggcgggaggcgctgcgaggcgctgctggccctcgggctgcgggagccgggctaggacgccgagcggtgactccccgccgctcccgggggccgtgacggtgagcagcagcgcctcgcgtcggggattgtgacgcgccccgccagggaggggcgggcgggggtgggcgccggcaaggggcgggcgcgcgcggaggtgagagcc

SEQ ID NO: 1186 - DNA, 380 bp, Homo sapiens
  source 1..380: mol_type = other DNA
aggagtctccttaaaacaccaaacctgtttttcgccttttgaataaatcaagaacatctttgtgaattttaggctgccatgaaaccagggaggagacagcctgaccctggccaaagacatttttgcataaactgagttcacgacgaccccggtccctgcagagtcccggcccccacagagccccggccccggacgctgcaggcgtcagaagggggcgggggcgtaacaggtgccgcagccgcagctgcgcccgcagcgcgcgcggaccgcagggataaggctccacggttgctcgcctagcaactggcggagccaatgggaggcggcggggcctgcggcgccggcgcgcgggggcggggtgggaacctcagcccgcagcg

SEQ ID NO: 1187 - DNA, 594 bp, Homo sapiens
  source 1..594: mol_type = other DNA
ctttgtcatcccagagaccacacccaacggtcggcttggctctcagggcgcagcggcttacacctgtaatcctagcctgcagtcagcagtgatcgcaggtcaggcgacagagtgagacccggtctcaccgggccgggagtgccaggtgcggccgcccgggagctggagggtgcgtgggccactttgccgcagggcccaccgcccgggtccctctgtaaggcgcttctccggcagacaccccgccgccgtaccgcagcggggcggcgggcctgcgcccagacaggtgcctcctgccgctccctggccgcgccatgcctcgaggcatggaggtgctggacctgccggtgtgcaaccgcgcctcgggcctgtcctgggggccgcaccacaggtcagtgccccacggcgcccttggcgtgccccacgcctccctgggggccccaccgccgcccccgcgtcgccgacccccttctccgggagcgcggggaggctggtccaccccaactggggaagctccggtccccggtaggaggcggcggggcggggcggggcggggcagccccttgggggcggggcgggagcgcctggccacgcgcc

SEQ ID NO: 1188 - DNA, 504 bp, Homo sapiens
  source 1..504: mol_type = other DNA
cagaatctctttgatggtttctaatgtttggaagacatctgggcacacaactctcattctgagtgggaaggacttcacctcacagaaagcacaactttgaacatttctgtgacttcgttatttatatttcagctttgaaaaacaaagtatccaggactatttgcccgaggccaagaaacctcttacaagaaccttaaatattgttggttgcctgcctgcctcccacgggggtggtgggtgtgggctgcacttcccgcagccacttcaaacaactttctaatacggagctccgaggtatgtttagtgggcgcttttccctctcggggccggccgaccacccacctggggacgatcccaggcaggaacgcgtctgcaagagcgctgccctcccgcggctcgcacgggcccctttgagcgcagctcggggacgctctccagtgggaacgtcgaacgcacccggcggggcggggcggggcagggaggggccgctgtccctaggtccct

SEQ ID NO: 1189 - DNA, 464 bp, Homo sapiens
  source 1..464: mol_type = other DNA
tacaatgacacacaattttgcacacttacacatacgtatatatttcatatatatatatatatatatatatatatatatatatatgtttggagagcagacggaggaggggcccgctggcagcgccaaccggctgggcctgtttgtttggaaggcacagcctagccttatttaactaactgcaagcagttaatataaagtaaagccatcgactttaggaagatttctccagtccagcatctcatttcgccctcgccgtaacgcgtccgccgaagctgccggccgcgtggtgcgcgcagaccccggcccgagagcaggcgccgcagtcgtggagtgcggcgggcagttctcctctgtgtgcaccctgcaggatgcggcgcgtggccaggcgctcccgccccgcccccaaggggctgccccgccccgccccgccccgccgcctcctaccggggaccggagcttcccca

SEQ ID NO: 1190 - DNA, 740 bp, Homo sapiens
  source 1..740: mol_type = other DNA
ctacttcttggaaaagtttcctacagaagagtctagtcgactgtccactcatttcacatctgcaggcttgaaacgctaagacattcaagatttcaccttgtaagcggggcctcacactcaccggagctaggcgctatagatcccgcacccgcggagcccggcaaccacctgaggggccttggccaggagggggtggccccccggcgccggcggcagctccggagcaaacctggcaaacccgagcagggcggtgcgggttgctggaacgggcacaacgccggcttcctccggacggcctcctgcgggcccccgacagggcgcggcgggaacccgagccgggagcgggaggatgcgcgggcggcggacggggcgctctcctcccgtctgactctgggcggagcggggctcgaggctgctggagtcgctcgctgactcgccctgcgccctcgccgcggacaccggagctgcggccgctccccgctgtcccccaggtgagcccgcggggcgctgccccggggcgtcgggtgtcgcgggaacggcgcccgcggcgcacagggagggccggggaggccgggaggcagcgagctgtcggggacgccgcgggaaggccgggccgggcagtcggcgccatggagggcaggcgggctggagctgggcgcgagatgcagctgttccgcgccgcccccaagccgcccgcaggtcagtggaggagcgcgcctgccgggcctgcccggggctgg

SEQ ID NO: 1191 - DNA, 634 bp, Homo sapiens
  source 1..634: mol_type = other DNA
aaattgcacttgagaattgaaacagcataaaattcttgtaccctgttgcaaaaatttattagtaatccatgcatactggtttaggatttgaaaacaggttttataaaaggtttgctaggtatcgatctaatttcaggaataccctagtagggaaattcagtgacctttccaaagtaattataattaaaattaaccaaagttcctgcctgagggtattaggtttaatatttacagataatttatgaagaaaaagattacggttcaaagtctacttcttggaaaagtttcctacagaagagtctagtcgactgtccactcatttcacatctgcaggcttgaaacgctaagacattcaagatttcaccttgtaagcggggcctcacactcaccggagctaggcgctatagatcccgcacccgcggagcccggcaaccacctgaggggccttggccaggagggggtggccccccggcgccggcggcagctccggagcaaacctggcaaacccgagcagggcggtgcgggttgctggaacgggcacaacgccggcttcctccggacggcctcctgcgggcccccgacagggcgcggcgggaacccgagccgggagcgggaggatgcgcgggcggcggac

SEQ ID NO: 1192 - DNA, 469 bp, Homo sapiens
  source 1..469: mol_type = other DNA
gctgggacttggtttcaccgtgttagccaggatagtccggaactctcatatgttataaatgatcagccttttctcaattaaagattttatttaaattaggtgtgaaaatttatttacaccaattacagcagtcaattacattactttattaaattctgccactttacaaattagacagttataattattttttaagggaaaatgaaccttgggttactcacggattcaagtttttacagcttgagtcaaattctaaacaaaagttagggttctggggcgcccacgacaaccagtggggcgcagcttcctctccactccctaggagggcccagctcgctgcagggggtgggtgcccgaaaggattctgagcgggcagcctccttaatccacaccccagaaagattcttctctggcaccgagcctgttagacctggggtcaggccgggccacgctctgtcagtctcgcagc

SEQ ID NO: 1193 - DNA, 406 bp, Homo sapiens
  source 1..406: mol_type = other DNA
catatggttacaccattccagaaggataccatatggaaaatgacacccagatttgggatgcaactttgtaatgccctttaaaatgttagaagcatcactgaaagatagtacaataagctcagtcaagcaggaaatgatttggttcttggcttgggaagtccaccacccctagaggtcttccaaagacaaaattcttaggtcttctatgcctttggtgattcgtctcttctcagagctcctcagaaatgagcaaaagcagcccccgcccctgcttgggaacgtgccgggcccgcctccagcctcagcccctccgagggggagcaggagcgtggcgcaaccgccagggggcgcagctggcggggccacgcgaggggcgggccctggggtggcttccggtttccggttt

SEQ ID NO: 1194 - DNA, 895 bp, Homo sapiens
  source 1..895: mol_type = other DNA
cgtgagcacgccgggggacacgggcggagcctacagcagccctcgccgtcacctgaggcgtggggtcccggggcgcgggtccccggagggcacccggagcagttgggggcgctcgggcctcggccgcgcggcgggcaggaggccgccccccagagccatgggctcgctcacgcccctccgcactccccggagggctccgaggacagcggagaggagcgaagacgactacgacgccgactactgcccggcggctcgcagtctgcgcccgagcctgagggggcggaggcggaacggcgtcccccgcctcccccagcggcgggctcctccctgggggcggagggcggccgcctggagacaggcaggctgcggaccatgcacgacctgccccctgactcgggcgcgcggcggggcggcaggggcttggcggatcacagcttccccgcgggagcccgggctccgggccagccgccttcccgcggcgccgcgtaccgccgagcctgcccccgggacggggagcggggaggcggcggacgccctcggcagcaggtgtccccgccccggtcgcctcagagggagccgcggggaggccagctgcggactcctcggatgcggccgtcctgcagcagaagcctcgagagcctccgggtgggtgccaagccgcctcccttccagcggtggccgagcgacagctggatcaggtgcggcgcgcaccgggactgggacgagcccccgccacgtggaggcacggctggagtggggaccgcgcccgggcggctgcacccaccggcctccagcctccaggctgcaaggaccacggctgctcctcgggaagccctttcagggatccagcggggtcctctgtcgcagtggcaaaggagaccgccaggaaggcccc

SEQ ID NO: 1195 - DNA, 483 bp, Homo sapiens
  source 1..483: mol_type = other DNA
atcctgtctcaataaataaataaataatcagttgagtgcatactccattacacagattaactaatgaggaagtgcgtttgtgtgtgaccaaaacagtaactggcaacaaaggctgagagtgccagctgcctgggcactgacggaccccacccatgcgcaggcgtggcttgaggaaacgcccgctgtgggcggagccacccgaaaggctccggtcgggggcgggaacaggatcggcccgcgggctggcgtcgataggctgccgcagagacagggcgggctctgctaagcgacgcgcctcgccgtggggcggtgcctgcgcctgagcctctacgagagggaaggaacgctgctccgagctccgcgtcgcgtcgcgtagattcgcgtcgccgtcgacctcagaggcggggccggaagcgctacggtttgacccccgagtccgaggccgaagcccccagccagggcggggcggcgcagcccgagctc

SEQ ID NO: 1196 - DNA, 412 bp, Homo sapiens
  source 1..412: mol_type = other DNA
cagtgaagagaattcttgcaggaaggagttcagtttcattcattccaaagtgccctttcataaatggaagcagcatctaagacaatggattgtcaggtgttaaaagtgtgggcccaacacgtacacaggttaatacatcaattattatttacaaaacactgtttttcctgtatttccagatggtgaatcagacaccagacgtaacaatatttccatatttgggtatagcaagcattcttgacagcttcaaatgttgttaaatatagatttaacttctcttcccagagcaggaaattctttggaattccttgtttttcacgcaacatcatgatttaaaataaaagcacagtggagatccagtctgccgcactgattcctttaaaatcacattaaagtttttttaacaagggtc

SEQ ID NO: 1197 - DNA, 566 bp, Homo sapiens
  source 1..566: mol_type = other DNA
ggatctcctagaaatccagagtttcctaaaagctgggatcagagttctggcaagaaggctgtagcctgggccttggccctagaccgtagtctgtgctggtcagaccacacagattttccggatactatgattttaaaaggatacaagcaaattgggaaaccaaatcactagttacttttcagaactgttttcagatatgcaaatgctgttttgtgaaaaaaccattatagctcttcaaaagtgggctagactttgtaagcacgcaaggtttaaactgttcaggtaaagaccaggaagccctccagctgctctgtccagaccgaggccggctctccaagtccgcgctggggacgatgggaggtgtgcacctgcgacagaacacaggtaccgccaggtccgggtagcggtggcttttcgccgaggtcccccgcccggcgctcgccgctacaactcccgcctgggctggcgcgagacccgcgagcgccggagtgggcgcgcgggatgcgcgcgggccggcgcccggagctctgggcatgctcagtcgcgcgggcagggctccgggcgcg

SEQ ID NO: 1198 - DNA, 573 bp, Homo sapiens
  source 1..573: mol_type = other DNA
tttgcagtaaaaatgtcagcagattttaagacatcaccaataccattagtgtgattgataaactttccctgcaagtttcaaaaactttttgcataattttaataaaaattatcatgtaagactcatatgctctaggataactacttatcctttttaatgtttaaggctattcagacttcataatttagcagtgctaatgctgactttcctgataagcacaatgagacagtgaagagaattcttgcaggaaggagttcagtttcattcattccaaagtgccctttcataaatggaagcagcatctaagacaatggattgtcaggtgttaaaagtgtgggcccaacacgtacacaggttaatacatcaattattatttacaaaacactgtttttcctgtatttccagatggtgaatcagacaccagacgtaacaatatttccatatttgggtatagcaagcattcttgacagcttcaaatgttgttaaatatagatttaacttctcttcccagagcaggaaattctttggaattccttgtttttcacgcaacatcatgatttaaaataaaagcac

SEQ ID NO: 1199 - DNA, 322 bp, Homo sapiens
  source 1..322: mol_type = other DNA
cagaaatgcatctcagtacagtgcaattcaaggcatcgaatcccagctccttgccaaggaggccgtcctggtcctccatggggtccttgagaccagccgagggttgggacagcccaagttgggaatgcagcccacggcgccatcaatacatgtgcactgatgtcaatttatggtaaaaagttagtccactgaattgcattccagactaaacttctggatgcagatccccttcagagcggtggagctggggcgcagacagcagccgcagccgtcccggaccagcccgactcccggcgcgcacttgggcgcctccagggggcag

SEQ ID NO: 1200 - DNA, 365 bp, Homo sapiens
  source 1..365: mol_type = other DNA
ctcctgcatccgtgaggaagtataagtcagcctcccggagaactccccgcgtcggacttccaacccaggcagtgggaatttgccagacgatgggcaagtttcccttcataaatgccactgtgggtattaatttgcaattcactgaactttgctaataaacatcatgccaaagctttgggacccttcccgggtgaggaaaaaattttgaactgttttcttgacgggtctgggagacagacacacaggggaggcgcttggcagcagcccgcgccaaccagcattcctgagatgtttgagaattctggaacgcgcagcagagccgacgtcactgacacgcggcgcctccgccggcccgtataaaaggc

SEQ ID NO: 1201 - DNA, 429 bp, Homo sapiens
  source 1..429: mol_type = other DNA
agaaagaatggaaagaaaaattaatgccctctttcctactttgattcccagttatacactgagtttgtgtctgtcactgacagttgatctcatattatcttcgcaatgacactgggagatttatattaataataccatgctcctagtttatagcttcaagaaactaaagcttgcaaaggtgtaacatcaggtgtgtcctttttcatttacacccagtagggcgtggagggtggcctggcccaggaggcttccctaaggaaaccgcatgatctcatataatctttgcaatgacactgggagatttatattaataataccatggtccctagtttatagctttaagaaactaaagcttggaaaggcctaataacactctttacacccagcagggcgtggagggtggccgagccgtaaagagctctacaagtc

SEQ ID NO: 1202 - DNA, 264 bp, Homo sapiens
  source 1..264: mol_type = other DNA
tgtttttgcaaaaatcaaaatttgctacaaaagttggagaaggtactggcctccgggtcgtacccaggcggaggcgagcgcgcccggggtgcggtggcccagcccgaccccgaagggctggcgaacgggggcgcctgggccggacgctggagcggtgaaatttaacaccggccggatttgcttggctcctcttctcaggcaaagcagccggcggcagtcaacgccgagcgcctgcagttgccaccggccccctcgcaccgaaac

SEQ ID NO: 1203 - DNA, 265 bp, Homo sapiens
  source 1..265: mol_type = other DNA
caatgattctcagtgatatgcagcattcattcacttggagtttccagtcttattaataaggaagataaaatcagaacgtttgttttctgtttgtttgtgtttttgcaaaaatcaaaatttgctacaaaagttggagaaggtactggcctccgggtcgtacccaggcggaggcgagcgcgcccggggtgcggtggcccagcccgaccccgaagggctggcgaacgggggcgcctgggccggacgctggagcggtgaaatttaacac

SEQ ID NO: 1204 - DNA, 352 bp, Homo sapiens
  source 1..352: mol_type = other DNA
tactaattctgtctcccgctttaaattatgaaagggacaattacagtactggtgaaaaacattgctggagtgctttagtaaatacgattcttaacatgaatattaagtagaggcattgaatgaagatatttttccaattaaaatcttgctttgcttcttcaggactttataaaccagacccctcaggcttcctcattaaatactactatacatttaaaaggaggttttcaaatcttctctttaaaaagcattcggtaacgtacacaaatgctaacccggaccaatcggcagcctgctgcgggcctgacgggaggggtggggccgccgttgccagagaagccactagccggtt

SEQ ID NO: 1205 - DNA, 485 bp, Homo sapiens
  source 1..485: mol_type = other DNA
cagaaatgttccgagacggggccacagcagggaagagtcacaggttataaaactttttctttagttttacaagttactaagataatttagtaactaagagagtggttcattctagtacgatgataatactcccaaccttgaacaagttacttagatttttttgaacattagttctgtcacccatctctcattggctaattttcataatcagaatttccaagactcattattttcatttgaaaagtacaaattatacctgagtattgatatttaaatgagttcatttgtaaactttaaagcatgaggtaaatatcaggtattatgaatcagtcataaaatatttgcgatggttactatatattactgaaggagaaatctattcttcttcctgaggcagagagaaagttcctggcagttggccctctctgggggatatctgatatctgacctccagccatcagctgagagcttgcccaagtacttgg

SEQ ID NO: 1206 - DNA, 443 bp, Homo sapiens
  source 1..443: mol_type = other DNA
ttttttgaacattagttctgtcacccatctctcattggctaattttcataatcagaatttccaagactcattattttcatttgaaaagtacaaattatacctgagtattgatatttaaatgagttcatttgtaaactttaaagcatgaggtaaatatcaggtattatgaatcagtcataaaatatttgcgatggttactatatattactgaaggagaaatctattcttcttcctgaggcagagagaaagttcctggcagttggccctctctgggggatatctgatatctgacctccagccatcagctgagagcttgcccaagtacttgggaaaatcactatagacttctgtgtttctacttccagcctcttctttctgaaaagttataaaatgaatgaagggcagaatgtttcttgcccaaccatgattcaggatggatccac

SEQ ID NO: 1207 - DNA, 631 bp, Homo sapiens
  source 1..631: mol_type = other DNA
gctaccaatgcctttcttcacagaattggaaaaaactactttaaagttcatatggacaagatgaaattaatgcttatcaccatctgaaatttatagatatttcaagtatttcaatatttgctgaggtttaattcatgttcctagggacatttagtttcagcaaaataatttaatgatgttaattggaattttattatgctttgcaaagtaagatatacattttatctttactctccattataaaatagtcaataatatctacatcacttgctaatgcttttggtacaaatggatgtggaatataattgaatattttctgaggttatgtcaaggtaaacaaaaccaccattgtggtaaagacctgaatatatggcttacaaaatgtttactgaataagcagaacagtctgcatggcttggtaaacatttccaagaagtaaacaaacctatcagcggccaagctgcttgtcacctgtgagtgcttccaaggaaccggatgtgccacccttaccccagcattttacaagtacgcaatttgagactaagatattgttatcattctcctattgaagacaagagcaatagtaaagttaaacgtgtgtctatattttcatatctgtatatatataatg

SEQ ID NO: 1208 - DNA, 408 bp, Homo sapiens
  source 1..408: mol_type = other DNA
taccactcctgggtatctatccagaagcacaatttgcaattgcaaaatatgaaactagtggataaagaaaatgtgatatatatatatacacatatacctacatacatacacacatgaaataatggcatttgcagcagccaatttcagaaatggaaaaacatcatatgttctcactcatgagtgggagctaagcccacattgggtacagtgtacactgccaaaatctcagaaattataattaaagtcaaacaggaaaatgtgcaatgcattttataaaatgatctgatttattctgactcttagtcacttttatgtaacatataattaagcaatcaggtgaattagtcatgtattttctcatgtaataccttcaacatcccataatcagccaatactggtaagttttag

SEQ ID NO: 1209 - DNA, 498 bp, Homo sapiens
  source 1..498: mol_type = other DNA
aaagaatgaaacaacacaaatatttacgttttcttcttgtccatctgtgactgttgtttcagtaaaacacggaagcttgaatgtaagcaaacagcattttcttattcttgaaatatgtttcaagcacggatgtcacatcatattctcatttgttattaaaattagtcacgcttaattgttaaggagtcaagtaaccggccaggagcttgagggcaggacattgtctccgacacttgattcagtgcctggcacacttcaattataacgtttgctgtgtgtcgcgcggtgccataccgtgacccagatattgtaattctagtaactcctatatttcctcttaaaacaaaaagagaaatggcatacagaggcgccgagaccccgcggctcgccctcgccgcttcctccacaggagccgggcggagctcccggcgcgccccggggctgcgccgccgcaatcctcaaggggtcgctgttcccgcgataacctcgagaaaggct

SEQ ID NO: 1210 - DNA, 545 bp, Homo sapiens
  source 1..545: mol_type = other DNA
tttcaagcacggatgtcacatcatattctcatttgttattaaaattagtcacgcttaattgttaaggagtcaagtaaccggccaggagcttgagggcaggacattgtctccgacacttgattcagtgcctggcacacttcaattataacgtttgctgtgtgtcgcgcggtgccataccgtgacccagatattgtaattctagtaactcctatatttcctcttaaaacaaaaagagaaatggcatacagaggcgccgagaccccgcggctcgccctcgccgcttcctccacaggagccgggcggagctcccggcgcgccccggggctgcgccgccgcaatcctcaaggggtcgctgttcccgcgataacctcgagaaaggctccgccccgcggcccgcgcttgtttttcccttgggacccgggtccacacggcggggtcgcccgtccatctccggctcgcccgcggggcccatcgtcgacgttagcggccgccgttcacggaaacgacagctgcggctgcggggctggcgccgcctccctccacct

SEQ ID NO: 1211 - DNA, 336 bp, Homo sapiens
  source 1..336: mol_type = other DNA
gcatcataatcctgaggagccccatgaaacccgctgctcgggatcaagacataccgcggggggcggggagcgggaccccggaggcgctggtgtccgcttcaaacagcgcgaagcggctgccgggctctcgcctccgcggccgcgcgcccctccaccggcgctgcggctgcgccgccctcatccccgccgcgcacgcatccgcgtacgctgctcggagtgcctgatttgggtaatcgaaagcacccagtgattgtatttgatgacttttaagctttcatatgccgttatttaatacctgtcacttccaaatgagagatgtaagggcaacggccctta

SEQ ID NO: 1212 - DNA, 265 bp, Homo sapiens
  source 1..265: mol_type = other DNA
gctccggcggcagcgcctcctcggcgactcagcccggggcagttcagttcgcatcataatcctgaggagccccatgaaacccgctgctcgggatcaagacataccgcggggggcggggagcgggaccccggaggcgctggtgtccgcttcaaacagcgcgaagcggctgccgggctctcgcctccgcggccgcgcgcccctccaccggcgctgcggctgcgccgccctcatccccgccgcgcacgcatccgcgtacgctgctcgg

SEQ ID NO: 1213 - DNA, 190 bp, Homo sapiens
  source 1..190: mol_type = other DNA
agagttggaagtctcgtcatgatgcattctggctgcgaaccctaagggccgttgcccttacatctctcatttggaagtgacaggtattaaataacggcatatgaaagcttaaaagtcatcaaatacaatcactgggtgctttcgattacccaaatcaggcactccgagcagcgtacgcggatgcgtgcgc

SEQ ID NO: 1214 - DNA, 222 bp, Homo sapiens
  source 1..222: mol_type = other DNA
tgcattctggctgcgaaccctaagggccgttgcccttacatctctcatttggaagtgacaggtattaaataacggcatatgaaagcttaaaagtcatcaaatacaatcactgggtgctttcgattacccaaatcaggcactccgagcagcgtacgcggatgcgtgcgcggcggggatgagggcggcgcagccgcagcgccggtggaggggcgcgcggccgcg

SEQ ID NO: 1215 - DNA, 406 bp, Homo sapiens
  source 1..406: mol_type = other DNA
taaacacaaattgtttacactttgctagagagctcttaacagaatttagagtagtttaaaaaagttaaaacacacactaaatcatatgggaggggtgtatgtttcttatatccatatacatttttaaagtgcccttaaactaaattgctcatgttaagagtcctctggtaaactctgaattagcactcattatacataaccaggtataacctaattaatgaatattttcggtatataaaggaagggtttctttttaaagctttcttttgaagtttcttcagaaacagataattttcaattgagtaactgtgaattaggtaatgtatggtattcaataatgccagatatcaaacattaggaagtatgcctaagccatgttttagcagcctcagccgtattatcatgt

SEQ ID NO: 1216 - DNA, 508 bp, Homo sapiens
  source 1..508: mol_type = other DNA
tgaatttgcactagagcagttccaattcatgcctctacatcctcgcacaaaactttttctatgaaaagatttaccctaactcagctccacagtctggattgctgacagtacaaggaagtagatactggctggcattgttggtgaaagttataacctcctgcctgggagatcacaaatacaatttcagaaaaggttctgatactcttgtttttgataaagcattttttcaactaaccatgaattaagatgaatgtctcatgaaatttattggaatgtttaatcatatttgctaagaaatgtttaattttttaaatggtgattagtgttaaaaatcaatttaaatcatgactaatatggtaaaaagataaagcataaagcagtatttctcattcctgcctcctcaatatctaatactgggaagatacttcaaagaatattgagattgtctgaagttttagttaagattttcacacattaatatcaaaaaagtaagtttagtatttgtttc

SEQ ID NO: 1217 - DNA, 622 bp, Homo sapiens
  source 1..622: mol_type = other DNA
gaaagttataacctcctgcctgggagatcacaaatacaatttcagaaaaggttctgatactcttgtttttgataaagcattttttcaactaaccatgaattaagatgaatgtctcatgaaatttattggaatgtttaatcatatttgctaagaaatgtttaattttttaaatggtgattagtgttaaaaatcaatttaaatcatgactaatatggtaaaaagataaagcataaagcagtatttctcattcctgcctcctcaatatctaatactgggaagatacttcaaagaatattgagattgtctgaagttttagttaagattttcacacattaatatcaaaaaagtaagtttagtatttgtttcgctttataatgtgttttaaagcattgcatttacaaaacaaggaaaatgctgtaaatattgcatattttatgtatttggaccaaaaggttacaagtaattagacaaaagtggttttgcaccaattttatgtcaagtaaaaccatcagacctactgttcttgtatttctcatttaactttactgttaagacatcactgaaatgaacttcagtaagctttcaattttgatacacagttcattattcataacttgaggca

SEQ ID NO: 1218 - DNA, 460 bp, Homo sapiens
  source 1..460: mol_type = other DNA
aatggtagctattctatacctatggtttaagtaaatatttctgaataagcttcaccatactgtaagcattttaggtagattgccttaaaggttaaaacatttataaacaaaagaactttcctcacaataatataaaaatattaaaagaacataggcaggctttttttaaatttggctttaaattgacttttataggtatttcctgaaagtgtatacaaattatttcccaaaataaagcaccacttcaaggtgtggtttgacattacataggtgcattaactcttttaggtaactagagcagtacttgaagggccagagagtaaatattttaggctttgcagcctgtaaacaaatgagcacagttatgttccaataaaactttatttacaaaaacagattcctctttgtgtctctactctagatgcctaaaagagtttatatacttctaaaagctcctaac

SEQ ID NO: 1219 - DNA, 326 bp, Homo sapiens
  source 1..326: mol_type = other DNA
tacaggctgcttaattggcagtaaataacttgatctttttacagaataagaacaaattaatcggtttaggctaagctttataaattgattcctatattatatcccagttgcatctcttttaaaaaaacactcattgatcttcaaaatgaaatgttaaaatacgaaaaaccagtttcgcaactaacttgtgaactgcagctgcacttcccggggcagaacccgggagggaacgaggctccggcggggccgccgcctccccactcctctcggctctgtcccggggcccggcgggggctggggaggggccgggcgcggccgcagcggag

SEQ ID NO: 1220 - DNA, 353 bp, Homo sapiens
  source 1..353: mol_type = other DNA
aatcagttttcactctgcagagctgagttgatattgagaacagctggtcttcagtatctatgtagaaattcttcatttgctaccactgtaatacaatatatatagaatatatatattttctgtgtagcttttagtatctctactttatcacaatttagtggaattgtaggtaggtgtgactatctactgatatgtaataggctctcaataaatgactgtcaaatgaatgaatgaatgaatgaatgaatgaatgaaaaagtttctcttgataacaagtaacaacaaccaactctactagttttgaaaaaaacagaaggtcaggtgacagacctgaatcaattagtcatggttca

SEQ ID NO: 1221 - DNA, 495 bp, Homo sapiens
  source 1..495: mol_type = other DNA
attcaaaacttgatttatactagaagtgactagaggctgtgagattgcaaatcttgcaattttccgcctctcatcctccacagtgaggagggtagtcgggaaaggctttctcccaaggatccaggaaatgcctgctaggcactttcaaactagtatttagctagcaactattatttatcgtgaattaaagaaacaacgtgcttgtggggatagaagtccactgccctaagatgtaggaagagacccatttctgagaaagatggggtctcctctcagatagaggggatggcagtccccgaggggcgagcgggcgcgggtcctcagggtccccgtgcgctgagaaggcaggtgaggccccgccctgcgtctcgactccggatcccgggtcgcgaagggcagcccaagcgggtccccggccccaggcgcccgggtcacttcacccggttttattattccgcctgaacaatccggccgcccagtggctgagggtcgctg

SEQ ID NO: 1222 - DNA, 628 bp, Homo sapiens
  source 1..628: mol_type = other DNA
tatcgtgaattaaagaaacaacgtgcttgtggggatagaagtccactgccctaagatgtaggaagagacccatttctgagaaagatggggtctcctctcagatagaggggatggcagtccccgaggggcgagcgggcgcgggtcctcagggtccccgtgcgctgagaaggcaggtgaggccccgccctgcgtctcgactccggatcccgggtcgcgaagggcagcccaagcgggtccccggccccaggcgcccgggtcacttcacccggttttattattccgcctgaacaatccggccgcccagtggctgagggtcgctgccgcggagggagcgagcgagccggctagaggccagcgccgccgccgccgccgcctccgagccgggcagcaacagccccggcagcggcgcaggctccagcgcgccgggcccggccggccgcagcccccgacgcctgggtgcgcctgcctgccggcctccgcaccgtccgccgccgctcccggggctgttgtgtctgcgactgctcccggccggaggtgcagggagctcagccgagccgccgctgccatcccggagcgagcaagcgagcgagcgcgcgggcgcgggcgggggcgggggcccccgggcggg

SEQ ID NO: 1223 - DNA, 317 bp, Homo sapiens
  source 1..317: mol_type = other DNA
ggagacttcgaaattccttaataccatagtgtcattaaaaacaaacacctagatttactttacttagctatattttactaagtagtcaggttagctttaatgcttaccacgccaaggaaaggtggcttttttcctttcccggtcacacaagttaggcccaagtttcggcaaggtggcaatggctgccctcgccgcggagtcgggtcggaagacgccccgccccctcgccgcgctccgccccaccttccctgcccgatgaggggcagtggctgccgccgtcacgtgtgctggcagccgccaagtgaggccgcttggtg

SEQ ID NO: 1224 - DNA, 350 bp, Homo sapiens
  source 1..350: mol_type = other DNA
gtcacacaagttaggcccaagtttcggcaaggtggcaatggctgccctcgccgcggagtcgggtcggaagacgccccgccccctcgccgcgctccgccccaccttccctgcccgatgaggggcagtggctgccgccgtcacgtgtgctggcagccgccaagtgaggccgcttggtgcgacaggaggagctgcagccgcggccgcagcgcccgcacggagaggcttgaggcggctcctggcgtcgcccagagggagcgactagacgaacagtccggtgagggcggcgagaggaagcccgctacgagtgccctagctccccgcagccgcgcctccagcaggggctgcgcctc

SEQ ID NO: 1225 - DNA, 252 bp, Homo sapiens
  source 1..252: mol_type = other DNA
aacgtaccggtaactgttattgttgttagtaatagtggtattacaattttttggctaattaataaatctagggatattttgcaatatctagatgttctcgcaagttttctatatgtagcataagggtatgcaaggcaagataccataacctatataaacttacatgacctgtataaagatttcaaatttcttagaaagaatcaatgagacttttcctaggtagttacgttgactcgcttagcaacatagcaa

SEQ ID NO: 1226 - DNA, 254 bp, Homo sapiens
  source 1..254: mol_type = other DNA
ttctaaggaagctagtatctcccaccttctcaagaaccggccgggcgccaggctcctgtagtcccagctactcgggaggctgaggcaggtgcagtgagcccagatcgcgccactgcactccagcctggctgattcgttgctttctgcaaccattgctttccacaaccaatcagactgattgtggagccactacttcatttacatagggtgtacaccatgtaaccaatgggaaacctctagagggtatttaaacc

SEQ ID NO: 1227 - DNA, 563 bp, Homo sapiens
  source 1..563: mol_type = other DNA
gactgagtgatttttaagccatctgaaattcttatttattgaaagtttctctctttgtgaatcaaattgtcatactgaatataatgtaactacttttttatgtctcagggtcattatgaaaaatgattttaatactgagcttatggaaatgccctaaaactttttgtgtttagaacattaaaaatgccaatccatgattgtgttttaccaccattaatttactgttgactttaaaatccaaagcacatttatatctgatgtatttattataacatttattaccatattaacaagattgaggttcttcaggatttatctattatctaaatattccctactgtctgttagacactaaaaattgactgtctggccaaataggtgattgtggaatgaaattaaatgaaaagtcatatcatatatgagatagacaagttttttataagggtctataaaatttaaagatttcagaaagagtatatggtgtattccctctgtaatagatacatattaagattttactgccttaaaacttgctttaacttactcaaagttatctacagaag

SEQ ID NO: 1228 - DNA, 520 bp, Homo sapiens
  source 1..520: mol_type = other DNA
acttaagtaattgattagctaaagtcacaactcttcaatttagaacttaagatgaattataaaaatgatggattttttgtggtggcttatccacaaacagtttagttgtagaataaaacttatgagtgacacactggaaacaattgggccacttggctttcgctttggagactagagccaatagatgagttgttggattagaggaactaactcaacttctacatgttttaacatttgcaactagggatagtaagtacaacatttttaactctcatccaaatttatgtggttgtaccttttggctcttaagatatcctaaatatttaaaatatttagatatcctaaatataggatatagagtttgtaccaaatatgaatgaatattgtgaccagacacctgtttgataaatagtttactgaactagcagacgtgtggaaaaagaatcagatcttgattcttctgggtttatactggttgtaaaacagaatgatattagaaaatgttttccttgtttaagtg

SEQ ID NO: 1229 - DNA, 418 bp, Homo sapiens
  source 1..418: mol_type = other DNA
gaggtgctgtactaaaaggaaaaattgtgttaccttttttaaaaatttttatgttcttgtgaggaaaaaagtaaaacatgtttaattttatttgactttatgacattgcttttcaacaagcaaatgttaaatgtgttaagccttgtagtactagtgttgtaactttccaaagctagctgtgttttctaactgaaatctcactgttctcagtatgcaaaacctgaaatcagaaagcaaatggataatgctggccattttgcctttctgatgggaatctgaagctgcaaggtgcttgtactctttcaaatttttgcaactctaatgtctcacttttaaaggaacagcttgattgcaaaggagaaaatagataagcaatgaatttatctccaacttcctagcttatgacttctaaaaagtg

SEQ ID NO: 1230 - DNA, 481 bp, Homo sapiens
  source 1..481: mol_type = other DNA
ggaccgcccccacctccaagaagtagaggtcctccaagaggttttggagccctccttcacattccatgaattttaagttcttccaggggaccactcccagtaaaaagaggaccaccaccaagaagtgggggtccttctcctaagagatctgcaccttcaggactagtaagagctcctctatcacgtggaagagatagttatggaggtccacctcgaagggaaccgctcccctctcgtagagatgtttatttgtccccaagaccaagttctcgtgatacaagagattatgcaccaccaccacgagattatacttaccgtgattatggtcattgatgactatccatcaatatggcgatagagatggatatggtcgtgatcgtgactattcagatcatccagggcccccgccatcttatggtggaagcctctacaagaaagagggcttcccccttctgtagaaagggggtacccttcttcacgt

SEQ ID NO: 1231 - DNA, 503 bp, Homo sapiens
  source 1..503: mol_type = other DNA
caaaagaaagtaattttcctggttttttgaatggatagccataccttaaaaccactggtgctgagctgctaggaggcgagcttgttggagctgcccaggaaagctcttcattggtgggcttaataccagtatttggcaacaacaaatcaagaggatttgcttttgtggaccgcccccacctccaagaagtagaggtcctccaagaggttttggagccctccttcacattccatgaattttaagttcttccaggggaccactcccagtaaaaagaggaccaccaccaagaagtgggggtccttctcctaagagatctgcaccttcaggactagtaagagctcctctatcacgtggaagagatagttatggaggtccacctcgaagggaaccgctcccctctcgtagagatgtttatttgtccccaagaccaagttctcgtgatacaagagattatgcaccaccaccacgagattatacttaccgtgattatggtcattgatgac

SEQ ID NO: 1232 - DNA, 540 bp, Homo sapiens
  source 1..540: mol_type = other DNA
cactcatgtgatatgaagtcaaaaagcacaaattcatatgtagtaaaggaattggattgcaaatgaaggcaaaactgttttttcagaaccagaatttgcatgcctgttaaggcaaattctagccctgcaaatatcagccctaaagctgtgctgtggccagtgatagtttctattgaagtacaattttttccccaaatacattatctctcagagggagtcctcagcagatctgttcagtcaacagatgttaacaaataattctttataaaataaagtaacaaactatatgttgtttcaaagccgagggctaggagttccataccagcatggccaacatggttccaagctactcaggtggctgaggcacaagaatggcttgagcagtgagccaagattgcgccgctgcactccagcctggaaaaagggctcctgttaattatacacacttttgagcttaatataattgcatttattctgttgttttcctctgccatctagtggcaaaagaaagtaattttcctggttttttgaatggatagc

SEQ ID NO: 1233 - DNA, 455 bp, Homo sapiens
  source 1..455: mol_type = other DNA
tgaagtataaattgatcatttggatttaagtctagaatcttcattttaaacagtctaaaccgttgataataaatcgacagtttcatttctatagatcatgcgttttggaatatggactttatgcataatatgctataattagatcacgtagatcatcctgatgttttcttcacagaaattgtttttagggagaaactagaaaaatacaatgaaaatattgtttagaattaaaagccatatacctttttattttctccaacttttcgatgacatctaaatttaatgtatttatctcatttgtgaatatatatatatgcaatgttgattgcattagaaaatgctgctataaactagcttgattcaaaggttctggtcttggaattccatcattcaatggtttctcaaagctgcagagagctctaggaaagtgagaattgcaaaatgtccactggatt

SEQ ID NO: 1234 - DNA, 176 bp, Homo sapiens
  source 1..176: mol_type = other DNA
tacctagttgaagagtatattcctttaatcaatgtatacttttgttcctcatcctcttaaaatagaagaggaaaaatatccaaacataaaattcaatttttaacaaaaaagtcaccagtggtttttgctgatcaaactcatatccaggaaagtgaagttcccgattcgcgcggcgg

SEQ ID NO: 1235 - DNA, 146 bp, Homo sapiens
  source 1..146: mol_type = other DNA
catcctcttaaaatagaagaggaaaaatatccaaacataaaattcaatttttaacaaaaaagtcaccagtggtttttgctgatcaaactcatatccaggaaagtgaagttcccgattcgcgcggcggccccgcgtccgaatcccgc

SEQ ID NO: 1236 - DNA, 215 bp, Homo sapiens
  source 1..215: mol_type = other DNA
tcctaaaggtgagcgggggaccccacagccagtgcgcgctgagtcagtacctagttgaagagtatattcctttaatcaatgtatacttttgttcctcatcctcttaaaatagaagaggaaaaatatccaaacataaaattcaatttttaacaaaaaagtcaccagtggtttttgctgatcaaactcatatccaggaaagtgaagttcccgattcg

SEQ ID NO: 1237 - DNA, 640 bp, Homo sapiens
  source 1..640: mol_type = other DNA
aaaaatactctaaagtagttttaataatgatgaaggagtttgaataaaactattttataaaatatgagtaagatagaacaatatatttcatttcatatatacataatgtataattttttatgtgtgtgtaactaaattaacaaataaatgctcacaagggttttttacaatttgtttttactgtaaaatagagttaataccacctattctgcatgtaagtagtcatgaatgaaatagatacataacatatgacgctcttagaaaacaatttatgaaaaatcaaattataatatactaaataaaaagaggaaaaacatctataaattaaatatttttacaattattcactcagtttctataaaatcatagggaaatacttgttatgagatttaagagtacaatgcatggactgtgtgctgggcattaagtgccagggactaggagaattgtctcctgttataggaaattatatctaagaattaatgtgatgcctcctaattctacaattctcaaacagatctccaatcttaaaatatattccatttttttcaatacctaatggacatgtttttaaaacaataaatggtctctaagatctcaatccagaaattgcatttatggttactgagtcacttccttg

SEQ ID NO: 1238 - DNA, 561 bp, Homo sapiens
  source 1..561: mol_type = other DNA
accacatcactataaatatatttttaaatgaaatgttcactcagtattttatttgcttttgctgtaaaatagagataatgccacttattctgtatgctagaagtcattactgaattagacataaaacacataaaaataaaatcacactataataaatttaaaaataaaaaacctataaataaaatatttctacaatttttcacttagtaaataagcagcatagtttatgattttagacaactaataaagtctttctgtgagtacacaactgcacctctcaaagaataggtttagattgtagctgaaaattaacatgatagtttctcaaattgactcaatccatgagacatgtatcattgtattcaaaacctaatgggcattttgttagacaacaaatggtctctaagatttccaacaacaacaaaaaaaatttgaagcttctggttgagatccactaattccatttatggtagtggagtcagtgatttgaacgaagtactttcagtttcatattactctaaatccattacaaatctgcttagcttctaaatatttcatcaa

SEQ ID NO: 1239 - DNA, 494 bp, Homo sapiens
  source 1..494: mol_type = other DNA
accacatcactataaatatatttttaaatgaaatgttcactcagtattttatttgcttttgctgtaaaatagagataatgccacttattctgtatgctagaagtcattactgaattagacataaaacacataaaaataaaatcacactataataaatttaaaaataaaaaacctataaataaaatatttctacaatttttcacttagtaaataagcagcatagtttatgattttagacaactaataaagtctttctgtgagtacacaactgcacctctcaaagaataggtttagattgtagctgaaaattaacatgatagtttctcaaattgactcaatccatgagacatgtatcattgtattcaaaacctaatgggcattttgttagacaacaaatggtctctaagatttccaacaacaacaaaaaaaatttgaagcttctggttgagatccactaattccatttatggtagtggagtcagtgatttgaacga

SEQ ID NO: 1240 - DNA, 487 bp, Homo sapiens
  source 1..487: mol_type = other DNA
gcggcttcattcttgaagtcagtgagaccgagaacgggttcaaaccttacttggtagctttgtaatattaacaagttgttaaatttcttggtaacattgtggtgaaatgtgattcaaacctgtaatcccagcacaaaaggataacttaagcccagaagtttgaggttagagtgaactatgattgtcattgcactcaacaaatacaaaataagaatacaatggtatgatttatataaagaagttatcactgtgtctataaatgagagttaccttcatcattatttattatttattaaatgttaagtgtcaggatggacctaagaaaatattatatgaggctttctcatccacatgcttaacatgagataaatagcactattttaaatgacccaatgaaggggtttttaaaacttaatatagcaagcagtctctaagatcttttccaatgataaagtggaaagttcctggttgttaccacagctgtcaa

SEQ ID NO: 1241 - DNA, 369 bp, Homo sapiens
  source 1..369: mol_type = other DNA
aaaaggataacttaagcccagaagtttgaggttagagtgaactatgattgtcattgcactcaacaaatacaaaataagaatacaatggtatgatttatataaagaagttatcactgtgtctataaatgagagttaccttcatcattatttattatttattaaatgttaagtgtcaggatggacctaagaaaatattatatgaggctttctcatccacatgcttaacatgagataaatagcactattttaaatgacccaatgaaggggtttttaaaacttaatatagcaagcagtctctaagatcttttccaatgataaagtggaaagttcctggttgttaccacagctgtcaatctctgacattgacat

SEQ ID NO: 1242 - DNA, 497 bp, Homo sapiens
  source 1..497: mol_type = other DNA
gaaattcaggtgtttcaaacacatttacctggatttttttttttaagagagagggacttcctgacattaaaaaatggtaagagaaaaaagcacctgatttcttattactggtcctatttaaaacttgacttagctttattttcactttcaatattgcttataggaaataaatgttaagttttgaatcaaaatcggccagtaattttacctgattaagtgcctaaaattttgtacttattaatttgcaaatgtttaatcagacattactaaacaaataaatggggaatcattacccatttatttcagatagatttcccaaactctgttaacaaactggctagtcattttaggaactcctaattataaattatgcatgagatgtttgtgttttgaaagagaagtatacatagatatccaacatattttatggttaatgaaaaaataaagaaaaagatgaaacaacattcatgtctgctgctctgagtttccctctgtct

SEQ ID NO: 1243 - DNA, 386 bp, Homo sapiens
  source 1..386: mol_type = other DNA
ttgtgaagtccctgggtgggttgttggataaagcactaaggcctgagacctgcctcctgtcaataggagcttgtacactgttatgcactgcacattctttctgagttgtttcacctaagataatgaactccagttccatccatgttgctgtaaaagacatggttcattctttttttaaaccagtagtgtgtgtgtgcatgtgtgaacacatttaaaatatcaaaagttctgagaaaaatgcttaaaatattcttggtttctaaggctttttcttgtgtgcctaggaaactaaagccacctgactttattaaaagcatggattaattttacttccaagtttatgaaacaactagcttactcagcttttttttccttttataaaggaa

SEQ ID NO: 1244 - DNA, 346 bp, Homo sapiens
  source 1..346: mol_type = other DNA
aaatttaaattagaataaaaatttatcgaatgaccaagtgaagaaatgttctttcagcttttccttcaagactcagaaaaaagatatcttcagtgacacaaagacagccttctttttccctttcagggtgactcaaattgtactgagacacaactgctcagatgccccaaatgctgagtttctttttttaaatggagatgtgaccaccatagcaactaaaagaattgaatcagtatgataaaaatatttatgtccctagaattgcagttgcccctccctatcccgggtaaagaaaagtaaggggacttccttttcgaagaggaggttcccgcgtgctgcacccgac

SEQ ID NO: 1245 - DNA, 362 bp, Homo sapiens
  source 1..362: mol_type = other DNA
gaggttgtcttcccaagagaatatcttttgaacaaacgtccttttcattttggtttagaaatagaaacaggccaactggccagcaactagttgtctatcagttgataaggcattcccagaagactgtgttacttagtgagattttccaaacagagagctgccagctttcaagacgtcagagtgctttttcatcctgaaataggtggttttgctgtgcaccgtcaactccttcccactgcccctcccgtattgcaggggcggtgcagggaggagttcccagaagggctatttttagtggtggctgctcccctctaacttacccaggggaggagctgcggtggctgagccgacgctgcgcgcac

SEQ ID NO: 1246 - DNA, 553 bp, Homo sapiens
  source 1..553: mol_type = other DNA
agattttccaaacagagagctgccagctttcaagacgtcagagtgctttttcatcctgaaataggtggttttgctgtgcaccgtcaactccttcccactgcccctcccgtattgcaggggcggtgcagggaggagttcccagaagggctatttttagtggtggctgctcccctctaacttacccaggggaggagctgcggtggctgagccgacgctgcgcgcacagccgcctgtggcagccgaatcctccctcagagtccgccaggtgggcgtctcaggaagcggagagaggatttctctcctggtcctggagaaggcccccggcggccggcggcatccctcgctggcgagtcccgggagcgaggtggtctctgcaggggaggaagttcccgggcggcgcggcctgcgtcacagcggggctggcaccgcggagtcgactcggcgggcggtggcgaccccggggccgggcgctgggcggcgctggctgccgctagccgggctgcgtgcggggcggcgctggaggcggctccgtccgcggccggggaggcggagg

SEQ ID NO: 1247 - DNA, 404 bp, Homo sapiens
  source 1..404: mol_type = other DNA
caaactgtaaactttgggagtcatgttaataaatattttttcccccacagctggccactgctctggaggggagatcttctgtattttgttacctattaaaccatacaaactctctatatatcattaaattatcactcagtacagtacttggacaaaataggaatagtctactgttaactgtttttagattaatgactttgaatttttcctaagagagattttaagaagttagatagtctaaaaaaaacaaaggctctgcaggtttaagtttttttcttaagaatttaaatatttttcttgatatttcaaaacataattgtgtccttaaaaacatggtaataattgacagggtttttaaaatgcactgagtactttgtggaaggatgctaagatcccttgagaag

SEQ ID NO: 1248 - DNA, 791 bp, Homo sapiens
  source 1..791: mol_type = other DNA
gccgggccagtcgcggcactcgccggctgcggttggtcccagagctgcagcgcctgcacgggcccggagcgtcatgtgctgctgctcccgtcgccgctgctgccgctgccgctgccgccgcccgtggtgccccggctcctccgccgcgcttcgaggtggcagccgcgggcggggccgcgggagcagggtccagggtgcagcgcgccttcgccgccccggcgcgtcccggtgcagccgccgcccgccgcgggtgatgccgccacctccggcctcagcataagccgtggcttggcggccgagctgcaccccaaggttggtgcgcacctctcccggcaggggccgggggctgcgagggaaggcgacgcgcaggtggagccgcgccgagccggagcgcgcaaccctggcgcaggcgccgcggcccgagctgcggttgcggccgggaactcattcggggacgtcggtggcggcgagcggagtgggctcccgtttgctgccgccagggagcgtcggccgcttcggccccgggcggccggccctgcgggaggggagtgcggcttcctggctcctgaacccctcgcgcgcgctccctccgccctatcggaaaggcggggagagccggttccttgctggcccggcgtccaaagttccttcctgtgcagggtgggctgcgctgggagcccggcgggcgggggcggggaggtgaaggcccgcgccccgccccccgcgcctgtgggagggagctgggggcccgcaggtgcacccagccgtccgcgggccgtctccgggttggg

SEQ ID NO: 1249 - DNA, 268 bp, Homo sapiens
  source 1..268: mol_type = other DNA
cagagcgagactctgtctccagagccatgggaacagttttttaataaactgagcttcatatgtagaatgattattgtttgtattacattctccattttgagtatggaaccataaaaagccatctgtgtactctttttaacactgtactgaagtccacttaagtcagagttcatatggaacttctctgtgattacatagcacagagaatcttttgagccagcgaggcacaagacaagtctctcacagctgctgagctgtactatgaact

SEQ ID NO: 1250 - DNA, 315 bp, Homo sapiens
  source 1..315: mol_type = other DNA
aaactgagcttcatatgtagaatgattattgtttgtattacattctccattttgagtatggaaccataaaaagccatctgtgtactctttttaacactgtactgaagtccacttaagtcagagttcatatggaacttctctgtgattacatagcacagagaatcttttgagccagcgaggcacaagacaagtctctcacagctgctgagctgtactatgaactttaaaaatttgcataaatccccccgaggtaattattttctgggagcgagcgggcgggcgggtggctggcagcgaggccaccagcaggggggg

SEQ ID NO: 1251 - DNA, 353 bp, Homo sapiens
  source 1..353: mol_type = other DNA
agccatctgtgtactctttttaacactgtactgaagtccacttaagtcagagttcatatggaacttctctgtgattacatagcacagagaatcttttgagccagcgaggcacaagacaagtctctcacagctgctgagctgtactatgaactttaaaaatttgcataaatccccccgaggtaattattttctgggagcgagcgggcgggcgggtggctggcagcgaggccaccagcagggggggcccgggccgaggccgcgccacctcggcaccacgcgggcagccggtgcggcggggtcgccacggccaggggagcgctgggtgcccaccatggcagatgaagcggtgaccc

SEQ ID NO: 1252 - DNA, 487 bp, Homo sapiens
  source 1..487: mol_type = other DNA
agcgagcgggcgggcgggtggctggcagcgaggccaccagcagggggggcccgggccgaggccgcgccacctcggcaccacgcgggcagccggtgcggcggggtcgccacggccaggggagcgctgggtgcccaccatggcagatgaagcggtgaccccgccgtggttccagcctccggagctcgcccaagccgcgtccccagagagcgccctgagagaacagggtggccgcttggtccaggtgctcggatctgcatctccagctctgtgctgcagtctgccaaactctggctgctgccgccctgggttcgggccggcggaaggccctgggcgtgcgctgcggagccgcctgcgaggactccactagggcgctttccaggctggactgccccgggctgcgctggagctgccagtgctcggggagtcttcctggagtccccagctgccctctctctcctccagctgctgctgcctgaagcagcagctc

SEQ ID NO: 1253 - DNA, 556 bp, Homo sapiens
  source 1..556: mol_type = other DNA
tgaaacaggattccaccgccttcctgtaggcattgtggtggctttgcatccaagccattgcttgatgttgccagtatcttgcatatacaatgggtgccgaaacttgtgggcgcgcagcttgcagatcctgggcggtggccaagcagatctctataaaaataatttaaaaattttttaaaagaattattatttccattttatttcagtgctttgtcctttaagaaaatttattgacatagcgatatttgccacaggcttctagaaacgtcccagacttctgtgtctccatggaggaaaccccgtaagtacttacaaatgttatgattagtcatccctagccaatactaagcaaaaggtaggcatgcggttttgggcaggaagaaggcattccaaccggcttctttcgctcttgccaggttcaaacatggcgggccgcagccggccagggtcagcacctccgagcgtgacagcggacctgcttcccgccccccacgcgagggcccgcccaccagcccgcgtcagccaatagcaggccgcgccgatggggctggtagcg

SEQ ID NO: 1254 - DNA, 518 bp, Homo sapiens
  source 1..518: mol_type = other DNA
atcgtggaactcaaacctgggcctgttccaccttaaagggcctaggcatgcctagtgcttgggtcgggcaccaccatatttggagcgtgcctaacccgagaacagtggtgcaccgctccaccagcgcgaagcttcccgggagctcctcgctggccacccccgcggcccgcagcccggcagaggcgggaaagcagcgcgcctgcgccgtgggaaccgggagcggcgtgtgacgcggggacgccgcgtgctcccaacgtcgccccggtttgacgcacacggcaccaaactgcttgggggacccggcctccggctctcgggcccggggagctacgccctaggctgggtcccagccatcggcggccgactacacaaggagcccgggccccgggttcggggaggcggcggccgcggcggtcgctgggggccacggagcctgaggtgagcggcggccgccgccgcggggcgggactcggcggggggatgggttccgctgcggcgtcggaggatccggtagcgga

SEQ ID NO: 1255 - DNA, 491 bp, Homo sapiens
  source 1..491: mol_type = other DNA
agggcaggctgtcgcctggcaaatattgctgttttcctcaacaagaggaaaataacagagattgctcgtgatcgtggaactcaaacctgggcctgttccaccttaaagggcctaggcatgcctagtgcttgggtcgggcaccaccatatttggagcgtgcctaacccgagaacagtggtgcaccgctccaccagcgcgaagcttcccgggagctcctcgctggccacccccgcggcccgcagcccggcagaggcgggaaagcagcgcgcctgcgccgtgggaaccgggagcggcgtgtgacgcggggacgccgcgtgctcccaacgtcgccccggtttgacgcacacggcaccaaactgcttgggggacccggcctccggctctcgggcccggggagctacgccctaggctgggtcccagccatcggcggccgactacacaaggagcccgggccccgggttcggggaggcggcggccgcggcggtcgctgg

SEQ ID NO: 1256 - DNA, 378 bp, Homo sapiens
  source 1..378: mol_type = other DNA
acaactaaggaaaacttttttatttttaaatttttaaatgagtaaacagagagatttctcaagaactcttggttaatcttaaatatagggcaggctgtcgcctggcaaatattgctgttttcctcaacaagaggaaaataacagagattgctcgtgatcgtggaactcaaacctgggcctgttccaccttaaagggcctaggcatgcctagtgcttgggtcgggcaccaccatatttggagcgtgcctaacccgagaacagtggtgcaccgctccaccagcgcgaagcttcccgggagctcctcgctggccacccccgcggcccgcagcccggcagaggcgggaaagcagcgcgcctgcgccgtgggaaccgggagcg

SEQ ID NO: 1257 - DNA, 407 bp, Homo sapiens
  source 1..407: mol_type = other DNA
gttacaatgaaatgcactcaaaagtgttagctattaagtaatgaagcaattaatgtgtttagtcaaatatttgcatcattccataggaaagagaatgtttctcattcttgtcaaataaatgcagttatggtatattcttccgaatgtcaataacatctacaactaaggaaaacttttttatttttaaatttttaaatgagtaaacagagagatttctcaagaactcttggttaatcttaaatatagggcaggctgtcgcctggcaaatattgctgttttcctcaacaagaggaaaataacagagattgctcgtgatcgtggaactcaaacctgggcctgttccaccttaaagggcctaggcatgcctagtgcttgggtcgggcaccaccatatttggagcgtgccta

SEQ ID NO: 1258 - DNA, 448 bp, Homo sapiens
  source 1..448: mol_type = other DNA
aactcaattactggaataattttacatttcagagaaggtgaaagaaattaatattcatgagcatttactgtgtgtaggactactgcaaatattattttatttaacccttgcagggaaagataaatgtctctgtaagaaaagcatcattgattcgttgctattttatcatctacaaaacattccctgaaatcttcagaggacaattctaaagaaacttaaaaggataatttatagtttgttcatgtttacagcctaagaacacattattgccctgtttttataaattcatgttggctaaacacatttaaatatcattgtgttttagaatatttatttctgaaatttaactttatttctgaatcaagttgtgccactgtgatattttataaataatataggtaaaacactttttagttaaagctcggcttagccaggcttggcggtcctc

SEQ ID NO: 1259 - DNA, 456 bp, Homo sapiens
  source 1..456: mol_type = other DNA
ggaaagataaatgtctctgtaagaaaagcatcattgattcgttgctattttatcatctacaaaacattccctgaaatcttcagaggacaattctaaagaaacttaaaaggataatttatagtttgttcatgtttacagcctaagaacacattattgccctgtttttataaattcatgttggctaaacacatttaaatatcattgtgttttagaatatttatttctgaaatttaactttatttctgaatcaagttgtgccactgtgatattttataaataatataggtaaaacactttttagttaaagctcggcttagccaggcttggcggtcctccctgtccgcagggaggtgaggagaggggcccggacgcccgcggggaaggtggggacgggggcccgacgcccgcggggaagtggggacccagccgagccgtccgggcagcggtcgatctcta

SEQ ID NO: 1260 - DNA, 195 bp, Homo sapiens
  source 1..195: mol_type = other DNA
gtctctttgagaggatatttccctcaagtagtaatcaatgccggaaagaatactgttcatttattcatccctcagtaaatagtatacactgccttcctgccactgtgctaacagccacaaacaatcagcaattacattttctgcttgtttcggccggccacgtatatagggattgcgcaagcggaatccgcggga

SEQ ID NO: 1261 - DNA, 303 bp, Homo sapiens
  source 1..303: mol_type = other DNA
gtctctttgagaggatatttccctcaagtagtaatcaatgccggaaagaatactgttcatttattcatccctcagtaaatagtatacactgccttcctgccactgtgctaacagccacaaacaatcagcaattacattttctgcttgtttcggccggccacgtatatagggattgcgcaagcggaatccgcgggaagtgttgcgcaggcgcatccgatcgactcggtaggtggggatctcttggagacggcgacccaggcatctggggagccaatccctccgacctgcggcgggaaagtcgcg

SEQ ID NO: 1262 - DNA, 399 bp, Homo sapiens
  source 1..399: mol_type = other DNA
actttaatgttaaactgttgccaagataatttagaattaagtctgaaatgttagctctatctttacttaaaaaatggttataaagaagcgtagaggacgaaacacctgcttttctgtccttccaggcacataattcatttctctggttttttgtgtaaaattgctgatggatcatttgtaaaaacacatttaagttgattagtccttgaaaaatgatctttagaaaatgatctttacagatatctttttaaatttgtatcatactattttgctaatggaaacttgatgtgcaaaaatactctggagactatttggaaatttcattttataattaactaactgtgtgataattgaggtgaaaaacttagattctaatcacaaaaagatactcacttttat

SEQ ID NO: 1263 - DNA, 555 bp, Homo sapiens
  source 1..555: mol_type = other DNA
tgtttgtaaaacaatgtcctgttacttaagtatactttttaataagaaaaactgggtttctggtgccagcagttcaacttctgaggtacttaggacgtcgcacaggcacaggtacttaggacgttgagctccattatttgtattaatttatttagctagcagtaatgcagtctcagctgctggaggggaagaggcaagactccgccggcgcccaccatcagatcagattatctgaggtttcagaacttttatataaagaaatccaactcttccagggagccctggaaagttcaaaggacctcgtttgagggagcgagtccccgcccaggacaggggccgccccaacccgggcacgctgagcccggccgcgcccctctcggcctcctcgtcccgaagggaagcacaggctcgagcagggggctcatccatcagccgcggaggcctgggcggccgagagcccccggtggggccggcggaggagcgcccttccccccgcgcgctgattgggcgtcctgcccgtccccgcccgcgtgtgtgcgagggagggcgagtgcg

SEQ ID NO: 1264 - DNA, 368 bp, Homo sapiens
  source 1..368: mol_type = other DNA
tgtagtgtgtaattatcacatcatggtaatttatcctttgtgttacaaacaatccaattatactctgttttttaaaaaaatgtacaatgaaattattattgactttagtcatactgttgtgctattagatactagatattattcgttctaactggaataatatattttttaaacagtaaagaatgagataattcctcattatttgataatcttccccattagagaaataggactttatgcaaatttatccattttacgccaaaaaaaaaaagtggttaattcaattattactctgatagtgcaaataaagctctgaaattagactttactgccccaagaagtatgtggttctcgcgagatgagcaaga

SEQ ID NO: 1265 - DNA, 204 bp, Homo sapiens
  source 1..204: mol_type = other DNA
gtttatggacgtctagtaagtagcttcaggaaactggagatgcgaatgagtattaggaattcagaagcgttgtttgctatttgatcctaagggaaactactgtattcttctgatacatgttagcacctctaaagtatctgcaaacaggcctgagctgcccggcccaatgggcaggccgcccgcggggggtcttctataaaagcg

SEQ ID NO: 1266 - DNA, 459 bp, Homo sapiens
  source 1..459: mol_type = other DNA
cttaattataaagatacagtatgtaatacataaacatatgttaattgtttactcaaaagtttttcagatgtgaaagggttcagcaaccctaattgtataactcacacatgctgaagtaaattcaaaattgtacagccactttggaaaccagtttgacagtttctcataaaaaatgagctgagaaccgaggactgtcactctcacggcttccagcccttcgacgatggctgaaccaggcaaggcatagtttcacagaaattatgtgcagagtgattttgcactctaaagaatctcttgttttgcttgataaacaacaaagaactccgcggaagacagccaagctctgcaccccggcctggcccgccgcaccccgcaggcccggctctcccctgcgcgctccgggctgggcgcggcgcgtgtgcggagccgccgcggtgacacggaacgccggccgccccg

SEQ ID NO: 1267 - DNA, 310 bp, Homo sapiens
  source 1..310: mol_type = other DNA
ccttggcttcccaaaggggattacaatgaaacagatttaggctggagtgcagtggtgcaatcatggctcactgcagcctcgaccttttccttattttggaggcagtaatcaaataaaaaataccaaaaccttaaatgataatcagtttgctactttatttgggacaaaagagaattctatatttagggctttatatgcaaagccctgtgctttctcctgactggcagtttatgaaggggtgtgactcgcccagtctttcccgcgggaccgcgcctgagccataggcggggtgcccgccggcagaagtaaa

SEQ ID NO: 1268 - DNA, 315 bp, Homo sapiens
  source 1..315: mol_type = other DNA
ccttggcttcccaaaggggattacaatgaaacagatttaggctggagtgcagtggtgcaatcatggctcactgcagcctcgaccttttccttattttggaggcagtaatcaaataaaaaataccaaaaccttaaatgataatcagtttgctactttatttgggacaaaagagaattctatatttagggctttatatgcaaagccctgtgctttctcctgactggcagtttatgaaggggtgtgactcgcccagtctttcccgcgggaccgcgcctgagccataggcggggtgcccgccggcagaagtaaacagag

SEQ ID NO: 1269 - DNA, 695 bp, Homo sapiens
  source 1..695: mol_type = other DNA
tggtactgaatgtaatgaaatttattaaaataatgcaatatttgaactaagatttttagatgtatgtgcattttaaattttgtatatgtttggaattttttataatactaaattttaaaaattccgtttgtctccaaatggacttcttataaaagtttagaaattggcagtttggctgggtaattttaaatttagtgtgatatttagcaacattatttacagtaaattttctagatataaaatgtatattttagatataaatgtatattttagagtttttaatcatcagtgtcttttatttttataatcttaatttttctcttcaaaaaatcatattttaaaattaggctgggaagcaaaattaaaatatttatttttaaatacaattaatcagtggccattaattaggtaattacaaattattggcattctgtatacaagaatggtttttaaaatgtatcatatttattactattccatagagcatttgaccttgtaatgtcatagttgatatgaaaagatatcaagggcattggtgttttaaaataacatttggttgaaaagatgagattttttagctttgtgttcatttataaaattttgttattaataagtcttcataaataacatgtacccaacgatcttaaaaatctaaatgatgacatcattgatctagttttacgtgcaagatccag

SEQ ID NO: 1270 - DNA, 342 bp, Homo sapiens
  source 1..342: mol_type = other DNA
atttccaattttgatattttttcatttccagaatttgtttcaaattttcaaaatgctccaattgtcatatactgctttgaacaaattaatcatttatagtctggatatgacaatgccagtatatgattgcaaaattataacactaatttgtaacctaaggctctggataatatcagatacagctgtgactctccagattctgctggccttgcagactcaccaagccacagacttgtcttccgcaagcatgttctagttaactagcatgagatgtatgcatttgccagggacaaatttatacttctgaattaacccatgtctgctggagccgccgatccacac

SEQ ID NO: 1271 - DNA, 551 bp, Homo sapiens
  source 1..551: mol_type = other DNA
aaactgtagaccaccttttcttcttttccacatattttatgtccaatcgtgtgtaaatcaaaatgaaataggaagggagagcaatttgtttttgcaaattgattagttgcttaattaaccactcctgaaaatctgagcacgtcctctctgggggaagaggggagtcggaggaccggtcctaggttcaaggccagctgccaacgctgccctagtcacttgccccgaaacccggggaccccaggcctgggttcccggggcctccactgtcctttgtctcagaggctggggccacagtccgcgtgccaggaaatctttcccaggaggtgcggacggcggtgggaagctttcctccccaggagcgcccgcgcgctgcggtctataactcgagatcggggcccagctttcagggtccctgcggcttttcgagagcagcggggagccccggccttgcggccggcagaagacggcccagcgaagtccgccatgggggagagtagtctgccggacggggacacgctccggcgtctcgccccgaggccccgcctccctac

SEQ ID NO: 1272 - DNA, 719 bp, Homo sapiens
  source 1..719: mol_type = other DNA
ttacacttaagtattcaaaagttatgtttcagtgtgataaattattagtaaatacaataaagaaaatggaaagtttttgttgttgtgttttttggtccaatagcatgctaggagaaaatgtaaagttttaaagttgaaatgttattactgaatcttagtatgtttgcctaagaaaataaagtgtttttttagaagcccttattagttttgaaagctactctaaagggcttttaaaaagcaaagcacttcttttctgaaaaaaaatttccaaaaggtgacctgaaatcaaaattctaatcatcaggggatttttcatttttaatgtctcacctcacaaaaattggggtgcaacacaagcttatcgcagtccccaaagtgatcaatccagctagtgaaatcactcggcggccttcaggaggagaccatcgcttctcctggcggcaaggctcggccccaagccctcagtaggggcgcgagtcagcccggtcctcagggcagcgcgctggaaggcgagtgaacaccccagcgcgcgtgcgggctgcatcagaggaagccatgtcttccgattcctgctcgcctaggtgggcaggctccaccacctcgcgtggcctagtcggcccgcagcaccaagtccgccgcggctcacggccaaccgcgagccctcttctggccccgccccgcgctacgcgtagggaggcggggcctcggggcgagacgcc

SEQ ID NO: 1273 - DNA, 468 bp, Homo sapiens
  source 1..468: mol_type = other DNA
ctctcaaggggtccagagagagtctgggttccaatcccagctctgccactcggcatattttgctgtggctcagaaactgatcctcatctacaaaatggagctaatgctagacaatgcgccaaccgaggaccacattgctaggtaaagctgctcagagaacagcagcatttctgagtggtgctgttggcaattgtatataacaaaaccactatctccagacagtcatttgtttcggaatattacaaagaactttttaaggaagatgtgtattctcacatctctgatttatgtaaaaccaccaaaacagataaatcactcctttagctaatatttcagggacagacacgcgacgcatctggctccaaccaaatggcaaatatttgccagttcgattggaccggcgcagctgctagggagtcccggccccgcccctctcccgtgagcccccgcgcaggcgccgcccccacg

SEQ ID NO: 1274 - DNA, 340 bp, Homo sapiens
  source 1..340: mol_type = other DNA
cgggagggtggggtaccgcccccggagccggctggagcctagcggcaggcgcagccacgccctcccgccgacgccccgggcagctagttccctcccgggcccgggcccgacccccgctctctgctaatgcagcctgcgcgctctggcactaccgactcgggacaagattttttggtgagcagactgggatggctcgccgcagcctcgaccggtgcccgccgcagccgggagtccaagggcgagtgggccagatgcgagtttctcgccagccgtaaagcacagccaggcaggcgatgagagctgagttggggtaacccacccgatgggaactacagctctc

SEQ ID NO: 1275 - DNA, 483 bp, Homo sapiens
  source 1..483: mol_type = other DNA
acacccagtgcctgggtatgacctcaggcggtggcagagcccgcgtgcgaggtcccgctctccctggcttgccccggcagggcggagtcagcctagcagccgccggcgctgcccccgcgcggccttgagcggacccggtcgagagccggcgagctccgcgcagggagggtgcgcccaccggtcccgccgggcgcccgcgggacgcgccgccagggccctctccgccgggggctcggcgctcgcccagcggacgccgtggccactcgccgggctccaggccggcggcaccgcgggccggtgattcacggtcccgacccgggggtggtgcagccctaggaggggcggggagggtcctcggagcggggcgccccccacccctctctcgcgtctccctcgcgcgggacgggctggaaaggccaggccccccaccgcctggccacttgcgcaaaggagcgcgcccggccgcccgacgggggttgggag

SEQ ID NO: 1276 - DNA, 293 bp, Homo sapiens
  source 1..293: mol_type = other DNA
attttaatatatttgtgaataaatgaaggagtaaataaattcagcataacaggaggctgaggcaggagggtcactggagcctaggagttcatcctttaaaaccaatatatcagatctcctagaaaagaattggagaagtggcggaaagttctaccaaattaataattttgtctagtgtcagaaaacacctaattatagaaattgtaacgtcattctgattagcatacctaagacaaaaaggctttggtttcagcattcagtggcaatgtctttgttaacactgcctatgagtc

SEQ ID NO: 1277 - DNA, 346 bp, Homo sapiens
  source 1..346: mol_type = other DNA
ggtaggctaataacttgataatccaccaaaatgaaggtttttaaatattttctataaatacgaattgaatacctccaaaagtagaatcacacttcctgtgaaaagtgttttaagttttgtttatttttcctattatataaggaattacaagttggaatcagaagtaattggcatcctaatcctgatttattgagcagctgataccctgcagtggcccctatcccaggcttggggctctcataattttttttttttttcctgcttagaaaagcaaaatgcgttatgaaccattcaccctccttccagcagggggcggaacgtaaaacgccttgtggccgacgcctgc

SEQ ID NO: 1278 - DNA, 658 bp, Homo sapiens
  source 1..658: mol_type = other DNA
tcccttatttggaactcattgtcaaaagaaagacaccacaccctgtgttatgtagccttaaccaagcagcaggccacgtcccaggctccctgccttcaggtataaaccaaaaaagtcggaattttttaaaagtacatttttaaaaaaagttgtagcaccgagttcagcagtggggcgccctgtccgctggggggatgccccggtctgcgtctccagctgcggcagacacccccttcccccgaccgccaccaagggcgagggaggacctgactccactgccggggcgggtggcgggacgcgcagctgggcgcagcgcggggagccggaagccggagcagactgcgaggccagcgcggtccgggggtcgccgcatcaatccgcgccgagcgtgcgacacccccgctgccgcggcgccccctcccgcctccgcgcgcctcgaggtgcgactcccctttatggcggagtcggcagcagcctctctgacagccgcggcggccggcgggcgaacagggcaggaggctgggcctctggcctctcgccgccttcactgcagccgggccgaggggagcgcggcgcgcgccgcggcgggggcgggggagtgggcgggcccggccgggcagggggcggggaggcggggggaggcggggagcccggccgc

SEQ ID NO: 1279 - DNA, 658 bp, Homo sapiens; identical to SEQ ID NO: 1278
  source 1..658: mol_type = other DNA

SEQ ID NO: 1280 - DNA, 480 bp, Homo sapiens
  source 1..480: mol_type = other DNA
tttaaagtattgaatggtattggataaaacgaatatgcttatttgccaaattctgagattatgagccaaatgagcttagaccacaaaaggtactttttcagagacagaaaaaatatggtgttcactatccctgtggcataatatgggacaaaaatataaaatggctttaaaaatattttgacgaaattataaataaagattccggttgtatctaggtgtaagttaaagagacaagcatacaatctcacagcttgtcagttgggacagaatctgggcaggctaagggtctgcattctgttttctttgaaagtctttcataaaagcagctcctgataaaaaatttaactaacagttctgactgagcctcactgcaacgttaaagagcggggacgcagggcgcggtgttcctccgcgctcgccgcgcagtccctgcccccccgcggctttggagagctgccattcggcaccggagtcgctccg

SEQ ID NO: 1281 - DNA, 244 bp, Homo sapiens
  source 1..244: mol_type = other DNA
caagatttcttctaagaaatacatgctaggcagggtggatcgcctgaggttcgagaccagcctggcctctagcaaaaaatgaaaagaaaggttataaagttttaatatacgatttgatcttttgaaaataatggatatataacttaaacggaaatgtatcattaccttgtccaatgatgaaggagaactctgcattgtgaaattgttctggcctccttcccaccggaggaaaggggagaaggcg

SEQ ID NO: 1282 - DNA, 564 bp, Homo sapiens
  source 1..564: mol_type = other DNA
gtgtttgtaggtttgcacacgcacacccatcaaacgaattcttttataccctatgtatgtgacaaaagattcctcattttggaaagaagtcataactttatgtagtagtctcctgtctcaagatcgcttgacacagctaatcttacatccgtctgatagagacagtggctcgccatattgccaaggcgcctcgtatttttcatcaaataaaagtcccagcgcatgtaagccggtttcaaatcgtcgctggggagagacccacccggcgactgcgcgcttcgcactcgagtctaagcctctgaccctttcccgggcccctgcgcgtggaagcctcgttcgaaccgccgcgggagccgttgggacgcgcctacccggtcactgccccgccccggcgcagactgcgtgaggcgccgccgaaggcgcggggcttgccggggatcgtggtcggcgagcgcgcccgagcccactagcggagcccgcctaccgccatgatgcccattggtggggtcagggggagaggcgggcggcgctcacgcctggcctgagggggcggactgctagccc

SEQ ID NO: 1283 - DNA, 504 bp, Homo sapiens
  source 1..504: mol_type = other DNA
gagtgagactcagtagcaatgaatatatttgatactaaaatgttttcattttcctagtgggacatttactgtcaaatgaatgtccttaacttcaatttacagtagttaccaaaaaggctatcttcactgactatgcataccaatgtgtttgtaggtttgcacacgcacacccatcaaacgaattcttttataccctatgtatgtgacaaaagattcctcattttggaaagaagtcataactttatgtagtagtctcctgtctcaagatcgcttgacacagctaatcttacatccgtctgatagagacagtggctcgccatattgccaaggcgcctcgtatttttcatcaaataaaagtcccagcgcatgtaagccggtttcaaatcgtcgctggggagagacccacccggcgactgcgcgcttcgcactcgagtctaagcctctgaccctttcccgggcccctgcgcgtggaagcctcgttcgaaccgccgcgggagccgttgg

SEQ ID NO: 1284 - DNA, 446 bp, Homo sapiens
  source 1..446: mol_type = other DNA
gttctggcctccttcccaccggaggaaaggggagaaggcggggtccccggccccagcgagagcctcgcctcgcctcgcgcgcctgcgcggagcgggctggcttcctgaacggccctcgcctagaagcactccttctggccggcggccgccccaggcagcaagggcagccagatcttgtcgcccatccctgctggggagaagaaactccaggtggcggccgcggcggcggcgaacactccctccgagggctagcagtccgccccctcaggccaggcgtgagcgccgcccgcctctccccctgaccccaccaatgggcatcatggcggtaggcgggctccgctagtgggctcgggcgcgctcgccgaccacgatccccggcaagccccgcgccttcggcggcgcctcacgcagtctgcgccggggcggggcagtgaccgggtaggcgc

SEQ ID NO: 1285 - DNA, 408 bp, Homo sapiens
  source 1..408: mol_type = other DNA
agaaaattgggcaaattctataataccatttggtactatatatttcatcttaaatcaggttttagtcgtagtgcagtgagccgagatcgcgccactgcactccagcctagagtgagactcagtagcaatgaatatatttgatactaaaatgttttcattttcctagtgggacatttactgtcaaatgaatgtccttaacttcaatttacagtagttaccaaaaaggctatcttcactgactatgcataccaatgtgtttgtaggtttgcacacgcacacccatcaaacgaattcttttataccctatgtatgtgacaaaagattcctcattttggaaagaagtcataactttatgtagtagtctcctgtctcaagatcgcttgacacagctaatcttacatccgtctg

SEQ ID NO: 1286 - DNA, 471 bp, Homo sapiens
  source 1..471: mol_type = other DNA
atcattttattgatagcagctctggggatagtgagatcatcatcgagacgaggaaatttctcaaaaagtcgccctcggagagtgatcccggggggtgctttgctcagaggggcgggcgctgtcgcctaactggtccccaacggcgtcggagcagaggcaagatccaggggcactggcctcgccgcggtaccgggcgggtacccagcgggctcggctctatagagcccgaggccccgctgccgctgccgccgccgccagcagccgttgccgccgcctcggccaacatgtccgccgctgccgctgccgctgccgctgctggaacggcgacggccgcctcagagccaggcacagtgggagtcgcagtggctgccgccgtggccgcgtagcccggggaaggtttgcaggaagccgctcccgacaccgacttccgggtgtggctgccgcccttcccccacccacgccggcgggagc

SEQ ID NO: 1287 - DNA, 582 bp, Homo sapiens
  source 1..582: mol_type = other DNA
agagagggtagagacgatccttcctcgcctacgtccgggccccagaccaagcgcgtgcttggagctctccggtacagtgaggcgcgcgcttgcctggctagggtccctgtgaaggaatgggatcccgggtgcttgccaggaccgtagcaggcggaagctgctggcagcgcgaacgggcggctcccgccggcgtgggtgggggaagggcggcagccacacccggaagtcggtgtcgggagcggcttcctgcaaaccttccccgggctacgcggccacggcggcagccactgcgactcccactgtgcctggctctgaggcggccgtcgccgttccagcagcggcagcggcagcggcagcggcggacatgttggccgaggcggcggcaacggctgctggcggcggcggcagcggcagcggggcctcgggctctatagagccgagcccgctgggtacccgcccggtaccgcggcgaggccagtgcccctggatcttgcctctgctccgacgccgttggggaccagttaggcgacagcgcccgcccctctgagcaaagcaccccccgggatcactctccgagggcga

SEQ ID NO: 1288 - DNA, 385 bp, Homo sapiens
  source 1..385: mol_type = other DNA
aatgaataagacttatttgataacacaatagggtgactgtagtcaaaacaattatatattttaaaataaagagtgtaattggactgtttatatatacacctactatgtatgcacaaaattttttaaatataaaaattagctgggggtcccagctactcgagagcctgggaggttgaagctgcagtgagccatgaccatgccacttagaaatcctccttttcattgatcctggtttaaaaactttttaagataagaaatgaaaaaaagactaagtctcttaagtcaacaagtcaggcctaatagagccactgctgccctgccccatgcagctctggccaggtgccacctgccctgacgtcgggcctgctagttggctggctggtgc

SEQ ID NO: 1289 - DNA, 634 bp, Homo sapiens
  source 1..634: mol_type = other DNA
ctgggctcatgtttaaatgcaatttctgtttactgttgatattactagtcactatggaaagaagtaaaaacagttgcttaagatgctctaacacttttttcccctgtagaagccaacatggataaacatgataaatgggttctaatatttccactatgttggaactgagccattaggcgacttagttgcctctaggcaagtaacttctctgaaatgtttcatttttcatgaagtttaaaaaaaaaaaggtgaagctttgaaccgaataaggtctatcagacatcttgaaaagctttttctccagacgacgcagaaacaggcacacggggttctgccaatcctcatttgggctcctaaaggaatagcaaagagagttagggaaggtttcggaggcctcagctacttgagagagggtagagacgatccttcctcgcctacgtccgggccccagaccaagcgcgtgcttggagctctccggtacagtgaggcgcgcgcttgcctggctagggtccctgtgaaggaatgggatcccgggtgcttgccaggaccgtagcaggcggaagctgctggcagcgcgaacgggcggctcccgccggcgtgggtgggggaagggcggcagccacacccggaagtc

SEQ ID NO: 1290 - DNA, 269 bp, Homo sapiens
  source 1..269: mol_type = other DNA
tggagctcatcttccgcaggtgacagctcgattaagctgcctctttttataatttcctgacagaatttataaaattaaaatatttaattaaagacagaacatcaggcttgaaagggccagcgagggtgaccaggtgcccgcttggggaccccgccggcggtggccaggctagcccaggtcctccccgatcccaggatgcactgcgcctcccctcggccccggccccctcccgcccagcgcggggaggcggggacgcgtcggcggcggag

SEQ ID NO: 1291 - DNA, 236 bp, Homo sapiens
  source 1..236: mol_type = other DNA
aaagcagtcagggaatccaggagggccttgcttggctgcgttttgcaattaaacaccaaaaggcaatattgctttgccagtagtgatggctgtgccaacgttatcagctgtaatgttacttagtacatctagtatttctcctagggaaagtcctcctttcctcaaaggagcctctgttcataacaaggtggtgtcggttagaatttcatcagaaagcaagtctggtcacatgagaa

SEQ ID NO: 1292 - DNA, 482 bp, Homo sapiens
  source 1..482: mol_type = other DNA
aacaaagttagccaagttaattaatgaaacttgggacattttctatcctataaaattagaaagaattaacatgcagtatgtttagttaatgcttctcagcttgggaagtatcagaacctaccagatactgctgagatactttcctaggaaattgagtttctgtttgctggaagctactggctagctgacgagaatacttttcattaggcaagaaaggaatttttcaaaaccccttttattataaaagtcctaggtacaagtttcttgtgaattgctccagacatttttctaagcatatacaaaaataagcatgatttgctgatatcttagccattatgtggaaaatcgtatttatttcaaattggtccctaaggcatttgaacacatatagaaaatgaattttttaaaaaatatgcatctcttaaaaaagcccttcctttcagctgactcaccagccgcgcgcgtgctgggcaggtagaggc

SEQ ID NO: 1293 - DNA, 208 bp, Homo sapiens
  source 1..208: mol_type = other DNA
tcccagcccaagatcatgccgttgcacaacagcttgggcttcagttgatccagcatcattacataaatcaagtgaccacatattgtaaatctgttttgactttataatggatcttgatataagataaagcccttcacggttccgcaaggcagcgcgaatcggctcgccggggtggggccgcggagccgcaaatcaccagttgagggcc

SEQ ID NO: 1294 - DNA, 485 bp, Homo sapiens
  source 1..485: mol_type = other DNA
gcctccatgctggagaggtagtcagcacagcgcacgcaggtcccgctcaaggcgtgggggtgtcacccgagacccgggcctcccctttccttcgccgccgccgccgccgccgccgccgctcttatcgactgcccagtcggctgagctgggccctgggccaccgaggcccggggagctgaggggctcgggaccctgcgagccgctcgaaccgcctttgaatgccttcagcctctagaagtccaatgcgattgcgccacggagcggagtctcagcgcatctgctatgttaagccagaggcgacggccccgcgctcttccgaccgcgcctcccgtcgtcagtgtcaccgagacccagccgccgcgctcagggccagtggtcgcccctcaacaaggtcggcgacccagttgagccaagggcggccgcagtccgacggtcccacctggtcggtgtgagggcagccgcaacccggtccccttcacggtccg

SEQ ID NO: 1295 - DNA, 475 bp, Homo sapiens
  source 1..475: mol_type = other DNA
atacctaattggctaaaacgtagtcacatagccacatttggctgcaagagagactataaaataagctcgacacagtgttctgtgactttaaataaaaaattggttttctgtcatgaagtacttttatctcaaaagataaccaaagaaacattctggtcatactcttcctttcactgtgacaataacaacaacaacaacaacaacaaaaccttattcttcttaaattttatttatagttagcgtcacaatacacgagtaaatattgtctttctttaaaaagcacaaatatctcaaaccttggaacgaatggcatgtaagtgcgtttttacaattcatgcccttgcgggcttcgccttaaacccaggccctttgtctctgaccgccctggcctgaactggctgggcggagattctcgcgaattctcggatctgcgcggaaaacgcgctcgaggcagttctctgacgcatttccggag

SEQ ID NO: 1296 - DNA, 390 bp, Homo sapiens
  source 1..390: mol_type = other DNA
tatttgctaaccttgtacaaagttaacagttgtcagaaaaagaagtaattccttgatgggcactgggcctaggacctctttgcctccatgctggagaggtagtcagcacagcgcacgcaggtcccgctcaaggcgtgggggtgtcacccgagacccgggcctcccctttccttcgccgccgccgccgccgccgccgccgctcttatcgactgcccagtcggctgagctgggccctgggccaccgaggcccggggagctgaggggctcgggaccctgcgagccgctcgaaccgcctttgaatgccttcagcctctagaagtccaatgcgattgcgccacggagcggagtctcagcgcatctgctatgttaagccagaggcgacggccccgc

SEQ ID NO: 1297 - DNA, 505 bp, Homo sapiens
  source 1..505: mol_type = other DNA
ataatgagaatctcattttgcctttaataatctgattcacctcaacgaatgtgaaagattgttgagtttggtaaataatctcgaccacctctaaaggggtgggtgataaaaattcatctggagaataatgttcttataaaaagggcaaagactcagtcttgttcgttgcagctgcttcttgtaggaagcccaccctggggcggccgtgggcggagccgcgacctgaacgccgggagacctcaccaggcggaggcggtgtctacctcaccaggcggaggcggtgtctgcctcgcgctgtcctctgaccgccagggggagccctgccgcgcgctgcgctccgggccgcgccgccacgctctctcgacccgcgcgcccgccgcgcaccacccgtcgccacgcccgccgcaggccaagggccagtcacttgcgggccggcgtcccgcagcccattcgcgccccgcccctgccccgccgcgggatgagtaacggttacgaagcactttct

SEQ ID NO: 1298 - DNA, 481 bp, Homo sapiens
  source 1..481: mol_type = other DNA
ttcctttcctactctttgagaagaatcagaagggagggaatctgtctaaagatgtttccattaattaaaggtttttgttttgcttcaaaaaaacttgaattggagtatttccacaagtatctttaacatgctctaccaatgtttgcagaccacagagtcaggctcgctggccaggagaggactcccgaagctgacttctgatggccgagcactgtgaaaagacagaaagtctgacttgttctcacgactcacactttcttaggttaaataagaaatcaattgctgccatttgtagtacccaattttctaaaatgatcacaatggataagtggcaagaaatccttatgactcatctgggtacatagatcactaggaagctataggtcagctagagactctcttgtttgcagagagacactctgaactccccctggccgtcaagggaaagactgccttcacacctcgagttggataaaaggca

SEQ ID NO: 1299 - DNA, 432 bp, Homo sapiens
  source 1..432: mol_type = other DNA
atgaataatgagaatctcattttgcctttaataatctgattcacctcaacgaatgtgaaagattgttgagtttggtaaataatctcgaccacctctaaaggggtgggtgataaaaattcatctggagaataatgttcttataaaaagggcaaagactcagtcttgttcgttgcagctgcttcttgtaggaagcccaccctggggcggccgtgggcggagccgcgacctgaacgccgggagacctcaccaggcggaggcggtgtctacctcaccaggcggaggcggtgtctgcctcgcgctgtcctctgaccgccagggggagccctgccgcgcgctgcgctccgggccgcgccgccacgctctctcgacccgcgcgcccgccgcgcaccacccgtcgccacgcccgccgcaggccaagggccagtcacttgc

SEQ ID NO: 1300 - DNA, 325 bp, Homo sapiens
  source 1..325: mol_type = other DNA
gagttcaaccagaccgcaaactaagggtctagagtctttcaaagagacccccacctggtgatgagtcaacccagcaccaccccattgcagggctggaatgacacattgcaagtcagtcacggctctgtcctgctgggcctggactgctaagctcaagatctgccgagtgagtcgattggacttaaagggccagtcaaaccctgactgccggctcatggcaggctcttcccagcctatatttatgcaaagagattttgttccaaacttaaggtcaggaacccctctcatggaggagagtgcctgctccataaaagggagccaacac

SEQ ID NO: 1301 - DNA, 465 bp, Homo sapiens
  source 1..465: mol_type = other DNA
atttatttggacaaaagaagcacttcagcttaattattttgtgaaaagacaattgcctataccaattattattatgattattattattatttgagaccaagagattctcgtacctcagcctcctgagtagctgggattacaggtacctgctgggattacagtatatcaattattatcttctatagacaatggtttagtgacccctttttatggtctatcataataaaatctctatttatagatcagatgatattttataaaacctatccacaccctcatacattaagataatgcatgtaaggtgagatattattctccttgttttataaatgcagaaatagaagcctaggtcttctgaataagcaaagcaaaatgtattgtgctttttaaatattactcctagcatttttgcaatctttctcatgctatcatcttagataatgattaaaaaaaactgtttggcaa

SEQ ID NO: 1302 - DNA, 387 bp, Homo sapiens
  source 1..387: mol_type = other DNA
aagtgccatcgcttgttccagcgagttttcttctcattatgaagtgagtttgaaaggaggtcgggaggtcgggaattcgagaccagcttggccaataatcgcagctactcgtctgaggaaactattaccctccacttccccaggccctaacccctggaagaaatgtagctgctcatctggccattagccgcatctagggcagccgacgcagcccgtgatgctgggacagcgtccggccgcgcgcaactgacggtcgcgttctgcgcgcgagctagttgcctcccgtacctgccgcggtcgccggccccgcccccgggagcgcgggccaatgggctgggctccagggggcggggctggcgggcgggcggtgcggccgtggcggtagct

SEQ ID NO: 1303 - DNA, 457 bp, Homo sapiens
  source 1..457: mol_type = other DNA
agcccttctggtccctttgcaaagaacagtgtttctcaaacttttttctgaccagatcacaactcctttatctattctcaattttattaaaaacggagggagagattataacccgcggtttggaaaatactggctaaaacggggccgtccgcctccttcgggagtggagaggcagggcccactaggtcgtcgctgcaggccaggcccgctcatccagttatggcagcactgacgcctcgcagggctgagtagcaacagctcctccgcgccgcgtttccggagaccctgaaggagtccgcgcgtgcgcagagcgcgtcccgggaactgttccgcccacggaggctgccgagcgcgctcccgccgggccaaagaagtgggctccagagcgcgggcggcgcggcggcgcgagccagggggcggtcctgcgcggccggccccgccctctgctctcctccca

SEQ ID NO: 1304 - DNA, 543 bp, Homo sapiens
  source 1..543: mol_type = other DNA
atttcggtggaactcagtcccacagatgtcttcttcagatgtcacgctggaattctcccagaggcaaactgccagactgagcaactgaccctcagacctgtgagccgagccggtcacaccgtggctgacacctcctgtgcgacccgctaagggccccgcgaggtgggcaggccaggtgtggctgggagagggccctgctcacagctcccgagcttctgccccaggtgggcaaagcatccgggaaatgccctccgctgcccgaggggagcccagctctcccacaatggaagggaagaattcttccaatccgggggccttgggggacccgggcaactagacccgcctgcgtcctccagggcagctccgcgctcggtggcgcggttgaatgagtcatccctcgggaggaggcggggcaggggtgtggactcgccgggggccgcccaccgcgacggcaagtgacccgggccgggggcggggagggcgggggcgggcgccgggggcgggcagaggcgcgggagagcgcgccgccggccctttatagcg

SEQ ID NO: 1305 - DNA, 361 bp, Homo sapiens
  source 1..361: mol_type = other DNA
cagagaaccactgttctacccttagggagaagcagcacctaaagggcaaccctaagggtgctcgagagcgccggtctcccggagtgtctgatccagcacacagtaaatgctgcttacctgttgggtgcagaggccgaccacccgcccaaggtcgtggcggcgccggctcagccctgggagccgctgcctcgaggtggttgaggcgagagggcagggaagcgtctgagcctcttcctcccaccacccagctgacagcgggggacccagtggaccgcagcgcccgcagtcgccgggccaggcgcagaggcgaacgggaggcggcgctgcaccgtgcccgcccctccccggcccggccccggct

SEQ ID NO: 1306 - DNA, 513 bp, Homo sapiens
  source 1..513: mol_type = other DNA
ctcgagagcgccggtctcccggagtgtctgatccagcacacagtaaatgctgcttacctgttgggtgcagaggccgaccacccgcccaaggtcgtggcggcgccggctcagccctgggagccgctgcctcgaggtggttgaggcgagagggcagggaagcgtctgagcctcttcctcccaccacccagctgacagcgggggacccagtggaccgcagcgcccgcagtcgccgggccaggcgcagaggcgaacgggaggcggcgctgcaccgtgcccgcccctccccggcccggccccggctccagccccagccccagccccagccccggccccggccccggctcgcgggcgctgcgtctccgcgtacaggaggcggcggcggctcccagtcaccggcccccgccggcgagcgcacgatgcactgcctgggcgccgagtacctggtaagcgctcgcagcctcggccctcgggggaggagccccggggaagggtcgagtcccccgccttcacgca

SEQ ID NO: 1307 - DNA, 512 bp, Homo sapiens
  source 1..512: mol_type = other DNA
ccagtaagaaagtctcaagaacacactgggcacttgaagaatgtttgttattttgatttctaaattagtaataaatgcagaatgtctagaaggtatttgaatttaggacaatgtacctttgcagcataaggtatcaatactatatattaatgaatagtgtattatatctgaacttgtcaatatagagtattaaatggtatcctatatattgcatacagtactgggaaacttactaagtttgcattatgggaagatacatattcaatcttggcagagagcctgtcagtatgtatcagttgtttgaactgaaatttcaaatattccacattcactatgagagtggataaaaatgatgaatgttcttgtccaacagaattccttccaaaacactatttgcagattggtgaacagtgtttcagtacatatcaactgtgttgcttctgcagaaagaaatctgtttcagtggattagattctctctctacctgtagcagggcactgtgcgctcagccc

SEQ ID NO: 1308 - DNA, 278 bp, Homo sapiens
  source 1..278: mol_type = other DNA
ttattccaagcattgaacaaatcactgagacagtctaagtaaagatgttaaatgatataatgattggaactgtctttttaattttaaaaaacacagaaatactcttcatacttccatttctcaaaatataaattatcagtgccgcttctagaacagtgtatactctgcacctagatttgctctgtcaccaggctatagtgcagtagcacttcacgtgattctcgagtagctggtttcgctctcaattgtagacctgactccacacccagctgtaagga

SEQ ID NO: 1309 - DNA, 537 bp, Homo sapiens
  source 1..537: mol_type = other DNA
gggcttctgattcaaagaggccccgggttcaaacacgtgaaagcacttgaaatgcccaggctttgcatggcaggtggaggccccagttcctccggcccagaggctccaacgctgctattttccagcagcgggcggaggggtcctgcccggcatctgggcgcgctgggcccagagcccgggaggaggcagacggaggcggcgggtcagcggcgggccagccccggtgggcttccgctcccctccgccggcccggtccggcccgccgcggaggatgcctggaggttggcctgtggctgggaagcccccaggcgccctgcctagcccgggggcggggccgcctagccgccggccccggtggcgtgagggctggggcgggggccggggacctcgcggggagggagcgggagggaaagcggcccccgcggcccttcaattggccgcaccgcccctcggcgcagaggcgggaggaggcggccctccattggtcgggcccggcggccaatcctcgaaggcccaggcggaggcgggggcggcctg

SEQ ID NO: 1310 - DNA, 365 bp, Homo sapiens
  source 1..365: mol_type = other DNA
aatcccaggtgcccgatccccggaaattctgattcagtgttacaggatgcagtactcctgtccagcaggactcagatttctggtttctgattctgaacttttactcatctgtatacctgttcaatataacctacaggtaggtctatgttgtcgtaatgtggattaattagacataattaatttattaacaattaattaattagacataagcaactttgtgataaaattaactgaatattaattgcaatcctcttaggagtgtggcttaaggctttcagtaatgtctgtgtgcaacagaaacatttctcttggcattaaaaaagccagaacacctcctaactggggagtttcgggacctttaggaa

SEQ ID NO: 1311 - DNA, 370 bp, Homo sapiens
  source 1..370: mol_type = other DNA
atgttgtcgtaatgtggattaattagacataattaatttattaacaattaattaattagacataagcaactttgtgataaaattaactgaatattaattgcaatcctcttaggagtgtggcttaaggctttcagtaatgtctgtgtgcaacagaaacatttctcttggcattaaaaaagccagaacacctcctaactggggagtttcgggacctttaggaattacaattttcagcttacgcttggctgcagctgcgcacaatccgcgcagaagcaggacgtagaaaccttttaacgctaattaatctaggtattgcgtatttagtttaggaaacacgaatactacatgataaatgaggtaaaatggaagc

SEQ ID NO: 1312 - DNA, 456 bp, Homo sapiens
  source 1..456: mol_type = other DNA
acagagagttatgaaatagctatgtgagtgcacaaggtagctattgcgcagcctgaaagatctttcttcttcagagtcactatgaattattattaccattttaaagatgaagaaattgagcctcagtgaggttcagttagctaaaggactctaataaactgacaatttaaataaataaacatggacagcttatatgagcttttgtgtatatattcatgtatatagtagatcaaatatgttagctctattgacatttcttagaaataaatatcctgttatcaatgatagtgtttacaaattatttatttagaacttacctcttttcaagaaaagtataatgcatataacaggtcagaacatctatttaatgtcaaactttacaccccgacaacagaggggttccgggtgtaggtgtagtgctggagagaacacgcttcttctacacgcgccccctac

SEQ ID NO: 1313 - DNA, 529 bp, Homo sapiens
  source 1..529: mol_type = other DNA
atttaaataaataaacatggacagcttatatgagcttttgtgtatatattcatgtatatagtagatcaaatatgttagctctattgacatttcttagaaataaatatcctgttatcaatgatagtgtttacaaattatttatttagaacttacctcttttcaagaaaagtataatgcatataacaggtcagaacatctatttaatgtcaaactttacaccccgacaacagaggggttccgggtgtaggtgtagtgctggagagaacacgcttcttctacacgcgccccctactggtatgcacctgcagccccaaagaatcgagtgtggccgtagaccaagaaaaaccagcagtcatgaagtccccagtatttgagcatttaaggcagaatgtaaattcataatttaagaagattttttgttacgtggctagcccaggtactgaccgctgcgggggcgggctcacacagttcccccgctggcaaaacccgggaattgcaccctctgcccttggcaaggtgtgagcttcca

SEQ ID NO: 1314 - DNA, 590 bp, Homo sapiens
  source 1..590: mol_type = other DNA
catgtatatagtagatcaaatatgttagctctattgacatttcttagaaataaatatcctgttatcaatgatagtgtttacaaattatttatttagaacttacctcttttcaagaaaagtataatgcatataacaggtcagaacatctatttaatgtcaaactttacaccccgacaacagaggggttccgggtgtaggtgtagtgctggagagaacacgcttcttctacacgcgccccctactggtatgcacctgcagccccaaagaatcgagtgtggccgtagaccaagaaaaaccagcagtcatgaagtccccagtatttgagcatttaaggcagaatgtaaattcataatttaagaagattttttgttacgtggctagcccaggtactgaccgctgcgggggcgggctcacacagttcccccgctggcaaaacccgggaattgcaccctctgcccttggcaaggtgtgagcttccaaagaaggtctgctcggcggcccgcctcggggccccgcccactttggccagggtcggagccgcccggagcgggagccggagcccgagcggccgcggcccctttaaggagcag

SEQ ID NO: 1315 - DNA, 643 bp, Homo sapiens
  source 1..643: mol_type = other DNA
ttcattacttgtgaacttctcaataaagatgtgagaaatctgaaattgttgggtaaaaaaactttattgtatggatgaatacacagtatcctaagtatagttctctaagtaacatagagcttgggaattagtcacatcattaaatttattaacaagatatattcatagaaacttatggtttttatgttaaacttattccttctatacaagaaaactgggtatttcttttaaaaacaaattttccgtatacatttatggtcctcaatttttctatttagaaatgttttcataataatgataaagagggactaataatagctacccttgttttcttacaaatttgttacaagaatcaagtgcaatagcaagataataaatcttcatatcatgatccattcgaattgttttaaggatatggagttaagggtagtggccttgccagttgccatctggctatctgtcttagaacttttaaccaataagtgattcaccagtgtaaagctgtggcctttggatttctaaatggcaagaaatggcaattttgcattatcttcacacctgtatataaatgcttccaggtataactgtcaggattaaattttattgcaaagaatctaaaatctttgtgtgtattttgtttaat

SEQ ID NO: 1316 - DNA, 757 bp, Homo sapiens
  source 1..757: mol_type = other DNA
tataaaataatgaacatatcatttactgcacgatgaatttttcatttattaaatgaaaaacgtttgctagacattttaaatattaagtattttgactacacggattaatttaaatgattctatcaggcattctgatatttaacaactctattaaaatatttatagaaaaataaaagcaaattgatataaatttttgagcaattctatttttgtagaaaaaagataacctgtaattataaagatgttttttgaatgtgtagtatcctagaaaataaaagttcttgtgaaatagcatgcaagatcatagatcctgcattaaatttttatttgtgaaaatttgaaaattatgagctataacttataaagtttgccttcttatgtctaaaatcttttaaaggattatttgcatttatgtaaaactggaaatgaagttatatatgagtgcaaagaaattgacttctgctcaaatatgtgtcctacagtaaattgaattaaatttttatcccaactgtttgattttattatttttacgttaagtgaaatactatttatgtacccctaagagtttaaaggtctagttttaaaaactgcctagtttgtaagtatttgaatccagttcttttctaaattttaataatttgactcaaaatttttgctacagggtcaacttttaaattgtatatttcctctgaggcacactgggcatttggagaatggttcttcagcaccatctgttatcaggcatgcagaaacattt

SEQ ID NO: 1317 - DNA, 582 bp, Homo sapiens
  source 1..582: mol_type = other DNA
tactcactgagcaaattttcaagcccaattttgttgagcctctgataaaaacaaaaatgtccactatagtatcaagtaaaaattgagaccgtaagatatagcaaagggagtcaatttgcataaatgttaaactccaactattgtagcattttaacacatggctccattgtattgtgaatattttctacaggcgcactgaagtgagaatcacattttggtactacaggtcttgaagcaaaagcctgttgagaaagtactgttgttacctggagccggtctgcaaataaaagatggcttaggagaaaagctatccaatgttttttccgaggctgcctgggggcgtcctgcagtcagctgttgggaggtgtcccacccacgcccccacaagggaaaccaggtcgccgcggtctgcagcagaacgccaggttcgcgaaggcgcggaggaggcgtcggctgcggcgcccactccccctagtcccagcgccctgccgctcgcctcccgctgccgggcgccggcgcgctcggctctttccgccgccgccgctgccgcgcggtggcccgtgcgcctcggcaccttcggca

SEQ ID NO: 1318 - DNA, 565 bp, Homo sapiens
  source 1..565: mol_type = other DNA
aaaacactgaaaagctagcgtttacatttgcagcaacactttgctcccaggactttggcgcacagttcccatgagtccaggtctcctgaagccaggactggcaggtcctgaccctccctttttgcacccgtaaggggaagggcccgggaatctggaccttgtctagagtcccggcgccagtaccagttcggagggcatcctggaggttgttactaacccgactcagttcagacctgagccgggcaaagtcacctcagcagcccaaggctcggcggggacggtcggggttcgaagcctgcagctaaacttagagggttcaggctttgctgggaggcctccctgtgctcagaagagcccagacagaggcgcagggcctcggcctccaaccgagaggctgagcttcgcgtctgtagttactgagcaggagcttctgggcggaacttctaagggcctctcgccccgcccccgtcccgcccggttgcggaggcgcggggcgcccccgggtggccgcgggcagtgctgctcctggccggtggaggcggcggctgcggcagcggaaggggaa

SEQ ID NO: 1319 - DNA, 374 bp, Homo sapiens
  source 1..374: mol_type = other DNA
cgttgaataaaacgtgtcattttctggattgggaccaactaaaaacgaagagcaacttttcaaaagagtttcacgttttagaataaaaaatatttaaaaaaataaccattaaaatgagactttcctgctgcagcacttcctgtatgcctacttggtggatggatggaggaacatctactatttcatccttgaggagttcctgaactactccctccctcccttctgcttgcaggctggggcgcggagcgggctgaactgggaaggccgggctgcggctgccgtgcctggcgcgggagccgcaggaccgagagcgcagccccgccccgggggcgttgccgccccgcgcccgctccgcccccgcgccgccggcccta

SEQ ID NO: 1320 - DNA, 638 bp, Homo sapiens
  source 1..638: mol_type = other DNA
ataaattaaagaatatatcaacgtgggcaaaattttccattagttttggaacttagttttgtttttgaataataagcagttaaataattaaagctttgccttggcaatgcaaggactgaattaacttcaggaagacgtccagtttcctggctcgacagtgaaatgaccgcacaggccagtcaattaacaaaacgggaagttttcatgtctttatttttacattagctcgaaaatcacaatacaggaaatacagtattgttattgctgttttcagcctcgctgtggatcccgcgaagtggacggttcgcttcgtggcttcgccactgcggaaaccgtcactcggtggcccccgactgggtcaatgcgaggacgcccaccgcccctccagcccgccccaggccaggtggggatgcgcccggcccgggccagcgctggtcccggcagttccgcgtctgcgcagcgggcgaggggctggagcggggccggcgcacgctcgggggagccgggctggcggcggcggtggcggccggctgggcgcgcactctcgggatggagggcgagcgccgggcatcgcaggcgccctcctcgggcctcccggccgggggcgccaacggggagagcccggggggcggcgcccc

SEQ ID NO: 1321 - DNA, 598 bp, Homo sapiens
  source 1..598: mol_type = other DNA
gaaataaagatattctctatttccccaaataaggaattcttacatagagcttaatgtatttaaaaatttttaaatgggataaattaaagaatatatcaacgtgggcaaaattttccattagttttggaacttagttttgtttttgaataataagcagttaaataattaaagctttgccttggcaatgcaaggactgaattaacttcaggaagacgtccagtttcctggctcgacagtgaaatgaccgcacaggccagtcaattaacaaaacgggaagttttcatgtctttatttttacattagctcgaaaatcacaatacaggaaatacagtattgttattgctgttttcagcctcgctgtggatcccgcgaagtggacggttcgcttcgtggcttcgccactgcggaaaccgtcactcggtggcccccgactgggtcaatgcgaggacgcccaccgcccctccagcccgccccaggccaggtggggatgcgcccggcccgggccagcgctggtcccggcagttccgcgtctgcgcagcgggcgaggggctggagcggggccggcgcacgctcgggggagccgggctggcggcggcgg

SEQ ID NO: 1322 - DNA, 577 bp, Homo sapiens
  source 1..577: mol_type = other DNA
ttacatacccacgcataggcgtggatagccatggggaatccctgcagttccctggaattcagggaataaagaacgagatgaggcaaatagtcctttttcctactgatttctattattatttgtatatacatatatatatacacaaagccctagctcgctgagatttttctaaaaccaccgccaggctccagccccgggctgggtcaaggaattcgagggatgcaggctgaacgcaccggttgaaactctgggcgccgcgctcggaagacgcgtccacgcaccaacctctcagctggtgcctcggaagagtttctggaagcagccccacagcgtccgccctgtgaggggtacaggtgccgctgtcccgccggctgccgccccgtccgcccacgcagcgcctcctccgggctagcctgggggattgacccagcgccgctgcttctcgaatggtctcgtgcaggggcgcagcggccgctgcccgtcgcccgggactccccgccctccctcgcgaccccgcgccggggcgggcggcgcttgcggcgggcagggggcgggcaggggagagggggctcgtccg

SEQ ID NO: 1323 - DNA, 482 bp, Homo sapiens
  source 1..482: mol_type = other DNA
ccaacattctagaaccctgctaaggtgattccaggttttaatgagcagggcagggctctaaaaatatttagtagaggagtgtcagcctgaggctcaagggacccacatggcatgacagaacgggtatgcagttccatagttagttacatacccacgcataggcgtggatagccatggggaatccctgcagttccctggaattcagggaataaagaacgagatgaggcaaatagtcctttttcctactgatttctattattatttgtatatacatatatatatacacaaagccctagctcgctgagatttttctaaaaccaccgccaggctccagccccgggctgggtcaaggaattcgagggatgcaggctgaacgcaccggttgaaactctgggcgccgcgctcggaagacgcgtccacgcaccaacctctcagctggtgcctcggaagagtttctggaagcagccccacagcgtccgccc

SEQ ID NO: 1324 - DNA, 444 bp, Homo sapiens
  source 1..444: mol_type = other DNA
gtatgatactacattaaagaaacccaaatttcaacagatttttaccaacattctagaaccctgctaaggtgattccaggttttaatgagcagggcagggctctaaaaatatttagtagaggagtgtcagcctgaggctcaagggacccacatggcatgacagaacgggtatgcagttccatagttagttacatacccacgcataggcgtggatagccatggggaatccctgcagttccctggaattcagggaataaagaacgagatgaggcaaatagtcctttttcctactgatttctattattatttgtatatacatatatatatacacaaagccctagctcgctgagatttttctaaaaccaccgccaggctccagccccgggctgggtcaaggaattcgagggatgcaggctgaacgcaccggttgaaactctgggcgccg

SEQ ID NO: 1325 - DNA, 381 bp, Homo sapiens
  source 1..381: mol_type = other DNA
agaaagaatgcaacaaatattagctattattattactaatatcaaaactgcaaaggaaattaaaccatatgttcaatgtttgggtttccttttaacctcttcagctgaatgttgatatgaaagcgcttaatagcattcaaacacataataataaggtagttggtaattaggatttacttcagcaaaatttaattaaagaacctgtaggtgatttctgagtggcacttggtgcttaagccacactaaataccttggtgggccaacttcttaatatagtcaagattccaaagtttgtaaatttaccactacatgaagtttaaagtagctatagattgttgtattattatcaaaggcaaacaagtgacttggcacttctgcctc

SEQ ID NO: 1326 - DNA, 514 bp, Homo sapiens
  source 1..514: mol_type = other DNA
caatacagtgcagtgctcatgctggggacacagcagtgaacaggtcagacaaggactctgctgtgttgcatgtactgtgctgggcactccatacacattaacaacgcaatacaatgagtcttaattgtgaaaataatgctcactttcattagactgaagaaataaaaattaacatcattcttccaaaaattggaaaaatgtctataaaacagtctcagaatgattttcttaatgaagccttaaaacatgtatctttgtagtagttatattttcataatataagctgctcattctaagtagtatgatactacattaaagaaacccaaatttcaacagatttttaccaacattctagaaccctgctaaggtgattccaggttttaatgagcagggcagggctctaaaaatatttagtagaggagtgtcagcctgaggctcaagggacccacatggcatgacagaacgggtatgcagttccatagttagttacatacccacgcataggcgtggatag

SEQ ID NO: 1327 - DNA, 422 bp, Homo sapiens
  source 1..422: mol_type = other DNA
gatatgaaagcgcttaatagcattcaaacacataataataaggtagttggtaattaggatttacttcagcaaaatttaattaaagaacctgtaggtgatttctgagtggcacttggtgcttaagccacactaaataccttggtgggccaacttcttaatatagtcaagattccaaagtttgtaaatttaccactacatgaagtttaaagtagctatagattgttgtattattatcaaaggcaaacaagtgacttggcacttctgcctccacacacagaccaacacatccggggatggctgtgtgttgctagagcagaggctgattaaacactcagtgtgttggctctctgtaacagttaataagaaaatgtgccttgctaactgtgcacattctgaaggaaaagggcttgtgccgctgccgt

SEQ ID NO: 1328 - DNA, 398 bp, Homo sapiens
  source 1..398: mol_type = other DNA
atttctgagtggcacttggtgcttaagccacactaaataccttggtgggccaacttcttaatatagtcaagattccaaagtttgtaaatttaccactacatgaagtttaaagtagctatagattgttgtattattatcaaaggcaaacaagtgacttggcacttctgcctccacacacagaccaacacatccggggatggctgtgtgttgctagagcagaggctgattaaacactcagtgtgttggctctctgtaacagttaataagaaaatgtgccttgctaactgtgcacattctgaaggaaaagggcttgtgccgctgccgtgatctgtgcatctgctcggagacgctcctgacaagtcgggaatttctctatttctccactggtgcaaagagcg

SEQ ID NO: 1329 - DNA, 373 bp, Homo sapiens
  source 1..373: mol_type = other DNA
cctattatatataggatataacatatccttcttattatataggatatattatatcctgtataatttatttaatttatctgtctcccaccaataaaatgtaggagttccttgagggcagttcccagcaccttatgtgcctggcaaatagtaggggccagaaaatgagctgtgggttcccaaagtcagttacggaccatttgcaactagtacagaaataaacaaatacttcagtatggggtttttttttttaactagtgtacatgaggtacacccggacagtttgcagactggccacaccttagcacaggccccttattttagacacttagaaatcaggactctgagaacttaggccgcgccttggccggtgcac

SEQ ID NO: 1330 - DNA, 365 bp, Homo sapiens
  source 1..365: mol_type = other DNA
gtgggttcccaaagtcagttacggaccatttgcaactagtacagaaataaacaaatacttcagtatggggtttttttttttaactagtgtacatgaggtacacccggacagtttgcagactggccacaccttagcacaggccccttattttagacacttagaaatcaggactctgagaacttaggccgcgccttggccggtgcaccttccccagggcaaggagaaagcgccgctcccggcctcagccgcagcaggctccaggtcccccggcccggagccgactgagacggtgcggtgcccacgctctcgcgagactagcggtcggggcgggcgggtcgagcctcccggaagtgggccagaggtac

SEQ ID NO: 1331 - DNA, 459 bp, Homo sapiens
  source 1..459: mol_type = other DNA
tagtgtacatgaggtacacccggacagtttgcagactggccacaccttagcacaggccccttattttagacacttagaaatcaggactctgagaacttaggccgcgccttggccggtgcaccttccccagggcaaggagaaagcgccgctcccggcctcagccgcagcaggctccaggtcccccggcccggagccgactgagacggtgcggtgcccacgctctcgcgagactagcggtcggggcgggcgggtcgagcctcccggaagtgggccagaggtacggtccgctcccacctggggcgagtgcgcgcacggccaggttgggtaccgggtgcgcccaggaacccgcgcgaggcgaagtcgctgagactctgcctgcttctcacccagtcggcgccccggccctccttgggctgcggcttctgtgcgaggctgggcagccagccgtagcaccagagt

SEQ ID NO: 1332 - DNA, 553 bp, Homo sapiens
  source 1..553: mol_type = other DNA
caggccccttattttagacacttagaaatcaggactctgagaacttaggccgcgccttggccggtgcaccttccccagggcaaggagaaagcgccgctcccggcctcagccgcagcaggctccaggtcccccggcccggagccgactgagacggtgcggtgcccacgctctcgcgagactagcggtcggggcgggcgggtcgagcctcccggaagtgggccagaggtacggtccgctcccacctggggcgagtgcgcgcacggccaggttgggtaccgggtgcgcccaggaacccgcgcgaggcgaagtcgctgagactctgcctgcttctcacccagtcggcgccccggccctccttgggctgcggcttctgtgcgaggctgggcagccagccgtagcaccagagtcgcgggtcctgcagtgccccagaagccgcacgtataactccctcggcgtaagtgctaggaatgccgctggcctcggcagctattccagaggcaacaactgctctcatctccccattggtggctggcgacccgaatttgggaatggg

SEQ ID NO: 1333 - DNA, 588 bp, Homo sapiens
  source 1..588: mol_type = other DNA
gcagcaggctccaggtcccccggcccggagccgactgagacggtgcggtgcccacgctctcgcgagactagcggtcggggcgggcgggtcgagcctcccggaagtgggccagaggtacggtccgctcccacctggggcgagtgcgcgcacggccaggttgggtaccgggtgcgcccaggaacccgcgcgaggcgaagtcgctgagactctgcctgcttctcacccagtcggcgccccggccctccttgggctgcggcttctgtgcgaggctgggcagccagccgtagcaccagagtcgcgggtcctgcagtgccccagaagccgcacgtataactccctcggcgtaagtgctaggaatgccgctggcctcggcagctattccagaggcaacaactgctctcatctccccattggtggctggcgacccgaatttgggaatgggattcggagtctccagagccctgtggcttggggctgggatttttaattttttaattgtaagaatctgtaatacagcatttttatttcggtcaaggcaggaaacaactattaatttgccttctcgaatcttaatagttataatcagct

SEQ ID NO: 1334 - DNA, 481 bp, Homo sapiens
  source 1..481: mol_type = other DNA
atatgtattttaccatccaggaattttctcaagactgtattgcagaaaattttaaaaccagttattctactctaatacagttacttatttttcttgtctctcttggacatggttttaatcatttgcaatataaagagacattaatttatactgagttaacaaaaagagataatcctattcgcttatttgataatccagctgaacctgaagtactgatttcagcctgttcatcaccttagagggtttccaacacagctactggaacacttttaaaacaagccttcttgcagaccactggtttgacagtcgcaaacagacagtcccgcagaggccctcgacgagtgtcactccgggcaggaaccaggggctgccagcagagcagcccaggtgcgtcgccttagggacagagctgccaagtgccgagctggggctgccagagccgagccgggaacggcatttgccagagccgaggcggcgggaa

SEQ ID NO: 1335 - DNA, 494 bp, Homo sapiens
  source 1..494: mol_type = other DNA
aagccttcttgcagaccactggtttgacagtcgcaaacagacagtcccgcagaggccctcgacgagtgtcactccgggcaggaaccaggggctgccagcagagcagcccaggtgcgtcgccttagggacagagctgccaagtgccgagctggggctgccagagccgagccgggaacggcatttgccagagccgaggcggcgggaacccggaaacgcctgggctgcaccgagctggcggtggctacggcgacgggagccggcggcgctgcgggtcagcggtcgcgtaggacccagcggactcggcagcctggggcgcccggcggagctgaaccgcggcccccggtggtgggctcagccggtcgagctgcgcgggaggtgagtcctcagcgcacctggggaggggcgggaggctagcggctgcggggcggcccgggaagctcctgcacgttgtaactccgacggacgacgcgcctggtgcggagctagtgacgggt

SEQ ID NO: 1336 - DNA, 514 bp, Homo sapiens
  source 1..514: mol_type = other DNA
ccacacctaactaatttaaaaatttttttgtagagatggatctcaaaacttcttaatagggaaaaatattgtacagcttttatatttgtatgtatcaatgtgaatatatgaaaaatctagatctagcaagacaatgacatattccaaatgtgagcaatttgcacatattcgaatgggctagccatgtaattatctaatttgtgcattgtattattttcttgtagtcataatatagtactaagtatacttttgttaagtatacaaaaccaagtaaaaattttagaaagtaatctaattttgactagcctggctacgcgcctgtagtcccagctactcgggaggctgaggcaggagaattgctttgccactgcactgcagcctgaaagaaagtaatctaattttatcaaaaagaaaaagttaagtgtaaaattatttggaatgtcagtggaaaaaatatatctcttcagacaaactaaacgatatatcatgtagactttacttttttttaaatggg

SEQ ID NO: 1337 - DNA, 581 bp, Homo sapiens
  source 1..581: mol_type = other DNA
aggtcgaggctgcagtgagccatggtgacagcactgcactccagagcctgagggactgagtgagaccctgtctttaaaaagaaaaaaaaaagttaatatttgtagtctagtttacatatcctgtctaaattcatttctgatttattgtaaagtagactatatctataaatatataggataataattattatcttggattttaaactaaactttaccttggtttaacatgacagaataaaatattcctttcgtatgttcaactaaagaattaaggccttttgttattgaatgtattgtatacaaaatccctattaaggtgaaatacagaactgactttagacaagttatttaaattctttaaaactgtttcctcatgtgtaaaaaatgaatactaatacatcttcatagatttgctgtgacaactcaatgaaataatgcatataaagcacttagccagatacctggaatgtagtaagtattttccccacattataattgtttttatagtaaagaaatagaaggaacttgttctgcttttaattatggttatgacactaaagcatagttgtatactatcttta

SEQ ID NO: 1338 - DNA, 539 bp, Homo sapiens
  source 1..539: mol_type = other DNA
tctgttttgtcaaggggaggggaattagagtccacctcttccagggagatatcttagaactaccatacctagtttcaatacatgttactccctaaccatctgagagtagggagcatgtttttctcttaaggaaaaggatattctattatacaacacggtagttatcaatatctaattttaacattgtgatactttaaagtccacttccacttgtgtaaattgccctttctagcaatgttcccatcaaatttatttttaaacaatacagtaaaaactattttttttggcagggaataaaaaaggttttctgaaacactacattatctcttaagttacccattacttacggaaaatgattttcgtgagcaggtaacaactttttgaaacaaattccctcatctgctgaagaaggagctagccagcagcacccacgcgagcccgcggttaccctggccgcgcggctactgtagagtgggctggcggcgagcgggcggggcggtatcacgcgggaggggcggggcccgctcgtcggctgatcg

SEQ ID NO: 1339 - DNA, 380 bp, Homo sapiens
  source 1..380: mol_type = other DNA
atcactttgtagtataatttgaagtgaagtaatggtctagctctgtcgcctaggctggagtgcagtggcgcaatcttggctcactgcaaccgcctccctggttcaagtgattctcctgcctcagtttcccgaggaactgggattacaggtccaggctggtcttgaactcctgacctcaggtcaggcgtccatataagttttaggatttaaaagaaaaaattctgtgaggaatgtcatttgtagtttgactattgaatctgtagattgcttttggtagtattaaaattttaacagtattgattcttccaatttatgaacatgaaatatcttggcatatagaaatggtactgatttttgtatcctgcataatctgtaaagag

SEQ ID NO: 1340 - DNA, 438 bp, Homo sapiens
  source 1..438: mol_type = other DNA
gtggcacgatctcagctcactgagtagcttggattgcaggcgcctgctacaatgagcacatttttgttaaatttctcgctattggcaggaaataactgaagaaaggggagcaattctgatccttctaaaggttcttcttgcaacatgtcagaaagtatatttagcataatgtttcttcttaaagggaatgttgttattactgagcgatagcattggataatagaagcattagttacatatgtaaagtgataatattatctaattcacagtgtgtaaaaatggtagctgctgtttatttcaagccttggaaaggatagaataacttgttatacattttcattttatagaatctttctagatctacttcgtggcaattaaaaattacttattaattttccgataatatatccatctgaaagagaattataagtcagttat

SEQ ID NO: 1341 - DNA, 266 bp, Homo sapiens
  source 1..266: mol_type = other DNA
ggtctcgagctcctgacctcaagtggccgggcctcaagtctaaatttttaaaagaaagtttcttccgtgcttctcttattaaaacctagcattaccatgagttaagatcgagataaatagatcaaaataaatgggttttacttagaaaaataaaaaatttctcatggcgcgtgcggcgacgtcgcggaggtcgccatgctcgcttccggtgtccagcatccggcaaccagaagaaaagttagaagcttccttcggggcgagggcca

SEQ ID NO: 1342 - DNA, 303 bp, Homo sapiens
  source 1..303: mol_type = other DNA
attcagtctggctgtcacccaggctggaatcagcctcccgagtagctggggtagtggtctcgagctcctgacctcaagtggccgggcctcaagtctaaatttttaaaagaaagtttcttccgtgcttctcttattaaaacctagcattaccatgagttaagatcgagataaatagatcaaaataaatgggttttacttagaaaaataaaaaatttctcatggcgcgtgcggcgacgtcgcggaggtcgccatgctcgcttccggtgtccagcatccggcaaccagaagaaaagttagaagctt

SEQ ID NO: 1343 - DNA, 613 bp, Homo sapiens
  source 1..613: mol_type = other DNA
aaacaatgaagttgtgaaatacctgagattttgtttcataaccactaatcttcaatgttgagcatttaaaatgtatttgttcgattttcattcgaagcaatacctggacatttccaggaattggaagattgccttttaaaagaaagctctgatctgcctgaatttgacatttctttaagagacaactaaatcaagatcatgtgtctgtgacatgtattgcatatgctagttagctgcatctgatagcagtctgtaaaaagaaagatgataacatgtttattttagacattaggtaatgttcatctttcatgaaaaaaattgattagccaattttggtaatcaaaaacataaactgtatggtgaaacaactagttgtccagagccttgctacaacgtatagaaatattctattttctgtatttggggcgcaacataactttcttgaggtaagtaccatacactaaaaagattatctttggtgcatctgtatttacacagcagtgttaaattgggtcccagatcctagggtttagctcaggctccgcccctccctattggtcgcccagggggaggcgcgtttcccactgataggccgcgccgaggagagtctctc

SEQ ID NO: 1344 - DNA, 447 bp, Homo sapiens
  source 1..447: mol_type = other DNA
caatatttattgaatgaattaatgacgtttatttttagtcggttaaatgtaatttacttttttaaagcaactgatgtaaattggtaggtttttaaaagttgaactttactgccaaaaggctcggagccaaggcctgagttctagtcctgaccctggtgagcccagagttagggaagagtagggctataatcttttttgacattaacttgatgtgaagaggtaaccaccgggccctctgggttccctatccgcttcctaggggggccgactcgacacctaggtgcaaggtggatcccacgggccacctgcaacgggactagtggctggtgtgcagaaaagcccaacaggcccggccctcgggattagcctgagagtcggcttctgcggaggaggcgtggccctcgccccgaaggaagcttctaacttttcttctggttgccggatgct

SEQ ID NO: 1345 - DNA, 477 bp, Homo sapiens
  source 1..477: mol_type = other DNA
ggagaatttctgtgagataatcaggcataaatttttaaagcattaatattgctgagaaaagacagtatagaacaatgtatatagtatgctaccatttttgtatgtgtgcatgccttcacatatgtgtgcttttaagggatataggcatatttaagctcgtaaattcatagaccatctttgtaaaggtaccttcagagaagagaacttgaagagaacctccctactggagggaattctgttccatgtgcatatattataaattcaaaaaaagatatagtttattttttaagaacctggaattaagtcctatctatgaaagtaaagtcatacatcaacatattccaagtttctctgcttggatggaatagatgcatgaaaaaaagtagaaggactttgaataggcattatttttcaagatcttagaaatagttatgcctgatagttttataatgtttgtccatgaactaaaattagaac

SEQ ID NO: 1346 - DNA, 494 bp, Homo sapiens
  source 1..494: mol_type = other DNA
tgggataacacatctcaggattctttcctgttttatgattctaaaactgacagcagaaccagaacactggttataaaacagggtttcatacgtgctgttcgaaacattttaaaagctagctcttcagcccaggcagagtgccccgccctggatcgcctgggaccttctgggttccaccactcggactcccgatgccccagcccggcagctacctcaggcctggcgtgctccggccggctcgctcaaggccgtagagactctcaggatctggccagagaagtaagcacaccggtggtgagagctcccctccttagttaggctgcagcccacccgcggccccgccatgggggacaccctggggcccagcccgcagcgacaaagcctccgccagagcggcggcgcctctcgggacactggagtcagcagaaacgaacccccgggttcgcccagttccgcagtcagtgcgcatgcgcgtagctcggcttaaaggagcc

SEQ ID NO: 1347 - DNA, 443 bp, Homo sapiens
  source 1..443: mol_type = other DNA
aacagtaaaaacagtaagtactttatcatgttatgaatgcatgcagtgcacaacaccttgcctgttattgttacagtatattattaatatattgtaattgtccccataataaactctaaatacagtacatgttaattattattgaggatgacattgtaattgatagaggtttacatattatttggtactcaattatgtaggaactgagccacaggcagaaccaagaagctggctattgcttctgcccgtgtcacctcggtgcatcgtcctcgagagataactggaggagttatcttaacctgcagattttgccgtgcccagggcacaagtttttcagggctcctgggcacccccgccagcgcggctcctttaagccgagctacgcgcatgcgcactgactgcggaactgggcgaacccgggggttcgtttctgctgactccag

SEQ ID NO: 1348 - DNA, 394 bp, Homo sapiens
  source 1..394: mol_type = other DNA
ctcctgcctggagcgcttcagctgagatccgcgcccgcccaggctggctcagcggtctcgccccgcccctccgggaccggagttttgcgctcacattggcggcccagatgatttttgtcccgtgagaacaaagtcaatacatctttttcaattgtattttttataaagatgctgtgtgtgtgtgtgcgcgcgcgcgcgccctacaagagtgccagcacatcctagcctccgaggccgcgacagcgcctttggcgatgtccacaggccccgcccgctcccctgggccgagggccccgtttcctgaacagcaattggtggacggcaacaaagccttagcaaccggctcctagtgacccgcggggcgcctggtaactggggctgctgtccctttaag

SEQ ID NO: 1349 - DNA, 411 bp, Homo sapiens
  source 1..411: mol_type = other DNA
aaatgtttcacattctgccactttgggcaaatttataacagtattcaagaatgtcatagttgatacaccttttagcactgaataatattccattgttagacatctgctttaaatcttttgcaaacacaaaacaaactccggaaaggagtttgttggattttctgtggataattgtctatgttccactttaccaaagaaaaatgaatttcaagtagtgcataaagtaattctcaatatatttatctcacagaaaaatcttcagactgagatgaaatactctagggtatattaaattttattctaatattgaacgacaggactttctgagcaagatatttttcttccttttacaagttggaagctattgaataattcatgccaagcgtggaaaggctgtcttttccctggatg

SEQ ID NO: 1350 - DNA, 648 bp, Homo sapiens
  source 1..648: mol_type = other DNA
taaaaggaagtggctattccggtttctttgcaaggccttgggctattgggatttttttaaaaagggggaaaaggaacatagagttggttattgtccccttgcctataataaaaacctattatttttaattttttaactgggtttgcggttaaatctcacagcccaagagatttccacttcagatggattccatacacttgcatttaagtatgcaaaaaaattccaattatccagcaatttaaccaaattattggtaacttttctaaaacaaaaaaaaattgtttcccttgttttggcagcaattactttctactcaagaaaatagtttcaaaaagttgatgtttgttgctaaaagaactatttttatgaataaatataaaactaagaagttatggtgtcccttttttaaaaaatgactcatcaaaagaaataactttttcctttctcttgtaagagaaaaaaattaatctcttttagaattgcaaacatatttccttgatggagaaaagtcgttatttatccagttcaaaaaccagagtagaatttactactctgtggattcagaaagcttcattctgcaatcagcattgtcaagatgaggaaaagcctgtattttatagtcttggaagtgtcttctttgaagggatt

SEQ ID NO: 1351 - DNA, 214 bp, Homo sapiens
  source 1..214: mol_type = other DNA
tgcatgggctccagcttcctcccaactggcattaaatcctggtgaagagacaaggtgctcctcagcctccggagtagctgagacctcagcgtagtataggaaagaagctttaggccagtttcagcaacgtgcaggcagaagctggcccctcggggaggagagccccacaggcctttcctgggcacccgcggtggatgggaaggctccaaaggga

SEQ ID NO: 1352 - DNA, 256 bp, Homo sapiens
  source 1..256: mol_type = other DNA
tacctcctagctacgtggcttccgggaagtcttgtcggacagaggtgccgggaccccgaggctgggtaccctcttcaaggacctgcccggcgaagggccgggtctactcccgcagtgacagtgacgcgcttgtccggggccgcgcgccgctgcgagacacagacagtacttccggcccgggccgcgcaacgcgtcctgggacaggaagggaggccggtcgcgggcggggcctgcgcggcggagggcgtggcttgcg

SEQ ID NO: 1353 - DNA, 297 bp, Homo sapiens
  source 1..297: mol_type = other DNA
ggggccagcttctgcctgcacgttgctgaaactggcctaaagcttctttcctatactacgctgaggtctcagctactccggaggctgaggagcaccttgtctcttcaccaggatttaatgccagttgggaggaagctggagcccatgcatggcggtcgggtgggcgtgagcgggctctccatctcccagcccacttcctgagtccgggtggcaggattccatcccgcaagccacgccctccgccgcgcaggccccgcccgcgaccggcctcccttcctgtcccaggacgcgttgcgc

SEQ ID NO: 1354 - DNA, 308 bp, Homo sapiens
  source 1..308: mol_type = other DNA
tacatgtcacaaaacctggtgatattacctgtcaatgtttgatctcaacagaagatcaaggacagcgattttctctgacaacagagactaagtctatttaataaatagaaaacaggttcttaatctagagtccaagatttagtcaattctggtatttcatcagaacacctaggagtgtgacagtcttgttagcagaacaacttcataagaccttaagttactcaacagcaaccaagaaatgttgtttctagaaactatatgggatttttacatcgcagatctcagatatactctctcagaatctttct

SEQ ID NO: 1355 - DNA, 434 bp, Homo sapiens
  source 1..434: mol_type = other DNA
ctaagaaaagcaatgacagctgtcttttttaatctaattacaacacttgagaggtctgaaatccctgagcactattaaaggtcacttctttaggtacaggaaggtctgggattcctgacactgagggtgactgaaacatccttccaggcatcttggggacaaacccaaggagtcattgccttgttgggagttgaactcaggtgaggaattaaccagccctccctgtttctggagaggaggagtagggcgcagggcccctcccgactctcttccacgttacccaggcttaggaagcgggtgtttaagccatgggttagagggctcgtgagcacgcccgatcctttccctgaggctatgaaacggtggctccaccagcagccggcgggtttcttcagtggagccgggctctggtctccgcagcccagtagcccgct

SEQ ID NO: 1356 - DNA, 402 bp, Homo sapiens
  source 1..402: mol_type = other DNA
ttaaacaactcagatacatgctttgtaaatattttcagtatgtggcttcaagtcttttgaagagcataaatttttactttgttgaagtccaatttatcaatttttttcatcacgcttttggtttaagaaatatttgcctaaataaggtcacgaatactaagaaaagcaatgacagctgtcttttttaatctaattacaacacttgagaggtctgaaatccctgagcactattaaaggtcacttctttaggtacaggaaggtctgggattcctgacactgagggtgactgaaacatccttccaggcatcttggggacaaacccaaggagtcattgccttgttgggagttgaactcaggtgaggaattaaccagccctccctgtttctggagaggaggagtagg

SEQ ID NO: 1357 - DNA, 440 bp, Homo sapiens
  source 1..440: mol_type = other DNA
caggcagatctgaccaagtccgaggcctctgagtcgactcccaagcagaggtgccggctcctgctgggcagctgcagttgctccgcagctcctggccgagaatctccccctttggaaattcctgagctgcccaggcgttttcacagcctgactttgtgctcagctgagggaaacactgcccctcagaccgcagttgcgagtagcgcggggggagtacaggaacctcccggttcaccagagcgccgccgacactcgccgggccgcggctcaggttttctgctgctcgcgcgaaagtggctcggggagctcctggccacaagctcagcacaccgatcctcctagggctgcggggggtgtgggatgcgctacgagactccgggcccgagagaaaagttttcaaagtctctcctcgggagaatcctctccacagccagggatca

SEQ ID NO: 1358 - DNA, 493 bp, Homo sapiens
  source 1..493: mol_type = other DNA
aggcctctgagtcgactcccaagcagaggtgccggctcctgctgggcagctgcagttgctccgcagctcctggccgagaatctccccctttggaaattcctgagctgcccaggcgttttcacagcctgactttgtgctcagctgagggaaacactgcccctcagaccgcagttgcgagtagcgcggggggagtacaggaacctcccggttcaccagagcgccgccgacactcgccgggccgcggctcaggttttctgctgctcgcgcgaaagtggctcggggagctcctggccacaagctcagcacaccgatcctcctagggctgcggggggtgtgggatgcgctacgagactccgggcccgagagaaaagttttcaaagtctctcctcgggagaatcctctccacagccagggatcacgtctcagcagttcagatccgggggcccccagctgacagagggcgtggggggttaaggcattaacccctcccagc

SEQ ID NO: 1359 - DNA, 483 bp, Homo sapiens
  source 1..483: mol_type = other DNA
attcctgagctgcccaggcgtttcacagcctgactttgtgctcagctgagggaaacactgcccctcagaccgcagttgcgagtagcgcggggggagtacaggaacctcccggttcaccagagcgccgccgacactcgccgggccgcggctcaggttttctgctgctcgcgcgaaagtggctcggggagctcctggccacaagctcagcacaccgatcctcctagggctgcggggggtgtgggatgcgctacgagactccgggcccgagagaaaagttttcaaagtctctcctcgggagaatcctctccacagccagggatcacgtctcagcagttcagatccgggggcccccagctgacagagggcgtggggggttaaggcattaacccctcccagccttggcgcggcgctgggtgacttcgcgggccgcggcgagcgggactggccattggagtgctccgctgcggagggaggggaccccga

SEQ ID NO: 1360 - DNA, 474 bp, Homo sapiens
  source 1..474: mol_type = other DNA
aacttgctaatgtaatctaataaacagatcattgaattttggagagcatattttccaacatccttatattgtagaaaaaacagtcatatgaaaatagagttaactgagtttcctgtgtgactgaacacctacgaagcaaacacatataaaatttctgtaacagaagtttttctgaaggtaatgtttgccacaagcagtagctattaatctttgactatatttttaaagcaatgatgctaattttaggttactttctaaaaaaaaaaattatctcctactctcaatatgatcatctggaaaattatttgcagactttatttccagagaaatctgtagatattaagtttggttttgaaatgtgcacatttaaaggtgtattttttttttttaatgaaagataaagagtagctgattgtggagctgggaaagctcaagtttccgcctccaagaatattttgtttgatgatccagcaa

SEQ ID NO: 1361 - DNA, 474 bp, Homo sapiens
  source 1..474: mol_type = other DNA
agattacagaagtgtttgaaagcttagaatcttcttcaagtaaaaacacaagtcagactgatagaaaaactatatggaatataccatttataactaaaagaagaatataagcctctttatttatttatgcatagtgtttttagatgaccaaatccctagatagatagatacacattaatacctatataactttaataagctattcataaatgactgcacatatctataaattaccacattcatctatcaataacagctgaaaatacacactgatagtctgcactgcaaactttgtttaaagcactaaatacaatagcagaaggttctagtgtctgcagctcaagttgccggcaaatgctgaactggagcggcgcgcgggttggaggcgcttcagcaccgcggccagcgctgcggaatgatcgccccccagggcggctgccgccgctgccgctgctgctgttattgctactgctg

SEQ ID NO: 1362 - DNA, 420 bp, Homo sapiens
  source 1..420: mol_type = other DNA
ggctgagggccagggccaggcccttaatgaggagctgtgggccgagcaatcagctggaaaattaaattactcaccctcttaatgagttcaactcttttaagagaatttaaacgtttaagagataaacctgtcagtttcagatcattcctttcttctaattattgggttaaaaaaataaaaataaaaacgagtccactggttcagcccaggactccagcggtgtggccgatcaggcgctggcctcctcccctctcccgccgaccagcgagaggctaacagacggggacaagtagctgtttttattgaatacagaagctccttgaaaactccgtgtgctccggggctctcagggaggcgggggcgggcttggggccgccccagagtctgaccctcagccttcacgccgaggagggggctgcc

SEQ ID NO: 1363 - DNA, 478 bp, Homo sapiens
  source 1..478: mol_type = other DNA
ggatgacagcagattgctggtatactgcttactgctgtatctctaacatttatttaagtggcaaaaagaaggttctccagactgtagcagctacatgtgaggggtacattcctgaccctccggggatgatccctgcagaacaccaagggtcaaaacttagttcttccactttaatttatttaaggaaatgaaccctgcagatggtgtctaatgagttgacagaataactggctagctttatattttaccatctaaatactgtaagaacataccggtcagctccagatagcgctcgccgccgtgcgccccgccccgccgtgcgccccgccccgccgtgcgccccgccccgccgtgcgccccgccccgccgtgcgccccgccccgccgtgcgccccgccccgccgtgcgccccgccccgccgtgcgccccgccccgccgtgcgccccgccccgccgtgcgccccgccccgccctgtgacg

SEQ ID NO: 1364 - DNA, 414 bp, Homo sapiens
  source 1..414: mol_type = other DNA
aacaccaagggtcaaaacttagttcttccactttaatttatttaaggaaatgaaccctgcagatggtgtctaatgagttgacagaataactggctagctttatattttaccatctaaatactgtaagaacataccggtcagctccagatagcgctcgccgccgtgcgccccgccccgccgtgcgccccgccccgccgtgcgccccgccccgccgtgcgccccgccccgccgtgcgccccgccccgccgtgcgccccgccccgccgtgcgccccgccccgccgtgcgccccgccccgccgtgcgccccgccccgccgtgcgccccgccccgccctgtgacggtcccagcccgcacatgcgcagtctttccggagacccgaagagtcttcgaagggttctcgcgagaaggtgactt

SEQ ID NO: 1365 - DNA, 487 bp, Homo sapiens
  source 1..487: mol_type = other DNA
aattttttgagggaaagttagtgaatcaggtcaacttacttagagaatgtgttcatttactttaacccagaatacagtcttgtttctttaaacctaattcaataacatatgctttaaaatttgggcaaaggaaatgtttttcttttaaaaagtacttacattgaaaattaagatgtctggattactatgtaaattctagagagtagcagacctctcatctgaagtcttagtgaatctcttttgacatagatagcaatagaagtatctttcttctttcccctttctttttctaaacaagagaagaaaagcgtaacagactggttgaccgtaatcaccaagaacagtggtggctgcacattgcagtgagcacctctggtctcagctacttgggatgctaagtacttgagcccctgggtgacagagtgagaccctctccctcctaaaaaaatccttaagaaatatattgatgcttggttcctttaaactg

SEQ ID NO: 1366 - DNA, 468 bp, Homo sapiens
  source 1..468: mol_type = other DNA
aatgtttttcttttaaaaagtacttacattgaaaattaagatgtctggattactatgtaaattctagagagtagcagacctctcatctgaagtcttagtgaatctcttttgacatagatagcaatagaagtatctttcttctttcccctttctttttctaaacaagagaagaaaagcgtaacagactggttgaccgtaatcaccaagaacagtggtggctgcacattgcagtgagcacctctggtctcagctacttgggatgctaagtacttgagcccctgggtgacagagtgagaccctctccctcctaaaaaaatccttaagaaatatattgatgcttggttcctttaaactgattttaatatacataaagattccatcagatttgaaaaggtttctttagtaattttaaggactgaccagtttattaggtacctagtatcaacctagccatccaaccttatatta

SEQ ID NO: 1367 - DNA, 524 bp, Homo sapiens
  source 1..524: mol_type = other DNA
ttgcagtgcacctctggtctcagctacttgggatgctaagtacttgagcccctgggtgacagagtgagaccctctccctcctaaaaaaatccttaagaaatatattgatgcttggttcctttaaactgattttaatatacataaagattccatcagatttgaaaaggtttctttagtaattttaaggactgaccagtttattaggtacctagtatcaacctagccatccaaccttatattaataactaggaaaataaagggttggagcctttctttgttctgctactattattagatctgtgaaaacaattgaaaattcggttattatcaccttaaaagtacaaaacctatagattttgaaaatgtaattatttttctgtaggcatagttaaaaagattttgtaaatgttataaatcagtttctttataagcggtttatttagataaattttgttatactgacatgattcactaattttctaaatataaatggttcagctcttagttatttttaaactaatgac

SEQ ID NO: 1368 - DNA, 440 bp, Homo sapiens
  source 1..440: mol_type = other DNA
gtgcccccggcaccagggcatgatggtgggcatgagagcaagcacagtatccccttctacaagggagcacatggccttggaggagcacctggtgctgctgaccgaggacccccttatgtttgataccttcaacaccctggccatgtacgtggccatccaggctaggctgtcccacccacatggtgcccatctatctggacctggctggccaggacctgaccaactacctcatgaagatccttaccaactacgtcagagaactgtgctatgttgccctggactttgagcagtagatggccactgccacatcctcctcctccctggagaagagaatgagctgcctgatggccatgtcatcaccatcggcaatgaggttgcagtgtctccatcatgaagacacggtgctatctggtggcaacatgtacccaggactccgtgtg

SEQ ID NO: 1369 - DNA, 314 bp, Homo sapiens
  source 1..314: mol_type = other DNA
ctacgtcagagaactgtgctatgttgccctggactttgagcagtagatggccactgccacatcctcctcctccctggagaagagaatgagctgcctgatggccatgtcatcaccatcggcaatgaggttgcagtgtctccatcatgaagacacggtgctatctggtggcaacatgtacccaggactccgtgtgctagcaattgcttcatgggttaattcagaagtaaaaatttgcccctggcaaatgtaagccttagaaaataagttgtctttaaagcttgtatctgatatcagctggtaagggctccttaacc

SEQ ID NO: 1370 - DNA, 493 bp, Homo sapiens
  source 1..493: mol_type = other DNA
cacagagttcttttatacaatgtctggaatctgtgaataatatcagcttctaaatcataagttgatttttagccaatcaggcccaggcctggtttcaggcctggcgctgggcttcctggttgtttttactgaatagaaaacaatataaaacaaggagaagtctggctcggtgagtctgtgcggccagcagtctctgagggttggaatctaccagagcacccgcatttatacctgtaaaagtattcatccttttaatttatgtaaagttttttttctttaaagagatgacaacaaattttggttttctactgttatgtaacattaatatctaaaaggtcatttagatgatttccatgagagactttttgatgttctttacctgttaggattattattgataatccttttcagattatgaataaacagtttgccaagtatttattcatgctaatatttactttgtaaaatgtgcttcttacaggaatataaatag

SEQ ID NO: 1371 - DNA, 545 bp, Homo sapiens
  source 1..545: mol_type = other DNA
gaattacccatgtgtaaacatgtatacagatgttcattataacacttcttataaaaacaaaatatttggaaataaatgttcatattaataaggcataccgtatgatcttagtccagttagaatattctgttttatttcaatcctttaaaagactcaacttctgactctatatagacgattaaaaaaagaatgtgttcctttgtgcatttggtcaggtaaattaaaaaataagcttgtatctgtagcgagcctcagacaaaacctctcagacactgagttgtagaaggaagggctctcaaaatctgagctcccggagtgcacaatttctgtcctttttaagggctcacatcacagagttcttttatacaatgtctggaatctgtgaataatatcagcttctaaatcataagttgatttttagccaatcaggcccaggcctggtttcaggcctggcgctgggcttcctggttgtttttactgaatagaaaacaatataaaacaaggagaagtctggctcggtgagtctgtgcggccagcagtctctg

SEQ ID NO: 1372 - DNA, 325 bp, Homo sapiens
  source 1..325: mol_type = other DNA
gagaatttctgtcccttttaagggcacatggaagggagtttcacaatgttcttctatacaatgtctggaatctatgaataacatcggcttctaaatcataagttgatttgtaactactgggtttaggccaaccaggcccaggcctggtttgcttccttgttgtttttactgaatagaaaacaatataaaacaagaggacagcttctcgagcatttataccggtaaatgtattcatccttttaatttatgtaaagttttttagtatgcaattctcgatcttttaagagttgacaacaaattttggttttctgctgttatgtgagaa

SEQ ID NO: 1373 - DNA, 330 bp, Homo sapiens
  source 1..330: mol_type = other DNA
ctccgcggggatcactcaggctggccagagtccctggcagcctgagggatgccccggccttactccacaaggcatgcccctaaggagctgctcagttatcttgcttccaggtcagggaaccaagagaatttctgtcccttttaagggcacatggaagggagtttcacaatgttcttctatacaatgtctggaatctatgaataacatcggcttctaaatcataagttgatttgtaactactgggtttaggccaaccaggcccaggcctggtttgcttccttgttgtttttactgaatagaaaacaatataaaacaagaggacagcttctc

SEQ ID NO: 1374 - DNA, 355 bp, Homo sapiens
  source 1..355: mol_type = other DNA
tgaaaagacttgtcttactaagtttcactccgcggggatcactgccaggctggccagagtccctggcagcctgagggatgccccggccttactccacaaggcatgcccctaaggagctgctcagttatcttgcttccaggtcagggaaccaagagttctgtcccttttaagggcacaatacggaagtttcacaatgttcttctatacaatgtctggaatctatgaataacatcggcttctaaatcataagttgatttgtaactactgggtttaggccaaccaggcccaggcctggtttgcttccttgttgtttttactgaatagaaaacaatataaaacaagaggacagcttctc

SEQ ID NO: 1375 - DNA, 454 bp, Homo sapiens
  source 1..454: mol_type = other DNA
ctatacaatgtctggaatctatgaataacatcggcttctaaatcataagttgatttgtaactactgggtttaggccaaccaggcccaggcctggtttgcttccttgttgtttttactgaatagaaaacaatataaaacaagaggacagcttctcgagcatttataccggtaaatgtattcatccttttaatttatgtaaagttttttagtatgcaattctcgatcttttaagagttgacaacaaattttggttttctgctgttatgtgagaacattaggccacagcaacatattaatgtctaagaggtcattgagatgatttccatgagagactttttgatgttcttcaccagttaggattattattgataatccttttcagattatgaataaacagttttattcatgctactatttacattgtaaaatgtgcttcttacaggaatataaatag

SEQ ID NO: 1376 - DNA, 303 bp, Homo sapiens
  source 1..303: mol_type = other DNA
gcccacttcctggctgcccagggccaaggagggcctggttataaattgtgggacacatagtgactaagtgttcacaattgctaaaatgtgaaacattcaccattgttagcttatcttggaccacagagacacatttcttgttcaaccaagagggtcttgctcccccttatatatatagaaaaaaaaggccgatttctgtttggttttgagagcaattcggatttgtttctgtagctatgtctttctcttagaaaaggcaaggccttgaacttcaactttttaaaggggaatgaatttctaaaa

SEQ ID NO: 1377 - DNA, 353 bp, Homo sapiens
  source 1..353: mol_type = other DNA
cacatagtgactaagtgttcacaattgctaaaatgtgaaacattcaccattgttagcttatcttggaccacagagacacatttcttgttcaaccaagagggtcttgctcccccttatatatatagaaaaaaaaggccgatttctgtttggttttgagagcaattcggatttgtttctgtagctatgtctttctcttagaaaaggcaaggccttgaacttcaactttttaaaggggaatgaatttctaaaagagggggccctgttgcctcagcgccccgaggtcgtggagcggcagcagctgcagccggagcagcaccagcaacagcaacagcgagtaggaccgctcgggtttg

SEQ ID NO: 1378 - DNA, 403 bp, Homo sapiens
  source 1..403: mol_type = other DNA
gctgggagcttcttagaatctcttaaagaaacatcctgcagagcggcatcttttcagatgcttctttagagggatctcagggcccttataaccattaggcatttgcagggcctgaaatgtaatgaaggaattgttcttcctatttctggaggactaaatatgaaaagaaaattagcattaaaatcaatcctgactcagtttttttttaagttccatctttaactcaaactgtatttctgccaaaattaaaaataaaaaaaacaattcacacgaaatgttgtactatgtataatttgctattgttacaaatcgtttcttaaaacgaggcatgttgaaagaaaggttgcatttagctattgcttaataaagttcctagtcatttaaaactgtgagtcactttcct

SEQ ID NO: 1379 - DNA, 412 bp, Homo sapiens
  source 1..412: mol_type = other DNA
tgtggcaatatcttgccacaaataatttaaacattaattgtgagtctccaaaagatttacttaagaaacacgaatgcactgcttgtgcactgcgcaaaagttctggggtcaagcagcccggcaggagctgcccagggctacggccgccagtcgccgacgcatgcgcacctcgcgaggaaataggctcagggatcggggcggtttccgcaggcgtctccacgcactctcactcgggggacccgaccccaggacgccgggggctgcgtgagccccgcaaggctgcaggcgggggcgcgggatcccctttctggccgccgcccccctcccccgccctcggccacagaccccagccccggccgccggcgcgctcccacccgcgcgtctggggacttgcggaccgcagcgagaccgg

SEQ ID NO: 1380 - DNA, 362 bp, Homo sapiens
  source 1..362: mol_type = other DNA
agagggggccctgttgcctcagcgccccgaggtcgtggagcggcagcagctgcagccggagcagcaccagcaacagcaacagcgagtaggaccgctcgggtttgctatccttccacttgctggcagttgcagaagaagatctgctttttaagtgaaacgtacatgccacccctccgagggctgcggcttccccccaggagctcgctgcccgctcggagcagggtcccggccgggagccgctggtgggggcggggagtccgggacgtcgcgtctcactgccatcagtgctatgtgcagtgactcatgcggtgccaagcggcatagaaccgcctggccgctggttctgatccccgggaaccaga

SEQ ID NO: 1381 - DNA, 294 bp, Homo sapiens
  source 1..294: mol_type = other DNA
tgtcctttgcagcaatatgaatgcagctggaagccacagaaaaacaaatactgtgttctcatttcaagctgatggtgtaacccctgaatctacaataaaattattttattttaaaaaatcattataaggatttttaaaaagaaggattcctagacaggtgcagccaaacaattttttttaaatgttggcaggccgccttcctggagtgggagccggggctgagaactccgcggtctcccagcgcagcccagagtgcggtcccacgcaggtcccgggtcctgcgcgctcgcgcct

SEQ ID NO: 1382 - DNA, 448 bp, Homo sapiens
  source 1..448: mol_type = other DNA
tcctcttacgcagctgtgaatgaacaggattattacaattaatgatatctctaatatacaactttgttgtgaaggcagatatttatattctcattttctgaaggattaggtactttctctagtaatccatcttgagaagaacaaatccaggagtttctcctttaggatttaatgctttttaaagcgaagcagctctgggctgaccgccaaggctccggcccggacgcgctgacgctgcagccctggacctgctggggacccgcatgctgacagcgggactggcaactgggcagaggtcgaccccgggtccgcaacccagctcccagctccctcacttccggctctctggaggcgggcccggccagtgccgccgaggccagcgcggcgagctcctccccagcagcggcgggacggccacaccctgcgctccgcgcgggctcgggtgggg

SEQ ID NO: 1383 - DNA, 488 bp, Homo sapiens
  source 1..488: mol_type = other DNA
gatatttatattctcattttctgaaggattaggtactttctctagtaatccatcttgagaagaacaaatccaggagtttctcctttaggatttaatgctttttaaagcgaagcagctctgggctgaccgccaaggctccggcccggacgcgctgacgctgcagccctggacctgctggggacccgcatgctgacagcgggactggcaactgggcagaggtcgaccccgggtccgcaacccagctcccagctccctcacttccggctctctggaggcgggcccggccagtgccgccgaggccagcgcggcgagctcctccccagcagcggcgggacggccacaccctgcgctccgcgcgggctcgggtggggtctccgctcctgcgccctgcgccctgcgcgccgcagccgcaaccccgacggcgccccaaacgctgttgcgccgcgcgccccgcccagcccggcctcgcgctggtcccggtctcgccc

SEQ ID NO: 1384 - DNA, 450 bp, Homo sapiens
  source 1..450: mol_type = other DNA
tcaacagtgttagaacaactatatatatatatatatatatatatatatatatatatatatatatctccaacaatattccctgttcttttcaatatatgggaaaactaaattttcaggggatatatacaaatgattttgatcacttgataccttgaaaagagctattttgggacgagaatgatattcgtaagtgacaagtatgagggtagaaaatcttttttaaaagtgaattattccttcattttcagtcgatacagaaaaaactctaaaagtttgctatctttcacttgtggaaaagcattaagatcattttaccttaaaaagaaggtgaggtgataaccttctggaaaactatccctaccttgatgattttaaatggtccccatcagtgaccctcaggtgagaccagggggcctagtgtgaatgcagggtttctaagattccatgaca

SEQ ID NO: 1385 - DNA, 447 bp, Homo sapiens
  source 1..447: mol_type = other DNA
aattactgtggcagaatctgagtgaaaaatcacgtaaccaactttgtaacattcattgtaacaatacatgcatgattacagaaagtggcgcgatctccgatcattgcaagctccgctctcctcagcctcccgagtagctgggattacagcgtagccagactaagcatttcagttctcagtatagacagacaaatttttaagtcctgggtgacaggaactagataaaatttagagtacctaacggaaattttagttttaggatttcaatttgaagattttaattgcctctattaacccatggctctcaaactcttcgtcgcgggttagagtccgcggccaagcccgcgcccgcccacaacctccggcttccgccccgccgtgcgctgcaggccgcggccgctgggggcgcccccgacccccgaggcgctgaggcggcggttcctcgag

SEQ ID NO: 1386 - DNA, 637 bp, Homo sapiens
  source 1..637: mol_type = other DNA
aatgtttgaaaatacagttccaatatatcatttgtggcatattaataggctattaattcagtagcaaaaacaccagcttttgcatctttcaaaatacttttttcatatacaggaaagaaagtacttatatatatttttctgaacgcaggtgtcactgggccaacttcacccaggcccccgtggactgctctgggatgaaagcggaggctgactgggactccagccgccggccgcctcgcgtggagccttgctgctccgcctttgccacgcctcgggagcgccacgaactcaacagccgcccaagccgccttccggctcgcggtctgcggacgcgctcggagttgggggccttcgccaacagctgccgtaccgtgccgcgtcgcagccgcacgctagcggggtcaacggcgcggcaggcgcaggggtcctttggcttctgggcatgcgccacagcggccgttacgagcttggaactgagagcctagagggacggagctcggcgcaccatgaggctcccggggcccaaggccgaccgtgagagcgcacgaggttggcgagccccgcggggaggccgaggcgcgggtgcgggcgccggcgtagccgcggcggtagcgtcacgcagcgaggccgtgcgtgc

SEQ ID NO: 1387 - DNA, 521 bp, Homo sapiens
  source 1..521: mol_type = other DNA
gatcctattgttagagattggtgtaatttatttggagctgtcagcatagtgctttaatgtttgaaaatacagttccaatatatcatttgtggcatattaataggctattaattcagtagcaaaaacaccagcttttgcatctttcaaaatacttttttcatatacaggaaagaaagtacttatatatatttttctgaacgcaggtgtcactgggccaacttcacccaggcccccgtggactgctctgggatgaaagcggaggctgactgggactccagccgccggccgcctcgcgtggagccttgctgctccgcctttgccacgcctcgggagcgccacgaactcaacagccgcccaagccgccttccggctcgcggtctgcggacgcgctcggagttgggggccttcgccaacagctgccgtaccgtgccgcgtcgcagccgcacgctagcggggtcaacggcgcggcaggcgcaggggtcctttggcttctgggcatgcgccacagcggccgttacgag

SEQ ID NO: 1388 - DNA, 481 bp, Homo sapiens
  source 1..481: mol_type = other DNA
ctggagtgcagtggtgcaatcatagctcactgcaggctcagattcctggggtcaagtgatcctccggcctcagcctcccaaacactccggggctcaagtgatcctattgttagagattggtgtaatttatttggagctgtcagcatagtgctttaatgtttgaaaatacagttccaatatatcatttgtggcatattaataggctattaattcagtagcaaaaacaccagcttttgcatctttcaaaatacttttttcatatacaggaaagaaagtacttatatatatttttctgaacgcaggtgtcactgggccaacttcacccaggcccccgtggactgctctgggatgaaagcggaggctgactgggactccagccgccggccgcctcgcgtggagccttgctgctccgcctttgccacgcctcgggagcgccacgaactcaacagccgcccaagccgccttccggctcgcggtctgc

SEQ ID NO: 1389 - DNA, 203 bp, Homo sapiens
  source 1..203: mol_type = other DNA
ttctagttctcttgcaacctaaaacaaaggaactccagatgtggatcctggaacagtctactaggcactacaagatgttatctcaatcttacggatgaataaatttaagcggaggtcactgcagcgacttcagcgtgcagagaacgctgagcgtctctgattggccgccagctcagcttggaacctggggtgccgccgggccc

SEQ ID NO: 1390 - DNA, 557 bp, Homo sapiens
  source 1..557: mol_type = other DNA
aatattagacattattattagtagtagtatctaaccacttctacatgtcagcaactaaactgatctcacttacgtttgattactttgatttaaagttgagctctcaacaataattgtagattctgaagcaatttgttgcataaatttgttaataaatgattattcttttgttggttcatttatgtatatcttatcattaaggcattcaatttttaaactaagttttaactacctgcagcattccaggaattgtgctctttaattagattgtaaattattcaggggaaagagttgatctctcatttctttgagtttcctaacaattactgtgtccttgaaaaaatgaatgaaataatcatttggggacagtaatttccattgggcacttcgcgttcctaggccacaggacgtcgaacctcgggcgacagcagcctcccgctagggggctcccgacttccctgcgcagcctccgtccgggagtgggcggaaattcccttgctgacgcgcgtgacgtcaccggagggcgcgagggggtggggcattcccctgcagcaagg

SEQ ID NO: 1391 - DNA, 352 bp, Homo sapiens
  source 1..352: mol_type = other DNA
gaaataatttcccagaaactgagtgaaactgagtaaaactgccacccaattttcctgggaaccagcgattctgtagtcaacagaagtttgcttttccaacagctggaaacgcagcctcaagaactgaggctgccttgttagcaccaagtcttccaaaaaggcggcgctggttttgcgctccttttttaaagggtttattgctctactttttagtgtctgaagaagaaagaagaggagccccctgtcaccttgacacgcagacaggactgcgaagaggggggcaaccagcgccccgccccgccccgctgcgccgcccgccattggccggtccgaaagacgcggggcgtgagcg

SEQ ID NO: 1392 - DNA, 380 bp, Homo sapiens
  source 1..380: mol_type = other DNA
aagaactgaggctgccttgttagcaccaagtcttccaaaaaggcggcgctggttttgcgctccttttttaaagggtttattgctctactttttagtgtctgaagaagaaagaagaggagccccctgtcaccttgacacgcagacaggactgcgaagaggggggcaaccagcgccccgccccgccccgctgcgccgcccgccattggccggtccgaaagacgcggggcgtgagcgcctggagccggggcgcaggcgggcgggacccctaggtggcggagggacgctccgggaaagcgaggggcgctacgagctctggcccacgtgacctgccgggggcgggagcagggggcgcgccggcctcctgcggtgcccctgccttg

SEQ ID NO: 1393 - DNA, 390 bp, Homo sapiens
  source 1..390: mol_type = other DNA
ttttttttttttcctaagttgtttctttaaggtttagaaaataaactggttttacaaaccttctgagagcaaaggaaactgctgtgttctttttcagcaagttgatgatcacaaagttattctaatgttattccatacagcatgggatgattaattgctgattaaaacattaataaaaggccacattgaagaaataaattgttgctttggaattagaaagaggctggatctctgcctcctttagctttaaagttgctgaaagtcagcagaaaaactgcattgccctttgcaaagagaacatggggaagcaggccagctctgcactgtaatgtattatagctgatattatactttgactctaactaatgttgaattgattttatggttaca

SEQ ID NO: 1394 - DNA, 316 bp, Homo sapiens
  source 1..316: mol_type = other DNA
acaatgtgagtatctaataccactgaattgtacctttaaaaatggttaagatagtaaattttaccatcttcacagttagaactagatcacctgaggtcagtcccagctggtgagccgagccgagatcgcgccactgcactccagcctgggtcatgcttgcgtttcatggcgaatgttacacattcaaacttatcaaatatattaatagtaagaaaataggtttcctattccttcgcagaaagagttccagaggccggtcccgctactagccccgcccaatcaacgaggccaatcagcggcccgcaacgggggaggg

SEQ ID NO: 1395 - DNA, 590 bp, Homo sapiens
  source 1..590: mol_type = other DNA
taatcctagcacttagtccgccaggaggagattgtatcactgtactccagccttgtctctaaaaataataataataataataataacccaaaacccaatttatttaaaaaaataattctatttcattatatatattaaaaattgttttagccttatactcatgatgatgactggatgcttaactatgatgctgcttcaggaacaatgatctcaggtattaaaaaaaattcgtgcatgtgtgtgagaccttatagtcccatgatggaaacagtctagctcacagagctatgagggtcatggatccatgattagcaattatgcagaatattttcttgacactgttaatctaaaattatttcaaacctacctggtattgaatttgaatgtaaagcccttgaagtagcaaaataatatgattttagttcttagtgtgtacatttgaaactttttttttgtggttcagtacaatttaagaatataacatgcagagtcatgaaatgatgaagtcagaatcttagtcttcattaaccaaaggctatttttgtaactaaactataaagaaataaaatgtttctatactctgttttagg

SEQ ID NO: 1396 - DNA, 316 bp, Homo sapiens
  source 1..316: mol_type = other DNA
gccaggctgacttcctggatgcttaattaagctcggttgaacatcgaacatattaaatgttaagtaactgaaaaatgctttcaaggcagatcagctttgcaacattaatttcattaacctttattaattatcggggaggagtatgaagagtcaatgcgcagtcccgacccccgcccgccccgcccaggctttggtccgccccgcccaggctttggtccgttcggctcaggcacctgcctggccgccccgcgcggcggggtcctgaggcgcctcggggaagcgcggcgattggctgccgctcgcgggtagagctcgg

SEQ ID NO: 1397 - DNA, 383 bp, Homo sapiens
  source 1..383: mol_type = other DNA
aaatcccaggccctaggctgcagtgaaccctgattgcgccacttcactccatcccgggggacagtgaggtaggttgcagtgggccgggatcgcgccactgcacacttcagaaaaaaccttcacaaaattttaaatgcttagtctcttggaaatttgtgatgaagcacagtatccccaataattaacacagtgcttagaaacagtggaactacaaatctttaaaatgatttaaaagcatatttgtctgataaaggctatgaatagggaggcgctccggcctcctcccttagagactgtcgcatttccgccgctaggccggaaagcaccaccgtcctcccgcaggccgcagagggctaggcccagctacggccccgcgcgtcacc

SEQ ID NO: 1398 - DNA, 137 bp, Homo sapiens
  source 1..137: mol_type = other DNA
gcaatggcgcgatgacctcagatcagtcacggaggccgcaggtgcggcttcttcacccgcggtgctggtgctgcttacacgccagccccaccaagtacgaagccttcgagatagcgttcttcttaccctacgagtag

SEQ ID NO: 1399 - DNA, 388 bp, Homo sapiens
  source 1..388: mol_type = other DNA
ccctccagacgtcgtcgcctggaagaggccccagtacgtgttccctcctacgatctctctctctgagacagggtctcactctctcgcccacactggagtgcagtggcgagattggcccgagtagctgggactacgggcgcagactggtctcatggctttgaaagcctttcctcaactgaagtcttttgcagaagtcctgatccgccgaggctcaggagtgcaattccaagtctcgggcccgctcagcggaacgttccctctgcagtccccggagcttcctccccaggggcctcccgtggtcagccgccaggtggcgccctcctctgagggaattcctctgtcatagatggctgggcagttgcctggcaaccgaaaccagcgctccaaa

SEQ ID NO: 1400 - DNA, 489 bp, Homo sapiens
  source 1..489: mol_type = other DNA
tttaaggtgagttcatcctaaaggtacccaggtagctccccttcttggggctgggaccttcgctgagctcagcatcgtggcgtctgaaactgggtccccaaggtctccgcctggatccaagacttttgtgaccaaaagtacctgaagctccggtcccgttccctgggtcacctggaaggcggtcccagcccagagcagcagccgccacagccggggtatgcgcctctcagccctgactctggcggagagatggtggctgtgcccaggctcagccatagcgtagtgagcggcagtagcggctcaggtgctgcggctgctgcttctgctggcagaaggcggaaagaggccaggctcgcttcagtcacctctctggctccgcgcgggtggggcagggaccacgcgcgcctctgcagctcacctgcgggtcgccatggcagccgccgccgctggtgcgcgcggcgtgggcgcgggagagcgcgcgcccggggt

SEQ ID NO: 1401 - DNA, 365 bp, Homo sapiens
  source 1..365: mol_type = other DNA
cgcccgtagtcccagctactcgggccaatctcgccactgcactccagtgtgggcgagagagtgagaccctgtctcagagagagagatcgtaggagggaacacgtactggggcctcttccaggcgacgacgtctggagggcttcacacgagccccgggcctgcctgttgggccggttgcgcaccccgggcgcgcgctctcccgcgcccacgccgcgcgcaccagcggcggcggctgccatggcgacccgcaggtgagctgcagaggcgcgcgtggtccctgccccacccgcgcggagccagagaggtgactgaagcgagcctggcctctttccgccttctgccagcagaagcagcagccgcagcac

SEQ ID NO: 1402 - DNA, 480 bp, Homo sapiens
  source 1..480: mol_type = other DNA
aagcccaaatatatttcatattataaataaataatatgatagttagctatgtcacaccctcatctcaggagtccatgacggcggtataagatcaagaaggtcttagcacatctagcttcgagaagaggagatcacctgttcccaaatccttaaataatctcttgttatcagggagattctaatatttcatttaaaggtctgaacattataaaatcaaagtatgatacaaaccgttcttcaagaccttatacggcgttcaaatgctcttaagagttggtaaagtgacaatttggtttatccaataatcagattaataaaggtatacggccccggcctctaagctagggatgaggggacaggcctctgccctgctgtagcagagctggggagcaggccccgcctccaaccagccgcttccggtcgcggggagggtcgcctgcgggctccagctgcgcctgcgcaggaagggcgggtcagcgc

SEQ ID NO: 1403 - DNA, 395 bp, Homo sapiens
  source 1..395: mol_type = other DNA
agttcactggtggcccgggcaacataacaagttggtttaagcattttacaaatactagggggctacttacaaacaccccatcctcctttcacagataagcgaagagaggggtcagttaaacttgggttgcatttgaacctaagccgcctgcgttctttgcacctcagctgcctcaggttcttgaagaggcgatggaggatgtacttctaagagaacctcaatatacctacaatataagtgtttaggtgccgttaggcagcacaaccgttctggagactgggtgctcggcggcccagcagacgggaaagagagtctccgcgcacgcgagcacgcgcactcgcagcctcaacccaccggctgacttccggccggcagctcctcagcccctccccctg

SEQ ID NO: 1404 - DNA, 491 bp, Homo sapiens
  source 1..491: mol_type = other DNA
actccgagtcggccatttgcccagagtcccagctggtgagaataggcaaggcagccattgacagctctcaaagggggaagtgtcggctacactctgctaagcactttacagagattacctctttaatcctcatatggttataattatctccattttacagatgtgtgagtcacacagctagttggtgacagagccccaagtggcacctgggcagccagtgcgagtgcagtctccacctaccactgcgctgtgcccgctgcccccggggagcgggggaggatgggacattacaattcatcctgggccccttctttgggacctgaaaccctccctacagctgtggggggtgtcatctctctcccgagataacagggacacctgctgggcgtagctgagtggggagggccagcccagttacgtaaccctgtggctgggacccgggaggccagcctgggagcaggtgctcagcccctccctcatcaccagcagtg

SEQ ID NO: 1405 - DNA, 438 bp, Homo sapiens
  source 1..438: mol_type = other DNA
aaatgtgcatctaggaaatgatcatgtgtacagtctttggcctacctcccctcagaagaggaaggtgagagaggccaagactattcttcaggcttgcccttcttgcagcaaggcagctgcttagtgagcggggtttataaaaacccgaagccccggttcatgacagctgagcaagctcagggatttcctgggtaagccccaacttgagggcgctagaggtgcggcaaggggtcgcgacgccaggagcccggggctcggcggtcgtgaactccacaagccgggcccgggagacgccgggcgaggcggggttgacctcagcagtctctgcatccaggacccccgaagccgccagcctatggggcggagaggcccggccgcgcgtatccaaggagcgccgcgctcggctcgggggtgtggcgcgcgccggcgggggtgggc

SEQ ID NO: 1406 - DNA, 398 bp, Homo sapiens
  source 1..398: mol_type = other DNA
agttatataaatatgaatgaactaggttagaattaggaactacatggatctcagtctgttaagataacaatagtaattcatacaaataagtagagaaatgtacctgtgactaacttttagtaaaaagtaataattaggcaagaccagcctgcgtgagctgagatcgcacccgcctgagactctgtctcaaaaaaaaaaaaaaaaaagtaataactgtgttttatagagattgaaaacataaggaaaaatgcacattttcttggaaattggctgtaagtctattcagaatggatccaagttgattcaggattgaggttaatgtacaaaaaaagagctagttgtcaaggaacttgaattcagtgtctacatggctagtttttatgagtataattaataat

SEQ ID NO: 1407 - DNA, 252 bp, Homo sapiens
  source 1..252: mol_type = other DNA
aaactttgacaaatacttgaattacagtgtgctcctcaaagaagcgtcgaaaaagaaagcgctttttttttttttttttttttacttatttttcacaaacaacagaagtgaatattttgaagtctggatcctgaactctaggttatttaggtctgaatgataaaattaccttaaccatgtggaaactttaagactttactcgtccgcggcgccggctcagacccattgccggaaacggaggaagtacctcct

SEQ ID NO: 1408 - DNA, 426 bp, Homo sapiens
  source 1..426: mol_type = other DNA
ttttcactctcatttaaatggtaatgaccattttaaaggagattaagtttctacttgttaaagattaataactttttttttagagtctggactgtcgccagggctggagtgcaatggcgcgatagctggactggtctccttttaaatcactaacatacaaatgtcttttgttgttttaaaaaaaaatcaaaacaatacctaggataaaaaatcagcagcttatattctatcgctagaaccttgtttcacagccattctagaggagaaaacctgaagcctgtgcgtccaggtgcgccccgcggtgtctcggtggggaccggtcccggaggcttcggcgaggaggacccggagtcccccccgccccgcggcggaaccctctggtccctttaaggtgcccggagggttcgggagcgcacgccacgtgac

SEQ ID NO: 1409 - DNA, 378 bp, Homo sapiens
  source 1..378: mol_type = other DNA
aagctctgatgagaaatctccctatgccgaggcttcagaaggctgcctcggggccaccccagttctggggctggctctggctcggagacagccttctgtcatcctgtcatcatgacaggtgatcttggtcagcttggccaggtcctctcaaatccagacaaccaaccctctgctctgcatcagggcagcgtgggtacacgggagccgaggccctccatctacaggggagcggagtcgcttcgtggccgccagcccgggaaggggcgccagccagctggcggacgcacggcttagaggcaacctgtgttgcgcttgcgcaaaggcccgcgacggggcgagggggagggggccgcgcggcggcggcgccagggcgggcgc

SEQ ID NO: 1410 - DNA, 472 bp, Homo sapiens
  source 1..472: mol_type = other DNA
ggcttgcccactccttccctgggcaaagagaggaatatgcccctcctgggcatgggaacagtgggaaggagggagtttccagattcccccatcccaaagggggttttggccccatgggggaccagcgccgggaagtccagggccgggccaaggactttgacgtgctggtgggggagtctcccagggcgagttctcgagcgcccctcccaggagctcccctcctcagtccaggttgtagcagcggtggctgctcccagcagcaccttactgtgcactgcccaggtacgtctagcctacctcacctgggggtacttggcccctaagccatcaggggcccctggaaacagggagtgtcctggaagaggcactccctcagccctgagtgtgggggtatttggaagcaggagactcccctgtttccaaccagtgtgccagatcccactcggccccttcgcgtgcagaggctatgccg

SEQ ID NO: 1411 - DNA, 341 bp, Homo sapiens
  source 1..341: mol_type = other DNA
gagggtcctttaaggaaggggtagaacctttcccagggaggcctccttgggttgggaggccttggtccttcaggatcacctggctcctcagggctgagcagctgctgaggaggcgagaggaggcatggaggaagcttgttccctgcagtactactagaaatcggcccaaacttgtttcacggggaactgttcggtccccttctgcctccgggctctcgcgggagcgggcctctccggggcactcgcgtttcccccccagcccccagagggcgctgtgggccactccgccgcactgccggcggcgtccccggggaggagcctctcctgcagccgccaccgcc

SEQ ID NO: 1412 - DNA, 350 bp, Homo sapiens
  source 1..350: mol_type = other DNA
aagtttcaggtgatactagggctgagaggcaaattttactagaacctctccttttgcatgttatcgcaacaggaaattttatcttggttttagttctaagaccctaaggtctacaggcttacctttcaggttatcgtttgccattatattgctgaggtcctaagcacagtcggtgttacgatctcagatgtgagacgtgaacggcgcccaggcccattccattgatctgagataaccccaacggaggcagtgtcccatacttgggtaggggttctggcaggcgagaaattaccagcagatattcccgcgcgggatgtagtactcctctccctgaggagagtggtttccgt

SEQ ID NO: 1413 - DNA, 397 bp, Homo sapiens
  source 1..397: mol_type = other DNA
atacactagtaacagcttcttgttgtttcaggggccaccctaaagaagtatgttgcaattgccagacctaagggctgaatgacttcctccgccaggaatggaggggtgttctggggcctgggctcaccaaacaccccctttctcctgcgcagctggcttgcaggctaaggagctgtacgggggtggggtggggggaacccctcccccaatttttgaatttcccgccaacattggcaagatttcttcaatttgcgaaattaaaagacatgtgatccggagctcgctggttgagggaacgaccccgcgcgcgtccgcccggccggctccgacacacacacgcacgtgcgccccgcccccgccgcgcgcacgcgccccgaggctccggcggcggcgacgg

SEQ ID NO: 1414 - DNA, 343 bp, Homo sapiens
  source 1..343: mol_type = other DNA
catttaagtaaactgaaataattggcagagtctggagagagttttttgtgtgaggcagcacaaaccccacactgaataccagcaaagttcatttatgaagtgaagttgggaaccaaaccttttgatccatctgagatttagcttcctggagcagcagccactgcgggagctgaaacctgaagcccttgagatcaagaccttataatctggaggctcaacataaggaatgctttctacatatgtgccagtaatctctagctctatgatgcaaatagggatgaaccccttaaaggatggaagtagtcgtgcatcctatcccctagttatagaaacatttgagtct

SEQ ID NO: 1415 - DNA, 328 bp, Homo sapiens
  source 1..328: mol_type = other DNA
attaattcctgctaatgcatttaattatattcagtgaagtcttagggacttccctgagtactaaagttctaagcagttaacttatattaactcatttatcttaacctggatttgaacccagacattctggctagagttaaagctcacttcgtgccaggcactgtgtaaagggactttacgtttaatcttcacagtaacccctttgagtgaggtactgtcattaccccatcttactgatgaggaagctgacgcacggaactggcccaagacccagggtcggctcaggccagccctaccgcggtgtggtggctgcccacggcggaggcgg

SEQ ID NO: 1416 - DNA, 504 bp, Homo sapiens
  source 1..504: mol_type = other DNA
gcggctccgcaggcggaagaggccctggccacgatttctcatgttgtctaggcaactcgggcctgcctcctcagtcccaggagtgacgtgactgatggatggggaagggccagcccccagctctccccagggctcccggggctagctggtccttccagctagcctggaaccccggggcagggcagccctcagctcccggggtagcccagctctgggaggagggggaagcccaggagggaggggcctgtcccgggaaaattccacctcccaggaaggcaggaaggccaggagacccccttgtctgggggtctgggacagagaccctagcctctgctccccaggccctcctgggaggagctgaccgcctagttccgaggggaggctgcccacgagaagtctgtgggacggcagggggatcgggccacagaccccagccaagtcactccaagggcccctgccctggcactgagatggggaagtaaggcagtctttcaaaattgccag

SEQ ID NO: 1417 - DNA, 399 bp, Homo sapiens
  source 1..399: mol_type = other DNA
aagccacctgggacctgggccccgtcttctcaacaactgttgtttcaataaaggaatgaccaaatgggtgaatactaatgtaacaatatcaattctgtttctttcataattattctcataagtgttagctttcttaaaaaatagacattttatctttcccagctcaagatggataaactcagaatgacagccaggcaccgtgtcaagaccagtctgctcgtctgtaatcccagctgctcgggaggctgaggctgaaaagactcagaatgacacattcttaatgtcttaatgtataatgagaagtataactattcagaagtccaagcacttggattcctgagcctggacccagtctcagagctggggaactggcccaaatctgcaacagagactgagctc

SEQ ID NO: 1418 - DNA, 468 bp, Homo sapiens
  source 1..468: mol_type = other DNA
gctcgtctgtaatcccagctgctcgggaggctgaggctgaaaagactcagaatgacacattcttaatgtcttaatgtataatgagaagtataactattcagaagtccaagcacttggattcctgagcctggacccagtctcagagctggggaactggcccaaatctgcaacagagactgagctctatcagcttcggtctaagacttagtagccaagaagtgttgaattaaatgaccctggcagcctcagtctcccagagcctgtgggaactcggcagccgagagagccgagtccctggggacccagcagaggtccgaagcggagcggggcggggcggggctacggaagctggcgaggccgagcccctcctagtaggatccagcaacctggaccttgaagatcggccggttggaagtgacgaccttgaagatccggggccgagggggcgggtctggcgctaggtccagc

SEQ ID NO: 1419 - DNA, 462 bp, Homo sapiens
  source 1..462: mol_type = other DNA
taattattctcataagtgttagctttcttaaaaaatagacattttatctttcccagctcaagatggataaactcagaatgacagccaggcaccgtgtcaagaccagtctgctcgtctgtaatcccagctgctcgggaggctgaggctgaaaagactcagaatgacacattcttaatgtcttaatgtataatgagaagtataactattcagaagtccaagcacttggattcctgagcctggacccagtctcagagctggggaactggcccaaatctgcaacagagactgagctctatcagcttcggtctaagacttagtagccaagaagtgttgaattaaatgaccctggcagcctcagtctcccagagcctgtgggaactcggcagccgagagagccgagtccctggggacccagcagaggtccgaagcggagcggggcggggcggggctacggaagctggc

SEQ ID NO: 1420 - DNA, 496 bp, Homo sapiens
  source 1..496: mol_type = other DNA
tctgtaatcccagctgctcgggaggctgaggctgaaaagactcagaatgacacattcttaatgtcttaatgtataatgagaagtataactattcagaagtccaagcacttggattcctgagcctggacccagtctcagagctggggaactggcccaaatctgcaacagagactgagctctatcagcttcggtctaagacttagtagccaagaagtgttgaattaaatgaccctggcagcctcagtctcccagagcctgtgggaactcggcagccgagagagccgagtccctggggacccagcagaggtccgaagcggagcggggcggggcggggctacggaagctggcgaggccgagcccctcctagtaggatccagcaacctggaccttgaagatcggccggttggaagtgacgaccttgaagatccggggccgagggggcgggtctggcgctaggtccagcccctgcgtgccgggaaccccagaggaggtcgca

SEQ ID NO: 1421 - DNA, 505 bp, Homo sapiens
  source 1..505: mol_type = other DNA
catgtcccctgaggggccctccacttggatggatactaatattaaaataataataataataataatagaaatcataatataactcatgtagttaaggtaagtcctttttgatggaacatttatttcagttaataatataactttttattttgatttaacatgagagtttgagaaatttacaaaaccccagcaagctccctaggcttatgacaaaaacatcattttcttttctctgagtttataacaatctctatcatacattgaaaagttttgaaaacttatccagtgctttattcagaatctctctgttttagagagagcctttctttccatagctcagttcagtcttgaacccctggactcagatctctctcctgaaacccacggggctgggaggtgggaggagatcctactcctagccccatgagcgcgctccaggcctccagattggcccgtttcgggggcagggcgggccgtggggcggggtcgcagcaaggcttcccct

SEQ ID NO: 1422 - DNA, 471 bp, Homo sapiens
  source 1..471: mol_type = other DNA
tactgacagccagtacctttatacagaggggaacaaaagcccaccaagagttttgcttaggcctttcctgggccaaggaattcttaacaggacctatttagaattaaacaagttttattgtgagtctgaagaaactcaggcctccacaaacaagtttattgggcgtccatttagattaaataaatagactgaggctccagaataaggtcctcaggacccagacctcagttacagattaaagaagttaatcacttatgtctttagatgaatgcacacttacttgtagacatataccttagaaggtatatatgctctggaaaaaggccttctccctgttaccggttgcagaacctggctggacatttctagggggcacctcagatacctcaccaacttgctggatctgatccttgatttcgattcataaattgtgccaaaatacgaagtggctaatttacacagtacttagcc

SEQ ID NO: 1423 - DNA, 425 bp, Homo sapiens
  source 1..425: mol_type = other DNA
agtcctgctcttacccctgcagccggagtctcccagagcccttgggaactcggcagcgcgcacagccaagtcgctgtggacctagcaagctggcgaggccgagccccgccttgggcttctgggcgccctgacttcgctcccggaaccctcgggcctgggaggcgggaggaagtcttactgagtgcagccccaggcgccctctcccgggcctccagaatggcgcctttcgggttgtggcgggccgaggggcggggtcgcagcaaggccccgcctgtcccctctccggaccgccagcaccatgcccatgatgggaccgttcctcttcagggctgcccgcctcagaagggcctgtttccctggtgcagacaaagtcagggaccctccatgacctgcgggccatctctcccagctggcccacgccatcg

SEQ ID NO: 1424 - DNA, 408 bp, Homo sapiens
  source 1..408: mol_type = other DNA
cctggctggacatttctagggggcacctcagatacctcaccaacttgctggatctgatccttgatttcgattcataaattgtgccaaaatacgaagtggctaatttacacagtacttagccagtcctgctcttacccctgcagccggagtctcccagagcccttgggaactcggcagcgcgcacagccaagtcgctgtggacctagcaagctggcgaggccgagccccgccttgggcttctgggcgccctgacttcgctcccggaaccctcgggcctgggaggcgggaggaagtcttactgagtgcagccccaggcgccctctcccgggcctccagaatggcgcctttcgggttgtggcgggccgaggggcggggtcgcagcaaggccccgcctgtcccctctccgga

SEQ ID NO: 1425 - DNA, 461 bp, Homo sapiens
  source 1..461: mol_type = other DNA
gtttcagtactgactgagtgatgaaattaaatgccagtacctttatacagaggggaacaaaagcccaccaagagttttgcttaggcctttcctgggcccttaacaggacctatttagaattaaacaagttttattgtgagtctgaagattagattaagtaaatagactgaggctccagagtaaggtcctcaggacccagacctcagttacagattaaagaagttaatcacttatgtctttagatgaatgcacacttacttgtagacatataccttagaaggtatatatgctctggaaaactagtaatttccaggccttctccctgtaactggttgcagaacctggctggacatttctagggggcacctcagatacctcaccaacttgctggatctgatccttgatttcgattcataaattgtgccaaaatacgaagtggctaatttacatagtacttagcc

SEQ ID NO: 1426 - DNA, 399 bp, Homo sapiens
  source 1..399: mol_type = other DNA
cctggctggacatttctagggggcacctcagatacctcaccaacttgctggatctgatccttgatttcgattcataaattgtgccaaaatacgaagtggctaatttacatagtacttagccgaggaagtcctgctcttacagtgaccccctgcagccggagtctcccagagcccttgggaactcggcagcgcgcacagccaagtcgctgtggacctagcaagggggcgaggccgagccccgctttgggcttctgggcgccctgacctcgctcccggaaccctggggactgggaggcgggagggggcttattgattccagccccgggcgctcgctcgggggctggcgggccgaggggcggggtcgcagcaaggccccgcctgtcccctcctgggcctctc

SEQ ID NO: 1427 - DNA, 427 bp, Homo sapiens
  source 1..427: mol_type = other DNA
tccataacaggcatgttaaacattgttgagtgaatgaaaaatggtagtacctttcctcctccagttataataaggaatccataaattacttaaagagacctcttctggccaggatagaggttggttctgagaaggcttcgatccagccccggctggctcggtaaacgcgaatccgctctccctgggtaactagggtccccatggcaccattaatgaatgaagtctggctcccacccgcggggaagggaggagcctcaacctcgggtcctctcctgcagcactcctgcccgggtcccgcctcggggtcgccaggccctgaaccccaacgccggcattagtcgcgcctgcgcacggccctgtggagccgcggaggcaaggggcggaggcggagtcagggcgcccgcgcgtgggccccgcccccttatgt

SEQ ID NO: 1428 - DNA, 278 bp, Homo sapiens
  source 1..278: mol_type = other DNA
ctggtttcaaacacagagtgatctctctgcctcctgcaggtaggaatgtaaaaggaacagcaattattctgttttatatttatatcgtctttgtttaaagattaacttcatgaggccttgactagctatttactatatattagtttatttcttccccattagaatgtaaacttcctgagggcaggtccataacaggcatgttaaacattgttgagtgaatgaaaaatggtagtacctttcctcctccagttataataaggaatccataaattacttaa

SEQ ID NO: 1429 - DNA, 225 bp, Homo sapiens
  source 1..225: mol_type = other DNA
agggcccagcaccgggaccctgcattctgcccacgagggtccgaggctcactggcactcgagggcaggggagcctggcccactctgagtgccagatagatgcaggcctccgttttccatctttcctatgggtgccacccacgcacaggcatggcacacaccccagactctggtagctaagctggggagcggttagtgaccaggaagcctccccacccacaaaggc

SEQ ID NO: 1430 - DNA, 255 bp, Homo sapiens
  source 1..255: mol_type = other DNA
gcaatttcagcctgacaagagactcctcttctataattaataggcttaggctcatcctactagtcctttttatggcacccaggagccccccagcttgctgtcacaggacacagctgctcccttcctggccaggtagctggcctccctcccagaatgggacgccgggccctgctgactcaggctccacgggtgggggcgtcttcaaaggatcctggagggaaagtcccttgggacgatcatagagcgctccgcgct

SEQ ID NO: 1431 - DNA, 272 bp, Homo sapiens
  source 1..272: mol_type = other DNA
tataattaataggcttaggctcatcctactagtcctttttatggcacccaggagccccccagcttgctgtcacaggacacagctgctcccttcctggccaggtagctggcctccctcccagaatgggacgccgggccctgctgactcaggctccacgggtgggggcgtcttcaaaggatcctggagggaaagtcccttgggacgatcatagagcgctccgcgctgacgcgcgagcggggctggccggccggcgggtgcctctcttaaaaggc

SEQ ID NO: 1432 - DNA, 422 bp, Homo sapiens
  source 1..422: mol_type = other DNA
ccctggactttccacaggacatgtaattggagccaatgtcatttgaatctcaaagtcagcgccttgcaaaacataaaatgcgtcacatgtccttttgccagcagggcctcagcacaggcactgcacatagcagtccatgaatgtcctggacagactactctgagtcagtcggccccttgggaaggagctttaatccaaagggcctggggctgggccagtgagtgagtgggctgtctcgagccccggacatttcctaggactgaggcatcgttgccgcgctgctcccagggctgatggtgccacctggtggcacaaagggtcctgctcaccctgggaacttcgctctcgagcgggagaggaacggcttctgtggcccagcccagcgtggtgacgtcacgacagagtgccctggagctgccagt

SEQ ID NO: 1433 - DNA, 415 bp, Homo sapiens
  source 1..415: mol_type = other DNA
aataaatattcttgagaaaattggggaaatttgaatataatctggacagtctggatatatgaatatatagaataattgttaatattaagtgtgatatgtctaggagaatattcttattcttagaagatacattctgaacaatttattggtaatgttcatgtttgcaacctttatttttacaggaccatgtgaaagtatgcatgtgtatgtgtatatatatagagagagaaaaaacctaatactatgcttttgaatttttttatgtgctgaaaatgattataataaagttggaaattaatgttgtcactaaagtagtgatttttttttttaaacctagaattgatgataaatcaatatcgtgtgttacattctgttcattgactgtactctttggcagagtttttaagtgactcag

SEQ ID NO: 1434 - DNA, 195 bp, Homo sapiens
  source 1..195: mol_type = other DNA
agtttccaacgtatggaaggagttttaattagtgccatgaacaaattttcctttaacacttccaagcactaggagacatttattaaatgtttgttgaatgaatgaatgacaagcacttgtcacaattgaacaagacacttaatatggcggccagggaaatttcctggagaaaatcacgcgagagttcatcacggc

SEQ ID NO: 1435 - DNA, 407 bp, Homo sapiens
  source 1..407: mol_type = other DNA
gaatcgtcaggcctgggggagcacagccctgaggtccgagctgcagacagtctctccagtgggtaggttcagtcctgagctgcccatgggaggctcctttcactgtgagaaacaagagatctctaagggaggcctgcctgtctgcccgcccaggccctcatcccaggctgcccaaaagtgtttgggggggatgcccacacggcctcacccctctaggggcaagtgcctctaggctggatatcaggaccacgggtgctgctctgagcaagactagagaggaagctgcttcatcctctcctccgaggggttaacccgcacggaggcgcggccccctcccctgccccccgccccccgccccccgcggcgcgcgccgctcccgggggctccgcgcccccgcgcccaggtcc

SEQ ID NO: 1436 - DNA, 398 bp, Homo sapiens
  source 1..398: mol_type = other DNA
ctaggaggcacctgtcacactgtagtccaagtgaatggcactctctagatgatggctgcatgggaagccatggtagcagttaaattactatgtaagcactcagcatttatgttgtcttaccagaggagtagggaaattgcccaagttctgcacatgaataaaaccatcccctcctgccatagctggacaaggcaggacaacaatgccgccctggtgtgtttgctgtgctgggcttcaaggccaacatcatggggagagaggtcccctccactcagactgaggaatggagatcacactctctgtccccagctccgggccacagggacaagctcagagatgcctctgtcagtgacccatgaggttcccacctgggtgcctgggaagagcctccaggatcg

SEQ ID NO: 1437 - DNA, 793 bp, Homo sapiens
  source 1..793: mol_type = other DNA
agcgcgcaggggcggcgcgctgggctccggactgcgctcggtcgccagggcctgcagtgagtcggatcggccccgcgctgcgccgcgccccgcccaccccgccccgcgaagggcgcgtctgggcgaggcggggccccggaggaaaaggcgccactggggcgtggcggccgctgccagcgccggagggagaccatgagcccctagggccccagcccaccggcgccgaggcgccccctcccctatgccacctcgcgcccgccccctgccgcgcgcgagccaaggccggcgccccgcccggagatgggcagacgcgtagatggcgtggctcccagcgccgccagatcgcaggaaccaggcgccggggcgttgcgctgaggctccctctccgcgcggcccgggaagcctgcaggtgtccttggccgctcggccgccgcccccggtacaccttcgccagtgcccagagcccggctccccagagcggccccgccccccaggctcggcgccgcgcaggacgccccgtctgaggcacccccgccccagcgcggcccccgcagcgctgcgcccggtccggcgcagctcccagccgcggacgcaggacccgaggctcgctcctgcgggcgcgcgccgcctcgccctgcgcagcccccgcccgcccggccgccgctccctcgcccggcgctggatttatgaatggggggaagaggccacatgccgccgccgccgcctcgtgttgaccgcaagcagcccgggcccacggagctccggctgccgtgagagtgtcggcctggccccg

SEQ ID NO: 1438 - DNA, 740 bp, Homo sapiens
  source 1..740: mol_type = other DNA
gcgccgccagatcgcaggaaccaggcgccggggcgttgcgctgaggctccctctccgcgcggcccgggaagcctgcaggtgtccttggccgctcggccgccgcccccggtacaccttcgccagtgcccagagcccggctccccagagcggccccgccccccaggctcggcgccgcgcaggacgccccgtctgaggcacccccgccccagcgcggcccccgcagcgctgcgcccggtccggcgcagctcccagccgcggacgcaggacccgaggctcgctcctgcgggcgcgcgccgcctcgccctgcgcagcccccgcccgcccggccgccgctccctcgcccggcgctggatttatgaatggggggaagaggccacatgccgccgccgccgcctcgtgttgaccgcaagcagcccgggcccacggagctccggctgccgtgagagtgtcggcctggccccggcagccgctcggaggacttgttgctgctgcgctgccgccgctgcggggaagccggctaggagggtggcccgtgtgagcgcgagcgccccggaccttcgcggtgcgcgtggactgtgcgcgtcggggtgaaggcgggggcgtgtccccggcccagctcctcccgctccgcgtcctagggggataggcaggggcaagcccaagccgcagagggggccgccaccgcctcctgcctcctcttcccccgtctgacgctgcctcctcgggaagggtgtttggag

SEQ ID NO: 1439 - DNA, 298 bp, Homo sapiens
  source 1..298: mol_type = other DNA
ccgtgaactctctgccccgcgggcccaggtgaccgcgggcggcgctctcccgcgcgcggggggcggggctccccccggctgttctaggcgtcccaggacggcttcctgagggactggagggccccgacagccggaaagcctgccccgccccttggccggcacaggtacgacggcggggagcgtttcgaactggaggcggggctggcgcacagtcaccctctcgcgacgacgtcgatttaaacttcttttagtggtttaaaggacgggttttagggggttgggaacccaataacagtgg

SEQ ID NO: 1440 - DNA, 378 bp, Homo sapiens
  source 1..378: mol_type = other DNA
attacaaacagcactttaatcaaaaagtattatagagtttgattttaagaatctgagaagcctcttgcttcttaaaaaggaacatgcataaatatgtgcagattttccagataaaactaaaaacacatcctttcgtctaaaatatactctggtttaaaatctggaatattggacgaaagacaatttcccatttgattgaattatcccagtaattttctaggatttccaaaatataataaaaaaaatctcattaaaattactacgagcatacgtcttttggtctgatatattctcctgtaaaataagcatgttgtgagaagttccctgaggaaatttagggagggcctgagatgacatcaaatcacagtctttcctcct

SEQ ID NO: 1441 - DNA, 369 bp, Homo sapiens
  source 1..369: mol_type = other DNA
aggctgtggtcctagccagtcgagaggctcttgaacccaggacgtccgggttgcaatgagctaaaaatttattttaaaaaggcattaaaagtatacatttacaaagacaactatctgaaaggatattctccaagaagttaaaagtcgtctttttaccagctttataattaatttttaaaagttattttcaagtagtgctagatcagagtctgagagcttgaacaggcccggctgcagacctctcccgagaggggaataatccgtgccggccggttccgccatggagccaggtgcaggtcacctcgacggtcaccgcgcggggagcccaagccttcgtggctctgtgcgacggaaaagaacgggacgttc

SEQ ID NO: 1442 - DNA, 369 bp, Homo sapiens; identical to SEQ ID NO: 1441
  source 1..369: mol_type = other DNA

SEQ ID NO: 1443 - DNA, 339 bp, Homo sapiens
  source 1..339: mol_type = other DNA
tggaatattttgcaactactacaaaggatgtaagtgaaaacttgacatggaaagacatttattctttgtacctccagtatgtatgtcaattttgcttacaaaacaaacaaaacacaaggctgtggtcctagccagtcgagaggctcttgaacccaggacgtccgggttgcaatgagctaaaaatttattttaaaaaggcattaaaagtatacatttacaaagacaactatctgaaaggatattctccaagaagttaaaagtcgtctttttaccagctttataattaatttttaaaagttattttcaagtagtgctagatcagagtctgagagcttgaac

SEQ ID NO: 1444 - DNA, 310 bp, Homo sapiens
  source 1..310: mol_type = other DNA
atctgacaaagcactgggagctctctctgggtcgtatgacacagagaccctcacaggcggaggggccatcccgagtctgagaccaccgtgtttatagtggtgtggccacagcccataccagctcggctctgcagggtactgggtcattgtaccaagggacacttgctggtgtgtgtgtcacttaggaacatcagccccacaatataattttaaccttttagagaaatctaacattgagtgaaatatacataactgtctgaatcactgcgttcttctgagatcatcgaggcgggggatgcaggagagcctg

SEQ ID NO: 1445 - DNA, 736 bp, Homo sapiens
  source 1..736: mol_type = other DNA
cggctcccggctggccgcccgcaccccgccgccgcccgctgccggggttctgccggcgctggccgtaacctaggaacatggaggccccggtgcccatccggaagggtaaatccgtgtcggggcgttgcgcggcgcgtgctgccttccctgcccggctgcggcgcccagaggggctgcggggcacccggcggcgcagcctgcagcgcagcaggcttgggctgagtccgcggcggcaagcccttgccgaccactgccgtctgctcggcaggtcccagaccggggagtcgcacccccccggctttgctgcagagagggctttccccttcgctggggccgtgggctgccgccgagcccccgcgcttaaaagatctggggcggcagcctggcgcaggctactccccacccccagagatcaggttccgggattttgggtctcggcggtccctcggctggacgccgggggcttaagaactgcgcttgggcccgcagcaggagccgaccgcgcgggcaggagggaggtggcgctagcggccgcggccagcgggagggtctggtcctctgcgcggaggcgagcgctgagtgcgccgaacggaatcccggccggagcccggggcgatggggagagggcccagacccctccccgccctggggccggcgggattgggtcggcagggggccagtccggaagccggcttcctccaggctccccctctcgctgctgccaagccgcctcgca

SEQ ID NO: 1446 - DNA, 236 bp, Homo sapiens
  source 1..236: mol_type = other DNA
attcaataacatgatgaattctaaatatctgatggtcagaaacagaattaattctcaataaaattttataggtatgggtatagcacattcaaggaaaaatgttctgcattaaaatggtcacctattttgctgtgaacaatttattacctgaaactattcaaatatttatagcaggagtaactgttcctgcctgtagattgatttgtttaagcaactaaaaggaattccattcctcc

SEQ ID NO: 1447 - DNA, 453 bp, Homo sapiens
  source 1..453: mol_type = other DNA
aaacacatttttcaaaatatattgatcacagtgtttctcaaaaggcctacctctgacatgtcttagttgtatgagtgttttcttgtatataaataaggatgtaacagtaaccagtaggattattattaggtgttaccattaataaactgaggctgacagattgagacttgctcaagatctcacagagataaagctggaactgaaactcagatctttggctccaaatgtggtgtttcaaatcatttctaccagtgcccctgggattatgccttggggagtctagagactggctaaagacattccaaagtctcgggcctagaaaatgtttagaaattcccctccagtctgtctacctgaatgggaaactggaagcactgtccttttctaagcaaaaatcatttgtttcacaaaactagttagactaaagagggcggactcagcctcacttcctcc

SEQ ID NO: 1448 - DNA, 327 bp, Homo sapiens
  source 1..327: mol_type = other DNA
gattgagactatcctggccaacatggtgacaccctgcctgtaatcccagcctgcagttctatgaatcaaaactgtgattacaattttttaacaaatatttaaatacccgtggtaataaaatgaattcaaatcaaaatataatttaaaaatacttacttttctaaactcttaatggttaaatcctaaagagtctagaaaattaagtttttttataagctgcatcaaatgttacattataatgcaatgcaaaatacagagttgcatttggttactgatttataaattaaaatttgggagaactggaaagattatttctacaccaccgct

SEQ ID NO: 1449 - DNA, 476 bp, Homo sapiens
  source 1..476: mol_type = other DNA
aagacttcaagcaaaattatatattcaatactaatgatgcaagtttctggatactggcaaacaccagcaactcttttggttatttctccttggcttatcaatataggctgaaatttccagaaaagttgctggatgccacacggtgtgtgcgcaaggtccgttcggcacgggtagcgctcccagccctcggcccgctcagcgctggcccccggctcccgcgccggcgctccgccaccccaatgtctccacagaggggcaagggggcagtcccacagaggggcaagggggcagtcgcccctcgcctccccacaaccccgcgcgcgaggccaccctgcgccaggaagaaggacggcgttcgcctcgcgcgatgggtggttcacgacactttcgcgattgccgtaagagcagcgccgcaggcgcgctcctcggtgccgtgagcgcgccccggggccggccggtctgctcgggagcgcgcc

SEQ ID NO: 1450 - DNA, 380 bp, Homo sapiens
  source 1..380: mol_type = other DNA
ccaccgctcaacaaaccagaggaattaattagaccgctgattttggcacggggagctgagcccagctgcactcatccccgccctctggcgcctggcataaggtagcccccggaggcaatgagggccagcaggagtctcgcgcgcctgcgacgcgggtaagggggctccaggctgcgcccacttccccgagctgccccaccctctgacgcacccttctagagggagcgggctgcaagcgctggggcctgtccctggcctggcgccagacagggctgggccacggggcgcgctcccgagcagaccggccggccccggggcgcgctcacggcaccgaggagcgcgcctgcggcgctgctcttacggcaatcgcgaaagtgtcg

SEQ ID NO: 1451 - DNA, 559 bp, Homo sapiens
  source 1..559: mol_type = other DNA
attctggaatttcacacaacaggttgtgtattgtgtaagcttaccttatgcgatacttgtcagacattcccacagctgaatgcagccgttttgcatgatagacttttttagtaaaggtattaattaaatatctctgattatattggattttccacataaatatttatgcttgcacaaagaaaattctttgtcagaccgtatgtgttttcacttacaaaacagtttgttgcttaaaggtatggaatgtttttcagcctttctgttcagagtctggaaccactaagtgtttattaaatactagacgaataatatttgttaattgttcagtaagtactgattacctactagcaggctcgtaatcctagcttctctgtggctgagacacaggaatcgcagatctggtactgcctccagcctgtagatcctgtctcactaaattaaattaaattaaaataagtattgattatctacttagtgctaagtacaagacaggcttggcccatgcacttgtagagtatacacaacagtctgtacaatagctataggactgtgacagtat

SEQ ID NO: 1452 - DNA, 363 bp, Homo sapiens
  source 1..363: mol_type = other DNA
tcaggggtttctgctagcagctgtgcctgtagcttgggcagaacagctgacctggcctgacccggaggaaggctgagcaggaatcaccctcaggctgctggtaattcctatttgagaagagggactcctctgggcttagatcaactctttctttggaagaattaatctatttggataattattaggccaagtctatttatcttgggaagtcctggaagttctagaattcaaggtaggatccctatcctgtctgacactatcaagcattgtccactgttctaaggttgtaaattaactctctgcacaatctcgccacaccctggggctcttgggaggagctgagatctgcgctgcagtgccagg

SEQ ID NO: 1453 - DNA, 257 bp, Homo sapiens
  source 1..257: mol_type = other DNA
tgcactggtgtgatcgcagctcaccatagccccaacccctggggctcactcaggtgatcctcccatcactgtccagctctgatggtgccactgcactccaactggggtgatacagcaagagcaagatcctgtttctggtcccttttaggtgagactagatgaaaagggctcttcagcagctgacttcacagcaactaatttctgacaggtcagagttggcatttcacaagtctgccaggggaagtccctggacttct

SEQ ID NO: 1454 - DNA, 305 bp, Homo sapiens
  source 1..305: mol_type = other DNA
tttgggctaactctcccatggtgactggagagtcacctggtgggagtcaggccaacagattccagacgtatttctgccagacaatgtcatggttgatacctgaagtttacagcctggagtcccttaaatttgtattatgtaacaacctacaaagagttcctgaactttcacatttctgtggaatcagttcctcctcaggaactccgagctaagtcaagcctccccgggagccccacggagggtgggaacgaggtggcgccgcccagtcccggacgcgcgtcgagcgccctcttccaccccacgct

SEQ ID NO: 1455 - DNA, 483 bp, Homo sapiens
  source 1..483: mol_type = other DNA
ggacccgtaaaggtttcagagtgaacatatccccaggctggggggattgcagttccaggagtcttgtccattgggcaaagtttctagggaataatctcaccagtcttcctaggaccatttatacatagtgggaccatctcaatttgcctgagatgggaaattattaataatgttcctttttactctttgaagggtctcattggacaataaactatattaactccagactggactatgagctccttgagtgcagggaaggcattaactgcattataatttccccagtgtcctgagcaatgcttagcacagagcatatgattcaataaaactttgttggataaatgaatgaaaaaataaattcccagcttggaacatgtttctgcctaggaatgtagagacacaaggcaccccagggctggggacctcaaggtccagtcccagctacttgcagtgagccgagatcacaccactgcactccagcag

SEQ ID NO: 1456 - DNA, 655 bp, Homo sapiens
  source 1..655: mol_type = other DNA
ttatgaggttagttccctcataacaagtgaagaagataatctgaaatttctatataaagggttaaacatgataaaattgatgatggtccctatctttgtctatggaaaaaaatatccagtgagagtcattgtagcaggtgttctgtttccagcaaagcccaacaggaagctaacttttgctttttgcccagactgggaagcaacagcctaggctccagagtcggacacggactaagttgttatcagatgaatttgctcagctgcgtactgttgtgttacaaaatcaaatggcattagatacgaatgttctgtgtatagccctaacaattctcacaatattactcacaaagccatgttgggtgtggtttttctgtaaactatatcaaatatcccttctattttcctgcaattgagtatcagattgaggccaaatgtggaggaaaagttaaatattaaatttgaactcaactgaacaatggtcaccaagtcccggaacaggttgtgtgagatccagcactgttttggaaaaatctctatttcaatctagtcctatatgttagttattgaaaaaaatagacagtctcaaaaaacaagctgacctttttatgttccttaacctagttgtgaagggcccttgttactgggcctcatgcca

SEQ ID NO: 1457 - DNA, 333 bp, Homo sapiens
  source 1..333: mol_type = other DNA
gcctagaacaaggcctggcatattataagagaataaatacttggtgaattaataaatgaagctgacccctcacgtcaggtggtgtgtggtccctgcagcatgcaggtcagtcctgggccccaggcatagaagataacatgttatgccccacctcaaaataagtattattttgatttgaaggcaactgaaaagagtcacatgcaagagaaattcaaacaggacataaatttataaaagtctcttgtccattctctgatttattaaacatttagctgtacgggaaatatttcaagcatcaggcaatgtactttatataggttatctcctacttag

SEQ ID NO: 1458 - DNA, 360 bp, Homo sapiens
  source 1..360: mol_type = other DNA
aatctcttaattgtatatttacttcattcattgaattattcagctcttaaatttcttattcaaatcatgaactgttttccttatttcatctaggattccttaatattattattttaaattctttttgaaatcatctcttcaaatgttatgcagtaggtttcataaataaagacttatttatatgaatgggtgttctccatgtagtgaccagctataaaccacaatgatggcatttgagagtttctcagtggcttacaccagccacatggctgttatgatgtgtcttctggagacaacccacagcagtttctcaggtctgtctgggacccagctctatgactgcttcattgccctaaggcc

SEQ ID NO: 1459 - DNA, 453 bp, Homo sapiens
  source 1..453: mol_type = other DNA
ttatttcctataaatttcttcacaatgttaatgtatataactactactaattatttttgtagagtccaacaggacatatttgaatgtcatgtgggacatgggaggcaatgcagtgtaggatgtctagcctccctagcctgttcaaaaattcttccacaaatttccaaaacaccctctgggagtcactgtcaccttttttggaaagaggtatggaccaggcaaaaaagacaaaacacactctgatctttttttcttcggttattattatcttcagtgataataacaatcctatatagaggaatttttattcccaatttagagatgagaaaactggggcttagaaatttgactgccccaacttctaaaaaaaactattagagttaaaacctcgcgccccctccccacggccccccgggatagcctctgctggggcgttgcccagggagtccaccc

SEQ ID NO: 1460 - DNA, 383 bp, Homo sapiens
  source 1..383: mol_type = other DNA
aggtatggaccaggcaaaaaagacaaaacacactctgatctttttttcttcggttattattatcttcagtgataataacaatcctatatagaggaatttttattcccaatttagagatgagaaaactggggcttagaaatttgactgccccaacttctaaaaaaaactattagagttaaaacctcgcgccccctccccacggccccccgggatagcctctgctggggcgttgcccagggagtccaccccggtacgctgcagaatcccctgggctttgggctccaaggtgcgggttcctgccccagtagtggctcggtggacgccccaacttgccgcgcaggcgcgctcgggccctctccccctccccgcgctccgcagctggg

SEQ ID NO: 1461 - DNA, 506 bp, Homo sapiens
  source 1..506: mol_type = other DNA
ctcaaatattgttgactcataaaaattcaggttttgccttctcctgagaaactgaaggatccagcaacactgggtctgtttccctgcagggaaaccattagcagctgccaagaggcttcatgtcagttgatgtacatcattgggcatgaactgttacttttctaataaaatagagatagctgttttattgccattcactgagcccttattatatgcgagcacgaaactaacccattttatacaaaacttctaagtggtgacactgagattcaaactttgaattcaaaccttggattcaaagcctaaatccaaagctatggtttaaactttttttaaaaattacgctgcttcccagccaataatcttttaataatagaattgctgctaccatatggatattcagtccctgtggtactgaataccaggaagaccctcttcctggtattcagtgtgtgactctcagggctgtcccagcgctatccacagggaagctcctataaagggct

SEQ ID NO: 1462 - DNA, 387 bp, Homo sapiens
  source 1..387: mol_type = other DNA
agccaaagtgggaatcaggctgcctctcctgggtcactttacagtggcggcagggccggcccttcagaaaactgtgttgtgcttttggagaacagattctccatcttcacaaccccaaggacaagccggggggtggtaggtgaaatttttaagtctagccctccagcgcttgaaatgcagcctgctacagggtaaaaggcagcaagcatttcttcatctatgaaaatagaagactggattggatgactgatgacatccactgtggatagctacactgtgtaacacacccaaaaaatgtgccccagatgtgttgggttctaggtttagaagccaagcccacagagactttgtgagagatgcgacttggtccccgctcaatcactccct

SEQ ID NO: 1463 - DNA, 368 bp, Homo sapiens
  source 1..368: mol_type = other DNA
tcgtcatgattcgtgcctgaaacttgcctaggatttagagtgatatcatttgagaaactgcttgtctttgaagtcagtgatccacaaagcaagtggattgctatatagcgttgtggttaaaataataactgcttcgttcattaacttaattttcacaatgatccagtgacttattattcctactttgcaaaagagaaaactgatgctcagaatggttaacttttacaagctcgaggaactaggattcaagtctttggcacaaaagtccatgctcttaacatgttccttctcttctacaggtgatgagaatgggacagtctcccttgtggacaccaagagtacaagctgtgtcctgagctcagctgtac

SEQ ID NO: 1464 - DNA, 472 bp, Homo sapiens
  source 1..472: mol_type = other DNA
ctgtttaagcagcacactgtgatgttaacacttccccaatatttggacactagtaagtatttgctgaactttgaataaatgtcttgcagagtctttaaaaatatgttgaataattgaacaactgtcagagaggttaaatctatcaaaaactgggactttaaacttccatgcttccaaattctgattttaaaaaaaaaaaagcacagattggcttcaatgtcatcttaaaatcaagattatgctatccgttgcttaattttgttacggatttttctaggaaatctcaccagacaatttagaattttagaaaaggtgagtataggaccattctaccgttccacccgggggtgggggtggataactccagcctccgtttggactccggcggagcagaagccttcgcagagggagccggcccagcagcgcccactcaggctggaggccccgaggagaagcgccccatctacggggg

SEQ ID NO: 1465 - DNA, 279 bp, Homo sapiens
  source 1..279: mol_type = other DNA
ttttattgaacaaaatttattctttttctagtttagttagaatacgttacttatcctgcacatgagagcgttcctggcagttacaggaacacccaaaattatcggaaagaaatttctgacctcctaggaaggctgcattcttcagagagcaaagtcaaatgaaatctggtttgccctttccgggcgctgtggcggcggcggaaagtatcgcgagatgaaaattttgtactcttccttcaactttccttgggagatttttaaaaaaaattatcgcgagaa

SEQ ID NO: 1466 - DNA, 498 bp, Homo sapiens
  source 1..498: mol_type = other DNA
cattctaccgttccacccgggggtgggggtggataactccagcctccgtttggactccggcggagcagaagccttcgcagagggagccggcccagcagcgcccactcaggctggaggccccgaggagaagcgccccatctacgggggcgcacagaacagcgttccggccgggtctggatctgagctcaggaacgcggggcagggctggggacagctcggtgacgcgacccagggtcgtcagtctccggggaggggcgccctgggccggggtaagggagctcccaggcccgggatctcggctcaccggaccggtaccgcgcagcctccaactgccgttccatgcaggcgggcgattccactcccgggccgccgggggcactagggggggtggggttctggacgccggccggagactccgctccggcattctcgcgataattttttttaaaaatctcccaaggaaagttgaaggaagagtacaaaattttcatctcgcga

SEQ ID NO: 1467 - DNA, 561 bp, Homo sapiens
  source 1..561: mol_type = other DNA
atatataaagaccttaggctcctataagaactttgacttggactctgaatgagagaaagtcattgaagggtaaccttgggcaagttaatggatacaattataataactatgccatggtttggttacaaggtttaattgaatctaaacacaagagtgtttagagtgtagtcagtactctacaaatgttaactattatttgatccagcaagtattatggtatgcaccattatttgtagtaccaaaaaatgaattatagaataccagtatagtggaatccagtgtaacttaaaattgaggtaataaaagtgatgtgtatatgcctatattttgatgggtatacctatatttttattaaatatttctgatttcatacagcatcacttttaaatatgtttttgccatatgctgttataatttctaggtacatattacctattaaataaaagaatttcacgtaaaatagcattctcactggcagaatcttcagagtagaagtattccttcaagtatacaaacaatatttatcatttcttaattttgccccagaataacattgctatg

SEQ ID NO: 1468 - DNA, 397 bp, Homo sapiens
  source 1..397: mol_type = other DNA
agtgagccaaggttgcaacattgcactctagcctctatagcatttacttaatgagtatatttattaatattattttacaaataaatatttataaagaaatgattcgctgaagggatcttaacactcttaacacatttgaagtctgcacagctagtacttagaatagatgagattataaggtttttgatgacaatgtcatactttaaagtaaacacttaataaatatttaattagcaagaaacctgtccttatgttctgtcattcatgtgtcagacacaaagaaaaggtacacgcctgtattcccagctactcgggaaactgccgttgagtttagtaagatctttgctacacacaatgtgatgctttatttcgtcatttttgaaacatagaagccgta

SEQ ID NO: 1469 - DNA, 314 bp, Homo sapiens
  source 1..314: mol_type = other DNA
agctccagccctttaagctgtggtgcaaggatgacatgcaaaactggaataaaataaaacgagagctctgtattttcttttagttctcaaaaatatatgtgcacatatatgaggacacgactttgagacttgtccttgtggggttgttacgaaaacaaaatgttataaatttttggaaggctgagagaagaatgggctctgctgtctcatctcgccatggtcaagctggacatggtgtgcgtgacttgggaacatgaagttcttatcccctaaagacagaacatgacttcctctgttttcagccctgtgcagcc

SEQ ID NO: 1470 - DNA, 197 bp, Homo sapiens
  source 1..197: mol_type = other DNA
tgctgagaagcacctgaattggccggctgccagcattctcagaggtgctgagcaaccaaggatctttgctgcaaaggctgggtatcggctgtgctcagcaaagcgtcaactcgtgcaagaacttagcaggaatagttctggctaaggtaggttgctaagctggcagaaagggttgcagctgcagcagaggcgttgag

SEQ ID NO: 1471 - DNA, 341 bp, Homo sapiens
  source 1..341: mol_type = other DNA
tctgagccacgagttgctcagtcccaatggtgtctgtgcggacccaggtgacaggagactgcagaggctgggagacccatcagaagggtataagccactctaaggattctggttgcctgaggcaccgagtaggaggctgcagcatctcctacttgagatgtgatgaggcacatgaccaagagtggccatatgaaggaagggcttctcttgttcacagaaaagaaacccctgtgtttggacacaaaccccagctgagatggtaaggttcaaagagtgctatatagttgcctcctagaaatttctcttggtaacttccttctctgaagcacagataaagaaaa

SEQ ID NO: 1472 - DNA, 273 bp, Homo sapiens
  source 1..273: mol_type = other DNA
aattgaatagaagctgcttaacactgagtagttggtatgatgcagagcactccaggaaagttttcttcaattggaggaaaagtatctgagccacgagttgctcagtcccaatggtgtctgtgcggacccaggtgacaggagactgcagaggctgggagacccatcagaagggtataagccactctaaggattctggttgcctgaggcaccgagtaggaggctgcagcatctcctacttgagatgtgatgaggcacatgaccaagagtggccat

SEQ ID NO: 1473 - DNA, 247 bp, Homo sapiens
  source 1..247: mol_type = other DNA
ttcatgggatcacaaggtcaggagatcgaggagtgagactcagtggtggtgccatcatggctgacagataagccaccaagctaggcctatactcccctaacaggtgcttgataaatatttattgaagttccagaaatttcaatgtttctctcatttcaagtttcacaatgtccaaatggcttggaaagccacacaatgaccagattttcattgatttatgtgtaaaacttgaggcatagtcttaagt

SEQ ID NO: 1474 - DNA, 400 bp, Homo sapiens
  source 1..400: mol_type = other DNA
acatatgtgtatgaatgaacgtggctatgttccaataaaactttatttacaaaaataggggcaagccagatttggctcaggagtcatagcttgctgacttctgctatagaaggaaagctttggatgaacaagtatttgctgccatagaatatttcagtgaaaatacaaaccataatgggattgattaattgaaaagaaaatgatgagctctgggctttacattcttagctcaaggtctatataaggaagcaccctaaattctgactgatacagtgatgactgactaactttaaaaagtcaatgaagcgtccaagtggtgacgcttccatttggacacgtactcaattgttataatcacaagaataaaagactttctttaaagaggaatacctctcttaac

SEQ ID NO: 1475 - DNA, 305 bp, Homo sapiens
  source 1..305: mol_type = other DNA
gctgccaggctagtctccattgtgtattttacacacatcagcttcactggatctggccaagcctagctggctggctgacgctgctcagccatgccggccaccagcatgcaagctgcaagagggttagaacagcgcgaacctaacaggcgcggctcctttaagcggactccggaacgccgtggggaaggcggggccgaagcccagccatcgccaacttggaggggcggggcagaaccagggggcggggcctgcgtggtgcgtgcgtgcgcgttctggaggaggcgccgccgccgctcccgaggccc

SEQ ID NO: 1476 - DNA, 610 bp, Homo sapiens
  source 1..610: mol_type = other DNA
caagtgaagcagatttctggaattattatccaatatctaaaaagagttttatatttttttgttcattcctgtttttataccttttaagataatcatggagacaaaaaataaagtttacgttccttttattttctctgggccttatggcgtatattgctaataactgcctatagtgtttagtcacatctttaattattttcaagatgacattttaaatggttcagctataatacaataatgaacaaaatagtatagaattactgtaggatattttaaacaaataaaatagcatgtacattatattaaagctcatgagtgaatgtttttaaacagtacataagttgtttaaatgatagctttgcaaaagtcataaggttatcaactgttggatttaatcatcttgttttctaatcaaagatttttagaagtaatatgaacataattgatgcctagtcaaagatgatcttcggtgaattaaaatatctgaaagtaatcctataaacttatgttaaaatctgtatggattttgttctgttgtccctttgatagtcttacaaggaaaaaaacaaaacaaactcctatgtttgatgcagtagtgtacattattaga

SEQ ID NO: 1477 - DNA, 493 bp, Homo sapiens
  source 1..493: mol_type = other DNA
gtctgcggagcccatcggcctatcgagcctattggccgccctccagggcctggctggcgctcgcccggctccttttgaataacaaaggagcgtcccggcgcgaggtgccgagctctggggagagaaaggcttgttccctgcccaccccagggaaaactacagccttgccaggggcgcagccgaccctcggcggctttgcgtgaaccggccaagcggcggcgtctctgctccgcccgcgagggcagggctgcgaggatttcactctaggagtgaggggaaaagggactgacactatggcactctgcctgttgggggccgcggtacagcctggagtcacgatgccctccgccgcgctggccgggaccaggtgtgtcctcgccagccccagtggctgcgcccgggtcctgtgcaaacactgcggtagggtccgcctcggccgcccagcccggcctcccggccgccctgcccattggcccccagcaccgaccgcgcg

SEQ ID NO: 1478 - DNA, 338 bp, Homo sapiens
  source 1..338: mol_type = other DNA
tagttgacattttctcaatgtttgtacattttgggaatatatttattggtattctttgtatttttaaaaatttgtttactttttaagaatttgagacaaaatttggaattatgaatatggctgaggtccagaaatatttaaatttataggagctcaatcatttgataaatattgaacatttcctatgtgtcagattaggagaacaagacattgttataatttcaggtaggtataagtatagagctgtcttagggtgttcaagacctctttgaaaagctgagactgctagctgccgcggatgcatggaggcggatgcatggaggcagatggatgcacac

SEQ ID NO: 1479 - DNA, 651 bp, Homo sapiens
  source 1..651: mol_type = other DNA
cacctgggtacttaagttttcaagaacaatttagcttgaacaattaaatctgcagaagggtctcctgagattcccctattttagttgattctcaaaaacgtatgagaacatagtccctgaacgtttaccgaaacttagaaccatttgtcagtgcttaaaaaaaggtcttaactatcctcaagttcaatagtgcacgttagttttacaaataagttaagcgcctagcccccggcagggccctgctccgggggccgaccgagggctcttcctgagctgcggcgcgggcctggccgccgccgcccgtcggtccccccgagcccgcagcgccccaacgggatggccttgagctgcaccggcgagggcctctcgaagccggccgcccgcagcccctccagcaccggccgcgaaagcagcagtgactcgaagtcggccggctccgccaacagcacatcccccgtgcgggtccgcgggctgctgagatcctgagcggtccgcaggatcctcacaggcccgggtgttggctctggggccgggacctgcacggccacatgctcagccggcatagcagtcgccactgctgctaaggctcccgaggcttcaaatgccgccgccatggtagccgcgccgtcagatctcgcggtgtttattggc

SEQ ID NO: 1480 - DNA, 669 bp, Homo sapiens
  source 1..669: mol_type = other DNA
ctgaggagctactggtatttcatctgacacctgggtacttaagttttcaagaacaatttagcttgaacaattaaatctgcagaagggtctcctgagattcccctattttagttgattctcaaaaacgtatgagaacatagtccctgaacgtttaccgaaacttagaaccatttgtcagtgcttaaaaaaaggtcttaactatcctcaagttcaatagtgcacgttagttttacaaataagttaagcgcctagcccccggcagggccctgctccgggggccgaccgagggctcttcctgagctgcggcgcgggcctggccgccgccgcccgtcggtccccccgagcccgcagcgccccaacgggatggccttgagctgcaccggcgagggcctctcgaagccggccgcccgcagcccctccagcaccggccgcgaaagcagcagtgactcgaagtcggccggctccgccaacagcacatcccccgtgcgggtccgcgggctgctgagatcctgagcggtccgcaggatcctcacaggcccgggtgttggctctggggccgggacctgcacggccacatgctcagccggcatagcagtcgccactgctgctaaggctcccgaggcttcaaatgccgccgccatggtagccgcgccgtcagatctcgcggtg

SEQ ID NO: 1481 - DNA, 367 bp, Homo sapiens
  source 1..367: mol_type = other DNA
agagctgtcttagggtgttcaagacctctttgaaaagctgagactgctagctgccgcggatgcatggaggcggatgcatggaggcagatggatgcacacggagctgttagtccagtataaatggggtttatctcaccccaatgtggtaaataaacccttgggtccatctgcgcgctctctgccagcacagaggagccgtgacgcaccgggcgggcggtggcgccgggggcacggctgggcggctccgcccagaagagggccgagaggcggggcggtgcccccaccgcaggcccgcggcgccctctgcaggccacaggcagcgactccaggccgggcgtgttagtgtcgcgggaaaactgccaataaa

SEQ ID NO: 1482 - DNA, 764 bp, Homo sapiens
  source 1..764: mol_type = other DNA
ccctgggcactcccgcggcgaggcctggcggctcggcgctctccggcccggcctggggccgctgggcccgcggggatcggaggggagccgagggcgcagccttgccgcctcccccggactctacctccccccctcgggaaagggacctcgggagaggcagcccgtggccggccgggctccgctcggcgcggcgccggcagcggcgggggaagggagagagcgagggagcccgcgagcccgcgagcggagcggcgaggcggggaggggacgcgctgccgagccggggctggagcggcggaggctgcggcagcggcggcggcggcagtggcggcggcagtggcggcggcagtggcggcgggggagggagggccccacggacggacggacgcacgaaccgaccgagccgctggcgaggaggagccgcgcgagcggcggctgctgggcgcttccccgcgctgctgggcgctcggcgcctccgcggccccggctcccggccgcagcttcctcgcgcgcgcggggcgccgggcgcggggcccgggctggcttcgcggaagaagtgcgaggagcgctgctcccacgcctgttgctccggctgcccacgcggcaccctcccactcccgcgcccgggtgggtgggcgctggggcgccggctgggggagcagacagccggcccgggggcgtcggttccctcgggctgtggagccacctccgggcagccaggcgctggggttcgggggtggggggcgggtgccagagacaggtgg

SEQ ID NO: 1483 - DNA, 491 bp, Homo sapiens
  source 1..491: mol_type = other DNA
cgcggtagggggccccaccttgccaggtcgccgggcttggtctcaagcaggtgctgctactcgcccggggagacgcactaggctctgccctgggcactcccgcggcgaggcctggcggctcggcgctctccggcccggcctggggccgctgggcccgcggggatcggaggggagccgagggcgcagccttgccgcctcccccggactctacctccccccctcgggaaagggacctcgggagaggcagcccgtggccggccgggctccgctcggcgcggcgccggcagcggcgggggaagggagagagcgagggagcccgcgagcccgcgagcggagcggcgaggcggggaggggacgcgctgccgagccggggctggagcggcggaggctgcggcagcggcggcggcggcagtggcggcggcagtggcggcggcagtggcggcgggggagggagggccccacggacggacggacgcacgaaccgaccgagc

SEQ ID NO: 1484 - DNA, 286 bp, Homo sapiens
  source 1..286: mol_type = other DNA
tgtattttaaataatgtggttattgtaaatgtaaccaaagatctgcattcctgtgttcacaaggcagacattcctaaatttgcaattaatcctcttctgtacaaaatgtggttgagagaagggtgagccgggaggggcgcgagcccaccctgaagcccaggacccaggagggcgcttcctcccggaagtgacgcgagctcaatggggccccgggaggagcgagaagccccgcctccagccggcgcggattggggccgaggctggaatgccaatgcccccgccgggc

SEQ ID NO: 1485 - DNA, 342 bp, Homo sapiens
  source 1..342: mol_type = other DNA
aaatttgcaattaatcctcttctgtacaaaatgtggttgagagaagggtgagccgggaggggcgcgagcccaccctgaagcccaggacccaggagggcgcttcctcccggaagtgacgcgagctcaatggggccccgggaggagcgagaagccccgcctccagccggcgcggattggggccgaggctggaatgccaatgcccccgccgggcggctgagggggcggagcctcagccgctgtggatggggggcaccggtagcctcccgccgccgtctcaacggcctctgggcccatcccctgagggggcggggccgtctcctccacctcccggtattccccgag

SEQ ID NO: 1486 - DNA, 336 bp, Homo sapiens
  source 1..336: mol_type = other DNA
tctgaactctcgattaatttaaaacacagtgcccgcagggcccgtacctgctatcctgggaggtgggagaggagagtctctttcggcagactgcacctcccctaccacgcccccaggcgctgtgcgggcggagggagggtactctcagccccgcccgagagggtggaggactgagctccgctgagcccaggcggggacctcgattcccggcacccgggccgggcaggccgggcaagcagggctaggatggaggaaatgagtgcatcctccgtgctcagcgcaggttggggacaggagggaagtgcccgcatccccttcccgctccgccagcctggc

SEQ ID NO: 1487 - DNA, 478 bp, Homo sapiens
  source 1..478: mol_type = other DNA
taccacgcccccaggcgctgtgcgggcggagggagggtactctcagccccgcccgagagggtggaggactgagctccgctgagcccaggcggggacctcgattcccggcacccgggccgggcaggccgggcaagcagggctaggatggaggaaatgagtgcatcctccgtgctcagcgcaggttggggacaggagggaagtgcccgcatccccttcccgctccgccagcctggccccggtggcgcggtgtcggcagggactgggcgcttggggcgcaggagggagccgcggcgtcccgtcgcagcgtgcgggagcaggtgggggtgcagcgcggtggcgcgcgggagccccgaggggcggaggcggctgctacacctagggcgtcgcggagcgccccgggcttggcgcgggcggagccgccctaagggccgcgcgtgtccccggcctcggccccgccccgtcccgtccaatgagagcc

SEQ ID NO: 1488 - DNA, 299 bp, Homo sapiens
  source 1..299: mol_type = other DNA
cctcaggcagaagcttctttttcctggggacactgctaggctcccaacgcagccgggccgggccccagttccctgtcgggggaggaggtaagagagagaggcggaccccttaccttctcccgaagtcggccatcttgggctgttctggcccagcccggctacgggcgcgaggcaggccgggcaccgcggcggccgtcggaaggacccgcccggaaagcgcgggagtgacgtctcctaacgccagcgcccgcgcccgcgccccaggaagtaggttttccaaccccgggggggggcaggat

SEQ ID NO: 1489 - DNA, 270 bp, Homo sapiens
  source 1..270: mol_type = other DNA
caggatccccgccagcccggcccgcagtcgctccctccagcctagcgtcagggacagatgcaggagacgctccaacagctgcggcttcacccacgccgcccgccatcttgccgctatcgcaggcgccaggagctgggatcctgcccccccccggggttggaaaacctacttcctggggcgcgggcgcgggcgctggcgttaggagacgtcactcccgcgctttccgggcgggtccttccgacggccgccgcggtgcccggcctgcctcgc

SEQ ID NO: 1490 - DNA, 322 bp, Homo sapiens
  source 1..322: mol_type = other DNA
attcttctggaacctcatcaggacattgagggagaaaaaaggtaaaatctttggctgcttttctagttttttctcagctggagctactatggagaacaacactagctttgatttatttgaaagtgatgtatttgatttaaaactttgtttcattctgcgggaaaaaaatagatacaaaggtttgttatttattaaccagatgctagtattttgatgaatataagggtccaccttatataccagtaaaaattaaagagcaatacagtcaccagcctttccacactcagagaccgtgtcgccccgagtttacaaggctggggga

SEQ ID NO: 1491 - DNA, 327 bp, Homo sapiens
  source 1..327: mol_type = other DNA
cagctggagctactatggagaacaacactagctttgatttatttgaaagtgatgtatttgatttaaaactttgtttcattctgcgggaaaaaaatagatacaaaggtttgttatttattaaccagatgctagtattttgatgaatataagggtccaccttatataccagtaaaaattaaagagcaatacagtcaccagcctttccacactcagagaccgtgtcgccccgagtttacaaggctgggggaggcgctggatgagcttccccattccggccgctagccctggctgaggctcggaggtcctcccgggctgttcagagggccc

SEQ ID NO: 1492 - DNA, 360 bp, Homo sapiens
  source 1..360: mol_type = other DNA
gagattaggaatttcaagctctgttgtcattggtgttttgccagaaccttaatggcttttcctcaaaatggctgcaatccgaaagaagcggtgaaggcagaaatgcccttcccaccctgaatgattcattctccctgctggaaccagtaaaagttaggaagtaagtcttaaaaaacctggatatctcccccacctgcaaaatggggatgatggtaagacctccctcaaagggttgttgtgcgtcttagatttctttaacaaactgacctaatttatgttgtgggacagtgattaatttgggtggcagggttggggccctcaggccagctactcactggccctgtgtgtcaggtggagctg

SEQ ID NO: 1493 - DNA, 287 bp, Homo sapiens
  source 1..287: mol_type = other DNA
atgcccgacagagtgcctggcacctagggcacctggtagctggacagtcggaccttagagattattaaactgtaaatgcatcaaatctctagctacctggagtccccaggttggcaagtggatgagattaggaatttcaagctctgttgtcattggtgttttgccagaaccttaatggcttttcctcaaaatggctgcaatccgaaagaagcggtgaaggcagaaatgcccttcccaccctgaatgattcattctccctgctggaaccagtaaaagttaggaagtaa

SEQ ID NO: 1494 - DNA, 271 bp, Homo sapiens
  source 1..271: mol_type = other DNA
gccctgtgtggggctcagttgcccctcttaaggggtcagtgggacagtccctctggggctgcctctcacagggagttggccttgggcctagtgtcctggcctgggctgggctggaggctccaattaccctgctggggggacagcagtggcatactcactggccaggggctaccccagcccatctttacaaaacagggcgatggtttccattctggaggcgatctgccgacagactcatgtccacaaaaccaacagttttgtaggctgagat

SEQ ID NO: 1495 - DNA, 410 bp, Homo sapiens
  source 1..410: mol_type = other DNA
gaacatagctctcagttcaccctcgagaaatgttcattgagtcagttaagaggcctctgttttcacatttgtcaaatgtctggattgcacttcagatatttaaagtctgtatgactcctaacattcattcattcatcaaatatttgttgacaacctattatgtgcagtttggagccagacaggcccggctgtgtgaattcttgctgtcacaagtcaaaaacagttgtgtaagccactgggtatattttccccagagatctgtgatgaatattcccttacagggaaaggagatacgcgtgtaggtaatatcctatgccccgcgccgggccctgggacctcccggcggagcccaggtgcagcaggagcgggtggccgcttggccacaggagggcagcagcggcccttcctga

SEQ ID NO: 1496 - DNA, 468 bp, Homo sapiens
  source 1..468: mol_type = other DNA
ttggagccagacaggcccggctgtgtgaattcttgctgtcacaagtcaaaaacagttgtgtaagccactgggtatattttccccagagatctgtgatgaatattcccttacagggaaaggagatacgcgtgtaggtaatatcctatgccccgcgccgggccctgggacctcccggcggagcccaggtgcagcaggagcgggtggccgcttggccacaggagggcagcagcggcccttcctgatcccctaggggattgaaggctgggcagagtctgagtccacccgggtcgtgcccgtggctctccccgacctggaggggtggacgcccctggcccccagtccccggcctgcggagggggccggtggctgcggccctgcgcggggccggggcgggccgagccaagggccgcccccggccgaccctccccctgccgggcccgccctccccgccgcggcgctggaggaggg

SEQ ID NO: 1497 - DNA, 525 bp, Homo sapiens
  source 1..525: mol_type = other DNA
actgtagtatgcagtacttcttcaataaatagtatttgttatgttgttattatcctattaatagctggagggcaaccgctctcccagatctagaggtggtcttcacaggcccaggaatctaccccggctcctgattccggggtggtcggctgcagcctgcgtcattaatcccgcaacaagcgccccatggctctctgggctggctggccacaccgaaccgagagcgaggagaatgtagcggcggggcagaggccggggacccgtgggccggttcctggggtggcccagagcaagggcaagtttcgcccgggacccgcccagctggccgggagccagtagcagggaagggccggctggcgcgagcaccgcccacgcggagccatgggggcggggcctgggcgggggcggggccgcggccgagggcggggcagggaccgggtgcgctcggccgtggcgcacctggtgagctccgggggcgctccgcctccgcgccccaaatccccggacctgcccaacgccgcctcg

SEQ ID NO: 1498 - DNA, 468 bp, Homo sapiens
  source 1..468: mol_type = other DNA
ttcacttgaccgtgtgacctcaagtcacggtaaaatgacaggaagcgtcccgtccactgtagtatgcagtacttcttcaataaatagtatttgttatgttgttattatcctattaatagctggagggcaaccgctctcccagatctagaggtggtcttcacaggcccaggaatctaccccggctcctgattccggggtggtcggctgcagcctgcgtcattaatcccgcaacaagcgccccatggctctctgggctggctggccacaccgaaccgagagcgaggagaatgtagcggcggggcagaggccggggacccgtgggccggttcctggggtggcccagagcaagggcaagtttcgcccgggacccgcccagctggccgggagccagtagcagggaagggccggctggcgcgagcaccgcccacgcggagccatgggggcggggcctgggcgggggcggggccg

SEQ ID NO: 1499 - DNA, 419 bp, Homo sapiens
  source 1..419: mol_type = other DNA
ccggactgctctcagccctggccctaagagaaggatgggaggggaggaacccccactcctctctctgcctgatccggagaagtaagcttggttcttaattcacttgaccgtgtgacctcaagtcacggtaaaatgacaggaagcgtcccgtccactgtagtatgcagtacttcttcaataaatagtatttgttatgttgttattatcctattaatagctggagggcaaccgctctcccagatctagaggtggtcttcacaggcccaggaatctaccccggctcctgattccggggtggtcggctgcagcctgcgtcattaatcccgcaacaagcgccccatggctctctgggctggctggccacaccgaaccgagagcgaggagaatgtagcggcggggcagaggccggggacccgtgg

SEQ ID NO: 1500 - DNA, 474 bp, Homo sapiens
  source 1..474: mol_type = other DNA
tagtcccagctactcaggtggctgacatgggaggatcatttgataaacaagaaactaggtctcagaatttggttcccatgttggtattctcccagcccctgagagcaccactcctgggagaggaagagatatttactattccctcctaaatatcattctagaagagtgctgctgaacagaactttggcctactaatgaggaactgaattttaagttttatttaattaatttagatttaaatttaaatatcaacatgccacttaccgtattggacaatgcagttctgcaatcttcaaagctccacctcccctgagccagggcactgggggccacaagacctttttgagggacctcctctgagttgccaccacggaggtgtccccctcggccgccaggggccgctgcgtctcggctgtgcccatccgttcagccgagcgcctggcactgtcccgaaggaggcggcggcgcccacgc

SEQ ID NO: 1501 - DNA, 471 bp, Homo sapiens
  source 1..471: mol_type = other DNA
gttcagggcagtgcccacttcacagggatccgggtgaggagcatcagccctccacgtggccgaggtgcacaccccaaccccccaccaggcgccaaccgccgcgggcctggctctatggatgagcctttggggaacttcccgaggtcactgaactggtgtcaggcccggattggaatccaaacacatcccagcccatgccgcgccggcccccagcgtcttcccgggtgccagcggcacccgcatccattcaaatgggcagggcgtggtagctccgcgccgctcagcaggggcgcagcgcgcgggtcggactgggacgccggtcacgtggcggggagggggcgccggcgcgcgcgggcgagctagagggcgcgcgcggctgaaagcgtgtggaggcgggggagggggcggcggccgggagagacgactccgccccctgcgcgcatgctccggccccggcgggttataaggcag

SEQ ID NO: 1502 - DNA, 322 bp, Homo sapiens
  source 1..322: mol_type = other DNA
gcaataattgtcttgccaatgtcacagtcatgaaccatcactattattctcaaagtcttatttctctgctttaggagaaataaatttcctcaccagcatccctccaaagagaagggtatttcctttatatagacatgcaggcaccaaaatttattattaacacttatgcaaatggcagttgccgcctacttgcagaagagggctcgagctcggctctggaggccgatctcttttctactacagtagatatcctccgaagcagcggcggaactccacagcggcagccccgcccctcactgagttccgccccgggcgcaacctc

SEQ ID NO: 1503 - DNA, 358 bp, Homo sapiens
  source 1..358: mol_type = other DNA
cgtcatcagcagcagcagcagcagctaccaaacttcagtgccggactctattttataatatttcagtaacatctgttgaatctctgcgccccgcacaggctcagaggctccgcccgcgtctccgcctaactcgccggccacgcccccacttcggggagctcggtccctctcggattcgagttttcctcggctccagccgccgcgcagagggcctctcccggccctggttggcggtccgcctcctgcccgccgggggccaatccctggcgcgagagtccagggccggggctcgttcccaagcgcccagcctgtgacggcagcgcgccgggcgccgcgcggcgggagggggcggggctct

SEQ ID NO: 1504 - DNA, 586 bp, Homo sapiens
  source 1..586: mol_type = other DNA
ctctgcgccccgcacaggctcagaggctccgcccgcgtctccgcctaactcgccggccacgcccccacttcggggagctcggtccctctcggattcgagttttcctcggctccagccgccgcgcagagggcctctcccggccctggttggcggtccgcctcctgcccgccgggggccaatccctggcgcgagagtccagggccggggctcgttcccaagcgcccagcctgtgacggcagcgcgccgggcgccgcgcggcgggagggggcggggctctgaaagcggcagtttcccgcgctacagctccgcagcggccacgatcgatcccgcgacgggtctacgcgcgcttgcctttcccgccgctcgggcgctgagcccagggaccagccggcggcagtgaccccgcccgaagccccttctcccgcggtggccctcgcggagtccggtcagccccggggagcgcagccgggaggggcgtccaaggggcgtctcgcgtctgggaacggccgggcccccagcgggctgtggtcgcggggtgggggccggagcggcgaggccccccttaccgggctgcgcgggccgccca

SEQ ID NO: 1505 - DNA, 411 bp, Homo sapiens
  source 1..411: mol_type = other DNA
tttggaaaaagcgcgggagaggaagggagtcactaagccgcagcctggcccttcccaggcttgtgccaggccccagtctctgacctcagcgactccccaggccctcggacccggagcctggaccaaggctgggcgggaaggccccgggccaggggcggagccacctcggcggggaagccgaaggctgctgcccggtggtcggctgagcggctctagcccagatctcagacggctgagtcactgcatcccggcgcggcccgcagaagacgagcgccgctgccgccgcctcctcctcccgggctcccgggctctcggggtccggggcctttgccgtgaccctgtaggcggcctctgaccggcgatcgatttgccgccctcagggcgctgggcggccggctgcctccgaagctg

SEQ ID NO: 1506 - DNA, 315 bp, Homo sapiens
  source 1..315: mol_type = other DNA
taatgtctgcaaaacatctcttaggctttcttaagtgaagctatcgctgtgggctagcattgcagcctaaaaatccttttaacgtatccttaaatattcacttgagggttttggaaaaagcgcgggagaggaagggagtcactaagccgcagcctggcccttcccaggcttgtgccaggccccagtctctgacctcagcgactccccaggccctcggacccggagcctggaccaaggctgggcgggaaggccccgggccaggggcggagccacctcggcggggaagccgaaggctgctgcccggtggtcggctga

SEQ ID NO: 1507 - DNA, 541 bp, Homo sapiens
  source 1..541: mol_type = other DNA
actatccgtagtgagcagtgatgattcttttcaaatttatgcaatcttatccttaagatttgaaaaaaaaaaacttataaaaaatcttaaacgtggttttccatctacaatttttcgcaactgtagggatatattcaaaataaatgctggacatttccaggcattccggatggcgaggaggggccgtcctcaccaggactccaccctcgtcaaagttaaaaggatgaagattcttttatctcacaaaggttatgagagaaatattaaatttaaaatcactgtggagaccacccccagactctgaaagccattaacattgtttcggccgttagggcggttggcggcaactcaccgcccagcggcggttgcgtcgcagccagaagcgtgacccctttccactcctccactcagagccggggacgcggcgggggcgcggcggaactacagctcccatgacgcctgggaacggccgcttccggcatgttactccaatgcccagcgggcagtgcgcgggcggcgcttgcgcgatgcgcggacgggg

SEQ ID NO: 1508 - DNA, 567 bp, Homo sapiens
  source 1..567: mol_type = other DNA
acttcctgaaacaaatttatttcctaagacattggttgcagagtagaaatgtgttctttagaaacagttcttaaaagttacaatgttgtcagcaaggtctagatcctatatagaccaacactcttagtctttatatccagaacccaagtgaagcttcaaaggttactgggagggttgaagaggtgctgaaatcaacacttcccttaatggaggtcagcacttccccagtctgggagagacacagactgtcagaagcatctgacttaggtatatatagcagacttaaaagttatgaataaaaataccttctgtgatgaacagaagtttctcattgatcacgacatgtcactcactctaaacagtggggacataaggaaacagaaggtgtcaacttggcccttgtgctcactgggaaagagacatcaggagacctgtaattctgttctttctctggtttgttaaaaatttgaattgtaaccaggttcctttaatgtgaccacagaaggtggttacgtactaatttcctctagggcttgtgatgaagtcagtaaaccacagccttcagca

SEQ ID NO: 1509 - DNA, 453 bp, Homo sapiens
  source 1..453: mol_type = other DNA
aggaaaatcctacaaggaggacatttaacatttattgtatgccaaacataatcctcataatttatctatgaaatattttccataatgaactgatcaaaggacttcactgatcaaagtgcactgatctcaatagcacaaataacaatgcgattactcatttaatatctgtcatttctgctgaagtgtaagcttcatgagcacagtaactgctatagttccttgttcagtaagtaattattatatgattatggcaaataaattccataaacagtcgaggaagtatttcttaataaaattactccagaggctcttcctgaactctatttcagttctaggttggctacctaacgataaaagttaagcattaattttatgtggtaaagtctttaaagtctccccagttccaagtaggtaatccttctgagaagtcccacctttctgagcaaagaggta

SEQ ID NO: 1510 - DNA, 414 bp, Homo sapiens
  source 1..414: mol_type = other DNA
cttctgagacccagacccaaaatctaggtttagctaggaaaatcctacaaggaggacatttaacatttattgtatgccaaacataatcctcataatttatctatgaaatattttccataatgaactgatcaaaggacttcactgatcaaagtgcactgatctcaatagcacaaataacaatgcgattactcatttaatatctgtcatttctgctgaagtgtaagcttcatgagcacagtaactgctatagttccttgttcagtaagtaattattatatgattatggcaaataaattccataaacagtcgaggaagtatttcttaataaaattactccagaggctcttcctgaactctatttcagttctaggttggctacctaacgataaaagttaagcattaattttatgtggt

SEQ ID NO: 1511 - DNA, 331 bp, Homo sapiens
  source 1..331: mol_type = other DNA
cattctatgactccaagaatgacaggttgatgcctggaccagctctcggagaccgactccagaggggccgggcccaggtgctagacaggcccacggtgtggggtgccagcccggcgcaggctccagaagtccactgcgatggctagatcaggaccccagggatcttctccacgggggcagggctcctgcgtgaggagggcgctggacactcccaaccgcgcgggagcggaggccgagccgggcactcaaagcgcgcgctgccccgccgcagctccaccagagggagccgcgcagctgcgcctgggactacgcttagcgctcgctcgcgaga

SEQ ID NO: 1512 - DNA, 181 bp, Homo sapiens
  source 1..181: mol_type = other DNA
agatctcgcctcaggctcggcttccgtagggccggcacgctggccctgacacgctcttcaggccctaccgtcggccggcaggccgttcgccccgcccacagtctcgcgagcgagcgctaagcgtagtcccaggcgcagctgcgcggctccctctggtggagctgcggcggggcagcgcgcg

SEQ ID NO: 1513 - DNA, 194 bp, Homo sapiens
  source 1..194: mol_type = other DNA
ttcatcaacacaaatgtaagctgaacggaagacggaagaatgtccgggctatttcggacatacttaagtctgtactagctatattatagatccagatctcgcctcaggctcggcttccgtagggccggcacgctggccctgacacgctcttcaggccctaccgtcggccggcaggccgttcgccccgcccacag

SEQ ID NO: 1514 - DNA, 556 bp, Homo sapiens
  source 1..556: mol_type = other DNA
tctgtgaaaatatgcaaacaaaactgccttgtggacatttttggtaaccctagttctctagggaaataaacttccctgttccagataaaatggaactgaagccaaatgacttcccttaaaaggtacttcagcgcattttacacaaatcatagttttctgtgtgtgttatgatttgagaaacaaaacttgatagtagaattttgtcttagccgatggtgacggacacctccagcacttgatcggaagtcctacagaatctcttgactttgggagatgcaactgttttcagaatcaagaaaattatgctagcattcgctcactgcatgttttcagagtacagctattctctcccacggcggcaatgggagactcccctaaggggctcttgacgtacagggagacttccagatatggtacacagatgtcacattgctagaacgtctctagacctaacctgaggtaatccctcaccggcagtgaagctcctctgccccaagctctgggggtgtcacactaaactgtggtgatgtcacactagctgggatgacattttaca

SEQ ID NO: 1515 - DNA, 471 bp, Homo sapiens
  source 1..471: mol_type = other DNA
cgatggtgacggacacctccagcacttgatcggaagtcctacagaatctcttgactttgggagatgcaactgttttcagaatcaagaaaattatgctagcattcgctcactgcatgttttcagagtacagctattctctcccacggcggcaatgggagactcccctaaggggctcttgacgtacagggagacttccagatatggtacacagatgtcacattgctagaacgtctctagacctaacctgaggtaatccctcaccggcagtgaagctcctctgccccaagctctgggggtgtcacactaaactgtggtgatgtcacactagctgggatgacattttacaatcaccgcagagtctgcagtgcggagggggcgggaagtccaggccccgcactcgatccacgcggagggtcggcgaggcggggccggccgggttgagggacggccgctcggcattccgttcgtcgg

SEQ ID NO: 1516 - DNA, 450 bp, Homo sapiens
  source 1..450: mol_type = other DNA
tacattgatctagactgcaacaacatatatatatatatcagattccgcgcaatacatgaatgtatagtaaattagtgtgaactcactgaacactcctcagttttggtgagagactatatctggcctctttcaaaaggatgtaaaacagcgctgctgtcgttaatttactaacttctcttccttgggctaaatcagatatttgcatagcccccaaagtagtaatgaaatatgcatttcagtggtgaaaacccctgtaaattcaatatatttggcttttgtggaaaattttcctcatggggtgaagtacaccagctgcttagcacaaggtggcgccaatgagtgaaaaatgtcagtttcttaagtcagcactggtgaaactttcctaaaacaggaaggaccctacagcctaggcgggaggtggcaccccgcctccaaagctaaccctcgggc

SEQ ID NO: 1517 - DNA, 583 bp, Homo sapiens
  source 1..583: mol_type = other DNA
ggagccgcagggggccgctgcagggagggtcttcttggggccgtcgtgccccgccccagtgcggccggggcgcgggttcgagctgctgctcggcagtggggggccggcgggcctcggtgccaggaggcgctcgcggtcctcgcctcgctgtgccgggcccggccgccccctctcgggctggacgtggagacttgtcggagcttcgagctgcagcccccagagcggagtcccagcgcggcaggcgcaggtaacgggagacccagggccccctcccttcctggagagaactccccagctcgggattctggattgggagcaagcccccggccctcctgtattactactgcggaatgcgggggaccccgcagacagccaggctcccaggacggggcacccttggggctcatctccaagctcgctctgcgggcgatttgccaggagatgttctcgcggtgaacgcgggcggacccccagtctctccgggagaaacttgggtctgcggctggctttccgcgtctccgctggggggcgggggacgggggagggtatgagggtgttgcggcgtccttcccccaccccctct

SEQ ID NO: 1518 - DNA, 567 bp, Homo sapiens
  source 1..567: mol_type = other DNA
gatcaagagactcccgagataggcccctgcagggcgctggtcccccggcctccctgaccatggctcacagacttccagcgctgagtgaggcagctcgaagcctctcaaggctttaagtctagtctttcttgttatgcttagcagaaagatacatgatcctgtttcaagcaaggaggtgggtcggcggaactgagcgccctgcgccctccgttgccatggagagagacggccgctgcctcccgtcgccatagcaacatgcgggtaccgcggaccgcaggattgcggagctcggaaagtcttgcagtgggactcgggggccatcccgtcaggaacctcggccaaggtcctcccagaccctgcctgagggagtccgtgaagtacttaaaatcattacacctcctttacggagaggaaaattgaggaatgcggaggattcgggacagcccggcttcccgcctcgaaacccccaccccccggactcaggccagtccctgagtgtagagggggcggccgcgaggcgccagactcgccagctgccgcgggatgccacgtgaggggcggggaccc

SEQ ID NO: 1519 - DNA, 351 bp, Homo sapiens
  source 1..351: mol_type = other DNA
accattgttgggttattgattctgatacgtagcaactcctgagaatcaccttaagaaaaatagctgttaaagagtttctttggtctacgcacagcagagacccaggaggtcccggcgatcgagcggcgcggcaggtgaaacttccgcggagacgcccgggacacgctcgcagggaccggaaccgtcccggctaccacccgcggcactgacgcaaggaactggcttcgagggtccgggaccgctccgcgcccgcgaaccgagttcccgcctccctcgggaggacgtccgtgcgtacgtgcgcgtgccgcaaccgccctccttcaaacgcgcgacgcgagggcgggggcgccg

SEQ ID NO: 1520 - DNA, 254 bp, Homo sapiens
  source 1..254: mol_type = other DNA
cgttaagtcctaaaggcaaagaactgaggttccttttgaattttaattggagactggcgcccaattctagagtctctttaaaaaatattcccctttcacctctaggcccagctactcggtgatcacgccactgcactctgttaaggggctccctttccagataacaagccaagacgttacgtcacgttctagataccgggcggacccgccgcactgtgattacatcagcgccggcgtaattaaatataactgag

SEQ ID NO: 1521 - DNA, 486 bp, Homo sapiens
  source 1..486: mol_type = other DNA
aggctcaggtcgcgccacagagcgagactctgtctcgaaaaaaatatatgtatatacacatatatatacatatatacatatatatacacacacatatatacagtcataactaagactgtgtgttattatgcagttttcttatttgattacttgccttacaggattgtaattagtatcaaatagataatgtttgccaaatgttttacatacaataaaatgttatacaaaacaaagctattgttcttattataacaataggtagattctgtaaaagacttgaagtaaatttaacacttaattcattaaactgtcaactgaagttctgtactaataaaaacatgcattcctgatgaatgtaccagcatattcaccaaccacagaaagctgtttgcgtgatgtgaaaccctgaggatagctttagggtgggatatcaccacactttagagagtattgaaatgcaattttcttagcagaataataaaatga

SEQ ID NO: 1522 - DNA, 370 bp, Homo sapiens
  source 1..370: mol_type = other DNA
tggttacacatacaacatgtcaaataaatgtgtttctcagaagactggctgctcattatttagcattcctctcaccagaggagcatgctctactgtctggcaggggataatccatatgaaaggtcagttactcgtggaaaacaaaggtctcatttagatttctaaattaccttgctacttgctgggaaaagataaatcattttttatgactcctgaatatgccatcagaattgttggccttcaaggtttaccccattattgtgggctaaaacgtatgccaccatgttggttgtggttaagtgcagcaaactgcttggcgtcacttgttgagagtcttctcgtgcacgcgcccggagcccgcaactctcgc

SEQ ID NO: 1523 - DNA, 495 bp, Homo sapiens
  source 1..495: mol_type = other DNA
agggtagaatatattatcttttaaaaattacaaaaatttgtataggcaaaccatttcttaaagttgatggccaaattttaaaatgttatttttcatatcatttataatcttgtcacaatccacttaaagaagtttggttatatttcagtgaaaattttcttctttactacaattagtaagtatgtaatttaaacatatttaaacagctgcttagatcactcccggtttcttttactgatttaaaaacaaaacaaaaaaaaataaaaaagttgtgcctgaaatgaatcttgtttttttttataggttactgtcctgtaaaatacagatggccatatacagggtccctggccagtggtaaacacgaaacatttttgctttctccagttttctgttaatggcgaaagaatggaacgctttgtgcggcctgccgcatgactcgtggttcggaggcccacgtggccggggcggggactcaggcgcctggggcgccgactg

SEQ ID NO: 1524 - DNA, 369 bp, Homo sapiens
  source 1..369: mol_type = other DNA
tggttacacatacaacatgtcaaataaatgtgtttctcagaagactggctgctcattatttagcattcctctcaccagaggagcatgctctactgtctggcaggggataatccatatgaaaggtcagttactcgtggaaaacaaaggtctcatttagatttctaaattaccttgctacttgctgggaaaagataaatcattttttatgactcctgaatatgccatcagaattgttggccttcaaggtttaccccattattgtgggctaaaacgtatgccaccatgttggttgtggttaagtgcagcaaactgcttggcgtcacttgttgagagtcttctcgtgcacgcgcccggagcccgcaactctcg

SEQ ID NO: 1525 - DNA, 342 bp, Homo sapiens
  source 1..342: mol_type = other DNA
aaattctaacatatgctactatatggatgagacattacactaagtgaaataaggcagttatataaatacaaatgctgtattgtttaatgagtacagaacttcagtactgcaagaatatgaatgtacaactgaactgtacacttataaatggctgagatattaaattttatgtgtattttgccacaatttaaaaaaaattaaatgaaagtaggccagggctctgtaatttagctactcgagaggcttcccactgcccagctaatcatagcctgaccaccaggctataggctgccactgcgcaggcgcccattgcgcctaccaagacaccttggacagactccc

SEQ ID NO: 1526 - DNA, 649 bp, Homo sapiens
  source 1..649: mol_type = other DNA
agaaacgtacttttgttacctgatgtaacaggaaaagaatatttgcaaactatgcatctgacaaaggtctaatatccagaatctataaggagcttaaacaatttataagcaaagatatatacatgatgctcacacaaatcattagagaagtgatattaccttttaatatgccaatgtcatatggcaagtaaatggcagggccaaaattttatctcaggtcagcttgacatcctgtcagatgtggccatgttcctcagagtcattctttcacatgtgtaaattttacttaatatcttaaaatcccccaaaaatattttgaactacacattttgttctaaacaaaatttttagatgaggaataattttatatatctttacatgaacatttaggtaaaacttgaagccaaataaatttttattcccaagacttatttagatttctgtatctatcttttattaatattaataaataaatattaataaagaatatatttaaaaggtaattttattttgaaacagcatgctttaataatgtcagtttccaggtaaagatattgtctaaatacattttatttggaattcagtatgaattttcaatagatgcttttcagataagaaagcagtaaatcaaatgcaattgtataaacaa

SEQ ID NO: 1527 - DNA, 503 bp, Homo sapiens
  source 1..503: mol_type = other DNA
ccagagactgtggtttcaaagttttgctgaatttatgcataactgtctgacaccacatattgtagacactattaagatcccgaaaatttgggatagtcagactccctccactggccggctgggttgagggcagcccacaggactcagggcgccgcctcccgcaccctctcccctagaagctgcttgtgtgcttgctccgcgccgcggagccgcagccctggacactcagtcaggtgccccgcgactggtccgcacagggcgctgatgggtccccagtccccggtgggcgctcccgccctgcaggtgctccgatagccggcggcggtgcgcccactgtccctgggtccgggagaagagcgaacgtgctccctcgggctgctcgatctccacccgctggcgcccccacccgtcgccagccacgccgcttggggtccacgcgcccctccccgccgggccccgccccgccccccggaggccccgccccggtcctccccgctccgccc

SEQ ID NO: 1528 - DNA, 374 bp, Homo sapiens
  source 1..374: mol_type = other DNA
tcaggcaagctctcctgtcaggctaggtcacctgcggaccttcagctcaggggccaaggactccgggaagttcctggaacccagggccttaagttaaggtcccggctctagctcccagaggagcttgggcacctgcccctcgcggagctccccctgggtgctcacctatcctgggatccgatgcctggggcaccgagggcgacgccgggcagaccagggaggcggagaggtgagggaagctgcgagcaactccgcccagccccatgcgcgcgcggccagaccccactggccagccctccaggagcgtccagcaggacccctccagccgggcaccacagcccagccacagcaggtgcggggctggtggtggggag

SEQ ID NO: 1529 - DNA, 219 bp, Homo sapiens
  source 1..219: mol_type = other DNA
tagcttcagctacctgcctgcagagatgtgctcatctagcagtttctaggagactgtgcctgcaccgcgcacggtgacgaggtgagggggacgccggccgagccccgccctccgctgcaggtgggccggccccgcggcggggccggcagcgctagctgttcttggctcgcggccgcgccgggctcgcagggctgggctcgggctgcggggcggcgccgg

SEQ ID NO: 1530 - DNA, 355 bp, Homo sapiens
  source 1..355: mol_type = other DNA
aaaccattcatatattgagaagtaagtataatagctactatttttgtatcagccccactttacatagaggggaactgagaatcacaagtgaccctccaaagttcattagctgttaaaagcgttcagcagggtgtccctgcacccctcgcccatccattttgttccatgttgcagtgaggaacagagaccaccgtgaggggacaggctgagttaccaccctggggtgatttgacagactgtattcattgcatgatttatttttagcctgaaacaactgcatcctaaaaaaggtatctggggcttggcctcccagcctccctagctactctcatgcgtgcgtgcgtgcgtgcgtgtg

SEQ ID NO: 1531 - DNA, 568 bp, Homo sapiens
  source 1..568: mol_type = other DNA
gctaaaataatcacaaataatatgttattgatattaactatgagtatcttcataaagtggcaaaataattgaactagattttattttttattataaggtatacaaattcacacgcagtacaatatattagcatgttaagatgggaataatcaacacatgtagcatgtcatatttcagcaatggcttaatctattgaaaggttcttaccatctattgataagttagtctcatagcagatcatttctcaaaaatgttaatatgcttaatcaaaccttactgaagtatcttttaaaatgtaaatgatctctaataagtctaaatactttattgcagcatcttatatagtatatatttccatgttctggacacaaatatttttctaaatattaagggaaagtttgatagtcaatatattgtttatttgtacttaaatatttcatcaataatctggaaaagagaaatagctacggctagataagctaaaatatttgggctgtgaaaactcccacactgtgacagattccaataggatttcccattaaatatcaatttaggggaaaaaaattcc

SEQ ID NO: 1532 - DNA, 423 bp, Homo sapiens
  source 1..423: mol_type = other DNA
agtttgtcagtgctcagcgacacagctatgaagtgttaattgcattcataaagacattaacaaaggaattaaaaaatatgttatccaaagaatgtttcaacaataatcatcaaagtttattgcttgcccattggggaaataactcttgatacatattaacttttcaaagaacattttgggtccattattttgagtatattaactaacagacagtttgcttttgtatgatttaagtttcaaaaaaatccagaggcattttcttagagcaaaatgctcattatctgggagaatttttgctttttgaaataaaattacaagactgggggtttattttacagtccctcttgaatattcctgagatacccggggctccctccccagccctgtggcagggccccccagctgctgacagcggggctaagc

SEQ ID NO: 1533 - DNA, 401 bp, Homo sapiens
  source 1..401: mol_type = other DNA
tattcaatgttaaactagaagtcatggtctagacaatggaagcaggtgtccagcgtcccttggccgacggacaagaatttgcttgcctaccctgcacagacagcacttttctctgaaggctctagggctccccaagccccgcattgctgagagccgccaggccgcccgccagctgcgggtcccctgtaggcagagccctggggaccaaaacaccattttttttttaaacaggaagtccagaggcccgggtccagggcatccagccccggatctcgaacgctcgccccgcgtagcccggctgcgctccccgctccccgcccggcgtgagcctgacagccccgccgcccgcgcaggcgccccgccccggcccggcccgccccggccccgccgccagcgcttcc

SEQ ID NO: 1534 - DNA, 590 bp, Homo sapiens
  source 1..590: mol_type = other DNA
gatctccggggagagtggtggtttcctgggcccccccagagaacccaaggcgcgtggagaggcacctggcaagtcctttttcttccctaaaaagagaacagattctcattttggaatctcgcacaggaggcactctgagagcaccaagcgcccggggaggccatccgcaggtgggcgcggggcctggattccacagaggggcggagtccctcagtcaggcgctggctgagcccagaggagatcgccgaagccgttccgcccacgactgccgggtcggcggcgactgggggagcccagttccgagaccgtaccgcacccactgcggacctcctgggccctacatagtaggcggggggcgtgggagggccaaggccgccgagtccccgctgttcagccagcaggagcgccccgcagccctcccgggacacggtggacacgcttgtcccagacctgggcgccctcctgccgggagccaggactggccgcagcaggcgctgtccgggcccgtgggcggggtttcgggagggggcggagccaggcccacggccggtgtcaggttgctccggtaacggcgcggcgtgggcggggcc

SEQ ID NO: 1535 - DNA, 401 bp, Homo sapiens
  source 1..401: mol_type = other DNA
atctgacatctcagcctcccagcttggggacgggggaggcctgcctcaggtaaccctacgccgcgggatcacacagcgctgaagggatgaggggccccgggtgctcccgcccgtcctgctgcctcctccggtggctctctgggagccacagccccgtctagccacggaggggcctacagcacgccccaaacctggtttttaaaaccaagccattttcaaggaaagaatttcttactttaaaaccttggtttttaaaaccaagccattttcaaggaaagaatttcttacttaaaaatcggcgccccggggcgcgcccggggcgcggcgccgcggagggtgggggaggaagggccggggcgggccgccggctgccagcccagggcggggcggagccctactcc

SEQ ID NO: 1536 - DNA, 632 bp, Homo sapiens
  source 1..632: mol_type = other DNA
cataaaataataatagcttatatttactgaccacttgtgatgtatcaggcaccattctaaatgctttacaagtatgtcacagatttctcccataaccctcttaagtaagggttatttcgcgttagaacccaggctgtttcctctatccaagagtgaagtgcaatatggggttccacttcgtgtctgtgccgccggcttcccaggttatgggtggccagctgggctcatctcgccggcggccccggagtctgggtgtgaagccctgattaacttgccgggctgctcggcccacacgccagccctgcccaggtcctccggtgccccgggccaccctcatgcccccgccaggcccggggccgggactcgcgtctccaggggcggggccgggggcggggccgggcctctcttcgaggccgccgccctggccccgcgctcgcctcgccgagtgcggcgggccgggctggagctggaggggcggggactcgggaggggccgcagcgcggctgctggtgccgttgcgggagaagaggaagcggcgcgtcccctgaggcgtgcgcctgccgcgccaggggcgaggtcaggctcggcgggggcgcgggcggcgcccggagggggccccggggagggaggcg

SEQ ID NO: 1537 - DNA, 502 bp, Homo sapiens
  source 1..502: mol_type = other DNA
cataaaataataatagcttatatttactgaccacttgtgatgtatcaggcaccattctaaatgctttacaagtatgtcacagatttctcccataaccctcttaagtaagggttatttcgcgttagaacccaggctgtttcctctatccaagagtgaagtgcaatatggggttccacttcgtgtctgtgccgccggcttcccaggttatgggtggccagctgggctcatctcgccggcggccccggagtctgggtgtgaagccctgattaacttgccgggctgctcggcccacacgccagccctgcccaggtcctccggtgccccgggccaccctcatgcccccgccaggcccggggccgggactcgcgtctccaggggcggggccgggggcggggccgggcctctcttcgaggccgccgccctggccccgcgctcgcctcgccgagtgcggcgggccgggctggagctggaggggcggggactcgggaggggccgcagcgcg

SEQ ID NO: 1538 - DNA, 404 bp, Homo sapiens
  source 1..404: mol_type = other DNA
actttctgacagataatatccatatttgtacttaaagttgaaaaagaaaacgagcaccacttttgcaatttttactcactgtgacctaaagaattataaccctgaaaatctataatgttaatcactttaaatgcttttgtgatattcaatttctttcttttcaccacaaaaacgattttagaacatgaaaaatatctttggagaaacaaaaaaatcaatttcctcatcattttatgggtctacatttttcaatataatcatatgggataaatgtttgcattccatacaaaagagtgatccttatttttttgtgtgagaattaaaatgcagcaagaaaactgctttggcaaaggagcacatcagaagggctggcttgtgcgcgctctttatgttactgtaaaaga

SEQ ID NO: 1539 - DNA, 495 bp, Homo sapiens
  source 1..495: mol_type = other DNA
agtttcaagcaaggaatgctccatttctcccaaccaagtcgggccttttgtattcaaatcaaaagcacaaaactctttattggcaatcagtggtgtccacttagagcaataaatattaagtcttaagagtacattctatatgaagtactatagctattaatacacttgtaatcagtgccacaggcaccctagccaccggggagtgggcagagtcaaggcctctgtatggtagaggggaatccgtggcctttaaaagtcctaggccaacttttaaaggtcggaggaaaagaggggatggcagggtgggctccgacgcctcctcgcctttaagcgggtggccccggctcttcctccgttacctggagcggatgggaggcgcgggcgggcgctgcggttcttcccttctaagcggtcggggctgcacactcggatcggcggggccggctcccgggcccggccggctggaggagggaggggcgagcggagccaggggcg

SEQ ID NO: 1540 - DNA, 498 bp, Homo sapiens
  source 1..498: mol_type = other DNA
tggtgtccacttagagcaataaatattaagtcttaagagtacattctatatgaagtactatagctattaatacacttgtaatcagtgccacaggcaccctagccaccggggagtgggcagagtcaaggcctctgtatggtagaggggaatccgtggcctttaaaagtcctaggccaacttttaaaggtcggaggaaaagaggggatggcagggtgggctccgacgcctcctcgcctttaagcgggtggccccggctcttcctccgttacctggagcggatgggaggcgcgggcgggcgctgcggttcttcccttctaagcggtcggggctgcacactcggatcggcggggccggctcccgggcccggccggctggaggagggaggggcgagcggagccaggggcgcacgtacgccccagcgctgggatttatcggctcgcgaggagagcggagcaggcgcgcggcccaggcggaggagcgccgactctggagcagccg

SEQ ID NO: 1541 - DNA, 558 bp, Homo sapiens
  source 1..558: mol_type = other DNA
tagctaatattcattgagcagttactatgtaccagatattgttctaagtgctttaaataaattagcttgaaactatcattctcagcaaacaccaacatggcacatgtatacatatgtaacaaatttgcacgttgtgcacatgtaccctagaacttaaagtataataataataaaaaaaagaaataaaaaaataattaaaaaattagctcatttggcattcacagtaatcttacagggtacctactattagtatcctcattttagcaatgagggttaggaaaagttaattaagttttctaagattgcacagttactaaaactagaatctgcatgcaaacccaggcagcctgactctagagtcatttcctctctcaagagaggaggagaaggaagggccaagaagacaacattgctggtgcctttttttgagtcttagttttatcgatatctgtttacttaaccacaaagataacttttttactcccaaatttgagtgattagtaaagagctacataatgtaaccagttttgcttttcacagtgggctgaaaaccacatg

SEQ ID NO: 1542 - DNA, 307 bp, Homo sapiens
  source 1..307: mol_type = other DNA
taactcggggcttccacgctgggcgagcctaggcgcgggccaaatggcgctgagacctgcgcaccgggtgagtctctcaaacatctcaccaggtcgagtgagggcactgcaaatctcgcggctcggcctgcagcggcggcttcccctggcctcccaccccagcgactgagcgcggagcccagcgcgcacgagcgccagcctggctcagagacacccacgaagccagggcctttcagcgcctgctaactggcgctacccctagggccgcctctcggttttaaacgtaagccgggtcctttacgcggct

SEQ ID NO: 1543 - DNA, 476 bp, Homo sapiens
  source 1..476: mol_type = other DNA
ttgtctcactgtgaccaggcaggagccctccgtgattgactgataaaaacagcgggtccaactcgctgctcgtttctgttacacaggactgtggaatcccgggtgacacccgagcccgacaaggagggtggcgctccctggcccggccgaagtaagccccggtctcccgaaccggtccccgtaacgcgagccgcacgctaggcccgcgtggaggagaaacgtctggcgcccccgagcggccgagacctcgggagcccgaaagcatccaccaatgggagaacccagtctgcgttcgtgggctttttaagaggtcctgaggcctctctggtcaccacagagagagggacagtccctgtgaaacgccttcggccgccccgcccacggccttgtcaggtcccgccccccgcgtgagtggactggccactctggagggcggcggggcccggagcggcgagggccgccgctctcggacggtg

SEQ ID NO: 1544 - DNA, 398 bp, Homo sapiens
  source 1..398: mol_type = other DNA
gatgctgctgaaggcctggagcaccttcacagaatcttgggatgaaatgtcagagatttttgctaacccactcaccttagtgtctttttggagtctcaaaaaaattgcaaggtgggaagtgctggccctctcctgctcccactgaaatgaagctggaagagaattgcaacccagctgcctgaggtcccccagcatgagtctcctccacgagagacctgaccaatggtgacccagcctctgttgcagagatggggactcctggccccaaggctcccagcatagagtcaggaggaaagtcctgctgaatgcaggccctgagtcaagacttggaaaggcagctctgagcccctggcttggctggctggccggagcaggcagccactgtgcctgcagggaat

SEQ ID NO: 1545 - DNA, 399 bp, Homo sapiens
  source 1..399: mol_type = other DNA
aggatgttatcttgcaaggaaaatggctctcctcaatactacggagaacagaattgattcagattgtttttaagcctgaacgtaaacaatattgggtacctagattcctctgaaaggaagtttattttaaaaacgtaacatggcacatgttggtgctctattaatcgagcctcgggggcccgctgggtcaaccccacgaactggcggtggcaaggccctgggctctcgtggcagcgcagatcggcgaccttctcttctttcgcgtcagacggcggcggcagcagtacgctttcgggctgctggagccggcagcggcgcgaggccggagcccgggcagccaggctgggtgggggaggggcggcggcagcggagccgggagcgtgcgcgcgcacctcacac

SEQ ID NO: 1546 - DNA, 484 bp, Homo sapiens
  source 1..484: mol_type = other DNA
aaatactgcatctgggaagtaatcttttcccccaaatacaagtacaataatgtctattgataaataacattgtccaacattggctactatctgatacatacagcatttgccacacactcgtattttcttaatacttatataattctacatctcaactcagattagtctgaattcagaacctgggctgtaaacgctatgttatgaataagccctgcatgttatataactggaccatccgaatggggccgaagcggctgcggctgccgacattggcgactccccgaggcccttcgtcccactaactgcacacaggtggtccccggggccagagagccgccggcgctctctccccgaagaccacgccttcgcctccagccagtttgcttggggaatcagaaaggtgcccagggcccagaaaccattaagttttttccgacttcaagtgggcgttacccgcctcactcctgggagttaagtgggtgtc

SEQ ID NO: 1547 - DNA, 785 bp, Homo sapiens
  source 1..785: mol_type = other DNA
gctgggtcaaccccacgaactggcggtggcaaggccctgggctctcgtggcagcgcagatcggcgaccttctcttctttcgcgtcagacggcggcggcagcagtacgctttcgggctgctggagccggcagcggcgcgaggccggagcccgggcagccaggctgggtgggggaggggcggcggcagcggagccgggagcgtgcgcgcgcacctcacactccgccgcccggggacgcccactcgcgagccggggccggtaggccggcccgggtcccatcgcccccgccctccggttcctctccggcgtgagcccaacgggtgtcggcccagcagctgctgcgctcaccaggcctggggaggcagggtacggggaccgggccgcagccccgagcggcgtgggcgcgctgcctctctggcagccgccgccagagccagcagctgcgagccaccggaggcggcgcggaggaggcccccgcggccgggcaggaaggagacgcggccgacctctgcccgcccgaggcgcggctgctcccgcgcgcccaggccctcccgccgctccagggctgagtgaggaatgagccggcgcctaccccgggctctcggagcgtgggccccggctcggcttcttaggcgcgagggctcggccactgcggccggcggcctagctcggggagcaggcgccggggttaggaggaggaggagctcggcgggggcggccgccgcgcctcccctcccccaggacacgccggggcttctcagtggccgccggaggaggaagttccgct

SEQ ID NO: 1548 - DNA, 508 bp, Homo sapiens
  source 1..508: mol_type = other DNA
attttcttaatacttatataattctacatctcaactcagattagtctgaattcagaacctgggctgtaaacgctatgttatgaataagccctgcatgttatataactggaccatccgaatggggccgaagcggctgcggctgccgacattggcgactccccgaggcccttcgtcccactaactgcacacaggtggtccccggggccagagagccgccggcgctctctccccgaagaccacgccttcgcctccagccagtttgcttggggaatcagaaaggtgcccagggcccagaaaccattaagttttttccgacttcaagtgggcgttacccgcctcactcctgggagttaagtgggtgtcgggcagccctcgccccgcccctgccgtcagggccgggcggaagggtcccgaggggactggctccgccacgccccgcccctggctcccccgggagggcggctcaggggcggggacgggggcgtggtcccgccgtataagaacggag

SEQ ID NO: 1549 - DNA, 386 bp, Homo sapiens
  source 1..386: mol_type = other DNA
aaatgagctttccctatcctaaagccttgaaaaggctaaatcgtttgccagtttccaaaacctgtcaggctgcatattattcgttttacttagaataacatccactgaaggcctggaccgtggcaacagacctgccacacatttcttcggtcaggggagggtgacggagggttccacacaccgaaggccagcccgtgcacacgcacggtcaggcagctctgctcagcacccgcaaccgcgccgagtagctgaggggcttccaagtactgctgtggggacgcccgtagttacctgcccgtctcggctgctgctgacatcacgacgaggctcccagccgattggaccccccttccgggtccgttccggaagcctcttccgccagaggt

SEQ ID NO: 1550 - DNA, 423 bp, Homo sapiens
  source 1..423: mol_type = other DNA
gctatgttagctttaattttgcacagctctagacatcagaactcatttctacccacttggtgaaagagcacttaagtctcagtgagcaaacaaggaggagtcagccttggtcacttccccctcaagcggccagatcggttccgtagaatgtccagtccacaggaacggcaacaccttgcctagggcgcccgcctttctcgtagagacggcgtccccgacaacgcctcgggctgaccagggccgagtcccgagcgcctcggaccgcgcccccggccctctcctggtggtcccatccgggcggcgggcggcacggatcaggctcctggtagaaggcggccgagcgacatctccggcgaccctcagcaggagcgcgccgagtacggacctctggcggaagaggcttccggaacggacccggaaggg

SEQ ID NO: 1551 - DNA, 325 bp, Homo sapiens
  source 1..325: mol_type = other DNA
gggggtatccctcattttggcaggcctaaaacagtagtagacagcagtgtagcagttatgcacactagatctgtgactcagataaatattaaatgaaataatcttgtatatagcatataaccagtgcccaagaaacaatggtttttattactatcattattttgggaaacttgtccaaccaggatattcaatcttggttactcaggatccccgacctgcgaggccagcctcgtccttgcagctttcctgctgaaaagtcctaaaatttgaccgggggactgggaaccccgcccccaagctgccgcgcgctctgaaactccgttgc

SEQ ID NO: 1552 - DNA, 507 bp, Homo sapiens
  source 1..507: mol_type = other DNA
cagtccggcctgcgcgttgtaggcactgggtatttcgaaagcgtttcaaaaatgcccgccagacttttggagaagctactagagaagtcctcaagaccagcctcggaggagcctggctctcgagcctgctaggatcggctggaacagctgctccggctgcggccttgcaagtatattgctgcggccttgcaagtatatttcgggccctcagcccctgctccacccggagtcctcagctagggcttggaaccttctgtggagggatttcctcctccagaaacttcgggccgggccacacagcagctgcgttccagaggcctggggatgtggtggcgcgcgcgggtgggcacctagacatcgacactccgcgtacacgtgtacacgtggcaggtctatcaagtggtcacatgaattaatctgccagtttatggtttgtttgctcaaaataaaactcagagattttaattctgacaactctttactgacgtttaagtaacgaataaaaag

SEQ ID NO: 1553 - DNA, 471 bp, Homo sapiens
  source 1..471: mol_type = other DNA
ccccattgctaccccaccaagcttggtaggggcaggctccagccgcaggcggaaaacgccggctccagcttctctgctgaagcccggtagcagtgaatgcgcgctgactttcagcgacgactcctggaagcaacgccaaatgctgactgaagtgggagatcctgcgcctctccatccgggctccccaagtcctctgggcagagctgcaggaggcggggaccagtaccctgcttccagctccccagttcgtgctccctggggacctccaagcctgagacacaggctccggggaggtcaggatgctagcttcggcctccgcagtccggcagagaattcggcgtttcagaggcctgacaagtcatcttttcttgccgcaaggtgggagagctgattctcccgggcctcgcgaccctaacctaaactttcaggtttggagacttctaagggcctggctgtcgtcacgactggcct

SEQ ID NO: 1554 - DNA, 444 bp, Homo sapiens
  source 1..444: mol_type = other DNA
tcagtgttccagtgagtcctctggtccacacccacatccaggtagccggtttctcacccaaggctgtgagaaaaataagagattccctgaccctctcgggaatctacccacaagcgcgccgggtgagggtgtgtgtgtgtgtgtgtgtgagagagagagagagacacacagagcaacctctccttgcaaggccaggaaacctggcgctggggttgggtaccctggtaagggtggcctggacccctgctcctgggtgctcggccgaccacgacgcagggcggcactaaggcgccgcgctcttctctccttggcaggcaggctccggggcacaggggggacaatttgttcagtgaagcttctcagatgcgttcgggaggcggggccgggacccgctgacggcagtttcccagccctgttccccctcccctgccccctcagcctgcg

SEQ ID NO: 1555 - DNA, 301 bp, Homo sapiens
  source 1..301: mol_type = other DNA
tattaactgtacacaacttgaagacaagatatgtctggcagatggcttggcttgaggcaacatggtgaaaccctgtctccctactcaggaggctgaggatcgcgccattgcactccagcctggcctctaagagaactgggagtttctaaacaaactttttaaaggttgccttcacatagctaatcagaaatgcagccttccttccaggaagcagtccgcccgatagcggctgcgctgcgcagcctggaggcccaagccgcgcccagcaagcagcgagactgggagaacagacgtcattcca

SEQ ID NO: 1556 - DNA, 406 bp, Homo sapiens
  source 1..406: mol_type = other DNA
atctcattttctcttctgaaaaagagacaatcttgaaaagattgaccttccgtgaagtagtgtgtctggcacgtcgtaagcgcatcacacacgtgagctgcagaactcttctggagaaattaattctatttttccatgtataattaaacccagaacagttctgtgggcagggagcggaccgtcctggcctgggtccccactgctgtcctgcccatgggctcccagaacaatctgtgatgagcagaggcaggtaggaaattacaacttcactttgaagtttaattttgtaataaacttcacttaattttgaagtaaatttgcaaagtcagcaaaattctttcaaaactgctaagctggatgttttcattaaaagattaactttgagacttcagcctcttctttagcc

SEQ ID NO: 1557 - DNA, 278 bp, Homo sapiens
  source 1..278: mol_type = other DNA
ggttgtagtaatttgtcagactcatagagcccactggcttgacagatcctggcttgacttgaggtatcctcaagcaagtaatgacttaaaagccattcagtttggctgccaactggagttggctggagcttagaaactaactgaaagcaactagtgatggagccaacatacattgtttctcaggtacccaaattagcaaaaataggaaaaaggtagatggtgacccttgagcctcctaataatattattacaaagtaaactttgtcttggagattcct

SEQ ID NO: 1558 - DNA, 477 bp, Homo sapiens
  source 1..477: mol_type = other DNA
acttacatggacatatataactgtcaaggttcattgacaatgaacacttaagtgtacactgaacgcttaagatctgggccttgtaatgcccagattacatctacttaaaaaaactacatctctatttttttaagtagagaaaagtgtttcaacaatttgctaagaatggttttgcagcgatgagtgcaaatatctatgattagagtcattgggtccagggaaaaattgcaaaaaacttagtgattggagctgtcaccattgaaaatttctaaactttgcaagacagcaatgacactctcaggtggatttactgtacaaggacaacatttacattgcacttggagacttctcccagtttggtagatcccagacagctggtatcaactgaccagtgttctgttaaggctaaagccaagactctttatcacactgtggttctcttcctgttcctgggaagaattagagataaataaagct

SEQ ID NO: 1559 - DNA, 391 bp, Homo sapiens
  source 1..391: mol_type = other DNA
aactgtcaagttccactgaactgaacaaggcattttaatgcatgtaaattatatttcaatttttttgagcataggcttcagaagcattcacagcagttcaagaatttgctgagaatcgttttgcagccaatcattaagtggttatcacccaggaacccagggctctccaggggcaaacacataaaactaagtgattggagctgtcaccattgcaaatttctaaattttgtaagacagcagcaacatttcaaatgcaagggcacaattcaaattgcacttgcagatttctcctggtccagacagctggtatcaactgactagtgtccagcattaggatgggacttctcttcctgttcctgggaagaatcactatttttctgagataaggatc

SEQ ID NO: 1560 - DNA, 310 bp, Homo sapiens
  source 1..310: mol_type = other DNA
taaactcataattctcattgcatcactaatttgaaattaatagaaagagatgtatcttttttttttttatactttaagttttagggtacatgtgcacaatgcgcaggttagttacatatgtatacatgtgccatgcacgatgatttccaatttcatccatgtccctacaaaggacatgaactcatcatttttttgtgccattcaaaaaaaatttcgtaaggaattaataaatgaatccttaggaggaaaagtgaaaatgaagtttttctctcatgcatcagctagtcagcgtaaattgtgctttttactc

SEQ ID NO: 1561 - DNA, 246 bp, Homo sapiens
  source 1..246: mol_type = other DNA
aaaatgactcctttatacataactctgacctcatctataaagtaaacctttttaggagattgagcttcaatcccacttggaaattgtgtagagctgtacatattgaaaagctactattaaaagagtttccctttggtttagaaagatgtttcttataatgcatagcacattaaaataatagcttaggtagctgggcagtcccacacatgctcaggagcagggcagctatgtacagctttataaagt

SEQ ID NO: 1562 - DNA, 428 bp, Homo sapiens
  source 1..428: mol_type = other DNA
tggtcccttccagacttaaagtttccagacataaaggtcctttacagacttaaatctgtagtttaaagttgagtcatctctatactggaaaagaaaatcttgttactcttttcaaatagcctatttttcagtagaactgtattttggcaaatgtccaggtccactgctgaccagtgttgtgaacctcggaagcatcttatttgatgtttgatgtatgatcatccatgttctgcgggagaagctcaaataagaagattacaggatgttgtcagttttaataacgtgatgtgaagaaaagattctgtttgcacacagggagaggttcttttcctggcactgtagataagacttttatggattgtttttctcaaataatattatcgctttgtgactaaagtaaagattattaattcctgaggcaagaagat

SEQ ID NO: 1563 - DNA, 362 bp, Homo sapiens
  source 1..362: mol_type = other DNA
gtttttaagatttatccctattgacataaatagctatagtcttttcaattactgtgttgcatttcattttataaatataccatacattattcacagtgttacaacggaatggggcagcaccactccgtgatggcgacctcactggatgaggaccgcctctcccgccgctgcagccctgatcgagttaaggcgcggcggcccccggggccgctggagaaggatgcggacggggccatgactcgtagtagatccctccgcgcggagctcgggccggcgcttcttcctgcgggaaacccctgggtgcccaaggcggcggggccgaggccgcggcgacagtggggcgggacacgaggctgcttcgt

SEQ ID NO: 1564 - DNA, 127 bp, Homo sapiens
  source 1..127: mol_type = other DNA
actcataatgacaacgagtagttattttaacttggccctttgaaacagagaccctgccgcaattgtgcaccactggagagaatctgattgatcaaacttacctaagggccaatcattggtccaatca

SEQ ID NO: 1565 - DNA, 292 bp, Homo sapiens
  source 1..292: mol_type = other DNA
cccactttaacacctagatatatcagagatcctagtttttatttgagtgtcgctctgttgcccaagctggagtacagtgacgcaacctcggttggtctcaatgtcctgtacttgttaatagacaaaaatctttgtctagaaatatataaatatagaacattttatagaatatatgacatagaaaacagaaaaaaataaatatgaaaatagcctaattttcagggttttcctttttttacatacccttcatggttaacggttagtggttaatggggattacccattaactccc

SEQ ID NO: 1566 - DNA, 526 bp, Homo sapiens
  source 1..526: mol_type = other DNA
gttttaaaaagcaagtcctttaggaagaaacgtgccagttgattctgacaatttctcatgaacagacaaggggctgtgtaacaagtaaagatttgttcgttttattatttttttaattttaagactcataattcctttagaaagtggagtcgagctgggagccccagggagtcttcactacctacactgccgctcagctcccggcgcgagtggaggtcggtgtggggagacgcgactcctgcccgggatggctgacactctgcgagccccggcggcccgcggccgggccgggtgactaggcggagggcgcggagggtccgcggcgggcgggtggcgctgcagcagcctgggcacggctgccgccgcccgcgggcgagagtgtgcacgggtcgcgcttgagccggagcggggctcgcccctcgtcggctcccgccgcccagccggtgatcgctctccggccgtccccggcaccctcggccccccacggcggttggtccgggcgggggaaggagagtcatcaccacgg

SEQ ID NO: 1567 - DNA, 390 bp, Homo sapiens
  source 1..390: mol_type = other DNA
ttccgggcggcaccgctaaggcgatgccgcgagcagcatccgcgccctctccttcccgccccagcccgggtttgttcagtcagggctccagcccggcggccgggaggaagctgacgcgacgggtcccaggcccccggctcctgccccagtccctggaggagcctccgccaactccgcaggactctatcgaccgatggggcccatagccaatagtggaggtgtgactagcactgccgagcccgggtagaccctcttccaataagaagcgggaagggcgtgccttgccactttcacgggttggccaagctcagccagcaccgttactggggcggtgctaagctctcgtgaggggaggccccggagccttccaatgagggactggcgctcaat

SEQ ID NO: 1568 - DNA, 551 bp, Homo sapiens
  source 1..551: mol_type = other DNA
atatatatatatatatatatacatatacagacacacacaaaccattgaaacaatttctcaaaagacttgaatagatacttcagattggaagtcttatacttgtaggaatgaaaaatggtatggctcctttgaaaatctaacagtttcttaaaggttaaacatattcccttcctaggaatttacacactgtgtctgcacaatgattttccagactgctatttctcgtggctcagtaacaaattatcaccagaccaactcaaaattggaaagttttccagctatatgtgtatgtggaagtgtgcattcatctaaatacataagtgattaacttcttttaatctataactaagtctgagtcctgaagaccttcctctggaacctcagttaaattcagttaatctaaatgggtctaggggtttggagagtcccttcagatctccaataaacttgtttgtggaggcctgggcccccagtaaaacttatttaatactaaatggctcctgttaagaatgccttcgttatttaaggcccaggaaaaacctaggcaaaac

SEQ ID NO: 1569 - DNA, 515 bp, Homo sapiens
  source 1..515: mol_type = other DNA
aacgtgccagttgattctgacaatttctcatgaacagaaacaagtaaagatttgttcgttttattatttttttaatttttaaagattaagactcataattcctttagaaagtggagtcgagctgggagccccagggagtcttcactacctacactgccgctcagctcccggcgcgagtggaggtcggggtggggagacgcgactcctgcccgggatggctgacactctgcgagccccggcggcccgcggccgggccgggtgactaggcggagggcgcggagggtccgcggcgggcgggtggcgctgcagcagcctgggcacggctgccgccgcccgcgggcgagagtgtgcacggggagccggagcggggctcgcccctcgtcggcttccgccgcccagcccgtgatcgctctccggccgtccccggcaccctcggccccccacggcggttggtcccggcgggggaaggagaggtgtcaatccagcagcggcgagcagcagctgggcggtcacat

SEQ ID NO: 1570 - DNA, 348 bp, Homo sapiens
  source 1..348: mol_type = other DNA
atgaagacagatgtcatgttctggtggctcacatttgagcgagctccaatatgaatggcgcgacccgccttggtctccccaggtgctgggattacaggcgtgagccggcccggcctgtaatggagtgcagtactccacctgacaataattgcctgtacagaaatgtattcatatttgccgagtcaagtaaaagttataacatttaggacacaatgcccgacttactataattaccattattatcttaggatcattacaataagccccgcccctggggcctccgcggcgggagcctagcgtccgccccacccaccccgagcccgaggcggggctgtggatgtagcttga

SEQ ID NO: 1571 - DNA, 428 bp, Homo sapiens
  source 1..428: mol_type = other DNA
gctgatagggatcagctgctgatcatggctagggctagcggctgagcacacgggcaccagcctactgctcgggcagcaaggcagcaggatggaggggtttgtaaaaatgccttccacctaccctgctgggcttgcccgagaggctctgtagggctttgggatgggtgccctgagtgcttggcccctgattgaggatactcctgtatgagcctcggccctgaccccaggatgggggaaggaaagcggaggcacctcctccctggctgttgttctctgggagtggctggcgagcagcggcctccccgcagggccaggcaggtgggcccagggcccagccagctggcaggaagcaggacagagggaattcagaccacatgtcgttaaatacattagcttttaaatcaatctttgttcaaagtccagtgagt

SEQ ID NO: 1572 - DNA, 272 bp, Homo sapiens
  source 1..272: mol_type = other DNA
gcaccactgcatttcagcctgggctgtaacagagtgagactccatctcgcaatttttaaaaatttctaaaaaccatacaataacaactatttgtgcagtggcatgatcacggctcctacaggcatgcaccaccatgcctggcttttttcaggtgttctgatcctaaatccaatgtctttgttgggggccaagccaaggcccaggggtgaggtcacccagtcctcggcctgctgatagggatcagctgctgatcatggctagggctagcggct

SEQ ID NO: 1573 - DNA, 348 bp, Homo sapiens
  source 1..348: mol_type = other DNA
gaggttacagtgagctgagatcacgccactgtacatctctaaataaataaataaataaataaataaataaataaataaataataaataaataaaaagttatccagggaccccaggaggtcaaggttgcagtgagccatgattgccccactgcactccagccttggtgactgggtgggaagataaggtcagtcattcatcctccccccaggagactttccttattatgaattagcaaatacaaaatctttgttccccagggtaaagaaaagaattttaagaagtggtttttcatgacttctaacaacccattctgtggttttcaaagagcgaatataataacagctatg

SEQ ID NO: 1574 - DNA, 365 bp, Homo sapiens
  source 1..365: mol_type = other DNA
aaatagacatatttcagaaacacgctataatgtgtcagacacaccaggatgtttcagatctggctttgaaacttaactatctgtgtaatattgggcaagtttcttaatctcttaatgacctataaaatggtgacaaaatattcggtcacctatgtaaattacttagcacagtgcctggcagtcaataaatgatagctatgattagttttatgctttcttagtccttataaaacactaagccattattattttctaaaatttattatttgtacgaagcatatgcttaaaatcacagctcctaagttggggagcaggactctaacccaagttaccattcacgaacagctgttaacacaagaacgact

SEQ ID NO: 1575 - DNA, 305 bp, Homo sapiens
  source 1..305: mol_type = other DNA
gatttaaaactgatttaattgaaacaactgatgagtactgaaaaagtaaactcagtgtgatttaacactgagtttaaatttaagaaataaatgtggctgggcgccatggctcacgcctacatgcctgtaatcccagcttctcgggaggctgaggccactgcaccccaggatttcgtttagccttattggtatattcgtatcaggcagaatttagcttatcaaaactctggaaaggtaatcaaagatctgtcttgaagatgacagcctgtgttccctccagagagtggacactcttcctcctgagg

SEQ ID NO: 1576 - DNA, 396 bp, Homo sapiens
  source 1..396: mol_type = other DNA
cttcactgcttggaagaattaaggaaatgataatttcgaaaaagacaaagttgacacaatcagaaacggacgtagttaattttatgattacttccttattacaaattgctaccaaacattgtttacttatttcttccggacctttgccatcctcggaaagggcttccaaggcgcttggcaatccgggtacggctcccgctggccttctaggccgaggtggagcccaccgccctttctaggacgcggatgccactctaccccagagtttcggcggctggacgctctttctttcttctcgctggaagactggaggaccagcggccggcgggcggcggggcgccgccgcgtttctgggcctggccaactcacgtgaccgacgcgggctctgaagcggtg

SEQ ID NO: 1577 - DNA, 381 bp, Homo sapiens
  source 1..381: mol_type = other DNA
aagtcatgctgtcttcactgtcacaaggaaaaaccgaagagtgacaatcctcagcaatccgctatttcgcttcactgagggccgaggccgtgatgcccagggtttagggccggcggcttttcggcagaccgatgtcgggccccagttccgggaaatcggggtgggcggctacagcggcgcccgagtccgccccggccgccgaagcctccgccatttttgccctccgccgcggccgtccgagagggcagccggcccgtccctcgccaggccgctacctcccgagctgcagtcgtcgccgccgccgccgcctcggtgcggcccaccgcttcagagcccgcgtcggtcacgtgagttggccaggcccagaaacgcggcggcgcc

SEQ ID NO: 1578 - DNA, 399 bp, Homo sapiens
  source 1..399: mol_type = other DNA
aaaatataaaaattcaattattgtaaaaaaaaaggaaaaatgtatgcataggaaaagactatgcatcaaatttatctctcttcactgcttggaagaattaaggaaatgataatttcgaaaaagacaaagttgacacaatcagaaacggacgtagttaattttatgattacttccttattacaaattgctaccaaacattgtttacttatttcttccggacctttgccatcctcggaaagggcttccaaggcgcttggcaatccgggtacggctcccgctggccttctaggccgaggtggagcccaccgccctttctaggacgcggatgccactctaccccagagtttcggcggctggacgctctttctttcttctcgctggaagactggaggaccagcg

SEQ ID NO: 1579 - DNA, 431 bp, Homo sapiens
  source 1..431: mol_type = other DNA
aaaaaccgaagagtgacaatcctcagcaatccgctatttcgcttcactgagggccgaggccgtgatgcccagggtttagggccggcggcttttcggcagaccgatgtcgggccccagttccgggaaatcggggtgggcggctacagcggcgcccgagtccgccccggccgccgaagcctccgccatttttgccctccgccgcggccgtccgagagggcagccggcccgtccctcgccaggccgctacctcccgagctgcagtcgtcgccgccgccgccgcctcggtgcggcccaccgcttcagagcccgcgtcggtcacgtgagttggccaggcccagaaacgcggcggcgccccgccgcccgccggccgctggtcctccagtcttccagcgagaagaaagaaagagcgtccagccgccgaaactctgggg

SEQ ID NO: 1580 - DNA, 279 bp, Homo sapiens
  source 1..279: mol_type = other DNA
acaagttgagactatgataccactgctatcggtcaggagttcaagaccagcctgtgtagtcccagctacctgggaggctgaggattgtgccactgcactccagcctgggtgacagagtgagactctgaaaatctgaatctatctcctatctcccagctgggatagtgaaaccctgtctgtattctcaatataaataatttgtctaaaacttttaaacaaaagtttaagattcttttcttataaaaaagaatccatcttgaggcctcggggcagcccagt

SEQ ID NO: 1581 - DNA, 320 bp, Homo sapiens
  source 1..320: mol_type = other DNA
cccaatcccatacgtaagcgatgatgggatccaaggatctcgtctctccagatccactcacaccaggagttaagcggtcctggcgggcttcccctggagggggcggccccagcccgagcgctaggccgggcggagctccggcccgggcggagccgcggccgccgcgtccggctgctggaccgaacttctgccgtgcggacagcaggagcagcgcgatggagatgagggtttgcgctccaacttcccgttgccctagggaccccgcgatcttgggggccgcgtcctgccaaccggccgcagacgtgtagctgctgggtcgg

SEQ ID NO: 1582 - DNA, 370 bp, Homo sapiens
  source 1..370: mol_type = other DNA
agctctgagcctgctgaccccaaggggtgccgttgcctgcagacatggccagaccagcctgggcttcaggcctctactgacctagacctctttagcccctacagccctggattcagtcggggcctgcgtgcatgtgtatttgtgaggttctgccaggcgcacacctatgccggcggcctccaagacgtggaggctcgccccgccccggcccctgcaggccccgcccttggtcatgaagtttcgcgtcctgagtccctcgcgaggcaccgttgggtcgcgcagtagcagggccgcggagcctgggctgcggctgtcatggacgcctgggtccgcttcagtgctcagagccaagcccgggagcgctacgggg

SEQ ID NO: 1583 - DNA, 323 bp, Homo sapiens
  source 1..323: mol_type = other DNA
ggaccttggctgctgccgagaaggtgggcagctctgagccctccacctcctgctgaccccaaggggtgccgttgcctgcagacatggccagaccagcctgggcttcaggcctctactgacctagacctctttagcccctacagccctggattcagtcggggcctgcgtgcatgtgtatttgtgaggttctgccaggcgcacacctatgccggcggcctccaagacgtggaggctcgccccgccccggcccctgcaggccccgcccttggtcatgaagtttcgcgtcctgagtccctcgcgaggcaccgttgggtcgcgcagta

SEQ ID NO: 1584 - DNA, 150 bp, Homo sapiens
  source 1..150: mol_type = other DNA
atgccgcaataaacatgtgtgcatgtgtctttatagcagcatgatttatagtcctttgggtatatacccagttctagatccctgaggaattgtaaattggctcacgcctgtaatctcctgagtcctaggtcactcacctgggggaaggcc

SEQ ID NO: 1585 - DNA, 319 bp, Homo sapiens
  source 1..319: mol_type = other DNA
agactgcaccactgcactcttagcctgggtgatagagcgagatacacaacatttttagtaggtatgtaaccaactgatttttaaaatgatcacagtactgtggagaatgaattagtaaggagtgcctaggtagctgggattgtgcctccctagtaggcagggagttttatatttaaaaaaaaaattgatatctgtcatttggtgctgcaggttccagaagcagctctttaattttttaaaaatttgaaagaaaagggtttcttcaattaccatttccgtcagcagctgccgcggttaagaggaagccacggccccctag

SEQ ID NO: 1586 - DNA, 332 bp, Homo sapiens
  source 1..332: mol_type = other DNA
gggtactctaatgggaggcaaagagacttgccctctcttattcccttcctctacttagaataagtgaaatattgggaatcagaacacctatgcttaatccctaaaataacaaaatctagttagtgattgtgattgtaaataagacatgcactacagtacattgcatagtttatgttcatattgcatatgatgttggacaaggaaatgacgcgccgaagctctgcgtctgcctttcagaggtgcctatggcggagcaggagccctccagctcccgccccatcactggtgattggcatgggacctagccgtccccgcccccacgactgaaggtt

SEQ ID NO: 1587 - DNA, 433 bp, Homo sapiens
  source 1..433: mol_type = other DNA
ggctgggggttgctgcaggaacgggttccctactgcttctgaacaaatgcaagagagtttgggatgctgtgcctgtaggtacacaagtaatcccatatgcatgtgaaatgaccagggcatgaatacatgtgtgtatatacccagtaaatagagtacttattctttcttgctaataagagtactgtgcttatggacacatgtttaaccatgtgtgggtgcactgtgcacccatgagcacatgcaaggtggtgtgtgtgtgagctggttctcccacctatccccaggcccacctagactctggaagccccccagcaggcggatctgctcagtctgcatggggagagcctggcgccccggcataaggaggggcaggcccgacctccgggttgcgagatgtggtccaggagcaacgtccccgagcccctccgctcca

SEQ ID NO: 1588 - DNA, 222 bp, Homo sapiens
  source 1..222: mol_type = other DNA
gtggatggaagctatggtaaccataatacggggtggaggcttcctcatacttatctaagaggtctacataagggattgcctctctttgcacagtatggacaccggctgtggatcagtgccatgtgccgtgtatggcaggtcaggtctggcgcacagctgaatctcagggagtcccctaaggaacacttatgggggagcagtttggtgcctgacgcccccacc

SEQ ID NO: 1589 - DNA, 222 bp, Homo sapiens
  source 1..222: mol_type = other DNA
tatttcttggacacgtgtcaactatgtgccatgtgctcctcacaactttataagataggaactatcatcttcttgttacagatgaggacagacttaataaggttaagcaagaaagcttcacagctatgtttctgtcctatggcaaagactgggagcttgccactcccagtctaaaaacatttttagaaaagaagtatcggctccctcaacacgggcttcgca

SEQ ID NO: 1590 - DNA, 295 bp, Homo sapiens
  source 1..295: mol_type = other DNA
acctgtagctccagctacttgggtgagccatctcaaataaaataaaataaaaagatcaatttgattgtaatgtgtcttttcgacgattaataaatgtttcgccgaatgcattgcattggattgactagagtgaactgtgattgcaccattgcactcaagccttttgtcctcagtcaaaatttgttgaatgacattaacttttcatgtcccagagataaaagattgaatgtcttgtacccccaggccccctccaccatggccagccggggtgggggccggggtcgtggccggggcc

SEQ ID NO: 1591 - DNA, 292 bp, Homo sapiens
  source 1..292: mol_type = other DNA
tgcagtgggctgagatcacgccactgcactccagcccaggcattctgtctgaaaaaaaaaaatcgtaatttttgagaccatcctggcctccagcctgagggacagagcgagactctggaccccctgggctcttattgagagggctggactctcaggaacagtcctgttctgggtctctgaagggataaaactttgacccttccacccctcagatgtggagtcagattccaacacattctcagattctacctgaaaaagctattaaatagttcgtattcactggagaccccag

SEQ ID NO: 1592 - DNA, 277 bp, Homo sapiens
  source 1..277: mol_type = other DNA
cccttttccttttcctccagaagcaggtaggaagtcccctcctatttccgttccacagaacagagaggtgggtgacgaacagcacaggcacgcagcccccagccctagccccaagggattgcttggagggtcagtgggatcctccttccactggacccgggagaagagcacaccgtgtccacgcgccacagcgatctcactgatggtcgggctcctggtgtgcacgagggcagcacgagcctccgggccagcgctcgcgtggctcttctggcccggg

SEQ ID NO: 1593 - DNA, 254 bp, Homo sapiens
  source 1..254: mol_type = other DNA
ctccagcctgagggacagagcgagactctggaccccctgggctcttattgagagggctggactctcaggaacagtcctgttctgggtctctgaagggataaaactttgacccttccacccctcagatgtggagtcagattccaacacattctcagattctacctgaaaaagctattaaatagttcgtattcactggagaccccagcggcgtctaccccgggagtttccttcatcagcctgagggccgaggctgc

SEQ ID NO: 1594 - DNA, 277 bp, Homo sapiens; identical to SEQ ID NO: 1592
  source 1..277: mol_type = other DNA

SEQ ID NO: 1595 - DNA, 316 bp, Homo sapiens
  source 1..316: mol_type = other DNA
aatcccagcactctgagaggctgagagaaggaaggaaaagtatatttttgaatctttttctatttctgtgagctggatagcaaagataggagaggggctatgaactacctctgctatggattcagctacctcctagatactatctgtagaacctaaatgtaatattcagcattggtaaatgaaaggtatccaattgcccactgtaatttttaaaggccaggagctcaacattattgaaaatgctggagggctgattggatatccaacttcgttcctggaattttggacttagctatttttaaaaccgtcaactcag

SEQ ID NO: 1596 - DNA, 425 bp, Homo sapiens
  source 1..425: mol_type = other DNA
ctcccaactggttcttaggagagccaaactgaggctaagttctgagaactaagtaagaactgacagcatgttacaagaagaaaaacctttttactcactggatttcataatcttgacttttttcaaacataaatctgtgtcatttttcttatttaaaacagctgagcagtttacataccagtctagggaggccttcaatcttattactgtcctaaattattttatttattaattttttagccacctttctcttatagaaataaggttcctgaggacagggagtttattctgtatacttaaatatgttctgaatattagatagctagttcccaaatgcactgcactgaaagtgtatgaaaattggaaattggcttctagatttttgtattatattgccaaatgatggagtgatgagattgaaatct

SEQ ID NO: 1597 - DNA, 352 bp, Homo sapiens
  source 1..352: mol_type = other DNA
tttagtttttaagatttatccctattgacataaatagctatagtcttttcaattactgtgttgcatttcattttataaatataccatacattattcacagtgttacaacggaatggggcagcaccactccgtgatggcgacctcactggatgaggaccgcctctccctgagccgctgcagccctgatcgagttaaggcgcggcggcccccggggccgctggagaaggatgcggacggggccatgactcgtagtagatccctccgcgcggagctcgggccggcgcttcttcctgcgggaaacccctgggtgcccaaggcggcggggccgaggccgcggcgacagtggggcggg

SEQ ID NO: 1598 - DNA, 143 bp, Homo sapiens
  source 1..143: mol_type = other DNA
actcataatgacaacggcaagagtagttatttcaacttggccctttgaaacagagaccctgccaattgtgcaccactagagaatctgattgatcaaactttcaagggccaatcactggtccacttctcaaagcagggggctct

SEQ ID NO: 1599 - DNA, 243 bp, Homo sapiens
  source 1..243: mol_type = other DNA
aaagtaaatttcttccagaagtcttgcctcgttcacaagacaggataataataacactgtatgaaaaaagcatacgtggaccccttaaagttgtaagcctttaaaaaggccaaaaatttctttcggctcttaagacgcgagtctgccgacgctcgtttgaacagatcacctgaaaggtaggtgttagtgtttgtcactttaaggcaaaaagaaaggaggtggagtgctacagcccctccccgt

SEQ ID NO: 1600 - DNA, 340 bp, Homo sapiens
  source 1..340: mol_type = other DNA
atgactttatatttgaaaagttacattttagaagtggatattttgtatttttggttactaatataactgtgtgaaagcactattaaaaatacttttatttcgttaaaattacctgtttgagtaggaaataaaagtaaatttcttccagaagtcttgcctcgttcacaagacaggataataataacactgtatgaaaaaagcatacgtggaccccttaaagttgtaagcctttaaaaaggccaaaaatttctttcggctcttaagacgcgagtctgccgacgctcgtttgaacagatcacctgaaaggtaggtgttagtgtttgtcactttaaggcaaaaa

SEQ ID NO: 1601 - DNA, 406 bp, Homo sapiens
  source 1..406: mol_type = other DNA
cattttactaatttgtcaaggagctccccactgaacagatttttcttggggcggggcaatggcgcgatcatgaccactgcttccttctgcctgcagttggaagtcagtttcatgaggcggggtagaaagccgtgccgctcctcccggcaccgagcaccggagcccagggaggcggcctccgagtgtcatttggggacgtccgggcgcagtctccccaggcgggacaggccctgcctggcgccccctcctggcgctggaggctgcgtgcgactgcccaccatcgaggcggcggcggcggcggctagagaggccggcgggtcccgggcgccgaggctgcaggccgcagggaacgcgcactgggcggactccgcgccgccggcctatcgctggtcgccagctattggtg

SEQ ID NO: 1602 - DNA, 593 bp, Homo sapiens
  source 1..593: mol_type = other DNA
tttctcccttttattttagaggaagatgtaaatgagaatactattctaatgacattagccagagaataatatcgttcctgtagtactgccaccattacaagtcccaatacatttacaatgtggggacaattataacacctaattattggttattgtgaaggttaaataagaaaatatacttatcatcaataaatgcagctattttgttattatcatatttatattagtggtatactacatcataaatgagtcacggtgacccctaactccacaatgacgtctttggtgctaaatcaatttatcactttctagaacccccaggcgatgttgattaaataataaatgaatgatgaacatcaggcaatcagacgtcctgtgcgtgatcagacgcctagcgcttcagaagcacgactggtaaactgggcagcccttccacgctccgcactgcaagaactgcctgtccggaagggtgactgcaccagctccgctccggatatcttggcaggacgcgccctctggcggcgcctcgctcgtaggtgggccccagcgcgcagtcgcgcgcccccgcgcgttgggaagttgggagggaggtg

SEQ ID NO: 1603 - DNA, 323 bp, Homo sapiens
  source 1..323: mol_type = other DNA
cttcactttaaaaatatcttgggtacaagttgaacctacagttaagtttacattttaactagtagctcaagtccatgctcagatccttaggaaacaaatttttctctattgtaaagaagaaaaatcaatgtgtgcacacgtgtgtggccacacctctcttctgccattttactaggacacaggaggccagtgcagcagcaactagctgagctgcttagagagagagagagagagtgtgtgtgtgtgtgtgtctgcgtgcgcagctaggccaagcctgcttgagacaagcttccatgtgtgaaagctacttggcatgaatgcct

SEQ ID NO: 1604 - DNA, 402 bp, Homo sapiens
  source 1..402: mol_type = other DNA
ggcgcaggcaaggcctggctttttccacaagaagtattctggatggtctacatgattacaatgacttaagcttgagaatttttttaaaaacgctgcagcaaccaggcttccaggactggaaggaagtcttctacacactgccggaccaggcacgtccgtgggccatccacgcctggaaaacggctggctgggccggaggggcgaggcccgcaggcgactcgttttcccgtgctcctgtgcgcgggtccacttgggaccttgctggtggagccgctgccgccagggaactcagggccggctcctgttccttcgctggaggccaaacttgaaatacaagtttaatgttcctcgtcctcccccggcccggtgtgcagcaggagcgaccaaccccgacccgggtta

SEQ ID NO: 1605 - DNA, 258 bp, Homo sapiens
  source 1..258: mol_type = other DNA
tcatgttacttaatttctgtgaacctcaatttcctcaaatgtaaaatgcagaaaaggtctaccttatagaattatgattaagataaaaataggcaatatatatatatatatgaagtctctagcccctcgcctctctttagaggaccaaaaaaggcttgttatgtgagtgaacaccctcttttttctgatctccaggaaagccatggcctgggaagtctgaggcgacgcaaggagggggctctgcctccttgggggcca

SEQ ID NO: 1606 - DNA, 283 bp, Homo sapiens
  source 1..283: mol_type = other DNA
tgggatacctgtataagtcgtgtggcgcgatctcggctcacttgagtagctgggaggcgcaggcaaggcctggctttttccacaagaagtattctggatggtctacatgattacaatgacttaagcttgagaatttttttaaaaacgctgcagcaaccaggcttccaggactggaaggaagtcttctacacactgccggaccaggcacgtccgtgggccatccacgcctggaaaacggctggctgggccggaggggcgaggcccgcaggcgactcgttttccc

SEQ ID NO: 1607 - DNA, 251 bp, Homo sapiens
  source 1..251: mol_type = other DNA
tatgacggtcaaagtttgaatttgacaaaccgaggtttaaagaacattcgttattcactaagtaagaattctcaagagttgcttcagaggcctcaggagtgaggctcactcctattcaccgggggatgggagcactgtgagtagtctccctcctgttcaccaggactgtgagtgaggctctcatacctggctttttcaccctgccaatgggaggcaggcaagaatattgggtaggaaacaacagtgcctgt

SEQ ID NO: 1608 - DNA, 512 bp, Homo sapiens
  source 1..512: mol_type = other DNA
agaggtcaagaaaccatgccttttctctagattttagtaatttaagctccagggacttgcgaatatctatgatcaatgaagtcccgtgattccttgatatctgtatgacactgagacagtcctctaaggagtgatgaatttcactgaggaaattcctgttcaaaaggcaatttctacagcacctgtctcagaagcatttggcttcctcgaggcgttcaggagacccacaggaaacagatattttgttgtttttctttttgctctaggaaaaaaactcattaagagagacagcagatgtctgttaggtgcacgtacatatccaaatgaaactgtgtcctaagaaacagaaatctctattccagaaagtcatgcacaggaattaatttataggtacaaagaggaagctaatgacttgtagttactttgctattgttttccgaaaacaatctgacttccttttattccttctttagctgagctggccagctcaggagcataatctttataaacaa

SEQ ID NO: 1609 - DNA, 357 bp, Homo sapiens
  source 1..357: mol_type = other DNA
atgaagacagatgtcatgttctggtggctcacatttgagcgagctccaatatgaatggcgcgaccgccttggtctccccaggtgctgggattacaggtgtgagccggcccggcctgtaaaaatggagtgcagtactccacctgacaataattgcctgtacagaaatgtattcatatttgccgagtcaagtaaaagttataacatttaggacacaatgcccgacttactataattaccattattatcttaggatcattacaaagccccgcccctggggcttccgcggcggaagcctagcgtccgccccacccaccccgagcccgaggcggggctgtggatgtagggcgcagcttgacg

SEQ ID NO: 1610 - DNA, 555 bp, Homo sapiens
  source 1..555: mol_type = other DNA
tccaaatagggaatatatatatatatatatacacacacacacatatatatattgcagtctgataagatttctcaaaagacttgaatagatacttcagaaaagaaatggtcaattatgtttattggaagtcttatacttgtaggaatgaaaaatggtattgctcctttgaaaatctaacagtttcttaaaggttaaacatacctaggaatttacacactgtgtctgcacaatgatcgatttccagactcgtggctcagaaattatcaccagaccaactcaaaattggaaagttttccagctatatgtgtatgtggaagtgtgcattcatctaaatacataagtgattaacttcttttaatctataactaagtctgagtcctaaagaccttcctctggaacctcagttaaattcacttaatctaaatgggtctaggggtttggagagtcccttcagatctccaataaatgtggaggcctggggagttgtaaaactcgtttaatactaaatggctcgtaagaatcgttattaaggcccaggaaaaacctaggcaaaac

SEQ ID NO: 1611 - DNA, 626 bp, Homo sapiens
  source 1..626: mol_type = other DNA
cagggtcacattacattttgaaaaagccactctgcccccccactccccaggtgaaggtagcctagactagggtggtagttttcttatagaagatgtatttagttgcaatgcaattgttaattgaaattgactttaaataatggcacgacttaaaattatgcaaacatttgccttagataaaatttcaagttttcaaagtttttatttcctaatcttgttaaaaaaaaagtttttctttttctcaaaggcttatttcagatctgcgaaatctgttataaatttaaattagaaaataaatacaagtgccattgacacgttggttaggccacctctcgcgggagctgggggctgccttccgactcctgtgcgtctgcgccgcgggccgagcccggaagtcagactatggggcggtgcggcagcagtcctaaacgcggggtagctccgggcttccgagggggtgtgtctcccgcctctttaacctggcaggggcggttcaagtggccggggaaaggcggaggggagagagggattttcccgtccccgctgcgcgcccgcggcccgaacccgctgtgcggtagaggcagccgggtccctttaaggcccagctgcgcctgtgccttgggctc

SEQ ID NO: 1612 - DNA, 143 bp, Homo sapiens
  source 1..143: mol_type = other DNA
actcataatgacaacataatgacaggaaatggtgaagtcaagagtagttatttcaacttggccctttgaaacagagaccctgccaattgtgcaccactagagaatctgattgatcaaactttcaagggccaatcactggtcca

SEQ ID NO: 1613 - DNA, 435 bp, Homo sapiens
  source 1..435: mol_type = other DNA
cagaagttgcctctcagaggtggagactacagctgtcgtaagcgcctggccattctgacagggtcacattacattttgaaaaagccactctgcccccccactccccaggtgaaggtagcctagactagggtggtagttttcttatagaagatgtatttagttgcaatgcaattgttaattgaaattgactttaaataatggcacgacttaaaattatgcaaacatttgccttagataaaatttcaagttttcaaagtttttatttcctaatcttgttaaaaaaaaagtttttctttttctcaaaggcttatttcagatctgcgaaatctgttataaatttaaattagaaaataaatacaagtgccattgacacgttggttaggccacctctcgcgggagctgggggctgccttccgactcctgtgcgtctgcgcc

SEQ ID NO: 1614 - DNA, 357 bp, Homo sapiens
  source 1..357: mol_type = other DNA
atctatctatctatctatctatctatctatctatctatctatctatagagagagagagagagggagagagagatgaattcagctttgtctgcattcagtcagtcaacaataatagctgttgcctatgaaatgctatatgcaatagtgttgcagaaacattttgctttgctggatacaaaagcaaactagtctctgttttcaaggacataatataagaactggattttcagaatgaatatttatgggataatttatttaactgaccaactttaaaaaaaggttaaaacactttcttggtttatggtgctataaactgcaatcagtctcaagggagaaagtttttacaattgaaaaact

SEQ ID NO: 1615 - DNA, 280 bp, Homo sapiens
  source 1..280: mol_type = other DNA
taacattgccacatgtgggcactataaagcctttttcagataaaaaaaaaggtcagtgatagtgctaataataacagtgattatgtcatttaataaaacggtcttatttgaaagcactctaattatagtatgtctgcctacatggtacagggcctgaggcaatgccatctccaaagaggccttttccatgatcttaaaacagtcacaagggagtgatgaagggtcctgtctgttcccccaggagccccgcctccgctcgcggttgacagctcagctggtg

SEQ ID NO: 1616 - DNA, 175 bp, Homo sapiens
  source 1..175: mol_type = other DNA
accttcaatgtaatgtggtataaataatacttcctgctaatgttgcagctgtcactcaaggatcttaaattactttaggagcccttcttccatggagggaggatcccttgctttgtaatggtagtgagctctattatcaaaggaaattgagactcctctccatatctccctgagg

SEQ ID NO: 1617 - DNA, 445 bp, Homo sapiens
  source 1..445: mol_type = other DNA
tagatgttgctggccttagcttacaaggtcaagttagtaaaaatttagcatgattaggaattgtgtgcaatctaagttttggacccaagggtggaggacctataacaatgctgagtaagacatggttttcaccgaagtcagtagacactccagctcttacggaaagaagcactgtcttttgcgctagtgacctgagggaatcttcaagatcttggttaaccagattcatctaaagaagggcttctggacattcctgttcagagtcgaggtaaggtgcctcgcagcctcaggcccttagaacccaggcggggcggggaagcgggggcggcgcgcagcggtacctagcggcgctgccccgctggcagccggaggacgtggcactgtctgcagggaggggattcgtctttctcctccccgcgaggaggagcctcgacatcctgcagag

SEQ ID NO: 1618 - DNA, 407 bp, Homo sapiens
  source 1..407: mol_type = other DNA
ttgccatggcacacaaatatttatcagagaacaaggataataataagttctgtgtttttctctttttcaaacaagtaattgttgatgtgaaatttacataacacaaaattcacagcattcagtatactcaaaatggtgtgccactatgtgtattttcacatggaaatgtccatggccagtctttctgaaagggaattaggaagacacctacttttggatcttgcaggagccctctctgatacagaggaagcctgtgtgctgaccttctgtttcaaggtctccttgaggacattatctcagaagtctctgttgcaatatttgaacggatcactcaacccttaagggagagatgcctcccgctcattgaatgagcatctccaggccctcctcactccggatgagccgga

SEQ ID NO: 1619 - DNA, 471 bp, Homo sapiens
  source 1..471: mol_type = other DNA
caccgaagtcagtagacactccagctcttacggaaagaagcactgtcttttgcgctagtgacctgagggaatcttcaagatcttggttaaccagattcatctaaagaagggcttctggacattcctgttcagagtcgaggtaaggtgcctcgcagcctcaggcccttagaacccaggcggggcggggaagcgggggcggcgcgcagcggtacctagcggcgctgccccgctggcagccggaggacgtggcactgtctgcagggaggggattcgtctttctcctccccgcgaggaggagcctcgacatcctgcagaggcgggaggcgccgtgagccaggtgtgcaaccgggggcgagggtcgcgctggctacctcgcatgcgcagagccggaagcccgctgaccggactacagctccttgtggaggccgcagacgcgaagccgctggcgccatctgcgtctgcgcggccggc

SEQ ID NO: 1620 - DNA, 371 bp, Homo sapiens
  source 1..371: mol_type = other DNA
ttcatagttacttatgcacagtagttatcaagtaaagaaaaatggatatcaaattgtgtgataatcatacaatcaataggatattacttttcccagctacttgggagtccgtcactgcactccagcctgggcgacagagtgagactctgtctgtcaaaacaagagaacatactaaatgattccatttttttatttatgacttcatgactaccattaagaaaatataacctgggaaactgtttctgccttggacacgggtctgtggcattgtcacaatgatccccattggtggtgaccctcaggtgagcggttatcagagtctgagctactggcagtgctttcagctctgagttgaggcacctcaaaccttg

SEQ ID NO: 1621 - DNA, 366 bp, Homo sapiens
  source 1..366: mol_type = other DNA
ccctcatgactcattgaattcacctaaaaatctttttatggggcaggagccacctcagtttggtggcacagagctcaacaattaattaccttggatttagccaaaataaacactccaaattcatgatgtctttcaggaagagagtttgttttcttttttaaccaaaatgatcctgtctgtgtcccctagaggagagaaacttctggattcaaatgattgtttggaggcaaatagaatagaatgtcaatacaactttagccttcttcataacctgaaaatcagagattcgcatgtttcaagaatttgagatgtatttcccagatgaaaatggtcagaaaaggcaatttccttcctcttttctcaata

SEQ ID NO: 1622 - DNA, 359 bp, Homo sapiens
  source 1..359: mol_type = other DNA
ccaagcgcgtgaccatcatgcccaaggacatccagttggcccgccgcatccgcggggagcttttcagagccactgccgttttcatcaagagcagctgtaccggctctccacacgtgcctaaaaattataaacccgtttcctggtttatttaggaactataagcttaattaaagcgagtaaatatctggcgatttttaaaaatgggtgaggaggcaagagagttaacttgtctagctggcgttaagatttcttccgtatgcaagtctaatacttttgttacagtgagcaagactagaatctattatttgaaagcgcagcactttgcgagtcttcatttgcatacgggctctataagtagc

SEQ ID NO: 1623 - DNA, 378 bp, Homo sapiens
  source 1..378: mol_type = other DNA
aaaatattaaacaaatgaatttcttttttaaaaaaaagtacaacaaaagatagtaaaaataaaaacagtataacaattacttacatagcatttacactggattaggtgttacgaagtaatttagagactattgatgtgcatagttatgtgcaaatactacgccacggcgggggccctggaccaatcccctctcagttctaccgagggagaaaaaagcttggcagcatgctgagaccaattttcccaggtggcgccgccgctcttgaggtcgcctctcgcgtgtcgctcgtcgggattaaatccgcgcccggaagccccggttgggatctgaattctcccgggcaattgagaacgcttcccgccggcgcgctttcggtt

SEQ ID NO: 1624 - DNA, 378 bp, Homo sapiens; identical to SEQ ID NO: 1623
  source 1..378: mol_type = other DNA

SEQ ID NO: 1625 - DNA, 353 bp, Homo sapiens
  source 1..353: mol_type = other DNA
cttcttttaagagccactagcgcattagctctttttttgaaaatttggtaacagaacggcctggatgttaggcaaaacgccgccctgggcgatggtgactttgcccagcagctggccagctggatgcccgccagctccaggatctcggcggtcaggtactcgaggaccgccgccatgtagacgggcgcgccggcccccacccgctccgcgtagttgcctttgcgcagcaagcggtgcactcgccctaccgggaactggaggccagcgcgggacgagcgcgacttggccttggcgcgggccttgcctccttgtttgccacgaccagacatgactgaaatcaagttataaaagaa

SEQ ID NO: 1626 - DNA, 373 bp, Homo sapiens
  source 1..373: mol_type = other DNA
aagagaatgggcgggcctgattcttttataacttgatttcagtcatgtctggtcgtggcaaacaaggaggcaaggcccgcgccaaggccaagtcgcgctcgtcccgcgctggcctccagttcccggtagggcgagtgcaccgcttgctgcgcaaaggcaactacgcggagcgggtgggggccggcgcgcccgtctacatggcggcggtcctcgagtacctgaccgccgagatcctggagctggcgggcatccagctggccagctgctgggcaaagtcaccatcgcccagggcggcgttttgcctaacatccaggccgttctgttaccaaattttcaaaaaaagagctaatgcgctagtggctcttaaaagaag

SEQ ID NO: 1627 - DNA, 308 bp, Homo sapiens
  source 1..308: mol_type = other DNA
ggctttgacatttttcaaaatgagaagttggggaaaaacatttagaaatatgtaaatatattaaggatacaaaataaaatttaaataattttacaagttaagaatcatcctggaaaaattacatcaaggcctggggtggtagtccccagcactagtctggggcacagtaattatgtacaatcagacttccattttcttgcatataaaataaaggagttgggctctacaagatctattggcagtaaaatagatctaataatgagccctcagggcaccacgtggtgcctgcccgtgctaccaacgcgcag

SEQ ID NO: 1628 - DNA, 257 bp, Homo sapiens
  source 1..257: mol_type = other DNA
gtgctgtctggaaggtcctgaccttatctggcatagacacattcaggatgtattccaaggggaaaagctgaaacaatttacttcttcctgcccgggaagtacaagggtcatagaaaccacaccttgttatctctgctttctctaaaatgtccaggtaaacttcagcaaaagcccctaaggaaggggctgccacattccgggaagggctgggtgccatttccagctgttctctctcccgatgctcagtggcgcggggt

SEQ ID NO: 1629 - DNA, 350 bp, Homo sapiens
  source 1..350: mol_type = other DNA
atgggaatgaggcggatacaggaaacaccctatctcctccattaaagcatagtatttatacacattgctggcattgttttgcaaaattcaagtgcgttctagagatccagactctagagctccgatcctccccatgcaattaggacgaggtgagcgcagacgtaggctcccccccaagtcctcgggttggaagaagaatcactgtccacaaaatatattaaaactgaaatttttgttcttttagctttcgaatttacacttttgagagcagtgtgattcgcgagccgaggaggaggctcctaagatggctgcagccgcttcccaccgctacgtccgtcttcgccccggaa

SEQ ID NO: 1630 - DNA, 317 bp, Homo sapiens
  source 1..317: mol_type = other DNA
atcccactgaaattgctggcattctctgagtgcagatagtgtatttttgcttcttgtcatttgaaggattaagaaacaaaaacaatccagaaattgatcggtttttttaggcccccttctggataaccagatgttaaatcatgagatcagagatatgggaatgaggcggatacaggaaacaccctatctcctccattaaagcatagtatttatacacattgctggcattgttttgcaaaattcaagtgcgttctagagatccagactctagagctccgatcctccccatgcaattaggacgaggtgagcgcagacgt

SEQ ID NO: 1631 - DNA, 256 bp, Homo sapiens
  source 1..256: mol_type = other DNA
attcaaaagcaataaaacagcagctcattaactcttattttgtattttatataaagatttaaaggagctgcagctccttgctgagctgaagagaggtttccagccctcacctgtgaaagtcctgaacatgaatcattgcacacaaactgtacttgtgtctgcatcttgaatatgaaaaccccccaggtctaattttcgaagaggcggcaaggaggcttgaaccactttgggtaaagaagggagtcgtttttctctc

SEQ ID NO: 1632 - DNA, 571 bp, Homo sapiens
  source 1..571: mol_type = other DNA
aaagagttactaaatggcctttctaatacttattcattcattcaacaaatatggaaggtctactatgtgacaaggatggcttattatgttctcatagccataaagttctgctacatataatatagttttatgtattttactaaattgtaaaacctttgaaagcagtgatacacatcacagggatacaatacatatttgaattatgccataatgttttaaaagacataagaagacataacaaacgcactatgtaagttttttttactgttagctcactgttatgcaagtaaataaatattaagtgtttacagagaagactggtgtggaagaagctaatcttcctccggtcactccagaatgattgtgtagagttactagaatgtcagtcttttcattccaagaatgctccagaccaggagctttagggactcgggtcggcaagcgccaaactggccgcagcctggggagcggcgctaaaggcggggctgcgacggggcggagcgggaggaggcccgggggcggcctgggtgtcaccaccaacccgctccggccggaaactggcgcctgtttc

SEQ ID NO: 1633 - DNA, 310 bp, Homo sapiens
  source 1..310: mol_type = other DNA
ttaattaatacagagagggttccttcacaaatgctgagcagtctcagctgcttcctcccagccgggattcggcttccgggagtccgggcagccacggtgcggaccaagcctaccccggggaccggctgagacggcctgggccgctgccacgcacctgcggcctgaagatgcctgaggcccggactctcagacccctattgccctttggtgctggaggcccagcggcagcctgaagcccccattaacgctttcttgcatggcagtgagataataaatcacacgcggcccaacaaatatttgttgaatgaat

SEQ ID NO: 1634 - DNA, 504 bp, Homo sapiens
  source 1..504: mol_type = other DNA
aaagattcacattttcactttaatatataacttaagacttttctttcaaaacacatctaaaaattagtaaagctttatttaaaaagctaaagaaaaaaaacatattcttcacaatttcagaggtgacaaaaatctcttatatttcagtagtttctgatctcccttaagggatttgagaattatatataatattgcataatcttaagctgattaatgttaaagtgctattggtctattttaactgtgtacttcttaaaatataatgaaagaatttatttggtaataaacactggtcattattttggtggaaatattcataagcatttttagttactgatttctaacaattgtttcttattatttacaatgtaaatacgtaaaaacttgagagttttggctttcagagtcccgccgggcagggggacgcttgcaggtccggtggtcccgcgggctgcgagcccccacggccgaccctagccattcattcaacaaatatttgttggg

SEQ ID NO: 1635 - DNA, 410 bp, Homo sapiens
  source 1..410: mol_type = other DNA
gtatgctagtctagaataataaaaacaagtagcacatctaaccctcttttttcattaatacttagctggataacttaaatagtaatatacggaaatatcctttcagctgaagcttcaagattaaaaacaaaaaacatggtctctttacaatccataagtttccaaaaatatttttttctatcaccttaaagagttttgtttcttgagctccaacagctttactttaaaaacacaatgttgagtatgatttctgattccaataaattgttttaattaatacagagagggttccttcacaaatgctgagcagtctcagctgcttcctcccagccgggattcggcttccgggagtccgggcagccacggtgcggaccaagcctaccccggggaccggctgagacggcctgggc

SEQ ID NO: 1636 - DNA, 359 bp, Homo sapiens
  source 1..359: mol_type = other DNA
gtaaaaacttgagagttttggctttcagagtcccgccgggcagggggacgcttgcaggtccggtggtcccgcgggctgcgagcccccacggccgaccctagccattcattcaacaaatatttgttgggccgcgtgtgatttattatctcactgccatgcaagaaagcgttaatgggggcttcaggctgccgctgggcctccagcaccaaagggcaataggggtctgagagtccgggcctcaggcatcttcaggccgcaggtgcgtggcagcggcccaggccgtctcagccggtccccggggtaggcttggtccgcaccgtggctgcccggactcccggaagccgaatcccggctgggag

SEQ ID NO: 1637 - DNA, 549 bp, Homo sapiens
  source 1..549: mol_type = other DNA
acacgtatatatattaaaaagacatgaagtttctgaggcagatctgctgcccttccctccactgggctccagcgctgtagagagggtggtttaagcctcacctggaacttaaggataatggtttggagacagagttctattcctgccagcattgacactgtgtctgaaaagccagcatcgacactgtgtctgcaaacctgtgagatggagatcataaaatccgcctcatccttaggattattctccaccctagcacctaggagcgtgcctgatgcgggttgtgggtggcgcgccctccgctggcgatctctccaccgcgcccgcccactgggccccggggcggccggcggccgggtctctcgggctccgcgtgtcgcccgagccgccgccggagcgagggtccctgccccctggggagcggtctccagccgcttcgaagccgccttcttccccctccgtgagtcagaaacaaaggcgggggggcggggggagcgcccgagctgcggctccgcgattcgccaacgtcagcggcccgcggatggagctgcg

SEQ ID NO: 1638 - DNA, 659 bp, Homo sapiens
  source 1..659: mol_type = other DNA
gccggccttgcgcgagggaggagcggcggcgccggggcagctccgacgccctcccgcggggaaggagcccccgcggtgccgccgaggccccgacgcggggccgcccctcggctcgccgccccgcgcccgcgcccgctgggaattccgccaagcgggtgagtgcgcttgcccgccctgcggccgccgccgcctccgcgctctgacgacccccgctccgtcggcgccgcggcggcctgggagacccacggcccggccgcgcccccgccccggcggcccggtcccctcggcctcggccccgccaggcgcccgcgggggcttttgcggggggacgacccgcacctcccccgcccccgggcgccgggcgagcgtttgcctcgcgctccgccgtggcgaggttagtccccgcgcggcgaggacggggcggcgggggcgcagggcctggagggaacctgggagcctctccgcgcccggccggcgcccctgccacttgcagccccggtgggagcgaacctggggcggccccccgccccccggccgcagccttcggaggagactgggccgccgaggcgggaagcgccggctggaatctcctaaccgcgcagcctgcaccgcccgagaaggtcggctgggtccggaaattctgcgaagggattttcagg

SEQ ID NO: 1639 - DNA, 293 bp, Homo sapiens
  source 1..293: mol_type = other DNA
ccaaatccatttaatatattggactcggatagaaaatatatcagatattaaactgttaagaacaattagagcggcatcgcggtgccatttctatgctaattaatgtagtgtttattacagcaacaattaactcagtaacaattcctccaggatagttttatttaaatattactaacttacaatcttgtcagtctctgtgaagagacaatgccacgaaggcatctttttaatgtgatcttggttgcaaagcagaggctatgcttaataggtacggaatttctggtccagggcct

SEQ ID NO: 1640 - DNA, 270 bp, Homo sapiens
  source 1..270: mol_type = other DNA
tttggggaacctcaaaacacaggggatagaaaggcacagtgagctcctgtctctgcaggagctgatgatccagcacatgttcagatgggtgcatcctcctggctggtgcctcggatgtacattccaatcgggatttccagtcccggacgtgcagcctccatgctccacggacgcagctccttggtggcagaagaccctgagcccctcttccatctggattgggtctggcagttacagccgctgtctctcgtggacccaggcctcaccgtg

SEQ ID NO: 1641 - DNA, 211 bp, Homo sapiens
  source 1..211: mol_type = other DNA
cgtggacccaggcctcaccgtgggacctgaacttaggacagggtctgctaccacccagggagctgctcctcagaggcctctgctccagggaagagctcaccccagctgggctcctgagccagggccagggctccagtgaaactccagcaattggctatttaaggagctgttttgtaaagtcgctggccagctggggatccagaaacccatg

SEQ ID NO: 1642 - DNA, 218 bp, Homo sapiens
  source 1..218: mol_type = other DNA
tgggtctggcagttacagccgctgtctctcgtggacccaggcctcaccgtgggacctgaacttaggacagggtctgctaccacccagggagctgctcctcagaggcctctgctccagggaagagctcaccccagctgggctcctgagccagggccagggctccagtgaaactccagcaattggctatttaaggagctgttttgtaaagtcgctggcca

SEQ ID NO: 1643 - DNA, 218 bp, Homo sapiens
  source 1..218: mol_type = other DNA
cctcagcctcccaggtagctgggattacccacatctgatgttggccaggctggtctcaaactcctggcctcgattacaggggtgagccactgaggttcatttttcagaaaataaatacagatgaaggcttcaaaggtattaccacttttcctgtctcgactgtcgagccactcccaggacgacagcaggtcgagcagctccgcccgcgctgattctcc

SEQ ID NO: 1644 - DNA, 261 bp, Homo sapiens
  source 1..261: mol_type = other DNA
agaatatcctggaagacatgtaaaacatgtatgtgagtgtgcacatatggattaaataataaatcacttccaggaaggaaaggaagtttggttattttggtactttgattatgctttcaaaaacaatattccctcagcctcccaggtagctgggattacccacatctgatgttggccaggctggtctcaaactcctggcctcgattacaggggtgagccactgaggttcatttttcagaaaataaatacagatgaaggctt

SEQ ID NO: 1645 - DNA, 183 bp, Homo sapiens
  source 1..183: mol_type = other DNA
ctcttgggaccctgtctcagaccatttatggtagaaacatccattctggattctgcactattgctgtgaaagtaaaaaaggaaattacagagctcccctcctcctccaaagcagggaaggagctgcagcaactcttctcctcccagggggcagggggttttgatgcaaacatgtttcttaagc

SEQ ID NO: 1646 - DNA, 288 bp, Homo sapiens
  source 1..288: mol_type = other DNA
tcttccaacctgcatcctggaagttgagtcccagctaccagggagaggagaatcactggaacccgggaggcagaggttgcagtgagccgagatttttagctgaagccatgcagcagttcctattctctatagctccagacagacagaagaaagggattcttttcagtctagaaaaatgctcacccctttccactgtggcttaagaaacatgtttgcatcaaaaccccctgccccctgggaggagaagagttgctgcagctccttccctgctttggaggaggaggggag

SEQ ID NO: 1647 - DNA, 179 bp, Homo sapiens
  source 1..179: mol_type = other DNA
gcctctctggccgccgcagagcagctctcggtctggacagccggctcagccagacacgtgcggcccggcacgtgcctcccgtaacacgtgactctagttactgaagtccatagcccatttgctacagtacaaaggggcgctgtaagggaagcattccgtgctcctcccctacatgcggc

SEQ ID NO: 1648 - DNA, 245 bp, Homo sapiens
  source 1..245: mol_type = other DNA
tgcttggaatcagataatttagcggggaaaaactgagtttcgttccctcctcacccagcagggcaggaggcacccaactcccgagacggaaccgggggtcccacgtccgccgccttcgccgcatgtaggggaggagcacggaatgcttcccttacagcgcccctttgtactgtagcaaatgggctatggacttcagtaactagagtcacgtgttacgggaggcacgtgccgggccgcacgtgtct

SEQ ID NO: 1649 - DNA, 218 bp, Homo sapiens
  source 1..218: mol_type = other DNA
ccctcctcacccagcagggcaggaggcacccaactcccgagacggaaccgggggtcccacgtccgccgccttcgccgcatgtaggggaggagcacggaatgcttcccttacagcgcccctttgtactgtagcaaatgggctatggacttcagtaactagagtcacgtgttacgggaggcacgtgccgggccgcacgtgtctggctgagccggctgtcc

SEQ ID NO: 1650 - DNA, 407 bp, Homo sapiens
  source 1..407: mol_type = other DNA
agtatctgacacagagtagtcattcagtgaaagtttagtgtaagttattagcatcaactgatgatgcactgtgtgtgtgtgtgcgtgagcgtgcgcgcgcactctctctctaagggaggtacagccattagatgttaacttacgtgaataaccataaatggatatgtagctgacataattttttattctaaaccctgcaggtgtttcccatatatctttattgatttcactttatgtagttaaattagtgggaagatgatataggaaactcacagtatgtttatttcttttcctaaaacaggaagcatcctcaggaagcgcctacttctcttgttttccatcgagaaagagaaatggctcaaatatttatctctcagaggccgaaggacttcgactccattaatttc

SEQ ID NO: 1651 - DNA, 338 bp, Homo sapiens
  source 1..338: mol_type = other DNA
ttaatatatagacctattgatagacaatactggtaggtctcacttgtcattttacaggcgtgagccacggcgcccggcctgacaccactgtttttactttctaccagaaaggctgtgtttgaacacaaaacttattctccatatgaggaaaacagcaagtagcccaatttccgcttcaggaagttgtcccagctactcgggaggctgcagtgagccgagatcgcgtcactagctaataggtttagggaaactttcgcatcgcgaattggcggcccggccctccttgacagcggcgtggcggcggcggtggcggtagcgacggcacgccgtagggcggt

SEQ ID NO: 1652 - DNA, 356 bp, Homo sapiens
  source 1..356: mol_type = other DNA
gatggctgcccctccgaggagttgggggcgatggctgcagccccctgaagctgtctctgttgtgtgagctgaacacacccaagagaaagggcggggcaggggaacccccccacccggctatctgcgcaggcgcaaaaataatcgtagcgcctcctgggccctgggggcttcagagctcctgcgcgcgcctccctctgctttcaaggttgagaaggaagcaggggtgggccaagtggcgcgtgcgcgatactgttgctgccccttcaacgattcagcccctccttgcagcgtgtaggagctgccagcgtgcccagcagctggtgttcccgtccgtacctccttgcccgctcccgccg

SEQ ID NO: 1653 - DNA, 229 bp, Homo sapiens
  source 1..229: mol_type = other DNA
tggagcccccagaacttcagaactgtgtggaggcacatgtctgctctcctgaaaagagacttggtttggggaccccacaagagcgagactctgtctctaaataaataaataaataaataaatacaaactggaatgtgggataaaaggatgttccactttgtctccctcttttttgtcccagagagttagggaggcagcctgtagcttctcaatcctctgaggaggcttc

SEQ ID NO: 1654 - DNA, 405 bp, Homo sapiens
  source 1..405: mol_type = other DNA
ctccagaggctgaggtggtcagttgacgcgtgagccatgattgtacccctgcactccagcctgggcaacggtgagacttgtctcaaaattaaaaaataaaactgttacagtcatttatcataatagcttcttgttgcttttgcccattaccaaattacataaaatttaactcaacaattgggagcaacactattctcattttatagttgagtattaaataaatatgagaagtttaataattttcccaaaattacatagttaatggcagatccagaatttacactagtacttgctgtaaggaccacgtaaaataaaataagttaaagggaaatttttcggtcttccggtcagccggaaccactcacaccgctgctggtgctgtgtagggtgtactagagtggcagc

SEQ ID NO: 1655 - DNA, 308 bp, Homo sapiens
  source 1..308: mol_type = other DNA
cttgagccgagatcgccccactgcactccagcctgggcgaggtgctcatggaaagagctcgagcccaggagctctgggaggaccccaggcgctcggagccgccgttacgtaaccggcactcagagcctccgaagaccggaaggccccgctcaggccccggctcaggccccggccccggccccggccccggccccgccccggcccggccgggcagctggtaggtgccgtgcgcaaccctccggaagctgccgcccctttccccttttatgggaatactttttttaaaaaaaaagagttcgctggcgcgg

SEQ ID NO: 1656 - DNA, 704 bp, Homo sapiens
  source 1..704: mol_type = other DNA
aaataataatataataataataaaaagccttttggggtgcattcttccatgtataaatgcataaagagacatatccaagcatcatatatattagattagtcccattttgcagatgagcaaactctggagctgaggttcaaatccagatcagtctgactcagaagtcagcacgctgtcctttcgctgagtgagcctggacccacgcggatcgggggccgcgggtacctccgtccagggcgcttccctcccggaccagcggctctcccaggccgcctcgctccaggcgcccctggaggctgccccgcctgtgccgcgccgcgccgcgccgtgttcgcaccgctcacccgagcggctcggaggcccgggttgctctcagccgggcacgaggacagcgcccgggagcgactgcagcctctgaccccggctgggccagcccgggctgcttaagtccctagtctcggccgggcacgaggacagcgcccgggagcgactgcagcctccgaccccggctgggccagcccgggcttcagctcacgcagccgtcggggggcgcccggcgcgcagcccggggtgggtggtcctggcgagtggggctgcgaggcagaccggccccaccccggggccgccgaggggcgcgggctggggcgcgtggcgggcggggctgggcgggggcgggcgcgagggcggagttgcggccgaggcgg

SEQ ID NO: 1657 - DNA, 223 bp, Homo sapiens
  source 1..223: mol_type = other DNA
ttctggataggttaactagtattaaccgtatttaccaaatgtcaagggttgagactcagtctctctcttccacaggccaagtgacacatcgtaataccattggtacctggagtgcagtggcgctgcgtgcaggcgaggcaccgcgcccggtccaaatcattttcttccacctgagaataaaaggtctatagagcccacctttagacggcgactattggtaggc

SEQ ID NO: 1658 - DNA, 492 bp, Homo sapiens
  source 1..492: mol_type = other DNA
atgcttttttttacaggacaaaaagactgatttttaaagtatggcattttttgcagcataaataaaatattgttctcgcttctaatttttatttaagtagcaggaaatatcacactttctagaatttttgcttgcctgctttctttgctttagaaaaaggaagacttaaaacttgttttccaaaaacatacacatccatgggtttgtcagtatcctgtttaaggtaaaccatataaacgtacacaaactgacccagatcatgtttttctggaacagtcaagtcaaggataaactgactgtcagaaacaaccaatgtaaaaatatttatttatttttagctgtattgcttggatcccaacaaatgggggtggggagcgcagccctctttcctctcttccagggggagagcctccccctgtgagctccgattggcgggatcaaccttggtgatttctgattggcgcaatgaagaaacacaaggtaggttgccta

SEQ ID NO: 1659 - DNA, 340 bp, Homo sapiens
  source 1..340: mol_type = other DNA
atacacatggaaaactaaaaaattgtgtaatttgctttattatgttgtttgaacttgcaatatctccaaggtattgaatgtttacactggtaagaaatgtatttggatatataataatctgtaaactaagaagcttgtactactgaataatcgattttattttgtttctaaatgagacaaattacattcaagaccagcttggccaacatggcaaaagccactgttcagtaactgcacatgcagtttgaggctcccagtgcgccttgcgctgcgcttggcgggaaaggtgacctcgaagccactgtcgcgccccagcgggtgaccgcatgcgcgtcgggca

SEQ ID NO: 1660 - DNA, 320 bp, Homo sapiens
  source 1..320: mol_type = other DNA
actgagtctattccttccccacatctgtttatggaagaaaatgaagctagattcttatgatctgtcacatggtcacatgtgagtccatcagaacttacggcattgattcaagtgctgtcataaataaccaggactgctgtttttggttacttttactgcctgacaaagaattctggagcctatggcttccattacgacacaaatatgaaaataggtttcacccaatattaaggatgggagagactagggctgtgtccttccttttactcaccaaaagagaaagtaagctagacagtcttgtgagactaaatagctagtaa

SEQ ID NO: 1661 - DNA, 405 bp, Homo sapiens
  source 1..405: mol_type = other DNA
acatgctggcaggtgcctgtaatcccagctacttgggagtcactcaacctcattagtaattaggaaaatgcaaatttaaaagatgatagtcaattggatatatttgagtgtatccttttttccatgaatatactaacacatacacacatattactaaactatacatatagtatatattaataaagacattttgagtttgtcagatcatgaatgagttgtgttaaaagcagtaagacaggttttcctaggctttatctaaatctctttataactaaatgttttccatgtaaaagttggtgtttttaaaattcaatttaattttttttttgagatttgatatgtcatccaggctgaaacacagtggcataccagctaattaaaaaaaatttttttgcagagacaggg

SEQ ID NO: 1662 - DNA, 476 bp, Homo sapiens
  source 1..476: mol_type = other DNA
actcaacctcattagtaattaggaaaatgcaaatttaaaagatgatagtcaattggatatatttgagtgtatccttttttccatgaatatactaacacatacacacatattactaaactatacatatagtatatattaataaagacattttgagtttgtcagatcatgaatgagttgtgttaaaagcagtaagacaggttttcctaggctttatctaaatctctttataactaaatgttttccatgtaaaagttggtgtttttaaaattcaatttaattttttttttgagatttgatatgtcatccaggctgaaacacagtggcataccagctaattaaaaaaaatttttttgcagagacaggggactgtatccactttgtccccaagaccatagggagctagattttaaatgaaactgaaatgaaagttcacttcctcattttgagtaatgtgacaagttccaatttcttttcaa

SEQ ID NO: 1663 - DNA, 480 bp, Homo sapiens
  source 1..480: mol_type = other DNA
ttttggctggcaagactaccggttccatagcaggcattcaaaagttagtcatttaactttttcaccagggacaaaattacaaatcaccatgtgatgtttaggtgctctttagcacctaaagaggatttacaagcgaaggtttttagtaaaatatccttttttccaagaagcggtttcgaacccctggccacaggtgatccggccgcctcggcctccaatacccattttaattgcatttcaatgacgttactcggtcattgacctcgcgagattagggagacagctggacttcttcctcgccctcccttcactggactggctggcgcagtgagtagcccccgcctactatataggcggggtctccccgccgcaggggctgggatgctgggggctgctgaagccgccatcttggattccgcggtagcggaggcggcggtcaggcgccgcttctggggtccctcccggttcggtggcggcggc

SEQ ID NO: 1664 - DNA, 434 bp, Homo sapiens
  source 1..434: mol_type = other DNA
ctgcactccagcctgggcgacagagagagactctgtctcaaaaacagacttttggctggcaagactaccggttccatagcaggcattcaaaagttagtcatttaactttttcaccagggacaaaattacaaatcaccatgtgatgtttaggtgctctttagcacctaaagaggatttacaagcgaaggtttttagtaaaatatccttttttccaagaagcggtttcgaacccctggccacaggtgatccggccgcctcggcctccaatacccattttaattgcatttcaatgacgttactcggtcattgacctcgcgagattagggagacagctggacttcttcctcgccctcccttcactggactggctggcgcagtgagtagcccccgcctactatataggcggggtctccccgccgcaggggctgggatgc

SEQ ID NO: 1665 - DNA, 479 bp, Homo sapiens
  source 1..479: mol_type = other DNA
tacagaaataaaagtactacttcaaaaggatgtttatttttattgttgaaaaaaaaacaatctaaactattcaggtgtcaaaaatacaagttattggttttttgtttttctggagtgcagtggcgcgatctgctcaccgcagcctcccgagtagctgggacagtacagacggggtttcaccgtgttagccaggatgatctgggattacagggccaaaaatacaagttttaccttttttattggcttcaggtaatgtccacatgttaaatgaaaaaagagagaatattatcacgtttttcttattacatcttgatagcctttacaatttgtatcacttatgtaacaaaacaaagcgtttccctaagtctttacacaatgaatatagtaatggggcactggccacgccttcgcctctgaggggcgccccgcggctgaccccgtcaggctaccgtcgcggtgaccggaacggcactaaaggt

SEQ ID NO: 1666 - DNA, 378 bp, Homo sapiens
  source 1..378: mol_type = other DNA
atttgggtcatacttgtaccaacaaatgattcctcatttacgtgaaattctgattaagctgcatgtcctgtatatttatttatttaatctaatagtctcactctgtcgcccaggctgtggagtgcagtggcgccatctcagctcactgcaacctcccgagtagctgggacattaccttatttatttatttatttatttatttatttttatgagtagtggacacattacttcatttaatcatcccaggaacccactccaaggagagaaaaccgccacagaaatatggagccactgcaggtccctcctccagggatgtaggaatgccagaggcagggctgtagcttctgtgccccgcccctacccaggctctccagggag

SEQ ID NO: 1667 - DNA, 402 bp, Homo sapiens
  source 1..402: mol_type = other DNA
cccactccaaggagagaaaaccgccacagaaatatggagccactgcaggtccctcctccagggatgtaggaatgccagaggcagggctgtagcttctgtgccccgcccctacccaggctctccagggaggcaggaaagagttgctgcatggcggggcgggggctccacagggctgttcacctgctgctctgtgcagagacagcctcaagtccagctgctggggttgcatcacctgcagctaaaacagccaccaagggagcctcccccatctccctgttgcagagcttccctctgaagtcaagggagtttctgggctgggaccccctctggggtgcaggctggggtgccctgctgctgcagcctgtctgacctgccccccagggagctggagccagaggcaga

SEQ ID NO: 1668 - DNA, 123 bp, Homo sapiens
  source 1..123: mol_type = other DNA
gaactaggtcttgaactcctgaccgcaggtgaggggcagctgaaggcctggagatggcctgtcctctccttgggacagttcaggcatgggcgtggccatgccagtccccaagcgtggactcag

SEQ ID NO: 1669 - DNA, 472 bp, Homo sapiens
  source 1..472: mol_type = other DNA
ctccaaggagagaaaaccgccacagaaatatggagccactgcaggtccctcctccagggatgtaggaatgccagaggcagggctgtagcttctgtgccccgcccctacccaggctctccagggaggcaggaaagagttgctgcatggcggggcgggggctccacagggctgttcacctgctgctctgtgcagagacagcctcaagtccagctgctggggttgcatcacctgcagctaaaacagccaccaagggagcctcccccatctccctgttgcagagcttccctctgaagtcaagggagtttctgggctgggaccccctctggggtgcaggctggggtgccctgctgctgcagcctgtctgacctgccccccagggagctggagccagaggcagagccaggtcagaagctggggcagagccaggtcgagactaggtctctgtggtcccacctggacccacagggaaggc

SEQ ID NO: 1670 - DNA, 499 bp, Homo sapiens
  source 1..499: mol_type = other DNA
ctcgtggctcagcctcccgagtagctgggattacaagcgccggcgaacgcctgacctcaggtgatctgcccgccacaggcccggccgtggtgtcatttgaaaactcatacattttacaaaaacagggccgcctccttgccacgggggtaggtcccgtagcacctaggtggaaaggccgcggctcggcgcgaggcacttgggcaggatccccgggctgcaccctcctccgcccgcgccccgtggggctggaagtgggaatgtgcccaccctggcggggaccgggggccgcacagagggacaccgccgctcggagcccgggaccccgcggcatccagtgcgtctgtgtcggtcccagtgggagacctcggcggaaggagcccgcacccgcctccccaggtccgggagcggagggttggggtctggcctcccgcgccggggcgaaggggcagccgcagcgcagaggcccgccccgccctcccctcccctcccggcccttggg

SEQ ID NO: 1671 - DNA, 522 bp, Homo sapiens
  source 1..522: mol_type = other DNA
cctgcctcagcctcccgagtagctgggactacaggcagccttggcttcccaaagtgctgggattacaggcgtcagccatcgcgcccagagcctggggcagtttcatttctagacttaaaaatgatactgttgtttgtttttaacattaattgagtaatacatgcaaatatcgtgctctttgctcctgcttctgtggatccagagccttagcaagggcacttgctcttcctccgtcccttctagaggcaggcagagggaagagaaagggtctgttgtttttctctccctgaccgggtcagaatccaccagcgctgggcaggcccctcctcctccagggagctcttgcctaatttttcttcgtcctgatgagaacaaaaaagagagaccagcttgtagtcagggcccggagcgcatgccatagactcggcgactcaggaatcctgaagactctctgagcgacctgccagtgcccccagtactgggcgtgagtccggaagtggccacaaccccgcttataaagct

SEQ ID NO: 1672 - DNA, 499 bp, Homo sapiens
  source 1..499: mol_type = other DNA
gaggcagggctgtagcttctgtgccccgcccctacccaggctctccagggaggcaggaaagagttgctgcatggcggggcgggggctccacagggctgttcacctgctgctctgtgcagagacagcctcaagtccagctgctggggttgcatcacctgcagctaaaacagccaccaagggagcctcccccatctccctgttgcagagcttccctctgaagtcaagggagtttctgggctgggaccccctctggggtgcaggctggggtgccctgctgctgcagcctgtctgacctgccccccagggagctggagccagaggcagagccaggtcagaagctggggcagagccaggtcgagactaggtctctgtggtcccacctggacccacagggaaggcgtttgaggctgagccgctgagaggctgagtggagttcactcacatggattgaggcccaagcccggtcctctcccacgtctgggaggggccagagtcagac

SEQ ID NO: 1673 - DNA, 359 bp, Homo sapiens
  source 1..359: mol_type = other DNA
ccttcagaatgtggagttaggttccaacctcccttaactgccactttcagtagtgctgtaaatcgagaggagggaaccaagatccagagcacaggcgtgttggatctgctggagtgcagtggcaggatctcctgcctcagcctcccgagtagctgggactacaggcagccttggcttcccaaagtgctgggattacaggcgtcagccatcgcgcccagagcctggggcagtttcatttctagacttaaaaatgatactgttgtttgtttttaacattaattgagtaatacatgcaaatatcgtgctctttgctcctgcttctgtggatccagagccttagcaagggcacttgctcttcc

SEQ ID NO: 1674 - DNA, 484 bp, Homo sapiens
  source 1..484: mol_type = other DNA
ctcctgcctcagcctcccgagtagctgggactacaggcagccttggcttcccaaagtgctgggattacaggcgtcagccatcgcgcccagagcctggggcagtttcatttctagacttaaaaatgatactgttgtttgtttttaacattaattgagtaatacatgcaaatatcgtgctctttgctcctgcttctgtggatccagagccttagcaagggcacttgctcttcctccgtcccttctagaggcaggcagagggaagagaaagggtctgttgtttttctctccctgaccgggtcagaatccaccagcgctgggcaggcccctcctcctccagggagctcttgcctaatttttcttcgtcctgatgagaacaaaaaagagagaccagcttgtagtcagggcccggagcgcatgccatagactcggcgactcaggaatcctgaagactctctgagcgacctgccagtgcccccagtactgg

SEQ ID NO: 1675 - DNA, 366 bp, Homo sapiens
  source 1..366: mol_type = other DNA
attttgtatgtttggcttaaaaacactgacttaaagtaaaatactgtgactacttaccggttccctccacacccccgaggttcacctggaggccagtgggccagcgctaggctggtcccgctctcaggcggaccccaaaggcggacaagcagcattctcacgccctgcaggtagtcctcgcccctggtcgagtagaggtgcccctggtcgaggagaggtttccccagcccgcccgggactcagggactagaggccagagtcaggaggcgggactcgaacccgccacacggcgaatcggcctccgaccccgggaggaactgcgtaagcgggcgctccggagtccggcgtcgccccgcccccagcggc

SEQ ID NO: 1676 - DNA, 357 bp, Homo sapiens
  source 1..357: mol_type = other DNA
agatccaacacgcctgtgctctggatcttggttccctcctctcgatttacagcactactgaaagtggcagttaagggaggttggaacctaactccacattctgaaggattattctaatgttctcctatgttttgccaagtgtcatttaaaatgtcaccagatgctcgtatatcaataatgggttactgtgacacatacacatttgtttaccgaacgactgatccctcagaaaagttgcgggactacgtttcccacgtcgccccacgccacgcccccttggcctcgccggaaagacgtcccaggagcctctgggcgtagagccccgcctccgccgctgggggcggggcgacgccggac

SEQ ID NO: 1677 - DNA, 300 bp, Homo sapiens
  source 1..300: mol_type = other DNA
ctgtcgccaggctggagtgcagtggtgcgatctcggctcctcagcctcagcgagtagctgagactaccggcgcggtccgatgagccaccgcgctcggccagagctctgggttttagaagagggactgtgatccttccaccttggatggaagaggcttacctgacagccagcctgcctgctgggagccaggagactttagtaaatttagaactgtagaggctaataaacagacatttaagcttccttaggagcaccccgcgcggcccgcgcgagcgcgcctgcgcgtcgaaccccaccccc

SEQ ID NO: 1678 - DNA, 222 bp, Homo sapiens
  source 1..222: mol_type = other DNA
atatactattaaataatttttttgggaataaggagcaacaggcttctgcctagaaacacacacaatggtttctttttctttttttttggagtgcaatggcacattcaagcgcaagtagctggttgggatgccttcaaaacccgccccctcacaggaggcagggtttttcttttgggcaaacctgctcctggggagaggagtggcaaaacctgttttgaagat

SEQ ID NO: 1679 - DNA, 579 bp, Homo sapiens
  source 1..579: mol_type = other DNA
gtgtctccgcctggcccggccggcgcggcaggcgggccaggggaccaactgcacggcctcacctgctcttctccaccatccagacgttcagctacagctggtgggggtgagggaccgtggccgccagtgtgggcttcccgggctagctctgcggcgagcggcggcgacgcgattacgaaacccgtccggctcggagcccggcgcactgctcccctctggactgcggaggcactgcactgcgcgggacgtgggagggtgcctctgcagcccctcaaggccgccgcccctgcggggagatgaggccctggcacccaagctggggcccccggaggcatttcggggcaaaacgataggactgattcttaaaaatactttgtaacctaaagtccttaaattgtggaagaaaggaatactcctcctttccattgtagtctagagttaagatttcaaatccataaattagaggacctaaaattagagggcaattaactgctcattcattgggcccccagtcagcacgggggtgcaggcaggagggggcggggaatccttccgcccttcttaggaggggctgcattg

SEQ ID NO: 1680 - DNA, 442 bp, Homo sapiens
  source 1..442: mol_type = other DNA
ctcgggagctccggggactcaatgcagcccctcctaagaagggcggaaggattccccgccccctcctgcctgcacccccgtgctgactgggggcccaatgaatgagcagttaattgccctctaattttaggtcctctaatttatggatttgaaatcttaactctagactacaatggaaaggaggagtattcctttcttccacaatttaaggactttaggttacaaagtatttttaagaatcagtcctatcgttttgccccgaaatgcctccgggggccccagcttgggtgccagggcctcatctccccgcaggggcggcggccttgaggggctgcagaggcaccctcccacgtcccgcgcagtgcagtgcctccgcagtccagaggggagcagtgcgccgggctccgagccggacgggtttcgtaatcgcgtcgccgccgct

SEQ ID NO: 1681 - DNA, 148 bp, Homo sapiens
  source 1..148: mol_type = other DNA
agggttgcagcgaatcctagctaacacggtggtggtggcgggcgcctgcagtcccagctactccggaggctgaggcaaaaagaaagaaagaaaagaaatgactcagttatttgtttcactgttcgacgcacgcttggcgccaacacca

SEQ ID NO: 1682 - DNA, 384 bp, Homo sapiens
  source 1..384: mol_type = other DNA
gagccgtggctcacgcccggggggatcccctcagctactcggagaatcgctttgcagtgagctgcaggttgcagtgagccgaaatcgcgccactgcactccagagcagaggcggggcccgtactgctctcattcactagtaatctcattatttgggtcagataatgagagtcgccgtttccctctctatcattggggcagggggccaaactcagcctcggcgacaggcctcggccccggctccgcgccgccccctagtggtcacctccgcggcctcccgccgctgcccccgcttcagtgacggggagccgcgagagcggtgtgacttctcacggtccgggacgctgccggccacgcttccacggatgtcaagtgggggccttta

SEQ ID NO: 1683 - DNA, 163 bp, Homo sapiens
  source 1..163: mol_type = other DNA
tcctagctaacacggtggtggtggcgggcgcctgcagtcccagctactccggaggctgaggcaaaaagaaagaaagaaaagaaatgactcagttatttgtttcactgttcgacgcacgcttggcgccaacaccaagaagtgacagaaatcttactcgcggcgc

SEQ ID NO: 1684 - DNA, 287 bp, Homo sapiens
  source 1..287: mol_type = other DNA
agaagggaaacctccaggcctccttatccgggtcaggacgaaccagaggacggatcgcgcaggctctgacagcccagcccagccccgcgaggctcccaggtaaatttctccccagccggcctggccctctgggtggacggtgctcctggcgcccctccccgggcagcactattggcggagaggtgtgtctagccgccctccgagggcgggattagtcgcggcgacccaaaggcgggcaggaggtgggcccggctgggaggcgggcggggccactggggccgagccca

SEQ ID NO: 1685 - DNA, 354 bp, Homo sapiens
  source 1..354: mol_type = other DNA
aagtaaaagcttttgctgaagctgtgtggagaatatttattttgcacatttggaaatttatgttcaatgtctttttaatagtttagtactattaaatatttaatatttagtactgtctttttaatagtttagactttttaatagtttagtatgtgcaaatcttattttaattcaaatatattatcattttcttaaagtctggaaccacaacccacagtggattgtgtagtagattgtgtctcaagtaagtgtttaatacttactggattgaactgagatttgagtcctaaaactttaaatgaattgctaggagctgaggagtaaaacaaccccaactgtctgacagtttgttga

SEQ ID NO: 1686 - DNA, 291 bp, Homo sapiens
  source 1..291: mol_type = other DNA
acccaattgtggcttcccctcattttgtatccctttagcagctacaaagtagctactacagtagcctactcagtaggccctgcggggtttggtctggaaggccaaggtggatcacctgaggtcaggagaggttgcagtgagccgagatcaccccattgcactcccacctgctggtcacctgtggtgcagcagccctggtcgaataatatattaaataccagtactgtgtggaggatgcaaatccctttccccccttcaaagactatttccaacagaattccactctttagc

SEQ ID NO: 1687 - DNA, 344 bp, Homo sapiens
  source 1..344: mol_type = other DNA
ttgtaaacccagctaatcgcgaaggatcacttgagccctagagttcgagggcagcctgggcagaggcttgagctcttcttttctgcagtgccagagcaacttcagggagcgactgaagcggctccagatcctctccgctcacgcttactttgagcacattgagtactgtgagtcccagaagtgataaattctctgttccccgtagcaagagcgggacagcgccttctctttttacttccggggacgcacttccacgcatgcattgcgcgatccggaaatctctggtgctcggagggaactgcatttcctatggtgccctgcgactccgcagacgcggagccttt

SEQ ID NO: 1688 - DNA, 460 bp, Homo sapiens
  source 1..460: mol_type = other DNA
ttcatttattcattaacaaatatttaatgagttatcaccctgataatatttaggcaatatgagttatagtcactgcccttaaggaggagaataaaggaggaacagttactcagctcagctaattgcttgttttaagagcgaccagaaatctctatatttaaatataatttcctaccttactaattttttttgcctaggctggagtgcaatgtggtgccatctcagctcaccaagtagctgggattacaggcgtgtgccagcacacccagctgtaataagctcaccttccaactctgaggtactatagccagacggccttaggggacttccatagttgtctctggtagttgggggaaaaagggacattctgatcatcccctcatttcttcctttgaccctaaagagacatatgagtgccccgggcccataatcacctatcattcagtgacagtgccacttg

SEQ ID NO: 1689 - DNA, 284 bp, Homo sapiens
  source 1..284: mol_type = other DNA
gatgctcgtccagccctataccgggaccctgttacagatggactgccgcccactgcctcagccctgggccccggcccgccacctcctgagcccctccctggctctgggccccgagccttgcgcgatcgttgtgttttttaatctaataaaatagaaagatcccttaagaagtatttgaatacctgcatatatttgggtctttattcgatagatttattatgagctgtcctttctaaattgtcaactcatatgtctcagactggggccatggctggggctcctgc

SEQ ID NO: 1690 - DNA, 378 bp, Homo sapiens
  source 1..378: mol_type = other DNA
gattgcaccaggcttccatatgaacgagcccggctcccttgaagcagtcctgacccccctggcgggggctgtctagacggggaagccatctcttcactctgggaatgaatattcaggggattcctcccggtcccggggtttgtttgctagcaagaatttgtagtacaccttccaccatctaggttgttgtccctaggtctttgagaaaagacttcatttcccaaaaggctccgcgtctgcggagtcgcagggcaccataggaaatgcagttccctccgagcaccagagatttccggatcgcgcaatgcatgcgtggaagtgcgtccccggaagtaaaaagagaaggcgctgtcccgctcttgctacggggaacagaga

SEQ ID NO: 1691 - DNA, 383 bp, Homo sapiens
  source 1..383: mol_type = other DNA
ccagctacttgggaattgcttgaacctgggagcaagaagaaaaaatttactgatgttgataacttactatgggtaggaaaatcctcattcttaggaaatacacactgaaatatttagggataaaggccatgatgtgtacaactttagttacctaatttagatcattcaatgagtattccttgtactattcttgcaacttgaaattatttcaggccaggactcccagctactcgggagtctgaggcatcgtgccactgtactccagccaaaattatttccaagtacaacatttcaaaataaataaataaaatatgtggacatgaattcaaagatttcttcttatctggcgaaaggggccccactgtgagcggccactaacccag

SEQ ID NO: 1692 - DNA, 287 bp, Homo sapiens
  source 1..287: mol_type = other DNA
attgtgtatatacaccctattggctactctaagtagtgctgcaataaataataaatatggtgtttttaaccacaatggtttttagaaagtttcctactagcagcagtggcggatcacctgaggtcaccttcagtgtgccactgcactccagtctggcgacagagcgaaaccatatatatatataaaataaaaataaataaaataaaatgtgttgacttaagcaagggagatcgctgggttgggactgggagtctctcgacactcttccgccgctggtggccacccgc

SEQ ID NO: 1693 - DNA, 286 bp, Homo sapiens
  source 1..286: mol_type = other DNA
ccttgacctcctgggctcaagtgatctgtgactacaggtgccttgaacccctgggctcaagcaatcctgcggaactctaataaaataatgttaattgagtgaattaattaatgaatgattaattgaataaatagcccatcctcagtcgcttgaattgcagcgagccaagatcgcgccactgcactctagcctgggcgacagagggagactctataaaataaagaaactgttctaagatatgaatgacactttaataaaggtgtgggtgtgtactcacatgtactga

SEQ ID NO: 1694 - DNA, 304 bp, Homo sapiens
  source 1..304: mol_type = other DNA
tgcccctgtagtcccagctacctgggaggctgaggcaggccccgagccactgcactctagcctccttagttaaacaataaattcaattgaagggtataagggcttgttgaattaaaattctaagaggagtctcactctgtcccccaggctggagtgcagtggcgcgatctcggctcactgcaagtagcggggatggccaggctggtctcgacccttgagtgctgggctaacaggcgtgagccaccgcgctcggccgatcccgacacttttttaaaatgccgaagccggatacaaatttgtttgg

SEQ ID NO: 1695 - DNA, 364 bp, Homo sapiens
  source 1..364: mol_type = other DNA
gcgcctgcagtcccagctactcgggaggctgagccgagatcgcgccactcacctgtaatcccagctggtcggaaggctgaggcagggccgagatcccgccactgcactccagtctggacgcccagctactcaggaggctgaggcgggaggatcactggagcctgggaggttgaggctgcagtcagccgtgatcgcgccactgtgctcccgcctgggcagcagagtgaggctctgcgcgaggtggcacactgggcttgcatacgaattccctttcccccgcctccagggggcgtggcaacaaagcgcggggaccttgaccccacccccactccatgctgggggcggggaaaaggggggcggttcc

SEQ ID NO: 1696 - DNA, 258 bp, Homo sapiens
  source 1..258: mol_type = other DNA
aaacctgttttgggagtttgatcattccacagataattatggagcttctgattcatgcatcaaatatttactgaactccgtcactgtgcagtgcctaggcaaacgaaaaagactaagaagagttcttggtggtattaactcccgcagagagttctttcctgggttaggacctgccgagccaccgtagggactgtcggccaacccgcgcgcgcccacccgtggactcgtcagggcgtgaggacccacctcacgtgacca

SEQ ID NO: 1697 - DNA, 313 bp, Homo sapiens
  source 1..313: mol_type = other DNA
gaccttgaccccacccccactccatgctgggggcggggaaaaggggggcggttccgccccgtccacgccctcccgcagagggaggagcgacgggtgaaccgcgcgggccttatatggcgcgaaagtgaactgcagcttcaagcttcgagcgtagggagcgaggggcggagacgcacctgggtgctcccccttccagtaggcaagctgggaagcaggctggcttctttctaagcgatcttcagagggcctcggccccttgcccaatgagcataagaggctgtgcgccgagcggcagggccaacccagtgcgggg

SEQ ID NO: 1698 - DNA, 325 bp, Homo sapiens
  source 1..325: mol_type = other DNA
aagggattgtgccctccaagccttgccctgtccagcccctccctggagggctgggcatatgcaggctgcccaggcaggttgggacctcggaggcagaaccacggcctcgagtcgggcctctaacggcgagactgacgcggttggaccgcgccacctgatttactaaggattgcaattacggtaatttggttagttactcaaaccgtttacatataacttgcatgttaatatacttctggaagtatgcatatgtccatactgactccttagattactatggaatcggtagggtcctgattgtggcagcctgaaggccccctcaggc

SEQ ID NO: 1699 - DNA, 229 bp, Homo sapiens
  source 1..229: mol_type = other DNA
gcttacagtgaacttctcagcggccgccggtacgagcccggcgccttctgtctccgggtggcagcagtgacacgagccggctgggccaggaccttggggctgggctggagtgaaggttgtagctgtattttcaacagcttgcacgtgcccggaatctgggaccccattcccctgccgggtttctgacgcccagcgcatgagttccgccactttgcagaaaccggggatt

SEQ ID NO: 1700 - DNA, 299 bp, Homo sapiens
  source 1..299: mol_type = other DNA
agaaagcaacaccagaggcccatttgcatggcgtgttttaagggattgtgccctccaagccttgccctgtccagcccctccctggagggctgggcatatgcaggctgcccaggcaggttgggacctcggaggcagaaccacggcctcgagtcgggcctctaacggcgagactgacgcggttggaccgcgccacctgatttactaaggattgcaattacggtaatttggttagttactcaaaccgtttacatataacttgcatgttaatatacttctggaagtatgcatatgtccatact

SEQ ID NO: 1701 - DNA, 155 bp, Homo sapiens
  source 1..155: mol_type = other DNA
ggagtcataaccttaaaatgtcttaagtaagagggttaagaaggagtgcagaactatggggatgcaaatgcatttgcaactcttgcttacagtgaacttctcagcggccgccggtacgagcccggcgccttctgtctccgggtggcagcagtgac

SEQ ID NO: 1702 - DNA, 317 bp, Homo sapiens
  source 1..317: mol_type = other DNA
cctggctgatgggcccacagtcccgggtgcccgtgcgcaggcttcaagcacttatgcacatgtccacacaggcgtagatcacgtgcaggggcagcggctcacacctgtgatcccagcactttgggaggccgacacgggtggatcacctgaggtgaccagcctgtaatcccagctactcggtgcagtgagccgagatcgcaccactgcactccagcctgggcaagagtgagaccctgtctctaaataaataaataaataaataccctaggccacttgagagtatcctggccagctgccctgagtagtttactctgggc

SEQ ID NO: 1703 - DNA, 317 bp, Homo sapiens; identical to SEQ ID NO: 1702
  source 1..317: mol_type = other DNA

SEQ ID NO: 1704 - DNA, 227 bp, Homo sapiens
  source 1..227: mol_type = other DNA
ggtcttgaggattacaggcatgaccctgattctttcatgtgggctttttgataatgatacaaaaggaacatctcctgtaatcccagcactttgggagtccgaggcaggcggatcacctgagatccgctcccagctactcacgagaatcgcttcagatcgcgccactgcattccagccttctggtccaaactccacggtgacactgaaggatcacttccgcttccgtt

SEQ ID NO: 1705 - DNA, 474 bp, Homo sapiens
  source 1..474: mol_type = other DNA
aatatttgtgtattgcttaaatagcaaacattttcaaatattcaaggaaaatattacatttttataatctcagaaggcaataaaggacaaaatttcttagctacctgaaaagaggtagtttttgtgagtggactaaccaatttctttgagccaaccttgaggatcaaaatggcttttaaaagttgtgtctcaatgacagttgttggtgccactgggcctcaccaccttgagtggaaagtgggggagcctcccaacacttccttggaaactcttggcaagtaaattggggaatattttctttggaagctcatttttctcaccaaaatttagatatagcttctgaagctaattattcttttttcattacaaaaaatgttttcctttatttgcccgggcacagccgcgctccgtatccctccgcggggcgagagggtcggtggggggagtcggcgtctctctcccccgcgccagctc

SEQ ID NO: 1706 - DNA, 395 bp, Homo sapiens
  source 1..395: mol_type = other DNA
ttgaggatcaaaatggcttttaaaagttgtgtctcaatgacagttgttggtgccactgggcctcaccaccttgagtggaaagtgggggagcctcccaacacttccttggaaactcttggcaagtaaattggggaatattttctttggaagctcatttttctcaccaaaatttagatatagcttctgaagctaattattcttttttcattacaaaaaatgttttcctttatttgcccgggcacagccgcgctccgtatccctccgcggggcgagagggtcggtggggggagtcggcgtctctctcccccgcgccagctcagggaggcttcctttcacccttggggagacgagctttcaacggttttctggcgccgggtgtaaggtccctttaaggc

SEQ ID NO: 1707 - DNA, 467 bp, Homo sapiens
  source 1..467: mol_type = other DNA
gtgtgtatataaagagcacaaataaacatagttctgatttcacatttggtttgaagcaaatatttgtgtattgcttaaatagcaaacattttcaaatattcaaggaaaatattacatttttataatctcagaaggcaataaaggacaaaatttcttagctacctgaaaagaggtagtttttgtgagtggactaaccaatttctttgagccaaccttgaggatcaaaatggcttttaaaagttgtgtctcaatgacagttgttggtgccactgggcctcaccaccttgagtggaaagtgggggagcctcccaacacttccttggaaactcttggcaagtaaattggggaatattttctttggaagctcatttttctcaccaaaatttagatatagcttctgaagctaattattcttttttcattacaaaaaatgttttcctttatttgcccgggcacagccgcgctcc

SEQ ID NO: 1708 - DNA, 487 bp, Homo sapiens
  source 1..487: mol_type = other DNA
ctgcagctggtatgagcggtcctgcagtttgcactaactctgaggtaaatttacaactgagtccctttcagtttagaacgaaggtcattcaatattaacaagagatccttgctctaaatgatgaaaatgatttttaaaattatgttattaactagaaggtgataaatattacatagaaaggacagaaagggccctggccggcgattcccttggagtaaacgggaggcactctggccgacggctcccgggatcttggccggcggtcactcgcgaccatccgcgacgccgcctccgcgcccctcgccgccccgccccgacgctccgcagcccgtgggtccacgtgacctggcccgcccttcgcggctggagaccccgggtcccggtccccgcaccggaggccccgccccctacgggaagcggaccaaccggagcggggaaggcggggcgggcactgacggcccgcgggggtggagctccgcagcggagt

SEQ ID NO: 1709 - DNA, 484 bp, Homo sapiens
  source 1..484: mol_type = other DNA
gacataggacccagtccctaactgggaggtagggacattgagctggcccttcactagagcctattgccagactatcccttcaggagtgggtcagacctcctgtctctgtggaccacagccaagtgacgagcagctgggcggggacgaagctccagggtcctgcttggccaacctcaagatcccagcctaggcttgggaaaagtcaaggctcatcctaagctgactgggcctcctgggcctcttgccaaggaagtgcacctgccagactggcttaggccagtctgagtgagtggaggaaaggtttactcagctccacaaagcaggaagcttttgcaggttccaactcctcatccactaggagcaggcagcctctgaccaacactgatctcaccgatggggcatgtcccagacccattggcgaaaccgcgaactgggggcgcggcctatcttcagccccgcccctgatgggcctatacaagggggc

SEQ ID NO: 1710 - DNA, 270 bp, Homo sapiens
  source 1..270: mol_type = other DNA
cctgcctgaggctgctttacagttaacttaaaaaaaaaagtaattctgtaacatagttcttaccattatcaagtattatgtactgtacataatcatatgtgctaaacaccagcatcactccaaacatgttatgtggcacgcacaataactgggccttagttcctgatacttagtagtgcaacataaatgagttgatataatttaagactgtgttgaatcacaaacgttaagttattctaacattattgtttttgggtgcaggcccaggcc

SEQ ID NO: 1711 - DNA, 190 bp, Homo sapiens
  source 1..190: mol_type = other DNA
tcaatttgagtccaactcatgtgaacagtaagatgctgaattaaacggtgtcgtgagagcgcccgcggcgccgcctccgcggcctccctgcccagctatcgttggttccttttctggaaagggctccccagatgccggcccaactcctgactggggagtagaccagctgctctccctctccagggtagag

SEQ ID NO: 1712 - DNA, 163 bp, Homo sapiens
  source 1..163: mol_type = other DNA
tagaattctcctttattagcttaaatactgcagtataatgattaagggtcaggctcctcctggagctggcaaggaaaagtgagagcatcattcattctccggtctcagccgtaccggcgcgccgcaggcagcactggcgggggcctttcctgccgccgacgcc

SEQ ID NO: 1713 - DNA, 288 bp, Homo sapiens
  source 1..288: mol_type = other DNA
gcgtaggcctgacccgtttcctcgaatccccagggaagggtgggcccctggcgcccctatggcccgccgcccccttaccaccgcggtcggagcccgggtctcactcaagagtgggtcctcgctctctgcggtcatgttttccagaaagaaaacgagcatcgcccatcatgaggctgtggcactgtctttgtacaaagacaccctctcatgcctcggtcccagctgctggagcgcagaacaatgcagcagccacgtcgctcaggcggggaagtggcggctgaagcgccg

SEQ ID NO: 1714 - DNA, 422 bp, Homo sapiens
  source 1..422: mol_type = other DNA
ccctgagtagctgggactacaggtgccctcaggtgatccacccaccttgggctcccacggcccacataaagtattttgtgaggattagattatccacatgacacataatagtaagcactattattatgattatgagtatgatgatggtgatgatgatcattatctacactccaatttcaaggaaagagtggtgggacagccccccaggctgcaccacactgggtatggctgttggcagtccacagggtgtcaggtggcacatgccaccactccccagccaccctggcgggtggaaacagcttttaccgcgtgtggggttttaccctgccccaggcccagattggccacgtggggcgcctgtcatcctactcactgcaccccttgggggtggggtggggggttgtcacttggccacctgtgtg

SEQ ID NO: 1715 - DNA, 313 bp, Homo sapiens
  source 1..313: mol_type = other DNA
gctgtttaccagctgggaacgagagcaggaggaggtgccagggagcctcttgctgcagcctggcccctggccagttgggcccccaggatccccagaagcctcgtcctcttggcccccttcagagccttcactgcaggcctcagtgtgggccactagtctgactgcacctgtcttaggtagaaattgttcttgtgtgagtcaaaatcattaatgctgtgaatatttacacaaagtaaaagcatggatttacagcacacagtaagtgattaataaatgctagtggcctgctggagggccaggtgctccccctgct

SEQ ID NO: 1716 - DNA, 334 bp, Homo sapiens
  source 1..334: mol_type = other DNA
cctgtaatcccagcactttgggaggtcacctgaggtcaggagttcaaactaaaaaaaatatacaaaatttagctgggtgatcccagctactcaggttgcagtgagccgagatcacgccattgcacaccagaaaaaaaaaaaagaggtgtctaaggctgtgagttggttttctttttagtgcggtggctagatctcagctcactgcaacgtagctgggactacaccgtgtgagttggttttctgagtcacaaaatcataccagagttttcagagtccggtatacactgcaccctccccaagcactgggtggggctcctagaccagctaaaggcgc

SEQ ID NO: 1717 - DNA, 435 bp, Homo sapiens
  source 1..435: mol_type = other DNA
tttgcattatctgagtaatgggaatactccaacccggttactgaattcgaagctcagaaggtatgcgcctagtattcccaccgaatacgtaaaatagttacaatacctgttacgcgtttaatttaactgtcagtttacataacaaaagagtcttttaaaaagcagcttttcgatcgtataaatgctccgccccagggacttcagtcttccgggggagggataactacttggggacacggagcactgcgtacgccctgggtcctccagtcggcgcgcgggttccggggctgaggggctgaggggcccaaggcgataaccgggatccgctccggccgcgctcctcgaagtggcccggctgcgtccaccccaggggttaactcgcacgcgcgctcttgtggcggaggtagagtgcgccgtccagggctagagcaagcg

SEQ ID NO: 1718 - DNA, 361 bp, Homo sapiens
  source 1..361: mol_type = other DNA
ccccagttaatagtgtaggcttaaaattacctactgacaaactgctggagttgttcagaaaaggcaaaatatctaatgcattcaggtcattcgagtatctctgcgagactctgtctcaaatttgcattatctgagtaatgggaatactccaacccggttactgaattcgaagctcagaaggtatgcgcctagtattcccaccgaatacgtaaaatagttacaatacctgttacgcgtttaatttaactgtcagtttacataacaaaagagtcttttaaaaagcagcttttcgatcgtataaatgctccgccccagggacttcagtcttccgggggagggataactacttggggacacggag

SEQ ID NO: 1719 - DNA, 492 bp, Homo sapiens
  source 1..492: mol_type = other DNA
tgagacagagtctcactctgtcacccaggctggagtgcagtggtgcgatctcggctcactgcaacctgacaaggtttcaccatgttggctaagctggtgttgaactcctgacctgaggtgatccgcccgcctcggccggggtaaatcccctgttcaacaaagggtttgtgacgcccaccgcaccctccctgcggcacctcgcgggccggtggggcgggaagcccggcttctggggaggtgccgcccctccactggcgcaggccgccgagacccccaactccctgcagggtcatccagcaagtacggttacctctggttctgcgccagcgtgccccacccgcaggacggccgggttctttgatttgtacactttttctcgaggcctctgcgaggcgggtccgggagcgagggcagggcgtgggccgcgcgcccggggtcgggggagacagggctgggggagcgccctgccgagcgcccgccaggctcctcccg

SEQ ID NO: 1720 - DNA, 771 bp, Homo sapiens
  source 1..771: mol_type = other DNA
ttatgaaaatagtcatcatttcaagctttgttgttgtcattaactattcttacagtatgtgaatttcaggtattcacctaagtaagaatcttacagataaacatatgggtattttgctgagaacaagataacaaaaattttgctgataatagctgttttattaaattaacattattaaatttgtcttacttattaaagttacacaaagatcattttatttttagactagatatacagttttataaactttgtgtcaaaagagagacaaatataaaactgtctaatcggtaaactcagtcaaaaatatatgctgacaattctgaagacatttctatttttattttatcaacagaattaaaactagcatatttatcaaagatttatttaagtcacatgaactaaaatgcatttgggttagttactatatattttaacaatttatatgagcattcacttatctagccaatctgaatagaatttcttaagggataataaatgtacatatgtgtaggcacacctaaacacaaagattttgtggcttttattttaggattttattcatgagacagtaaaacatagtaatacaggaaaagttaaatattaaatttgaactcaattaaacatgaacacagtcctggaacaggttgtttgagccatccagcgctgtttcagaaaaatctctatttcaatctattcctgtacattagttattgaaaaacaacagacaatcacaaaaacaggttgacctttttgtgttcctaagggccctcc

SEQ ID NO: 1721 - DNA, 462 bp, Homo sapiens
  source 1..462: mol_type = other DNA
caggaagatcttgaagatgaaatccaagttgggttttcctggcaacggaggattccccaggtctgctcattcctttaggatcattcattcctcccaaggcctcccttgggaacaaaggaaaaccccagagtttgggattgggcttttccaccaacagctgctagtagtttgtatttaaccctgagtcacaattaaacctaggaaacacttaggttttctctaaatttattccagaaaattcttctaaaggacttttcaaggaccacagcatactgccttggaaacttgagacagagtctcactctgtcacccaggctggagtgcagtggtgcgatctcggctcactgcaacctgacaaggtttcaccatgttggctaagctggtgttgaactcctgacctgaggtgatccgcccgcctcggccggggtaaatcccctgttcaacaaagggtttgtgacgccc

SEQ ID NO: 1722 - DNA, 209 bp, Homo sapiens
  source 1..209: mol_type = other DNA
ccgagtagctggaactacccaggcggctggagtgcaacggcgcgatctcagctcgctgcttatctaacctaaatgcccagaatgagctcatacatgggaaatgcaaaacttataattctaaaaagtcaaaaatcttcatctgtggttagcgccggccgcggtcccaggcccagcccgggaggcggggaggggcggggcaggagaggctc

SEQ ID NO: 1723 - DNA, 384 bp, Homo sapiens
  source 1..384: mol_type = other DNA
tggtcttgaactcctgacctcaaggttcttacttctacaagttatttacaagatgaatcaaaagatagatggggttaaggcctcacatgattcctgtaactctacaagttacttattagttgagtaacaccagctggtgaagtcacccccctcgggcattgtggggcaatatctaaatcagagttctggctgctgaggtagcaggactgagaccggggctggaccctgactgagacccaggagccagcagcctctaggcaactcagacatcagggtgggtgagtcacttcctgggccgtggctcagggcctccactctgctccaggcctaaaattctgctcagaggccagcctggcttggaggagtcttagagagggtacgtca

SEQ ID NO: 1724 - DNA, 499 bp, Homo sapiens
  source 1..499: mol_type = other DNA
cctttgacaaggagtgttttaaaacatactctattttttaaaaatatctaagaaaaccattgaatctaattcttattttattaaatattctctactaagaaggacccagatctaggagacaattaaattcccctttacagggagaacacagtaatatagattattggtttcaagctccttgtatagtaaaaatgtctttagaaagcaaatatcaatcacgtttttaaaatcaaggctttgcacaccaagcaagaatttttttttttttctaactctgcggagagcaaagcattgaaacatctgaatcaactggtatctccacttttgtcactaaatgggggcctttatttttaaacacatgattgacacccatctctcaggtttgggtcaaatatcagatgacttatgaggtccctgccagcactatgatttgtcagacagaaatgtaattcttttgatgcatctgaagctaagatttaattgaaactgcctaaaagga

SEQ ID NO: 1725 - DNA, 437 bp, Homo sapiens
  source 1..437: mol_type = other DNA
acacatagtaagtaatagttagtgttattaataataatggattaaacgtagaaatacaggtgagtctgctatgtccctcaattcaaactttttagtagtaagtcttagaaggcttaagtggtagaagttgcaccattggagcttaaatgaaaaaataatagtaattcaaaataagttaataggttaatagccaaataaaaaggttagtctaaaagaaacctcttccaggaactatattctggccaaataaatagaatctctagttccaactttgacatatgtttgtaagtgaccacatagatagcattcttcagtatgagctgactgttgccctctattagtattggcaagtgacatatattgtctttaattaaataagctgggctgagctgggctgggaccagagtgattcaggcttaaaacccctataaatagga

SEQ ID NO: 1726 - DNA, 451 bp, Homo sapiens
  source 1..451: mol_type = other DNA
ttatcaatattttctaatttttatattaaacaataattgtatagtaaaacaatttttaaagattacaatatagtatgattgatacaacaataaatatgaatatcttgagtaattcaggaaagattttctatgggaacctaaattggagaaaaaatatgaaataacatatcccatggtatattgaggttgaaatattactagttaattactgttgataccatgctaacaagacgcatttcttcctaagtaagatggcctggagccattatttgactagatgatctttacagtccttttaatcatcaatttttgacatttgggccatgatgtttaaaatccacacaatttgttgtcaatatattgtgctagatagtttgatgaatacaaaggagtaaattaggacatctcaaaattagcaactcctccctaagagggaccattattccctcta

SEQ ID NO: 1727 - DNA, 452 bp, Homo sapiens
  source 1..452: mol_type = other DNA
cttgagacacccagtgtgtgagataaccatgggacatccatatggagatgcaatctgctcaacataacagtgtgtatatcataccctgtatatttatggataaagtaaaattacactaatgagtcttgcctaattaaactcatgtagtgatcaccactctgctttgaaaaattaaaattaaatttgcctatcctctactgtttctagaagaacatagattaaaaaagaacatatatgtagatgcttgtgatgttttcctatcataaattgaatttcaagttcttataaacgtattaatatgtcctactcttctagagacaaggatcaggaagtgtatttatcaatagatatttaccaagtaatatgtaaacccaaatttggaacttgctgaaacaagtcagaccatcccacagagggtggctcctccctgcatggggcctgctataaaaggg

SEQ ID NO: 1728 - DNA, 449 bp, Homo sapiens
  source 1..449: mol_type = other DNA
aatgaggagttaccacatgatcatggtaagcctttttttacaaaatgctacctacccatagcatggggtggggaaggtattaactttttttgttttaattaaaaatgagaccaactttaaagagatgaaactggctttcttgtgtctcatacactaggtgtgaaaggcacttacaaaaaatgttctaagtaataacagttctaagtacctctcagagtggctactttgtaaaagttaacctcaatagatatattcttgaacatttatattaaaaaaggaacaagatcagcctgttcaacatggtgaaggcaggcacctgtaatcccagctactatcgcaccactgcactccagcctgggcgacagagcaggttggatgaatcaagccttcccatagggcaggatatcctgtctaaaacaagagccttggttaaaacccctataaaaggt

SEQ ID NO: 1729 - DNA, 273 bp, Homo sapiens
  source 1..273: mol_type = other DNA
caattcttaaaaattagttattctgaaaacactatctataagaacgccctagggagagctgactagcctttcttcctgtctccagtgacagagagaaatcacccctggggttcccaaaggtggtctgccctggggagcctaccaagtagatgactacatagaagggcaggggttccagacctccctgcacctgtttggaaaggcacctaagtccacctacaatgctacctgagtgatgaatgtctctaacctgaatacttcttataaaaaggt

SEQ ID NO: 1730 - DNA, 430 bp, Homo sapiens
  source 1..430: mol_type = other DNA
ttgttgggtcataaaagaagtatcattaaattttaaaacactgaaatcagaaatgtcttaagcaaccaatgagttcagaatactttgagaatggcttaataaagattaagtttgtagctgcattattcacaataaccaaaaattggagctaactcaaatgtccatcacttgatgaatggttaaataaaacgtgctaaattcataaagtgaaatattactcacatgctacagcatggataaatcttaaacaatatattaagtgaaagaagctaatgcaaaatgccatatattatatgattctatttatatgaagtgtccagaataggcaagtccatacaggcaaaaattactttggcctgaagctgtcacctcccctggttgtgaaagcagcagcatgcccagcctgtgcatcacacaccctgcacaggat

SEQ ID NO: 1731 - DNA, 568 bp, Homo sapiens
  source 1..568: mol_type = other DNA
tttgagaatttaaaaaacattggccgggcacagtggctctgtaatcccaccactttcaggcgcctgtagacccagctgtgcacttcagtctggacgacagagaaaaaaaaaattcttgaaccaagtccttggtaagatttgtgttttacaagccttttgaaaagcagaagtttttaattttgatgaagtcctatatttcttttttgaattgtacctttttggcatatctgaaaaattttgcataacccaaagtcacaaagatttattatgttttattgcagaagtttcatagtttaattttttaaattatgatctattaatttttatatctagcattaggtatgatttcttttacatatggacgtccaattatttcatctctatttgttgaaatgactattatttctccagtcatgactcaagaaagaattatgtcatactaattcccaggaaattgtaaaggacagactgtgctccacagcaaagtgccaaagctacaaacctagtcttgggcgtgtgccttgttgtgaaagcagcagcatgcccaggctgtgcatcacacaccgtg

SEQ ID NO: 1732 - DNA, 619 bp, Homo sapiens
  source 1..619: mol_type = other DNA
ttctgtcaaaataaggagtgtttctgttttcctgaatggacacagactgatacaaaaaagaatatcctgaaataataatgtacttatttcattttgcgaacttgtaacaattttactggcagaaaaatgtgacttataaagtgaaaataggtctatatagttcaaaagcaattgtacctgacgttttaagaaatcgtagatatttatactatttcttgctagcagaaagtcattgaaatgtcaaatgtttaagtaaaatgtaagagtaaaacatagtttcttaaaatccagttcttacagaagaactttattcaatgaatgaataggatcccttattttgaaaaaacatttaaaaaaagaatcctctttaaaaagttacagttaatatatgtttttgaaaagagaattaggaagaaaggaaacttatttatttatttccaaggaccatagagtcttgagaaaccagattcttgtctcaagggtcaggaatcctatagtcccagcctaggaaataatatactttgatgagatttcgttctctagcttcagaagagtaactcagtatctccctggcttcctgctccacccagaaccatggctaaggcccagtcaggcgagt

SEQ ID NO: 1733 - DNA, 522 bp, Homo sapiens
  source 1..522: mol_type = other DNA
tgaaacacatatttattaagggtctattcttatttaatattcaaaacagatctttataatggccattacatatgagaactgatactcatagtgagtatcataatgacactctagcaattgttgataattgttctagctacttctataggttaccaagttatcatatgcaagtttcctgattccggcaatggattcaatacaattgcttcgactaaaggaaacgtttagatattctcaatcattctccttgctctaggagacagaatcaactcagatttaattcagtgaaagcttgtcatgatgagtcctgtggctcagagctgatgtaacctcagagaggaacagaaccatgtccaggcatgggtgccttgggttccctaagttaaccccacctgctggaggctctgactggctaaagcctctctagaccacagccccagagaggagtcctagaagctcccgaggcctctttgggtacccagcacgtgcctggttgtgcaagagccacctcctgctcttccc

SEQ ID NO: 1734 - DNA, 530 bp, Homo sapiens
  source 1..530: mol_type = other DNA
tatccaatacatggcattagtttttctattaaacatatatttattaagggtctatcaggcacaaaatctctttcttgcttctcactttatattacaaacagctcagtgagataggtatatctcactgataggtttataatgggcattatatgtgagaactgatactcacagtgagtatcatagtaatactctagcaattattgataattgttacagcaactttcagagattaccctatcattagggaattgtttattctcaatcattctccttgctttaggtgacagaatcaactcagatttaatccgaatctgcttgccatgctggatcaatgcagggaacagaatcttgtccaggtgtgggtcccttgggtaccctaagttaactctttagggttcccacctggtggaggctctgactggctacagcctctctagactgcagccccagagaggagtcctggaagctcctgaggcctctttgtggttgtgcaagagccacctcctgctctttccagagccaagcctggg

SEQ ID NO: 1735 - DNA, 561 bp, Homo sapiens
  source 1..561: mol_type = other DNA
taaagtatccaatacatggcattagtttttcttttaaacacatatttattaagggtctatcaagcacatagtgtcacactaagctctttcttacttctcatttaatattaaaaacagctcagtgagattataacggccattacatatgagaattgatactcattgtgagtatcatagtgacactctagcaattgttgataattgttgtagcaatttccagagatcactcagttatcatatgcaagttttctgaatacaattcctccgactaagggcaatgttttgattttagagggaattgtttattctcaatcatattctttgctctagaccacagaatcaactcagatttaatccactgaatctgctgctggatccacagggaacaggatcttgtccaggcatgggtcccttgggtaacctaagttaactcattagggttcccacctggtggaggctctgactggctaaagcttctctagaccgcagccccagagaggagtcctggaagctcctgaggcctctttgcccagcacgtgcctggttgtgcaaaagccagcc

SEQ ID NO: 1736 - DNA, 561 bp, Homo sapiens
  source 1..561: mol_type = other DNA
gacaagaaataattagacttctcaaaatcctgaatgtacactgtacattagcctacctatatttttaaataaaattttcaaagacagggactgaatattgtccatttttgttcttttaaaaaatgacattgtttaagtgctcacttgatggaaccaacaatttagattgtctatatatagtctttgaggtcactgggctcataaacacagagctcttctgattccaattcaaaaaactattggcttattttaaaaactgccttgttacacagtagacattttaatttctaagtgaagaagtttagtcacaatgatcatcaccaccagattatcctcctagcagggttctgcctagctgtggaagcagggcatacttccacaggaaagctatggcatttgtccaggcacaagctccttaagaatcccctggcagctccacggggaccagcctggggggggctgtgactggttaaagctcctttagacccccttcccagagggaggtcttgggagctcccagtgcttccttggattacccagcacgtgcctggttgtgcaaga

SEQ ID NO: 1737 - DNA, 468 bp, Homo sapiens
  source 1..468: mol_type = other DNA
ttgtgcaggcatccacttgctcagctcaggatggggaggcagcaggcacccatgactcagcagtagtttaaacatcattcttggatgaatttttttttattatactttaagttttagggtacatatgcacaacgtgcaggtttgttacatatgtatacacgtgcccacaacaatcaggaaggaagatttaattatctctcttttgcagaagagtaatttgatactcagattgtttataacatgggatagagttgcctctatctttgaagtaacttaaattacttcaggttagaaaacaatcatcttttaggagagaagatacctttgtcactcctcatctcccgaccatcaggaaaataagaatctgctattcatagtcctgaggggcaggcacacagggagggaaccagctgctggaatgccagcccggttgatgcaccaggcggatgccaaccagctgtctcatga

SEQ ID NO: 1738 - DNA, 475 bp, Homo sapiens
  source 1..475: mol_type = other DNA
aaaggagtcaagttaagtaattttcacaagtatacacagccaagctcttaaatataatggaatgcatcaagcattttttttttttttaaaactctaagagattaaatgttttaggctttgggaaccatagcatctctacttccattttagtgtgaaaagtaccacagacacaatcaataaaataataaatgtggctcattatctaagtcagagaaataaaactttatgaagcctgaaatttgaatttaatataatttttatatgttgtaaaatattttcctcttcaatttaaacgcattaaaaatatccaaatcagacagcaggcagatttgggctgcagacagaagctcctatctagcagcaggtgccctcagcctggggagggaggcaggtgaggagctgctagtcaccacctatcacaggtatcagggggcaagtcctctcatgcccaggccctgtctcaccacgctgggat

SEQ ID NO: 1739 - DNA, 312 bp, Homo sapiens
  source 1..312: mol_type = other DNA
ttatctcaattttcatgaaagctaaagaagaacttttcactctgtggaaggcttttccacaacggtgtaccctctgctcagcctattgtgtaaggtgactgaaacaaaatgagttgttttttgaaacacaaagtcttttctaatggcacatagactgtttcattcaacaaatactaatgagtattttctttgtgtcagaaggtcttcctcagacccttctgaaggccccagccacctgcagatgcctttgaaccacatcccagctacatgtagctgaggaatctagcactgggaattgtgaaatacctggag

SEQ ID NO: 1740 - DNA, 805 bp, Homo sapiens
  source 1..805: mol_type = other DNA
aaagtatttgaaggctctcagagactattagagattccatgctttgttaataggtgttctgtgaaaataataattacaagtgataattatcttcacaaatgttgtaaacaatataagcatcattgtgataaaaataacacatactaattttattcttagcatacaatctgcatttaagaaaacaacatgcctaatcagagaaggccagaaagtcactgacaaattatctgacctgggaatactcacctgtaacttgggcatgaattcgcatgccttgatgtagtctaatggaagggaaaaactcatcaatgcaatttatcttatttttcaatatcagcatatacttgagatactattcaacgttagtaaatatgattaactttactacacacatgtattctgctttgatgtgttactgagaaaataaatttgtgagacctttgcatttttttctcaaccataatacaaaggggccgttatctgtatttctcgaacaaagttaaatgtattatttcattattaaatttaaaatatgacatatattgtgttcaaataactttgggaaatgtagttctagagcaatgttattatctattagtaagcaatgtgtatacttttatttattaatgaattatctgcacatattactatataaattttaagtacaatataacagaaaacaaaaaaagaaaattttaaaagttgggacgataattagaaatactactttgagtcatggaaccctctgcagggcttggggccaacaacatggtttgcatagtatgaggtgttgttacacaccaga

SEQ ID NO: 1741 - DNA, 307 bp, Homo sapiens
  source 1..307: mol_type = other DNA
acaggggtcagaagcctctgaatgtttatggcaggcatgcggaaagagtaaacataatgaaatgcttctctcttatcattattttagtcaattcactattcaattgattcagtttcagaatcttttatgtgccagacactggcttacctacctaggtaggtgaatccatttctggatctgaaaaatcattattatcacatggtattgttggcatattgaattagatctttgagaatgggaactacatcccattgagctacacgggagctttctttttatctttcaggaaagaaaccaaagagacaga

SEQ ID NO: 1742 - DNA, 499 bp, Homo sapiens
  source 1..499: mol_type = other DNA
gagagatgtgctcaaatccccactctgaaagatttcttaagctatttctagagtatgatttacaacaggaaatggatgatttgattctgatctttataccttcatgcatttaaaaaagtacttaagaaagtagtttggtttgtcattataaaaagcaatacttatttttatattgtgtgttcttatgagcatggcattcctgagaacttctctaactgcagcctcgggcatagaggctagcaagaggactcctagaagccttctacttgactctacttgtaaagtcaaactaagacagagtttatttccacataggatggagttaaaaaatatattcaactttccatttcatgcccttgaaagtgaatcttttggcctaataatgagaacaaactcattttgaaagtggaaaaatatcctctggccaggcaggagctgtgtgtccctgggggtgaaacctgtccatcaccttcaacctggagggaggccaggctgcaga

SEQ ID NO: 1743 - DNA, 405 bp, Homo sapiens
  source 1..405: mol_type = other DNA
tgtatttagcaaataaaaatagagcctgcccagtgaaatttgaatttcatatgaactacaagtaatttttgagtatgtttcctgcaatatttggaatatacttatacttttaaaatattctgttatctgagattcaaatttaactgaatgtcctgcaactcccaatgggcagatggggacagcacctgctgggctgaatcatccagatctgaattcaaatcccattcatctgcaaaatgcagcaatttgcagaaaaagggatgttcacatttttgtcagaattaaacagctccttcaatttgtactatatttaaaagatcttgaattgagcaaacaccttccctgggaggtggtaatcaggaccacaccaagtgcccagggcaggttgggggccctataaaggct

SEQ ID NO: 1744 - DNA, 185 bp, Homo sapiens
  source 1..185: mol_type = other DNA
ttttctaaattattctgaatgctctgagacaatagacaaggagggcccacctcagctcctctgctccccctcccttccctattcatgtgtgcaagagtgccctgtcccacagaacagactctccctcaaggcaagccctgcacctgggtctgaggatgaggccagtgacatcattttcagaaaag

SEQ ID NO: 1745 - DNA, 272 bp, Homo sapiens
  source 1..272: mol_type = other DNA
acacatgcctgagactcttccttcactcctggagaagtcagggctgagccacaatgtcggttcacagtgaaagcaacttatttccaaagcaggcattttgcctttgaaaatcagatgattcacttattctgcaaaccagaaatgcctattgttatttccggcccaggccaagaggcctggctcgttctagtcctaggagcataaaagctggaatgaagttagagcagtcttttaaaaaatccaattttcttaaggcagggctcattttctat

SEQ ID NO: 1746 - DNA, 343 bp, Homo sapiens
  source 1..343: mol_type = other DNA
tggttgctctacaaacattgaaggatagtttggattttccaaaaaccagcctcctttgttccttctgcagagaagggatttcttcaggagaaaaggctttttagaaccgaaataatcattttagtttttcctttcccctgccaggcggattaacagaatattactatttttcacagaaatacctattgtttatctctacatccataagtgtcacctgtgctgaggattagactcttccagaagataggacagtttctggttccagcagtgccacaagtttcatcacaaaagttgagtcaacaggtggatcctgtttccttgaggcagggcttgttccatgcat

SEQ ID NO: 1747 - DNA, 506 bp, Homo sapiens
  source 1..506: mol_type = other DNA
ctaattatttacatatgataatgtctatgcagctttctctataggatgttcacagggaaccatatatgcatggttccatacatagattttgagtcaatacttgtaactttctctccattactttttataaataaaaaggctgtagtacacatccttgatggcaccaagtagctaggttttatctgagaatagcacaatgtggtcagcctgcaaacccagaggtgtcccctgtttataatcccagggaggagaggtgacatgcctgttgtcatggaacttagcaaagaaaaagcttagctcaggcctttgttaagtctctcctggccaactgtaagtcactgaaactgagatctaaggcaggttctctgttggggagatcccagaacaggatatttcctagtttgagaatgcctctcatgccagatatggatacatttttgctggaccagcccagttttaggcagttccacttcccactgggtggggcagaacgtcctataaagagg

SEQ ID NO: 1748 - DNA, 417 bp, Homo sapiens
  source 1..417: mol_type = other DNA
aatgttttgggagattatgtaatatttaaaatattcaaattatactaaaaatgtatgtaaaatgtattgaacataggcaagtttcaatacatagattttgagtgaatgcttgcaactggtgtccaagagtacatttttataaataaaaagttatagtacagagactcgatctcactttggaatcaatgcctctacaaatggattagagaagacagttttaaaaaaatctagagcaaagaaaaggcttgagctagaactcaggcctttgttaggtctcgcacattggcaaattgcatgaaaatatctttgttcccaattaagaaaagtcactgaaactgagatccaaggcatggcttctgtgagtctcagaacaggatatttcctattttgagtatcctcaagggctctataaagaga

SEQ ID NO: 1749 - DNA, 386 bp, Homo sapiens
  source 1..386: mol_type = other DNA
acttctaattatttacataagatactgtgagtctatgcatcttgttctctatatgatgttcacagggaaacatacaggcatggttcaatacatagatttaaaatgaatgcttgtaacttttcttaatgtggtgaataagagtacagttttacaaatgaaaagcctgtagctcaatctggggccagaactcaggcctttgttatccttctagcacattggcaaattgtacaaggtttgctgtcactgaaactgagatctaaggcagggcctcagtgagtcagggcaaatccagtggaaagatcccagaacaggatatttcccagtttgagaatccctgtcatgccagtgggccagcccaccgtggggtagcaggccctataaagagg

SEQ ID NO: 1750 - DNA, 272 bp, Homo sapiens
  source 1..272: mol_type = other DNA
tgttttaaacttttattttaagttcaggggtaaatgtgcaggtttgttatatacttaaacttgtgtcataggttacatcaccttaacttgctgttataagtgaaacatgttacctgtaaaggtgctattatgaatagtgctgcaatgaacataacacattcatgtgtctttatgatagaatggtttatattcctctaggtatataccaagtaatgagtaatttattccacaatgtttgaactaatttacacttccaccaacagtgtatacac

SEQ ID NO: 1751 - DNA, 364 bp, Homo sapiens
  source 1..364: mol_type = other DNA
tagtcattattgaaagtgaaatattgaagttttcaacttttattatagatctgtcaattatttaaaaaatttatttcagtgtagcttcatatattaattggagttctgatatttagtgaatgtatgattataatagctatatcttcttggtaaattgatccttttatcaatatatgatcttgaagtatggctttacaaaatattagtttagaaaagaaataagctttcctgtattaggctgacttatcaacacagggaggagaaaaacaaattttcctttcttttatggtaggcggttacatagccatgtgtaatcctgagttatgaacctgttaaaatttgaccccttttaaaagtgtgtata

SEQ ID NO: 1752 - DNA, 355 bp, Homo sapiens
  source 1..355: mol_type = other DNA
agtacatttttaattccttaaaaggtctgtagtaccaccgaggggacttgattccactgtggaatctgtcctagagtctacaaatagcacaatgtggacagtctccgtattattctctcctgtgaacacacctacctgtgatcacaggactatagaactatgttcagtttctcattacttctagcaaattggcaaattatactaaggccataagtcactgaaactgagagctaaggcaggggatatttccttttttgagattccctgtatgggacattactggaccagcccattttaggcagttccgtttccccctgggtggggcagcaggccctgtgaagaggttctcagcctc

SEQ ID NO: 1753 - DNA, 377 bp, Homo sapiens
  source 1..377: mol_type = other DNA
gctatactttacttatttaggtaaaaacatccaaaatcctactaaatgtcatttcaaaagagaatgtacattttggatttctagtagaccacaagtcactcatgtttgtcagaacacacccaggttggggctgtcagcatctaggaagctgatatatgattttgtcaccctgttcaagtcaattaattgtcaagaaaagcctaagaggatatagccaggctgcaggatcagcacatactggtctctactaaagagacacaattgtcagacaatttgtcacgttctacaattgccactggcatgaggaacctgagataatgtcccaagtgaatcactgtgcacttatcctcatggggctgcctgccccttataaaagg

SEQ ID NO: 1754 - DNA, 239 bp, Homo sapiens
  source 1..239: mol_type = other DNA
aagctttgccttctagtacactaggaagaattaattttctgcacagtcagtaaataatggagattttcataatttctttaaaacagtctctaatatttaaataccttaggcataatcatgtcacaattttaatcaaaagtcactagagattcattcgtgatgaccctttattcagaatctcacaaaatggcagtgatcaattcagtgggccagcttttctgcttgagcctacagcctca

SEQ ID NO: 1755 - DNA, 387 bp, Homo sapiens
  source 1..387: mol_type = other DNA
atcattccacagtcaataagtacttactgagtgcctcccatgtgcaggtactgcactaagagctgaaagtcatgattacccttctcagacgcactgtctatggtgtgcagtccagagctgggtgctggggactcatgcctccagtgggtaaacttttgcaaaggtaggatttagaaggtcctactccttgagcactgagatcttcagtgccagaggttttggaaacaatgtctgccatccactctgactgggtgaccccactgatgagcctgccacactgttgcatcagagaaggggaatgccaaccttcatgaatgggccatcctgtgcctgcaatcacagggaggtggggccgacagccacgggtagctggcctggatcaatgaa

SEQ ID NO: 1756 - DNA, 364 bp, Homo sapiens
  source 1..364: mol_type = other DNA
agagtgagacagtctctcactaaagatgagcttataaaccattttcattttaaggacttaatcatgattgcaaaagatccaaaatcataaataaaaatttcagactcatagtgtctgtcattgtcatgtctccctcagatgctggcagccatgtgaggctccccatccagggggctgcagctcaggtacccttggctgagcctgactgtaaagtcttatgcatcaacctcttcctgctggtgactccagtggaacctggaacataggaagttcccagatgtcagggacaggacccccgggaccccagtctacaccctcccaggtacctgggcttattcacagggcgggtccccaggtgctctca

SEQ ID NO: 1757 - DNA, 394 bp, Homo sapiens
  source 1..394: mol_type = other DNA
tgccaggctggggaaactaccagggtccctacagctcatcacacagctccagcctgggtctgggtgcatgactgggatgccaggtagacctggcgcatgctcaatgggccccatccagagagcgctcctggggagcccagtctgagagtgggactgcagctcactgagagcaactgttctggattcagggcacttcctaagtgtctagggaggctgccccaccctccgggacatgagaggctctgcaggtccccgtggagactgtcaggctcctggagcagaacttcacaggcaggaagtttctgacacaaccctcaggccctgcaggcgcaatcttgccctttcccagggaggagctacctgggcttattcacagggcgggtccccaggtgct

SEQ ID NO: 1758 - DNA, 356 bp, Homo sapiens
  source 1..356: mol_type = other DNA
ccctgtgttcccacagttgcgcagggctaagccaagctttctccagttcctggaacccttgctgggagcaggatttagaaaaatgatgctgagagatgctagtgaggctctctcactcagactgcaagagggggtccccttcctgccaagtcagcaaccagctatgtgaccttgatcacagagccaggcaagcatgggtgagagctcagaccatccttgttggactaaaaggaaggggcagactgcccatggggggcagccgagagggtcaggcccccataggtcctcagcctgcttcaacctcaaaggggatggcaaagggccaagtgccccagtcaggagctgcctataaatgc

SEQ ID NO: 1759 - DNA, 313 bp, Homo sapiens
  source 1..313: mol_type = other DNA
atcacagagccaggcaagcatgggtgagagctcagaccatccttgttggactaaaaggaaggggcagactgcccatggggggcagccgagagggtcaggcccccataggtcctcagcctgcttcaacctcaaaggggatggcaaagggccaagtgccccagtcaggagctgcctataaatgccgagcctgcacagctctggcaaacagtaagtgagctgccagcttccccaggcagaagcctgcctgccgtgtagatattctaaaaaatcattttgtacatgagtgcttagtaggaagtgtcaaagaagcttg

SEQ ID NO: 1760 - DNA, 506 bp, Homo sapiens
  source 1..506: mol_type = other DNA
tggcagcacaggttctggcatggccttgattgctgcaatcaaccaagggcagagtgcttttggagtaataaagttgctttactaatgttctgtcttactgaactcatgaacatggtaaagtaacctaggcatggtgaactttcttctttgtaaagccaagttagaaagcaaaggggaggcatagtagcattgctctctccttttttgaaaaccttggaatctattttgaaaactgatcctctgctccagtgatgaactttgcatcccagaacgacttaggaggaggttagctgcataaagatctttaagttgatattccatttgccaaaactgaagagctggtaacctcatctgttaaaacaagacactcaggctgtaaagtttgttctcctagtctctaaacctgaaacctgggccctggctcagggctaaaagggctgctcctgtggcagcctaagccacaggtttgagagatttcttcacccaagggctaagatgaagcctga

SEQ ID NO: 1761 - DNA, 421 bp, Homo sapiens
  source 1..421: mol_type = other DNA
tgttatggggcaggaaagaacttttcccactccctacctccaggctcattccatggggcggggggggcgggggtcactccaccactcaacctagatagtgaggccccccccccacctaaatccagggcttctgtgaggggctgaggttagcaatgatccctcccgctttgagttcccatagggcagaccctatgcaacccaactagctgagtaaacttgggaacatctcaacttctcctttcctaaaatagagatgcagcatgcttcggccccaggtgaggtctctggggtggggtgggacctggtgacctgggaccctggccagaaatcctgagcacagcctcctgggtgtgtcccacacacctgatatggccccaggcctcccaacccgtgggaagagccaggctgagccttataaagg

SEQ ID NO: 1762 - DNA, 315 bp, Homo sapiens
  source 1..315: mol_type = other DNA
gatcctggggtcccagacacaataaggcccttgtgaagtgccgagggacgggcatggtccatccccagcttcacaaaagaacaacaacgatagttttagtttttagtaatgagaacaatagttctcatgactaaaagccatggaggaatgttctcactgagtgcatgcactcaaaatgatgcattcaacttcaattcagtttcagggatgtataccaccaatgcgctggatcaagcaattcacctggttgagaaaccagagactgtagactctggcaggtctctgatggcctgaagctgtgggcagctggccaag

SEQ ID NO: 1763 - DNA, 382 bp, Homo sapiens
  source 1..382: mol_type = other DNA
tgttccatggggcaggaaagaacttttcccactcccggggggtcacctgaggcccccccacctaattccagggcttctgtgaggggctgaccaatggttagcaatgaagtctttgagttcccatagggcagaccctgatgtgaccctgtttactagctgagtaaacttgggaacatctcaacttctcctttcctaaaattgatatctagacaagtctgaaaggttgagccagagaagactccaggtgaggtctcacctggtgacctgggacactggccagaaatcctgagcacagcctcctgggtgtgtcccacccacctgatgtggggcaggccccaggcctcccagcccctgggaagagccaggctgagccttataaagg

SEQ ID NO: 1764 - DNA, 467 bp, Homo sapiens
  source 1..467: mol_type = other DNA
gtgataggcaggcaggcctgacttgtccacagctcaccggaggccacgtaggaagggcatgtctggcctccacaccagcccatcaaaatcttttctcaggggagggtctgaaaaggccttcactcccccgtaaataacgaatggtgcttacagggctgggcacgtgcatgcacattaacaccaaacctctggggtgaccctgagtatcctctgtgggacactgcgctggctcgagggtcacatgtctggcagaggaagcaggggtgaccgccgcagtcctcctcctgctccccttgccgagtcacgtgtcacgaagagagggagactcgtcaccaggcgtgcagtgggcactgctgggctcccccatcccgtcctaacccggaacagccccgggcaggagcccacggcgcgcgggcggggtgggcttggccgagctggcctccggggcaccgaccgctataaggcca

SEQ ID NO: 1765 - DNA, 446 bp, Homo sapiens
  source 1..446: mol_type = other DNA
gtgataggcaggcaggcctgacttgtccacagctcaccggaggccacgtaggaagggcatgtctggcctccacaccagcccatcaaaatcttttctcaggggagggtctgaaaaggccttcactcccccgtaaataacgaatggtgcttacagggctgggcacgtgcatgcacattaacaccaaacctctggggtgaccctgagtatcctctgtgggacactgcgctggctcgagggtcacatgtctggcagaggaagcaggggtgaccgccgcagtcctcctcctgctccccttgccgagtcacgtgtcacgaagagagggagactcgtcaccaggcgtgcagtgggcactgctgggctcccccatcccgtcctaacccggaacagccccgggcaggagcccacggcgcgcgggcggggtgggcttggccgagctggcctccggg

SEQ ID NO: 1766 - DNA, 356 bp, Homo sapiens
  source 1..356: mol_type = other DNA
gacccttccatgggaggaaataaagtttccatcgcagggtgataggcaggcaggcctgacttgtccacagctcaccggaggccacgtaggaagggcatgtctggcctccacaccagcccatcaaaatcttttctcaggggagggtctgaaaaggccttcactcccccgtaaataacgaatggtgcttacagggctgggcacgtgcatgcacattaacaccaaacctctggggtgaccctgagtatcctctgtgggacactgcgctggctcgagggtcacatgtctggcagaggaagcaggggtgaccgccgcagtcctcctcctgctccccttgccgagtcacgtgtcacgaagag

SEQ ID NO: 1767 - DNA, 236 bp, Homo sapiens
  source 1..236: mol_type = other DNA
taaatataagaggaatttcagttcaggagaaagtctgctgcctccctgggagcgccctccctggggcctccacccaggtcagctgcctctccaatcttgccagctgggggtggggtggagcagtggggaggccccccaggctggggtgggactgcagcagctgagccctgttctactgagaacgagagtgtctcctgggatacaggaaactcagtgctgggccttagctaaaagca

SEQ ID NO: 1768 - DNA, 400 bp, Homo sapiens
  source 1..400: mol_type = other DNA
acaataacaatgtatatttgtatcaaacataacacagtttatatattgttttcatgactattgaaaatcttgagggttggagttccaaactggacctcccaaaggagcctccctgaactctggtctgggagtagaaactgggtctggtcctgcctcttcccctccagaaaaggacagatgaagctgctttccagaagctgatgagcaacttggacaaattctttgaaggcttcccagataagcagcccaggctgccagctggggccctccctgtcgccagacgtgcttgatgctgagcaagttcaataaagattcttggaagtttgtgtgtgtgcacaggaaggggacccctcaccacccccctgccaaggtttggaaggtcccagctgtgggatctcag

SEQ ID NO: 1769 - DNA, 420 bp, Homo sapiens
  source 1..420: mol_type = other DNA
taaaactcaggctgagctatgtacaagtaaccgctagggcttacccgttacccacgggtgcccacctgggaacaggaggcttggttccacggggtggtggagggtgctgtggcacttaccgcatcagcccacagcagcgctctcccctgtcccctgctatgggcagggcctggctggggtataaataggtcagacctctgggccgtccgatccagatgtgagattctgatgtgggattgtgtgcgtgggtgtgcatggcacacacacacatgcacgtaaggcagaaggcaactgtgggcctttgtctggtggtgtgccccatgagcctctgccctgcacgcagcagcccagctcgagaaggtgcatggcctctgcaggagctaagcgactgcaggcccctgggcaggcctccagcagcca

SEQ ID NO: 1770 - DNA, 314 bp, Homo sapiens
  source 1..314: mol_type = other DNA
cagacagtaccgggcatggggatccccaccccagttgcagtggctcccagctaattaaaaaaaaaaattgtttttcctttttatagagacagaagtctctctatgtaggcacaggctgccctcctaaaactcaggctgagctatgtacaagtaaccgctagggcttacccgttacccacgggtgcccacctgggaacaggaggcttggttccacggggtggtggagggtgctgtggcacttaccgcatcagcccacagcagcgctctcccctgtcccctgctatgggcagggcctggctggggtataaataggt

SEQ ID NO: 1771 - DNA, 315 bp, Homo sapiens
  source 1..315: mol_type = other DNA
gcatggaaaaaactcttgccttcctggctgccttcgggttttcccaggctggaggcaattccaggaagggcttcccctccctgcccccaggggtcgggagggtacaggttcaggttcctgactgggccagcgaggtgagatgaaccccaacttgaggctgtgggggcgcctctcagacctgcccctccctgctaaggcctagcttctccaagggctgagggcagagaagcacagggccaggctctccttgtgcaagttcctgcgggctggggcagactgggaccgagccatccctgcctggaactctgctgtgag

SEQ ID NO: 1772 - DNA, 375 bp, Homo sapiens
  source 1..375: mol_type = other DNA
agcaccagtggtgagtgccagcttcagggcagtttggggacccccagtagccagcctgactcctgacccagggtctggcatggggtgggagcactgggctcaaggctctggtcttccccttgccagccatttgctcccagcagggggcccagcagtgggcaaatcttcagggagagtcttggccctggccgccctgtgctgcaggactcttgtcccggcgctagcatggaaaaaactcttgccttcctggctgccttcgggttttcccaggctggaggcaattccaggaagggcttcccctccctgcccccaggggtcgggagggtacaggttcaggttcctgactgggccagcgaggtgagatgaaccccaact

SEQ ID NO: 1773 - DNA, 367 bp, Homo sapiens
  source 1..367: mol_type = other DNA
tgagggatccctgagggcatcctcagtggaggctacaaatagtccagcaccagtggtgagtgccagcttcagggcagtttggggacccccagtagccagcctgactcctgacccagggtctggcatggggtgggagcactgggctcaaggctctggtcttccccttgccagccatttgctcccagcagggggcccagcagtgggcaaatcttcagggagagtcttggccctggccgccctgtgctgcaggactcttgtcccggcgctagcatggaaaaaactcttgccttcctggctgccttcgggttttcccaggctggaggcaattccaggaagggcttcccctccctgcccccaggggtcggga

SEQ ID NO: 1774 - DNA, 347 bp, Homo sapiens
  source 1..347: mol_type = other DNA
ctggggccccccgtgccctgaggtcattggccaagccaagccgaacctgagctttgctcaccccaagaggggacacaaatggatgacttgttttggtgctggagctccagccactggccagctggggtggaggaggaacattcccccctgggaagcaagcagttcacagccaaaagctgggatctggtcaggcaagttcagacttctcgtctgagactgtctcctccaactgagctggaaggacttggcaggagactgtcccctgttcccaactctgggggagggcgtctgagcccagactggctgagggatccctgagggcatcctcagtggaggctacaaatagt

SEQ ID NO: 1775 - DNA, 559 bp, Homo sapiens
  source 1..559: mol_type = other DNA
cctcagcctcccgagtagctgggactgcaggatggtctcgatctcctgatctcgtgatccacccatctcggcctgctgggataggtctcagtgcaggggttgctctgaggccctcccctgaggggcctgcaaaaagaatcctgagatttttttttttttttgcaaagtcctggattctaggggtctcaagactctgcctgggtcatggccccaagcagcaaagctctgccccctgcctcggtgaaggcagggctggcatgatgggcccagggcatgccctgcctctggcatcctgcctaacctttccaggctggtctgagtattctcagaggccttgccaatgaacatttcatatctttaattctaatgcccctgtctgcctagaggctcaggggccttcagggtgaggggagacacattccccaccctctgggagctcctagtctgagagagatgcctctggcttcaggagtcccgagtctaaggagggaaacgactccttcctgctcctaggctgtagccatggctcctgccagactgcacaggagcccccatctgc

SEQ ID NO: 1776 - DNA, 394 bp, Homo sapiens
  source 1..394: mol_type = other DNA
agcaggggttgcctcccctcaccccggtccaggccacttcccactgtggcctgggtgggctcaggggctgcccttgacctggcctagagccctcccccagctggtggtggagctggcactctctgggaggtgggggccagtggggcccacatcaccctgggagcctggctgccttgcctgaggtggtgggatcaacctggtcccccttggaagggctggagtacagtggtgtgatctcagctcactgcaaaccctcagcctcccgagtagctgggactgcaggatggtctcgatctcctgatctcgtgatccacccatctcggcctgctgggataggtctcagtgcaggggttgctctgaggccctcccctgaggggcctgcaaaaagaatcct

SEQ ID NO: 1777 - DNA, 369 bp, Homo sapiens
  source 1..369: mol_type = other DNA
cttcaggcctggtagggatgtacccctacccacccagaggaggccaaagttttcctggcccacaactgcggctgtacacttagttacctcattacctcattaagaggtattccagctcacacacacgggcgcatgtatgtacacgagcactggtcactgggctgtgactcacaggcatgtcatgagaatgaggcctggcaccagtctccaggccccagagcaggggttgcctcccctcaccccggtccaggccacttcccactgtggcctgggtgggctcaggggctgcccttgacctggcctagagccctcccccagctggtggtggagctggcactctctgggaggtgggggccagtggggcccaca

SEQ ID NO: 1778 - DNA, 358 bp, Homo sapiens
  source 1..358: mol_type = other DNA
tgaacccaatgtgataacgtgggtcctcgcatgctggtatggatccaattagtacaacaggggaaataaattatttaatgcattttgctaaacctcagaacttattttgtggttctctttcccctgaacggcctggggaaagggggtgggtgggcagaacttggcagtggccaatccctcacagacagggtcttgctctgtcgtccaggctggagtgcagtggcacgcttttaaaatggcttccaggtatctggctgccgtctcagacatccacctgggcttctgggcagggactgtcgtctcctgtttgacccgcggggccgctggtggaaaatttctggcacctggagcccggaga

SEQ ID NO: 1779 - DNA, 348 bp, Homo sapiens
  source 1..348: mol_type = other DNA
ctgctgctgccctggccctgggggaggagggtgtgccgctgagtcactgcctgggcatctggggcccggaaggggccctgggagggggcagccctcccttgggctgggctccttcaggcctggtagggatgtacccctacccacccagaggaggccaaagttttcctggcccacaactgcggctgtacacttagttacctcattacctcattaagaggtattccagctcacacacacgggcgcatgtatgtacacgagcactggtcactgggctgtgactcacaggcatgtcatgagaatgaggcctggcaccagtctccaggccccagagcaggggttgcctcccct

SEQ ID NO: 1780 - DNA, 219 bp, Homo sapiens
  source 1..219: mol_type = other DNA
ggtactctgctccatcctcccagccaaggaccagagggtttgggcagggcaggatttcccttcagagaagccgcagcctcaatacccgttgtaccttgagcaaggcactggaccagcaccagttagtgggccccagccagtgctagctgagtggtgatgacaggcaggcttcctggaggctgtggtggggcctgaccaccaggacccgccgggtgaggg

SEQ ID NO: 1781 - DNA, 520 bp, Homo sapiens
  source 1..520: mol_type = other DNA
gactggcctgagtttgaatctcagatctgccacttatcattgaattttgggcatcttagtatcagtttcctcatctgtaaaatgggggatatcatcatgtaaagcacttacagagagcctgacacatggtgagtgcccagtgacccaatatcattcccgctggagtgggcaagtgggcccctccagttatcttaggcagggagccagacaggtccctggcatctgccttctgatttgagcacagaagtcgggcgttactcctgaaacccctgggagcccctgaaactgggatcccagtgacccaggtgagaaaggcaggtgatagtccttcccttcctttctctaccctgtcaggttctgctcagcccctgcggggctgggagggtgggccagttttcaccactccctctgggatgggggtagaggggccctttaatccccaccgagccagctcagcgggcagggctgggagggagcggggaggagtcccggctgggctgagcgcagggagctgcttggc

SEQ ID NO: 1782 - DNA, 287 bp, Homo sapiens
  source 1..287: mol_type = other DNA
agatccctcatttagggaactgggaattatcttcccacttccaagtcttggttgggagtggacttggcacagtccttccagaaatgggcacggcttcctcttcaactttaaagggtactctgctccatcctcccagccaaggaccagagggtttgggcagggcaggatttcccttcagagaagccgcagcctcaatacccgttgtaccttgagcaaggcactggaccagcaccagttagtgggccccagccagtgctagctgagtggtgatgacaggcaggcttcct

SEQ ID NO: 1783 - DNA, 383 bp, Homo sapiens
  source 1..383: mol_type = other DNA
tctgggatccaggcaggcttgagtgtcagtatccaagctggtgtgtgtgtgtgtgcacgtgagagagagagagagacagacagacagagggtacagaggctcctgcttctccttcctctagggtgaccccatgaggtctcgaacggaggccaggggtttcccagccccagccctctgtcatagcccaggctgctgcaatagcaggggtggcttaggcccagccccctgcctcccctcccttcccccaggtataagagctgagctcaggtgagctggctcctcctgtcttgtctcagcggctgccaacagccaagggattccccctattggcctgggggatatgaccttggctcctgaagcccaggcggggcctgggcctactg

SEQ ID NO: 1784 - DNA, 273 bp, Homo sapiens
  source 1..273: mol_type = other DNA
tttgaggggctgaatctgggatccaggcaggcttgagtgtcagtatccaagctggtgtgtgtgtgtgtgcacgtgagagagagagagagacagacagacagagggtacagaggctcctgcttctccttcctctagggtgaccccatgaggtctcgaacggaggccaggggtttcccagccccagccctctgtcatagcccaggctgctgcaatagcaggggtggcttaggcccagccccctgcctcccctcccttcccccaggtataagagct

SEQ ID NO: 1785 - DNA, 273 bp, Homo sapiens; identical to SEQ ID NO: 1784
  source 1..273: mol_type = other DNA

SEQ ID NO: 1786 - DNA, 550 bp, Homo sapiens
  source 1..550: mol_type = other DNA
gtgcctgtattgtcttagttaattctcacagtcctttgaggaaggcactatttttaactcctgtattaaagatcaggacacagatcttagttaaagtcccctcctccccttaccctctggagcagtggggaagccaggtggtgccaccggaggcagaacttgcatatggtgtacacggccaccagagggcaggggcgggcatctcggtgaccagcctcccagggctgtcactgcctcactggcaggcatccatgcagggcagctatgagtccagaggaacctttaggctgagggagctccctgaccctccgttagagagccccagactgagacctcagagagactcccagactgggaatccaaagggccattggcagcattcaagaggggctcctgcactgaagggctcccttaccgtgagaagccctgcctgagcctcctcctgaggaacccaggctaagtcactctcagaggaacccacaggctgagagaccctcagagggacctgcagccttcagaggaactctcagaatgagacattgttggtttg

SEQ ID NO: 1787 - DNA, 232 bp, Homo sapiens
  source 1..232: mol_type = other DNA
tttgaggggctgaatctgggatccaggcaggcttgagtgtcagtatccaagctggtgtgtgtgtgtgtgcacgtgagagagagagagagacagacagacagagggtacagaggctcctgcttctccttcctctagggtgaccccatgaggtctcgaacggaggccaggggtttcccagccccagccctctgtcatagcccaggctgctgcaatagcaggggtggcttaggcc

SEQ ID NO: 1788 - DNA, 377 bp, Homo sapiens
  source 1..377: mol_type = other DNA
aggccaaagctgatgtcctcaaggggctagctgacctttgtcagggctgaccttgttatcacatcagtctcagcctggcaggagattcagctccagaaaccccctcagacccctctacttgagaggaggtcttcagttgaaggtccttccctgtggtcagagctggctccgtctgaacagaacccttacctctcctcagcggcagcagggcagagtgctgatccccgctcctgtctcccggtgacaagggtcctggaacggggcgtctctgactccctgctccaggacgggtttagtacaggcactcacaaccccctggggtgcggcgggtggggctggaagaggcattctcttttcgctccttcctgagtctgagc

SEQ ID NO: 1789 - DNA, 481 bp, Homo sapiens
  source 1..481: mol_type = other DNA
cagatggccaaggttgcaaatgtggctgctggagctgtgtgtggagacctgtcttcaacagccaggagcagacagaggcgccctctgtctcctgggctggaacaggcggcccttgtcctttctctccaggcagcagtggatggtgcagggggacactggatgtcttaccccaagctgggccttctgtggctcctccatggggcctcactgagaggaccctcagtgagaaacttagtcttgggagtctgagaacccacagagggatttcaatccaggatccccctcggcctcacctctgtgtgcacactcctgattagacatgggtatggtggcagcagcccccagtattgagaggactaggcctgggaccctgccaacgagatctgtccaggcagctcctctccctgaccaagtgggggcgctcgtgtggctggcagggagcccgggtccagacctgagggctcagggcaagcggcctgat

SEQ ID NO: 1790 - DNA, 436 bp, Homo sapiens
  source 1..436: mol_type = other DNA
cctgtggtcagagctggctccgtctgaacagaacccttacctctcctcagcggcagcagggcagagtgctgatccccgctcctgtctcccggtgacaagggtcctggaacggggcgtctctgactccctgctccaggacgggtttagtacaggcactcacaaccccctggggtgcggcgggtggggctggaagaggcattctcttttcgctccttcctgagtctgagctggctctgggagcccactccctccagggatcaggccgcttgccctgagccctcaggtctggacccgggctccctgccagccacacgagcgcccccacttggtcagggagaggagctgcctggacagatctcgttggcagggtcccaggcctagtcctctcaatactgggggctgctgccaccatacccatgtctaatcaggagtgtgc

SEQ ID NO: 1791 - DNA, 438 bp, Homo sapiens
  source 1..438: mol_type = other DNA
atcaggccgcttgccctgagccctcaggtctggacccgggctccctgccagccacacgagcgcccccacttggtcagggagaggagctgcctggacagatctcgttggcagggtcccaggcctagtcctctcaatactgggggctgctgccaccatacccatgtctaatcaggagtgtgcacacagaggtgaggccgagggggatcctggattgaaatccctctgtgggttctcagactcccaagactaagtttctcactgagggtcctctcagtgaggccccatggaggagccacagaaggcccagcttggggtaagacatccagtgtccccctgcaccatccactgctgcctggagagaaaggacaagggccgcctgttccagcccaggagacagagggcgcctctgtctgctcctggctgttgaagacaggtctc

SEQ ID NO: 1792 - DNA, 351 bp, Homo sapiens
  source 1..351: mol_type = other DNA
gaggggcagctggaggtcacctggagccctaccccagactcccccgggacctgagctcttggcaaggcagggaaacagctgttgtatctgctctcttcttgaggcaggggagggctgggacccttcccaacacctgggtccctgccaggcggtcaggaagctcatggtgggttccccactggcttggtccccagcggccagggactagcccagtggggcagcggttggcctgggcccagatggccaaggttgcaaatgtggctgctggagctgtgtgtggagacctgtcttcaacagccaggagcagacagaggcgccctctgtctcctgggctggaacaggcggcccttg

SEQ ID NO: 1793 - DNA, 336 bp, Homo sapiens
  source 1..336: mol_type = other DNA
gtgagccgagatggtaccactgcactccagtctgggtgacacagcgaggtgagaggatcacctgagcccagtaggtcaaggctgcagtgatccgtgattcattgcgccactgactccattcacaactctcagactgggcgagtggcgtccgcgtaaagatttttagacggtgtaccttgggaattcgggacccaaatcccctctaggttgaccactactggagaccattggccacgcccctaggggcggggcactgcatggaaagccccgccttcgccctaaggctccgcctctgacctctgcgcaggcgcgtaattgcgtccagccggtcagaca

SEQ ID NO: 1794 - DNA, 353 bp, Homo sapiens
  source 1..353: mol_type = other DNA
ggtgagaggatcacctgagcccagtaggtcaaggctgcagtgatccgtgattcattgcgccactgactccattcacaactctcagactgggcgagtggcgtccgcgtaaagatttttagacggtgtaccttgggaattcgggacccaaatcccctctaggttgaccactactggagaccattggccacgcccctaggggcggggcactgcatggaaagccccgccttcgccctaaggctccgcctctgacctctgcgcaggcgcgtaattgcgtccagccggtcagacacgtggcggccattagctggcggccgctggccgggtgagcagacggatcggccgactagacagcc

SEQ ID NO: 1795 - DNA, 331 bp, Homo sapiens
  source 1..331: mol_type = other DNA
atgtttatattattcagccttaaaaaggaatgaaattcggatacatgcagttttttacatatttaatgccattaaaaatatactctttagaaagagttgggaggatcacctgagccctgcactccagcagaaaacgatactatgaatataatgtggctttctgactggagtgcagtggcgcgatctcggctcactgctagctgggtgcccgccaccatgtattcgcgtttattttcacctttaaagaaaacgaaaagtatctcccagaaaccccggtgtcttggtggagacagcatttcccgggcgccccctcacggggcggggcagtgcg

SEQ ID NO: 1796 - DNA, 261 bp, Homo sapiens
  source 1..261: mol_type = other DNA
ccgtttctataaaaatataaattaattaaaaaaatagaaaatacatgcagctaaagttgagggccgggcgcggtggctcacgcctgttttcggagaataatcccagctactccggaggctgaggcaggagaaccccccaaaaaaaaatatatatatatatgtatgtatatatatacatatatatatgcatgcctagtttcaaaagtggctttcaactccagaatcaagcgccccttcgcaggggctccgcctccccccggg

SEQ ID NO: 1797 - DNA, 489 bp, Homo sapiens
  source 1..489: mol_type = other DNA
tccacccgtctcggcctcccacagtgctgggtggccacaagccaccgcactcggttttgcttgttttttaaaaattaataatatttattttaatctggaccagaatacgtttagacttaagatgtttacgttctgctgtagtaaattaaatatcgaaaaaggtatactgctcgggtgatgagtgcaccaaggtaatcccagcactttggtcacctgtttccatggacatggaaaaccatgttttccacatcaacttcaactgctagtggcaaaaatagctgatattggttgcatttttgaggtaggaaaattggcaagatattttccttcactaaagaaacgtcgatagcagaggatggtttcgatccatcgacctctgggttatgggcccatttgattgttatagaacacacctaatgtctgatcaaaaattcgtcattactatagaaccagttcttataagcctttgacaaaggagccaatcgcacc

SEQ ID NO: 1798 - DNA, 259 bp, Homo sapiens
  source 1..259: mol_type = other DNA
atattatgccctcggcacctagtgggtgcttaatgcaccgaaaaccacagcagtctgcaccgggggcccagctgacaaaacagtcattttcttggggcgtttccctcttcccccgaggagaccaggtaggaggcgagggaaaaggtggggcgcaagtgggccccggttgcttcgggcgcaccttcagagggtcctgggagggttcggagcttggctcgggtcctccacggttccctccggatagccggagacttgggcc

SEQ ID NO: 1799 - DNA, 428 bp, Homo sapiens
  source 1..428: mol_type = other DNA
aaatgaagttggttctatcatttggcagtggcgcgatctcggctcactgcagtgcaagcgattctcctgcccatgtagctgggactttgcaaagtctgataattgcacttatgtgagtgcatacacgtgcctgtgtgatgcacgggttggggtacgttccctcccccgccctgccacttcgtggcaggcttcgtgtctctcaaagccacgcagggacattgcccaggttcctgcacccacccaaattctaggaggaacagggcggaggctgacatcgcgcatgcgcctcagcgcacgccggcgcaggcagacggagaaaaggccagtccgccgaggtcttcctaccccttggagactcagcgccaccgcggaagcagctattggcggaggccaggggccgcgactgctcacttccggcgcgggcctag

SEQ ID NO: 1800 - DNA, 434 bp, Homo sapiens
  source 1..434: mol_type = other DNA
gtgggacacggtccctgtctaccctccaggccatggcggtctgcagtgacacatggcatgcgagaccacgggtggagggtgtctcgcactctggaaccctcccacactcagactctggctctggtgattcctgcacagcctgaggagctctagcagcaagctggcccagctgactctggagcagatcctggagcacttggacaatctgcggctcaactcggcgtccagtgtagacggtgctgccctggcccagactatgcctggagccaggctgggggcaggggcaggacacccggggccacaacccacactcaaaacaacctgtgcgtgctgtttaataagctcgctgcagcatgtccagcccacaagatgaagtgaggctcctgccactttgggcctccttgtaggagcagcaggctcccactcaaagagct

SEQ ID NO: 1801 - DNA, 327 bp, Homo sapiens
  source 1..327: mol_type = other DNA
gggatctgactgaagccagaggctctgtaaaatcagagactcagtgagtcactatccacatgccagtgtgaaatgggcatctatgacgtggtcagggtgtccattcctaatcacacagccccacgtggtgtgcttaggttggtctgaggttggcaccataatcgtgtcttaaaagttgtttttaaatgacaataaaacaagccagaatgtcttttgtgctggatgtctagagcagaagggacttggctttggccactacccatccttcctgctgccactggaggtgggagccaggcacctgtctatgcagaaccaaaaacaagtacc

SEQ ID NO: 1802 - DNA, 331 bp, Homo sapiens
  source 1..331: mol_type = other DNA
aaacaagtaccggggacagagatgctcttccttccacagccagcagagggaagtttgggcgaactgcacagagctgctcctccaggatggagccccaatagcccccacccatcccctggggttgcggctggcaggccgggacttgcagaaccaaatgggccaggggccaagttcattcttttgggagagagcaatggtaccttcccttaaccgatccaaacgccctggctctcaggcctggactctagggcttagccagatgcctagagcaccgcccaggacctggtagggtgcgagccgcgagcagtccgggagggtgtggggggagggc

SEQ ID NO: 1803 - DNA, 607 bp, Homo sapiens
  source 1..607: mol_type = other DNA
aaggtcccgaggggggctgcagcctggcctggcgcctcgcggaactggcccagcagcgcgccgcgcacacctggctcgcggcgctttagctactcagaggcggagcgcgagagtaacagggctgcacgcgccttcctacccgacggcggcgacagccagcgccgggagccggagatgcagcggccggaagcggcgcgggccggaggggacggtgccgccagaggtggaggagccgccgcccctctgtcacctggagcaactgtggcgctgctcctccccgctggcccagagtttctgtggctctggttcgggctggccaaggccggcctgcgcactgcctttgtgcccaccgccctgcgccggggccccctgctgcactgcctccgcagctgcggcgcgcgcgcgctggtgctggcgccaggtaaggctggagctccgaactggaaaggcttggtctcatccctgggcctgggaagaagccgaatctttggtgccccaaggatccccaagctcatccaagagcagtgtgggctgaggtagagccagggccccggcccgccctgagagccatggggctccacctgtgggctgcaggcccaggaaccca

SEQ ID NO: 1804 - DNA, 345 bp, Homo sapiens
  source 1..345: mol_type = other DNA
aaaagccaagagaccatttctcagctccgttcttctgtagagtgtgcatagtgccaatcagaaaattcaggatgactgatgagtcccactgtgcagagcacatcgtgttctgcaatgctgcctcctttgaggaagtgtctgacagcctccacttctagcaaggggcagctgcagaaaatgaaggaatctttagatgacttgatggatttcttgttaacaacatgcgactgagtctcagaatgcttagaattatagttatttccagctggattaagagctttaaagtttctttctgttcacctggtaagaaaagaattgcacaaaaaattcaagtgcacttatgtt

SEQ ID NO: 1805 - DNA, 280 bp, Homo sapiens
  source 1..280: mol_type = other DNA
atgaggaataaatacttcatgtaaagttcttagcacagagcctgacacagtctctgctcgctgagtttaggcgggcctaactgctccgtggaagcaggcgtggtttagtcacgacaggaccatatcgtgaaatttcctagagtctgtcgcgaagtctccatctttagaattgaaagaatgagagatggccaaaggggaatcccggtttgggttgcagccacataatgggctgtcgaagacccggatgtgtctgggactggcattaggtcgcccaacgcgc

SEQ ID NO: 1806 - DNA, 587 bp, Homo sapiens
  source 1..587: mol_type = other DNA
ggcaggcggggtgggggatggcccccagctgctgtccctcactgttcctctctcctggggaagtgaaagtggaggggagggcacctcccgcaattagctcgccgtgcccggcctcctgcacccccttctgctcccgtgggtgccggagtcggagccgccctccctcccgcttgggtcacgcggcggccggcgctgctgccgtcacgtcctcggccgccggcgcgcctgccccgaacttcccgtcacccggcacgcgggcgtggggacccggagtgggccctgtgcccgttgtcttccctagggagaaagggctgctttctgcaggactcttccctggcaggccccggtgcgcaggtcctgcggatgggtgccacccacttgcccctcagaaggtcccacctaatggcctctgcctgctgccttgggcatagggctcccattcgccctcagtggatgagggacaggtctgtgccccagaattaaatcaagaggctgacgctgactcctggctttacctcccagaagtggagtctaaataagaaagccagcctggctctatccctggaaccattctgagcctgctggca

SEQ ID NO: 1807 - DNA, 401 bp, Homo sapiens
  source 1..401: mol_type = other DNA
aggaaatcacttctccagggccctgctgcagcatcagatgggggctttgactgatcagacattttagttttaattaaacagatccttcagtgccaataaagctcttgtcattttcaaaaaagagaactgagggttctggtccaaagggaatgccctgtgccctaaacctggaagtagggggagccacctgggtccccgtagactagacaggacccaggcgggaagggagcgcgccgcggccctctgggtcgcctggggtcagggaagctacctgggtgcagggggccctcccagccgccaggggtcgggctgcaggcggctgggctttgggcagacgcttgccagggtcacggccgccggccgaggaggaggggtgggggtagcggcggcgcccgcggccc

SEQ ID NO: 1808 - DNA, 377 bp, Homo sapiens
  source 1..377: mol_type = other DNA
ggagccctggaagcagggcttttccggatgcctaggggtgggcagtgccagcccctcctcaccactcttccccttgcagtggaggagagagccagagtggatactattttttattaaatatattattatatgttaataaaaaaatcatatcaaacccttggtgtggttagaggaaatcacttctccagggccctgctgcagcatcagatgggggctttgactgatcagacattttagttttaattaaacagatccttcagtgccaataaagctcttgtcattttcaaaaaagagaactgagggttctggtccaaagggaatgccctgtgccctaaacctggaagtagggggagccacctgggtccccgtagactaga

SEQ ID NO: 1809 - DNA, 312 bp, Homo sapiens
  source 1..312: mol_type = other DNA
atgtggcacctcaggagaaatgttgcagccatctactgctgctgtaccctatggggacatggacatggtgtcccatgcccatttttttcaagggggaagggcaatgcctacccccagcgttatttttggggtgttttgggacctgttacccaaataaaagatgtttctagacatctgtaccagcttcccagcttgcacctctcagggagtagccgagagggtagtccccagtttccggagtcagcagggctgctgggaagtggagtccgtcccggcggcccccgcgcgcaacaggtcagggctaggctgggg

SEQ ID NO: 1810 - DNA, 299 bp, Homo sapiens
  source 1..299: mol_type = other DNA
tgctgccattggtggcagcggggtccatgtcggctgcccaggcctccccgggcccgggaacaggagtcccagctcactcccgcgacgcttggcggcctcgcaccccgcctcctggagcccggactttcaggcaccgccctcagtgtcgcctcagtccgtcccgggaccgcagacggaaaaggggaacgatggagcgatccagtcgggagttggggacccggcctctacattccttaggggaactccagctccaggtcctatttggaggcggctccgcaccaggtgaaagggtgatgaga

SEQ ID NO: 1811 - DNA, 343 bp, Homo sapiens
  source 1..343: mol_type = other DNA
atgaagcttttttcacctttgcataaaagaacagctggctagaagaggattctcaaggcacagagttgtgggcctgggggctcttccctgggcgcggcttcagcaccccggtccccacccacctggagaaggcggaggaagggatgattttcaagacatacccggtcccaagaggggaatgctttcccttgggcgccaagagggtcagagccttctgactttggcccaagtctccctcttttaaaaatatccataaaagcctttgttgactggcccgctccggcccctcagtcctccacagatgcgccccagggccccagccccgaggtcctgctgccattgg

SEQ ID NO: 1812 - DNA, 347 bp, Homo sapiens
  source 1..347: mol_type = other DNA
ggcaatgaagcttttttcacctttgcataaaagaacagctggctagaagaggattctcaaggcacagagttgtgggcctgggggctcttccctgggcgcggcttcagcaccccggtccccacccacctggagaaggcggaggaagggatgattttcaagacatacccggtcccaagaggggaatgctttcccttgggcgccaagagggtcagagccttctgactttggcccaagtctccctcttttaaaaatatccataaaagcctttgttgactggcccgctccggcccctcagtcctccacagatgcgccccagggccccagccccgaggtcctgctgccattgg

SEQ ID NO: 1813 - DNA, 542 bp, Homo sapiens
  source 1..542: mol_type = other DNA
gtcccagctactaggtgagccgagatcgagcctctgcactccagcctgggttcccgtttttacccttagcccgttcaaatcttcataaggataattagtagcagtttgagttctgggattcacactccactgaaaaccatacctgtatcagtttacctccattgttttacttgaagtgaattcctgaataaaaataatcaatcaaccctgagttttggtattactacaaatttgcaaagagaacaatttttatgaaaacgttttgtaaattatacaagtgtgggacataatgttcccggtaactgtatgcaaacaataagacaacaaacgcaaaaggctttttaacttgttgcagttgagcagcgtgcagcgagcgtgtgcgcacagctgctgttctggaaacccgccatcgcgctcctgccgcctgccgagcgaggatcaccgctccactggggtcagcgggctgttgactccccgcctgggtgaaaccggagcttccgagtcacgtggcgcgcgaagacaggctgctcagggtttcccgg

SEQ ID NO: 1814 - DNA, 210 bp, Homo sapiens
  source 1..210: mol_type = other DNA
tgtcccctagttaccggaacctctggctccaggacggatcctgtcgagaagatatcctctgggggcccgagatccatgcttctgcagaaagtggatgccaccttgccaggagccacggtagggccagtctgagggtctcttagctatagtaaatcttcctgagggttgagcacaggactcctgaatgcctgttctgtagccctcgctttt

SEQ ID NO: 1815 - DNA, 461 bp, Homo sapiens
  source 1..461: mol_type = other DNA
ataaaaataatcaatcaaccctgagttttggtattactacaaatttgcaaagagaacaatttttatgaaaacgttttgtaaattatacaagtgtgggacataatgttcccggtaactgtatgcaaacaataagacaacaaacgcaaaaggctttttaacttgttgcagttgagcagcgtgcagcgagcgtgtgcgcacagctgctgttctggaaacccgccatcgcgctcctgccgcctgccgagcgaggatcaccgctccactggggtcagcgggctgttgactccccgcctgggtgaaaccggagcttccgagtcacgtggcgcgcgaagacaggctgctcagggtttcccgggacaaataagtcccgccggccggacgcagtggctcgcgcctgtggtcctagctgctcgcggtgctgaggcgggagaatcacctgagcccgggaggtcgggggctgc

SEQ ID NO: 1816 - DNA, 359 bp, Homo sapiens
  source 1..359: mol_type = other DNA
cgctcctgccgcctgccgagcgaggatcaccgctccactggggtcagcgggctgttgactccccgcctgggtgaaaccggagcttccgagtcacgtggcgcgcgaagacaggctgctcagggtttcccgggacaaataagtcccgccggccggacgcagtggctcgcgcctgtggtcctagctgctcgcggtgctgaggcgggagaatcacctgagcccgggaggtcgggggctgcaaaagcgagggctacagaacaggcattcaggagtcctgtgctcaaccctcaggaagatttactatagctaagagaccctcagactggccctaccgtggctcctggcaaggtggcatccacttt

SEQ ID NO: 1817 - DNA, 281 bp, Homo sapiens
  source 1..281: mol_type = other DNA
gaaaaaaaataaaattaaatgaaaattcgttcaatgaatctttggcctgggtgttgacagtctaggctcaagcctcagcttaacggagatacatttcatctgcctctcggaagtggtaaatacacattagcatttcctcatggagttaataaccaccagaacctagactcaatacttatggaactatgattactccattatgagtttcatgttcgtttctgcagggacgagaacgcgcagtttcagcttctccactggatcatcggtggcgatgaaggttg

SEQ ID NO: 1818 - DNA, 372 bp, Homo sapiens
  source 1..372: mol_type = other DNA
tcatggagttaataaccaccagaacctagactcaatacttatggaactatgattactccattatgagtttcatgttcgtttctgcagggacgagaacgcgcagtttcagcttctccactggatcatcggtggcgatgaaggttgccgcgggcgacgaccgaacgcccccgggaacaccgggccccgagctcggtcccgcgcccgaggatcctccacggggctagatggctgcgtcgggggcgggagcggaggtgagcgggcgctagggccgcgagcccccgccggcccttcctccagcgccctgcggaccccgcagaaggcgctccgcaaaaacatatcgatttttctcgctgtccttccctgccctgacct

SEQ ID NO: 1819 - DNA, 254 bp, Homo sapiens
  source 1..254: mol_type = other DNA
tgaaatcccagccgtttgaaaaaaaataaaattaaatgaaaattcgttcaatgaatctttggcctgggtgttgacagtctaggctcaagcctcagcttaacggagatacatttcatctgcctctcggaagtggtaaatacacattagcatttcctcatggagttaataaccaccagaacctagactcaatacttatggaactatgattactccattatgagtttcatgttcgtttctgcagggacgagaacgcg

SEQ ID NO: 1820 - DNA, 249 bp, Homo sapiens
  source 1..249: mol_type = other DNA
gagtactgcaccttaagtgggccatattaaaagattcacgtaaagaatgacatttttagttcaaatctctgttttcctaagctatttggtcagagaaatcacacatgggtccccataagagagatcgttcttacgttttcaccctgttccaccagggggcagactgacgggacagggctggcagccttggcctgcgggcagggggtggagcccggaggggtgccgcctctcctctttcccggagcctgg

SEQ ID NO: 1821 - DNA, 346 bp, Homo sapiens
  source 1..346: mol_type = other DNA
ttcctcctgtaggctggcagaggacagattttatagcatcctgaaagaaaagcagataacatttttttcctctattacaacacaaaaaaacgtaaaaactttgccagtctcatacattcaaattttaagagtatcagggaaaatattttccacaggcgaagaaactgaagctgctgcactcctcttctggagagggatgaagctgtcacacaccggggagagctcgcccctcgccgcccctggtgtctgcgcagctgggccgcggtggcccgtgggccgctgcagagggtaaatgaggaccctctacgatccgaagagttcggacaggatctcttctcgtgtgcgt

SEQ ID NO: 1822 - DNA, 214 bp, Homo sapiens
  source 1..214: mol_type = other DNA
gtgagccgagatggcgccatcacactgtttatttatttatttaagacagagtcttgcagagtagctgggtgacctcaggtgatccaccctaaactgttaaattaaactcaaggtatggcacaaaattttaaaagtgtccatttatccctggatagtgatcaaagaaggtaaccctctcaacatggtgacgcatatgtgtcacaactggcacaag

SEQ ID NO: 1823 - DNA, 349 bp, Homo sapiens
  source 1..349: mol_type = other DNA
ttctgtcaaagcttcttaaaaatcttcaaggtgagagtctatacctttgcatgcaaggatctactttaattccacactctcattaataaattgaataaaagggaatgttttcacctgatataatctgccaggcttgcactggtctgactttataaattatttaataaaatgaactattatcaaataaaacgtatgaatcagtcctttatagttgtcttttaataaaacaggcatttgataatgttatctgcacattgtttctggggcaacaggccaggtggccaatcaactcctaggcaggtgtaaatgttactatgactactgaaaccttggttactgaactaaacag

SEQ ID NO: 1824 - DNA, 388 bp, Homo sapiens
  source 1..388: mol_type = other DNA
cttacagtgagccgagttcgcaccactgcactagtcccagctacaccggaggctgaggtgaggctgtagtgagttgtgatctcgccactgccgcactttgtagtctgttctaaatagaacacttaagttcataccatgccgaaaggagactgagtggggctcttttgaacctgaggcccagaaagttgcaaaggggccaaccattgtgggcagccagcctggcgggagaggctagggcacgaagcgccgcccagctggcccaaggtaaggccgggagccgtactccagggcgactgggaggatccactccctgccgcggctctccctccagtggactgccttcccgcctgcctggcggtgggagggcgcggcagagggacgtcacatc

SEQ ID NO: 1825 - DNA, 339 bp, Homo sapiens
  source 1..339: mol_type = other DNA
aaatttcatctgtagctattgagctcaagtctaaaattatgtaaaggtaactgctcttgggttaaccttaacaaaaaacactgggtagtttaagatgagctgggaaatattttattctgcagataacagtgcctgctcaacttagtagtgccctaaggacctaccttgggggcattgtgtcccacagggacatgaggtccccttcgagatttcattgcaaagcgcatgattaaaagatgtaaaaatcctttaataaaaagtcagttttgttttgttttttttttaaaaaagcatgccttcattccaaatccccagattccggctctcaggaatggcggg

SEQ ID NO: 1826 - DNA, 510 bp, Homo sapiens
  source 1..510: mol_type = other DNA
catgggggagtttgggggagctccaccccatcgccctccctcccccccaaaccaggccggatccggatcagaggaggcccgcagtgggtggaaagggaggaggccctctcctccgcaggcaccggccggggtgaagagagagccctacctcaggcaaggcccaggcctcgctcgctcccggccacgctcccaaatcgaggccccggctctggcgcggcccactaggcccgggggccgactcgaggtggggggcgccagggctcaaggggccgcggacaatacccggccccgccgcgctgccgctgccgccgccgccgccgccaacgccgctgcgctccccgggccgcgccgcccctgtcctgcgtccctcagcgcgtgacgctaaaaggggcgcgcacgcaagcgtgcgcgtgccgcctcgccacgagacatcacggcggccctgcctccaccacgtgacgcacggatggccgcctgcctgagtcacgtgtcagggggaagctggaaggc

SEQ ID NO: 1827 - DNA, 429 bp, Homo sapiens
  source 1..429: mol_type = other DNA
ttaataaaaagtcagttttgttttgttttttttttaaaaaagcatgccttcattccaaatccccagattccggctctcaggaatggcgggtcggcccgactaagtgacttaaactcctactccggggtggggtaatctcctcaccaggctcccagttactgccggacgccatggcccccgctgtcctggctggtcagcccaggctccgccgaagcgacggcgcctgggtcccctggagctccccggccatttcctgggaaaggagaacgacgccttccagcttccccctgacacgtgactcaggcaggcggccatccgtgcgtcacgtggtggaggcagggccgccgtgatgtctcgtggcgaggcggcacgcgcacgcttgcgtgcgcgccccttttagcgtcacgcgctgagggacgcaggacaggg

SEQ ID NO: 1828 - DNA, 399 bp, Homo sapiens
  source 1..399: mol_type = other DNA
aacaattgagatagtctaatctttaaggacaatggtgtcagatctcaaagcagttttatcaactgatacacagcaaaatgttttaattctctgtaatcattggagaaacgctggttactagtaatgtctccatttaataaaacgttaacaataataacaaaaacgcctgttactgtggtgtttttctttctacatttcaagaatggtggatttgcaaagcaatttgcattcctgtaccattatgagagtgacgtcccttaagcgtaaatacaccctatgggggacacaattgtttggggtacccaaaggtggaggatgggaggctcacccccctcagcgccacatcgacacatgggggagtttgggggagctccaccccatcgccctccctccccccca

SEQ ID NO: 1829 - DNA, 557 bp, Homo sapiens
  source 1..557: mol_type = other DNA
gtagaatccttccttgttagaagtcttgtaacaaaaactatattcttgtctctttaaagactcaactaagtcatcttgccagcattaaggtctcaagtttaaaatgatttcttagaagcactttcttccaaataaaactttgtgctagatgcttttggtggaattattttccagagaacagagattcttggtttaaaaaaaagaagagtctagacttgaacttgtcctttcattgaatacagtatttaaaattatttctctggagtgtagactaatctccttcctggaaggtggtacttcagatacttgcatctatgtaaaaggcttttgattattagttaaatgtaaagtctgcttatgggggactagtaaccaaactgctgtaacttcttaaaaaaatccatcacttacacatgctttatacatttcttgttacataaaaatggattaacagccatagctccttaaggaatttatcaagctaattatgttgtaagaataaatgaatcttattgatttgttcctttgaagagttaaaaacatattttgcccacatt

SEQ ID NO: 1830 - DNA, 245 bp, Homo sapiens
  source 1..245: mol_type = other DNA
ggatgctaacattgtattaatattaatccttttggttaatttacagagtttctcctaaagatttgttgaccaaaataaaacagaccacacaatgttgaaggtgagcatgctgtgtaattctcagcattaaagaaaaaagattctacctaatatagtccattgtttagacattcccttttttctgatgagaggaattcctagtgaaatctgattcaacggtatctgcagcttcatcctccttgggt

SEQ ID NO: 1831 - DNA, 324 bp, Homo sapiens
  source 1..324: mol_type = other DNA
taggtcaggagttcgagaccagcctggtcaacatggtgaaaccttttcccagctactcgtgccactgcacaaaaaaaagataccaaagggatatttctttataacccccaatttggcctgcttagaaaaaagaattctatatagttataacaaactccctagtagctagagaggtgggaaaagcattttaggctggccagccccgcgggtggggtggttgagggacgccctcaagccggtccattgggctgccatccagagtcatcacgcccactcccgtcacggaaacttcaaatttcgtcgtttacgacagtgtcaggatcg

SEQ ID NO: 1832 - DNA, 423 bp, Homo sapiens
  source 1..423: mol_type = other DNA
aattttattgttttgatttgtaacaactattaatagaattaagtcctttaggagtctctattcaaatacacagtttcagatttaaagtcagaattgtggctctgtaatcccaacactttgggaggccaaggctctccataaaaattttttgaagattggccaagccagggttgcagtgagccaagattgcaccactgcaccccagcctgggcaacaggatgggaccctgtctcaaaaaaaatgtaaaatcagaatttttgctttttcctagtccacaaactggtctcaactagtaaagaaaagttggggagagaaagctgtgatatattttttacatctcaactctcgatgagtcttgaggaatatgtagctggagattatttctaactaattaggaagtgacatcataatatattcagagca

SEQ ID NO: 1833 - DNA, 166 bp, Homo sapiens
  source 1..166: mol_type = other DNA
tgtgtctcaagtgattccaccatgttggccaggatagtcctgcactccagcctgggggacagagcaagactctctctcatggaagcaatagtactactctccaggctctgtgttacgtgcacagacacgtagctgctgttcaggaactgagctaatggtagctgtg

SEQ ID NO: 1834 - DNA, 356 bp, Homo sapiens
  source 1..356: mol_type = other DNA
ggtttatctgtttggcatcccttcctcctaaactaagaaggatcgaggaggataaggtaccaggactcaggcttctcatcccctacggctgcgggcatctgcagggtggagggggccaccatccagtgtagggcacaaccctggggactgccctccatagggggatgcctccccaagagggtagttaggggtggggaagccgcctccacccagggggcgtggtgggggcggtgaaactgaggcaccgttcctagacatctcggtgctgtgtcgttcacctgcagaggcagagaaacgtacgtgtgggggcatcccagcccagccacgccgaggctcggaagggctaagaccctccc

SEQ ID NO: 1835 - DNA, 373 bp, Homo sapiens
  source 1..373: mol_type = other DNA
cctgcagaggcagagaaacgtacgtgtgggggcatcccagcccagccacgccgaggctcggaagggctaagaccctcccccccgccgccggctccgtcacttccgccccgccgtggccgaaactgacacaaagtagcgggccgaggccccgggggagcggggccgcagctgggggggcgggagcccgtggggagccgagccgagcgccccccgccccagcccccggcatgggcagtacggggccgccggggcgggcgccgagcgctgagcgctgaggagcgggggcgcccgggagcgcggggccagatgcggccgcagccgcggggctggaggggccggccagcttcccggctcgtgcagccttggccagggg

SEQ ID NO: 1836 - DNA, 204 bp, Homo sapiens
  source 1..204: mol_type = other DNA
atactcagactgggtggagaccctggctgggggaatctgcgactggcagtttggatgaggctctgccttgtaaggccaggccttgaaccttttagtgcaccctgggaggggcaaactccccaccagggttgggaagacccctctgccagcccagaagggtggctgacccaggctctgtgcgaaagagaagggtggagcctgccc

SEQ ID NO: 1837 - DNA, 368 bp, Homo sapiens
  source 1..368: mol_type = other DNA
ctagtagctgggactataggccacacccagctaatttttaaatttttttatagaaatgggggtctcactttgttacacaggctagaacccaaagtgttggggttacaggcgtgagccactgcccctggtgttagtgtctgtcttcggtgtttaggtctgacagatgaggaaatggagactcagattctgaaccgctgctgcagcctgcgaggagcagcaccgggctaccaagttttaccctaaggggcctcctcgagggctctccaggtgtgcctttctccccgctcaggtgcggcgctgtggcaggaagccaccccctcggtcggccggtgcgcggggctgttgcgccatccgctccggctttcgta

SEQ ID NO: 1838 - DNA, 366 bp, Homo sapiens
  source 1..366: mol_type = other DNA
cccaaagtgttggggttacaggcgtgagccactgcccctggtgttagtgtctgtcttcggtgtttaggtctgacagatgaggaaatggagactcagattctgaaccgctgctgcagcctgcgaggagcagcaccgggctaccaagttttaccctaaggggcctcctcgagggctctccaggtgtgcctttctccccgctcaggtgcggcgctgtggcaggaagccaccccctcggtcggccggtgcgcggggctgttgcgccatccgctccggctttcgtaaccgcaccctgggacggcccagaatgtgcgagtgggaagtcgcactgacactgagccgggccagagggagaggagccgagcgcgg

SEQ ID NO: 1839 - DNA, 822 bp, Homo sapiens
  source 1..822: mol_type = other DNA
acgcgcgtgcacctgcgatcgcgacgcccagccttcgcgctctccctccgcgctccgccccctctgagcccgggggcacggggcggggcttgccggcagccaatccccggcggccacggcgggaagagcctcgcgctgcccaggaccgctggcgaccgttgtccctgcgcccggacctcgggccgcaacctcttcccgggggtgagcggcgcacgtgacactcctgggcgcgtgtgaaggcagcgcccggccgagaccggctcggtgcagacgcgggctgtcggcggcagaagggggctctctgctcagtggggcgcggccgatccgcacgtgcggccgccgcccctttctcgctcaccccgccgcccccagctctgggcaggaggtggcggggctgggaggcgccagccgcggaggggaggggcgcgcggagttgatgggccgctcgccgtccgtccaccgtctgtcgctgcgccggggatactcccgccgcctccgctctggtccctgggagcgtgggctgggccgcagggggcttccgtgggcctggcctctcccaccgcaggaggaaagagcagggggaagcccccggcgcccgccgcctccgagagccacggtgtcctcgggccgggcaggcgttgaagacgagcccgggcggggccccccgcgcgtcgtgcctgtcgcctgccgtgtccggagcagaggctagcgcccgcccgctcggcgccccgagccgtgagaaccccaccctgccgggcgtgggcgacggccggccgggggcgcacggagcagccgtcgcggggcctcgccgcggcctccagc

SEQ ID NO: 1840 - DNA, 763 bp, Homo sapiens
  source 1..763: mol_type = other DNA
aaaataagagtttttcaagaattaaaaaacagtctaagaattttaaatggtcaggaaggaccttaggaaacctatcctcactgcctcttaggtctaaagaagcctagggcttagcaggcgcccagggctccccttcgactgagaggtggtccaagcccttgtccagctcgggccccagggaggaaggggagaggagctggagctggagctactgctgctggggtagttgctctaggtgctgcagcccgaggttgcaccccggtggggctcctcctccgtggcccgggagtttttgcggcccttgcccgcggcggcctgaatcagaccctgcaggctgtcgcgggacagccggctgtccttggggccgacgccggccctgccgctccccagctcggccgccgagttcttgcggcccttgccaggacccggcccagcgccgcccgcctccgagtcattgccgccgccgcccccggggggaactccttgaaccacttggccgccatgagggggccccggccggctcggcccaggagcgtcggggccgtggagcaggcgacacgcagaggcgccaggggtcggggaccactgcattccccgtgactggggcgctggaggccgcggcgaggccccgcgacggctgctccgtgcgcccccggccggccgtcgcccacgcccggcagggtggggttctcacggctcggggcgccgagcgggcgggcgctagcctctgctccggacacggcaggcgacaggcacgacgcgc

SEQ ID NO: 1841 - DNA, 501 bp, Homo sapiens
  source 1..501: mol_type = other DNA
ctccttccgactctgtggaggaagcccatgctgtccttcccccaagacccatggggtctaacacttgtacataacacagcagtgatctattatctcattctcatgagagccattgtacagatggggctgggacgagaatccacgcctcttccgagtgtgaagacacagcatgcccacccccacggggagcagaggctccaggatcctgcgcctctgtccatggagtgccgggcacgctcgccacggctcgggggcgggggaagcggcgcccggggcaggaaacagcgtcctgcgcgggtagcccctgggagcacgcggcaccgagtcacgtgagaggggagcgcaggcgaaggggcgtcgcgcgcaagcacgcacggccccaggccccgggtcacatgtggagggaggggcgcgcggcttccggcggctgggggggccagcgagcggaggggggggcctgtcccggaggtggcggcggcgccatcttggcgaagggaagtg

SEQ ID NO: 1842 - DNA, 167 bp, Homo sapiens
  source 1..167: mol_type = other DNA
ttcaaggatcctgaagaccttgccaaacaggacagagccttgctgtatgctaagtcttttggttgaaagtgacagaagcttagccttttagactccaaagccgtttgctttcttaaaaatgaactcctccaccgtgccgtggaggaacagcccttttccgcctccgg

SEQ ID NO: 1843 - DNA, 386 bp, Homo sapiens
  source 1..386: mol_type = other DNA
cagcgtggccttagtcaagcctctgtaaagtacttaaccatttgcctggtggggtagtttttatgaccgcattaacaaggtcccacggtggggaccttggtcgtttgacgagatctgcgctcccgccccccctccacattggagacgcggccaccaccgcgctggcgcggagagagggaggaccctgtgcggggaattaggagctcagtactgaaacggcggttttcctaaacgggagttcgagaccaccctcccagctactccgtgaggcaggagaatcgcttgaacccggggcagaggttgcccatccggcctgaaaccaagcgtggcgcaagatttgctcaagcccctcctcttggccaaactttccggaggggaaggctttc

SEQ ID NO: 1844 - DNA, 355 bp, Homo sapiens
  source 1..355: mol_type = other DNA
tggtaggagtataaactggtacaaccactttggataaaaatttggtactatcatataaattttattcctaggtaaataccaatgctgatttccaacactgttggaaataaattatggtacataatggatttttatgtagcagaaaagtaaaaatacattgcttagtaatatatataaatgtgaaaagaaattaaagcaatataatagttgtgtaaacacaaaaaagttaattgataatattttagttcttggttagcatgtcaagttaaagaaggtgttcattatattattttaaaaatgaattcgtttaatttaatttaaacgggccattcaaagatttaaaagaggttgaatc

SEQ ID NO: 1845 - DNA, 379 bp, Homo sapiens
  source 1..379: mol_type = other DNA
cacagagccagccacacactgggtctcagcagctggcaactgttgccttacaggaggggcatatgcgcccatgtcacccctccactgtctgcaggtgtccctgccagagcacgtgtggaacatgccccttttctcatgagccaaaagggcagggctgcagtggtggcctgggctggtccagggctgtggcagtgggtgacgttcccagccaggtgccagggggcacaggggagggacgtgcccagggcttgccctttgtggaagccatatctgtttcacaagccctgggcacagggtaaccagagttgtattctgagcagagccttgatgatactaaatgaacagcatgcaaatgatgtgtaataatatgcaaattggc

SEQ ID NO: 1846 - DNA, 343 bp, Homo sapiens
  source 1..343: mol_type = other DNA
aactaacatttgaacaatatttattgaacaaccactttgtactgaatatcatagtatcttcttcttcttccaattttcatctgtaaaaggagagtgatgaacctagaaggtgtggatcccccgtgtttggagactgtatccggataatatatgtgaaacaacctatcgtaaaccctggtggttagtgagcgaacatcccttatcgccgtgggcttaagggttgtggccatacctgtagctacagttcccagtcctcgctgcgccgccactggggccggagcccaggacgccaggcccctcctctggggaggagcctatgcggggggctgctggcttggcttac

SEQ ID NO: 1847 - DNA, 402 bp, Homo sapiens
  source 1..402: mol_type = other DNA
ttctgacataggggaaaggacagattattcttatcctgcctctcaaacttctggctgggagccagagaaaacctttgggccggaggctgcggctcccccgacatgacgtggccagacacgccgctcgcgtcagggctgccttacgcccccaggcgcagatttgctgtggcacatgtactataacgcacaggcaacgtgatctcactccagaggggttcacctcaggaaatttcagacgtcacccccctcggaggaaggtagtcgcgacgaggggaggctgctctgtgaaggaaccgcctgagctgagggcacggtcgcgggcggtcagccctgttcgcagctacggcgaggaggggcgcgattcttgttgccgctccgcttagtggccgcgtccattccgcg

SEQ ID NO: 1848 - DNA, 356 bp, Homo sapiens
  source 1..356: mol_type = other DNA
gtgcagtgttttctgggttgctgaaaaaaaacaaaaaaaaccccaaaaaacaaaaaaccacctccttaagtctgttctttttggttctgacatgctcagaggggaaaggacagattattcttatcctgcctctcaaacttctggctgggagccagagaaaacctttgggccggaggctgcggctcccccgacatgacgtggccagacacgccgctcgcgtcagggctgccttacgcccccaggcgcagatttgctgtggcacatgtactataacgcacaggcaacgtgatctcactccagaggggttcacctcaggaaatttcagacgtcacccccctcggaggaaggtagtcgcg

SEQ ID NO: 1849 - DNA, 319 bp, Homo sapiens
  source 1..319: mol_type = other DNA
aagggcttaaaggtattagttcattgaatagtctcaccttaagaagcctaaagttgggaggcggacggattgcctgagctcagcagccagcctgggcaacacggtgaagtcgcagctactcgtgccactgcactccagcctgggcgacagagcaagacactttctacagcaggaggaactgcagttagatctaaggaagaacttcctttcaggtttggtacccaggcctgtgaaccactgccggcagggagttcccagagggtggtgactctcactgtggccccgaacgctcagggaggctgccaggttcccctaagcc

SEQ ID NO: 1850 - DNA, 528 bp, Homo sapiens
  source 1..528: mol_type = other DNA
gtccggggcccagatggggtgtgcctcagtgggggtagaggcccacagggtggagcggagccagaactcagcttcctgaagcagaagggctgctggggtctgtacagcaggatctgaggagcttgcaggatgccagccgcggggacccagctcatgctggcttggctgagctgggccacagattggcccagaaactgcagggcctggagaactggggccaggaccctggggtctctgccaatgcctcaaaggcctggcaccagaagtcccacttccagaattctaagtggtagcttccactcctctggagatgaccccctgccatcctgggcagagctgttgaggcccaagtaccgggcaccccagggctgctcaggtgtggatggcacagagctagccccagtgcggcaacaggagctggcctctctgctaagaacatacttggcacggctgccctgggctgggcagctgaccaaggagctacctggtgaggatggcatcttccgtcatgaccgcctccgctgccct

SEQ ID NO: 1851 - DNA, 345 bp, Homo sapiens
  source 1..345: mol_type = other DNA
ttgtactgttggattaataaaatgattttaaaatcccagacaaggactgtatgctccccagggtccctgggagcagatttggcccctgagctgaccctggtataagctgctgagccaagggacctgggccaggcctggagccaggcggataccacagcctccccacccaccttaagcaggagggctatttccacaccctgtcatctcagaagacggcaccgtctgctgaaactgtgctgggaccccggtcgcccaccaggaggtaagcccaggtttagggccgtgtcgctagacctcccggccaaaagtttccgcccccttggggaagcttctcgggctgcaaac

SEQ ID NO: 1852 - DNA, 596 bp, Homo sapiens
  source 1..596: mol_type = other DNA
gcttattcttgagcacaaaatgataatcaattattacatttatacatcacccgcctaggcctgtgaggtaactgggatccagagacctgaggcagatgaaatttatttccatctaggactagaaaaacttgaccttctacaggcccggcccagcctaggcccggggtggccacaccacagcaagccggccccccctcttttggccttgtggataaggttataccaaagggaacgccgcgggccctcagcggcagacggggaggcgggaggtcgcggccgcccagggaagggcagagtggggcgtttcgcgccaccgtccccatggggatgtcgagagggggctggctccgggtgggtcgaggcgggagccgggcctgcccggcgccccagcaccggcccccgggctacctgggcctcccgggtgcgccttcggctcgcgcgcgcccctccgcggcggctccaccgcccgggatggtacggtccggcagccgggccgcgcgctgccgcccctcggtgagctggtgtgggccgccgctagcggagacgaccctttccactcgcgtggtgccgttccccctccccgcagcgctcagtgg

SEQ ID NO: 1853 - DNA, 335 bp, Homo sapiens
  source 1..335: mol_type = other DNA
ccaggctccttccctggtgtgaaggctcacccttgacagtgtgctgtgttaacaagccctgtggaaaggggagagaacaagccgtgaccagcatgtcctcttgttccctctgatgtatcatccaggccagtccacagctgctgtagcagaggatctgggctggggccagcatgctgagctctgagatctcctcggcaggggagaggggcttggatagccctaccccctgctccagttcgaggttggggcggggtgggggctcagcccctctgagcctgtgagtcagcctccccttagctccccgcccctggggaggagccagaagcgctgggtcc

SEQ ID NO: 1854 - DNA, 114 bp, Homo sapiens
  source 1..114: mol_type = other DNA
tgtgtttgcccgataactcatgggtgagggtggtcagtaccctaaccacgcccacttctcaagaacgagcgtgggtcaaaagtaggcgtcttattggccaccactgcccatctc

SEQ ID NO: 1855 - DNA, 167 bp, Homo sapiens
  source 1..167: mol_type = other DNA
gcttttcagctgtgaataaagctcctaagggggcgtggtcccctaaggacgcgaagagccccctcctcatggagtctccgcaccgcaccgcgggccgatttggtgccggagatgggcagtggtggccaataagacgcctacttttgacccacgctcgttcttgagaa

SEQ ID NO: 1856 - DNA, 229 bp, Homo sapiens
  source 1..229: mol_type = other DNA
gtgacagagggagactccgattattgttggaaaaaagtttaagatgtacttttagaacatttcttgtcaaagagatttaagtaattcgttttgtctactatactagagataaatgctttctcactccagtaaaagcccttagcctagtgttagagtcgaggtcccgcccccgaccgtgggctaaggtccggcccccgtatttccgggcgagaagtgaccacgtggttgt

SEQ ID NO: 1857 - DNA, 215 bp, Homo sapiens
  source 1..215: mol_type = other DNA
tttcaattactctactgaaaaacttgtagcaaagtccctacaatttttcaatgcaatttaccctcgagccattgcactaagagttttacccagcctttttaacagatgacctggagtgcagtggcacagtcacagcaggctcaagcagtcctcctgcctcagcatctggagttgctgtgactacaggtgttaaaatgtcaagttttaataataat

SEQ ID NO: 1858 - DNA, 328 bp, Homo sapiens
  source 1..328: mol_type = other DNA
ccatggatgggccccttcccagggaaaggtgagcatttgtgactattctattactctgacctcccagggagggccaataggatcgcccacccggagtcgggagtcccgcacatgacctcccaccctaggagggagggaaggacaccgtcctagggtatagatgggagaagcagaaaatgctgccagctctgactggctgtgctcactctaaggggcccaggggcctgaggttctcaatgtcagcctcagcaggagcccaccagaggaaagatggagtggccaggccctccctcccactaggggctgactcagcctgttcccaggccta

SEQ ID NO: 1859 - DNA, 422 bp, Homo sapiens
  source 1..422: mol_type = other DNA
aagcgagtccgacccggttcggcctggcttgtcgcaggggagccaaacctggccctaggcggtggagactcagtttctccacttagggaaccccgggatggaggtggggagcaaaagcgtcggcgcgccccctcccccttcgcagactgggcccctcccctccgacaatgccaaggccgcagcgggcactggcgacaggcgcccttccctccccgcggggcaccgtcacgcgtggggagggacgcagggcgcccgcaggctcaactccccggctccctccgagagggggtggggcgtaggggccggagccgaaggcctggtggctccccctccccctcccgaccctacagaagcccctcttgaaggagagggagcccctgtagggggtgctcgattccctggccgctgcggacactgccccc

SEQ ID NO: 1860 - DNA, 320 bp, Homo sapiens
  source 1..320: mol_type = other DNA
ggtggggagcaaaagcgtcggcgcgccccctcccccttcgcagactgggcccctcccctccgacaatgccaaggccgcagcgggcactggcgacaggcgcccttccctccccgcggggcaccgtcacgcgtggggagggacgcagggcgcccgcaggctcaactccccggctccctccgagagggggtggggcgtaggggccggagccgaaggcctggtggctccccctccccctcccgaccctacagaagcccctcttgaaggagagggagcccctgtagggggtgctcgattccctggccgctgcggacactgccccc

SEQ ID NO: 1861 - DNA, 558 bp, Homo sapiens
  source 1..558: mol_type = other DNA
ccctcccccacctcaggcccacagttggcatggggcgctgggagcctgccagcatcctggtgggtaggtgccaaccgggccgggagctggtgaggggcagcaggccagcggcattgagccagcagcacccccaagcctagcaggatttgggatggcctagtgtctgggggtcactagggcacccctcattccaggaataagggaccccaggagtggcccatcctctgggctcagagctctcctgagttgcccctcaggcccaggcgggtcccacccaaccggccagggtggcagcagcttgcgcaaggggtggggctaggcgcttcccagcagatgccccctccttgggggctggcatgagtgctgccccctggcctggttggcaggggttggcacccgggcatggggagggcggggtgccgccttgcccagcccctgagggccccagcccagtacagggtagggagaattcggccagctcccagggggactgagcttgtggtccccatcccacatactctgaggggctgggacccaggcacctgtcacccctggcag

SEQ ID NO: 1862 - DNA, 638 bp, Homo sapiens
  source 1..638: mol_type = other DNA
cacggagccttgcccaattccaagctaagaaggtattggggcagaggctccccaaattggggtgatcccccaaggagtgatacatatattgtgtatatatttacagctgttccccagctgctcctggggagtagaagcaatgggggtgggggcttgggaccaaagccttgccccgcccctatgccccttgggggttttggctgtgtaagggggtgaaggactgcccctccctggaaggagccatcccagtccccctccgccctgctcccggcgctgagtcatggggtcgtggagaagggggcgcctgattggctcgcctgcccctgggggcagtagaggggccccgcccagctaggggagccgctccgttccactcccctccctagcccccctccccacggccctgggcagggaatgtcttgttcccgccgctccctccccggggccagagggcagggcgggccgggcggcgtcctaccctcttctcctcccccgcccaggtgcgagccggagccgccgccaccgctgccgcccctgactcacgccgcccccgggctggcgcagcgaagggtgtggggcgggcgagccggcgccatctggcggccatgctctgagtgggcgagcgccccccgcggcca

SEQ ID NO: 1863 - DNA, 354 bp, Homo sapiens
  source 1..354: mol_type = other DNA
caagctgtacaagaacataatcttctgttcttcgtagatgttaaaggccaaaagatgggtcctagccctggtccagccccccagcgcctgcccccagcaggagagcgctcgcccggctggcgccacaggaaccagctacctctgcaccgctaagagggggacagggtagctcaacagcccactcttctgctgggtctctgctgagtgactcacacctccttggacacaaggagaagagaggtgcgcctgtctcttgaagcctaggcctgagtccgagaagtggggaaggagattagagacctacctatcccctctccagtcctcggaactgggtcaaggattccaagacatatg

SEQ ID NO: 1864 - DNA, 334 bp, Homo sapiens
  source 1..334: mol_type = other DNA
cagaggcgggaagcctggattccggtctggttcagggccagctctgccccacaggctacagcctcgctggcccgggtgcaacagtagtgtccggccctgccctgggggcgacagctttgttagaaccaagcccaggacctgccccctagccctgggtgccaagctcactggagaaggcctggacctggcgagagaatcccatgcccaggctaaggaaggcagccaaagtgagggtgcccaccaggcaaccccaggggctgtggccttcagctccaggcctccccccaaggggtgcacaacatccttcatgactttgggcatggaaagggccata

SEQ ID NO: 1865 - DNA, 713 bp, Homo sapiens
  source 1..713: mol_type = other DNA
tcactgtgagaaccaagagcctggagggtgcatcctcccattctccatcacagagttggggagggaggcaccctcgccctccaggggttccaaccaacacgcgggaattgtcaggcctggcgacttcagacaggacgggctggcgctaacgcccacctcccaacagcgccacccgctggcggatatcctgcaccgcggctgcccgctcctgcgccgctggctgtgccggcgctgcgtggtgtgccaggcacccgagacgcccgagtcctacgtgtgccggacgctggacgtcgtgctgggacgacatgcggcagcggtgcccggtctgcacgccccgcgaagagccgacgacactgcctacgcggggtgaagaggcgtcctgctcgctctcggggactggggtgagccgcgcactgcctcgcctgcagtcgggaaagcctgcccgcccgacctctccgagccaggccgcgcacaggaggcagggaggagggaggggtccggacctggcgccgggtgaaggcgcgccgcccaagccggtcggaccgggcaccggctcccactccgcacagttgcggggaagcggtagcgctgagcagcgcgggcgtagtgggcggtgtccccgctcccgaggcacccggcgcgcagcggggcgggctttgccgggggcggagcttggggcgggccggggcggggcctggtggccgcgcggcgct

SEQ ID NO: 1866 - DNA, 558 bp, Homo sapiens
  source 1..558: mol_type = other DNA
tgcagacaagggtgaccgctggtgctgcccccaagctggtgttccccagcaccagtgcgttgggggtgggcaacatgacacccccccacctaagaagccactgcctgccgacccccagggccggtgcccatcgggtgacctgcccggcccaggggctggaatcccgcccctagtggtaccctccaggtaggaggagccctaaggggcctcttccggaggttccgctgcctccaagccggacttagggcttcaagaggcgggcgtgccctctggagtcccctaccatgactgaaggcgccagagactggcggtgtcttaagactccgggcaccgccacgcgctgtcaagcaacatccgcacagcctgtcgaacccgggtcgctcctgctgcggttccaggtttggccgccagaagacgctgccgcctcagacgagggcgggctgtgttgtgtccccgggatgctcgcagcttccctctgcccagactggggtggcagtggatctggctgatgctcccagagcccaggagccagggcggagcggggcggcggctgctccc

SEQ ID NO: 1867 - DNA, 495 bp, Homo sapiens
  source 1..495: mol_type = other DNA
gaacccgggtcgctcctgctgcggttccaggtttggccgccagaagacgctgccgcctcagacgagggcgggctgtgttgtgtccccgggatgctcgcagcttccctctgcccagactggggtggcagtggatctggctgatgctcccagagcccaggagccagggcggagcggggcggcggctgctcccacgatcccaaggccctggccgccgccacctgagggatcgggaacaaaggtgcttttagggactggggccgcgtgggcccccagcccggaaccttccgcttgcactgtccctagatgtgcaaagaaaacgggggacaggcttcatggattcctatctgggcaaaggttatgtacccttatttaaaatcttccaaacttcttcgcagtgcggtgcagcctcagtggaagctttggcgaacctggcgcgcgctgcggtgcacagagggttaacaggggcggggtcagtgaatctccgtaccccactcc

SEQ ID NO: 1868 - DNA, 368 bp, Homo sapiens
  source 1..368: mol_type = other DNA
aaagctcttatcacttgttattggtgttctccagagagtctgtggaatccacacacagtatgtgtttaataaataaatgttagtgagtgaaagagaaagaaataatagtttatatctgtacagcctgcagctccagcctgcgggaggctggggatcgccggggggcggagcccggagtgcgggcaaaggcccccccagctccaccccctagacaacccttggggctggggtcttctgcctgccccccaacacatgcgggctgtggggagacccagggcgcgcctcgcccctcgcccctcccccctcaaggagccccggcgcgcggccaggctcaggcggcgccgcgcaaagagcgggtggcgggcgcg

SEQ ID NO: 1869 - DNA, 482 bp, Homo sapiens
  source 1..482: mol_type = other DNA
ccctctgactcaggatcagcgtctctgagagtaggagtgagaatccctggggacaaccctggctgccccgggaggggccctgcctaagtgccagtgaggaatccaggtgtccagggaaccctgaagactcttacagctcccagtattgacattctcaggggctgagctcttttactctgcctccaagataaacaagcctcatgctcagctgggggcttcaggtcaccagctgtcaaagccttggtgcacctgagtcctcatgcacacgggaaaagggggtccagccctacttactaagaggtcctggatgggcttccctgagatcgagatccttatcttgggttcccaaagcacgcgctggtctttcccgagggggcagtacggtccccacctcccacgcgtcgcgcgctcccgaccggagcgggacggggcctgtcgggggcgcgccaggggcggggcttcgggggcgcgcccaggagggc

SEQ ID NO: 1870 - DNA, 559 bp, Homo sapiens
  source 1..559: mol_type = other DNA
ccctctgactcaggatcagcgtctctgagagtaggagtgagaatccctggggacaaccctggctgccccgggaggggccctgcctaagtgccagtgaggaatccaggtgtccagggaaccctgaagactcttacagctcccagtattgacattctcaggggctgagctcttttactctgcctccaagataaacaagcctcatgctcagctgggggcttcaggtcaccagctgtcaaagccttggtgcacctgagtcctcatgcacacgggaaaagggggtccagccctacttactaagaggtcctggatgggcttccctgagatcgagatccttatcttgggttcccaaagcacgcgctggtctttcccgagggggcagtacggtccccacctcccacgcgtcgcgcgctcccgaccggagcgggacggggcctgtcgggggcgcgccaggggcggggcttcgggggcgcgcccaggagggcgtggcctaaggctgggggccgacggcggcggcagcagggagcgcggggctcagtcggggggcggcggcggcggcggc

SEQ ID NO: 1871 - DNA, 466 bp, Homo sapiens
  source 1..466: mol_type = other DNA
cacctccctagaaggaagatgtcggtgtgtcacacacgcacacacacgcccgggctggggacggcgaatggccggggaaggggctgcggtcgctgtccgcgcggccagctgcgtctgggctggggtggctgttggcgccgccgcggtcgtgctggctgcggggccgggtcctggggacgcgggggtcactgtcacacctgcccgggcggtggcggcagcactgcctctggctgcccaccccagggaccgacaggggaggggaccgggagggccgggcggccgcgacccccaacctctcggaggaggggctgccgctcgccgctcccctctctccctcctcgcgcccggagtgtcagactgggggtggggatgagccaacgacgcccccctctcgcttcccatggaaacctcgggggtggggacgtggcccctcccccccggagcgggactccaagaactccggggg

SEQ ID NO: 1872 - DNA, 489 bp, Homo sapiens
  source 1..489: mol_type = other DNA
ggtgtgtgcgtccctcggaggggatccctcccacgttcatcccatccctcctcccggctgctgaattatgggggatggacggagcctgggtctgagagtcgctggggcctgcgccgtttctgggaaagcggcaggccgggcttccctgctaccctctggtggccaacaggagagcggcggcactagggccccgggggcagagacagggctgagccggaccctcccacagcctgcggcgaggtgcagacagctcgggggtgggccccggggcgggaccggggcccggaggcggggcagagcagtacgtgctgtacatggtgagccgcaacggctaccgcacctgcaacgccagccagggcttcaagcgctgggagtgcaaccggccgcacgccccgcacagccccatcaagttctcggagaagttccagcgctacagcacggcggccgggcgggcgcagccggggggtggagcccctaggctccggggcg

SEQ ID NO: 1873 - DNA, 432 bp, Homo sapiens
  source 1..432: mol_type = other DNA
gcatctgcttctctgtcccaaagagggaagggcccctgagtcccttgtcacgggactcaaggtacagaagccagtgatactgtgggagacccccagattggtggggtcaaccaatactggcatgcgggccagcacacatacagcccagcttttctgtgtgtctcatagaacttatgcatgtatatgcatgaagccgccatacatgcgtctgtaagggcggtgtgtgcgtccctcggaggggatccctcccacgttcatcccatccctcctcccggctgctgaattatgggggatggacggagcctgggtctgagagtcgctggggcctgcgccgtttctgggaaagcggcaggccgggcttccctgctaccctctggtggccaacaggagagcggcggcactagggccccgggggcagagacagggctgagc

SEQ ID NO: 1874 - DNA, 440 bp, Homo sapiens
  source 1..440: mol_type = other DNA
agcggcggcactagggccccgggggcagagacagggctgagccggaccctcccacagcctgcggcgaggtgcagacagctcgggggtgggccccggggcgggaccggggcccggaggcggggcagagcagtacgtgctgtacatggtgagccgcaacggctaccgcacctgcaacgccagccagggcttcaagcgctgggagtgcaaccggccgcacgccccgcacagccccatcaagttctcggagaagttccagcgctacagcacggcggccgggcgggcgcagccggggggtggagcccctaggctccggggcggggccggcgcggcgggcgccaggtctcgcggctgagaccagggaggaggcgtgggcacgggacgcctgaggggttcgtcccaagtttgggctgcgcacattgggcgaaagtgactcaggcccg

SEQ ID NO: 1875 - DNA, 481 bp, Homo sapiens
  source 1..481: mol_type = other DNA
cgcacctgcaacgccagccagggcttcaagcgctgggagtgcaaccggccgcacgccccgcacagccccatcaagttctcggagaagttccagcgctacagcacggcggccgggcgggcgcagccggggggtggagcccctaggctccggggcggggccggcgcggcgggcgccaggtctcgcggctgagaccagggaggaggcgtgggcacgggacgcctgaggggttcgtcccaagtttgggctgcgcacattgggcgaaagtgactcaggcccggtctcctagccacgcccactcacaacctgcactggaagtgtctgaggatgggctccgagccgcgcccccatcctcagctcttggggcaggtgaggggggcttgctccccagccgtagcaaggggagggaatcctggccctgactctcccctccactccggggagaagccggtccccatcccccagttcaccatgggccccaatg

SEQ ID NO: 1876 - DNA, 452 bp, Homo sapiens
  source 1..452: mol_type = other DNA
acattagcatacgtctgtcaaagagtttcacacgcttccacacacgcggctgtatgctagcgcgccatcacacgtatttcatgtgtggttacagctcgagcccagggtcccgcgtgtcaaaacaaacagccgcgtgtgtgtgggcgcgggcgcccgagcctgggcatgcgaggctcagaaaggtgcggggcatgtcaacaacctcgcaccctgcaaggtccgcgcgcggagcagcaaagccgtgtcccgcacccccgcgttcgcagactcgcacttgcgagttctcgcacgcgactgcgcccagggacgcgaacacacatctctgagcagatctgcgggggcagaggagcgcgcttcgctctttcctcccagcccccaagcccccaggcagccgcgcgccgggcggggcgagggcggggcggggtgtcgggcggcgccggcccaaaaggcgg

SEQ ID NO: 1877 - DNA, 371 bp, Homo sapiens
  source 1..371: mol_type = other DNA
ttgtcaaagatgccccctccacagtttcttgcttggaaggcatgcttgggctgacccagcatctcccagcaagacctcatctgtggagctgccacagagaagtctctcccatcctggggcagcactccccagagctgtgccagcaggggggctgagggcagtgcccatgtgtacattctgcctagagtgtagcctaaaggtttttatacaatgttctttgtctcaaaataaagcaatgtgttttttcggactctgagggctgtccaggaccggagtgctcctgacagctgtctctcggggagctgggaacgccagctgaggcatgcggccccgccccacagccacactagcagagacgtgtgggaggctgg

SEQ ID NO: 1878 - DNA, 254 bp, Homo sapiens
  source 1..254: mol_type = other DNA
ctctgagggctgtccaggaccggagtgctcctgacagctgtctctcggggagctgggaacgccagctgaggcatgcggccccgccccacagccacactagcagagacgtgtgggaggctggaacttcccaaaccctgggcaactgaggttctgaccaccgccgaaggcgcacaggcctgtcttcggcgcagtttccggagggacggcccgagcgtgcgggggcggagccgagtgcgcggggcggggctccagag

SEQ ID NO: 1879 - DNA, 343 bp, Homo sapiens
  source 1..343: mol_type = other DNA
tctaaagaattatactctatattggttgttgtccttgtaaaaatatgactacctctgttctaacaatatcgcgcgcgcctgtaatcccagctgctcggaggcactatagagagaccctgggggaatggtattatattcccatcttgttgcaacatttaaggatgtcctcaagccccacgccagcctggagcgtagcccaaggtgggaaagcagcgccgaggcctctccagacccggcctgctccccgtttgcggagcacagcccactgtacccccgcctagattgaggcgctggccaggagtacaccaggcgccgccatgtgaactacaactgccgcgcggag

SEQ ID NO: 1880 - DNA, 368 bp, Homo sapiens
  source 1..368: mol_type = other DNA
cggggtatgggcccaaccctcgcctccctgtcgcaagagggcgctgcgtccacggtaagcgctgacgcatgcgcatagctaaccgcacccggttcagctcgcctttcttggccagaggcgccggttggaccggtggggtccccaggaagtccggacaagctttcctcgtcctctcccgacagagctgacgtcgggagcgtccaccggacgggagcgattcttggagggggtcggcccaccgagcttccggaccggctgatctgcccgtgccggagggagggcggagcctgactctccgtcccttctcccatcccctccagtggtgggtacgggcaccagatgtacagccgtcagctggcctccaccga

SEQ ID NO: 1881 - DNA, 260 bp, Homo sapiens
  source 1..260: mol_type = other DNA
accccagcccacccgctgcgtctgggcttccatgatggaagtgaaggtctgcatatcctcatggaccgtgcccgcccgcccctgggtgcccgatcccggctgcggctgcgaaccccgggcttaatgcgcatgctcccgggaccagcctcgaacagcgcccgtcggggtagggggtgggaaatagttctccccacgtggttctcgaaagcggggtatgggcccaaccctcgcctccctgtcgcaagagggcgctgcgtcca

SEQ ID NO: 1882 - DNA, 396 bp, Homo sapiens
  source 1..396: mol_type = other DNA
tgcccgtacccaccactggaggggatgggagaagggacggagagtcaggctccgccctccctccggcacgggcagatcagccggtccggaagctcggtgggccgaccccctccaagaatcgctcccgtccggtggacgctcccgacgtcagctctgtcgggagaggacgaggaaagcttgtccggacttcctggggaccccaccggtccaaccggcgcctctggccaagaaaggcgagctgaaccgggtgcggttagctatgcgcatgcgtcagcgcttaccgtggacgcagcgccctcttgcgacagggaggcgagggttgggcccataccccgctttcgagaaccacgtggggagaactatttcccaccccctaccccgacgggcgctgttcga

SEQ ID NO: 1883 - DNA, 402 bp, Homo sapiens
  source 1..402: mol_type = other DNA
aaccacgtggggagaactatttcccaccccctaccccgacgggcgctgttcgaggctggtcccgggagcatgcgcattaagcccggggttcgcagccgcagccgggatcgggcacccaggggcgggcgggcacggtccatgaggatatgcagaccttcacttccatcatggaagcccagacgcagcgggtgggctggggtggcctccagcagtgcaccggggctgggggccctgccccgtgcagttcccaattcctgcggttggcaacccgtgcctggctctcccaggggcggtgccaaccgtgttccccagctgcgcccctgaccgggatggctgcgaatgtgggggtggggcatagcctgaggacccccactctcgccaccaagagggggaggggacttc

SEQ ID NO: 1884 - DNA, 234 bp, Homo sapiens
  source 1..234: mol_type = other DNA
gccgcggacacgcagcacatacacagagcccgtgtcggggttctcaagcagggcactggtgcccctcacctcctcccgccgctgccagcgggtggggcctggctgagcaggcacatccgtgcgccggacaggcacagtcagggcctggccactggcctggcatggagggcaggggacacctgtgtgctaagatcaggtaagttctgggggcccttgcagctcagttattctatg

SEQ ID NO: 1885 - DNA, 424 bp, Homo sapiens
  source 1..424: mol_type = other DNA
gccacggcagtgaggcagcgctgctctccgcccggtccgagcggcccctcagcttgcgcggcccagccccgcaaggctcccggtgaccactagagggcgggaggagctcctggccagtggaaggaaggaccctagggttcatcggagcccaggttccttggctttctccaaggagggaacccaggctgctgggccccgctctgcttcagtggacccggggagggcgggggggtgggcttccgttgccctgaggctaaaactagagcccaggggccccaagttccagactgcccctcccccctcccccggagccagggagtggttggtgaaagggtaccctacccaggaatggttggggacctgtcacctgctccggctgtgcctagggcgggcgggggggagtggggggaccggtataaagcgg

SEQ ID NO: 1886 - DNA, 369 bp, Homo sapiens
  source 1..369: mol_type = other DNA
ggcgtgagccaccgtgccacgcccgatctgcctctgccacggcagtgaggcagcgctgctctccgcccggtccgagcggcccctcagcttgcgcggcccagccccgcaaggctcccggtgaccactagagggcgggaggagctcctggccagtggaaggaaggaccctagggttcatcggagcccaggttccttggctttctccaaggagggaacccaggctgctgggccccgctctgcttcagtggacccggggagggcgggggggtgggcttccgttgccctgaggctaaaactagagcccaggggccccaagttccagactgcccctcccccctcccccggagccagggagtggttggtgaaaggg

SEQ ID NO: 1887 - DNA, 308 bp, Homo sapiens
  source 1..308: mol_type = other DNA
tctgacagcggaactgcttccgtcggcctagagcgcagcctgcgactgcgggacccaagttccacgtgctgccgcggccacctcacgtgtgcaggctggagtgcaatggcgcgatctcggcactgcctgagtagctgggttggccaggctggtctcctcggccttccaaagtgttgggattacgggcgtgagccaccgtgccacgcccgatctgcctctgccacggcagtgaggcagcgctgctctccgcccggtccgagcggcccctcagcttgcgcggcccagccccgcaaggctcccggtgacca

SEQ ID NO: 1888 - DNA, 251 bp, Homo sapiens
  source 1..251: mol_type = other DNA
ggcctgtactgctccagggccccttggggctcgtccccgagcggggactgcgggggggtcccccgagcccctgcgccgcctgtcgccatgggggcggtggcggcggccggagcggaggccgggctggggctgctgtcgcttaggtgacgggaactcaggcgcccctcacccacagtgttccacagaggcttccagaaaacggtagcgcaaagcagggaggcctccaggattctttcccagtgcccctccca

SEQ ID NO: 1889 - DNA, 254 bp, Homo sapiens
  source 1..254: mol_type = other DNA
gccagggccccccgaagttcctgcgtctccatgcctctcagccggctcactacccctggcaggcaggcagctgggaggggcactgggaaagaatcctggaggcctccctgctttgcgctaccgttttctggaagcctctgtggaacactgtgggtgaggggcgcctgagttcccgtcacctaagcgacagcagccccagcccggcctccgctccggccgccgccaccgcccccatggcgacaggcggcgcaggg

SEQ ID NO: 1890 - DNA, 433 bp, Homo sapiens
  source 1..433: mol_type = other DNA
ttaacttatatgtgaatattttattatatttatttgcttacctatctgccaagggaggaaccaaattttattcatctttgcctggcaatgtttaatatttggaagaaatctaatagatcctctttaaagcaaggagtcaatgaataaatgaaattgctaagctctttatacaaagcctggctgtgagtcgtttggtctaacaaacaatgcccgtgcccgtgctgagtagccctggcaaggtttggatgcttggctgttcggccccctccccagtcatcagggcacagcagagggcgccggcgccacccctcaccagcacggccaggctgtccaggtccactgacggcagcccccagccccctgaccagcagaatgggcggcccgccccccgccaccgcccctccgatcgttgcggtcagggggcctggggaga

SEQ ID NO: 1891 - DNA, 481 bp, Homo sapiens
  source 1..481: mol_type = other DNA
ctgtggaacactgtgggtgaggggcgcctgagttcccgtcacctaagcgacagcagccccagcccggcctccgctccggccgccgccaccgcccccatggcgacaggcggcgcaggggctcgggggacccccccgcagtccccgctcggggacgagccccaaggggccctggagcagtacaggccacgtgcagtttggcaagagcccccagacctggcccaggcgcacaagaccccgctctccagagcctgccgcgccttcaggggttcggggctccacttggacgaggcgccgtgactctccgaggcgcgccgggccgacagcgctgtcccgctacgtgggccacctctggatgggccggcggccgccctcccccgaggcccgcggcccagtcccccgcagttcagctgcgggccctccccggggatctccccaggccccctgaccgcaacgatcggaggggcggtggcggggggcgggc

SEQ ID NO: 1892 - DNA, 419 bp, Homo sapiens
  source 1..419: mol_type = other DNA
gtcaggcactgcacttacctcactgactgcagtaaccaccctttgaggttgtggcattgcctccattttccaggcaaggaaatgggctgagctcctaaatctcatttgatgtggttcatgaggccacaccatggacagctacactttggtttttgaacgactttacaaacctccctgtcttgtgaggaaggaagaacagttattaccatctgcatctgatgatgaaacaagggacgctgcagagggaggacttccatgcctcacacacctctatagggcaaagactgtcttaaacatcttggtagtgtcagtattttgcacagtgaagtttttttttttaaattatatcagcttacatttctatcaaaaaaggttttatagggcatataatctgtaacagatgagatgtcatgtgacgc

SEQ ID NO: 1893 - DNA, 297 bp, Homo sapiens
  source 1..297: mol_type = other DNA
aatagaagagtgtgactcacccatggtttcagcatgtatcactatctaaaattattatttttgtttatatatctcagcttcaggaccctgtgcttgtaggggcaacgtggtgccctccaatcaggctgcaagacttcttgaataattcagcattcccacggggcagcttctgcgcactggacgttccctaacctgaggctctctaaagaggatggactcactgtgggaattcaatcgcccccatccaccaacagtgtgctggcgggaaaacgccgacacgcatgggagtcccgcctc

SEQ ID NO: 1894 - DNA, 472 bp, Homo sapiens
  source 1..472: mol_type = other DNA
aatcttcattgggaattaggccttatgagggagccctgctccccacccctctccattaatgacggggaagagccaccctagccagggtccagagcgaggcagggactggaggagcgcttatccgactgcctcgccctgccgcgggatcccagggtactcccggggtgcaccgcgccggccctcgccgccatgtagtccccgacctgcggcagccggagctcggggagcggagcggcgacacaggagacagcggcgccgcggcctctccccaccaggcggccccggatcctactggacgccctgagggcacaccgaccgcgcctccctagggagatgcgatgagccggtgcccccgcgtcctcatcgtcgccccgggcacggtgcccgtccagtgcccgtggtggggagggagcactccgcggtccctccgtgacgcccctcgctggcgtccctcggccatgccccaggggac

SEQ ID NO: 1895 - DNA, 404 bp, Homo sapiens
  source 1..404: mol_type = other DNA
gtggggagttcactgtgacctagtcccccggttatttaaataaaaagaaagtggaactggaactgacatccccgtttcctgaatcttcattgggaattaggccttatgagggagccctgctccccacccctctccattaatgacggggaagagccaccctagccagggtccagagcgaggcagggactggaggagcgcttatccgactgcctcgccctgccgcgggatcccagggtactcccggggtgcaccgcgccggccctcgccgccatgtagtccccgacctgcggcagccggagctcggggagcggagcggcgacacaggagacagcggcgccgcggcctctccccaccaggcggccccggatcctactggacgccctgagggcacaccgaccgcgcct

SEQ ID NO: 1896 - DNA, 472 bp, Homo sapiens
  source 1..472: mol_type = other DNA
tttcagaaggcccagcaagaatttgctgctggtgtcttctccaaccctgcggtgcgaaccgcagctgccaatgcagccgctggggctgctgaaaatgccttccgggccccgtgacccctgactgggatgccctggccctgctacttgagggagctgacttagctcccgtccctaaggtctctgggacttggagagacatgtggggagttcactgtgacctagtcccccggttatttaaataaaaagaaagtggaactggaactgacatccccgtttcctgaatcttcattgggaattaggccttatgagggagccctgctccccacccctctccattaatgacggggaagagccaccctagccagggtccagagcgaggcagggactggaggagcgcttatccgactgcctcgccctgccgcgggatcccagggtactcccggggtgcaccgcgccggccctcgccgccatg

SEQ ID NO: 1897 - DNA, 346 bp, Homo sapiens
  source 1..346: mol_type = other DNA
aggccctgggcccccctgcatcttttttatacaagagaacgagccagagttcactcacctgccccctcatacggagttggatgggggccgagtcatctaccccatgttttataaggaattttgtacagtctttgtgaaataaaataacttcatttgacccccatccctggagttggaggtttgggagagtttgggtatgaagggagtcctccttaccctccaaaatccttatcatatgggagggtcagattaaaacagagaaggtgccacgaccggtcagaaggctcccgtcgtccatctcgggagactaggaaggagacgcaggcgcaacccacggctgctgcgg

SEQ ID NO: 1898 - DNA, 364 bp, Homo sapiens
  source 1..364: mol_type = other DNA
agcggctgaccttgggtgaagggctgagccgcccaacaagttgtgggaaggccctgggcccccctgcatcttttttatacaagagaacgagccagagttcactcacctgccccctcatacggagttggatgggggccgagtcatctaccccatgttttataaggaattttgtacagtctttgtgaaataaaataacttcatttgacccccatccctggagttggaggtttgggagagtttgggtatgaagggagtcctccttaccctccaaaatccttatcatatgggagggtcagattaaaacagagaaggtgccacgaccggtcagaaggctcccgtcgtccatctcgggagactaggaagg

SEQ ID NO: 1899 - DNA, 379 bp, Homo sapiens
  source 1..379: mol_type = other DNA
aaaaaaaaaaatagctgggcgtggtgatgcgcgcttttttttttttgagacagagtctcgctctgtcacccaggctgcagtgcaatggcccgatcggctcactagtagctgggataggcgcatcaggctaatctgtcgtgcataacttttgttgatgacaaaaggtggcagactttcagaagaatgagacttcaccatcaagcctcactacagtcaggcttgcagagcagcgacactgtattgacaatgagcgggcctggaaggcttccagcttcgcccccagtacctccgaggctctgacaggcggatgcctgccaactacgtgagcacgtggtggcgcgcgcggtcctgggggcggagcccagggggtagctgggaa

SEQ ID NO: 1900 - DNA, 219 bp, Homo sapiens
  source 1..219: mol_type = other DNA
ctgttgaaactaggtccaaattttttgggcctggtacaccatgttgaagactcttttagaggtttccgaagtaattaaggccaacgctaggccacgccctctccctggctcaggctgggagttcctccaggatcccggcgtcccagccccgcccggtcttggcgcggccctcgccagggggcgccgcgcagcccgcccgccgcccgccagtcttccgcc

SEQ ID NO: 1901 - DNA, 270 bp, Homo sapiens
  source 1..270: mol_type = other DNA
ttgaagactcttttagaggtttccgaagtaattaaggccaacgctaggccacgccctctccctggctcaggctgggagttcctccaggatcccggcgtcccagccccgcccggtcttggcgcggccctcgccagggggcgccgcgcagcccgcccgccgcccgccagtcttccgccccgcgcgccggcgattccgagcctacgacgcctccgctagagcccgcggggctgcgccgactcctgctctggaggggttgcgggtaccgctcta

SEQ ID NO: 1902 - DNA, 300 bp, Homo sapiens
  source 1..300: mol_type = other DNA
agactctgcatttcttggttgagacagagaaaaaaagtggtattcatgggtctctaagtcccaaagagacttagcaaagtccatatgatccacatcagccactggctaggtgggttttggagaggaacgtacgttcttcagagccctggcctgggtcttttccaggccctataggcaggccagagtaagccacggggcactcccgtggttcctggactctggcccctggcatacagggcttccaatggaacaggagacagtggtgacactttaaccagtctgcagaactgatccccagcc

SEQ ID NO: 1903 - DNA, 110 bp, Homo sapiens
  source 1..110: mol_type = other DNA
agtcagactcatcccagctactcgactgcactccagctaatcaagtttatcagtgtctgagaatgttcactctgcatttcttggttgagacagagaaaaaaagtggtatt

SEQ ID NO: 1904 - DNA, 116 bp, Homo sapiens
  source 1..116: mol_type = other DNA
tgcaatgaggctgagtgcctggagtgcagggtcgggatggacatgatccaactgatggtgccgggagcggacctaatcacttgaatcattgcctgttttgacaggctaaatttgag

SEQ ID NO: 1905 - DNA, 318 bp, Homo sapiens
  source 1..318: mol_type = other DNA
ggttgcagcctcccaagctagagtgcagtggttcgctggatctcagctcacctgagtggctgggattacaggcgcgcgccacttaagcccttaaagcaattaccaccctcattcaacagatgaggaaagctagtttcaagcaagttcactgaaatgatttgtgccaatcagctgcacagcggggacgttcccagcctggctcgcttccggcactgacgccagcgtcacagtgccacagtgcgccatgctcacacgacggccagcagccaatcagcgcggctcatcttcgcccagccaggacgcatatttccgccctta

SEQ ID NO: 1906 - DNA, 251 bp, Homo sapiens
  source 1..251: mol_type = other DNA
atcagcgcggctcatcttcgcccagccacgcatatttccgcccttagtgtggactactcgacccacagagccgatcgcggagcggattctgcttttatagactggctggcagttgctccgagcctatctgctcagtccctgtggggcttgggacgcgcggttcaagcaccccggaccatatggatgcagcacccatgggttctcgctccaatgcacccctctccactgcccaggggagacctgggttaagg

SEQ ID NO: 1907 - DNA, 591 bp, Homo sapiens
  source 1..591: mol_type = other DNA
ttggctgggctttggtcccgccccggcccccacccccgcctcgacctggactgcagcccatagcggaggggcagtccgaggagggccgggctgtcagcccagcggctggcgaggaggccccagccgcgaaggagccgggcgcgcaggccggcctggaagcgggaggagggctgggcttcggccgctcacgcctcctaggcccccttctaccagggagcgctccgggaaagggtcggccgacgggcgccccctgttggagggtgggggcgcaggcgcagctgggtctctgctcctggctcctctggccgggtggcccggcgccgggctgcggctgctgggggcgccgagccccccagaggagcagctgctgcccgtccgcctgtccccggtgggagcctattcgcctccgactcggggagccttgccctgcctggccagccccgagctggcactgctgctgtcccgcgggccaggtactccgccgaaggcccctcgctggaccaggagcccatcgcctccgcccaggctacgtaagacggacccgggctagccccgcgggccacgcctcaggcgggccgccccgcccactct

SEQ ID NO: 1908 - DNA, 573 bp, Homo sapiens
  source 1..573: mol_type = other DNA
ggccgggtggcccggcgccgggctgcggctgctgggggcgccgagccccccagaggagcagctgctgcccgtccgcctgtccccggtgggagcctattcgcctccgactcggggagccttgccctgcctggccagccccgagctggcactgctgctgtcccgcgggccaggtactccgccgaaggcccctcgctggaccaggagcccatcgcctccgcccaggctacgtaagacggacccgggctagccccgcgggccacgcctcaggcgggccgccccgcccactctacctgggcatagtggacgcgggcttacccagcctccatgcagtcacaccgtgcagctcgggcctgccccccgaccttgctagggaggggtggagggtgaagctcccgggagctcattggcactagaggttctggccacgccctctccgcgagtccagtcccacgaagagggcaccctccgccaagaggctgctgcgggacccgggtttcccctttccggccgcccacgtgctccccggggctccgcaggcaggactgggccccggggcggtgcgctgggctacac

SEQ ID NO: 1909 - DNA, 483 bp, Homo sapiens
  source 1..483: mol_type = other DNA
aatttttatgtacactttttgataaggaactaacaaaaatatcctccatcaccaggctgtctaacgaggctgcaactcaacgcccgggaggaatccccccggaggcgcgccggtcctactggcctcactccctacctcctggaggtccggagtccctgagtcgaggactagttcgaccagctccacagcagcggtcctgctactgcgaagtaggctcaccgccgcggcctccaaccaccggtgggcagaggggcgctaggcagtcctcgatccgctcgccgcgatccggcggaggaggaggagcagagggaggcgagccgcagcgctgcggcgaggagcctggcaattccagtcaaacggcaagccccgacccgctcggcccgtcccttcctctcctgcccctgcagccgacaggaatggaacagtcccgcgggggggatgggggctggcggcggcggcggcggccgtggcggcggttggtgg

SEQ ID NO: 1910 - DNA, 392 bp, Homo sapiens
  source 1..392: mol_type = other DNA
atatatatatatatatatatatatattttttttttttttttttttgagacagaggcgtgatctcggctcactgcactgcctcagcctcccgagtagctgggagcctattctttctttagaatagatcagtggtggcgtattcatacaatggactattccgcagtgatgaaaatgaattatagatatttgcaaaaatatgaattacataaactacacagaggggagctatcagccagcggagagatccacggcccgcgccctggcggccccaagtcagcggcggagacggcgcccaccccgctccaacgtggagcaggagcaacggcgtggcccgtggagccccgcccctcacaggctttctcgcccacgcgcctgccaagccaatcggctag

SEQ ID NO: 1911 - DNA, 160 bp, Homo sapiens
  source 1..160: mol_type = other DNA
atcccagctactcgggaggctgaggcaggagattgctaccagcctgtgccgctgcactccagcttgggtggtaaagaagaagttttcaaaaggcatcttttccactttctgtcagctatcactgggatttcataactcagggaattccgctctgacagct

SEQ ID NO: 1912 - DNA, 286 bp, Homo sapiens
  source 1..286: mol_type = other DNA
tgggagttacagttccaactttgtcaccaatccttatgcctaaatttcctattttgtaaaatggaagaaagcatcctaccattttcacagagattcagtatcacaaagaaactgaaagagctttcttattgtattgtaaactattactataattctttacagctttgtagcaatgattctgttaaagatattttataataacttataaggggaactccccctccgggagtctgcctgtcagggacaccccttcaccccgcctggagggacttcccggtaggctcag

SEQ ID NO: 1913 - DNA, 529 bp, Homo sapiens
  source 1..529: mol_type = other DNA
gttggcaactcaacgcccgggaggaatcccccccggaggcgcgccggtctaccggcctcactccctacctcctggaggtccggagtccccgtgagtcgaggactagttctccagactaggcgaccgacacacgctgcctggggccggctccaaagcgcccgtcctgccgccgcggcctccaaccaccggccggcagaggggcgctaggccgccctcgatcccctcgccgcggtcccatggaggaggaggcgagccgcagcgccgcggcgacgaacccttgtcatgggactcggccggccaccctggcaattccagtcaaacggcaagccagactcgctttgccggtcccttcctctcctgcccctgcagccgccaggaatggaacagtcccgcggtggggacgcgtgagggcctgcgctggagcccgtacgctggctcgaggtggtggttggtgggagcagccagcgacgagcccgtagacactcgtacgcgtgcgggctgacgtgcgcgctacatggccggagtcggg

SEQ ID NO: 1914 - DNA, 445 bp, Homo sapiens
  source 1..445: mol_type = other DNA
taatttttatgtacactttttgataaggaactaacaaaaataagttggcaactcaacgcccgggaggaatcccccccggaggcgcgccggtctaccggcctcactccctacctcctggaggtccggagtccccgtgagtcgaggactagttctccagactaggcgaccgacacacgctgcctggggccggctccaaagcgcccgtcctgccgccgcggcctccaaccaccggccggcagaggggcgctaggccgccctcgatcccctcgccgcggtcccatggaggaggaggcgagccgcagcgccgcggcgacgaacccttgtcatgggactcggccggccaccctggcaattccagtcaaacggcaagccagactcgctttgccggtcccttcctctcctgcccctgcagccgccaggaatggaacagtcccgcggtggggac

SEQ ID NO: 1915 - DNA, 329 bp, Homo sapiens
  source 1..329: mol_type = other DNA
aggctggagtgcagtggcgcgatctcggctcactgcaagcctcagcctcccgagtagctggggctacaggcgcccgccaccacggccggctaatttttatgtacactttttgataaggaactaacaaaaataagttggcaactcaacgcccgggaggaatcccccccggaggcgcgccggtctaccggcctcactccctacctcctggaggtccggagtccccgtgagtcgaggactagttctccagactaggcgaccgacacacgctgcctggggccggctccaaagcgcccgtcctgccgccgcggcctccaaccaccggccggcag

SEQ ID NO: 1916 - DNA, 599 bp, Homo sapiens
  source 1..599: mol_type = other DNA
tgaggaagagggggtggccgccaggctcctccgcttccctgggtccaccgcggatccctcccgcttgtcaggaggcggccagcgggtaagccgactggggatcccgcaaccgacactgggatcgtttcccctcgcaagcgaacccaaaatggcggcggcagcggcggcagcagagtggccgcggcagctcctccagagggagggagctaagggcgcctagcgacacccccaaccgcccgactccggccatgtagcgcgcacgtcagcccgcacgcgtacgagtgtctacgggctcgtcgctggctgctcccaccaaccaccacctcgagccagcgtacgggctccagcgcaggccctcacgcgtccccaccgcgggactgttccattcctggcggctgcaggggcaggagaggaagggaccggcaaagcgagtctggcttgccgtttgactggaattgccagggtggccggccgagtcccatgacaagggttcgtcgccgcggcgctgcggctcgcctcctcctccatgggaccgcggcgaggggatcgagggcggcctagcgcccctctgccggccggtggttggaggccgcggcggc

SEQ ID NO: 1917 - DNA, 193 bp, Homo sapiens
  source 1..193: mol_type = other DNA
gcctgaaaactatcttcaggttacagaagtttgtaaaagggaacttcttcccctctcctgctgtcaggccgaatgtcagctatcaacaggcatgtaggttacaggcgtgagcactgttggcccattgctgggatttcataactcaaggaattcccctttgcaattcatgagccactaagagccatttctcagg

SEQ ID NO: 1918 - DNA, 411 bp, Homo sapiens
  source 1..411: mol_type = other DNA
cattcattcattcgctcattcaaaaagcacgtattgaattattgaacgaactttgtcctgtgcaaactggaatatgatataataatcttacagtctattgaaatgtgagagcattttgtaaaatgcagaatattgtacatatatgaataattactataagtgagaaaaattagttgttaatctttttttttttttgatacagagtctcagtgcagtggcacgatgccggctcactgccacctcccgattctcctgcctcagcctccggagtagctgggaggtgaccaaggtgccgggattacaggcgtgagcccgcgcctccactgaatcttaacctcagttcctttaaatttttttgccaataactatgctccttgatgcactgcggcgcggcgctccgaggctcgggga

SEQ ID NO: 1919 - DNA, 518 bp, Homo sapiens
  source 1..518: mol_type = other DNA
cgccgcctcccctggctgccagacttccctcccccgcagcccttaggaatgggagggggaggaaggggcaccgccctgtgtgccccaagggggagggcttggcctaccccacctctcctcccccagaaggaggggtctccagcagtgctgacagtgcgacttccccaccctcggtgtggctcaggccctgccagtccctgcaaccacaggcccgattttagtggggatccttaccaaagctaggtcggcagccatggttgctataacgtttttgctcagtaccgaggcagcagctgtagagctcatccagcggacgcctcctgcgacggtccggcccctagttgtcagctgcgctcagctcttaagatgctccggggatgcgctgagaggctccgccttcttccgaatggtcctcggaagaagactccgcctcttccgaatggtcctcggaagaagactccgcctcttccgaaagattgccctcgcccccttcaggaagctctcccggaggggactcc

SEQ ID NO: 1920 - DNA, 454 bp, Homo sapiens
  source 1..454: mol_type = other DNA
aaaaaaattcaacactgattaactttggcacttttcattatttaaacagaccacaatattttactgtacaaccaaatttttttgtgtctcaggctggtctcccaaaggtttgggagtttttttaaaattagtaaatgttcagagttgtgcaacttctgaggtttaagaatactgaaatccaggcagtacagaattttattttcccaaaattctggaactcaggaccgagaacattttgctgctgtattaaagcccagaaaactgaaatcagaggatttcatataataacgcggcctcattctcgggaaaactcggcggtgggaggagtcccctccgggagagcttcctgaagggggcgagggcaatctttcggaagaggcggagtcttcttccgaggaccattcggaagaggcggagtcttcttccgaggaccattcggaagaaggcggagcct

SEQ ID NO: 1921 - DNA, 409 bp, Homo sapiens
  source 1..409: mol_type = other DNA
tttaaaacaagtttttgtgtgtcttatacgtgtttaaaatacatacagaactctgattagggagtgttgtgttctgagaatgaatttaggtttcaatagcaaaagtggaaggaggatttggggggtgccccttttttcccacaagcagcaaacaacccaataatttactttcgtgcatacaccctaggttggggcggggcaggctgtgggcgtcactgagtggccccgcccctccttccgcgactcgggcgccggtggcgccatcggagcccccgggtgttccagtccccactgaccagtgggtaccgcagacgtgagagaacccctgcggcctaaggggccgcatcccttcgagacgtaaatttatttgtatctttttatttttctctttggaaaaagtaaaacctgt

SEQ ID NO: 1922 - DNA, 318 bp, Homo sapiens
  source 1..318: mol_type = other DNA
gtagctgggtatttaactcaaggcctctgttaactcagagctctcgtacatttatttaaaacaagtttttgtgtgtcttatacgtgtttaaaatacatacagaactctgattagggagtgttgtgttctgagaatgaatttaggtttcaatagcaaaagtggaaggaggatttggggggtgccccttttttcccacaagcagcaaacaacccaataatttactttcgtgcatacaccctaggttggggcggggcaggctgtgggcgtcactgagtggccccgcccctccttccgcgactcgggcgccggtggcgccat

SEQ ID NO: 1923 - DNA, 318 bp, Homo sapiens; identical to SEQ ID NO: 1922
  source 1..318: mol_type = other DNA

SEQ ID NO: 1924 - DNA, 204 bp, Homo sapiens
  source 1..204: mol_type = other DNA
ggtggcgggcacctgtgatcccagctacttaagatgagcagcttatcttctttttatattccctgcttggtgcacagaaatgaagcaaacaaacagagaaattctccaaatgatctttgcaacgaatccttttccttttcctaagtaacagaaacgtgaaacgaggagaaacctgtttcatgcatcatcgagagtccaatcgga

SEQ ID NO: 1925 - DNA, 516 bp, Homo sapiens
  source 1..516: mol_type = other DNA
tcccgtcctgcgcgcgggcaccccgccctccctccgctccgcctacccccttcctgagcttgggcgggggaggagaccgggcgaggggagtcagacttcctgtccccgagacccccctcccccctacaggacgccggggtccgcgccgcgtcctccctggtccccccgtcggatcgaatccctcacgcgggcgcggatcgaccggggcgagcaaggtgggctcggaaaccccctttcgccgcggtcctcgggtgctccccgaaccccggcacccgcggtgcactttctgggcgccaaaatcgtcccgggagggagcggagcggacctgggcttggtcgcctccaagccggcgggaccgagtgctttcgggtgggggcggtggaagctccggcacctcctctcaccccgggccccaccggcttgggcttggcgtggcgacccccccccctttgtccccgccatccggcggaggggacgggagggggtggtttcccggcttcctcccaccaccaccac

SEQ ID NO: 1926 - DNA, 414 bp, Homo sapiens
  source 1..414: mol_type = other DNA
gggtcagtctgctcaggcctgctttgatgggaccccgaaggccaggaaggaactggtcctgggttttctctggggctagagggcgcccccaggcgctggtcttcctaggacctcccgtcctgcgcgcgggcaccccgccctccctccgctccgcctacccccttcctgagcttgggcgggggaggagaccgggcgaggggagtcagacttcctgtccccgagacccccctcccccctacaggacgccggggtccgcgccgcgtcctccctggtccccccgtcggatcgaatccctcacgcgggcgcggatcgaccggggcgagcaaggtgggctcggaaaccccctttcgccgcggtcctcgggtgctccccgaaccccggcacccgcggtgcactttctgggcgccaaaatcg

SEQ ID NO: 1927 - DNA, 279 bp, Homo sapiens
  source 1..279: mol_type = other DNA
ctcacccaaaggctggctcaggctggggcaccttaccctgcttggggagaggctggttgggcccgcttaacttgcaacgggagaattctctgggtcagtctgctcaggcctgctttgatgggaccccgaaggccaggaaggaactggtcctgggttttctctggggctagagggcgcccccaggcgctggtcttcctaggacctcccgtcctgcgcgcgggcaccccgccctccctccgctccgcctacccccttcctgagcttgggcgggggaggaga

SEQ ID NO: 1928 - DNA, 285 bp, Homo sapiens
  source 1..285: mol_type = other DNA
aacttcacagttcatcctctgaacctaagatctactgttcaaaatgcctgtaattccagagtctggccaacatggtgaaacagctattgcagtgagctgagatcgcgccactgcattccacccaatggagaaaaaaagatctacttttttggcacttcaaagctcttgtctgagaatagaaaaaatactggttggaatagcttttctctaatttgacattttagatagatgatccaaatttctaggtttgctagtttcccaaagcacctaatgaggttcacagcc

SEQ ID NO: 1929 - DNA, 497 bp, Homo sapiens
  source 1..497: mol_type = other DNA
gaggcaccctgggaatagttcgcctttccaagccgaccacgcggttgttgggttaaccccttcaacagttttctccgttgctagaccattcaggccgcgaccctcggggctatagggtcagtcccacccaacctccaagtcgggaaagtcccctggcctggaagggacttgggcttccaagaaagagcggcgacacagaaagtcctttgtcccggaccgcggcacggctcgggcgggcagcgttgggtcgcggtctcccggggcagtccgccctcgcccccgcaagggcacgccccttccccctcccagaggccccccaggggcccccgcctggcgagaccctggccgggctccggacctggggcttggccctgggcggaccccgctgcagtggcccccccggtccgcccggggcgctgtggctgcggctggtccggagggggcggtggaagccgagccgggccggccgggcgggcggggaggaggaggagccgggc

SEQ ID NO: 1930 - DNA, 487 bp, Homo sapiens
  source 1..487: mol_type = other DNA
caccgccccctccggaccagccgcagccacagcgccccgggcggaccgggggggccactgcagcggggtccgcccagggccaagccccaggtccggagcccggccagggtctcgccaggcgggggcccctggggggcctctgggagggggaaggggcgtgcccttgcgggggcgagggcggactgccccgggagaccgcgacccaacgctgcccgcccgagccgtgccgcggtccgggacaaaggactttctgtgtcgccgctctttcttggaagcccaagtcccttccaggccaggggactttcccgacttggaggttgggtgggactgaccctatagccccgagggtcgcggcctgaatggtctagcaacggagaaaactgttgaaggggttaacccaacaaccgcgtggtcggcttggaaaggcgaactattcccagggtgcctcgttcccagagccccccgcggtggggcggggttgagtcgg

SEQ ID NO: 1931 - DNA, 224 bp, Homo sapiens
  source 1..224: mol_type = other DNA
gactacaggtttagtagagacacagtttcaccgtttctaccatagagccagagagggccccctcctgtgtctctgttgcccagactggagtgcagtggcacgatctcactcctaccttggccgcccaagtagctgggattgcaggggggaccggccctccactcagccctcagtgggctgtctcgctggagctgcttctcccgcttgcgggagcccaggctgag

SEQ ID NO: 1932 - DNA, 571 bp, Homo sapiens
  source 1..571: mol_type = other DNA
gagaacctctccccgcggccgggctccgggatcgactctgggagagcggcgcagtgagcgagcggggacggctcccggctccccgcccccggccccggccccccctcctcatttccataaaaaagcgggcccccaggaccggccggcgcggggcaggagcgggtcctgggagggggcgcgcggcgttagccagcttcacctagcttgccccggagctgcgaggaaagaccgaaggccacatccctatcctcctcgggtcaaggaatttgtccccgcgcccccaagggcgggaactcccggcatgccccgggcgcccccggcgcgcccccctccatttaaaacaaaaggggctctattgggggccactgagcgccgctcccggactggggctcggtgcgggagcctaacgggggcgcctggacagcgggggctagagactcccaggtccgaggcgggaggggtgggggcagagatcctgcagccccccgccccccgtcacccccggagaggagaggagatctgcttctttccccccacccccaccccgggggctggggcgaggggagtcggg

SEQ ID NO: 1933 - DNA, 577 bp, Homo sapiens
  source 1..577: mol_type = other DNA
cgtggtgttgctgctgcccttcaggcgcagctcggcctctttgtagagagcgcagagcttggcgtcgctcgcccctttgggggggggggctggggcgtctgcgctgcgggggccgccgtcggggcggccgggggcgccgcgggcggcggcggcggggccggctgcgggggggcggccggctgcgcgggggcgccgccccccccacctcccccgtcctcgcccgccgtgggggcggggggctcccccaaacccaggaggcagagagccagctgaagggcgcgctcgtcttccagcagccccgactcccctcgccccagcccccggggtgggggtggggggaaagaagcagatctcctctcctctccgggggtgacggggggcggggggctgcaggatctctgcccccacccctcccgcctcggacctgggagtctctagcccccgctgtccaggcgcccccgttaggctcccgcaccgagccccagtccgggagcggcgctcagtggcccccaatagagccccttttgttttaaatggaggggggcgcgccgggggcgcccggggcatgccgggagtt

SEQ ID NO: 1934 - DNA, 212 bp, Homo sapiens
  source 1..212: mol_type = other DNA
tggcgcgatctcggctcactgctccctagtacctgggactacaggagccacaattttgtctctttaagaaatacaaaatgatctttttgcaaatgtttcgggtcttgaaagggcccgtgcaactgagaggccctgaaactagctctcctctggccctcaggccaggaggtcaactaggaaagtaactcccagcccaggcccgccccagagga

SEQ ID NO: 1935 - DNA, 319 bp, Homo sapiens
  source 1..319: mol_type = other DNA
tgttttaaattatccattaaaataagtacaagtgcttggagatggaaggggcagtgcctggctcctacccaaactgggggcataaaggaactcaggttccagaactttgctccccccaagatgcagctctgaatgggcgaagggtgagtcacactgatgggcaccagcctcctctgccctctagcccagaaggtctgaggcaatgggggcaagctctgggtgcgctggagagggtggggcccgactccgccacaccccaaatggatctgggactgcccctttaagagtagtggcccctcctcccttcagaggaggacct

SEQ ID NO: 1936 - DNA, 347 bp, Homo sapiens
  source 1..347: mol_type = other DNA
cagtgtcctctggccggcaactggcgcagcgcagctcactcatcccagacacagggtgggggcagtccactgagagccgcagcagcttctcacagcacgcacgcactagcgggcgcgtggccgtggaggtttgtccggctgcgcactcagagggtggaccagggtgagccttggttccaggcctggctcctggactctgtgagaccttgagcaggttatttaacctctcagagcatcagtttcctcatctgtaaaatggggatgaatactgatccctaagtcttggctattatccccgggcctcacccaagagcctgggtgagcctcccccatgggcaatttccaga

SEQ ID NO: 1937 - DNA, 517 bp, Homo sapiens
  source 1..517: mol_type = other DNA
gacctggttccatgtccccaccaggaagtggccatgcgcaagctgaggatggagatgacctgctccatcaccaccacgtgagtggtagccgccgctgaggccgagcctgcactggggccacccagccaggcctgggggcagcctctccccagcctcccaaaaatcttttcattaaagaatgttttggaacagggaacccaggaggggaggacagacgtggggcatgcccgccctgcctctctccccatagtgcatgcctgctgacatcctcttaagctcagagtagctagaacagagtcagagtcactgctctggttctctgtaccttcctgcctggcggctgggagcctgcaggagcctggagcctggttgggcctgagtggtcagtcccagactcgccgtcccgccagggctcccactgcagcagctcgggggaccccgctgagtacaacctgcgctcgcgcaccgtgctgtgcgggacctgcgggcagcctgccgacaaggcatctgccagcgg

SEQ ID NO: 1938 - DNA, 335 bp, Homo sapiens
  source 1..335: mol_type = other DNA
agtacatcttcccctccctcactaaagggtcgggaggggcctacagtaccctgcggggagtttggagtaacgagccaaggtcctcctcagagcctcggtgccccctttgcgctgtgcccagaggggcagagaaaggtgcctcctacgccccctgactgactctggggtgctggcctccccctgccttctggggccaggcctcaggccagtaccagttggtgccagctggcagctctcactggagctgccttctccttggtccctttaagagctgcctgggaactggggcactggagggggctggcagggcccccaccccctccctgccatgcctg

SEQ ID NO: 1939 - DNA, 277 bp, Homo sapiens
  source 1..277: mol_type = other DNA
agagggcacaggcttggcatgggaaagaatccggcagtcctgtctgaagtctgctctctacagcaagccacagaaggcttctgggggagccaccttcttctcaggcagcttaggaaggagaggcagaactgtgtcgccccggcatatacacagttcccccagctgaccccctgaacccaggtggtgacatgtggctgagcagggaccgggggctactgtacctccttttgcccctcctcctccacatgtgcgaatccaggagccacaggagattctc

SEQ ID NO: 1940 - DNA, 311 bp, Homo sapiens
  source 1..311: mol_type = other DNA
atgtctgagaccaacccccgggctgtaacatcccccatgttggctggtgctgtagcaggaaagtttacaggaaggacttcctgccagggaggaaagtgggcaggaacctacccactttgtaggccacagagttcttggcgctggatgcctcattaaccccgcgttatgaggctccccctggagcctttagggcagccacctttgggggttgggtgcctccaaaaaatcatggataagagcctaatacaattattttattttatttttttaaagtcccaggtcccctatctgtcacaactcgagaggtggaa

SEQ ID NO: 1941 - DNA, 328 bp, Homo sapiens
  source 1..328: mol_type = other DNA
ccagtgctggctttggcatgatgggcacctggagggccgcactcccgtgtcccctgcctctggggccccggggagctgcagaggctgggagccggccagccacccctgcccaggcagctccccgggaaatttgcctccctggaagtatcaggccaggcaggcctgagcctcaaagaccctgaacccagctggggctgggggagggttgagcaggcagactcaaacccagtctgcctacctgggtcagagctgagtggtacaggaacctgctccccaaaatgttccctgcccagagccaggcaacggtttgggctctcacccagaaagt

SEQ ID NO: 1942 - DNA, 263 bp, Homo sapiens
  source 1..263: mol_type = other DNA
aagacctctagagaccctagagactcgacttttccccgccatggcacagtggggcaggaggtaggatcctgccgcgatgtgtgtataattaaattccattctccctaaactggagttttggtcggtaatttgtgaaaattaacagtgaatattcactgttgcactgtacgaagtctctgaaatgtaattaaaagtttttattgatcggaggcacccttcgcgggagcggccaatcgggagctccggcaggcggggaggccggg

SEQ ID NO: 1943 - DNA, 324 bp, Homo sapiens
  source 1..324: mol_type = other DNA
ttttgagttcccaaacttcaaaattggactggcactatagcctgggcgatagagtagtattttgactctaaaaaaaaaaagttatacaaaaatcacacattagatttgttcttttttttttctttactagggttcaagcgattctcgtgcctcagccacccggctagctgggattacaggcgcgccgactcggcgtcccagaattctgagattacatcaataagcgtctggtgattcaatttccgccaattacggaagtgcggcacatcctcactcctggggccccctgcagggggcggtaatgacagagtcctaatttccggt

SEQ ID NO: 1944 - DNA, 441 bp, Homo sapiens
  source 1..441: mol_type = other DNA
agaccatgcaaactcaggcttgagtacaggaattacatgaactaccagcctacagtttaaatatttcccactttaggccggtacagtggcctaaaattttaatttttttctggctctgtcactcaggctggagtgcagtggcgtgatctcagctcactgcagcctctgcctcctaggctgaagcaatcctccgattccagaatcactggagctaaaaagattttttaaataaaaataaataaataaaacattttccccactttatattttatttccctacaacccaggttcaagtgattcttgtgcctcagcctcccgagtagctgggatgacagcaccgtgttaccaggctctgggagcctattttcttaattataaaagctagccaaaatcttaccaagtgctgtcagcagtttagcatatttttgccatgagctcatc

SEQ ID NO: 1945 - DNA, 446 bp, Homo sapiens
  source 1..446: mol_type = other DNA
cctgctgcagcttgggagggccccggtgacaagtggaaggccggcagccgctctgctccctactcagactggcctgggggactgggctcatcttgcagggcacagctccgagttgtgtcttgggcactcccagggccccctgctgagtcctcaggcggccatgtgatcccagggcctcaccagctctgagattcagtgttgacatgggcaatttccatgtctgtaactcaactgaaagtgtacttaattcaagaaagtttctcgctagaaagctctgtggatgcccagcctaggtggtcacagacccagtgtcctgggggaaaccccaggcctggagtcagggacctctacacagagaacagagggagctggttgctgtgctgagggagcctgagtgaggagaccgccagccccagaacggcagtcaaggtcaagagcctgtggtc

SEQ ID NO: 1946 - DNA, 588 bp, Homo sapiens
  source 1..588: mol_type = other DNA
ttctgtaccgtagaggataggccttcctattacttatcggagcactacgggagggcaggtccctccccagggtgtttaacactggaggctcaggccctgcctccctgcctgctaaggacacagggaagggggtccccacctcagtgcctgcctcccttccctgtgcctgtgtacctggcagtcacagccacctggcgtctgtccggatgcgcagggcagggcctgagccgtcgagctgcacccacagcaggctgcctttggtgactcaccgggtgaacgggggcattgcgaggcatcccctccctgggtttggctcctgcccacggggctacaggctgtgagacagctggagcccagctcagctcagccagtgctcaacctgaggctctggggctgtcccctgagagaggggccagaggcagtgtagagccgggcagtctgattgtggctcaccctccatcactcccaggggcccctggcccagcagccgcagctcccaaccacaatatcctttggggtttggcctacggagctggggcgcaccatggtcaggcatgcccctcctcatcgctgggcacagcccagagg

SEQ ID NO: 1947 - DNA, 313 bp, Homo sapiens
  source 1..313: mol_type = other DNA
ctcttgccagcaacatcgcctcttccccaagggggtggggaggtgagccttgaaaccagcctctggccaggcgtagtggctcacgcctgtaatcccagcactgggtcccagctactcgggaggctatatcgcgccactgcactccagcttgcaggtgctgggttcctctgccagcctaaggcagagctgtccccaagcaccatggccacatcctgccttgggcccctaccccaggcggccgagtgagctgcctgctaatggggctgggccaccccgtgctgctccctggaggctggacaaggctccgcccagg

SEQ ID NO: 1948 - DNA, 415 bp, Homo sapiens
  source 1..415: mol_type = other DNA
tgacccccaggccctgcagtggggctgactccagatctctcctgccctccctggcagccaggacgctgctcagaggctgcagggagggcccaggagccggctgggcagctcccctgctgtctccaggggcaggtggtaggcatggagcaaaagaggcccttcttcctcacccaagatgcagggtggctctggagccagccacaggggctgttagagaagcaagtagcaggcagggttcgtgtgctcctcctcctgctgcaggggctgcacgcttccagggcagggagcaggccccacctagggctgcaggcagtctggcctgtgccagcacggtctcctgtggaaagggggtgcagtctgaggccaccaccccccttcctatctaagggagggctgaacagcagaaaggagaggc

SEQ ID NO: 1949 - DNA, 255 bp, Homo sapiens
  source 1..255: mol_type = other DNA
ggctgtttcaacaacaaaacaaaccacccttgctttttaacttaggttttaagctaaaacaagacaggagatagaaacgttagggactagcttctcatttctatgagtccttatccctaaaatcatttgagcttactggctcgtaagagatatctgatagctttgccaataaagtttttcgcaagggttttagttctggcaacttggtagcagcaggccactggtccgcaactgtgcggctgccatcgcgagatt

SEQ ID NO: 1950 - DNA, 376 bp, Homo sapiens
  source 1..376: mol_type = other DNA
caggactcaggagtccccaggtgcccggagatcacaccgtgctgaacctagctccacggacttcagtccaagactccaagaaagctcactgcagagggcgacacccgggccccgcccgcccgggaggccccgcccctcgccgtgtgggggggccttggctcatggtgcccgggtccgggggcagctcccggtcacaggcccctgccacccacctaccgccaacactgccgtctccggccgtagccgcagccgccgccgccaccggccctgctcggccgccatcgctgtgaggcggctgcccgcgacagctcctcctccgcctgccaaatctcgcgatggcagccgcacagttgcggaccagtggcctgctgctacc

SEQ ID NO: 1951 - DNA, 348 bp, Homo sapiens
  source 1..348: mol_type = other DNA
ctcttacgagccagtaagctcaaatgattttagggataaggactcatagaaatgagaagctagtccctaacgtttctatctcctgtcttgttttagcttaaaacctaagttaaaaagcaagggtggtttgttttgttgttgaaacagcctaaatattaccttaccaaagaggtctttcctattaaaattgtctaattgactaataattggtgtccagtaagtatttactgaatgaataagtgtacaaattcgcattccaggtgcctagaaaactttcagaaaggatgacatcctcctcagattcagcagggcggggcctgcccctttaagctgggccccacctgctct

SEQ ID NO: 1952 - DNA, 326 bp, Homo sapiens
  source 1..326: mol_type = other DNA
tctactggcacagaagtggtcagggccttggctgtggctctgcctcctgcctcacgggaagccggggagtgagaggctgctcaggaaggagctgtgcctctcccctggtcggagaactccgattgattggagtccctgggttccacccaccgcggtcctaggcctgggggcgaagtccaggcctggccacaaggttcagccgctaccccctactccgagggcgagggcggagaggctcagccccaggggcggggcctgtagtcggaggccgagcgggcgtggtccgggtagtccaggcggctctcggtggcagtgagcatgcgctc

SEQ ID NO: 1953 - DNA, 526 bp, Homo sapiens
  source 1..526: mol_type = other DNA
ctctctctctctctctctctatatatatatatatatatatatatatattttttttttttttttttttttttcaagtgattctcctgcctcagcctcccgagtagctggggttacaggcgcctgccaccgggattacagggccctgccaccgtgcttggccaggctggtcttgatctttcaacatttaacaaataagttggcttttttggaagtatgttgttgtcatttagtgacacatctctaaatatttacaatttttgttgaaatgtttttgtgtcaaaatgagatttcacttaaaacatgctgaatactgtgtttttggcattgtccaaggaaaactgaaaacttgtagcatgaatgttttttttttcacttaaaatcttgtgaccatattaaattgtattacttgtaagagactttcctgttttaagatagaatacaaagctgttctttaatacattaaatggtgctgacgaaaggaaatttttttaaaaagcaaatagtttgagggatcagctgaacgcga

SEQ ID NO: 1954 - DNA, 238 bp, Homo sapiens
  source 1..238: mol_type = other DNA
gtgcagtgacacgatgtcggctcactgcacaggcgcgcgctgacctcaggtgatccaccggcggtgggaaaatattttagataggataacagtccgtgtgctggctggaccgcctctctagtccacctaagagtgaagcctttcttagccttcacgccagagccttggcgcctgcgccgacgttcgcgctgcacgcggccgggagcggccaccctactgcgcaagcgcctgtgccctc

SEQ ID NO: 1955 - DNA, 243 bp, Homo sapiens
  source 1..243: mol_type = other DNA
aagagactgttactgaaaataaatgtaacgtaaaaattctactaggaaatactgttaactccgtaatacagattgaaacatttaaacttcccaagacgaagtggcccggtcagtgggcccatcatggcgacgcgatgcagagccgggtacccagagctgggggagagggcacaggcgcttgcgcagtagggtggccgctcccggccgcgtgcagcgcgaacgtcggcgcaggcgccaaggctc

SEQ ID NO: 1956 - DNA, 543 bp, Homo sapiens
  source 1..543: mol_type = other DNA
ccacagtgggcacacagggaacctgggtgtcagtgtggcccctgcccagcctgcttggtaggaagggggagagtcccttaccttacaccgcttggagcggtgtaagggactccactgcagaggcccagactccatctctgctttttcagtagggaaaaagattaagtaaaccctaactctctcttgtgttaaccctagaggggccagaagtagctgggactacaggtgtaccaccatacccagcccagaccggggtctttaagggcatcatgtatgagggtgcgggttctcccacccccaggtcccacagctgtgccctatcagggcaggcctttccagggtcgcgtccaaggacctggcaccgtaacagtgccaggatcagcgccaggctcccttccccaagtcttggccctaccttgggccgagggtccaggaccccccgacgccccgctcctggtccccggggccctgggcctgcggcaggtgagggcggggcctccgtgagcagggcctctgtgggcggggctccgtgaaacctgccct

SEQ ID NO: 1957 - DNA, 308 bp, Homo sapiens
  source 1..308: mol_type = other DNA
tgacagccctgattcccagcgcagaggccgagccaggaatgtcgcgctgggaaccttgctggagggcgatcctcctcccataaccccagctctccagacacctggagctggaccatgggctagaggtcggctgatgccagctggaatccattgttttgggttgaaaaccagcaagacaggttcctgcccattctaaaaggttaggatctctataggagtagagtctgcagtcatatattctccagtggggaggggcgccccaattgcgctccccggccggcccgggaagggggaggggcggggccggc

SEQ ID NO: 1958 - DNA, 236 bp, Homo sapiens
  source 1..236: mol_type = other DNA
gagctcagaccgagttcattctgggccccagcttgaaaaagataatttatctagggaccgagtcttgcttcccttggggacgagggtggcctggaggaacaatagcttcccttagccccttcttcctgcctcaggttagaaaaggcagcaggtctccagagaggggcagcaccccctttttgctgcctttccagggagagcagcaagagaagcatcctccactccacaagaggcta

SEQ ID NO: 1959 - DNA, 303 bp, Homo sapiens
  source 1..303: mol_type = other DNA
ctgagcctctgccacaagggccttgtgtgccccacttggtacttgttctggctgaccagttactgtttagaaggcacctgcccggcctccccagagagcacaaagggcatttgggtacctagtccacccagctacccataatactggccagtccaggtatccagaatcccagcttagaggcggggtggttacctaggagccagcccagagctggcggacaggctgctgccggagacagaccctcactggagaggcatctcctgggcagagagctagggggagggctcagccctgctctccata

SEQ ID NO: 1960 - DNA, 485 bp, Homo sapiens
  source 1..485: mol_type = other DNA
cccgccttcgtaggggagagctggtgacgacgctgtcggcccgagctgggaggggagggaccccgcctacgggaaggtcacgagcccgccaggccccgccctcatgtgacctgcggggcccgtcctcgcctgtgtcactaccctcggcggagagcgaaggctcgcaccggccgtggcatccaatccctgtcctgccagctatagccgggcggggaggaaagtcacttgtttaatctcgattggcaactggccatcggaccctgctcggatgcagcgccagtcccgctccaagcctgcggcccgcggccgggaagtgggtgcggccaaagaccccagtccactctccgcgcccctgccaatgggcgggaagcggggcctcagcctcactgcgctggctctgccagtggcagacggagccaattttggctgggtcttgccaggtcttgccaggtcttcccggatctagaggggacagcgccctctgt

SEQ ID NO: 1961 - DNA, 630 bp, Homo sapiens
  source 1..630: mol_type = other DNA
ataaaaataaaaaattttaaagagctactactgcttctttaataagggtcccgcccctttaaattgccccctcggcagtaagtgctgtggggccccgcaagcactggagcccaaggcgtctgccgagccgggccctgggaccggagggggcctgtcacaggtagagggagcaactgagctccctaggtaacaccccccaaccgtgagtggggctttgtcacacaccaagtgggggagatgggagcttttcaccacttccacccaactctcctggggcccggggccgcgaggaggtgccgagagtgtgcgtgcagctcgcacggcctccccggaaaggacctcctggagcacgcggtggcagcagcgccaggcgggcgggcgggcggccggcgtgctccgaggggcaccgtgggagcggaccgatccctttaaaggtcctccctccctcccggcaggcggagggatccgccgctcccagcgccgcagcctagcttgggagggcggtggggtgggggccgacccggcctggcccggccagccctggggaagcgaggggcggggccgcgtcctcgggaccgccccagccccggctccgccccgaagctaggctgagctgtgcctacgtcggcc

SEQ ID NO: 1962 - DNA, 258 bp, Homo sapiens
  source 1..258: mol_type = other DNA
gatggctctttttaaaggacaaatctgctgctcaccagaccccatgccagggccctagcatggtgcccaaggtgctactggacctggccctgtgcctccacctctaaaactgaaccaagtttaagttgcaaactcttttagagcattcactgcgccggactcgggaacacaggggagcggtactgccccggcctggggcgcctcttctcccagcacctgggcggcccggctccgcggccgggaactacaaatcccagg

SEQ ID NO: 1963 - DNA, 311 bp, Homo sapiens
  source 1..311: mol_type = other DNA
aataccaagcctatggtttcaattacgttttaaaccatagcttacccaaactatttaaggataattttatatttccatagctattttacattggtggtgtaaataagaacagtagcttaatttctatacctataggcgaaaaagcagtggggcaggaatcaagctttctgaaagagttacaaaatcagcacttattatcaaagagctggaccgggtgggaactgctccccagcccaagggctgcagccccgagcggcttccggaatccgcgcgtgctggcccggcctcttcgggggcggggcgagcgccgc

SEQ ID NO: 1964 - DNA, 206 bp, Homo sapiens
  source 1..206: mol_type = other DNA
ctgtaatcccaacactttgggaagccgagctgtgaaggctgagtattcatgagtattcaaccctgaaaaatcaggagctcagtgtaggacgcggagccgttcttggcatcctgagagggccagttagtactgaagtcccttggctgctcaaggatcggaacctccgaaaatgggcacgctccaggtcccagtttctatggcaacca

SEQ ID NO: 1965 - DNA, 206 bp, Homo sapiens; identical to SEQ ID NO: 1964
  source 1..206: mol_type = other DNA

SEQ ID NO: 1966 - DNA, 294 bp, Homo sapiens
  source 1..294: mol_type = other DNA
ttgtcttaaaaaaaaaattttaaaaaggccggtcctggttaacacggggaaaccccgtctcccaagatcgtgccaccgcactcagtgaatttccatccggatccccttctgagtactttaaaaaggttatctattagaatattagggaaccaataagataacttctcttttggagaggtttccaaagtcagaaattctcatgttcctccccagggacagaaaatctctttagagccctgtaatttggagtgttgagagagattccaagaaaggggccctgttattcaacaatag

SEQ ID NO: 1967 - DNA, 322 bp, Homo sapiens
  source 1..322: mol_type = other DNA
agggacctagggtgcagtctagacctccaaagctatccttggtgccaatattggtatccaggggagggacctgcccactgtccgtgccaggggctttgcctacagtcccaggagggagaggagttcctggctgggcagcactcaagccctggccagtaggccttctgggctcccagatagctgcctccagggaggtagctacggtccagaaaagagttttccattttttttattagaaagggtgtctcttttcaggagcatcttctttgaacaacgagaagactcagttgtctagctcagcgaacgctgggcgaacgctccc

SEQ ID NO: 1968 - DNA, 370 bp, Homo sapiens
  source 1..370: mol_type = other DNA
cctgcccactgtccgtgccaggggctttgcctacagtcccaggagggagaggagttcctggctgggcagcactcaagccctggccagtaggccttctgggctcccagatagctgcctccagggaggtagctacggtccagaaaagagttttccattttttttattagaaagggtgtctcttttcaggagcatcttctttgaacaacgagaagactcagttgtctagctcagcgaacgctgggcgaacgctcccttgctctcgccgctgctgccggagccgaagcagagaaggcagcgggtcccgtgaccgtcccgagagccccgcgctcccgaccagggggcgggggcggccccggggagggcggggcag

SEQ ID NO: 1969 - DNA, 413 bp, Homo sapiens
  source 1..413: mol_type = other DNA
tcataaactgtagaatctttaaaaggttgttttgaagattggcctcttcctgctgcttccacttctgaaagccgccagagggcgtccactacccaacattccctggcagggggtgcgggagaaggggcccttccccaagaacagaacttcctaaacgttctgactcaggcaatagcgtgcaatgctgtagtactctctccagtatttcaggaggaggagcatttgctatttcaaaaacgaaaaacaaaaacctgtccatcattgctcacattttatggatgcagtaagtgaccctcccaggctggaacgctggggaagcaggaacagaggctgctgccactctctgacctctaaggggttaaggcctgggtcccgcccctcttcccgcccgcctggcgggagtatgaatagcc

SEQ ID NO: 1970 - DNA, 416 bp, Homo sapiens
  source 1..416: mol_type = other DNA
agtctgacgcacaccacaatgtgattctttattgatcgagtacatgaactatttcaaaataaataaattaagtgtctaaactgtcctggaacgaactgccaccagagggagtgaggaccctgttcctgggtgtctgcttcttgaatcccaggaactgaatgaacctccctggattgtgggatctggcagtgggctgtagaccaccagcccctcgcctggccaagtgggagaggggtctcagggcccaggctcagcctggaggctcaaccactagcagaagcaacttctgcgcggcgcctcctccccgcagtgttgtgaagtcctgccccagccgggtggcggctcccgctagaccccttcgctaggtgtggtgtctcgagaagccactaggtggagccaagacaccgaggctctcc

SEQ ID NO: 1971 - DNA, 535 bp, Homo sapiens
  source 1..535: mol_type = other DNA
caagggaggggaggtcgctccttccgcccgttggtgacaccctatctaggtggtggcgcagctcgccagggctccgcccccctactgagaccccctcggggtctcgggagtgaaaagcgttttaataaagaccttgtcgcctggcgactacttccagagtccccagcagggtggaggggtggggggaccgtgccgcccccgcccagcctctccgagttgttccagcagggggcgctctgagtacggagtggtcccactggatccagttcagggttcaatggagctagggccagctgggacagccatacacgagccctgagcatctgcgcccgcagctagctccccccgcctctgcggagagcgcgattcaagtgctggctttgcgtccgcttccccaactagcgcaggagaaggctatctcggtccccagagaagcctggacccacacgcgggctagatccagaggttggtggcgggggcgcagggccccccaggtgggggggggcggacggttccgtacagggtataaaagctg

SEQ ID NO: 1972 - DNA, 563 bp, Homo sapiens
  source 1..563: mol_type = other DNA
gaaaaaaaaagaaatattatttatgtcagctgaaaaaaaaggagggatcactccagttttaaccccttcttgtacagaaaaagttctctccctgataacagctagctgcttcctcccctcatgagagactcgggcggagatgcccggcatcccggggtccagcagggagcgcgggatccagggtcagtactacgcgggtccaggacccggacggggctgcaggcagaacaggaagagttttgggtccagtctccgacgctgcctttccgggatccgatccccccagacgtcacaggtcgcgacgtttcacagtgagaaggtgcagtgacgccgtgccgctgagctcagctcacaacgaggcgggccaagttccagttcccgccccttacggaagtgaagccggaggtgtccggcgggctgccaccttcgcgttgtaccaccacggggctagaggggccggggagcgcatcccgcccccgcccccacccacgggtcggggcggtgcgggtgtgcgcgcgccgacctctggcgcgttctaacccgcgcgctcggcgcgcaccgat

SEQ ID NO: 1973 - DNA, 315 bp, Homo sapiens
  source 1..315: mol_type = other DNA
tcagaaagcctctccgttctaagagcctaatgcctttttgggaggaggttccccaaaatccatgtgggactcattctctgctgaatcctaccagcaagcctggattctagtgaagcccaattcaccaggatagagctcgaaccctctgagtctaagaggctagaacacctgggctacccaggcatccgcagcgggccggaattgggggcaatgaccttgacaccatctaccagcgcgggggtgggatcgagcggacagatctccagctaagaccggaagcgtccggagccggatgcggaaatcggtgcgcgccga

SEQ ID NO: 1974 - DNA, 452 bp, Homo sapiens
  source 1..452: mol_type = other DNA
ccatagagctcgaaccctctgagtctaagaggctagaacacctgggctacccaggcatccgcagcgggccggaattgggggcaatgaccttgacaccatctaccagcgcgggggtgggatcgagcggacagatctccagctaagaccggaagcgtccggagccggatgcggaaatcggtgcgcgccgagcgcgcgggttagaacgcgccagaggtcggcgcgcgcacacccgcaccgccccgacccgtgggtgggggcgggggcgggatgcgctccccggcccctctagccccgtggtggtacaacgcgaaggtggcagcccgccggacacctccggcttcacttccgtaaggggcgggaactggaacttggcccgcctcgttgtgagctgagctcagcggcacggcgtcactgcaccttctcactgtgaaacgtcgcgacctgtgacgtct

SEQ ID NO: 1975 - DNA, 341 bp, Homo sapiens
  source 1..341: mol_type = other DNA
aatgcaaatgatttccagtagagggtgtcaacctcctccatttttaggcatttggaaatcccacctgggaaagttttttttaaaaaagggtttgcacaagaacaatttgaccccaaagtgcaagtcaaataataggataaccctttctccttgctaatgctaggggtacctgccacccttagctggaaggacagggcctgtctggaaagggcggcccttagaaaatggagccttcttctctagtcccagcggcctccacgcagagcatgcgcgggaatgtgccaggcgggccagccgaaccagcttgccttacaactcccagcatgctgctacaactccca

SEQ ID NO: 1976 - DNA, 457 bp, Homo sapiens
  source 1..457: mol_type = other DNA
acttcttagcatataacctaggccaaaatgtagtctcgcagaatttggcaaaattctactagctagcgtggccaatttgtgcctcaacaagcgtttcctccttagcaaaggcggacgtagggcttccagagaggaccccagtgcgcggagcggcacggcgcccactcctctcgccctcggcgcctagcacgctgcacttaactgcgctggggccgcggtggtgagcgctccgcggagtcgggggaagggcgggggccgctccgtccagccgggcgccagctcctcccgggcgggcgggcacccaccgaccgcgggcacacaaagcctgctcggcgtgctcggcgatcggctccttatgcctgtgccgccacgcgccgtcaggcggctccgggttgggcgttgggccgtggcaggccctgggcgtcaagaagctgcacgcatcaaaccgccgcgggag

SEQ ID NO: 1977 - DNA, 307 bp, Homo sapiens
  source 1..307: mol_type = other DNA
gccctttaccccactgagctgagcccggattgtcagagccttgagagggaggccaggccccaggctccagggggatgtgcaccccgatcctggtgagggagatcacgggtcccttgggcccccagtcccagccgactgggaagctatcatatctcccagaaatctaaggggctaccctagggaacttcaagtaccgtcctgtccgtctcagtgactgccgtggtgaccggtggggcttgtagtcacctcggaattcctgcgtcagaggcggtgccttgcgctgagatccctgcggcaaagaaccggg

SEQ ID NO: 1978 - DNA, 353 bp, Homo sapiens
  source 1..353: mol_type = other DNA
ggactggagcctctccaatgatctcccctggagagagagtgggcgcctccatctactccagactggtagaagtgggagccttcatctattcctggcaggtggcaggacccagacccaggacttgccctgcccctgtctgggcccaggcaggggctgccccgtgctgcaggagccagtgggcctgggtcttctggaaccaagcccgggtctcggcctgcaggaacaggcttcgaggcagcctccggggcctggggagatgcggggaagcagcatgatgagtgggccttctcctgtttagggtacaattgcccagaaagtcggtcctgagggctggcttacttcataatatgagg

SEQ ID NO: 1979 - DNA, 356 bp, Homo sapiens
  source 1..356: mol_type = other DNA
cagtccagcctgggtgacagagctagactaaaaaagatgtcaacactgatgttattaatgacaactgctgatagtgttgatactggatatagatttctttattattattactattattattattattttaaaaatagtgatgggctctccccaggatgaactcctgcaagccatgatccataagcaccttgtgtggcttatcctactgctcagcaggcagcagtaagggcttcctaacaccccaccgctatctacagctgcgtggcaggctttccatgacgtgagtcctcgccagaactaaggctgtgggtaaggcgacatttcctgcccccggggccagggtgagaggaagtgtg

SEQ ID NO: 1980 - DNA, 451 bp, Homo sapiens
  source 1..451: mol_type = other DNA
caagagcatcgatttattcgtgaagaaattaatagatcttctcttagctcctcggacgcaggagccgcccgcgggtggagctgaggaccgcgccggaggccgagcacctggaaagccccgggatccccagcacccagggcagaaggacgacctcctagaggctcacggtgagccctacacagtgatcgccttcttcctcgggatcttggtcagaaccaagggactaggccaaagaggacaaggaggcctcctaggaggctgagaggggctcccagaggccacctagacacagcgctccccagaagcccgggcgcgctggctgcccctccggcggtgcagccccactggcgggagccgctgcagccgcagcgggatttgtcaggctaaatattttgactgggggcggggagggcgggagctgggcgcggcccctgcgtgccggccctgggaa

SEQ ID NO: 1981 - DNA, 311 bp, Homo sapiens
  source 1..311: mol_type = other DNA
cccagctactcgggaggctgaggcacaagaatcccttgaaccagtccagcctgggtgacagagctagactaaaaaagatgtcaacactgatgttattaatgacaactgctgatagtgttgatactggatatagatttctttattattattactattattattattattttaaaaatagtgatgggctctccccaggatgaactcctgcaagccatgatccataagcaccttgtgtggcttatcctactgctcagcaggcagcagtaagggcttcctaacaccccaccgctatctacagctgcgtggcaggc

SEQ ID NO: 1982 - DNA, 533 bp, Homo sapiens
  source 1..533: mol_type = other DNA
ctgccctgggtgctggggatcccggggctttccaggtgctcggcctccggcgcggtcctcagctccacccgcgggcggctcctgcgtccgaggagctaagagaagatctattaatttcttcacgaataaatcgatgctcttgtcagggaggcgatcgatgtcagccctgccctgccttgccctatcctgccccggggccggcgctggctggccggggtcagggactggctcactgggggctgcagatcgcacccccaggcacccagcgcgggcggggagctcgcgcctttgcgcgcgggcttctcgcgccacgctcactcccctaggcacgcgcgccgcgaggatggagcgctgagcctggggctgcagctgctttaagctgagagcagacacctccgaggcgttctgctgcggcccctcagcgtctgccggagctgaggcggatcctcggggagggggcccctaaggggcaaggcggggccgggcgggggccgctggctccgccctttcctggcggctgggtctttaacacc

SEQ ID NO: 1983 - DNA, 398 bp, Homo sapiens
  source 1..398: mol_type = other DNA
gttgcagtaagctgagatcataccaccgctccagagtgagctccgtctcaaaaaaaaaaaaaaaaaagttatatgcatttctagacataacagactacagtatagtgtaaactacccttagaattttgggggtatgcctttactcaaatggggcccaccacagtttgtaaggagtgtgattcaccttattaactcgttagaggattaactggcggggtggactctggagagtggacctgcccccacctggaggtcctaggtcacacaggctcggccagccctggccctctgggacccatacctgcgatctctggccggcctcgccctgcctgctccgccgggcctggcccgcccctcgggttctggctccgcgcggcgccccctgtcggcccctcggg

SEQ ID NO: 1984 - DNA, 399 bp, Homo sapiens
  source 1..399: mol_type = other DNA
aacagactacagtatagtgtaaactacccttagaattttgggggtatgcctttactcaaatggggcccaccacagtttgtaaggagtgtgattcaccttattaactcgttagaggattaactggcggggtggactctggagagtggacctgcccccacctggaggtcctaggtcacacaggctcggccagccctggccctctgggacccatacctgcgatctctggccggcctcgccctgcctgctccgccgggcctggcccgcccctcgggttctggctccgcgcggcgccccctgtcggcccctcgggcccgcccgcctcgcgcggttgtcttggagagggacgcgtaggctacgccaccgcggacgggtcggatccggtccctggacgcggaacag

SEQ ID NO: 1985 - DNA, 378 bp, Homo sapiens
  source 1..378: mol_type = other DNA
gccgggcgtcctgcgcgacaataatctttctggtttcctttcagaaaggccgaacgtaggctgggtctgaaaaaggagagaatattttcagagattatctctggtttgttatcattactaccatcttaaaggtaaaaagcattgcatttcaggtgttctttgattttttttggtgcaattggctcatttaagaatttcaaaacatttaatgtaaaagcttttttttttttaaggaagtctggttttatttattattttactgtacaaatcagccgaaagaatttttccaagtgccatttcggatttagaaaattacttttaagctggatttaaaggatggttttatctgtactttgcagttaacagtgatattttgaa

SEQ ID NO: 1986 - DNA, 587 bp, Homo sapiens
  source 1..587: mol_type = other DNA
aggccgggacaggggcgggccggtcggcgggagtcgcggccgcgggaaccgaggcagggaaaggcggtcagcttcccgcccccgcccccggccgccgcggcgtgaggggaaaggccggcgggcggcgggcagcgcagcgaggaggaggagcctgcggccccgccccgcgggagcgagggaagggagggaaggggggcggccggccgggcctgcgcccgagcgagcggcgaaccgagcccggaaggaggcgagcgcggccgcgacgccggcagtcggacgcccgctcgtgccggcctgccgcagccgccgcagccttccctgtgcgccgagcctggcgtcccgagcggccgcgaaggccggaacacggcggtcgggcgcggggcgagcggcgccgggagcccgaggcccggccgggcgtcctgcgcgaggcactgcgggctcaataatctttctggtttcctttcagaaaggccgaacgtaggctgggtctgaaaaaggagagaatattttcagagattatctctggtttgttatcattactaccatcttaaaggtaaaaagcattgcatttcaggtgttctttgatt

SEQ ID NO: 1987 - DNA, 607 bp, Homo sapiens
  source 1..607: mol_type = other DNA
cgggcggcggtggcggcggcggggacggcgcgcggtgcctggcggggtcagggccggggtcgcccgcgggccgggccggggatccggctgagatgggaacccgctaggccgcgccgaggggcagggccggcgactgaggggccgcagaggggaggccgggacaggggcgggccggtcggcgggagtcgcggccgcgggaaccgaggcagggaaaggcggtcagcttcccgcccccgcccccggccgccgcggcgtgaggggaaaggccggcgggcggcgggcagcgcagcgaggaggaggagcctgcggccccgccccgcgggagcgagggaagggagggaaggggggcggccggccgggcctgcgcccgagcgagcggcgaaccgagcccggaaggaggcgagcgcggccgcgacgccggcagtcggacgcccgctcgtgccggcctgccgcagccgccgcagccttccctgtgcgccgagcctggcgtcccgagcggccgcgaaggccggaacacggcggtcgggcgcggggcgagcggcgccgggagcccgaggcccggccgggcgtcctgcgcgaggcactgcgggctcaataatctttctgg

SEQ ID NO: 1988 - DNA, 641 bp, Homo sapiens
  source 1..641: mol_type = other DNA
cgggcgcaaacctgcacccgtgggcaggggcacggggcgcgggcacggtggctggcggtggcggcggcggggacggcgcgcggtgcctggcggggtcagggccggggtcgcccgcgggccgggccggggatccggctgagatgggaacccgctaggccgcgccgaggggcagggccggcgactgaggggccgcagaggggaggccgggacaggggcgggccggtcggcgggagtcgcggccgcgggaaccgaggcagggaaaggcggtcagcttcccgcccccgcccccggccgccgcggcgtgaggggaaaggccggcgggcggcgggcagcgcagcgaggaggaggagcctgcggccccgccccgcgggagcgagggaagggagggaaggggggcggccggccgggcctgcgcccgagcgagcggcgaaccgagcccggaaggaggcgagcgcggccgcgacgccggcagtcggacgcccgctcgtgccggcctgccgcagccgccgcagccttccctgtgcgccgagcctggcgtcccgagcggccgcgaaggccggaacacggcggtcgggcgcggggcgagcggcgccgggagcccgaggcccggccgggcgtcctgcgcgaggcactgcgggctc

SEQ ID NO: 1989 - DNA, 466 bp, Homo sapiens
  source 1..466: mol_type = other DNA
ggccccgcctcgggatttttaatcataacgctcggcaccttctgacaaatgtcacgttacttgtaaagatagattgctctggaaaggctcttccatagacgggcgcaaacctgcacccgtgggcaggggcacggggcgcgggcacggtggctggcggtggcggcggcggggacggcgcgcggtgcctggcggggtcagggccggggtcgcccgcgggccgggccggggatccggctgagatgggaacccgctaggccgcgccgaggggcagggccggcgactgaggggccgcagaggggaggccgggacaggggcgggccggtcggcgggagtcgcggccgcgggaaccgaggcagggaaaggcggtcagcttcccgcccccgcccccggccgccgcggcgtgaggggaaaggccggcgggcggcgggcagcgcagcgaggaggaggagcctgcggccccgccccg

SEQ ID NO: 1990 - DNA, 377 bp, Homo sapiens
  source 1..377: mol_type = other DNA
aaaaatattacatatattaagaacacattatcattattattatcattttgagatggactggtgtgcagtggcgcagattctcctcggagtagcgaggtgatccactcgcctcggtctcccaatttttatgtgtcagtggtctgtcaccacagagcaatctagactgtgctggtgaggtcactccagagctcacgaatgtgtatagataatttacatatacatatccacccccgtgtccactgcctgcagagtattttacaatggcatttacctaggcaagaagtgagagtttttttattttaataattttttaaaaaaaattttattattattagttttttgagacggcccagactggagtgcagtggcgcaatcgc

SEQ ID NO: 1991 - DNA, 557 bp, Homo sapiens
  source 1..557: mol_type = other DNA
cctggacaccactcagatttacagggcagataaagctgaactgcttgagattctttatccttaatgagcctctaaaggaagaaaaaatcatgctttgtagcggggaagcggtcatgccccccagtcttcccagagaaagctttgcggtttctttcatacgtatatgaaagggccctttcttaaagggtaggatttctggagaaagacgggccgcctctctgtcctgtggggtctgcgaggtcccctcccccgggaggtgggaccccggggcagcgcctcgccccgcaaagtccgttctgcctcacggcgcaggactggcgggggaagcgtatgctcagcaccccctcgcgccgcgtcacccctcggcgtctggaggaccctggcccagcagcggaccgggccggccgcccgccacgagcgtgcgtaacgtgcccccgcagcgtgacgcacgggccgtgccggggcggatgcgcgggatgcgggccgggaggtgaggctgggaaccggcgggagggcgcctcctcctcccccgccctctctgctgaggatggaagtga

SEQ ID NO: 1992 - DNA, 554 bp, Homo sapiens
  source 1..554: mol_type = other DNA
cgcatatgccaatatgtataaatgcactatttgttttagcaccaaaagtaggtgatgtgacataatatacctaaggtgatgtgcatttgtagatataaaattaaatgcaaaatcataagagctatacattcacctggtaattttttaaaaaatcaaacggtacagaaatacataaaataaattgtgttccctcaaacataatcaatatttttgtgtgtactttccaggaaaagaagaaagtatacttaaaagagttgatgtacacatatatcctattttttatatttacccaatgggataatactacaaaaccaatctatatctcacttttattctacggatgaatcagaatattcttaaacagtccctgttttgtttccagtgtttaggcaataatgaatgctacaataaacgttcttatagtactctcttcagatacttccttcagggtaatttcccaatagcaaaaatgtagggtcaagggtatttgattttttaaaaccttaactttttttaggaaactgtgattagcagctgaagacgggtactcccac

SEQ ID NO: 1993 - DNA, 485 bp, Homo sapiens
  source 1..485: mol_type = other DNA
tgaggatgggacatttgatctgagatcatctcccatttctaatgtaaaggtatctgaatagttatatcaccttcaaaggggcaagaattgactcttgggaagatgaaaaaaactaattttttaatgtatcaaacacagctatacatgcagcacataaacacatacatagtatatttgtggtattaaatttaaatggttgagaaacactggttcagagtttttattcaatagtccctcaaataatacttactaaaggaatgctttcaagaaagaaattgcaaattgttataaacactgtgaaaggtggaacctctttgattgcaaagccctttctgagaagggctttggcttaatctgtacatttgtattattttcctgttcagaagcctcataacaactgtgaaagtcaaaaaggcatatgcttgacaccttgactgtgtgattacagaaagaattatttgaatactagcaaatacacaacttga

SEQ ID NO: 1994 - DNA, 531 bp, Homo sapiens
  source 1..531: mol_type = other DNA
aagaacaaaccaggcttgttcccaaaccttgtaatactatctaatgagaaaaataggcattatacaatataaaatttggtgacttccatgggagaaagaacataataatatttgttaaaaaagaggaccctcttgaggatgggacatttgatctgagatcatctcccatttctaatgtaaaggtatctgaatagttatatcaccttcaaaggggcaagaattgactcttgggaagatgaaaaaaactaattttttaatgtatcaaacacagctatacatgcagcacataaacacatacatagtatatttgtggtattaaatttaaatggttgagaaacactggttcagagtttttattcaatagtccctcaaataatacttactaaaggaatgctttcaagaaagaaattgcaaattgttataaacactgtgaaaggtggaacctctttgattgcaaagccctttctgagaagggctttggcttaatctgtacatttgtattattttcctgttcagaagcctcataacaac

SEQ ID NO: 1995 - DNA, 289 bp, Homo sapiens
  source 1..289: mol_type = other DNA
tgaagatgaggtgtttatcagaacactccttcatggtcatgacggtggaaccctcagttttccatcatgtgacggtagagcgaaaagttggcagtctgcagagatggccgtcacagaattgtgagaaataaatctctgttattgatatccattctgtcttcgaaggagacagcatcgttctgaaattaaggataacaaagagttatctgttttcaaaaaattctcagatttcctgacagtaactatttctgtagtaccaaaggacaactctttctctgggataaaactt

SEQ ID NO: 1996 - DNA, 479 bp, Homo sapiens
  source 1..479: mol_type = other DNA
gcataaaaaagttttaaagagttatacataccaaaatattatacgtaccaaaaaacgtcactacggatttttccattttttgtgtttctcaaaacaccaaacagcatgttgcccagtgtgaaagaatggcaaaaatcaaaatttaatagaattatttaaataccggctaaagcataccaggcatatgtatttcaatcaatatatatttgccaagacattcctgtagcaaattttggattctaggacattaagtaaaaatgttatggcctattatctaggaagagcatgatggggctataatttactcctcagctttttcatatatatcagacaaggtgtctacagacggcctgctggagggagaaattcttcatctctggggatattcagggacatccttagattatgaatctcacctcatctctagtagcagagagaataggttgtcacagcagtacttaattctattaaattttgat

SEQ ID NO: 1997 - DNA, 686 bp, Homo sapiens
  source 1..686: mol_type = other DNA
attacagattagaaagatggcaatgttttcagcaatatagtgcaagtgttttgaagtttagtaaaatctcattctagaaagtcatcgaatgactacgaaaaattttacttaagaaatatgagctattgaaacaatggccttattattttatgaaccttgagaagcaatatatcaagataagagccagactgtgacactgggctgcctgggtttgaatcccagatctgttactactagaaattgattaagctgatcttggtcattttacatctgaatgtttgtgtcctggcaaaattcttatgttgatacttaatcctcaatgcaatagtaataaaaggtaaccttttattacatgaccttttaggggtcatgagtgtggaactcttatgaaaaggattagtctccttgtaaaagaggctcttgtttgctccttccatcatgtgaagacacatagaggatcatgtgataaatttatgttgtttataaatttctcagtctaaggtccttattcatgtgaaaggggatagtgccaattcagaaacttgctgaaggtaataaataactctgtaagcatgaggcacttagaactgtgtctgactcattgcagctataattgttttagcccttccaggacaaagataatggttaaacatagtggcactattctacttccttttttgctaatt

SEQ ID NO: 1998 - DNA, 411 bp, Homo sapiens
  source 1..411: mol_type = other DNA
cggatttaagaaatgttgaaaattaagatagcttaggaaaagaggggcaattttacaaatgccagagttagtactaatatttcattttcaaatatcccccagattgtaatttatttactggtacactgaaagtttgaatatcaaagcgtatataggttgaccctgtacatagatttaatgacatgtttgcataatatgactatactagagaaagtttgcatagtgggactatataaaagtattgtagatgtatcagatgaatttcagcaggaccataacctgatgagactcatcaatacctgaattcttgaaaaagtccaactatctgcagcttgtggaactgaatcaaactatatttaaaaaggagcatctttaattttctcagacttcatagaaaaggaaatggagact

SEQ ID NO: 1999 - DNA, 285 bp, Homo sapiens
  source 1..285: mol_type = other DNA
tgctaaaaacttttcattgaatacaatactaagtaaatgaagaaatgtgtttctgctgagttacctgaatattacaaagaagcaaaaattattactgtagaggaacgaatgcagagattatgtcagcatacaaaattgattgcttgatcaattcatgaagcatagctatacttaataatatagcaaagcaccaggcaattttctaggcacttccctctggggtaaaggaatcaaaattggcttatttcccttgtggccagaaccaagtcatgatagcctgtttct

SEQ ID NO: 2000 - DNA, 388 bp, Homo sapiens
  source 1..388: mol_type = other DNA
tgttaatgtaaaatgtaaaactattttcagaatctgctagaaaaaaatgataaattgaacatcagaatttaaaaatttagctgtgcaaaatactttacttaaatgatgcaatgactctcaaattcaagagtttatattaagatattcaacattattacccattagtgaaattcacattaaaatcatcatgacatataattacctacctattgaaatgtctggaaaccagcttggcagtttcttaaaatctaaatatgttacttatatatgacccagaaattgcactattggtcaattatccaagacaaataaaggcttatgtttgcataaaaaactttataggaatgtttatagcaacgttatttgtaacagccttagtgtcatgaga

SEQ ID NO: 2001 - DNA, 333 bp, Homo sapiens
  source 1..333: mol_type = other DNA
acctctggcagaggccaggtaaagccatccagttggctaccttgtaagatgaaggaagggtcaactgtgcctcttccaggccctgagtcctccaacgcctagctgtgctcaaccttgactgggtgaagccaaggcagggcctttataggtggggagaggcatgtatgcccctcccttatccaagcattcattagtcaattgagaattcttaatttgggggtggaatttaaaaagaaaggtctttatgtttatttaacctgagctagaggctgatgtccctcagcccatggtggggtggccaggggtcccgtcgtgcctgccccagaacccacg

SEQ ID NO: 2002 - DNA, 148 bp, Homo sapiens
  source 1..148: mol_type = other DNA
ctgagaggagggtgctgtgccaggcagcaggccctgcacctggtgatcagtccagactcctggagttgcccctggggtaacaccctactaaggcctgtgcaagggcatgggcctcctcttttgcccttgagtgtcaagaagccactaa

SEQ ID NO: 2003 - DNA, 353 bp, Homo sapiens
  source 1..353: mol_type = other DNA
tgagtcctccaacgcctagctgtgctcaaccttgactgggtgaagccaaggcagggcctttataggtggggagaggcatgtatgcccctcccttatccaagcattcattagtcaattgagaattcttaatttgggggtggaatttaaaaagaaaggtctttatgtttatttaacctgagctagaggctgatgtccctcagcccatggtggggtggccaggggtcccgtcgtgcctgccccagaacccacgcgcgtgagtgtgcgcgcgcgcgtgtgtgtgtgcaggggcgggcgcgggcgggcggggggcgggctcccgggctcccgggctcccctcctccccagcccggctc

SEQ ID NO: 2004 - DNA, 391 bp, Homo sapiens
  source 1..391: mol_type = other DNA
ttctggagtctagcaatgtaggccttcagggccagtaagtgaaccaccctgcctgagagacgctgctgctgcttcaggaactgtatctgaaacagcttgaggtgctgtttttatcttgtataaatcccaggcaattgagctgggaggctccagagctagtcaaagctgccctgagggttgtctttgcccacatttgacaaataaaagttaaagttatgaacttcattgagctgaattgaaggtcgaaaagaaattaaattcttgccgactcggtccagaggtgccgccgccgccagtccagctccagcctccactgcggccgcagctgcttgggcttctgcagccgccgccactgctagggcggccgccctccactttcacgggggcgggg

SEQ ID NO: 2005 - DNA, 218 bp, Homo sapiens
  source 1..218: mol_type = other DNA
tacacttactgtttaagatgtgcaactgaggaaattaattttcatgcgtttactttattgtaaatgtggtacttgcacttgagaaattttggaaaagatgtaaagcaattgcatttttaccatggttggaattgtaacacagacacaaccttatgtcctgcttccaaaacataaataatggtaaagtctcctttgaaacaggcggcggcgccaggatt

SEQ ID NO: 2006 - DNA, 157 bp, Homo sapiens
  source 1..157: mol_type = other DNA
ttctttatttcattgtaaatgcagctatgcatttaaaaataatttttaaaaatcttgcatttcttttatgtgttacgcacagaagttctttcaatctagttattttacagataaagaaactgacaacacctccaacaggtgtcccatgtgggggttc

SEQ ID NO: 2007 - DNA, 454 bp, Homo sapiens
  source 1..454: mol_type = other DNA
agtaacttgtacttttatcctaaataaaactgtatgagattctcatctcactacatagggttacaagtaacttttatgatatctttaaaaagtttcatgttgaatatcacctccataattaaaaaatggatgcatagactgaattcattcattcatttgacaaaaaaattctgcccccattttagaaaatattatttcaagcaggccttgtttttatccagagagtgtatacagtataataaaactcagtacaccaagatttatatttcatggcgtgtttttctccctaagtagagaaaaagctccttcagtaaagtgattgtgttgtcaaccactgcatattcttaagtgtaccaagatgcttgtcaatgaaaatcaaacagaggaaattttctttatatgttttagtgtctctaagaatatgctcttattgtatgattgagaaaaaaatgtc

SEQ ID NO: 2008 - DNA, 540 bp, Homo sapiens
  source 1..540: mol_type = other DNA
aaaactgtgttcatgtatttacacatattaaccagccagggtcactgataagtcactgaatacttcatataaaccttaaatcaaacattgacaaactttttatacaatgtgttttggtcagatcacaaaacaacttaaatttggatttttgtggtctcccattccacactgtacagaattttcagtatttagttgagatgcaacttcaaattactagagaatatagttctaagtagatttgtatctgggattctatacattgaaattaaaatcacaatgcattttaattttttgtttaaacatctgcagtttaaaactctttgatagaagagattacattgttaacctcatatgcctagtaagacactggtatcaaccatgtactatgtaattttttagtgaatgactatacagattaaatgcagtagattctgaatggctgcaatttaatctctaaggataatgtagagtggtagtttatataggaactgaaaaaatgacatggtttctcctttttatcttacaaatgacatgcaaaat

SEQ ID NO: 2009 - DNA, 422 bp, Homo sapiens
  source 1..422: mol_type = other DNA
cattccacactgtacagaattttcagtatttagttgagatgcaacttcaaattactagagaatatagttctaagtagatttgtatctgggattctatacattgaaattaaaatcacaatgcattttaattttttgtttaaacatctgcagtttaaaactctttgatagaagagattacattgttaacctcatatgcctagtaagacactggtatcaaccatgtactatgtaattttttagtgaatgactatacagattaaatgcagtagattctgaatggctgcaatttaatctctaaggataatgtagagtggtagtttatataggaactgaaaaaatgacatggtttctcctttttatcttacaaatgacatgcaaaatcaatgccatacaccactttgtctaaggcagttgaggaaggg

SEQ ID NO: 2010 - DNA, 387 bp, Homo sapiens
  source 1..387: mol_type = other DNA
taaaattttttaaaacaagtatctctgaactttttgtataaaaaaaagcaacctctttgctctattattaataccacatgtggtgatatgaatgcccaaaacttacccaaaaagttatcttttgtttatgtcatgaatatttgttactcaaaactcccaattgtcattttttccctcaaatattgctatagtataattttgtttgaattataaacttcagtctttattatattgctatagtacaggaaatgttttaaatgctttgcctttatgtaagtgaatatcggtacacacacatacacatacacacaagcatccttctgggttaaagcagactaaaagcttagcaattgcttaatatcaccatcttatcctatagatgtggga

SEQ ID NO: 2011 - DNA, 317 bp, Homo sapiens
  source 1..317: mol_type = other DNA
ttcactcaattaattctccagtgaacacttcagtatgaactaatgaggagcttcatgcctgccctcagtcactttaacagtgacagttgggggaaactgaaaaaaaggagctttctttagattttctgataatctgcattgccattgctgctcctttttcagcagcacagagagtcagctatccaggatgctgagtgtcttctgatcatgatcaagagcagccagattagattattgacaagccaagtatggatttgattgccaaaactacagactttgggcagtgtggcttctctgacagggaagtcagctgtctg

SEQ ID NO: 2012 - DNA, 745 bp, Homo sapiens
  source 1..745: mol_type = other DNA
taaagattagaaattaatgtaaattgatcatgttaatatataaatatttcatagatgttgattcttttctcttaaagataaaataatttcctctccttatcccaacttcagaaaataaaaagttcctgcctttactactaaatttgacttgaatataatgaaactatatggaaaagtaaaaaggactctcagtttttctatgtgagatccaaacaaatgtagaatcaaaatcttctcttgtagatcatggaagttagattattcaagctgcatttacactggaatgagaaaggtctaagagcaatttttgtaagttagtctaaaataactatgcctatctacctctttttgttctccattaaaattaatacatacagtaggatgatttataccatatatatcagaagtcagccatattttcaacttttttgtgacatcattggtttgtcaaataaggtatcctaatttttgttttacaaaatattaatgaacacatcatataactttttttgttccttccatttaaatgattaagagtacaactaaatcagatttttaaagaccaaattgttgaggttaggaataaaatcttattttgtgaaagactctctagaaaaatagaatatggggttttttttctaatttttcatccaaaaaccttactttcattttttaagtcttattgagtaactttgaaagccagagcctcccaaaactgctgagtcacccagtatctgtaaaactt

SEQ ID NO: 2013 - DNA, 559 bp, Homo sapiens
  source 1..559: mol_type = other DNA
ggattaagacaatcagctacagatcagctagttggtaaccacagcactgtctgctaactgataccattcatttgacaattcagagttatgatacccactgttcttcacaggaaaaaaaaattgcagtacaactatccataaataatgcaaaaagcatgagtaatcatgaatttaataatcaaggtaaggccaactagtatgaaactctttcaaattatttgaataaggatttacatattcataatgactttctggttattaataactgggtgaatatgtaggtactatttaaacaaaaactggtagcaatagacatctctacctctcctgctcctgccctgtgaacaggaaaggagggagatatatgtaagttctttataagaaagttctgagtttgaaactcctttcagcaagtatttgtaagtcaaaaaagcgaagaagaggcaccatttactgtcatttctccttgtgactgagattacttactacaaagaggaactgaccactttctctgacatctgaaaatgattacataacttctttctagttaggaattagg

SEQ ID NO: 2014 - DNA, 549 bp, Homo sapiens
  source 1..549: mol_type = other DNA
ttgttttcaggagagtgtcaactaataacctaaaaagggaaatttaaaaaaaacttgttttctctgcagatctgctgctgggttaacacaacatcatctgccagttgaaaatactgctgagcaaagggtttaacaggactctcgggtttttccatgaataatgaaggaaacctgaggaatcatgaatgttaaactcctttatatatatttgagaaaggatttatatattcataataactttctgatctggaaagccctaggtttgtcaactattaataactgggtgaatgcttcaggtagtatttaaaccaactgctatttcatagcagacattctcccaactggtagcaatagatgctcctaccaagatctcgaaaggagggagaagaaaccaccttgcttctctcatatttgacaagttctaagattggaactccattcagatatcaacatttgtaagaaaaaaaattttaaatataactttgatacaaattttactttgattaagatacctacaggaaagaaactgttcattttctctaacaactt

SEQ ID NO: 2015 - DNA, 799 bp, Homo sapiens
  source 1..799: mol_type = other DNA
ttcattttatgcttcattttacaacaagtgtaagaagaaataattctctttttcaaatggtctatgctttactcagtcatagataacattttttgtcaagacagggagaatcaattatatatttcctactttgggatacatatatgaatgttttctaattactccatgagtacttgagaagagtttataaacgttggattccaaattctatttaagtaagataaagtttcttaagtaagcttgttaattatgtttgaaaaatctaaatctaaatctaagctattttttaccttgttctttcagtaactgagagatgtggtgaaatctccaactctaatagtgattttatttctaccatatatttttacatagaatatgtatatctaagtatatatgttatgtgtgtgtttagagagaagaaaaaacttctatatgctactttataaagtaataacagattatatttataatataatttaaattattatatctttttccaagttgcatactttaccattatgtagtgaaactatgtacttattgacttaagcctattttaagctacactatttttcctaaaaagtctttctttaagttagagtttgaagaatataacttttccagctctttctcaaacttaagtgaacttatgctttatttgtactttgtcaacaacatatgactggatttatttttaatccaaattgaaaatttttcctatgcaaattctataaaggtatatattttaacttggttttcaagtttcttatttttaaaaaatctatattctccttaaaga

SEQ ID NO: 2016 - DNA, 526 bp, Homo sapiens
  source 1..526: mol_type = other DNA
aaaatactgctgagcaaagggtttaacaggactctcgggtttttccatgaataatgaaggaaacctgaggaatcatgaatgttaaactcctttatatatatttgagaaaggatttatatattcataataactttctgatctggaaagccctaggtttgtcaactattaataactgggtgaatgcttcaggtagtatttaaaccaactgctatttcatagcagacattctcccaactggtagcaatagatgctcctaccaagatctcgaaaggagggagaagaaaccaccttgcttctctcatatttgacaagttctaagattggaactccattcagatatcaacatttgtaagaaaaaaaattttaaatataactttgatacaaattttactttgattaagatacctacaggaaagaaactgttcattttctctaacaacttctctctccccagggcaaagcattgaaaatacttcattttcttagcatttcaggagattataacatcctgtatttcagtttctga

SEQ ID NO: 2017 - DNA, 462 bp, Homo sapiens
  source 1..462: mol_type = other DNA
acttacatggtttcatctcgacttcatagaaatcatgtaaacatagaaaccatgttatccatgttgcgtgcctgcgtgcgtgcgcgcgcacacacacacggagtaaaaataagttttgctgttagagttgaacttaaaaatctctaaattgttacatttggaggctctcattttgggtttgttggtcaattttaattatacagacataaataaaggatatattaattatagagagacattcaatgatttgtccaataatataaaaacagtttttgtaacaaaacgacctagtatcccagtttattttcctttatcttaaaatctttggtaaacatgtaaatgaggttttgagaagttaagattgaaattccatgttcatgttcgctgcaattgaactggagaagttgtggaatttgtaacaaacacttcctaggagtgatttcttagcaaacaaattccagc

SEQ ID NO: 2018 - DNA, 286 bp, Homo sapiens
  source 1..286: mol_type = other DNA
gcatgattacttgcaggtggctacaagcacattatgcccttaatatcataaaacttccatggggaaattctttagtcaagaaaagggtggcaccccgattccgggaattgcccgcccattagtacgtgaaccacattgcctgtgactcaaatcgagatcagtgtgcttgtttataccagaaaaatgtcattcacaaagtgtatcaagaagtagatacaagtttctatagacattttattagagctccagttgtcactcctacccacactgggcctgggggtgaagg

SEQ ID NO: 2019 - DNA, 557 bp, Homo sapiens
  source 1..557: mol_type = other DNA
tgcagatctgctgctgggttaacaccacatcatctgctagttgatgccccttaacagagaaaaatacactgctgagcagaggtttcaggaaaactccttcatataaatttaaggaaggatttacatattcataatgactttctgatctggaaagcccaggcttgtcagttattaataattggatgaatacttcaggtagtatttaaacaaattattggtagcaatagatgctcctaccaagatctcctcctgccactgccactctgtgcacaggaaaggaggggagaagaagccatgttgcttctcttatatttgagcatcatttaagggaatataagtctctaatgactcacatgtaagtctaagaaagttctaatgttggaactcctttcagctatcgaattttgtaagaaaaaaaacttatttgtgtttatatacatttatgagatacaagtgtaatttcgttacatggatatatgagtcagagatttcagtgtgcacatcacccgaaaaatgttaactgtaactgttcattttctctgactaacagatactcc

SEQ ID NO: 2020 - DNA, 406 bp, Homo sapiens
  source 1..406: mol_type = other DNA
cgactgagttgctttgttaggctgccttcccaaggcctggaaaatgcctttcaagggagattgcctggggcctatccactggacaggtgtccctgggtacactgttgatagggggaccccagggcttaaggccaggggccacaaattgtggggaccccagggcttaggggatcccgacctcaggctagtgagcacgcccttgcccaggcctgcagtggctgcactcgccagctggcccatgtccctccaccccaagcctaagaggggtgagcgcagggtcccactgctgagccagctccacacccgagcccggctggccgagctcccgggggagaggggcggggggtgtggggaatgcggcagcctggcccccccgcgaccagcccagatggtttgctccgagatc

SEQ ID NO: 2021 - DNA, 527 bp, Homo sapiens
  source 1..527: mol_type = other DNA
ttcccaaggcctggaaaatgcctttcaagggagattgcctggggcctatccactggacaggtgtccctgggtacactgttgatagggggaccccagggcttaaggccaggggccacaaattgtggggaccccagggcttaggggatcccgacctcaggctagtgagcacgcccttgcccaggcctgcagtggctgcactcgccagctggcccatgtccctccaccccaagcctaagaggggtgagcgcagggtcccactgctgagccagctccacacccgagcccggctggccgagctcccgggggagaggggcggggggtgtggggaatgcggcagcctggcccccccgcgaccagcccagatggtttgctccgagatccccgcgactgcagcagcgccggctccctcccggtccccacctcggccccgggctccgaagcggctcgggggcgccctttcccccagcccccggggattcaggctcgccagcgcccagccagggagccggccgggaagcgcgatgggg

SEQ ID NO: 2022 - DNA, 195 bp, Homo sapiens
  source 1..195: mol_type = other DNA
ctgcagggcctctctgctggccagggcaatggtcccattttaaaatatatggcttttgaactgcctttccttggatccagttcaaggggatggaggagcagtgagagtcagccgcccttccactcgccagtgacccccataggcctgaggcttgtgcaggcagtgggcgtggggtaaggcttcctgatgccccct

SEQ ID NO: 2023 - DNA, 390 bp, Homo sapiens
  source 1..390: mol_type = other DNA
tgctaacttttatcagtcagtcatagaatgttagtgccaaagagatcttaagagttccgacaatgaaacccttaaaggttaaaagtgacttggtaaataagaccaccaaagatttctcattccttatccagaattctttctgattcactaaaattactacacatttaataattagaaaatactttcacatgtaaccctcttaataaacctgtaaaataagtacaaggacattatcattcctattttgcagagtggaagatgaagactagaaattcaatgcctgattttaaatacaaagctctatttgtttcaatgtgagactcccaccattgaagttggttactggaattccatttccaagaaatacccgcgcaaaattcagtgagctca

SEQ ID NO: 2024 - DNA, 556 bp, Homo sapiens
  source 1..556: mol_type = other DNA
aaattataatattaaaagaaataaaataaattatatggcctagatccccataagtatgccttcctgtgttctgagccagattagggcacagtagaggatcatcagtgaatcagatgaaaatttgtggatttatgcactaactgatcagctggcagttgctagccatgctcctgaatatgtataaacagtacatcatatgactaagagtttgacttaggggttagattttatgtgtttgaaccccaaattagttatttaatagttggcaccccaaaacaagttacttaacctcactaagattcagttttcctgtttataaaatgtagatagtgatagtatgtactttataggattattgtgaaaaataaatgaaatatcagatttatttaggataacacctggcatatgtttctaagttgtaaactaaatagttgtacacactctctctcaccagattccaggtgtatatgtggagtaaatattaaattgcccagttgggcaccatcatgatacagaaaacatttccttctgctttttggttttaagcctatatttg

SEQ ID NO: 2025 - DNA, 278 bp, Homo sapiens
  source 1..278: mol_type = other DNA
ctctggggctgtgagagagccagtgaccactgaatccccagcacctttaactgctgacatctctgcaggtaaagcttcatggggacagaaagtttattctccaagttgttgaattagtcaaagttgaaggtcttcagcagaaaactagaatccacaagagggctgagctcagcgatacactctgtgtggctcaggagcttctggcagagcacagagccaagagaggctctgctgacatggccagcccagcgccaaatcactcacatattattggtgct

SEQ ID NO: 2026 - DNA, 501 bp, Homo sapiens
  source 1..501: mol_type = other DNA
gggaacaatgttccatttaactttagaatggcgatattattaaagatcatccataaaatgggattcactagatcacctatcttataagattactgtggcaattaaatgagtcagtatgtgctaagtgcttagaagactatctagcacataataaatgctcaataagtcctgaggagcaactgtgctggttattattattactataattattaccctgggtaagtttttaatagttccagcaatgaaaaaatgagaatacttgcagcacttactggaacagttgtgacgcaatgactgcaacatgccgccagggtgcagcagagcccgaccccgggttgttcctagctgagtgggttgaaccccgtggaccaatcaccgcgtgatctgctcggacggggcgggatcgcggcgcttccctcggtcgctcagagactgggttccgcgttccagccccgccccaggttctgggccaatccccgcggctgggcagagcgacccgag

SEQ ID NO: 2027 - DNA, 395 bp, Homo sapiens
  source 1..395: mol_type = other DNA
aaagagtagaatcagattatcctgactcctgcctgaaacatattcagagaaaaatgttgagctatgtcttttcttaataagtgtactcaattggagcatggcacatgtatacatatgtaactaacctgcacattgtgcacatgtaccctaaaacttaaagtataataataataaaaaaatgttgttttcctcatttcccagtctgtaaataagcaaattgaaagctaccacgtgcacccagatggccactcgtttaatatgttaccattttcttcatttttcctgtcataaagaattggtaattcagtagtcataggagtttgtaataaataactcacattgatttctctgtagcaatgttggaaaattatttacattgctttggatataaatcc

SEQ ID NO: 2028 - DNA, 447 bp, Homo sapiens
  source 1..447: mol_type = other DNA
ttgtcacatgtagctgcttaaattttttaaatttcaactaaagtaaaaacaattaaaacttcagtttctctgtgtcattcaagtgcttaatagctctctgtggccactgaactgcagaattcatcatcactgaaagttctattagatcttgctgtctgagagcatcttatgtttaaccttcatagcaaccctatgatgcaggtgtaattatgtatccactttagagataaagactggttaaaaaacttacccaaggtctctcaccacctgggcctggagcctcttctggatgaggatccacgtattagtgttagtatcatgggttttaatatcactgagtcctggaagattccaaacctgggcagcagccctgttgctgttccctgagggtcaccttcatccccaagggactcagctcaggctcatgcaaaccacaaatgtttgcgc

SEQ ID NO: 2029 - DNA, 284 bp, Homo sapiens
  source 1..284: mol_type = other DNA
tcctcaccaatactcagtagaggattgcatggggagggtcacgggctcccccagacccagctcagtctcagctggacacgtggatatctgcttctgtgaagtacgtgtcttttaaggaatagttctcaaaatcatactggaggatcctgtgaagcatcaccatagaaaatgtcagggatttattagtgatttaccgactccttcatacttagtgttcaggaaaatttattcatgtaatacttcttcaaccaaagaggaaatatcaattagagctttgtaagttt

SEQ ID NO: 2030 - DNA, 250 bp, Homo sapiens
  source 1..250: mol_type = other DNA
agttccagctctgatgatcctctctcatgaaacatctgtaatgtgccaagagagggcctctcacctgcctgtggtcaggaagcctggaaggatgtcctcgccgactgcacagccagaggccttctgaaggcctgactcaggagggcctgcatgcagagcagagttccatgtgcatgtgaaagaggctgacttacaagaatctgctccttccttctgaacatgggactttccagaaggaccacagctcctc

SEQ ID NO: 2031 - DNA, 165 bp, Homo sapiens
  source 1..165: mol_type = other DNA
agttccagctctgatgatcctctctcatgaaacatctgtaatgtgccaagagagggcctctcacctgcctgtggtcaggaagcctggaaggatgtcctcgccgactgcacagccagaggccttctgaaggcctgactcaggagggcctgcatgcagagcagagtt

SEQ ID NO: 2032 - DNA, 402 bp, Homo sapiens
  source 1..402: mol_type = other DNA
ttacccagaactgtgctggtttagtcagcccgatgaccagtccaggttatgagggtccttggtctcaaggacccagttaatctctttctgggcagaactcagaggggcttagccatcctcacagagacaggggtgcagcacccctgctcccaggggtcccctacacttggggatggccttgagtcgaaggaggagactctgttcctgcacacaccccttctcaggaggcctgagtccctttgaaaggcctgagccctgggatcctcttccccacttcccccagggaaggaggcagcaatggctgtcctgtgccactcttaggacagggggtaggccaccctgtcacccctattagggttcctgggactcctccccaaggcggggaccaggccccctccctcc

SEQ ID NO: 2033 - DNA, 540 bp, Homo sapiens
  source 1..540: mol_type = other DNA
gctgggactgcggcatgtcgacctgctgacattattatttaagaagagctaataataagaatagtgctaataacttatattagaagcaaactagaaataaaaatagaacaagtctagtagtgctaaaaaagcaccttcttctgggcctgcgtgcaggggcctggagggggctgcctgcagggctctccagatacgcgtggacaagccctgggatgctggctccgggaccgctgcagggtcgccgacccaggttgccaagagcccccggctctgcccaggccgtgcccacgccccgctgcggagcagcccgctcacccgcccgcacagagaggacgccgtggcgcccgggtgcaaggccagcgggcgcggcagccgcgtcacccacctcctggggtacccgacgcagaacgtcagccgctccctgcgccgcaagtacgcgcctcccccctgcggcggccccgaggacgtggccctggcgccctgcaccgccgccgccgcctgcgaagcgggcccctccccggtgagcgcggagccggctga

SEQ ID NO: 2034 - DNA, 340 bp, Homo sapiens
  source 1..340: mol_type = other DNA
agagaactgagcgatatcaggctgagctccttccttccagagggtgacaatagttcccagtgggtgaaaccctgggtttttcagggcccagtgaatattgtactggaggctgaggtgggagaatcacttatgatagcaccactgcattccagcctgggtgacatggactcccttgttcaaaaattattaagaatttcaaaacagtgaaagcgggggcccttctaagcatgcccggggctggagcccagagggctgtggtctctgaaaggagcccacccaggaggctctcctggcctgggccagctcagctgagcccagagctccggcgccaggtgcgcga

SEQ ID NO: 2035 - DNA, 234 bp, Homo sapiens
  source 1..234: mol_type = other DNA
ctgcagaggaggccaaggcagggcgggcccagtagggccctaccattccacaggggatttcttctcctgaacacccgagcactgcaccacaacgtctgtgttgacagggtgtttctgcccggagcccccacccagcctccaacaggccttaattgtgggccgccccccatgccctcacaacactccccccaaaagcccagggtctgggtggggccgagtgccttgcgtggcccc

SEQ ID NO: 2036 - DNA, 302 bp, Homo sapiens
  source 1..302: mol_type = other DNA
ccggtggtggccgcgggcggacgggcgggctgcccagaccactgcgtcaccccagcggcgggagggcggtgggtgtgggaggccggacctgcaggaccggaggtggactgccgcctccccccgcgccctgtgcctcctggggctacctgaagccgcagctgcagaggaggccaaggcagggcgggcccagtagggccctaccattccacaggggatttcttctcctgaacacccgagcactgcaccacaacgtctgtgttgacagggtgtttctgcccggagcccccacccagcctccaaca

SEQ ID NO: 2037 - DNA, 328 bp, Homo sapiens
  source 1..328: mol_type = other DNA
atattgacatcctggaatctcaggttcaagggaactccaccccgggggaagacaggtctgagccctgggtcccaacaccgaaaacacccctagggccctgggcagagtgacctcactgttagtccctgcccaggcttgaagtaagagggggtgctgtcccggcctgcaagtcccagtcctgtcacacactcagtggggtcgggggtaggaggcttcttctacataacccacagtgtttagctaactttctaggcagaaagtttcctacgagaccactgcagcccgccccgggtccgccccgtctgaggcgggaccctcctgaaaatcc

SEQ ID NO: 2038 - DNA, 529 bp, Homo sapiens
  source 1..529: mol_type = other DNA
tctcaatccagctctgccataacctagttgggaaagcttgggccaagtctgagcctcactggcaccctgcattgccagagctgccttgggagctgacttggcaaccccacgctcagagcacagccttcctcagctgcacacggtgggaggcgcctgggcaagattttcgccaaccagtccctgggaggagggcggggagtcatgctccccgcctggttctcctacgctgccgcctctgtggcgcgcccgttcggggagcggagagggtaccagtagcctggcaaggggccagctcccgcagccctggagcgcgagccggaccctgctgcccctcttgctggcggcgggaagcggcccaccggcctttccacgcttggctgtgcagaggtccacgagggggcgacctgagcccacgtgcagccaggggtcccgcccgcctcgccgtgcctctggcggctccaattggccgccgcgggagggggattggcggtctccagggcgacgggaggcgctcggggcatccgaggcg

SEQ ID NO: 2039 - DNA, 394 bp, Homo sapiens
  source 1..394: mol_type = other DNA
ttgcattcaaggccacctttagcatattgggggggagtcctcaggaccctcacagatagatggtggtaataatagtattcactatgcaattctatgaattaggtagtactattagctctgttctatagaccagggaactcaaatattgacatcctggaatctcaggttcaagggaactccaccccgggggaagacaggtctgagccctgggtcccaacaccgaaaacacccctagggccctgggcagagtgacctcactgttagtccctgcccaggcttgaagtaagagggggtgctgtcccggcctgcaagtcccagtcctgtcacacactcagtggggtcgggggtaggaggcttcttctacataacccacagtgtttagctaactttctag

SEQ ID NO: 2040 - DNA, 378 bp, Homo sapiens
  source 1..378: mol_type = other DNA
tgccagtctggggccaagtagtgccctggatgctgcagcagtgattctgtggcctggtgcactcagtttgagtcgcacgttgctttcatggaaggcttccaagggagccaaaatgttgcttaagcccagcatccctacagcatcaccaggctgaggaggtggatctcaatccagctctgccataacctagttgggaaagcttgggccaagtctgagcctcactggcaccctgcattgccagagctgccttgggagctgacttggcaaccccacgctcagagcacagccttcctcagctgcacacggtgggaggcgcctgggcaagattttcgccaaccagtccctgggaggagggcggggagtcatgctccccgcctg

SEQ ID NO: 2041 - DNA, 361 bp, Homo sapiens
  source 1..361: mol_type = other DNA
tctgaattcatataagttgatcaacattgtattctcacaaaacgatttaaagtcttttcataatatgaacaacatagatcaactctctgatcaaagagtcttgctctgtcacccaggctggagtgcagtggcacgagtagctggcatacaggggcacgccacgccaggctggtctctgctttcttaaagaggattgaatcaaatgtttttcccctgcgaatagcctctcaggtgggactttaaataaaaaggcttaatcattcatccattataaagctatcaattgagtgcagacacatgtgatgtttataagatcaaatgatcacaagacttcagtagtcaggggaaaattatttccctt

SEQ ID NO: 2042 - DNA, 338 bp, Homo sapiens
  source 1..338: mol_type = other DNA
tgcactctaatctagtaaatgggacagctgccttaaatgcaacagagtcctgatctgctaggacagagaaagccgctgcaggtgggcaccgtgtgctgcgcgtctctcacccagcaccgcacctgtgcccaaagatacagtcctgtggctcagggagcccaggcctcaggcgccgccttcggcgctgcctgcagggccactgggccggtcctgaatgaccctccaatctcggcggctcgagcctggcgctccactctcccattgggctccggcgctgcggagggagggggcggcccggcccggcccagctctgcccccggccggcccgaccccggccc

SEQ ID NO: 2043 - DNA, 292 bp, Homo sapiens
  source 1..292: mol_type = other DNA
acatgaggcatgtgtctcgttgggttgccgagtgaatacttagtaagccctaacctaggttctagggtttttgctatgaataaaacacatttcaaagccctttgtggtttttttgctcagggaagtgaagtgactcctatgggacacagtgcaaatcagtggcaataattagaactggtcagcctgacctgagagcagcacctgcacgcagagacccatgttgaaggtggtgagctgccagctaccagatggccctcttcccccaggaaggttcttaggaaagagccagcgt

SEQ ID NO: 2044 - DNA, 367 bp, Homo sapiens
  source 1..367: mol_type = other DNA
tttgccctctgagggggtgaaaaacaggtagtgaccttctggatcctggaagacaggggaccctgcacccaactctccaggaaaggctgggctcactcctgcgggggcctcgggcggagccagggccaggggcggggcgaggccggggtccagggcggagccaggattgggactggggcggggccggggcccggggaggagccagaggggccggaactggggctgggccgaggcccggggcggatccagggctggagtcttggcgactcgatgcgactcagggccggggccagcaggcagggccaaggctgggtccggggcggggcgggcctagacggcggcagctccagttcagctcgctcggcgc

SEQ ID NO: 2045 - DNA, 383 bp, Homo sapiens
  source 1..383: mol_type = other DNA
acaataaccctttgggtgatgtgatcaacctcaattcaatttgcatttgccctctgagggggtgaaaaacaggtagtgaccttctggatcctggaagacaggggaccctgcacccaactctccaggaaaggctgggctcactcctgcgggggcctcgggcggagccagggccaggggcggggcgaggccggggtccagggcggagccaggattgggactggggcggggccggggcccggggaggagccagaggggccggaactggggctgggccgaggcccggggcggatccagggctggagtcttggcgactcgatgcgactcagggccggggccagcaggcagggccaaggctgggtccggggcggggcgggcctagacgg

SEQ ID NO: 2046 - DNA, 280 bp, Homo sapiens
  source 1..280: mol_type = other DNA
tgcttccccttccccactggaagaaggaaacagtcgacatgtctgatatttgctatgatattgaccttcacacacatcttagatagattcagtctagagctcttcctgctatccttcaaaactttggagaggtttcagtgtccctgcaacctctataatagaaggaacagagtggtctatgttcaaattggatggaaaagaagagctgatccaagggggcatatcccccctgggacccaggcccagcctctctcagttgtgagtgccacaggccagaggg

SEQ ID NO: 2047 - DNA, 455 bp, Homo sapiens
  source 1..455: mol_type = other DNA
cctcacttaaggtagaaggtatcctcttttaaaaataagaaaagaattgaaatccaggactggttccagagcccaagatctgatctattctgctagctgatctcctaaaattaattgctaaaaaacacacacagagtacctgctttttttttttttttgagatggagtctcaaaaacagacggatggagtcactctgtcaccgaggctggagtgcagtgatgcaatctcaattcactgcaacgagcagctgggattacaggtaccagtctgcaggaccacacaagaactttgttctagttctgccctcagactgaaactctttctgtagcagggccttcaaacccaaagactgagacttctaggttcttggttaaaaccagacctggaccatcgccaaggcaagacttctggattggtcattgccccagcaaccacagggcctgggactgggggg

SEQ ID NO: 2048 - DNA, 315 bp, Homo sapiens
  source 1..315: mol_type = other DNA
tccttggcttatgagtcagctgaaagcgacatcatgaagataatctggtgaaccaccgtctcattggcatggcctatggagtggtttcccctgcctggcaacgtgagccatctcaagatattttctcagcaacaaactctgatctgtccttgacttagagtccagaataaaccaggttggtagagcccttagtctttataaagtagtgaaaaataagactgtagacagagatagagagggaatcagtggcctctaaagtcctttttagttttaagaccatgtgattcaaagctgactctgggtcagagtttagaa

SEQ ID NO: 2049 - DNA, 131 bp, Homo sapiens
  source 1..131: mol_type = other DNA
ttccaatctctacaggacaggatctgggccagccctgtccttccctgcattcccaagttaggagtgcgctggagctgagccaggttgccaaacggggctgaggtgccctgagggggcagctccggttccct

SEQ ID NO: 2050 - DNA, 204 bp, Homo sapiens
  source 1..204: mol_type = other DNA
ggaatcccccaacctgggcctgctggagttcctggcaggaaggacctacccagggtcagacttctttccagggccaaaccctgcccagagccacattgctttttctccccagaaaataaaattacatcatgttttttcccaggggtcctaggcaccgtggcccctccccggctctgacatcaccggccagccgggtggagtgag

SEQ ID NO: 2051 - DNA, 365 bp, Homo sapiens
  source 1..365: mol_type = other DNA
caaacgagtttcgaactcctgacatttttaaaaagcactctggctgccttatagtcttaagtaatatgtgcctggcagctgggagtaatcctctgcagggttactgtaggtgtcactcttcagaaaagagcttctggaatagggggattttcagaagaaatccttgtggcaatcattgctcgttccagtgacggcaatcatccaggaagtggcctgccaatccgctggaaatttactcgcatttgtttagagtatcacaagataagcaagcctcgaggagggttgcgagccgtgagctcgcgcgaccactcttccctcagtcttctcgagcacatcgtcgcaaacccggcagcgcaggcgcaagc

SEQ ID NO: 2052 - DNA, 460 bp, Homo sapiens
  source 1..460: mol_type = other DNA
tagttctacacaatattgtaatgctgggttccacacctcagttggcaaaggagactggatggccatcttcaatgtagaaagcccttcaagtggtattatattttaaccttttacattattgttattaatgttagtaatatattgttatgttttctaaattaactctggtcagctcagctggctgtcctggttcactcaagcaaattcacatgcattatgagtcgctttgagcttctgacatgtcacttgccccgaggttaaaacttttcaccccttgaagaccttacatgttttagaataaaacgtctctgttctgccagagatggaaaaaatacaggtatacttgtagtcactattttctccttaaagctccaaagagcccttctcttgattgaatgtgagcaggttgacctcaggtcacactttgttccaaaaacttttggaattattccaggacttg

SEQ ID NO: 2053 - DNA, 444 bp, Homo sapiens
  source 1..444: mol_type = other DNA
aggagtgtcacctgcgggagaagtctgcccgctgccctcaatagggtctgtttcacaggccatttctgtgacactatcaaagttccagctacctgcaaggtgaaggaaggcatcccttttggggcatactccctctcttggatctggggaggaggggcagtacaggtctgtcactatgctctcttgccttcagacagaccattctgaattctctaaagggaaagggcttttgcatctaatcacaatagagttgaaagagaggccttaggattctcctctctctaggtgctgagccctcacctccaggctgagtttatcccaacctttttgagctcaagctgtgataaagaagggcccatcctatttccccccccgtcttcctggcagacacaaatgattctcttagaatcctgtcccttggttcaggatggaaaaggagtccct

SEQ ID NO: 2054 - DNA, 349 bp, Homo sapiens
  source 1..349: mol_type = other DNA
agatcaggattccacctaaggtgaaaatcctggatgccctaccagtgccagtggtgaacagtgtctgatcatgtgaaacacaggagtgtcacctgcgggagaagtctgcccgctgccctcaatagggtctgtttcacaggccatttctgtgacactatcaaagttccagctacctgcaaggtgaaggaaggcatcccttttggggcatactccctctcttggatctggggaggaggggcagtacaggtctgtcactatgctctcttgccttcagacagaccattctgaattctctaaagggaaagggcttttgcatctaatcacaatagagttgaaagagaggccttag

SEQ ID NO: 2055 - DNA, 375 bp, Homo sapiens
  source 1..375: mol_type = other DNA
gcttcccaagagaagtttttccaggaactattcgacagtgaactggcttcccaagccactgcggagacctggtggagcagttccaaaagctctggaaatatctgaacagactcttaagtctttgttgcctgaaaacaccgattcttagtgttgatagcaatcatattattcaaaactgaccatttgaaaggtcacagtgttatagtccgtgtactaaatagatttatgaaaagactatgaagataaccatagggtgggagtgataatgattcactagtaaatgcttcatatccaagctgttaacctaggcagtgatatgacctcccaacaagaattcacttcttgcctaaaggaaacactaagtgatgctttgag

SEQ ID NO: 2056 - DNA, 156 bp, Homo sapiens
  source 1..156: mol_type = other DNA
ttcccttattttgagaaactgagggggaaagcagttcaccctcctgaaagacgggggagtagggccagtgctctctccctaggcctggcgaacagtctgtgctggtaccagtaccaacaggaagctggttggcaatttgaaaaatcatattcctaa

SEQ ID NO: 2057 - DNA, 325 bp, Homo sapiens
  source 1..325: mol_type = other DNA
ccattgggagggcgtgtcggcaccgaggaggtcccgcctcctacggcaagtcggaggtagcataaatgggggcggagagtctgacccccgagccccccaaacatcctgccccaccccggcgactggagctggggagctcacctggggtccctcagtggttcttaaagttcgacttcagcagcagtagcagcagcagcagcatttggttctttacgcactcactgattgcttacttcccttattttgagaaactgagggggaaagcagttcaccctcctgaaagacgggggagtagggccagtgctctctccctaggcctggcgaa

SEQ ID NO: 2058 - DNA, 417 bp, Homo sapiens
  source 1..417: mol_type = other DNA
gagtggccaatgaatgcctactaagttttaaaccctagcctgggagttgggctttacagcatacggtagatagtatgtcagatactgttcagtgttaggctcacgcctgtaatcccagcacttcgggaggccgaggtgggcggatcagctgaggtccggagttcgagaccagcctggccaaccagcctggccaacacatcccagctacaccaaggctgcagtgagccgagatggcgccactgcattccagcgttatgttatgtgccataattgtcatatcaattatatatgtttagattctggtttttgtctcaatctcttatccctaattctgtttcacaggagaaaagggatggcggttccgcactggtcaacaataccattggttagagggcgtgtcggcaccgaggaggtccc

SEQ ID NO: 2059 - DNA, 417 bp, Homo sapiens; identical to SEQ ID NO: 2058
  source 1..417: mol_type = other DNA

SEQ ID NO: 2060 - DNA, 170 bp, Homo sapiens
  source 1..170: mol_type = other DNA
tgcagcctgtgcacatgatcctggtgccttcaagctcaagaacttcaagacctttgctcggcgcctactagaactcgggcccaagcctgaggtggcccagacatggcactcgtctaagagttctagaaatggtgattgttaacccttcacatacagaactaccaaaccat

SEQ ID NO: 2061 - DNA, 307 bp, Homo sapiens
  source 1..307: mol_type = other DNA
cttaagtacattataaatgccaaaagttccttgaattgttacttcagggtcttcacagttaagctaccttattcttgctttactgattaaaaaaaaaaaaaaaaaaaaaaaaagtctaaacgcgaggaagaaagctaactttcacacccggtcgcggcggggccgatccgagagttccccttagagaacggagctcacgggcggggaggcctcacctgtctgctgagcggaagcccccgttcggactgacaccgtctctgtggcccggagcctaagagaccggaagttcgtgtttccaggcgcttcc

SEQ ID NO: 2062 - DNA, 274 bp, Homo sapiens
  source 1..274: mol_type = other DNA
gagctctagagctcgagatttccagataaatttgaactttaaaaaactattcattgtttacctgaaattcaaatttaactgtggcaactctatcaagttgagactttattggggttataagcctcaagtactatttccgggctcgggtgcgagtaacctgtgtgggagccactttagctagccaccgactccgactcccgcggtttccggaagcgcctggaaacacgaacttccggtctcttaggctccgggccacagagacggtgtcagtccg

SEQ ID NO: 2063 - DNA, 228 bp, Homo sapiens
  source 1..228: mol_type = other DNA
agagtcaggttgggctggccagcctagaaaaaggcacagggtatgagggccaggaccctagggtcctagagtctccctctcaggagtcacgctgggacggtcctgccctggctcttcttgcttatgaaatatgcatggagaacagatggggccagcccccgcccccagctcccgaggggttcccagatccctctgccagtgtgtgtgtgtatctccatatatatacat

SEQ ID NO: 2064 - DNA, 516 bp, Homo sapiens
  source 1..516: mol_type = other DNA
atcccattactggttatatacccaaaggattataaatcatgctgctataaagacacatgcacacttatgtttattgcagacatatatatacggatgagttcatgtcctttgcagggacatggatgaagctggacatggcatatgtatacatatgtaacaaacctgcacattgtgcacatgtaccctagaacttaaagtataattttaaaaaatcagttttcttttggctttttcttagctttatacttaaatatttttttctaatgtaattagagtggaattgttcatagctagtatatacaattgcaattgaattttatattttgattttgtattgctgaactcatttatttgttctagtagattttaggaaattccttacagacttttacatataagtttatgaaagatgcaataaaggactttatcttcttttccaaaaaaaaaaaaaatttgtgcacttagctcagaaaaaagtaaacaaaaaattaacacagttacaaattaggattttta

SEQ ID NO: 2065 - DNA, 601 bp, Homo sapiens
  source 1..601: mol_type = other DNA
tctcatgcccaggagtcacagtctttgccaagtactcagttccctaattcactgtgtgatatagggaaaagtcaaaaatagattcaatagtctaaaaatcccttttgacttcatttttatcaaacactttttgtgtccctaataaggtgtgatcataatcataatgtttcatgatgatatcatggaattatacataattatatgtatgtagttatactatattatatattaatatattatataattatatattattgtatcatatataaatataattatatattattaatataatacttaatattgattatgttaaataatatcacatgttgattatacattataatacataatcatgtacttgtgatcattttatataactataattatgtaattttaattgctatgttttttaggaagcctactccaattaactgcttatagagttgttgattactccaaaaactctgtatattgccagcacccagaagagtaggcacacaataaatatgtgttgaataaataattaatgctaggcactttaaattactaaatcagttgcacttcctttcttaaatgtcgttataaaaaggaggaagaa

SEQ ID NO: 2066 - DNA, 534 bp, Homo sapiens
  source 1..534: mol_type = other DNA
gtgtgactatagtcaataataatttaattgcacatttaaaaataaaaatataattgcactgtttgtaacacaaaggataaatatttgagatagtgtgattaaccatacaaatatatgcataccccatacatatatatatacatacaacacacacatatatgtatatctactatgtacccacagacgtggatggagctctgggatagatttgtcctacatccctgcctgggagggaatccacacacatgggcttcaagtgacccgcgtgacagtggcacctgcaccagactgcatgttgaggtgtcatctgaaaacagaagtattagctcatcaaaatgcagttatctaagttcagctgtgaactgccaaatttgaggagtgatccaatgaaacatcttttctttgcaatccaagaagacttacctgggcgcatgtttctgcccaaagccgggttttgtggcttcttgagaagcctgcttcttgagaacaaggaagcgggttcaggaacctgctggttcctgatacataaatcag

SEQ ID NO: 2067 - DNA, 348 bp, Homo sapiens
  source 1..348: mol_type = other DNA
ctttcctggccaggcacaggcccatgccgtcaggagttcagctattgcactgctgcactccagtctgggctacagagtgacctttataaattacccagtctggggtatgtctttattagcagtgtgagaacagactaatacagaccaggctctgaactacccaggcttgactgggaaccctgaattaatcagagggattcctgcctgggaacgaaaagcagacattctctatcagggtcccttattcttttctgagtactggcccccctgagaaattgttctagttggtttctggggccccacacaagtgtgctgggtggagagaaaatctcagtggttttttttttt

SEQ ID NO: 2068 - DNA, 334 bp, Homo sapiens
  source 1..334: mol_type = other DNA
aaagatcatcttttccatcacatggtagtagaacaataaacatgacacttttcaagtgtcatattacctgatatggttctcaatgaatatagacaatatatttaggtgaatctcaacctaaacttaacaggatcatacatttaaatgtaaaacataaaactataaaactttcaaaaaaactgataagttgaatttcatcaaaattaaaatttttgctctgcatatttgtaaaccacatatctgacaaatgactcttatacttggaacatataaggatatattcactctgaaaataatttagcaattaccctcctgcttctttaaatatcagctg

SEQ ID NO: 2069 - DNA, 319 bp, Homo sapiens
  source 1..319: mol_type = other DNA
aaaatgtattgggtcactgtattagttatctgttgctgtgtaacaaattgccctaaaaacaataagcatttttgatgaaaaataaaaaattgaaaaaaaatttaaaaaccaaacatttattatctcacagtttctctaaggacctcccctcagtcctcatggacagttggccagaggaatcagctgcatatgcacacttgaatagaacccaagtcccttgatgtcaaagcaagctgcgcagggggggtctgtggtgttttgtataaacaaccctcagaagctgtgacacgtgcggaagctgtggtaagtgcatcctcct

SEQ ID NO: 2070 - DNA, 276 bp, Homo sapiens
  source 1..276: mol_type = other DNA
aaatgtggagcaaaacaaaatttttttttttttttttgagacacagtgtcgctctgtgtagcttggattacaggtgcacgccacccagcctggcgtgaaacaaattcttatgaaacaaatttaatttacatgtgcttaaacttccacctccacaatgtctgttggaatggaacagtggcccccatgggggtctctccatataggacaattttgaaactggctttgtgagtcactgtgaacttcaagcaccctcccacttgtaagcagctccaggcc

SEQ ID NO: 2071 - DNA, 388 bp, Homo sapiens
  source 1..388: mol_type = other DNA
ctggccttgaagcacagtgttccaggggaggggggatgccgctgtccccacccctccatgggggcctaagcagatccagagctgcctggccttcctggagggtggcgtccaagcatggatgggaaatgtggagcaaaacaaaatttttttttttttttttgagacacagtgtcgctctgtgtagcttggattacaggtgcacgccacccagcctggcgtgaaacaaattcttatgaaacaaatttaatttacatgtgcttaaacttccacctccacaatgtctgttggaatggaacagtggcccccatgggggtctctccatataggacaattttgaaactggctttgtgagtcactgtgaacttcaagcaccctcccacttgtaagc

SEQ ID NO: 2072 - DNA, 433 bp, Homo sapiens
  source 1..433: mol_type = other DNA
gtttcgtattgattcagtttcaaatgaatcctgtagtaaattttccctcgtttgtggcaaaatgacaaaattaaagacaaagtagtgagtctttgtgtgaaactaaattattcaaactaaagatttatatattttttaaaacttttctattcgtatatttattcagaaatgatcactttcccattttgttaaaatttcctttttctatttctatgaattgataattatggccaatgattaatttcatttatttatttattttgagatacctaagctgaagtaattttttggcttaatttagagaaagtttttattttgcaagaaagaaataggattggttttttctttagaacctgttaattccactgtataaatactcccctgcactgggcattgtgccaggggagggtgaggaaaccttggttggccccac

SEQ ID NO: 2073 - DNA, 407 bp, Homo sapiens
  source 1..407: mol_type = other DNA
ttatattattgttatttttgcaacatttaataaatttcaaattgtttctaaacagagttaataaaacaataaaatacatgcaataattagtgtttcccatttatttattattattattattattattattttgaggtgacccaggctggagtgcagtggagcagtcttgtcttgaactcctgacctcaggtaatggccaattattattcttaattaattaatttatttttcatgaggtgtcacctcagtctaaaagacggcctgccttggcaaagcaggatgcccctcctggcgacagtcacctgtgtggccaggaacacagctccctgctccaggtaccctcagagggaagggcttcagagggaggggctagcagcctaggctgctcagggttgggctgggcaggg

SEQ ID NO: 2074 - DNA, 207 bp, Homo sapiens
  source 1..207: mol_type = other DNA
ctatagccgacccagggcctggcatgggtgtcatctgagtgtgttgtcccctggggaacactgatcacggggatcccatttcttctctttcaggaacaaagaaagggtcaccttgcctcccctgggcaggggtgggccacctggggcagctaaagatgttttatttctgcagggagaatttactcaggtgctaccggactctggccc

SEQ ID NO: 2075 - DNA, 215 bp, Homo sapiens
  source 1..215: mol_type = other DNA
tgggaagtttctgcaggaccaaactgcaggtgcagttgcacgggggccgtcacctgctgaaggtgcggaattcgtctcctgacgcggggaaaggcgccagtgcgccgaggcggggagtggcggcggggtaacacctggccgaggggttcccgcggagggcggggccgggcggggttccacctggcggctggctctcagtcccccctgatcgcgat

SEQ ID NO: 2076 - DNA, 181 bp, Homo sapiens
  source 1..181: mol_type = other DNA
atgtgtgggaagtttctgcaggaccaaactgcaggtgcagttgcacgggggccgtcacctgctgaaggtgcggaattcgtctcctgacgcggggaaaggcgccagtgcgccgaggcggggagtggcggcggggtaacacctggccgaggggttcccgcggagggcggggccgggcggggtt

SEQ ID NO: 2077 - DNA, 389 bp, Homo sapiens
  source 1..389: mol_type = other DNA
ggatactggacacacagcagatagatgtgcaacctgtggctcagggcagaacaacaggcaggggcccacttggggccttcccccttgtttttttttttttttttttttttaagataaaattgttcaaagccaattgctcttcgacccggagtcctggttcctgggccagaccgtgtgtccgcgaacaggtgctgcgggggcggcgcgggaggcggtgcccttgcttccggatccggtctcagctctgggagggaacgcgggccagggccgcactccggagactcgcggttgctacgcctggaggtacctgcggtcttcgtgcacaccctaccgggaggggcgctgccaggtgaggggatgccatggcggccgtgactcctaggccccct

SEQ ID NO: 2078 - DNA, 333 bp, Homo sapiens
  source 1..333: mol_type = other DNA
tcaggggctttgggcccaagaactgcagatagccactgccccacttctggcatgggacagggtgtggacgtgcactatctccatgctggatactggacacacagcagatagatgtgcaacctgtggctcagggcagaacaacaggcaggggcccacttggggccttcccccttgtttttttttttttttttttttttaagataaaattgttcaaagccaattgctcttcgacccggagtcctggttcctgggccagaccgtgtgtccgcgaacaggtgctgcgggggcggcgcgggaggcggtgcccttgcttccggatccggtctcagctct

SEQ ID NO: 2079 - DNA, 307 bp, Homo sapiens
  source 1..307: mol_type = other DNA
tcaggggctttgggcccaagaactgcagatagccactgccccacttctggcatgggacagggtgtggacgtgcactatctccatgctggatactggacacacagcagatagatgtgcaacctgtggctcagggcagaacaacaggcaggggcccacttggggccttcccccttgtttttttttttttttttttttttaagataaaattgttcaaagccaattgctcttcgacccggagtcctggttcctgggccagaccgtgtgtccgcgaacaggtgctgcgggggcggcgcgggaggcggtgccc

SEQ ID NO: 2080 - DNA, 375 bp, Homo sapiens
  source 1..375: mol_type = other DNA
cgggctggaagtgcgcatgtccccagagcgcgagcgtcccagccctcctgcgctgtccagctgcgcgccgcagccgccggcaccgggcgcttgagctccctagtccccgaggccctttcctgcctcctccgcggagcagctggggcgcggggctaagactgcggggctgcggggtcacggcgcaggctcccgggctcgcgcctggcgggcgctcagctccgtaagcgccttctggttggtgagcctgcagggagacgcctcattctagggctcttactgggccccctcagagactgccccggctgacagctgtggccaatagagatgcctctgtgccggcaagcttcgcagggcatttcctcttcaggtttgaag

SEQ ID NO: 2081 - DNA, 382 bp, Homo sapiens
  source 1..382: mol_type = other DNA
aataaaagctgtatttttacacatagtgtggagtctcattattcttattaaagtctttggtgataggtattatatcttcacatatttggcaaaacattctagtggccagaaacataaggaagagaaacttatatttacataatgcgttcattatgtgccaggaacttcacaaaatctatgtccttgattttatttaatccacacaattatctccagtttgaggaaactaaggcttccaaatccattctaggtcttgattgagaagaatgggaatcaagattcctgtcacagaagtcaggtaacctttcaaaagatggcgcctccgtcggactcttctttcctggaatgaaaaaatgccctgccaagcactaagatattaggc

SEQ ID NO: 2082 - DNA, 379 bp, Homo sapiens
  source 1..379: mol_type = other DNA
aagcgattctctcacctcagcctcccgtatagctggccatgttggcctcaggtgattcaccattacaggcgtgagccagcagtgtacccttttttacaggtaaagaaactgaaactcaagttaaatgagttttacagactcttagaggtgggaggatttaaagttcattttcctaggtttggaaactgaggctcagtgaagtaatgactaggcagaacccaggcatcctcccttgtctctaccttggacccaagaactggagggagaagggtgaggatgtgaatgtcagctacctcccccaccctaggccctgtggttgcaataaggagctgcactgcttcctgccccctaaagctgagcggggcgaggagccacaggg

SEQ ID NO: 2083 - DNA, 347 bp, Homo sapiens
  source 1..347: mol_type = other DNA
gtcccaagtaggggaagacttaggaaagcgattctctcacctcagcctcccgtatagctggccatgttggcctcaggtgattcaccattacaggcgtgagccagcagtgtacccttttttacaggtaaagaaactgaaactcaagttaaatgagttttacagactcttagaggtgggaggatttaaagttcattttcctaggtttggaaactgaggctcagtgaagtaatgactaggcagaacccaggcatcctcccttgtctctaccttggacccaagaactggagggagaagggtgaggatgtgaatgtcagctacctcccccaccctaggccctgtggttgcaa

SEQ ID NO: 2084 - DNA, 404 bp, Homo sapiens
  source 1..404: mol_type = other DNA
tatcccagggatatgcattcagaatggaaacacatggtctgagtacttataggagtacttgaaattaaggtcttgtccaatgaccttggagtatggccatggagagggtagagaggaacctctctccattacttccctacttcagggattctgaagaatgaagtatacagcgcagcaagaccctccaggagatccgggaacttgtcaaggcccccaggaggtaccaaggctagctggggtgtgggaagggccttgccccggcctggcctggtgccctgggtggagctgaggatgggaccccaccgcccccaggcgcctattagctagcccaggccatgggggcggtggctgctgagtctccgtgccaggcccagcccccagagacgcacctgttctgacctgct

SEQ ID NO: 2085 - DNA, 235 bp, Homo sapiens
  source 1..235: mol_type = other DNA
atttaatacatttactgaatcttgaagcttacaatttagttaaggagataagatgtgcacaaattatgagcacataagctaagaacgcaaaactttaaccctggctatcccagggatatgcattcagaatggaaacacatggtctgagtacttataggagtacttgaaattaaggtcttgtccaatgaccttggagtatggccatggagagggtagagaggaacctctctccatt

SEQ ID NO: 2086 - DNA, 191 bp, Homo sapiens
  source 1..191: mol_type = other DNA
cctgtttttgccccacaccagctgtgttgggaggaaaattctgtctgtatttcctccttcagctgaaagcagaaagcttgcatagttaactctctctctctctctctgtgtgtgtgtgtgtgtgggagcagcacctgcatgtcctccgactttctgaggttaacaatcttgcaggatttttattgtttgca

SEQ ID NO: 2087 - DNA, 277 bp, Homo sapiens
  source 1..277: mol_type = other DNA
gctgtggtgacatcccgcaaaaaacaataaaaataaaaatctttatgctgatacatctgcttgtattaattgttcaacaaaaactgaacctagcgcgcctgtagtcccagctactcgttgcagtaaggcgagatcgcgccactgcatgcactccagcctgggcgacagagcgaaaaaacgataataataaagtagctgttaactgttttcatttctatagtaactcccgaattaaaatagtataatgagagtcacgtggctctgcagcgtgacggcg

SEQ ID NO: 2088 - DNA, 245 bp, Homo sapiens
  source 1..245: mol_type = other DNA
ttgcagtaaggcgagatcgcgccactgcatgcactccagcctgggcgacagagcgaaaaaacgataataataaagtagctgttaactgttttcatttctatagtaactcccgaattaaaatagtataatgagagtcacgtggctctgcagcgtgacggcgcctctccgaaggggttcggctagccaggtgggtacccgccgcctgctgggtttccggccggcgcagctcagcccccgccttgcgc

SEQ ID NO: 2089 - DNA, 266 bp, Homo sapiens
  source 1..266: mol_type = other DNA
ccctttccccggtggagatcagttgcagccaattctaattgccaggcccttagcttttaagagagaattcaactgggtttgttttccaaaagactcctttcctgcttgggaaaatggggaagccggttttctagtttttagagctatattggaacttaaatgatagtttccagacccttttggatactgtatgtagaaaaacttttccctggtgaaacttctaaaggtgaaagttaacgttaatattgtaacaaaataggtttcaa

SEQ ID NO: 2090 - DNA, 435 bp, Homo sapiens
  source 1..435: mol_type = other DNA
tcaaagacttttcattgccttaaggataaaaatcaattaatttatgaattccgagacgggatctgggcaccactttcggctccggatccgggtttacggaacgtccgggttatcaggaagctcagaggaaaggttccagatcttgagtcatggctgccaatcccagccttccagtgggtcttgaagtcgccaccagccagctgtggcgcgccagcttgaagccgccactaaccggccgggttccgggaggcgccgttcaggatgcagccacccccgcccgcctgtcccctcccccacggccgcggcggcggcggcggcggcggctgctggagcccggatgcggcgccgtgaggcaggcccgggagagcggcgcggatggatccaacatggcggcgccgagcctgagccggacggggcggggccgggcggggccgc

SEQ ID NO: 2091 - DNA, 280 bp, Homo sapiens
  source 1..280: mol_type = other DNA
aaggttcaaagacttttcattgccttaaggataaaaatcaattaatttatgaattccgagacgggatctgggcaccactttcggctccggatccgggtttacggaacgtccgggttatcaggaagctcagaggaaaggttccagatcttgagtcatggctgccaatcccagccttccagtgggtcttgaagtcgccaccagccagctgtggcgcgccagcttgaagccgccactaaccggccgggttccgggaggcgccgttcaggatgcagccaccccc

SEQ ID NO: 2092 - DNA, 234 bp, Homo sapiens
  source 1..234: mol_type = other DNA
tcttaaaagctaagggcctggcaattagaattggctgcaactgatctccaccggggaaagggctggctgggcccagtctcaggcggccccgcccggccccgccccgtccggctcaggctcggcgccgccatgttggatccatccgcgccgctctcccgggcctgcctcacggcgccgcatccgggctccagcagccgccgccgccgccgccgccgcggccgtgggggaggggac

SEQ ID NO: 2093 - DNA, 286 bp, Homo sapiens
  source 1..286: mol_type = other DNA
ggatcacctgaggtgtatcccagaaaaaaaaaaaaaaaagcaaaaattaatgtgtttagattttaagtccaactggagccaagacatagactaaggcagaaatcttgcagggatttgtcttttgtctttatcaggagttaaacatccttctacaggataactgcatctagaggcaggacttacctatgtatcaaacttgcacgttgtgcacatgtactctagaacttaaggtataagcagcctgaagttctaagagctttccaagtttgggaaggcttctctgagc

SEQ ID NO: 2094 - DNA, 318 bp, Homo sapiens
  source 1..318: mol_type = other DNA
aaaaaaaaaaaaaaaagcaaaaattaatgtgtttagattttaagtccaactggagccaagacatagactaaggcagaaatcttgcagggatttgtcttttgtctttatcaggagttaaacatccttctacaggataactgcatctagaggcaggacttacctatgtatcaaacttgcacgttgtgcacatgtactctagaacttaaggtataagcagcctgaagttctaagagctttccaagtttgggaaggcttctctgagcatgaacggaagtcatcatatatgtaaagatgacggcgccttgaggtaagctacag

SEQ ID NO: 2095 - DNA, 313 bp, Homo sapiens
  source 1..313: mol_type = other DNA
tagctccattattttttttattaaaaaatacccttccacctcactttttgtgaataaatttattaagaaaaaatgatgtgcttatttgtatttttgcgccaaattggagtcttcttgggacccaagttccctctctactgctggacccggacctgtgtcccccagggcggcctaggccgggaccctagctgtaagcttgtgctggggaacgctaactccagcattaagcgctcgccgcctcggtcctgaggagggcagtgacgggtacggccgctcactcccagctcggcgctaacacggttaacctttacag

SEQ ID NO: 2096 - DNA, 248 bp, Homo sapiens
  source 1..248: mol_type = other DNA
tagttgttactaagtagctgcagttacatatagtctttctggtttacccatcaataaaagctgcttcctctggtagcctgtggttctcattgggagctcaagaagtggttttgccggaccagcacttcccgccgggctggacccaggcctgcagtttctttccatccctatgggctataggatggggcgacggcaccccgtttccgatcgcggagccgtgggggcgggctcacgcaagcgccaaggga

SEQ ID NO: 2097 - DNA, 393 bp, Homo sapiens
  source 1..393: mol_type = other DNA
tcactttttgtgaataaatttattaagaaaaaatgatgtgcttatttgtatttttgcgccaaattggagtcttcttgggacccaagttccctctctactgctggacccggacctgtgtcccccagggcggcctaggccgggaccctagctgtaagcttgtgctggggaacgctaactccagcattaagcgctcgccgcctcggtcctgaggagggcagtgacgggtacggccgctcactcccagctcggcgctaacacggttaacctttacagtggcaagcagagcacctcagaactcaggcgtactgcccgccgcccgagccctgcgagggccgatagcgagggtgggcccttctgcacccagcagagcgccggcggggtacggtcttagga

SEQ ID NO: 2098 - DNA, 105 bp, Homo sapiens
  source 1..105: mol_type = other DNA
cttcaaaaggcaccagccactagggcccctctcctggggctctgtcccaccaaaaagggaaagactggcccagtgcccaccgacagagctcagctgagtggctta

SEQ ID NO: 2099 - DNA, 530 bp, Homo sapiens
  source 1..530: mol_type = other DNA
tagaatttgcatacagatcagttacctacatgaattgtattaaagcagaaggatatgctatagacaagtcctttcacttctgggaagcctttctagaatcaacacaaaaggtaaacatattgcatgttaacggagcatccattttactctaatatctggggaaacatcatttgactttaaagaagacgctgttccaggcctggcggtccgcaacgctgtagcctgcgaggaacaattgatactaagtggcactaggctgcagggggtgccactgacacactgggagagggctcagccagcctcctgatcagtctcggcccagaggaaaatgaagggcttgagcttctgcttttacaaagcgtgtggagttgaaccctagcacccgctccccagggggtcgcctacaacgcgttccaggtgggcaggctcaggcgctgctccctcacaagcccccggccacgcggtgtctgggaccgggtgcctagtcagcccgggtggctccgccccgaggccccgccccatgacgcgag

SEQ ID NO: 2100 - DNA, 122 bp, Homo sapiens
  source 1..122: mol_type = other DNA
ttccaggaaccactgggttctcagagccagattgatactgggtgacttcaaaaggcaccagccactagggcccctctcctggggctctgtcccaccaaaaagggaaagactggcccagtgcc

SEQ ID NO: 2101 - DNA, 347 bp, Homo sapiens
  source 1..347: mol_type = other DNA
tggagagttgtacaaactctacgggtgggtggcccagctgatctttgtccatacagaattgtgaggaagcctggaggatgtcagggtcacccacagaggacctccactcccccatctgggatgaggtggcgtttggcgggagctctcagacccgcccagctgacatctggaaatcccaactcctgcagtgatgggaaagtaattggcctggggctaccctataagggcgccgcgcgtttccggcaattttcccttgctcgctcctagaaaagcagtaaagatgaccgcggtcactgttaaccctgccagcttccaagagggcggcttcaccgcgctggagttacttc

SEQ ID NO: 2102 - DNA, 195 bp, Homo sapiens
  source 1..195: mol_type = other DNA
ttgggagatggagccactgcattccagcctgggcgacagagcgagactctgtaattctcctcctgttttcttaaggcagccatgtttaatccaagctactttgtgggaggatcacttgagccccagagttcgaggctgcagtgagctgtgatggccaagccaagcagagataacccttttgaggttggccaaagg

SEQ ID NO: 2103 - DNA, 205 bp, Homo sapiens
  source 1..205: mol_type = other DNA
gtgcatgtactaaaaaaggagaaattataataaattagcctcttagtggacacacagataaatctctgaaccagccgggcgcagtcgatacctgagccagctactccgccattgcactccagcctgagttggtcattgaagggctgacgcttaagagcccagatcttggcccttccgggagccgcccgtcagggaactgctcgct

SEQ ID NO: 2104 - DNA, 323 bp, Homo sapiens
  source 1..323: mol_type = other DNA
caaaagcttctgatatctatttaactgatttcaccaacaggagtgagacaagggccagggctattgcccctgctgactcaatattggctaatcactgcctagaactgataaggtgatcaaatgaccaggtgccttcaacctgccagagccctccattgggaggggacgctgccaagttgcagtaaagtgaagacaccatgagctttccatggtatgatgggttgatggatatgtcagagctttccagagaaacaagtccaaggacctcagatcttagtccctgtcacctgacagggggtgggtaaacagacaggtatatagcc

SEQ ID NO: 2105 - DNA, 271 bp, Homo sapiens
  source 1..271: mol_type = other DNA
agtaagggttccaaagaagtcttcataatttctcatggatgaaaccaagctacaagatgctccctctagtcttccacttaagtctaaggggcgcctctgcagctccagggttgaagctcttgggccgtcagacctgcccattggcccatggtaaatagcgctttctttgccagattcaaagatggcgcttacggccacgctaagaatgcagcgtgaagctgcagttctgccatcactcaagatggctgcccccatcaagatgagcgtcgga

SEQ ID NO: 2106 - DNA, 391 bp, Homo sapiens
  source 1..391: mol_type = other DNA
agccaaaaaaaaaatattttttaaaaatagcactttattattattattattagagatagggtcagtagggggatgtacagggcatgtcactgtgccctgtggccctccctagttaggaagtgagagggctctttccgtaagctcttacttagatggagttcagtggcatgatctcagttcactgcaatagctgggattacaataaagacagggtagtctcttaaaaactttttttggggtgacatactgcgtgtgaaaaactctgtacacagaaggctgcagatgtagccttaaactcatctctcgatgagcagcttccagggaaaacctcccacccaggcctttgccctgagtccagggtctgtgccctaaccccacagtcactgagagc

SEQ ID NO: 2107 - DNA, 139 bp, Homo sapiens
  source 1..139: mol_type = other DNA
attctggaagggatttgatgaatcctaaaatgtcttccaaccctgagatctatgatctcacaatttccctgttctttgccaaagaatgcagtggcgcgatctcggctcatggttgccagcattggatgcaagaggctgt

SEQ ID NO: 2108 - DNA, 476 bp, Homo sapiens
  source 1..476: mol_type = other DNA
cctggcataaacttcatttattaaagtttattttgtctttaatctctcatataactcattactaaaggaagtgtcttgctggaaggacttaaatattgctggcacttaatacaattttgtagccttgaaataaattgaaatggacttaacttcttgcctggaaatagtccagtggagaagtctgtaatgcagcccacattagaggagataacaggggatatcctattttcagagttctagggctgtgaggcagcctctctcaggcaaggaggctgaaatccctttttatggcctttaaattgaggttccatacaccccccacaacattccagcctggggcagggggaggccagtggacacaaagccctctgtgtatggggtggtatgtgtccccccacccctccacccccaggctgcaattggttactggctgaggacagccccctcatgctggggccctaggggattttaagcag

SEQ ID NO: 2109 - DNA, 440 bp, Homo sapiens
  source 1..440: mol_type = other DNA
caaaactgtatttaaatataataactaacgaataagttgttcattaaataaaacttgttgtttgaggtaccctagagagcctctttcaatcctaaagtgtacgaatgtgctttgtcaagcattatagaaatgcaaagtagtattattcatctgatgcagaaataagtgaatttgtgctatttaaatcctgaagtgcagggatgctaaatatacataagatctgaatattaatataattgagtattttttttgtagaaataggagtcaattccctaaaactgtatatatatatatacacatatataaatcaaagcgtagctgtgggtgtcacccacatagcgctgaaacaacgaacaagggagcattgtcctcggctagtgggcgctcaaacccaggaattgtggggtctaatcgagagatgaggctcctcaggccgacct

SEQ ID NO: 2110 - DNA, 398 bp, Homo sapiens
  source 1..398: mol_type = other DNA
ctatttaaatcctgaagtgcagggatgctaaatatacataagatctgaatattaatataattgagtattttttttgtagaaataggagtcaattccctaaaactgtatatatatatatacacatatataaatcaaagcgtagctgtgggtgtcacccacatagcgctgaaacaacgaacaagggagcattgtcctcggctagtgggcgctcaaacccaggaattgtggggtctaatcgagagatgaggctcctcaggccgaccttgcagattttgagccagcggcgtttctgccgaaatcctggcaaattccggtagctgagcggagaagctccagagccttttaaagagactctcgtcacaaccccgacccccagccggcgcgcctccgccctcggg

SEQ ID NO: 2111 - DNA, 354 bp, Homo sapiens
  source 1..354: mol_type = other DNA
atgtttgccaatttataaccccattatttgtgttccatttttgaaagatataaatatgtgtgcaaatcaacatgggtagttccttacaatttctgtaatggaaaacatagagggggttcccgtttcaaaaaagaaaattagaaaatattgtgaaaaacaaggtaattttctactttaagtttctgtcgggtataaaaaatactctaatgcctttggataagattttaaccaagtagctagagacggggtttcaccgtgggtataccggccggtgtgtaatagacttatctataaagcagactcaactcctaactggaattgttcctgaagaagatgaaaccatttccttcctct

SEQ ID NO: 2112 - DNA, 304 bp, Homo sapiens
  source 1..304: mol_type = other DNA
tggtaaggagccctggagccccggctcctaggctgacagaccagcccagatccagtggcaagtgatcaaatcacactaaaaagtcagtagctcctgtggattacatatagcatatagattttgaattttgaattttgaaagaaattctgctggatccaaatccaggagatggggcaagcatcctgatggctgagggcacactctggcagattctgtgtgtgtcctcagatgctcagccacagacgggagtaaagggggcagacccacccaccttgcttgccagacttcagactgagaagtcaga

SEQ ID NO: 2113 - DNA, 207 bp, Homo sapiens
  source 1..207: mol_type = other DNA
ggtaaggagccctggagccctggagccctggatcctaggctgacagaccagcccagatccagtggctgggtaccgaggaaggtaaagagttcctgtgcatatagattttgaattttgaattttgaaagaaattctgccacactctggcagattctgtgtgtgtcctcagatgctcagccgcagaccgattgagaaatcagatgaagt

SEQ ID NO: 2114 - DNA, 340 bp, Homo sapiens
  source 1..340: mol_type = other DNA
tcatcccctggggtgccactggtcctacaatgctcagggaactttcaccatgccgttgttattgggatattcattaaatagaagaatgaataagaggatgagtgtggtcattctattgcgttccacaactcagcagtgagtctgggattgcctggagtccccatgctcaatttcaagaagcatccagattccagggcctgggtctccaaatgtcctgcatcaccctttctcaggaggatcccagaggcccaggccagctgtggcctcagaggaataaaatttctgtgaatttgaacagatttattctgggctctggtgataaaacagaacatttcttttt

SEQ ID NO: 2115 - DNA, 279 bp, Homo sapiens
  source 1..279: mol_type = other DNA
tggccaggctggtcttgaactcctgacggcctcccaaagtgctgggccaaataacctactggaggcctggtgggtgttatctgagtctcctcaggtttctcaagatatcggatgcctcctatcctcaggatcagtggcctgagctttggctatgagcctaagccctgagctgactgtgagactgagcagacttagtcatttgcatgcaaatttgtgtgggctagagactaatccttctagtcactagaaacatataagtgttaccagtgaaaagggtgg

SEQ ID NO: 2116 - DNA, 317 bp, Homo sapiens
  source 1..317: mol_type = other DNA
ccaaataacctactggaggcctggtgggtgttatctgagtctcctcaggtttctcaagatatcggatgcctcctatcctcaggatcagtggcctgagctttggctatgagcctaagccctgagctgactgtgagactgagcagacttagtcatttgcatgcaaatttgtgtgggctagagactaatccttctagtcactagaaacatataagtgttaccagtgaaaagggtggtccagctggctatcagacaatgacatggagctctgtgaaggagatgagacagttaaatttacttcctcttttctaatctgagag

SEQ ID NO: 2117 - DNA, 246 bp, Homo sapiens
  source 1..246: mol_type = other DNA
aactgaaacatgatctgaagtgaccagcataatttaaatgaccagtcacattttcctaagaggcatttgcatttttaaaaggggctagtccattaagggaagatactatcttcctggaaaattcattaagtatttacatgaaaattcaggttcctgagaggcttctgaggggccgatgcagtgacttctctgctgcaggtcaggagttctggaactgggagaagagttttctaacttcttaagaat

SEQ ID NO: 2118 - DNA, 190 bp, Homo sapiens
  source 1..190: mol_type = other DNA
actctgacaccatcctaaggaggttgagggtggagccggcatctttgctcctgctgggtgggaggccaggcccggtggctcacgcctgtaatcccgaggtgggcgtatcacctgaggtcaggagttcaagaccagcctggccaagtgggtgtgatggcgcccaccatcccagctattggctgattctgca

SEQ ID NO: 2119 - DNA, 522 bp, Homo sapiens
  source 1..522: mol_type = other DNA
gaagaaaggcagacttatggcttgtctgtctgttccagaatagagacacgtcgatgtatctatctttataccagtactatagctgctacttcttgaccaattacagctttagtatctctctcacctgtcctccctatacaaaagatatataaaatatactcactgtactgagtatcttctgcagtggagcagaggatcttcctaacatcctcgtgataactcatgactgagtaataaaaccaacttgcttaattaaagttggtttcttgtagtcttagtatcttcaaaataaggctccataatattgaaaaaaattttacttcaaatgcataaaatgatgcttctgattcagctggtgcgacatttacagctgctctgatgtctctttcctgaaaatttcaataccttatccttcaccatcaacgccgcgctgaatggggccgaagctccgcccctcagcgtcctgcggccgacgtggtcctccgagggagcagcagagccgccgaggctggcgagtcccag

SEQ ID NO: 2120 - DNA, 397 bp, Homo sapiens
  source 1..397: mol_type = other DNA
ctgttccccatggggactcgcggagagtgtcggagatgtaaattcaatgattctgcccgagaactcgcccagagttgcgccttctcccctactagctcagccttggagcgagcgctgggtgcctggtaacttctcttcactcacttgcgatcagatgagaagaaagtccctcagccggcgcgcggcagctgagtcccagcggggacggggtccgccgggtacccctccgcccgagccctgtcgcgcgagctctccgcggctccctagcccagcagccctcgtccggtccccgtgcgtcccgaggctccccgccgcccgtcccggcgcgcaccgcgggcgtctgtccgaacgccttccagccacctgagccctcctgcgggcgactcgctcagctagc

SEQ ID NO: 2121 - DNA, 594 bp, Homo sapiens
  source 1..594: mol_type = other DNA
aagattccacgtggtcctagaagcatacgtattcgtcggttacagtattttaaatattcactggccgctgaaatttaaaatggatgaaaaagaaattctcttaagtagcgttcttgaaactgctttatcaaactcagttcataatgtatgtgattttcctttaaataaaacccgaatctttagtaatacaaatattgggaacttcgattactgtaactaaatactatgctttagaaatttatctttaggagataaatttgtttttatatttgctttgtttcaatttatttaaataaaagtagtctttctagaagtatgttttatagtaccacttacctcggttactgtcccagttaagcagttttcacgaatgtggaaaaatagtagtgtttttctttcatacacgcgtatatgaaaaatttttacattgatagagaattattcgtaaaaattaaagtaaatttactgttagtctctaattttggaataagccataatgttcagaaaggggctttactttttatttttaatattattgataaactttgtactcagaggtctattcaaatttgctcgtgcggcaaaagtatttgt

SEQ ID NO: 2122 - DNA, 337 bp, Homo sapiens
  source 1..337: mol_type = other DNA
ccttattcctcagcataagaagcaaggtcacagtgcccttccttaaattcacatattggtaatcttcactgtaggtttatctgttccccatggggactcgcggagagtgtcggagatgtaaattcaatgattctgcccgagaactcgcccagagttgcgccttctcccctactagctcagccttggagcgagcgctgggtgcctggtaacttctcttcactcacttgcgatcagatgagaagaaagtccctcagccggcgcgcggcagctgagtcccagcggggacggggtccgccgggtacccctccgcccgagccctgtcgcgcgagctctccgc

SEQ ID NO: 2123 - DNA, 455 bp, Homo sapiens
  source 1..455: mol_type = other DNA
aacagctgtcctgcagctaggcaacttttctccaaaactgttgatgtaaaggagaaaagtgactaggccccttcttaagacagtcaagaatataaaaatgttctggattctcttacaaggctgatggcttttaaatgttaaaaccctcagtcttgccttctgagaaaggggactctgagaattaatgagggcccagatctgggatatctgggacaagacttgctgagctagggcacctcagatcccggcagtctggggccggggcgaagttgccggcgtcgcgcggccgggggcgcgggcagggccgggcgcgactctcccggggactttcacctgctcggctggcagcgcgggcagcgcgggggcggacccggcggcgggcggggcctctgagcccggcgggaggagccggcctgggcccgccccacaggaggagccgctcgctggcggctgat

SEQ ID NO: 2124 - DNA, 181 bp, Homo sapiens
  source 1..181: mol_type = other DNA
gctgttgaccactgggcctcaagcatgctgaatgcattgctgccctcagccgacccctaccaggtggtcctggtaatataagccactatttctcccacctccaacatggcatgccatgctaggtgctgaaggataagcccagatgcccatgctgcccgtgaagggcttcttctgccagtga

SEQ ID NO: 2125 - DNA, 353 bp, Homo sapiens
  source 1..353: mol_type = other DNA
ctgcactgctctgctgggcaatagcagaggttgccggcccctgggctgggctgggcagctgtttgatcacatattgtgccagaaactgtgatagaattttttgccctgtagttctgctgcagaaaaatgggatgccagagccaagattcaaacctagatctgattgcaaaattttgttccaatcttttaaaaagcccagaggtgtggattggaaaccagtgcccttcaccactctggaagcctctctggattttccagattgttccctaattaatgcttatttacatgattgtactaaaggttaccacagaaccatcatatggttcttctcccctccagcgaggtgtgtctgg

SEQ ID NO: 2126 - DNA, 414 bp, Homo sapiens
  source 1..414: mol_type = other DNA
cagagccaagattcaaacctagatctgattgcaaaattttgttccaatcttttaaaaagcccagaggtgtggattggaaaccagtgcccttcaccactctggaagcctctctggattttccagattgttccctaattaatgcttatttacatgattgtactaaaggttaccacagaaccatcatatggttcttctcccctccagcgaggtgtgtctggttgcagtgggctcccaggacagcttgctggagatcaccttccgctccggagctaagccagaggacctgcattcgccgccgctgggcgcgggcttggctgactttgcccaccctgcgggcagccccttaggtaggcgcggaggacaccccgcccccagcgcagggcgaggcgctcctgggcggtctggagctcatca

SEQ ID NO: 2127 - DNA, 316 bp, Homo sapiens
  source 1..316: mol_type = other DNA
ttgaagtacttaggtataaaagtttataacttaccttcaaatagttcaaaaaattaagtatagatggagtctcgctctgtcacccaggctgcagtgcagtggcgggttcaagcgactctcctgcttcagcctccatggctaaattttatattttgaatagagatggggggattatagggcctaatttctgcaacttttacaaatttgaatttccaaagaaaatgtgaaaaattggcctgccactgggcaatggcaagtcaaatacaatctttacacattttaatcttgcgctcagaatgtttatcctctggacaaa

SEQ ID NO: 2128 - DNA, 434 bp, Homo sapiens
  source 1..434: mol_type = other DNA
gagcctggagctccagtaccacaattttctatctacaaaatgggttttggcgattcaagatctgtattgagcacagctaggtaccaaacccaaatctttacaacctaatgggtttatattttgagcagggcaaagttgtggacagagccctgagctgtgggttagaaggcctgagttctagctccagccctgctctcaggcacggcactgcattacgcggagtcctgcaggcttcatccttccatgtaccacctccctaggtggttgtaaggattaagtcgagttcctatccatttggtacgaactgattctgaaccaccacttagcacctctgcaagagctggcccagctcaaggcccacctcgtgctatactcatggccttcagtgagagctcagcacgtgcttacggtgatgtaaaaatgtcatgtttcat

SEQ ID NO: 2129 - DNA, 392 bp, Homo sapiens
  source 1..392: mol_type = other DNA
aagcccgtggcccccggctctgcccctctgggctctggtgagcctggggggccaggactctgggtgggcagcagccagcacctcaacctccagcctgggcagtgcagggcacagctggccagtgggactgaggatgaaaggtgagcccctcacccgccccaggatcaggccacgttctcgggagctggcttcaccttctgcagccacagctgaaggttgctgactgagtgcacatcctcagctctgtgctccagcagccctgggaggtagatgatatttctggatttgaacccagcgtggagaagcctgcacctgtcacagcccactagggcacagtgggagaagcgtgggaatgccctcacattccctgttttaaacacaggacttactgc

SEQ ID NO: 2130 - DNA, 272 bp, Homo sapiens
  source 1..272: mol_type = other DNA
tgataacctgatcagtgaaactgcactatgccaattgggaattttaggaagttctcgttagcacatagttctattttcatagataacatttttgagatatatatagtgattttctgtagatatatgagtatacccagatattctcagcatccaaattaagctaagcatagcccaatcctaggcattcagcagaaaatgggtaccattacagcaaaagcagcggtgtgcttcctggaaaggaacctacttctgtgagtcacatgtgggccatt

SEQ ID NO: 2131 - DNA, 314 bp, Homo sapiens
  source 1..314: mol_type = other DNA
tctgtaaaatatttgaagagatttgaccatggtctgtgacacagccctcaggagatcctgagaacatgtacccaaggtggttggggtggagacttcaatcaaatatatttaagaaatacattgatttggggtagatttaaaatttttctaattggcaattggttgaaagagttatcaatgtcataagaacttgtggagaccaaagttttgtattgtattttcggtttacatctaaaagaagaacaaaggtctaggcttccagaatcatgggttctggtgaccgtggacctcaacctcaataattaaggttactt

SEQ ID NO: 2132 - DNA, 511 bp, Homo sapiens
  source 1..511: mol_type = other DNA
gttaaattcgtatttcaacatattccacttcttgcaaaagctgcaaaatgcatataataacctgtgtgtgcacacccacactaggttatgggcctgggaggtcatctaggtcctccataagtctgtttgtgcaaaagaaaaaaggcctggcttcgccttgagcgcgccaggcccgccctgaaagtttctccgcaggaaccacccgcgtgggtggctcggaaatccgccaccctggggacacagctccctgcccatctctgtggcccgcttgtgccccgtgccgctgggccgactaagagcctcgggctcgcacctcccagtacctagggacgtcaggggtcctgggacccacgagccgctctctgccggccggctcctggcccctcctcagttagtgcgcaggagggaccgggacgccagccgactgcgctccgagtgacgcactaggccccgccccggcccggtgggttactccatccctagccccgccccggcgccccgggccgcggcc

SEQ ID NO: 2133 - DNA, 602 bp, Homo sapiens
  source 1..602: mol_type = other DNA
ggcctgggaggtcatctaggtcctccataagtctgtttgtgcaaaagaaaaaaggcctggcttcgccttgagcgcgccaggcccgccctgaaagtttctccgcaggaaccacccgcgtgggtggctcggaaatccgccaccctggggacacagctccctgcccatctctgtggcccgcttgtgccccgtgccgctgggccgactaagagcctcgggctcgcacctcccagtacctagggacgtcaggggtcctgggacccacgagccgctctctgccggccggctcctggcccctcctcagttagtgcgcaggagggaccgggacgccagccgactgcgctccgagtgacgcactaggccccgccccggcccggtgggttactccatccctagccccgccccggcgccccgggccgcggccgcctccgcgtccgcgtcgtcgtctgtgctcccggcgctgacgtgtctgggcggtcggcttccactccttcaggcgtcggcagccactagtcgtggcgagaggggcggggtggccggggctggcgctccacttggcccccgctcccggcccgccccgccgccgcggccccccggatgagggt

SEQ ID NO: 2134 - DNA, 362 bp, Homo sapiens
  source 1..362: mol_type = other DNA
agtcttactcaaaactctaccaaatagctctgagagttcccaggacggctggtgtcaaggctgaacacgagttgtctctgaaaactgaggcttcaatctaatgatttaaatatccctgaagtattttagtaaaatatcacttttcctggtctatatacaaatagactctgcctcagacaaacccaggtgtgtctgggttttgcagtctacatcactagtcctggctcaattaagactacaacttgagttctaattatacatacaacctatatgtacaggccctgtcttgacctatagtatcaccaaatctgtgaaatcacagattgtatttttggtttctagttgtctctggcaagcaccca

SEQ ID NO: 2135 - DNA, 356 bp, Homo sapiens
  source 1..356: mol_type = other DNA
tcctggtctatatacaaatagactctgcctcagacaaacccaggtgtgtctgggttttgcagtctacatcactagtcctggctcaattaagactacaacttgagttctaattatacatacaacctatatgtacaggccctgtcttgacctatagtatcaccaaatctgtgaaatcacagattgtatttttggtttctagttgtctctggcaagcacccaaggcctgacttggtaagttatttgaagagtcttcttaataagttgaaacagctgtgaggcacagatgttaacggctgctttctgaccctcagactggtgctgagggacttaacatggccaccctcattgtgtgtgtg

SEQ ID NO: 2136 - DNA, 351 bp, Homo sapiens
  source 1..351: mol_type = other DNA
taaaatgagctgttattaatatttggttaatacatcctctgtcctcttttgtaaatgaggaatgagtaagtcactgagccagaatgcattccttcccacaaatctggccatgcttgtcctggagggcagatagactagccttcccgccactgaactccaggctggacttggtgagtggcactcagtggagtcagagtcataagcatcatatttttaagccaagaactcagttatatttttgacagtgtggtgtctacagtactaagacaagagtgacactttttgtcacctgggtaataagcacagtacccaataggtttaatttgcttaggataatgagatcatgttctc

SEQ ID NO: 2137 - DNA, 383 bp, Homo sapiens
  source 1..383: mol_type = other DNA
tctccatactcacggagaatcaggacctcagcccagcgtgggcttggtaggaatgatccaggctctgaagggttaaggctggagcctggagtgaaggctcctcccctaaaagttcacaaaataatttagaaagtccttataaatgcttgtgttttcataaaaaataggaatcctggattctggcagtttccagttaaatcaaatctttcgggggagagctcagctctaggctttcatcttcaattggaaaactccaaactttaagttttgcttatagcttcagctcaagtaagaaaaaattatagctttgcccatagtcccttgggtcaaaagaaatagtaatatattggatgctgggatccctggcgctttcccaggaatcc

SEQ ID NO: 2138 - DNA, 440 bp, Homo sapiens
  source 1..440: mol_type = other DNA
agtacttttatatgtcttggatctaataataaaatatctaaaagcacccatctgggatggcttggcacattctcagtacttcggagaatgaagttctgagattctgatacattccaagttttgaatactggtaatttacgtctgattctacataaagttcttaataaaatcagtgctcattttctcaaataagcttctttagaggaggatgataatcgcccaactttggctcctagacccacaggcgccagggcacagacccagtgcgtgtcacagatcctgtcctgagtgctaggccgggtgacgcccccaccatgagccctaggaagcagtgacagacacctgcgcctaggcggagcgagaagagcctggaatggctccgggctttgcgtcacgcagctcccgacgccgtctccgagggcagggtaggacttccgaaa

SEQ ID NO: 2139 - DNA, 391 bp, Homo sapiens
  source 1..391: mol_type = other DNA
taaccgaactgtagatttaaagagttctctcccattagagatgagatgtcttaaaaactcattttgtttttgaaaacattgtgcttgccaagtaaaatgttcaaaggaaacctccaggggcttagctggtttaaacctctgattcaacctaatgtgtaatatacaccaaggtttatacacattggttctctgaaagcccagtttgcagaatagttttctagggctgccataacaaagaactataaacaacaaaaatttattgccttacaattctagagtctagaagttcaaaatcaatatgtcaaattatttgattttctctgtaaagaccttatctccaaataaggtcccaccctaaggtactgggggttaggacttgagcataaaaaat

SEQ ID NO: 2140 - DNA, 421 bp, Homo sapiens
  source 1..421: mol_type = other DNA
tgttcagaaacacctatagggcttaatattcttacaatcagtttgaaggttatcttttgaaatatcagtttggagacttagaattacataagacataaacccatttgatataagaattgctgtgtatatttgttaccaagatttctagaaaagtattcctcagtcaggttgattacagatatagcaaatctatttttgatcagatctatgtataatatgatgctccagaattcctgctggtacttttccttccaggaagcaacttccttgatattttttttttacaggcatatgaataaaaactatattttgcagcattgtacactttttttccttttctagaaattctaaacctctgacattggtggagacattgagtacacttcctcatctctttcaggggctggagaggcagagggag

SEQ ID NO: 2141 - DNA, 364 bp, Homo sapiens
  source 1..364: mol_type = other DNA
agataagacacaattcaggtaaattttggtaaatattccttgagtgaagagttcagagataatatcattatactcaatccctactaagaagacatatggattcataaagaatatatagtaattattcatatttgttttgatttatataaacagtaatcttgctctgaattcctagcatccagctgagtgcctggcacttggtaagtattctccttcactgtgaaacaaagtgggctaaagcccttacagtcctaagaatctatgactttgaccgatctgaagggccaatgacctgtgcacagtttagggcctaaccctgccctggccggttagcaatgttgtgatagcagagaaaggattccct

SEQ ID NO: 2142 - DNA, 419 bp, Homo sapiens
  source 1..419: mol_type = other DNA
taaaagtactctgttaaattttacacacttcgttttgttaaaataaactatttgtggacaaacttcaatgaattaagtaaaacgttccttgaacttttaaaaggaacaatgatggcgttatgcatgcgtagtgctataaatgtatgcctaacttgaacaatttcagctcaagctcgtcttcttcggtctatgctgcaccagaaaacacccgttactgagctctggttgtgaaaacaccgccaggcccagcgtcccggcacctgcccgcgccttgggatggagaaggcgtctgtctgcaggcttccctacagtgccggccgccgacaggaagacggcgatcaaccgtcatcacttttcaaacttgacgtccaaccgcgacggatgccggttgggctcaagagtcggaacctcggactgca

SEQ ID NO: 2143 - DNA, 317 bp, Homo sapiens
  source 1..317: mol_type = other DNA
tgcccaggaatgtgcaaattaaatcaggagacctggtttctactttaccagttttcatatcggtgaaagcgagaggatttgaccagatgaactgtagcacagagactgtgcgcagagaactgcattctctgattcagagccctcacctgaggggatgatccctttaatgaagtctaaatgagatgatgcttataagcatctaacaaatgttcaacaagttattattactctggaattctataaattacctagtgaagccccgtgcagtccgaggttccgactcttgagcccaaccggcatccgtcgcggttggacgt

SEQ ID NO: 2144 - DNA, 284 bp, Homo sapiens
  source 1..284: mol_type = other DNA
atgtttgcatttaagtggaggaactacagtaccattcggcccacctctgaactctgattgacagggcgccgggtcagggaagcggggaggagctccaggcgccctcctccctcctcctctgtttctggagtcctgagcctgagctaaacaaatgctttgcctgccgccgcggctgggggagatctggcttttgcaacagcccaccccctttgagatcactctggcccggagtgggggtggggggtggggggggaaagtttgcattgcaatccccctgcctaaag

SEQ ID NO: 2145 - DNA, 391 bp, Homo sapiens
  source 1..391: mol_type = other DNA
ttccacatgtactggatttgcttttccttaaattggatgaaagtaaaaaatatattttgttatgattacatttttctagttgaaattttttattgtggtaaaatatatataagatagaatttaccggagtgcaatgagtggcgtgatctcagctcactgcagcctcctcaagggattcccctgcctcagcctcccgagtagctgggtggtctcgatctcctgacctcgtgatcaagaatttaccattttaaactatttttaagtgtacagttgagtattataaaacattattcgagattccacatacaagtggagtgtaattttggaactcttgcaagtaacttggcagcttatgtagccaaagaacacaaatgtgttgtgttttttattt

SEQ ID NO: 2146 - DNA, 651 bp, Homo sapiens
  source 1..651: mol_type = other DNA
ctctccgccgccgcgcacgcagcgccgcggcccctgtcagaagctgcaggatccgccccggcgaagcagggccgactcgcacccaggaccctgggcctctgccttcctggccctctcctcccgctgaggagcgacgcgggctggtaggacgtcccgggaaggccggcagctcgcgaccacgtcccggcccagcctgggcgcgccgaggagcagagccagcggccggcgttcgctccggctccctccccggcgctccgaagccgagggcggctcctccggctgcagtctcgggggcgacgccttcccgggcagaagcttccagcagcgctccgcaacttctctctgctccagtcactgggagagagctcgcctaccgcccgtgcctagagtgagccgggccagccggggctcctccccgaggcgaccggcactggccgactggcgggaggacctccccgcgcgccccgcacaccggctcctgcgcgcacagcgccaggagtccagaagcgggcgggacgccctccgggtcccttacagtgccccttctcgacctggggcaggtgagggccgcaacggggcggctgggacgcgggattgcaaaccccatcgtcccgcgtgcctggacccggtcgctcgagggagggtacccac

SEQ ID NO: 2147 - DNA, 328 bp, Homo sapiens
  source 1..328: mol_type = other DNA
cccctgggagcctacagattttatctctataagaaactttcttgtggtgtgagctccccattattgggggtgcttagattctttcacaagacaggctctgtgttagtgaagaggcccacctcaacttaagggctactctattttagttttccgtagcagattgagtatcacgctttcgaatgagaaaatgcattttaataaaatcccattgatttttgtggatgtaagtcaaggaacagtgccacccggtagggacctctggggacgcgccggcgacggcggtggcaagagtagcggtgacggcggcggcggcggcggcggcagcatt

SEQ ID NO: 2148 - DNA, 281 bp, Homo sapiens
  source 1..281: mol_type = other DNA
tgccaccacacctggcaaattgattaccagtgtaagacattgcattaatccatctatttacatggaattattcccaaataattttcaaaggcaagtttttaaatctcctttaacttccatttccttattaagagaggattatgcaaatgatacttcactgggttattttgaagaaaaataaaataaagtcatggatcagaaagcattttataaatgctatagaaataattggtttttacagttgcttgatgtagtcctgtcttcaagacttcttgcacttc

SEQ ID NO: 2149 - DNA, 458 bp, Homo sapiens
  source 1..458: mol_type = other DNA
ttcaatatgttactaatattcacaactcagtatatatgaatgtttttaaaaaatgaaatccaattttcccaaaaataaaagtttcaactcctcagatgtttactaatcacctgacaagtaattaattagagaggcactcactattttaaaagtcctaggagaatacgagtggtaaaaaaatacttctattgttgcactcagattttttatatatacattgtgttagaaggagtagcttacacttattcaaaaactttttaaaaatacacatatatatatattcaaaatgcagacagagatgtatacatcctaggaagagtaccactttatcagaggaattcgagcgggtacagaggagttccagctgaggagaggtgaggaatctctttccctcagccaggcagtctcctgaggctgctgacatcacaaaggtgtcaactggcaacctcattgtcatg

SEQ ID NO: 2150 - DNA, 192 bp, Homo sapiens
  source 1..192: mol_type = other DNA
taaagatttaatgagctctcaaagtacctctagatgtctcccggcctcgagccccgccccggacgctggacccgagcgtaacgtccggagccacgcgactccgcgctcagggggcgtgggtacggcccaccacgagggcagggctcggcgccagctctcggcaacaatatttgttaggccctaaacaaaaag

SEQ ID NO: 2151 - DNA, 362 bp, Homo sapiens
  source 1..362: mol_type = other DNA
ccggcctcgagccccgccccggacgctggacccgagcgtaacgtccggagccacgcgactccgcgctcagggggcgtgggtacggcccaccacgagggcagggctcggcgccagctctcggcaacaatatttgttaggccctaaacaaaaaggcgcacgcgccttgcatgcccgtgcttcgcccttacagcagagcgcctaaaaccgctacggtcacctcccaaccagtggccctgagttggcaactagcgcgcgccagcgccaggagccccgccttgggggcgtggccgcgcgctggtcggctggggcggggcctgcttctggcctcatctagccccgccccaggcgagggcgccgcaccc

SEQ ID NO: 2152 - DNA, 406 bp, Homo sapiens
  source 1..406: mol_type = other DNA
acctcttttgaaaataaggatcctaggtaggactgaagccaggcaattaccattcctcaggagctgcccaaagcctcataggctcaggagccatgctctgctttcagagtacttgctgctgcacccgcacgtgccccaggacgaagggaggcctcagagtcctgcctcacagatactttagcattttaccatgttaaatattttttcaataatgtgatttttgttggctatattattctacagcaacgactactgcagtggtgtagataaatctcataatgttgatcagagagaaaaaaagatacatgactgtatacttttctgtgtatagactgcatagttgagtaatttttaaattattttatatggtactgtctttgatgacttctcagaaacatcagattga

SEQ ID NO: 2153 - DNA, 414 bp, Homo sapiens
  source 1..414: mol_type = other DNA
gcttggacccccggggctcaggggatcctcccaccttagccgcccaagtacctggggccacaggcgtgtgccatcactcttgtcacccagactggagtgcaatggcagctgggatcctcaggtctcaagcgccttggtgagagccacagcgcccagtctctctttaagaatttaaaaagcagtttcatgtcaccctttaaaaagcattatacaatttccaatcctctgccttcttcaggcgataggattaagaatgggatcctaggatgcttacatgcaatcacgaagaaggaagtcctcttcccgcgtgtcttgctccaccctcctggcgaggggagggcctggcctggaccgcagagtcccgcggccccgcccctcccgcggccccgcccctcccgcggcccgtcagcctct

SEQ ID NO: 2154 - DNA, 239 bp, Homo sapiens
  source 1..239: mol_type = other DNA
atttttgaattttaattagttagcaacacttataaattaagtttcacataaaacccaggatttctggattttcctgagaaacgaagacatctcagaaacattctcgtcaaattctcttcagatgaacttaagcataagataatttattttctctactgtggtaatacctctattaaaacccttatcagagcgtattgaggccagaagttgggctgaggtggtgatgccccggaagcgga

SEQ ID NO: 2155 - DNA, 292 bp, Homo sapiens
  source 1..292: mol_type = other DNA
acattttgcataaaagtcttctatttctaaatagctggtgctcttaaaatatttattgtgaacatgggtaaaccaggacccaggtggaggaattccaacttttcgctttgtatttacccatagttaacttttttcaaaggctaatagatgagcctctcaagcaagtaaggctcgcgatctttcccctggtggcacaggggaccccggggcccttcctcccggggactccctctgcgagcagagccgtgtccgcgaacatagtgggggaaagttccgcttccggggcatcacc

SEQ ID NO: 2156 - DNA, 475 bp, Homo sapiens
  source 1..475: mol_type = other DNA
ccagcactgttctgagaactttacatacactaattcatttaattctcacaaaaatcctgggatgtaattgccattattattcccatttaacagataagaacactgttaagtaacagaaatctggctccagaggtggagtctgaaactgcctttctaagtgactgattgccaatctctggaaaaccgttcaattgaagatattaatggatcaaaatgtcagtatgttagctagtgtatgggatgagatactgtggtttagaagggaattgcttttccaacggagggcacccttcactaggagtcgcacgaggactaaagccagcggctgacatattattttgataatgggtaaatgacctttcgcagagacctcgggcggcggcggggcccgggaggggcggaggctggggccagacgcctcgccgcctccgcctcggcgaatagcagcgcgctgcccgcccggattggagcagca

SEQ ID NO: 2157 - DNA, 223 bp, Homo sapiens
  source 1..223: mol_type = other DNA
ggatatttttataagcttcccagatggttctgatatgcatctcagatacaccacaatgttccaacggcacagtggaaaccttgcaatgatgattatttctctattttcagtgaatttttgaaaatatagaccagcctgggcaatatggtaaaaccccagattgcgccgctgcactccagacacctaggctacccaaccatgtgggttgggtggatgactttat

SEQ ID NO: 2158 - DNA, 438 bp, Homo sapiens
  source 1..438: mol_type = other DNA
aactgcttttttgttaactataaagtgtaaaacaaggatgaagagtgcttttagatctcaatcaatttttaaattaagctattggctttgaaagaagatgcctagtaaaagcatctgctaaatattcttcctgtttggcacattagactgcagtatcagacacatgaccgtggtcatactgtacacaatgcccaatgtctgccaaaactctggcatatgagagacttagtgctggagtacggagggattcttccggtatccccactacacagcccttcaccctttctgaaggtaggatactaaaccgggttccccactggactctggacagcgccgcgccctgctcggcctcacccacccggtggcgcttgggcccgccctagtcggccccgccccgcctcagccccacgtgcggggccccaccccggcgctagcggc

SEQ ID NO: 2159 - DNA, 472 bp, Homo sapiens
  source 1..472: mol_type = other DNA
aagaatcctgttaagtgggttcagcaagaatcccaataaccctgtataaagtcttccttactgttttaacaagtgtcagaataattttttcttcaacaagttctcaacaaaaacccatacccagaatctttttctggaatgaaaagggcttcaggtttggagaagaaaggtccttctatacacccacttcatccaaggaattacatgcttgggatcaaaaatcaggaagttccttctccatgtatatgacgaagttcattgcctgaagcacggcgagatcgtccacgccgaggtcacacgcagcactggaagcggcctgcatcgggcggggcggggaaggccgagggcacggctacccaggcccgccagggactgcccggaccggccggaagccgcgcctagaggagggccccggagctcgcgcgggcgccgtcccccggcgccgccgaggcctgctgacatcagccgcgct

SEQ ID NO: 2160 - DNA, 445 bp, Homo sapiens
  source 1..445: mol_type = other DNA
agaaccctgctaagttaggttagagagcttgatatctgatcaccctggatatctgatcaaataagaatcctgttaagtgggttcagcaagaatcccaataaccctgtataaagtcttccttactgttttaacaagtgtcagaataattttttcttcaacaagttctcaacaaaaacccatacccagaatctttttctggaatgaaaagggcttcaggtttggagaagaaaggtccttctatacacccacttcatccaaggaattacatgcttgggatcaaaaatcaggaagttccttctccatgtatatgacgaagttcattgcctgaagcacggcgagatcgtccacgccgaggtcacacgcagcactggaagcggcctgcatcgggcggggcggggaaggccgagggcacggctacccaggcccgccagggactgcccggacc

SEQ ID NO: 2161 - DNA, 472 bp, Homo sapiens
  source 1..472: mol_type = other DNA
gctaaagtaataatcctaaaggaggaaaagttttatgcataaagaagttttgcttcattatgctatatgcttcaaaagcaatattacagtattgctttttaatagagaagaaatggaagtctaacgggaaacaagttgtgttatttaatatgttgtcattaaaattattctaaagacaatgtaatactacagataaatccttaagtttaaaaacgtgcaaaattgaacatagaatattttaagtgagaaatctctctcagttaagtgaaattttacatagttacccaaatacttaaggcgctgctctagagaattctaaatgtcatataaggaaagagtaaaactgatactgcatttacttttttaaatgtcctcccagcctgtcagcaacgtgcggggcgcgcgggttgcgcggccgggcaccttccctgcgaaactgacggcggccggcttagcttccagagccaaggcc

SEQ ID NO: 2162 - DNA, 681 bp, Homo sapiens
  source 1..681: mol_type = other DNA
ggcttcataaatatatttcttaagcaaatcatacatttctcagttctctctcaacacatacattttgagacacaagacaaatcctataaagtgttggatggatttaagccgttataatcatttattctacctcatattttaacaggaaaaagtaatgacgcgagattcccgcctaccttttagcctagaggacttgctagttacaggttggctgtggctgcccgcagacacaggctcccctgctcgagtccccagccagcgttctcgcccgggttcccgagcgcgggcgtccctgggagaagccgcgatggtcgctccccgctcggcgcggcccgcggggcggcctcccccgcgcctctcgctgcctgccacccagagaccccctctctccgcgtggcctcaaactccacgctgacctttgggccgccgggggccagcacgtgacagtcgcggcagcgggcggcggggcggaggcgcgggaggcggtgcggcggccgagctcccccgcgcggcgggctctgcggcggggagacgctcgccccgtgccgcgctgcctgggcatgcggatgcgccgccgagcgctgcgcggaccccggaagcccgcggcagcgcgcgctcagccggcggcgcgatccagcccccggccccgcctgcgcggccggcccggcgggcgctgcgccc

SEQ ID NO: 2163 - DNA, 356 bp, Homo sapiens
  source 1..356: mol_type = other DNA
atttgggaccacagccacagagagaatgccctgggtccccctccttctctaggagttcatttaattaatcagcagagtttctgttgaaaaggactccccaacttcccagccgaattacggagtgaggaaagtgatcgctgtcaccccgcggcagcgggcggcggcggagcggcgggcaccgggcgtccctgggcgcagcgcccgccgggccggccgcgcaggcggggccgggggctggatcgcgccgccggctgagcgcgcgctgccgcgggcttccggggtccgcgcagcgctcggcggcgcatccgcatgcccaggcagcgcggcacggggcgagcgtctccccgccgcagagc

SEQ ID NO: 2164 - DNA, 433 bp, Homo sapiens
  source 1..433: mol_type = other DNA
gtgccactgcactccagcctgggtgacagactgagaccctgtattacctgaaaagatccagaaatttagcaaattttcaactgccattcttgattttaaaacatataaggaattttctctgggaaatcagtagtaatcaattagaaaatataattttttaaaagaaatttttcataaaaactcatattgttaattaggaataaaattgacaaaaaggaaacagttttatgaggaaatctataaaactttaaggatattttaaatctcaacacttatttttgaatgtacttttaaaaaattcgagtttagggcaaggaagaccttgtcatctttgtcgcacattacgcaataatgtacagaggcggcacgagccggaatcttccagtctcaggctgtttgttcccccgcggggcaatgcgactgcgcgtcgtgc

SEQ ID NO: 2165 - DNA, 581 bp, Homo sapiens
  source 1..581: mol_type = other DNA
tttacttttaagaatttatcttacatgtataatcacaacacgtgtgaaatatcgtacacataatagatattggttgcaatcttttcatagttgtgaaagatgaggaaaaacaatcttaaaagtagtttggttaaataaatcatgtcactcatgaaatatcatccccattttaaaaagatgatggtggtggtgacagaaagctttctaaaacctttcattaaatgaaaaatgaataaatcattgcagaacagtgtatatatatctaaaatatctatggaactgctcctggagaattactgatcattctttcagtagggtgaccatcatccattggtttgaaaaccaggacagtcctaggaaaagtgagacaagttggtcacatgtccccaagatgatcttctttcacttatgaacttgctactttcccagtcagaatataaactctgaagggggcacattgtgtcttgaagtgtttcagcaaatcagttataagagagctttgtgagcagtctccccagctcacctgccaatccagctgaggagctcacctgccaatccagctgaggctgggcagagcaggg

SEQ ID NO: 2166 - DNA, 675 bp, Homo sapiens
  source 1..675: mol_type = other DNA
taataattttaaaaagtaaattatatatacatgggatatcatgttcacttagatttgataactgtgtcataaacacttggtaactgtgttagtgaatatgctgctaataggatcatggtagctagtttagcaatatctataaaaattacaaatatgcataactttcagtgagtcagaaattttacttttaagaatttatcttacatgtataatcacaacacgtgtgaaatatcgtacacataatagatattggttgcaatcttttcatagttgtgaaagatgaggaaaaacaatcttaaaagtagtttggttaaataaatcatgtcactcatgaaatatcatccccattttaaaaagatgatggtggtggtgacagaaagctttctaaaacctttcattaaatgaaaaatgaataaatcattgcagaacagtgtatatatatctaaaatatctatggaactgctcctggagaattactgatcattctttcagtagggtgaccatcatccattggtttgaaaaccaggacagtcctaggaaaagtgagacaagttggtcacatgtccccaagatgatcttctttcacttatgaacttgctactttcccagtcagaatataaactctgaagggggcacattgtgtcttgaagtgtttcagcaaatcagttataagag

SEQ ID NO: 2167 - DNA, 378 bp, Homo sapiens
  source 1..378: mol_type = other DNA
gacatttatgaagctcatggaattcttaagtcacccagggttgccaatccattatcaccttgcacaactgtccagttgaccatcctgagacatgtctacggaggtggatggatcacttcagccatctctacaaaaaatttaaaaattatctgggtgtggtgactcccagctactcaggaggctgaggtgggagaatcacctgaccctgagaggttagctgtgatggcaccactgcactttctaatcctggtcacaagcaatgactactctttaattactctcttctggaagaactttgaatctttggggcctgggtccagagcctgcattccttcctcccgccagcctatggggccagaggctaaatttatgttcctg

SEQ ID NO: 2168 - DNA, 443 bp, Homo sapiens
  source 1..443: mol_type = other DNA
cttaataagacgcctagctcccgaggaagccagcctggcgtcgtttgccggggccgggtctcctgcactagcagagccgggggcggggaaatttaaagcgggaggcccgcgtgtggctcagcaggtgcctcatgcccggctcccgtggcggtcgtttccgcccctacctgcccagagggccgggcttatccattgttgccaatgtttcaactgcgagtgcggagcacagggcacgcgggccgctcactgcccttactatatagcgcatgcgccggcgacacttctggcggcaggagaaaggcgcgcttgagggcgctgctttagctaccgaagggccacagcgccccgaaggcgcgtgcgcagagcgcggctgagggggccggggcgaacagagccggcctcgcgcgccccctggcgcgcgcccggggagaggaaggagcggg

SEQ ID NO: 2169 - DNA, 600 bp, Homo sapiens
  source 1..600: mol_type = other DNA
atgtatgttcattaagtgaaatatacttgagaataccaagtaattccacaatttagacaatagagattctaagtaacaaactgtcttctttctacttgagatttgggaaggatactgcataatatgtagcattcaactaatctattctgttaatttggtaatataaaaagatttgtagataatgaatttctatactctttaagatactttatattaagaattggaaaattccctatcagtagactagcaccatcttgacaggattgtgtagaaagctttttgcaaatcctcttattactgaagtcattgttgccagcaggaataagattaactcctaattattatgctggcactcaggagataatttttcccttcatgcactgccaattaatatgcaaatagcctgataaatatttatgcaacgatttaaattatgcagggagtgctttcagtatattctgtaaatgaatctaagattaagcttcattatggaaactgccagctgcaatctttgtttctattttattacaaaaagaggaactttttcatagttgccttgacaatgtcagtcctagctggtaggagagactaaaactcctc

SEQ ID NO: 2170 - DNA, 384 bp, Homo sapiens
  source 1..384: mol_type = other DNA
tcggtgcctggggcttggtatccaggagcaaagcaaggaccagccaagtgtgtgcctctcaggcagaggtccttctttccaagtgtgaatgaaggcctcttgaaaaggccctttcttggactttggcataatattttatttgaaaaaccaaatcttactgagtttcttgttttaagtttgaagatcttaagacattgcagtttctcccgcctgaagcggcagaggctgtgtcagcttcccacagatgctcctgggcaccgggagataggaggcgggatcttgaccagccgccatccaccctggattgtcctcagagtccccggaggaagggatccagaatccccggggcctctgcgcacgcgcgagggcgctagcccgggaaga

SEQ ID NO: 2171 - DNA, 567 bp, Homo sapiens
  source 1..567: mol_type = other DNA
aaaacttttaattgtgatgaagtccaatttatcaattttatgttgcattaatttttttcatatcaattttggaatcagcttaacttgttctaaaactttttgttggtattttcaatgaaatagattgattaattaagaggtctccttaaaagagagcttcctatcaaagaagggtatatgttttaaagtttgtttcatatagatatattacaatttttagacgaagtttatgtctaggttttaatgttttattattgtaaattactctggtgtttaaatgttgacaactaacacaagtgtttaaaatactatgtgagctacagtatttcacacaatagttcagatctgcaacctcagatctactccagctctttgctttatagataaggaagcttctagactcaacagccaccataaaatatttgacagtctaggaaaacagtcaagataggaattagataagaattattttttttaaaaaaaggagcattaaaacaatgccctgtcggcaggtgctttctcaaaggcccctcctccacttcctggggaggtagctgcagaataaaa

SEQ ID NO: 2172 - DNA, 311 bp, Homo sapiens
  source 1..311: mol_type = other DNA
ctagtgtaagtgggaaactgctgatgtactgtttctttatcaagcaggaggagataataacttcagttacgaaaaagtataagtcctttgaagtactagaagtctgattgttcaaggaattatctgagactgaagaaacacagacttatgtcagtgtttggcctggtaaattcaacagaaaagaaaatgcagcatttcctctctttctttttccgcctgtcaaacaaaacaactcctgcaggttgcggagctgcaggtggcgcctcgcggagggggcggggcctgggcgcgccgagctccggctgggtccc

SEQ ID NO: 2173 - DNA, 313 bp, Homo sapiens
  source 1..313: mol_type = other DNA
gggtagcagggagtgaccctggtgcagattccagtccccgaatccctcccatgcggtctctgctgcccagccgggatggccctaaagtcttgcccgaaatccttctactcgtatacagaagatagatccgtcggcgccacgctgagctctgaagcctcggtcagaagggctcctcttttggtagaacacaaacgcctagaccgtggcaaagcccagggtcctgtcgcgagacagaggggcccggtggctgcccatccccatgtttgggcacatggagttttagatttgcgtctaaatttaaactctctcgcgc

SEQ ID NO: 2174 - DNA, 240 bp, Homo sapiens
  source 1..240: mol_type = other DNA
taaggatccttccaaatatttcaaagcaaaacaatcaaaaagcattttcatttgtttttcaggtcttctttttaaactagtagatttcgcaaattgcaacaaaactggctggtggggcccgcaggcggacagccacgcaggcaggcggaaggctcggctcggcctgggaccgctgcagacccggcctccgcgcggggccgaggcgcctgggtgggaccgaggaggcggggccttcccggc

SEQ ID NO: 2175 - DNA, 631 bp, Homo sapiens
  source 1..631: mol_type = other DNA
tagtgaatacagcacttagtagttcctgaacatagtaggaattcaattaatgattgaatacatgaataaacaaatgtcttctgactgttgtgaattatcccttcagcaatgataaagatattttaaaactggcctttctcaggcctaactttaatgttagagatacagctaagaatattataagattaacaagcattttcccctcacactgtttacattattgtcctggtcatcaccactgttattgaataccatactatctacttccatgaggaagtagaatataatattccttatatgaaaataaataaacaacatgagacaagtatattagatctgtcttccaaagacctcttattctctatctccagtcttaggactaaatggtttgaactagtgattctctcatattgttttatactcagaaaaggaaagaaccagacccgaaaccaggcctgggcctgcctgacctaagctcggtactgacctagcaactgttgttatctatagattccagacattgtatggaagggcattgtatggaaggacattgtgcggacccccttagagttgtgagcccttaaaagggacagaagttgagcatcagacgagctcggattttgagacgcta

SEQ ID NO: 2176 - DNA, 593 bp, Homo sapiens
  source 1..593: mol_type = other DNA
aacaaaggtctctactggagcctgtttatataatgaagatttattaagaatagctctccctaaggggattgtttaattaaatgaggtatgattctaattataagactaattcactcaatgaacataattaaatgaccctcttgtacaactgtgttttattataggagaacatgtacagctttttaaataagactttttaaattccaattttaaaagctgtgcccctaaatgataattgtggttgtgatgatatacataagaacatttagaaaatcaacacatgattctcttaaaatacatttttccagtgtcacaataaagaaaactcaaatccagtgcccattggatttcaagttatctttgggataaatttgattaaaagcgtgcacttgaccagtcagaaagggcaggtatataattcttcaaacaaaaatttacctcacaaatatatctgaaggtaagtattgaatttattataactggtaaatttcatagtcctggtacaagctgtaaccactatacatggccaagggaagaattgtgttctcccctgacccttgcctcaaatgtgcggggacggcagtgccacccaa

SEQ ID NO: 2177 - DNA, 668 bp, Homo sapiens
  source 1..668: mol_type = other DNA
gacgggtcctccagcccgagggaccttttcctcacgccaacaggtgtgggtaggagccaccccgagacatggctctgcctgagccccgtttcaacacccgagccgcaccggcaccatccgcgcgccgggcctccagggcgcagcgttagatggcggtggcagcagcggcgcctgggcccctgaagcccggccgcacccgggccggagctcgccctccctcagcccccctccaacaggaggaggcggaggcggaggcgatggcgactcctccctctcctcgtaggctggtgtgtgctgcggctgccctcaccctcgagtagagagagaagctactcaattctgtagtctctcgctcacgagtctccagtgaaaagaagcaagagaattgtgcggcatcatctttaggcacaagtgaaagggcagtagaaccagcgcagcttcactttcccttctccaacatggcctcgagggcatggggagaaggaggaggtttccgctcgaccccgcccgcgcctcggggcgggccaatcatggcgggcagctcggcctgcgcaagcgcgctgccagcagggcgcagcgcaggctcctccctctctcctgccgggggccggaggcggaccgggggctggcagtcggcagcctccgccccctcaaccttcgcggggcgc

SEQ ID NO: 2178 - DNA, 666 bp, Homo sapiens
  source 1..666: mol_type = other DNA
gcctccgccccggggcccccgctcacccaggtagcgactccgcagccgggacgggtcctccagcccgagggaccttttcctcacgccaacaggtgtgggtaggagccaccccgagacatggctctgcctgagccccgtttcaacacccgagccgcaccggcaccatccgcgcgccgggcctccagggcgcagcgttagatggcggtggcagcagcggcgcctgggcccctgaagcccggccgcacccgggccggagctcgccctccctcagcccccctccaacaggaggaggcggaggcggaggcgatggcgactcctccctctcctcgtaggctggtgtgtgctgcggctgccctcaccctcgagtagagagagaagctactcaattctgtagtctctcgctcacgagtctccagtgaaaagaagcaagagaattgtgcggcatcatctttaggcacaagtgaaagggcagtagaaccagcgcagcttcactttcccttctccaacatggcctcgagggcatggggagaaggaggaggtttccgctcgaccccgcccgcgcctcggggcgggccaatcatggcgggcagctcggcctgcgcaagcgcgctgccagcagggcgcagcgcaggctcctccctctctcctgccgggggccggaggcgg

SEQ ID NO: 2179 - DNA, 668 bp, Homo sapiens; identical to SEQ ID NO: 2177
  source 1..668: mol_type = other DNA

SEQ ID NO: 2180 - DNA, 617 bp, Homo sapiens
  source 1..617: mol_type = other DNA
cattaggagccggtggtaggtggcccgcaggcctcgggcaccggcggccgacatcgccgccgagggatcgttggcagccgggtgttctcgtccctggctgacaacgaaggggagctagtcacacgacgactcgcgtcctgtgaaccgaaaagctgcggcccgcgccccgcgaaggttgagggggcggaggctgccgactgccagcccccggtccgcctccggcccccggcaggagagagggaggagcctgcgctgcgccctgctggcagcgcgcttgcgcaggccgagctgcccgccatgattggcccgccccgaggcgcgggcggggtcgagcggaaacctcctccttctccccatgccctcgaggccatgttggagaagggaaagtgaagctgcgctggttctactgccctttcacttgtgcctaaagatgatgccgcacaattctcttgcttcttttcactggagactcgtgagcgagagactacagaattgagtagcttctctctctactcgagggtgagggcagccgcagcacacaccagcctacgaggagagggaggagtcgccatcgcctccgcctccgcctcctcctgttggaggggggctgagggagg

SEQ ID NO: 2181 - DNA, 335 bp, Homo sapiens
  source 1..335: mol_type = other DNA
tgagatttcattttcttctctttacttgaaatcaaaaacaaatgagagcaacaaacactttttaactagcaagtggcaaaactggaaagaaaaaaattttatgatgttgtttgccgtatcagacctttactaagtacgtccatttttaagaaaaactttttagttgactcgggcgtgacctgctatcacttttaggttttggctcagcgccgcaaaaacagtttacacggatgggtggtcaacgcgtcgcagccgacacctaaaccctctctaacttttgctctaaacggctcctggaggtccggtctccgggcgccccaggcggcgacctcagc

SEQ ID NO: 2182 - DNA, 558 bp, Homo sapiens
  source 1..558: mol_type = other DNA
aaagaagaaaggttgagtaccctatggtacttcataatgttacctactatgtaataatttaaaagacagaatcaatctatttttactgccatagtgaaaacaatgtttacaatatgacaatcaggtgtctcttacacacacaaacacacacacaccccagcatttgtacatgtacatatgtacttgtaagaatgcaaacaaaaaggattcagaaaacagaaaatattatttctgcttcatttttattgagtttttataaacaaaatgtattcgtattttacttgagacactaaaaagaattaaaaaattgcatgctaacttttcttaaataatttacaaaccagaactgttggttgtaatgagatttcattttcttctctttacttgaaatcaaaaacaaatgagagcaacaaacactttttaactagcaagtggcaaaactggaaagaaaaaaattttatgatgttgtttgccgtatcagacctttactaagtacgtccatttttaagaaaaactttttagttgactcgggcgtgacctgctatcacttttaggttt

SEQ ID NO: 2183 - DNA, 447 bp, Homo sapiens
  source 1..447: mol_type = other DNA
aagaaaaatctttgtgataaataatgcatttgataatgagcagcaggagaaaaaaagtgttttctgttgaagagttcattgctcagtatgaaggacatctttcgcatcataccaattttcaaaagtgatttacttacatgacctcatttaaccttttcaactctacagataggaaagtatgagtatccccattttatatatgaataagctgaagtcagtgtaaattaaataaatatcagggatttcaaaataagtgtctaaaatactattaagaacagaaagctttaagctccttcaagtgtctggcttgccgcgtgacctagactcttaagtggagcgtcagcttccagtttgagcaatgtgggtgtttggcaggtgccagacagtaaattactgttctaaattgtgcctcagtggcccaataatattataattaatgtatttata

SEQ ID NO: 2184 - DNA, 316 bp, Homo sapiens
  source 1..316: mol_type = other DNA
gactaaagcttaaatctttcaacagattgccgatcagaaaatctttgaatccaatatcttccatatattgatattggttcagaataaatctctttaaaaccttttacagaatttgttttttttccattaacaaaatcatctcattttgagaaatcgttagagaagcgctttgcccaaggattcacagagtggctagtggcctacttctttttttgacctcaaaacagaaaaatttcctctgtaatcactaacacatgaggtaatcttttttccggaacgccggaacgtaagagcagagcccgcgtccgggtcggcc

SEQ ID NO: 2185 - DNA, 390 bp, Homo sapiens
  source 1..390: mol_type = other DNA
gcctcgcaagtagcttggattacagatgcccgccagcatgcctggcttacttttagtttttttaaggtcagaaaaaaaaacaattgtacaaacacaaaacaatttaacaatctattattccttagcccctccggagtagctgggcttccaggcacgccaagaaaatcttttcccggagccttgcacgtggtaggtgctcggcggatcaagtagggcgagggagcgcggcccgttccggtttgaaactggtggtcttcaatcccagcccctccggcccgccgcgccccccgggaccaaaacaagcggaggcgagcgcgggcgcgcggggcatgccgggagccccccggtgggcaggtgcctgggcggggcgcgccgcggttggcgcctggg

SEQ ID NO: 2186 - DNA, 414 bp, Homo sapiens
  source 1..414: mol_type = other DNA
gcctcgcaagtagcttggattacagatgcccgccagcatgcctggcttacttttagtttttttaaggtcagaaaaaaaaacaattgtacaaacacaaaacaatttaacaatctattattccttagcccctccggagtagctgggcttccaggcacgccaagaaaatcttttcccggagccttgcacgtggtaggtgctcggcggatcaagtagggcgagggagcgcggcccgttccggtttgaaactggtggtcttcaatcccagcccctccggcccgccgcgccccccgggaccaaaacaagcggaggcgagcgcgggcgcgcggggcatgccgggagccccccggtgggcaggtgcctgggcggggcgcgccgcggttggcgcctgggcggctgggcggctgcctagcaccc

SEQ ID NO: 2187 - DNA, 313 bp, Homo sapiens
  source 1..313: mol_type = other DNA
tctcctggataatatcctgcagagtgtttttctaaatttttttcaaagttttcaactcagagtaatttggtgaggaactgcgttagttttccttctaacagacaggaccctcagctgcaggtctgttagtgtgcccctgctgggggatgcctcccagttaggctgctcgggggtcagggacccacttgaggaggcagtctgcgctgtcagacacgtttaagtctgcagagtgccctgcccccagaggtggagcctacagaggcaggcaggcctccttgagctgtggtgggctccacccagttggagcttccca

SEQ ID NO: 2188 - DNA, 466 bp, Homo sapiens
  source 1..466: mol_type = other DNA
tggtgaggaactgcgttagttttccttctaacagacaggaccctcagctgcaggtctgttagtgtgcccctgctgggggatgcctcccagttaggctgctcgggggtcagggacccacttgaggaggcagtctgcgctgtcagacacgtttaagtctgcagagtgccctgcccccagaggtggagcctacagaggcaggcaggcctccttgagctgtggtgggctccacccagttggagcttcccagctgctttgtttacctaagcaagcctgggcaatggcgggcgcccctgccccagcctcgctgccccttgcagtttgatctcagaccgctgtgctagctttttaagccggtcggaaaagcgcagtatcggcttcccaagtgaggcaatgcctcgccctgcttcggctcgcgcacggtgcgcgcacccactgacacccgtcttctgcgtcgctcacgctggga

SEQ ID NO: 2189 - DNA, 617 bp, Homo sapiens
  source 1..617: mol_type = other DNA
ggaagtaattcagtgtatattaatgaaatcgaccttatagttctgatctttataataagttataagaaaatggtttaatttgtatgtgtatatatttactcgaagtagaaatatgaaaagatatttaaattggtgttaaaacagcatttaaaattaccacaattatgagaaaaaaatattgaaaatgaaaactgtcagatggtaagattataattttatttcttttttaatttgaaataaattggtacagcacagcttttcaaaagcttctataaatgtgtatgttaagttgtaataaagcaaacacatgcatgtagacatgcttaaacagttatttaattgttgtggcagcagcctctcttcccctcctgagagagtcaaagggtggcatcagggactcatgatccatggttgtggaagcctcatgtcacactggatgtcacatgaggtgggatggaacggcatgaacagccttcaggcatgtctatgaggagacaacacaaccacgttttcttttatgcatgcatttggtttaattgacacattaaccacagacggaaagggacattttttttttttaagaaaaataaaagcatcagtattgcaaagactttcca

SEQ ID NO: 2190 - DNA, 590 bp, Homo sapiens
  source 1..590: mol_type = other DNA
attgaccttacagttctgatctttataataagttataagaaaatggtttaatgtgtatgtgtatatatttacttgaagtagaaatatgaacggatatttaagttggtgttaaaacagcatttaaaattaccacaattatgaaaaatattgaaaatgaaaactgtcagatggtaagattataattttatttcttttttaatttgaaataagttggtacagcacagcttttcaaaagcttctataaatgtgtatgttaagttgtaataaagcaaacacatgcatgtagacatgcttaaacagttatttaattgttgtggcagcagcctctcttcccctcctgagagagtcaaagggtggcatcagggactcatgatccatggttgtggaagcctcatgtcacactggatgtcacatgaggtgggatggaacggcatgaacagccttcaggcatgtctatgaggagacaacacaaccacgttttcttttatgcatgcatttggtttaattgacacattaaccacagacaaaaagggactttttttttttttttttttaagaaaaataaaagcatcagtattgcaaagactttc

SEQ ID NO: 2191 - DNA, 298 bp, Homo sapiens
  source 1..298: mol_type = other DNA
ggttaactgtacattatgtattttaaaaggtgaattaattatatgtaaattataactcaatgaaaagaaaattcagggggtttatttagattaaacccattaatgagttctcagaactggtatacccgcgcagccttacagaaatcctagatggctctgttacttcaatttctacagggtagagcagcagttggcttttataatctagatacaattgattacatgctgctggtatattcctagaattccaccttaaaatggctgacatctcagcatggaaaagttttgcttaagcaat

SEQ ID NO: 2192 - DNA, 572 bp, Homo sapiens
  source 1..572: mol_type = other DNA
ctaggttttcccaaaggtcctttggctccaagaattttacaggacaactcactgcgggctaccgccctgaggccgcccacaaggggcacagccgggcagtcaggaaccggggctgccggctgggctggcctgcgcaaccgcagtggcggggcggagctgggcagagtcctcgccagtccggcgtcccggagtgaccttcccccaccccgccagcgcccaggaggggtggacccacagcccagggaggcaggcagaggcgtggaggctgggccaggactgccgggctggggtcctcgaggctccgggcgacccaggtgcggatcccccagccacggaaggggcggttcacgcccagccgggagctgggagggggctgcgcggcgctgcctgcgcgtccctcaccgccgcccccgaacgccccgcgcccagcgatccaagcggcccctctagccccggcggctcctttgtgccggccccgaacccgccctctcgggccgagtccctgcccctggcgccggcgattggccaccgggccgctagagggcggggcgcacggccgccggggcgcggta

SEQ ID NO: 2193 - DNA, 187 bp, Homo sapiens
  source 1..187: mol_type = other DNA
tacaactcagttcaattagtgaacccggggaagtcgaaacctaagtttgtctgaaaaagtcttcccggaacaatctttccgaaaaaagcggacagatttctactttaaaataaaataccgcttaaacttccgggccagctgttaaacaaacggacaggcgacggggcggtggcgtcccacgcctcgt

SEQ ID NO: 2194 - DNA, 780 bp, Homo sapiens
  source 1..780: mol_type = other DNA
gcacagccgggcagtcaggaaccggggctgccggctgggctggcctgcgcaaccgcagtggcggggcggagctgggcagagtcctcgccagtccggcgtcccggagtgaccttcccccaccccgccagcgcccaggaggggtggacccacagcccagggaggcaggcagaggcgtggaggctgggccaggactgccgggctggggtcctcgaggctccgggcgacccaggtgcggatcccccagccacggaaggggcggttcacgcccagccgggagctgggagggggctgcgcggcgctgcctgcgcgtccctcaccgccgcccccgaacgccccgcgcccagcgatccaagcggcccctctagccccggcggctcctttgtgccggccccgaacccgccctctcgggccgagtccctgcccctggcgccggcgattggccaccgggccgctagagggcggggcgcacggccgccggggcgcggtagggcgcagccaatcctcggctcctggcgggagtgccggtggcgccccgcacctaccccgggcctgtctctgcagaggtcaggggaggcgggggcccagcacacgtccccagtggcagcgggagcggcagctacgggttcgcggagcccccgaccccccaagggctagaggagcgctcggcggaccagcccgcgagcggctgcgcgcccaccaataggtgcggggctcggagccgcgcagcctgcgccgtccctccctccgcccccgccccgccgccgccgccgccgccgcctc

SEQ ID NO: 2195 - DNA, 222 bp, Homo sapiens
  source 1..222: mol_type = other DNA
attaaaataacctataggcttatttaaaatgcaaataccgaaatttctgtttaaaaaaaggcgtggggcagtgctctgccacttaataaagcgcgttaatgtgaattgatgaacaatgcaaacacataatgtttgttcaaaacagtactctagagacttagtaatcactgtcgcacgaggcgtgggacgccaccgccccgtcgcctgtccgtttgtttaaca

SEQ ID NO: 2196 - DNA, 222 bp, Homo sapiens
  source 1..222: mol_type = other DNA
ggcgtggggcagtgctctgccacttaataaagcgcgttaatgtgaattgatgaacaatgcaaacacataatgtttgttcaaaacagtactctagagacttagtaatcactgtcgcacgaggcgtgggacgccaccgccccgtcgcctgtccgtttgtttaacagctggcccggaagtttaagcggtattttattttaaagtagaaatctgtccgcttttttc

SEQ ID NO: 2197 - DNA, 568 bp, Homo sapiens
  source 1..568: mol_type = other DNA
cctagagtaaacctagggtctacttccagctttggtaagtaactctacaactctacatccattaaaggagatttgactaaaattccttcaacctagtgcactcaatattacaattcattttaaccttccattttaaaagaccttaagtctataacttgaagaatatctaaaaatttaattttacattgcctctcttggagaaaaggtgctctccatcacatcaagtgatagatttaaaaataatccgaacacactggattgtactgaggaaatatttttagggaatggatagttgttaaaatcatctcaactttcaccacaatctaaattcatcttgctttgcctttatacataaagataagcagaatttgagaaaattctagttgaccattttgacatgcctcaaagctaaaaaggtcaaaaatatggtaactcattagcaatttgcttatctactaatgaaaactaaaaactacttttctacgttaactgtgaagcacataacatatagaaatatagttttagaagttgtcctaagaaattctaaataacgttagtgatgcgtgga

SEQ ID NO: 2198 - DNA, 262 bp, Homo sapiens
  source 1..262: mol_type = other DNA
ggcttcctgaagagtaatgctaagcttatttttaagaaatttaatctggcaaagacctaaaattgctagctggattgccattgcaattttgctaaattaacattctacaatgtgtgtttacgtttcaaaaagtagcttagaaagtttaaataacctgccaagataaaccaggattctgccttgctcagaaagcagagctccgtaaaacctggagcccgatctcccggccagcgggaagcaggttgccttgcctgctgcaagc

SEQ ID NO: 2199 - DNA, 433 bp, Homo sapiens
  source 1..433: mol_type = other DNA
gctacaaatactgcacaggaaaaattgctttaaatgctgcatctttgcagtctggagagtcttgtcatgctttgcccttgaaaactatgccaagacctcttttgtgtttttaaatgaagaaatccatcatgttttgtgattgctgtaatgacttgttttctttgtatcatgcttgcaaaaagtgacgaaataaagttaagttcagtgaccagcttgttcattataggaaaggtttaacgttccccctccccaaggtgaaatctactaagtctctcaggagcggaaactgaattccttccgccagctggccgcctcactagagagagctccgccgcaagccgccgcttgcgcgcttgagccctgggacgtcagaggcctggcgtgctgccaccgccccgagcaggcaagtattcccggcgtccgctgtgattgg

SEQ ID NO: 2200 - DNA, 333 bp, Homo sapiens
  source 1..333: mol_type = other DNA
gctggtcttgaactcctgacctcaggtgattcacccgccttggactgggattacaggcgtgagccactgcgcctagcctcttagtttacagtatcaggaaaaattattattgtcatccttatttcacagatgtcaaaactgcccgctgctatgctgcagcttagctggcgacagaaaatagtgtttcagtgcccagtaacagggcacaatactcttttcctcagattaaaagagccatctgctaggcaggcctcaggtcggctcctggtcactgggagctgtgatctcacagccagaggctgctgctgccgtttgcaagaactgcaggggagc

SEQ ID NO: 2201 - DNA, 472 bp, Homo sapiens
  source 1..472: mol_type = other DNA
tacttgattttgctgtctgagatcaatctgaaaagtaataataatcactaacatttgttgagcatcaattgtgggccaagtgtcatttcaatcactctgtacactgttttggcacatcccatgggaagaggaaaataaaaaggtatctatttgtatacctttttatttctgatataagaagcagaattcctttcacatgacctatgtctatttaatacgtcattttgaaacttaccaataaaatttcccaagcgccagaaaactgttagtggcttaatagtaaatcactgacatgtcataattaaaatcacattgtaattaattcaaagcatgttttccaaatgtactactttaaattggagcttatatcataatccaaggaaacctttgtgtgtgtactgttcccacattgctcagcctgggatatccaggagtaatttcttccatggaagggggtgaccccttgcctctt

SEQ ID NO: 2202 - DNA, 307 bp, Homo sapiens
  source 1..307: mol_type = other DNA
atctttagaatggggataataatcatatctatagcagagagctgttataaagattaaacaatataataaatatgggcagagtttttgttgttgttattattattttcctaaaaatgcaaatctgatttgcatttgactcattatgcagtcttataaaaccatctcattttatagtccaagaatattaaaggtacttgtaggctactgaagttttgcaaacatcataaatatgtctgaaatgcagttttgatttgtagtatttgcaatttccaagggccagagaatctagtcacattactttctgatc

SEQ ID NO: 2203 - DNA, 400 bp, Homo sapiens
  source 1..400: mol_type = other DNA
tgtcagcctcccgagtagctgggattttttcactgaacaaaccatgaaactaaatatctatttcccatttttctttttttaaaataaggcattattttaaccatttgagtgttagatattatttttagataatattttaatttaggcataactgccgtgcaaaatctgaagattaatatctaccttgtgagtattggttatccacagcgtagactatgaacctattgtttctgaaattctaattacaacaagcaaagttttacaactttttaaagacatagactttatgttattataattaaaaatcatgcatttttgtcatattaataaaattgcatatacgatataatttggatgtggacaatatcctcctattattcacaggaagcaatccctccta

SEQ ID NO: 2204 - DNA, 259 bp, Homo sapiens
  source 1..259: mol_type = other DNA
ctttcagaaagactccagcctaaatcatttttatttactgaacatcttttaaagatttcacaccacagaactatgctttaaaagctcagagtatctcgctttacctcaaactattaagagccagagctatcgtcgagaaaggttcgcgacccgcccacacccttctctcggggcaggacggacggcagttcccggcggcatagctcctctggcgtgagcccgggtccctcaaggccggaaagaaagtcgggcttctcta

SEQ ID NO: 2205 - DNA, 318 bp, Homo sapiens
  source 1..318: mol_type = other DNA
tctgtcttttacagaagaggtgtaaattcatacttcactccaattagcactgcagtagaagcaactttattgagaatcttctatctactgcatctgcctcaattttcacagttctggcaagtgggatctttgggggagaggcgggtcacccagtcccgcggctaggaacgcgcctccttggagtcacttccggctgcaggtcccggaacaaatccgaccccagaagtggggacttctggccctcacctccccatttgaatgtaatgaggggctagagaagcccgactttctttccggccttgagggacccgggctcac

SEQ ID NO: 2206 - DNA, 249 bp, Homo sapiens
  source 1..249: mol_type = other DNA
tttaaaggaacattattagttaaccaaagcagctactgagtgggttttaatcttgaaacttaagaattgtttatttctggagttttccatttaacatttcaactactgcattaatattaaaattttcaaatattactttttgctaaatgaaatgtgattcagggactaactagaccactgggtcgtcgcggcgcccacacttaagatggcaccggcctgagactcagctgtgcggccaggaaggtgggc

SEQ ID NO: 2207 - DNA, 395 bp, Homo sapiens
  source 1..395: mol_type = other DNA
ataaaaatatattttgttgggtaaggactgtatttctatatttaatataccatgcagtgcttacacataacggataatcaataattgcatcaatgtactacatttttggtgtttggcacacagccaaccaaataaatgaacctatatcatttgcatagacataatagctgaacccatggttctttcctaagctaacaattgcctgcctcagaagaagcaattctaaacataccttgagttcaggataattgttgtacaacgcagagctggactgctgtatagcattcgctaactaaaaggttatcggattggggcggtgactacggagccactccttcggtgcgtcaaactctgaggccaccgcctcagactgagcctgcgcagagcaagcgcat

SEQ ID NO: 2208 - DNA, 308 bp, Homo sapiens
  source 1..308: mol_type = other DNA
agaaattttttttcaaagttttcgctggtgaggaactgcgttcctttggaggaggagagtccttctaacagacaggaccttcagctgcaggtctgttggaacctgctggggggtgcctcccagttaggctgcttgggaggcagtctgccaggacatttaagtctgcagaggttactgccctgcccccagaggtggagcctacagaggcaggcaggcctccttgagctgtggtgggctcgctgctttgtttacctaagcaagcctgggcaatggcgggcgcccctcccccagcctcgctgcttgcagtt

SEQ ID NO: 2209 - DNA, 190 bp, Homo sapiens
  source 1..190: mol_type = other DNA
tccactttggaagcccgaggctgtaatcccagctactcgggaggctgaggcgtaagaggaaagttacatattataattattcactcatcaaaatcctaaatctgatcatttcctgagttaatctgaaggagtttccttaggcagtttgtcaggcactgctgaaggcagcctccgcggccggggaaaaacc

SEQ ID NO: 2210 - DNA, 426 bp, Homo sapiens
  source 1..426: mol_type = other DNA
cacgagcacgtgcggcgctcagcttaggctctcggaggcagctgagttccacccgcgtgcacgcgcgcgtccctggctcagaagcgcacagcgagcgacttgcgcggcgcacagtgcggcgctggcagggctctgggctcccggtcggggaatgatgaaaaagtctcctccatcccagttccttaattaaatgcatggaaagaaccgaggtctggtttcaatctacagccctttgatggcatcaaatccagatcagagtcgagcctcttgactatatttaaagaacataaaacgccacaaataagcacttaatattttactgagtcgtcatacagtaactcatttctaatgagactgttaaagctgtgctcagcacctctctgtcttctgtcaggttagggctccgcagacggacgacagaggatt

SEQ ID NO: 2211 - DNA, 346 bp, Homo sapiens
  source 1..346: mol_type = other DNA
caggttagggctccgcagacggacgacagaggattatccgtagacttagatgctccgcccctctctgtcctcctgccaccacagccaggctggacgcactgcctctgggagtgctcctgcctgcttcaaggaatctgggcagcgggaccgggagaaagattataatatatatttggagtcctttcttccagtacattatttaataggggaaccaaaaatagagcagaaaatttttttggtggattttttccaaatttccccacagctgttatcaaaacatcttccccgtgatattattgcaggggaatgataattagacctttagaaatccaaaggggctctcttg

SEQ ID NO: 2212 - DNA, 203 bp, Homo sapiens
  source 1..203: mol_type = other DNA
cttccccgtgatattattgcaggggaatgataattagacctttagaaatccaaaggggctctcttgcacgtaattaattcttaatttttttttttactctttacaaaaagtaaagtgagaatctactgagaatccacagtttcttgaagatgttttaaagctggaacaagccttctataacttttttaacctttaaaaaaacc

SEQ ID NO: 2213 - DNA, 179 bp, Homo sapiens
  source 1..179: mol_type = other DNA
cacgtaattaattcttaatttttttttttactctttacaaaaagtaaagtgagaatctactgagaatccacagtttcttgaagatgttttaaagctggaacaagccttctataacttttttaacctttaaaaaaaccgtgcacaacgctctgctctacagaagggggtcccccaccctc

SEQ ID NO: 2214 - DNA, 472 bp, Homo sapiens
  source 1..472: mol_type = other DNA
ttgttaaaaaaaaaatagccagacaggaattaatagtgtagttatccctattttattaatgagtaaatcaacgattggaaaatgaagattactgtcttcatgaagggtaattcctcaaaattagacatataccagtttacactaagtatcacttgcttaatgaaggagttaacttaattctaagtgacatcaaaatatagttgataggaaaactttttttgaaattctactatatttcgcagtttattttgtctaactgccaacataattttacctggtactaattttacctggttcctggtactaatagatcaatttgctgtgaccacactccttattgggctatctcaattaagtagctaagtttctttgactcccaggccaagggtccaagagtataaccagcagcttgtgtttaccataatgcctacagtcccatcaataaatgagtatctctttaagagcagctcct

SEQ ID NO: 2215 - DNA, 408 bp, Homo sapiens
  source 1..408: mol_type = other DNA
cgtctcagactcgttagtctgctaataaatgttaaccctaataactgaaattattagcagaggtaattatccacataatctgtctgttcatccaggcattgcaagaactgaatatttgttagataattaaaccatcaactaaatgagataatattgatatactagaaagttaaaaaatcaagttggaaattagactattccatttctgtttgtgtgtatgtatctacaaataggtggaaggatatactatccctatatgttcatttgtgaatgaatatttattacatcattataaaaaggatttttaaactatctgtatgtttaagagtatatgttgctactatgtaagagtatatgctgttactgtaaagacattgcattgactccttggaggaatacggaactcct

SEQ ID NO: 2216 - DNA, 358 bp, Homo sapiens
  source 1..358: mol_type = other DNA
agtttgcagcggcaagccacttcttgcagtacttcttggaggaaaatttcactttttaaattgaggaaactaaagctgagaaaagttatacaatttttccaacattcccaagtgcttgggcaatcagctgcacttaaaaagcctttacaaattgagtttactaatgtgagtaatatatgattttttaaaaataataattgtccctaaaggtaactgttaacataattgtcttattttattctcatccccttaaagaataaaactgtaacttagtttatagtctgtaagcactgttgcattaatcaacaagttaaaatataaacaacggctaaccttgggtttcaaatttaacattcct

SEQ ID NO: 2217 - DNA, 564 bp, Homo sapiens
  source 1..564: mol_type = other DNA
aacacttcaaggaagctactattgttttctttatatttgtgatgcacagaagggttaatctgtccaagattacaatagagccgcgctttatctcaggcagcctggatccagagcctggttgctcttacacatgtgtgttattaacacatggcctggtgccagaagattctctggcccatcccagtggtgaagggagggatggctttgcatgcctacctttctaccactggtgaccatcactggtgacctgtgaaagggacacaccaacagcacagctggggccctggcattgtgccaggggcaggatcacacagggcagtgccgcggtagcacccgtggtgccacaggtgtggtggctcctggtcccaactccaccccaccagctgctgtgtggtgttgtgtcaggtcaccacaccaatcggagaattgtgtctgacaaggtgaccttttcctagtcctgaagtgcaagactttatccagtaaaaggtccaattccagcgccttgacaactgtacgaacatttggcactggtggcacagggttaaccagtgacctgaaaaaagc

SEQ ID NO: 2218 - DNA, 468 bp, Homo sapiens
  source 1..468: mol_type = other DNA
tggcttccagcttcatccatgtccctgcaaaggacatgatcttatttctttttatggctgcataatattccatgatatttttcaaaagaaaatatttgctgccaacagaagattttatattaaaatctgtatttgcagcttttactgaaaagaacctaaggccttgccatattgggctcattttctcaaataaatttagctgaactgaatagacagagaaagtactttccagtcagaagtggtttagaaattgttcagtgaaccatgttggaaaatgtcctggtctgttatattatcttacaagcacacagtggaaggaaaaacagttaagttttctatttctgccaaattaaaatttgtaagtcctgaactttaaaatcacatttctggggttggagaactggtcatctaaataactttcaaaagtagaactcctgtttcgaacccatagctttagggctttgccag

SEQ ID NO: 2219 - DNA, 369 bp, Homo sapiens
  source 1..369: mol_type = other DNA
atccttttgccttgacctaccaaagtattagtattaattaatattagtggggaggtaagaaatccttgaattttaaatatgtcataggtagtcataatattatcatgttacacttgcctagtaaaagccagcatgggtgaatcttactattcaacggagctgaacactgtgagagatgtcatttcactgaggcttattatcaacttgtaaacgtggtcaattcaagacttcttagaaaggtctcaggtccaagctttgtcctgaaaagataattctgattgcagacaggaagcgccagcaccctctgtcggggttgggccgccacggaggcttcacactcatgacgtagtacgtaggggctggctagcc

SEQ ID NO: 2220 - DNA, 524 bp, Homo sapiens
  source 1..524: mol_type = other DNA
aaaacaaccgttaggttgatatgtatctacaacttaattaaattgaagggaaatagcatgagacataatttttcttttttgcctataaagatgaggattctctttgtatttgaatgcttatgaaaatgttatttatttctaacaacttctcatatgtaagggaactttatatatgctttgaaaaaaatggatactattttttgaatatttagtcctcagtgatgaatgttttaccttttacgaaatgaagagaacatagaacgttgtttctgttctaaactgttaaaatgtgtcagtcatttcaagcatattaaattggataatatatctttttaaaatagacagtctcagtggggttaacccttattctctatgatagagttaagcagttataaccatatataactgatatgtttcacaagtgcatgatagctttattggaatttgacagttaaaaagttctatgaaattatcattgatatgggaagttttttcagaatttctgtgaacatttgaatttactg

SEQ ID NO: 2221 - DNA, 261 bp, Homo sapiens
  source 1..261: mol_type = other DNA
gtgcctggcacagtatttcagacagttaaaatactgtatcaacaaaggacccatagatactgtattaattttaaaagatgtgtagtgaatatgattcaatgagtaatttcctgaaggctttcaggtttcctatctaaagggaggagcctgagatctcctttcttcagacgcactccggcgcggcgcccagtcccgagcggttctcggaagtgtggacaaccagtggtgccctggacccgccccctccgcctggcgccaggc

SEQ ID NO: 2222 - DNA, 499 bp, Homo sapiens
  source 1..499: mol_type = other DNA
ctaaatttaacattttattccattgcgaatagagccataaactcaaagtggtaataacagtacctgtgattttgtcattaccaatagaaatcacagacattttatactatattacagttgttgcagatacgttgtaagtgaaatatttatactcaaaactactttgaaattagactctctggatcttgtttttaacatattaataaaacatgtttaaaattttgatattttgataatcatatttcattatcatttgtttcctttgtaatctatattttatatatttgaaaacatctttctgagaaatagttcctagcatagtgcctggcacagtgcaggttctcaatgagtttgcagagtgaatggaaatataaactagaaatatatccttgttgaaatcagcacaccagtagtcctggtgtaagtattgggatgttctttttaaaaagaaactccaaacagacttctggaaggttattttctaagaatcttgctggca

SEQ ID NO: 2223 - DNA, 296 bp, Homo sapiens
  source 1..296: mol_type = other DNA
ttcgttagtacatttttacataaaaataaacatcaaacaaaagaagaacaactttttggtaagagggtggtgcctggcacagtatttcagacagttaaaatactgtatcaacaaaggacccatagatactgtattaattttaaaagatgtgtagtgaatatgattcaatgagtaatttcctgaaggctttcaggtttcctatctaaagggaggagcctgagatctcctttcttcagacgcactccggcgcggcgcccagtcccgagcggttctcggaagtgtggacaaccagtggt

SEQ ID NO: 2224 - DNA, 357 bp, Homo sapiens
  source 1..357: mol_type = other DNA
taagtaactcaagttgcttggagttctgactctaagctcagtgctattataattactggtatatttgattcatgttaactgtaaaatgacattttctaagtttcacaaatattgaatggattatctgtaaaagctatgcaatgatataactagctaaactctaattggcagctgctcatctgtaatccttagctcaggagttcagagctgctgtgcgctatgagtgtcactgcactccagcctgggggaagaagtgaggggtaggtgggccgtttcagtccaagttgctgacttggacactttcagaaccttcaactagcacgtgggcacctacgtagttttaaaagctttccaagt

SEQ ID NO: 2225 - DNA, 350 bp, Homo sapiens
  source 1..350: mol_type = other DNA
gatccccggagactgcagtgagccatgactgcaccactgcactccagtctgggcgacagagacagaccctgtctgagaagcttcctcagggtattagcatgagcatgtgaaagtacagtatgtttatcaaacacattttctgccgcgctccgcccttgtgcggcgcacgatcggagtcgcccaggaagcaagcgcgctctccgccccgcctggagggagggcccaaccgttctcacagaggcccggcctcttccgccacaactccggcccgcggtcccgccccgttccgtgaatggtcggccggcgtgtctgcgacggagcctccggaggttgggctgggccggccgacg

SEQ ID NO: 2226 - DNA, 407 bp, Homo sapiens
  source 1..407: mol_type = other DNA
agtgctaaacttaattacaaaaattaacatggcatattttgccttctcttgagaatttttgtctgaagttgaagaactctgtattttgaaaattaaatctatacagaagtaggacctggattcaaattggttattaaaataattaaatgggataacctaagtaaaggtttgttatttcattgaacatgttatgctcaacaagttatctagctaatatatgcaaagttttgcaaggccaggctcttaaaattattttcaaattgtgttcttttgttaagactaaaattggaaatagactaatattctcagtgctttttaactcattgagcctgggtgaggcaaagcattggtcagctcagtgccctgttgacaacacaatgtgtctgagtcacagggggtcaagtgac

SEQ ID NO: 2227 - DNA, 298 bp, Homo sapiens
  source 1..298: mol_type = other DNA
ctttggtcgtaaatggatgtcacagactccaacaggcctgccaccctgggaggagtcatctggcagcggtgccccggtggtggcggcggcggtgctgcgctgccgctgctgctgatttcatggtggcctctgagccttggccacagaacgcagaggccgtggcatctggccgcagctgggctgcagtgcgtgcgcgcctggcctggtggtccgatgggaagcccggggcggggcagccgcggggcgggggcggggcgtcgcggagataggccacgcccctgcccgcccgcgcaggcgc

SEQ ID NO: 2228 - DNA, 643 bp, Homo sapiens
  source 1..643: mol_type = other DNA
catttgatttttaaatcaatattcttagtggatagttgtcaaagagaaggttttcttcaattcattttttaaaagtgtttggtacttttccattaatatttttatatgcagtgttacacagtttagatgtataaaacttaaattaatgacaaccttactcagttttccttaacaaagaagtgtgttcccttccttacattctataggcaagaaaaaagagggagtaaaattaaattatgctaagatttgttaatatgtatttagtaaatagtatttctatgtttcataatatacttgaaaaattactccctttttcagagttgatcataactcaggatagtcaggaagagccaaactattatgcctttagtaaacataatattccttatatattttcattcctttatttatgcatcaaacatttcttgaattcatgataatgtcctggaccctgggactaaataagcaattacaatgtagtgctacaataagagaactgttctgacttcagtactgaagcagctatgagttttagtatactgttatcaactttacccaacacatgctaatgttccagaacattgtgattttgacttctaagacaatcagaaactgagcttttcattctgaatggaattatatg

SEQ ID NO: 2229 - DNA, 376 bp, Homo sapiens
  source 1..376: mol_type = other DNA
cacacttaaacattgctatcattacgatggccaaagtcagatagtgaacactttacaaaccatttttatatttaactctttaatgtcatctccattttactgatgaagaaatcaaagctcacttcttttaggaggtaaagaggaactatagacaactggatattgatctctgacaaatacaacttatctgagccttagatttgtcctccaaaaaagagagtttcatgagagcagcaatttttgtgtgttgttacatgcaggcattcaatcagtatctgtggaatgaacgccagtctccaggagaggagaccggaggtccttcgagggggcagcagtcacgtcgcgatggttccagccggggtgccctcgctgcggc

SEQ ID NO: 2230 - DNA, 189 bp, Homo sapiens
  source 1..189: mol_type = other DNA
tgaatcaggcctctgattcaactccataatcccctaagcctctgagaggctgtagttacttaggaacggagaaggtttatcatgttctgtcagtcgatgctgctcccaggaccaacagttcccttgcaacgggccccgtcactatctctccccacagggcttggctgggaagggcagtgctgcaccctg

SEQ ID NO: 2231 - DNA, 359 bp, Homo sapiens
  source 1..359: mol_type = other DNA
acttggtttccgctgcaacctcaatggggcagtccattgccacagggaaagggaagctgatcagtctcgcagcgaaactatagacttctccaaaggcccttgcgcggactcagcgcgcgagctcctcccggctttctgaacgcaagccagcaagtgggcgggcggagcggcgagagcatctgctcctgccctccggcttctccgcctgcgacgtcgaagggggcgtggcctgcgcagaggcggcgccgcgggacttgggtgacgcgtccctttccagctctgtcgcggccccgccggcgattggctgttgagaggcgagtacgcggcggccgttggtcgctggcctcacggagcaaggc

SEQ ID NO: 2232 - DNA, 446 bp, Homo sapiens
  source 1..446: mol_type = other DNA
taaattagtcaggtgtagtgacttatggcactccagcctgggtgacagagtgagactctgtctctatttaaataaataagtaaataaataaactggacaaagcagctctgtgggttccactggtgatggcaacagatgttttcctcccattttcagtaaaatttttatagtttaaaaaatacggttctgaacaatttttgttagagttagtgtatatggtagaattcttaaaattatacaattataatgtataaaaaagcatgcaattataattcataaaattatacccccatgctgacctgctctgcaggatcccaggaaggtgagacctgtcggaaacttccaggctctgagcttcttgaggcttctcagcttcagctgcagtgggtgtttctttgagaagcagaatcggtgtttcccttagctatggaaactctataagagag

SEQ ID NO: 2233 - DNA, 572 bp, Homo sapiens
  source 1..572: mol_type = other DNA
gtaggaactgggcagtgccagccaaacccatatttttgggcccaggaagaaaacccaaggtttttttttttttttttttggcaggaaaatatccttctgtaaaataacttcttatgccagaactagattatcagagtttaaaaatgatgaaatataaaattgagcttgttgtatttacaattttttattaaattcttgtaatacacttgatattttctagagactcagaatgcattctatacactagaaattgatgaaacatttttgtgagtatagattttatttttccaggtttactgaagtataattgacaaataaaaattgtgggtatttaaggtaaacaagatgatgacttgattaaaactctattttttccaaactagagatcctagcgctcatgtacatgatatctggagttctcaaactttattttttcttataaaaagtgattttcttatctagaaataatctggaatactttcttagatgataggaaagaaatttttttcccctggtgccaaatgagagtcagcacttaagttataagtatcattttctaacacagtgacaga

SEQ ID NO: 2234 - DNA, 476 bp, Homo sapiens
  source 1..476: mol_type = other DNA
tgtgatgtactcagtaaatatttgcccatttgaactttacattataagtaattttatcatttatttcatttcattgtttattgtctattgatagaatacagaaagaaataatcttcaaagcttatttacatctattcatttgttcattcatggaaaaattatgtacgaaggaaaggagacaaggatacccttctgcttcttttctggtatgcagaaaattaatcatataattgtttattgaatttgcctcaaaaaatgagagaaagattgtccatctaacacagtgtctgacacatagtaggtagtttatttttatgcaatagactacaaccatcccctaaatcttttctatgatttaagacacctatctttaccaagtgacccacaatttgttactggtgcaataagttaagaaaatagcatacttttatgactgtcatttcacagtcactcaaatcagaagcgttaaaactgag

SEQ ID NO: 2235 - DNA, 503 bp, Homo sapiens
  source 1..503: mol_type = other DNA
gtgtgtgcctatgtgctcactcattcaccccaatgatttaatcagatattgtttctcacaatctatctcttccagtcataatttaccctaccttattaaatacatcatgtagtaggagattatccttctagtattttccccatatagttaaaatatttctttcttattcagtagttcagatatacaaacattattaggtatttaaggatgttcttcactgcagaagatgccactggagaaaaataaatctatgaaatgtttctccctgataaagttcaggtaatacaaactgatttctgatggtcttgtctgagattggttatgatcactgtaccacagacagtgcttgtgtcatgctcaggtctgcagaacagtgagcacaactctcgcagaaatggcaggatgcccaagacatcgaccggtgcattcaccagtctgggagccctgagagtgctttttctaacaaccacagtgttacatatttccttacaccatgggatgat

SEQ ID NO: 2236 - DNA, 554 bp, Homo sapiens
  source 1..554: mol_type = other DNA
gtttcccttcacaagaaggaaagctcaagacttatctaccttgtacttggcaaagagtatgttttaaattttatatttagatttcaagataattgtgttgaatattttatggttcataacaaacaataaaaataaataaaagtttagttacattaccctagcactgacattggtacgggaatttttgctgcaataagaaagccactggctggtcagacgtagtcgagcagtcactccactcctcggccgcgagtgggtgcgcagcagggtgcgcgcggacccgtgcagcgcccagggcggctgtgcgaagccgccgcagcctgcgcgcccaggcgattctccacctcaagcttccagggggcaacagtcgcaggcccggcggcgccaccaacagcgaccgcggtagtccagctcgcgccgcgtcccggccccagcccggcccggcccagccccgccccgcgcccagccccgccccgccccgcgcccagcccagcccccgcggcccggcccccagcggccggcctcccgcggccccgcccccgccgccccagtcc

SEQ ID NO: 2237 - DNA, 559 bp, Homo sapiens
  source 1..559: mol_type = other DNA
cggggaagtgatcgtcaatgccggacaacaaaccctcccgcgggcggtgagtttccccccaccttggcgtggccttgcccagccacgccggaggcggggaggccaggagggatcgagtggcccgcgcagggcaggccgaacgggtgccagctcccagcagcgcagccgacgctgagcagaggccacacggcctggcgcgcgccggaaccagtgcgggggaaggccaaccgaggccaggacagggctacgcggtggccacttacgagtctcccagaaagtcgtggaaacgggtattggcctcaaccaaccggttggttctggcgaagaagcagcctgtcccagcgcgcggaggactggggcggcgggggcggggccgcgggaggccggccgctgggggccgggccgcgggggctgggctgggcgcggggcggggcggggctgggcgcggggcggggctgggccgggccgggctggggccgggacgcggcgcgagctggactaccgcggtcgctgttggtggcgccgccgggcctgcgactgttgccccctggaagcttga

SEQ ID NO: 2238 - DNA, 341 bp, Homo sapiens
  source 1..341: mol_type = other DNA
tttcttcaaattgataagaaatatagagtatatatcaaaaatatagaaggagattctgtctacattaatatctttgactatttcagctattatgttgttttgggacaatcaaagattaacaaaggcagttgatcagtcttttacattagaaggaaaaacacgctgttagtattcttctctaacttagactacacttagcttttgaagggaaaagtaaaaatttttggttgtctttgattatacttgtaaaattcatgaattcattctacaatgtcagcaaaaaaaaaaaaaatcagttaaaacagttgtgggtacttacgtaacttgagtgttaaaaaatg

SEQ ID NO: 2239 - DNA, 513 bp, Homo sapiens
  source 1..513: mol_type = other DNA
tacatatttagaacataaatttaatttgaactatattattaactatactatagtattgaactctactgttttatgtagataaaatctgtattgtttttctccttttagctgaaaaagcaagatctggaaatgcatatgcaaatgtagcttagtcaattatagatatcacaaaagaaatctatcatctaaggattaaaaattgttctttggaaacctttataaactttttgccacaatctttactaaaattttccaaagaagcctgggttgaaatgttacttcccattcaattaaaaaattactaaagtactagagaagaaattgtatactgtagaaaatgaaatagaggttcctcttcaaagggtcagaatagatagtaacctctcttagaagcaaaatttactcaaagacctgtgctaatattcttaaattctgctagctgtaataaagaaatcaatatacgcatgcctgaataggtccaagcaagcatgaggtcatactagccaatcaggt

SEQ ID NO: 2240 - DNA, 390 bp, Homo sapiens
  source 1..390: mol_type = other DNA
gctgctgataattggctgcaaccaaaacaactgcctatcacctgatggggggagtttgcttgggccttaggtcaaatattcatttcagaactaggctattcgaagtactccttagtggactcttggtagaaacagtaaagaaatgaatattttccttgtgtgattcatgtgaacattgatataattgctaggttcttgaatttctgaatcaagagggatatagtctccaagtttcttaaaattaagcaaggggttattcatacaatcttttgtagtttttagaatgcaaatttccagaaaatacaacttatttttaaactgtaaaacaaataccttattacagaaaatttactcccgcgctgccggaaccgcggcgcaggaggaggcgct

SEQ ID NO: 2241 - DNA, 321 bp, Homo sapiens
  source 1..321: mol_type = other DNA
taatctagtacatttaagattaccatccttactctgcatgctaaaataaatagtcccgactgttaggtcagtcttgtttctcttcaaaaagtgcttggagatatttaactgtgatctcgacatcaagtatatttacaggaggcgtctgcatttgcctttacagacaaagcccggggcctcctctggctcccgtaggctgtcagccagcgagagcgcactctggcgctccgcgaggcccggccccagcgccccaacccatggggcagctcagcaacttgggaccacatatctgcgaagcgagccctggggcgctcaggcagg

SEQ ID NO: 2242 - DNA, 329 bp, Homo sapiens
  source 1..329: mol_type = other DNA
aaaggccatgttgtgtattctgaaaatctggttaatacttagcctagtatacttaccaggaaatcagcaacagcttgtatcacttgttttctaaatattaatatacggtaaaaatcgaggaaaagataattttaaaaatatacttttttggctctgcttgctactgaaaaaaaatttttttaagaaaatatactcttccctccttaacattaaagttctgcaccttgcacatccatgtgtgcatgcaaagaaatacaaattcttagctactgcctttgctggcgaaaacaaagaagaaaagagtattcaaaagccgcaccggaacccct

SEQ ID NO: 2243 - DNA, 282 bp, Homo sapiens
  source 1..282: mol_type = other DNA
agaaacaagacaaatctctccctgagtcttaaagcatcagtctgcacttccggcgccttctcgagaggctccccgctggggtccaagcgcccttcaacaaaatggcaattttagttgctcggcgaggcgccaaggaggcttcctgcgtggggccgcatgggctggtctctgacaggctcagggagagggacgggttggacttccccctccgcgagcagaagctgactccgcaggagcgtccctcccagagtgaagtcgcagggcccgccccgcgtctgaggg

SEQ ID NO: 2244 - DNA, 269 bp, Homo sapiens
  source 1..269: mol_type = other DNA
tctcctctgtgaactctgcaacagacttctgtagagagaaccccagatcggttgggtggtccttttaaaagtcagttttggaaatacacagaaatcccttaaaattccaggagttcccactctcttctagaaacaagacaaatctctccctgagtcttaaagcatcagtctgcacttccggcgccttctcgagaggctccccgctggggtccaagcgcccttcaacaaaatggcaattttagttgctcggcgaggcgccaaggaggctt

SEQ ID NO: 2245 - DNA, 226 bp, Homo sapiens
  source 1..226: mol_type = other DNA
gcacacaagtaaagctttgttgtttctctgtttcgaatcattccctcagacgcggggcgggccctgcgacttcactctgggagggacgctcctgcggagtcagcttctgctcgcggagggggaagtccaacccgtccctctccctgagcctgtcagagaccagcccatgcggccccacgcaggaagcctccttggcgcctcgccgagcaactaaaattgccatttt

SEQ ID NO: 2246 - DNA, 318 bp, Homo sapiens
  source 1..318: mol_type = other DNA
tataatgaatataatgagagtgaatttcgcgcctccgagtcccagctactcgggaggctgccgtctcaaataataataataataataataataataataataatgggggacataggatagatctcttcgctatttctcctctgtgaactctgcaacagacttctgtagagagaaccccagatcggttgggtggtccttttaaaagtcagttttggaaatacacagaaatcccttaaaattccaggagttcccactctcttctagaaacaagacaaatctctccctgagtcttaaagcatcagtctgcacttccggcgc

SEQ ID NO: 2247 - DNA, 546 bp, Homo sapiens
  source 1..546: mol_type = other DNA
gaggctttaatgttaacagcatttatatttaacgtgactgctgtgatgaagtaagttgaaaattccctctcaaaaaggtttaaagccattggagctagaatgatgaggatcttaaccaccattatcttaactgaggcaccttcctctattttgtacttctcacttttaagggattagaaaatagccaaagcaatgatgattatctatgttagtcaaatgagaattttgctctcatattgatactaagtttaatactgaagaaaatgtgaaaatggttgcatagttcagcagatttaatcatgaagagatgtagttaatggttaagcagtgtaccaccaatctaccattaaaatattttttgctgacaattttgtattaaaattacaggcattagacaggcaggtaactgagtgctgaatgcattaaataaatggccttgttatgattaataagaaagtttgtaaatgcagcctggatgatgataagcaaatgctgactgaacatgaaggtcttaattagctctaactgactaaaggcatttgttag

SEQ ID NO: 2248 - DNA, 373 bp, Homo sapiens
  source 1..373: mol_type = other DNA
gatccagggtctgaatcagccaagaacttagacacagcttcagttcaggagagatgtcctctctcatgaacgaagagctacaaggagtccttgatcacacagcaggaggcacatgcgccctgtggaagagggaaatgtactaataaaaataacgatacacataaatataatttagtttgtttttatttcaagtgccagggacaccttggcactcagatgcctgaaggtagcagtctccctctctccataaagaaaactatgagagagggtgggtatgaaccaagtttgtttccttggttagtttcctaaccaagtttgagggtatgaacatactctccttttccttttctataaagctgaggagaagagtgag

SEQ ID NO: 2249 - DNA, 357 bp, Homo sapiens
  source 1..357: mol_type = other DNA
agaaaggacagaaaaacataatctctgctctcttagatgatttattttgaaattagtactgtatggtgttacaataatccctttttggcttttcgggacaagaaacttttaggctgtttcacagccttaggaggctgaacgccatctggccactggcccgctgagcccaaaggcgccggtgcgggagggcagaccggaccgagggaccggttcatctgctcagggcgtgtgagactttcggtcgcggcggagagcgtcgccggtctccctccgggcgttggtggccggtgagcctcctgagggaggatcctcgccctcgtctccgccccagtctccggggcgggccggagcctgagg

SEQ ID NO: 2250 - DNA, 454 bp, Homo sapiens
  source 1..454: mol_type = other DNA
tttaaactaaagtcattctatggctgcaatcactggacactaatgcaatcacattcattgagtgcttcctatgagttagcaggtgcacgtgggaaaatttctaacatcttttaccccaaaggataaaaaggtgcaaatgagggcacattttcttcatataatacgacttggtgaaaaagtattctttcaggtgactttccttaagattactgagcattaagaatgaactctccacattcagagttaacgcaccccggtcagggcgggctcgcgggcgcggtcccacccccaggcccctccgccgcggaggttctccagcgccgcccgtacacagctctggttctgtcaggacctcactcctccgctcccggcgcaaccgcggccacgcagcgacgtgcacgcgcgtgtgcgccgccgccgcccggcagagtgggcgcctccgacatcaggagcg

SEQ ID NO: 2251 - DNA, 415 bp, Homo sapiens
  source 1..415: mol_type = other DNA
ggaaaatttctaacatcttttaccccaaaggataaaaaggtgcaaatgagggcacattttcttcatataatacgacttggtgaaaaagtattctttcaggtgactttccttaagattactgagcattaagaatgaactctccacattcagagttaacgcaccccggtcagggcgggctcgcgggcgcggtcccacccccaggcccctccgccgcggaggttctccagcgccgcccgtacacagctctggttctgtcaggacctcactcctccgctcccggcgcaaccgcggccacgcagcgacgtgcacgcgcgtgtgcgccgccgccgcccggcagagtgggcgcctccgacatcaggagcgcgcacgccgcgcagaggggcctggacgagcgcgcttccgacccgccgccacc

SEQ ID NO: 2252 - DNA, 526 bp, Homo sapiens
  source 1..526: mol_type = other DNA
ttggctacaactgattatttattcacaacaagtaaactaatataacacattagcactaagattgtaaaattttgaactatggataatttttatattactggggaaggattaatttgaccagagatttatcagaacaatgttttcaactattagctatacaaaagttatttttgctttgagaatttcaattctaatagttctttaaatgtatactcttaatacgtgttaggtttttattatttatcatagcttgtttacaaaaatcaatcacagccttcccagaatcctgaaatgcttcttgtatttgcattgcaaagagtcattattattgcataaacacaggattggaaactttaaatccaagtataagatctattctcgttgttagaaaggaataaaggtcagctgttcagatgactggctgtctgatcatggctgtcagacagaggcagcagcagcagcagtagcagcagcagcagcaacaacagcgctgcttgtcacgaatcgaggattgcaatgagctcat

SEQ ID NO: 2253 - DNA, 418 bp, Homo sapiens
  source 1..418: mol_type = other DNA
atattcaacaagtggctggagtgcagtggcaccactgcaacccctgcctcccgggttataatgcaactactttgctgcattggagagaacacaatagaaaaatagccacatatttgactcatagtatgacccaggtatgcttttgttaaaaagaacagttcattagctactagtatggaatactctttcagtgtaaaatctcagaacaacatttaaaaatcattggagatattttattcataaacattttcttaataagatccagaaagggtttataaacctaataaacctattcgataggttctatcaaataaacctatttctatcaaataaacctatttgatatcttctatcaaataaacctatttgataggaggaaataggaataggacacattgcttttgactttctataccca

SEQ ID NO: 2254 - DNA, 601 bp, Homo sapiens
  source 1..601: mol_type = other DNA
taaacaacccagggaatcaatgggttcaggactgtgtacaatagcttctgaagttaaaatgacggtagagtgacagtttctctaatcatcagttttcaaagagtatgtttttcgttggaaccacaaatatagtacacttaataaggggaaacgaaaccttgaatttttccttcccagactctgaaaagtaaagtaaactttaaggaacattttaagggtgacaaaagtgacatgttattaataattctagtcactgtggctaattagaacaatctgttgaaggttataaattatagaagctttttaaaacatttatctaagaacctgtgtagaattctaaaaggactgaattatttgaagttattagtttctgtgtatgtaaacttaaactatttttaaagcctttgattatttttctaaaaatgtttttgcatgcttattaaattatgagtttaatgtacagcacctctaggtgctatttaaaatttataagggttcttcgtaaccaagaagattacctatggttacgctgaatgcactctcccagggtgcataggcgctgctgaactgcggtttgccagcagggagtaaggcgggaagt

SEQ ID NO: 2255 - DNA, 760 bp, Homo sapiens
  source 1..760: mol_type = other DNA
aatttctagttctaacaaagaatatttctcatagtaagtactaaaacaacttcagagaagccttatctgtcttcctcctttttccatgaaattagtatacattatatttcctgatcaagaactttcaaacttttcatctggaaatctccagctgtaatttaaaaagcactactggtggttaagctaccaacagttaatggctatctactgatttgaataattaaaagaaacccctaagagaacttttcaaccagtttataaatgagactcttgtattgctttctgaataacaacacaaaactatgcttaaaatacttattttttttagtaggaaaagggagtaatgattattaattgatatcgctgtcttggcatttttttctttaacagaaatactcagaggggaaaattttttttttcagacttcaggagatcacttgtactatgaattctttaaattctgagaaattaaaatggttttcatctgtttattttctaagattacgaaaaaataagcgttaagaacactaagaaaatttacttcttctccaagaacaatcttcatgtaataatactgcagtaagaagatgagctattatgaaaatttttaattaccaagaacataacacaaatcagttttttttgttgttgttattaggaaactttatttcttttttgaagtttaaaggtttccaaaaattgaattttccagcttctctgttataaatgcagaaggtgtttatagtgtatacttctaaga

SEQ ID NO: 2256 - DNA, 702 bp, Homo sapiens
  source 1..702: mol_type = other DNA
tcctttttccatgaaattagtatacattatatttcctgatcaagaactttcaaacttttcatctggaaatctccagctgtaatttaaaaagcactactggtggttaagctaccaacagttaatggctatctactgatttgaataattaaaagaaacccctaagagaacttttcaaccagtttataaatgagactcttgtattgctttctgaataacaacacaaaactatgcttaaaatacttattttttttagtaggaaaagggagtaatgattattaattgatatcgctgtcttggcatttttttctttaacagaaatactcagaggggaaaattttttttttcagacttcaggagatcacttgtactatgaattctttaaattctgagaaattaaaatggttttcatctgtttattttctaagattacgaaaaaataagcgttaagaacactaagaaaatttacttcttctccaagaacaatcttcatgtaataatactgcagtaagaagatgagctattatgaaaatttttaattaccaagaacataacacaaatcagttttttttgttgttgttattaggaaactttatttcttttttgaagtttaaaggtttccaaaaattgaattttccagcttctctgttataaatgcagaaggtgtttatagtgtatacttctaagatcaggtgggtgtgtaca

SEQ ID NO: 2257 - DNA, 433 bp, Homo sapiens
  source 1..433: mol_type = other DNA
gcttctctgggggtctcactgagtgacagggttagaaccagtctccagaagacatttcggccataggcgggcccttttgttagggccttgacctgggcttccgctacagggcccggtcacgaggccaacgtagctccacctcctacggcggccagtgatgacgccaccacgtcggaactgttagaccgcggtgacgtctccaccgcgcgcggaggctgagagactcttacacaacaagcaggtgactctctagtcaacttccgacttggactccgaagatgggttaacgcagcggttccgagctgcgactgcgcagcgtggcccagcggcggagccagactcggcggggcagccaggcttggcgctcgcggtgggcggtggcggcggctgcctcgcgaaggttcgagatccgtcgcgtgcgggaggcgggccg

SEQ ID NO: 2258 - DNA, 336 bp, Homo sapiens
  source 1..336: mol_type = other DNA
actccgattctgctatgtgacctctcaggttgttgacatcttggccaaggactagaagcttctctgggggtctcactgagtgacagggttagaaccagtctccagaagacatttcggccataggcgggcccttttgttagggccttgacctgggcttccgctacagggcccggtcacgaggccaacgtagctccacctcctacggcggccagtgatgacgccaccacgtcggaactgttagaccgcggtgacgtctccaccgcgcgcggaggctgagagactcttacacaacaagcaggtgactctctagtcaacttccgacttggactccgaaga

SEQ ID NO: 2259 - DNA, 320 bp, Homo sapiens
  source 1..320: mol_type = other DNA
tgccaaggctggagtgcagggatgcaatctcggctcactacagtacgtgggattacaggcacctgccatgaactcctgcctttttttaatatccttcataaaatcagtaaaaagccccataagagttctggatcctgcagcttggcctaactcccgtggcttaagtctaagtctttccaggaagatctggcctaagtcctgccgctccaataaggtagaactttcagaactagttttccagaaagagaaaagagtgcacctcgcttcggcgggtctggctgcgccatccgccccaggcggcccaggccccgcccctcgtg

SEQ ID NO: 2260 - DNA, 324 bp, Homo sapiens
  source 1..324: mol_type = other DNA
tggcacctggcacctggtacctgtgtacttgtcagggaggacctcccaggatgacactgaggaggcccctctgaatcatcagagcttcggagcgcagttttccttagcgcctccaggcagcagagacaaagactcttatgtcacctgcaccccttggagcaaccggcgttggctagaggggggaacactggtgcgtctgtgagagacaccggggctggctccgcagccgctgtgtcctgaagcgcgtctggggcgtgtgcgcccaaggccagaggcacccgaggtgggctggcccagggtggaaagcctgggccgagcccctgg

SEQ ID NO: 2261 - DNA, 390 bp, Homo sapiens
  source 1..390: mol_type = other DNA
ctgaatcatcagagcttcggagcgcagttttccttagcgcctccaggcagcagagacaaagactcttatgtcacctgcaccccttggagcaaccggcgttggctagaggggggaacactggtgcgtctgtgagagacaccggggctggctccgcagccgctgtgtcctgaagcgcgtctggggcgtgtgcgcccaaggccagaggcacccgaggtgggctggcccagggtggaaagcctgggccgagcccctggagcgggcgtcaactatgccaggcgtcgggaaggcagggaacacagagggcgctgccctcggcggcagcggcaggtacgcgcgggggtggagcggggcggggcggggcggggcgggcggctcccacgaccttggccg

SEQ ID NO: 2262 - DNA, 280 bp, Homo sapiens
  source 1..280: mol_type = other DNA
tttctcctgaataaacagaaaggacttgatgcagtcatttggcacctggcacctggtacctgtgtacttgtcagggaggacctcccaggatgacactgaggaggcccctctgaatcatcagagcttcggagcgcagttttccttagcgcctccaggcagcagagacaaagactcttatgtcacctgcaccccttggagcaaccggcgttggctagaggggggaacactggtgcgtctgtgagagacaccggggctggctccgcagccgctgtgtcctgaa

SEQ ID NO: 2263 - DNA, 546 bp, Homo sapiens
  source 1..546: mol_type = other DNA
tcagaagagagagacagctccttcttcccgttccggaatgtggtgcgttcgcacgcatgcgtgacacggctactccgcgcttgcgccgatattctccgcttggggcggataccctgggtgacccgtgagcgtccgcgcccggcgcgcgcctgcgcagtcgcttttgcggcttgactcccttcgccagggagccccgaccccgagggcgcgccctgagcgtctgagcgcagccccgctgcgtcccgcctcttccgccgctcgcgcgcgcgcgcacggccggccacggcgcgccggggttggctgctacagggaccgcggtggcggcggcggcctcgacagcggtagtgccaaaaaaaaagccccacctccggctcggcgggcgtcctcaggatgcactgaggctgagggggggaggcggcggagggtcgaggtcgcggtccctctcctccgagcgcccggctggaggggagggagtcacgatgtctggtagccgccaggccgggtcgggctccgctgggacaagccccgggtcctcggcggcctcct

SEQ ID NO: 2264 - DNA, 647 bp, Homo sapiens
  source 1..647: mol_type = other DNA
tcagaagagagagacagctccttcttcccgttccggaatgtggtgcgttcgcacgcatgcgtgacacggctactccgcgcttgcgccgatattctccgcttggggcggataccctgggtgacccgtgagcgtccgcgcccggcgcgcgcctgcgcagtcgcttttgcggcttgactcccttcgccagggagccccgaccccgagggcgcgccctgagcgtctgagcgcagccccgctgcgtcccgcctcttccgccgctcgcgcgcgcgcgcacggccggccacggcgcgccggggttggctgctacagggaccgcggtggcggcggcggcctcgacagcggtagtgccaaaaaaaaagccccacctccggctcggcgggcgtcctcaggatgcactgaggctgagggggggaggcggcggagggtcgaggtcgcggtccctctcctccgagcgcccggctggaggggagggagtcacgatgtctggtagccgccaggccgggtcgggctccgctgggacaagccccgggtcctcggcggcctcctgtcgccgccttccgtggcggtttcggcggcagcgctggtgtccggcggggtggcccaggccgccggctcgggcggcctcgggggcccggtgcggcctgtgt

SEQ ID NO: 2265 - DNA, 541 bp, Homo sapiens
  source 1..541: mol_type = other DNA
aggctcaggtgatccgaccccctaggcctcccaataatcaattttcaatattctaaaaaagcctaccagaaattgtatattttctggtgggttttgtgctagaattatatcagatccacaataaacctaggttccgactgagctgggtctgattgagcaaaatctgttttcccattattgttatgttcaatttggcaaacagcttttcaaaatataggataaaattggtaacacttgctacaatgtttgcaattcgcagaaaatcagaagagagagacagctccttcttcccgttccggaatgtggtgcgttcgcacgcatgcgtgacacggctactccgcgcttgcgccgatattctccgcttggggcggataccctgggtgacccgtgagcgtccgcgcccggcgcgcgcctgcgcagtcgcttttgcggcttgactcccttcgccagggagccccgaccccgagggcgcgccctgagcgtctgagcgcagccccgctgcgtcccgcctcttccgccgctcgcgcgcgcgcgcacggcc

SEQ ID NO: 2266 - DNA, 567 bp, Homo sapiens
  source 1..567: mol_type = other DNA
aaatgaaaaaaatttttttttttgagacagggtctctgtctcacaggctggagtgtagggatctccgctccctacgtagctgggactacaggcctgcaggctggtctctaacctcaggttcagcctgatcctcacctccaggctcaggtgatccgaccccctaggcctcccaataatcaattttcaatattctaaaaaagcctaccagaaattgtatattttctggtgggttttgtgctagaattatatcagatccacaataaacctaggttccgactgagctgggtctgattgagcaaaatctgttttcccattattgttatgttcaatttggcaaacagcttttcaaaatataggataaaattggtaacacttgctacaatgtttgcaattcgcagaaaatcagaagagagagacagctccttcttcccgttccggaatgtggtgcgttcgcacgcatgcgtgacacggctactccgcgcttgcgccgatattctccgcttggggcggataccctgggtgacccgtgagcgtccgcgcccggcgcgcgcctgcgcagtcgctttt

SEQ ID NO: 2267 - DNA, 477 bp, Homo sapiens
  source 1..477: mol_type = other DNA
tggtgtatttatataattcacacaagtgattattgatatagttgaattaattatctttattaaatttgcaatatacattattaggtaatctaagtatgaaactgcagatagtactgaatcctatatataccatgttattttctatacaagcatacctatgataaaattttatttataaagtaggcacagtaagagattaaaaactatagctaacaataaaatagagcaattataacaatatgctgtaataaaagttagatgaatgtgctctttctttttctcaaaaattttatcttgtgatgaaaatgtgagatgataaaatttgcctggatgattctgcatcattgagccatactgatgttaatggttgaatgtcaggagcagacaattcacttcccaagtgagaagcagcagggtggtgcaagatttcatcatgcttctcagaatgacatgcaatttaagtcatataaattgttt

SEQ ID NO: 2268 - DNA, 287 bp, Homo sapiens
  source 1..287: mol_type = other DNA
tgagaaatacaaacctgtgaccatgggtaagtaacttcagcttggctggagtgcagtggtatgatcaaatctctgcaggcttgactacatggttaatttttaaattcagtttcctaaattataaactgagattgaatacttgtcctatcttacatcacatgttcttgtaaggaccaagtggtaatactataacctcattatatgttcattaacttaccaaattggtgtaaaaatgggtggtaccacagttccaggaaatgttcaccttttcccaggaatcttcatga

SEQ ID NO: 2269 - DNA, 325 bp, Homo sapiens
  source 1..325: mol_type = other DNA
gatgtaaatttctattcagatttgtactttacatagttagctaacctaattcttacaaccaccctggggccactgataattggtggaaccactgttagaatctatgattgatgttgtggcagatttaacttaatttaatacagctgaatgaatgaatgcataaatctttgtgggaagagccttcgccggcgctggtgcaaacgccgccgggtcccgcagccccagaagaaggcattccttctgtgctgatcggcgggcacggacgggagagcctgcgcaatgcccgcgtgcagggccacaactccaggcatccgggagacacctt

SEQ ID NO: 2270 - DNA, 249 bp, Homo sapiens
  source 1..249: mol_type = other DNA
tactagattgtctaaaattaaagtttcaagatttatttgagctatcatctttttattggttactacagataaaatttgtgatagaaatgaagttgtgcattaaaccagtataacaaatattttctttaaatattttgcaaagttagtgctaagtaaaaatatgcacatgtgcactcaagcctttttacattgcaaagatcaatgtatgcaccggcagccagctgggggctgacctgattccctctcggg

SEQ ID NO: 2271 - DNA, 306 bp, Homo sapiens
  source 1..306: mol_type = other DNA
tattgtcatcatttttaaaaggcaacattgtttattcttcagaatacttacgcaggtacccaatactagattgtctaaaattaaagtttcaagatttatttgagctatcatctttttattggttactacagataaaatttgtgatagaaatgaagttgtgcattaaaccagtataacaaatattttctttaaatattttgcaaagttagtgctaagtaaaaatatgcacatgtgcactcaagcctttttacattgcaaagatcaatgtatgcaccggcagccagctgggggctgacctgattccct

SEQ ID NO: 2272 - DNA, 258 bp, Homo sapiens
  source 1..258: mol_type = other DNA
agaaacaaggctggtcctgtttcctttaaaaactaaacgaacaattcccttttttggagggacatttttgaaacttaatctctaattaagcaagaagattagaagaaaatgtaattagctccccagctacttcgggttaacagagctggtaccccagcctgccagctcaccaggagagagcggtgaggctcagagcccgccccctgccaagccgcccagccaatgggcacctgtggggagtgtggcttggctgccctt

SEQ ID NO: 2273 - DNA, 423 bp, Homo sapiens
  source 1..423: mol_type = other DNA
aaaagcttttttgtcttttaaagaacatattttcacatatgccaataaactgcacagtagaatgaaaatgtaattgtttcttaagtaggggtcctcttttagaacagtagtgcattaaatttctagagaaagttcagttaaatgtcagatttcagaatacacaatgtcacttttctagtttattgcatattgtcatcatttttaaaaggcaacattgtttattcttcagaatacttacgcaggtacccaatactagattgtctaaaattaaagtttcaagatttatttgagctatcatctttttattggttactacagataaaatttgtgatagaaatgaagttgtgcattaaaccagtataacaaatattttctttaaatattttgcaaagttagtgctaagtaaaaatatgcacatgtgca

SEQ ID NO: 2274 - DNA, 488 bp, Homo sapiens
  source 1..488: mol_type = other DNA
caagaagattagaagaaaatgtaattagctccccagctacttcgggttaacagagctggtaccccagcctgccagctcaccaggagagagcggtgaggctcagagcccgccccctgccaagccgcccagccaatgggcacctgtggggagtgtggcttggctgcccttaagacactcatctggtgtctgagtggagcgcggagtcggagcggggacgcgccgggctgcagctctgggatgcaatccgcctgcctcgcaagctgctcgccgctgcgctggcagcgcttacgctgagctcggaggatccacttgcccggggatgtgcacctgccgtgcgctccgaggtcagtggcaggtctgcaggcagccgagggagcggtgtctctgcccaaaatcttgggtttctcctcggcggagggacaggggactcccccagcggcccagtgccgaagccccacttcaaagatgctctgggagaccgggatcct

SEQ ID NO: 2275 - DNA, 532 bp, Homo sapiens
  source 1..532: mol_type = other DNA
catgctctgagggcttgtcttttccagataagcagaagacatctttaggattcttttgtgtgtttggaacagagtgattcttacctaataaagacagctttattatttcttctgattatataaatagtcttctttgatacctacatactcataaataaactgaaataattctgtatatgcatatataatggcatgtgggataatataccttttcactcaataatatgtcatagaaacccttccaagtcaactggcatagctttattatttgttattaggtatcctaatgcttcacaacataaatatctcattatttatccaactatttctttattcctccaaactaacaattttataatgaatttaggaattcaatgtaacagttaggttctctttggaactctcatttagaaatacaaaggagagtggcctcttttttcagaccttctcaatatggtggtcagatcatgtttccagcctcaggagctgcctattaagccattccgatgggaatgctgcagtttacagtatc

SEQ ID NO: 2276 - DNA, 526 bp, Homo sapiens
  source 1..526: mol_type = other DNA
ccagctactcgggaggctgaggcaactccatctctgggcgacagagaaagactctgtcttgagaattctatgctttgtagcttaggtacatgaccctatatgggacagacatgagagactaatttgtgtcttttatatttatgtgtgtcaaaataaaccatttgggattttttaaaagagcaaattcagaattttaaaatattaattcagaagtagtcatgtgcttttctgcgtttaccttaataatgcagaagaaatgtatatttcaagtgcgagaaactactttcttgttataatggaaaactttttagtgccttttcagtactggggatataaatctgccttccagctagatgacagaatttattcacactgggcaaaccaggtgtttgcttggaattaacttgtctctttgggaaggaaaagataatattgatctgcagggcatacttacctatatatcattgccattcccattttaaagaaaaagaaactgaaactcggagggttaagccagaccaggctg

SEQ ID NO: 2277 - DNA, 509 bp, Homo sapiens
  source 1..509: mol_type = other DNA
gcggacagggcgcagggcgcagaccctgtgcgaagaaggcgctcccccttggcaaagcagcttcttcgatctctttgtccaataagaaagagaaggaagggaagctcctttcttttctgaggccggatgaataattcggtgtccgacttttcctgcctgcccggcttcgttactcgagtgcacacgcggccgggctctcggccctcgattgcctgggatgccgcctgccgctgccgccgccgccgccgccgccaccgccaccgccaccgccaccgccaccgccgtggctgccgggtttgtgggatccgccgcggagcaggagccagagctgtggccggagctgtggcctgagagtgccgaggacaggcgggctagaacccggggccaccgccccctacccctcctcaggctgagggaacgggcactcggagcttctgaggcggcggcggcgggagccggtcagagggggcggcccctggcggcgacgcccccaagcccagccctgcccg

SEQ ID NO: 2278 - DNA, 438 bp, Homo sapiens
  source 1..438: mol_type = other DNA
gtgccactataaatacataaataaagcctttacctgtgcatttaggattttttgcactggcagaggacccaattgtctgtctatctatctaatcgatagagaaggtctcactctgtcactcagggtggcctcagcctcctgagtagctgagaccacagattaaaaagtttcccaattttgaggttgaaaaactggtcacatctgcacatgtagtctcccaaatttgttataaaaatgccatgggtaatcgaattccgttcctccagagaggcccaacagggagctcgcgcggtcgtttggtctcggcggccgtagaagccgggcgcactggaccggagctgccccgccggggttgggtcgtggctgccagggcgcgtcgccaggaggcctcgcgggccgcccttccgctctcccggggctgggcggcgctgtccggct

SEQ ID NO: 2279 - DNA, 661 bp, Homo sapiens
  source 1..661: mol_type = other DNA
atatgactgattttaaaacaaactaaaatgatgattgagaacagtaatactatctataatttcattgcatctagtagaaaattagctttggaaagccactcagtttataaaattgttttgattattctttatttaaaaaatgaagttctcagttttaatctcaacaggaaatctcttgattacagcagagcagatttttatctgtcaataagttaaaaaaattttgaggaaagtctaataacttccttgaactttcagactatataatacagagtccatacaatacagggcatttctgtatgaataaagtattaaatattttttaaaaataacttttaaaaaatgaagttctagcctaagacctgaattaagggctttagggaaataaaaactttgttccttttctaaattttagatatttcctatggtaagttaaactgatcggtttaagaaggtagtttaagatagtaatgtatatgtgttaacatttttatactctgaagagtttatatttaaattcaacataataaaacattcaaaataagaatctctgaacttagttttattttagactgcttttgaaaaaatcacttcttaaagagaaaaaatgaaatacttagcttggtaaatcacacttcgccttcacccagtgctgtgaaag

SEQ ID NO: 2280 - DNA, 333 bp, Homo sapiens
  source 1..333: mol_type = other DNA
tactccagcctgggagacagtctggggaaccaaaaacagcttgcttgtgcatgctgtttaggcccagagccctctctgttggcctaagggcgaagacttggaaatccctgatggaagggcaaacggccatgcagccacaaaaatgtcctgcctcccagaagcaggtcctgcttgtgtcagggcctcccaggaccggcccagcactccctgagggcagcacttggaactccaggctgaaattccacgtgccttcctgactgtgagctccttgagagcacggactgtgccaaagcaataaatggcaagcattatgtttatcattagtagctgtgt

SEQ ID NO: 2281 - DNA, 510 bp, Homo sapiens
  source 1..510: mol_type = other DNA
atgttatgtcttttataacattgccatttttaaagaaatcaagtcagatactttattgaacatccctcaacttgatattacctgatattctcccaggttacacagctggaggcacagatgtccatctgtcctgcattggtaacgttaattttgatcatgatcaaggtgtggtctataatcaccacatatatgcttataataaacttctgttaacagtgttcaaatatattataggcatctgattgacaaaagaaagcatttcaaaattcgttttccattgtcattgtgacagaattttcaaaatgtatatatttctatataattctttcttttatttaaaaaatcacattattggtgaaaaaaagcatggctttctgtttaaattacctgtcttgacacttattctcaaagtgaagactattgtcttcagttcaaaggaacacattttctttgttaattactataatccccacgtgttgtggtctcttgatagtgaataagtctcacgag

SEQ ID NO: 2282 - DNA, 422 bp, Homo sapiens
  source 1..422: mol_type = other DNA
gggatgtcattcacatgcaatttgcatttttctgtgcaactagcagttgaaaccatgggggaatggccttcttgtcccaaccctcttcccggatgatagaagaacgtcagaggcatcagaaaccatcctgctgagacggtccgaggtggggtcggttcgcgcgaggagcgcacagcagaggacatgggctgtgcgctcagaggaggagctggctgtccctggaggacgtccttctgagtcagtaggtgagtcctgctgcagaaggagccactgcttctgacgcgtgccttgcacttcgaccgtagcaggcgactctgaaacctggcctgaacccctcatctcagtggccgaagccccccaggcctggtggtgacgctctggaccaccatgtgggtcctggcattgtgactacacaaaggggt

SEQ ID NO: 2283 - DNA, 550 bp, Homo sapiens
  source 1..550: mol_type = other DNA
taatcagttctgtttagcggtagaaaccaaatgggaatagtgaattattggtcctttcatgcctagagaaagaactgcagatcatcaaataattatccatttccaaatggtctaatgacagcaacctgcgtaataatgtgtgaggatgttgatcaccataatttatgacaagacagtggggtgactctccacattgggagccccctcatttaagagcccggcgctgaaggccacagaccgttccgggagcgggtggccaggcggtggcggacgccccacctgtccatcctcgggagcccctcctttcagcaggcgccgggcggtggggttgcggatggctgcgcgcgctgcgggcaccgatcaccggcggcagttgggctccgcggggccgaaaagctgcgggcgggaagcgcgaggttaagaccctgacggctgcagctctcagagcccccgcgagcgcgctccgttggtgcgcgcgcgcgcgcggctccgccccgcccgcttggcgcgcgcccccgccaggtccgctctcgtcccccacccctggcgc

SEQ ID NO: 2284 - DNA, 530 bp, Homo sapiens
  source 1..530: mol_type = other DNA
atccattccactacttagtacttaagtgctaagctaagttacttaagcctaagtttgtgtttcttcagctactgagttatttaacatttcttcaattaatgaaatacaatagtatagttgtactcaacacttattcatttctggcaggtaaagtgatgtttgtttttaaaccacaccacatcatcattttgtagaataggaggatatgacattatgtaacaccagaatgtaatatttaaaagtcttaagcatctgaaagaatttcacttatgtttggtaattatatataaaggctgttttatcttaagacacattacacagtaagacataacatactacaacaacatcaagtttcttgtaagtttaaaaccttcattagcaacttagtaaaatgtttacaaattcttctaggctataaagagtatttattacattatttaggtcaaagtctagctcttgttctttgttaacaaaaaccaaactttggtattcaacttaaaagatctctggccagcagactaaaatgtttg

SEQ ID NO: 2285 - DNA, 410 bp, Homo sapiens
  source 1..410: mol_type = other DNA
ttttggcaatggcattaataactttctcattctaagtctttcctggaatacattctacatgtattagctactacctaattgctggctggctagtgatattactaagtgctcaagttagaaagctccaaactgctgaaagtttaaaagctcagaaagaatttattatctcttatttttcccagatttaagccattagtgactacaacataattactgagctggcagacccaatgttttttaaaattattacaggaaaaatctaaatggctcttttttcctgaataatgggaagatctggcaacactgtctcataatctttaaattaaccaaaaggatgccaacttgccatacttctctggtatacctatatatggcataggaattcaaataaatgatagactttaaataaa

SEQ ID NO: 2286 - DNA, 419 bp, Homo sapiens
  source 1..419: mol_type = other DNA
tcactgccctgtgagttcagagaaggagcaccctcagggcccagcactgtggctggctagcagcacttgctaaagcccctgcttgctgcgcaggcagtgttagatggcatcctctgtacctaatgcagcctgataataatcaaatatgaaaaacaattttagaatgtggcaatatatgtaatgacatggaaactgagaaacattttctcaatcatatgtacatgaataaaaacacctttggaaaactttgctatatttataggctgcagtgtataatctatgaaatgtctgttatacaaatgatggcagaattttactgtgattctgggcctatgtgtcaatcttcccactggactgggatcctgcacaggccagcaaggtgtcctcaatctatcaaccagggtgtggtcagtcctgtg

SEQ ID NO: 2287 - DNA, 451 bp, Homo sapiens
  source 1..451: mol_type = other DNA
ccagtaagaaagaattctgttcagtacgccttactgattaaattccatggagtaacctgcattatatttcactgggtgcactacggtcgggcattggcgacccaggagcgactgaccgtaaaacaactaatattacagtaaatgaatcataattttgtgagatgctcgtccgaatgaagagccatttgcactcagtgtggaaaggctagcctttttctgggcaaaatccagtcctgctgcttggctgcctacctacctaagaaaagcaggagggcagggcggcgcggccggcaggagaccggcgccggcgccgagggagttaagcggacgggggggcagtccggagcgggtccggtaggggccgcctactgggcgggggcggggccgcgccgagcgagcgctgggattggccgtcgggcaggcgctacgctaggcggtaccaacagccggg

SEQ ID NO: 2288 - DNA, 499 bp, Homo sapiens
  source 1..499: mol_type = other DNA
ctctgatctctctagacagcagttttctcctaagacaagacggctttttggcttggctgaagtaagccaggtgattttaaacaatgcattaagctcttctgaaatctaacagccttgttccatgctcctcgctatggagaatttttatgagatataattacattgacatgacgcctcatgacatgactcggggggtttccaaactccaaacacctccagactgaggagccagggcaaccttggccagacaggcacctacctctaacaggttgttcggtaggcctctgatgggccaccagagccgtccgaaagtcctagcggaggattgacagtggccatttcaaagctgcttcctggaagccggctagttgcacctggcctgaagtcagtctcgggactgcctctcaggaccccagacagggtttcgggttcccgggaggctgccagtgcgcactcagcccggcccgccggtccgggttcaagcccgcctaggaagtgc

SEQ ID NO: 2289 - DNA, 479 bp, Homo sapiens
  source 1..479: mol_type = other DNA
tcctgtttattaacaaagattgggctttttgctttaaaaacttttaccagcctgggcgggcgcctgtaatcgcagtccagtgagccgagatcgcgccactgccttccagcctgggacagagcgagaaaataagtaaataaaaataaataagtaaataaacttttaacactcaaaagttttcaacactatattgccatgtttttaacctttattaagctatttaagtgatgtaaaagatgagtctttcttttaaaaggtgttttattgtaaacagattttctccaaggaaacttttcatctccctataaaatagagatatattaacttctacattgttttattattaggctatttgttatacatatatatacattttaaaagaagtaactccattctgactcagtttgctggaaattgtgaatgctcaccattttgtacatgagtaaatgtcacatgcagtcagagaatggaattctaag

SEQ ID NO: 2290 - DNA, 346 bp, Homo sapiens
  source 1..346: mol_type = other DNA
tttattttatttttaaaactttttttgagaaggagtttatcaggctggtctcgatcctaacctcaggtgacccagccacctcggtctcccaaagtgttgggatctccagaagcggcttcttccagtcccctgcagctccatgctaccacgcagggtgccgtttcggcaagatgttgtcgccggtatcatgatgtcttccttggcaggttgccagggccagcctgcgagcactggcgccggggacccgcgcgcccgggaaggggcggggaggtgggcaacctggggaccaccgctcagcctggccctgcgcgtgacgcagcggtgctcggaggcagggggcgtaggg

SEQ ID NO: 2291 - DNA, 481 bp, Homo sapiens
  source 1..481: mol_type = other DNA
ttcactctctttagactgcataagctaaaatgagtaagttctgactcagaaacagggtcaaagatatatattttttctcctttgtcatcacaaggatgccagtgggaagattaactttactgtcaggcatttaatataatatgaggctacaattgcgtccccaataacatcatgaaataatctccaaaaattaaaatcaaataaggtagcattttactctcttcttgtaaattttataccattttaattttgcaaggaccaaagtgcctgcacctgagctgcgcacgcggtggcactgagcccggccggagaccgaccaaccccaaagacactgggggacccaccctgcgaggaggcgggggcggggacggggggcgcggcgcggcagggcggggcggcagccgggaagccctccttccccgcggcggaggtgactggcgggcggggggcggggggcggggggcgggagacgctctgtccc

SEQ ID NO: 2292 - DNA, 251 bp, Homo sapiens
  source 1..251: mol_type = other DNA
agaccagcctggccagtccctcgggaggctgaggcagagctgagatcgcaccatccgggagtgcgtcacgggctacaggggtcggcccctcgagctaacccccaccggcgcctgcgcactggcctggcccgcggcaggaagccccggcgtgagacatgctgtgacttagaacataagatccctcctccgccggcaccgctgaaggcagcccctatggagggcgctaaacctcggggccctgggtttctatg

SEQ ID NO: 2293 - DNA, 443 bp, Homo sapiens
  source 1..443: mol_type = other DNA
aaagtgtctcctatgattcttcaagaagcattgcatcatcaacacatcgcaaagagagttttcttttatcccctttaaaatgtaaaggatgaggcgaaatttctgattttaccttaaagtgatcttttttacttggccctgcccaagcaggacctaaaaacaacaactgttcctctgcgtaaaaggtaaaagatgtattcgttttgaagagaaaccagagcttgcgatgagcttctgtatctcacagcccgggttggcacctgcagacacacgcccgcaccctgcccggggccggctctcccacccaggcctctctctgcttcagcgccgccccggccgtgggagtcggcgggcgcagtccaccagctgtcggggttccgggtgcgccccgcccgcggccccggtgtcccgcccctcgccctccgacggtctttagggtcccc

SEQ ID NO: 2294 - DNA, 390 bp, Homo sapiens
  source 1..390: mol_type = other DNA
gcaagtatccagctgcttgagacatcagctgcctgccaaaccatggcatcccttaggttctttgcccagagcctgttggcactcaccttgctgtcatatattaaaccttacattttataagaaaaaaaaaagaaggaagataaggtttctttaattagactgtacattttaaggtacaagtctttatattatacaatgcatctctagtggcagattctcagccaagaatcagaattttctgtctgtgattttcctcaaataaacccagacctattgaatgagaatctctgcttatggcccacgcggcccgcttcccctccctgcgtcaggcccggccctagctctggaggtggttggattggttcaagggctgcagccccacctcgcgtc

SEQ ID NO: 2295 - DNA, 299 bp, Homo sapiens
  source 1..299: mol_type = other DNA
gccaactataattgtgagcctagtacataatatagacactctgtaaatatttttaaattagttttaatacattgttctatcttagagtttcactggggaagcaagtagctgggccattctgagacctagttgcctgtaacagttttacttgttctactagctatcagagtagcattactgcaattgtcattttaaacttctgtttctatgaaaagatttatctttatggttcagctctctaaaagaaagagctgcatatgctcaagctccattaggagatttgagcatcctggccaaaa

SEQ ID NO: 2296 - DNA, 247 bp, Homo sapiens
  source 1..247: mol_type = other DNA
tctgtgttacagtttataacaaaatcacaatctgagctcaaaatgtaaacaaataaagttgagggtccacagtgggaacgctccctcctcgagcattcagtccaatcaagatcgaagtgcggagaagtgacagcttatcccctctcaggctctgaattactgatgtcagaacttactcctagagttttaagacattaaaccccctgccacgaggcccgggtacccctcagcggcggggacatccagg

SEQ ID NO: 2297 - DNA, 502 bp, Homo sapiens
  source 1..502: mol_type = other DNA
ctttgcccagagcctgttggcactcaccttgctgtcatatattaaaccttacattttataagaaaaaaaaaagaaggaagataaggtttctttaattagactgtacattttaaggtacaagtctttatattatacaatgcatctctagtggcagattctcagccaagaatcagaattttctgtctgtgattttcctcaaataaacccagacctattgaatgagaatctctgcttatggcccacgcggcccgcttcccctccctgcgtcaggcccggccctagctctggaggtggttggattggttcaagggctgcagccccacctcgcgtcttcccaccgcgtcggaggacgtaggcgcctgggatcctggaaggcggccagcctctgcagccgggcccagcggctcctgagactggggcggaccccacctgccacgtgccctcggggctggaacgcggcgccccgggagaggcctgctggtcagggggcgctggtgcgcag

SEQ ID NO: 2298 - DNA, 355 bp, Homo sapiens
  source 1..355: mol_type = other DNA
gggaacgctccctcctcgagcattcagtccaatcaagatcgaagtgcggagaagtgacagcttatcccctctcaggctctgaattactgatgtcagaacttactcctagagttttaagacattaaaccccctgccacgaggcccgggtacccctcagcggcggggacatccaggtgtccctggatttccagggcacagtgcggggagcccttcgggaggctctcgaggcagtctctttccagtggatagcgacgcaaggcctctctggcgggggattctccccggactccggccagcgccaatcaggtcgcgcggtacctgcccccagccctggccacctggaggggcgatgagg

SEQ ID NO: 2299 - DNA, 526 bp, Homo sapiens
  source 1..526: mol_type = other DNA
cacattaaatgaggaattattaattcaataaatacttgagctactgttgttctctgtcaaaaaatgtttcctgccttcttggagattatattctagaatagatttcttcttgaaattgaattgctgtaggtcaagaacaggaattttagacttacttcatttttcccccaacaaattgtatgttcttgggtaaattgctcgccatctcttaattttcacatttataaaattagtagatcaaaacagctattttttgtcactactgtcatttaacagaaatgctgcaatctactaataacaaacttatgaggtaagtaatccccatttgacacacgagcaaactgaggtttattaggcaactcattggattacatgtaatggcacagagggtgtgttccaggacatggtgcttgccattgtcgacgtcttacagagatgcctgtaatcctgtcagcatgagaaccgcgcctgtcgctgggtcagacgactactagtcccaggattccacgggcgccttccggcggaa

SEQ ID NO: 2300 - DNA, 604 bp, Homo sapiens
  source 1..604: mol_type = other DNA
acaaagccctacaagcagttgtatatttgaaggcaatttaagctttctttcaataattattcagactttacacgaacttaatgaccttctctgaatgtgtctaaatttggttaggtatttgcagattagccacatctgtaaacatttgtataaggaggtgaaacaaatagatttaccatgctttcttattccataaagtccataaagcattctaaatcaaatgtagaatggatcacaacttaaaattacagtgctgtctttaattaaaaaacttgttcatttctcactgtgcacaatgtagtgctgcttggtataaaaccgagaaatgtcctatgggtacatttcggaaaagaaaatacagattttgtatcaacaagtgacaaaactaaaatttttgccacgaaaacatggcatgtgcaaaagttctggggccgagaagcgaaacttgggtcttctcccttttccccgagacttggtactgggaagacttaggacaggcaagttgccccccctcctttacttaagggcgatggcagagacccccttctcctcctctttggtgcctccagccaggaggcgggagcgatccacagcagctgaccca

SEQ ID NO: 2301 - DNA, 296 bp, Homo sapiens
  source 1..296: mol_type = other DNA
tttaaaaaagtgagtatatttaataaggtggttgtttacattcagtaaaatagcgcatgaatgggcaaaacctaaataacattttccttatgttgtcttttgcttcctggagacacttcacacgtatgcaggacttctgtacatcctactcaggcacagctgtaggccctacaaagagggaccatttactgattgatattcgacaaacatttattgagcacctacaatgtatcttaaagtcttcacgacacttaaaatgttggccacagagcctgttttatagctgcaactactct

SEQ ID NO: 2302 - DNA, 463 bp, Homo sapiens
  source 1..463: mol_type = other DNA
tcaacaagtgacaaaactaaaatttttgccacgaaaacatggcatgtgcaaaagttctggggccgagaagcgaaacttgggtcttctcccttttccccgagacttggtactgggaagacttaggacaggcaagttgccccccctcctttacttaagggcgatggcagagacccccttctcctcctctttggtgcctccagccaggaggcgggagcgatccacagcagctgacccagctcaggcacccagcagcgacgacgcaggcggcggccccagcgactcgcaactgggaaggatggggtgtgtacgtcacccccagggcccccatccgagagggaaggggccggctcgcccctcaaaatggcggcagcagcgatgcgcctgcgacagaactcctccgtcgcgccagggccggcgggaagtgaggttctgccgccagaagtgtacggcgacttcgagcccc

SEQ ID NO: 2303 - DNA, 262 bp, Homo sapiens
  source 1..262: mol_type = other DNA
tgtaggccctacaaagagggaccatttactgattgatattcgacaaacatttattgagcacctacaatgtatcttaaagtcttcacgacacttaaaatgttggccacagagcctgttttatagctgcaactactctagtcctacgagtttaaacttcgacgcaccagcctgtggcactgtctcgggacagttctcgcgaggtttgcctgggcccgactgctcccgccctgcctcgcgccgccgccacagccgctgccgctgg

SEQ ID NO: 2304 - DNA, 592 bp, Homo sapiens
  source 1..592: mol_type = other DNA
gaaaatattttatgaaagaatttatttttaattttgagattgttttaaaatataaaatatgtatgcacacgtatacttatttttttacgtgttaccgtgtaagatattctaaccttttcatgttatatgaaatttaagaattggattctgagactatatataggtgctgtggctcaggcctatagtcccagcactctgggtgcatcacctgaggtcaggagatcgagaccagcctggccaacatggccatagctactatgaggcaagagaatcgcttgatcccgcgccactgcactcccaaaaagaggaataaaatatctctgcatctctgcagttttatgtaagagacagatatgtaaatataacattctgtggatggattcatatactgcattaaggagtcattaaaggcttccaatgaaagaaaaattgtttccatttccttaaacagcctctcagttgactaagttattgaacgtggaaggagacttttgaaaattatcttgctttccactcccattgtaacttaaagggaaacttttaggccttgatgtccttaagttccttgcaggaggaacccacttagatggca

SEQ ID NO: 2305 - DNA, 486 bp, Homo sapiens
  source 1..486: mol_type = other DNA
gaaccccgaatcgccctgacaaccttatgagggtggtcgaggaaactgatgaagaggggcttctgatccatgagtagggcccctcaaatgatgttcccctttagatggtcatggtcatcagcagacagccgaaatccgggtcgtctattccaacggactcctcttccgttggatacggggacctccgcgaggctacccccgcagcgaccgctcggcgggcgctccattccttgtacacctcgcctcctggggcctgaggcgggaacccgggtcgcgctgctccgaggcctcggcggaccgcgaaaggatggctcaccacccggccagggccagcccctgcaacaagctcagccccgcccgctcccgcgcccaggagcggccggcggggcggggtggctgggccggcctcgggggcgggggctcgggggcgggggctcaggggcggggccacgtggctcctccttgcgggcggaggcaggcggtgcc

SEQ ID NO: 2306 - DNA, 768 bp, Homo sapiens
  source 1..768: mol_type = other DNA
gtggcagggcggccggggaggccccgccgcggggaggtttgggccccctaccctgcggaactggaggcaagtgcggactccggctgcaggccgcggtctgcggggacgcgcgcggggggcctgcgtcccgccacctccgcgcacagcccctggtccccttccccagcccgggccggcgccgcccgccgcgtgactcgcgcgttccgggccgagtacgggctgtcccttggcccagcctcagccagacgcgggggagacggagcgcgctccgtccggcggagcgaagccggggaccgcgcgcgacacagcgacgcagccccgtccccggcctccggaccgcctgccccgctcggccccggctcggctccgccccgcccctgggtccgaacggaggagtgaggagccgcgcgggcttggaaccccagggcgccgccgtctccgaccacctgctgccgcggcaggccatcagcagaacccagggcgcgagcccgccacggctgggcggaggcggaggcggaggcggggagggggggggggtgccggcttgcgaggccccgccccgctccctgccgccccgcccccctccgccccgccggcctcactcggggcgccgggacccccactccctccggggtcggctgcccgccgccgggttgggggatgtgccgaagggcgggcctccctgcggaaagcgacgtcacggccgctcctgcagtaaaacgcccgggtgaccgcggcctcccgggcggccggcacgcgaagggtgga

SEQ ID NO: 2307 - DNA, 513 bp, Homo sapiens
  source 1..513: mol_type = other DNA
ctttctggagacttaaggaatgctgtttattacattgttttgaatactaaatgaatatatagtgttgtgtttaacatttaggacataaccactcataatgttacagttaaaaaaatagttttgtctggtttcactgtacagtgtctacaaagcacagtgtcaaagacagagcctgggctaaggcgcgccccgaactccccaaaccctattattcagggcccggagaggtgcgggctccgaagcgcacgcaacagatccgcgcgcagggctgtttggaggcgccaggcggaaccttagtcctcagcctcgcgtttcccgcgactttcccccacccccgggggcccatcccggtggcgggctccggagctcgggactagctgacggcactttctctcctccggcagggaaggacgtccagcgtagcgtcgcccgcgcttccccgccggcgcagagcaggcctcatggcacgcacgccgccccgcccccacggcccagcgccagccgcgccccgcg

SEQ ID NO: 2308 - DNA, 486 bp, Homo sapiens
  source 1..486: mol_type = other DNA
ctttaataaaaattctagaaacaaagatataaaagtccatgttatatctcctaagttacttaaccactctgtgctgatttcctatgtgtagtaaaatatatgttgtaatgatcaagtcctcaatacattattcttaatcactttttaattgcaagaatttggtcattaactttctggagacttaaggaatgctgtttattacattgttttgaatactaaatgaatatatagtgttgtgtttaacatttaggacataaccactcataatgttacagttaaaaaaatagttttgtctggtttcactgtacagtgtctacaaagcacagtgtcaaagacagagcctgggctaaggcgcgccccgaactccccaaaccctattattcagggcccggagaggtgcgggctccgaagcgcacgcaacagatccgcgcgcagggctgtttggaggcgccaggcggaaccttagtcctcagcctcgcgtttccc

SEQ ID NO: 2309 - DNA, 489 bp, Homo sapiens
  source 1..489: mol_type = other DNA
gaaccatgatggtgtgactgcactccagccttgagtgctcaataaattattattcacccagggtaggacaatgtagtacagagctctgtgagtgatctctgcccatgttccccagggacacttcagcctggactagacaattacattgaaattcagaagcagcatgcactttttggcattgatgtctttaattaaattcaataagcacttattgagcacctagagtgtgtaaaatactgtttaaatacatatccatttcttaaaggttttatgaagcataaatatcaaaatggaaaaatatttgcacagttctttgtaaatataaacgtcttgtgtggattattgttgctacagtattaatattaactgcagtaacaacactgctgctagcagctggaggtgcctccagcacgtacggcccacaaggggcggagtcttaagaagcgtaccccacccccttcgtcagggcggtgtaggcggttaccatgg

SEQ ID NO: 2310 - DNA, 696 bp, Homo sapiens
  source 1..696: mol_type = other DNA
ctttgagatttccggaatttgcttcccgtctttgtgaaaaaataggctggccgcggctgcagggaatgcccctggttgcgacccccgtcccgcgctggggaaagtgatcaaccggtccccacccaaggcggcggcgggcaattccggcaccgcggcagacgggatgcgcggagcgcgttccctccgggtttccctcacgccgagagcgggaacgaggaaacggctctacggatggacggccccacagagagggcggccggctcctctggaaaccaccccgaaaggcgagccctgggtgtagggttaccagcggcgcgcggagcccgccgagaacgtggtgcgcccccagctcctgcccgcgctccccggcctccgtgcgccccgcgcgcctccgctcttgcgcccgctttcccgcggggaaggggccaccgccctgcgaggctggcggccgccccgtcgtccccaagctcggggccgccctggacttccatcccgcgcctctgacggccggggacactcgctccctgggccgcggctcaggagaggcggccccgcggggctccgggcggggtgggaggccgaggcccggctcctccagcccctcccgcggccccacctctccgcgctcggctccctctgcccagcgcgggccgggaaggcgcgggcttggccgctcttcccctccacggcaaagcc

SEQ ID NO: 2311 - DNA, 850 bp, Homo sapiens
  source 1..850: mol_type = other DNA
gccgcggctgcagggaatgcccctggttgcgacccccgtcccgcgctggggaaagtgatcaaccggtccccacccaaggcggcggcgggcaattccggcaccgcggcagacgggatgcgcggagcgcgttccctccgggtttccctcacgccgagagcgggaacgaggaaacggctctacggatggacggccccacagagagggcggccggctcctctggaaaccaccccgaaaggcgagccctgggtgtagggttaccagcggcgcgcggagcccgccgagaacgtggtgcgcccccagctcctgcccgcgctccccggcctccgtgcgccccgcgcgcctccgctcttgcgcccgctttcccgcggggaaggggccaccgccctgcgaggctggcggccgccccgtcgtccccaagctcggggccgccctggacttccatcccgcgcctctgacggccggggacactcgctccctgggccgcggctcaggagaggcggccccgcggggctccgggcggggtgggaggccgaggcccggctcctccagcccctcccgcggccccacctctccgcgctcggctccctctgcccagcgcgggccgggaaggcgcgggcttggccgctcttcccctccacggcaaagccgtgaacggacagctgatgccccgaccccgcttcccgtcctctcgccgggagggagtgcggcccgtggggcgctgcgccggccagacccacccggggcccgggggctgccagcagagccgggagctggcccggcctcggcgccgtcccggacccccagtcggccgcgccccgaggggcgaggcctgcgggccgcactccctccg

SEQ ID NO: 2312 - DNA, 494 bp, Homo sapiens
  source 1..494: mol_type = other DNA
cacgcccataatcccaccactttggcccatctctataaaaaatttaaaaattagccgggcgtcccagctactcgggaggctgaggccggaggatcgcttgagcccaggaggtcaagggtgcaagaccctgccccccaaaaagggggaggggggaataatactttcccccatgtaacattataatcagatactatgcttcattttaagatagatttataaattacatactgtcaaaattaagtattaaaagtagttgcaaatcaggtacaactacagcttatcctgaaaagccgactcctcaccctcaagcttgaggagagggctgtagaagcccgcccacctccaccgccccgagggctccgcctccagggccgagggacgcaggcgtaagccccgcccactggggggggggggagaccgcggccgagggtcccgggggtggggtcaggccctccgacgcttcgggaggagccgggactggaggctgccgaggg

SEQ ID NO: 2313 - DNA, 185 bp, Homo sapiens
  source 1..185: mol_type = other DNA
attgccaaatgttaattttgttgctgctataacaaattaccaccatcgaacaatgcaaatttattctttcaaagttctggaggacagaagtccaaaaatgctatgcatcataaacagaacttctgatccttcaacaactctgtgaaatatatgacagagcttaagctgctgttttccagcttgtc

SEQ ID NO: 2314 - DNA, 230 bp, Homo sapiens
  source 1..230: mol_type = other DNA
atgcatcataaacagaacttctgatccttcaacaactctgtgaaatatatgacagagcttaagctgctgttttccagcttgtcttgagcaagctgagtggctgcccctcagaataagtgacacctgctatctcagacagacagggaagcagaggcagcagcttgagctccctgattgaccagatatgattaatctatgactatgctccataaatatttaaaaattaaagg

SEQ ID NO: 2315 - DNA, 359 bp, Homo sapiens
  source 1..359: mol_type = other DNA
cggagactccgccgcaggcaagccagcctcacttcccgctcttgcgcgcctcgctgcgcctctgcgcgccgctcccagtgctccgccgagggcgctgcctgcggggaagagtggtgccaggccgccgcgaggctcggctgcaacctgttcctcgcccgccggtgctcgccgcccgcccgctcgcactcccgccctctcggcggcgcagccgcggatcgctgttgcatgcatccggggaggcggcggtggcgagcgctccgggcggctgctcaacttctagcccaagcgcaggagctttgggcattgcggtttacgcaggaacctcaatggggctggcgttataaagcatgtcatcgtaa

SEQ ID NO: 2316 - DNA, 372 bp, Homo sapiens
  source 1..372: mol_type = other DNA
cgctcttgcgcgcctcgctgcgcctctgcgcgccgctcccagtgctccgccgagggcgctgcctgcggggaagagtggtgccaggccgccgcgaggctcggctgcaacctgttcctcgcccgccggtgctcgccgcccgcccgctcgcactcccgccctctcggcggcgcagccgcggatcgctgttgcatgcatccggggaggcggcggtggcgagcgctccgggcggctgctcaacttctagcccaagcgcaggagctttgggcattgcggtttacgcaggaacctcaatggggctggcgttataaagcatgtcatcgtaagtctgccagaagaggagcagagattttgaaaaaaatattttcctccaga

SEQ ID NO: 2317 - DNA, 397 bp, Homo sapiens
  source 1..397: mol_type = other DNA
ttaaaatttttaaaaatcgtcaataataacaatgaaagcagctaacgtttttgggtacttgctatgttccaaacaccgaactacctggtccctgttttgtgctgtcaatcagtatactttgtgaccacctagtgacaatgttcatcctaataaatgcacattagactgagtgggtaaaaattagacaggcctggcatctgtatgcccaatgaatgggctgctacaaagaattctgggaatctgggcatataggccaaatactctgttctgccttccaggagggaaaaagcatgctacccaggaagctcacaagtgacatgtggcccatgggcatgtgagagagggcagccccactctatttcccaggctgctctctggatgcaggcaggaaggttga

SEQ ID NO: 2318 - DNA, 562 bp, Homo sapiens
  source 1..562: mol_type = other DNA
aacccctgcccgcaggaagcggggctcggaggttcggctgggagcctcgggaccccgggttgggggccgtggggcggcacctggcgagctggcgggtgggcggcgagccgaggcttcccggcctggcggcaactcgcccctctgcccccagcggcgcccgccgggctcctcgcccaatggccgcggggcccgggaccgcatcagctgatcggcccgggctcctggccgctgggagccaatcagggcaccgggggcggccccgggccgcggataaagggtgcggggctgctggcggctctgcgtgtgagcagtactgcggcctcctctcacccgcccgcctgctcggcgaccaggtaagcccccggacggcccggtgtcacgcaagcgaggcgcgccgcccctgctaccccgcgaggcgcgccgcccagcctacgctgcggcctctccggcccatgcctgagatccggcatgggcttggacccgtcggggctggcgctggtggggcgcgcccttggccaggctctgggcggccgaagcgccgcccctggaggccgttgggccg

SEQ ID NO: 2319 - DNA, 537 bp, Homo sapiens
  source 1..537: mol_type = other DNA
aattcgttaaaggaatttcttgacaatccctggaccagtttgcacacagaatttcaaatctagtgggcggctccacaggtcattttcagatatgagacaggtctccagacttaaaattagagaaacagcacgttgatttcaaatgtgaagagccggagcgggcggctcttccaggccttgggaaccccggcctgtccccaggcccgcgcggcacccgccctagcccaggcccgccctcgggtcccgcgccccgcgcaacccctgcccgcaggaagcggggctcggaggttcggctgggagcctcgggaccccgggttgggggccgtggggcggcacctggcgagctggcgggtgggcggcgagccgaggcttcccggcctggcggcaactcgcccctctgcccccagcggcgcccgccgggctcctcgcccaatggccgcggggcccgggaccgcatcagctgatcggcccgggctcctggccgctgggagccaatcagggcaccgggggcggccccgggccgcggataaagggtgc

SEQ ID NO: 2320 - DNA, 500 bp, Homo sapiens
  source 1..500: mol_type = other DNA
gctacaatctcatcttgcaatacatagaacatcaagatgtaaaaatcactttaaaatgcagtatttggtctttatatattctaaagaaagtacagcactttttcaaatgtaagtgatattgtattgacgattcattattaacaataatccttcggacattatataagcttttgaaggattatctctcatcttaatatttacttcctattagggaagaacaggaagagtcttcagaggaagggagttcaaacctcttggctgatgttttaattttaattttttaaagatgaggttttgaagttcagtggtgtgatcacagctcacagcagccttgaattcctgggctgagaatatccaggagttactgcttattaaaattacatcaaatgtaaagcaatgcaaaagtcaccctagcatgttgtcagataaagacttatcttcagattaaggccttagagaaggtgtcattacgtgttcacaaattgactggggggtaattc

SEQ ID NO: 2321 - DNA, 418 bp, Homo sapiens
  source 1..418: mol_type = other DNA
atttgacacatattcaatgaccatgcactacttgttgttcacaagtcccagggctttgtctccccagcaagactgggtattctttggggatggaaatactttccactacagcactaagtacacagtaaatcacatgcctgaggtcactcagctaagcagccacagagctggctgtagatcaggtctccagactgccagtccggtacccttctgagaaggccgcactgcctcagagctgtgagttgagtgagctgagaactgggaccatgctgcatgtaaagcattgtgtctggaacacaataggtgctcctttcttccaagaatggatgcagttggctgctgccacctgaaaggctgcatgaccccgggtggctattgctttcctccagaaggtgtgcaagtagaagcctggtgcctc

SEQ ID NO: 2322 - DNA, 456 bp, Homo sapiens
  source 1..456: mol_type = other DNA
aatgcctttaggcatttattacctttatgtcagagatggagacaataaggtattaactgcttaaacccaggatcgtccacaggtatagccgtgaccgggaaaaagaatggcaaattcacatttgaattttggagccaacacttactagctgcacatctttgagcaagttatttaataactaagactttgagcaagtcttacttatgtgcctagcacatagtaggtgttcaataaactattctcgatttcttcatctataaaatggagatgatgatgaagagcttacttagccccgtgtccatcatggcttatcagttttccctaggaaactgggtgtgcacgtccacacgcggcgtcctctgggcggagggtgcagctccgcgtgctccagctgccgcgaaagttgcacccggcccagtctggctgcgggccccgcctccgccttctcagcgcccc

SEQ ID NO: 2323 - DNA, 278 bp, Homo sapiens
  source 1..278: mol_type = other DNA
caggaagagagtcctccttctggacctcctggcgctcctgctgtcagcagctgtctggggcaagatcttcagcggtactggaaagagttaatacctattctttgctgccccccgcacagcctctgggtgcagagggaggcagctgtgggctgtggggacttctccctgagctgcagccagaggagcttcaggttagtgaggctgagctcagctcaggggcaccttctgcatccgtgaggatgggcgtgcagactgtgcccgggagctgagccgccgcc

SEQ ID NO: 2324 - DNA, 326 bp, Homo sapiens
  source 1..326: mol_type = other DNA
atgctgaggactttttcattatagactgagttcctgcctgcagtgcgcagggagtggacattgagcctgaaggcctgacctcaagttggctggccgtcactctgaagcttttcagacctacatcctgtgcagtgctctgcagatcaggcttcaaaaaggatctaaagggcctttcaaatgctcagtgatgcgatgactgaatcagcaccacattgattaggtgatggtaaatgaacattattacgtttttaccccgtgaatgagtccttaataaaagagtcactcaaagtcagttccccttgtgtagatggacaacaggaggaatt

SEQ ID NO: 2325 - DNA, 405 bp, Homo sapiens
  source 1..405: mol_type = other DNA
tcttatggtgcccctctttctgcttaagttctaaaccccaattagcaacagggttcaagaaaggggtaataagaaatgagaaacttttcttttgcatcttattttataacacaaagttccctttctttaatagaggggcactgtgaaagactgggtcctggtatgatatagtaagagctctagtcataagactcaaatcatctgtaacatgggaataataataccctcaggattgcaatacatgaaaatgctttatacatttaaaaaggtttaaaaaatcgaattcatttccattattataaagccatgaaacggtttgcagcaaaggctatgtttggcaaactttagcatgcatcacagtcacctggaaggctgattactgtccccagagtttctgattctgta

SEQ ID NO: 2326 - DNA, 531 bp, Homo sapiens
  source 1..531: mol_type = other DNA
tcaactctttaaacctaaaatgatgaccttgctcatctgtaatatatacatttataaaacaggacccaccaatgggattattttatgaattaaatgttaaaacagctagaacggtgcaggctgagtaagcactgaacacagtacttattagctattatctctggtgctctgtgcaagaactattagaatacatttaaaagcactttgcaaactagaaagccctttgaacaatttagtttctctaaatgtaatgtctctggctctgttcctgatttattcacacagtaaaaataattttccctttcaaaactctttcaaatgttctccaaaagcactttaaaatttgaacgccgatgggcagttgggattctcccgcacgcgggaaggactggcgtgctgcactcggcgtggcgcgggtgagccgcgtgctctcgggcacccggccgccagttcggatgcttccgatcctcggggagccggggcgctgcgccggagtcacttcagcccatgttgttcaggtgacacccgggg

SEQ ID NO: 2327 - DNA, 562 bp, Homo sapiens
  source 1..562: mol_type = other DNA
attttatgaattaaatgttaaaacagctagaacggtgcaggctgagtaagcactgaacacagtacttattagctattatctctggtgctctgtgcaagaactattagaatacatttaaaagcactttgcaaactagaaagccctttgaacaatttagtttctctaaatgtaatgtctctggctctgttcctgatttattcacacagtaaaaataattttccctttcaaaactctttcaaatgttctccaaaagcactttaaaatttgaacgccgatgggcagttgggattctcccgcacgcgggaaggactggcgtgctgcactcggcgtggcgcgggtgagccgcgtgctctcgggcacccggccgccagttcggatgcttccgatcctcggggagccggggcgctgcgccggagtcacttcagcccatgttgttcaggtgacacccggggcgggccagcggttccgggcgcgcctcgcgggcggcggcgcagaactacaacccccaggctccctggcgtggcggcacgtgggcccgagccgggcggccgcggatataaag

SEQ ID NO: 2328 - DNA, 412 bp, Homo sapiens
  source 1..412: mol_type = other DNA
tttgagacggagtctcgctctctcgcccagaaaatgcccgaccccggggttcaagcgattctcctgcctcagcctcccgagtagctgggattgcaggagcccgcccagccacccaagcagctgggattgcaggcgcccgcccccagggattacagtcacacgcccggccagtcgaagggaacctcctctcaccggagagcgaaatattttgctgcatcagaatggccgattatccagggtagtggattatccaggagagtggattatccagagtagcaggtctggcgcgatgcccgcccggctcagccttccgcgccgcgaggttgctgagccccgccccctccattggcgcgccctcgccatcccccgccctggcacgcgctctgcgcatgcgtacgctcgctggccccgc

SEQ ID NO: 2329 - DNA, 282 bp, Homo sapiens
  source 1..282: mol_type = other DNA
ctaaactgtcttaaccttaatttagagtaatgttttgtctgcctaaaattagtgttcatttaaactccccattgagcctcgttttggcaaaatgatgattaagtggcagaataatttcagaatcttctcctcccttggcccaatatggggaccttgaagcactagaaaataaggaaaaatatacttggtcataatttatgataaatatgtggccatttctttctgaagttctttgttaagccagtttcattgcaaataaaagctacctgctttccagagcct

SEQ ID NO: 2330 - DNA, 552 bp, Homo sapiens
  source 1..552: mol_type = other DNA
gagctgtcagcttcagtgcagtatttcacagctagactgtgaacaaacgttaattccaattggctcaatatacattcaacattgtttatgatctggaacagactttttgaaaagtttaacagttatataatataatcttttatgtgagaattttgaatagcacaacagagacaagtctccttggtatgaccacatcttggcaaaaagtgaatcctatttaaaatgtaaaggaaatcctatttggaaatctaggttgctggatttgtcactagggtttcctctagtaatagccagccagtatgaaaataaattttctttcaggtgatgacctggaaggtgactcataatcaccctgaaacgtatgagcccccggtgcggcacctggtgggggttcggcacggagccgcacccaacactgacccgggccgagcccaggcgcctgagcagcgcccagctctgggccgcgcctccccacccggcgggacgccctcgagcagccgctcgttgcgggcctgaagcgcagagcgcctattggccagagcggccgagggc

SEQ ID NO: 2331 - DNA, 488 bp, Homo sapiens
  source 1..488: mol_type = other DNA
gccaagccgtatccagcactgggtaagcgcccaggttctgctccgggactaaaactcatgaagaatattccgtggaagaatttcgcagtgggtcgtgcgtacccaagggaaaaaatctggctgctgcgattctccagggaccgtgtcggccccatgaacgccccgggacctctgttcgggaggggctggagcggggccccgggcagcagcgggcgctcccggttcggacccacacctggccgggcggggaccctcttgccgcagcccaaattggcgcgaggccccagggacgaccccgagcgacctcctgagcaatccggagtctcccaggccgcggagcccaaggaccccagcgactcccgcgcggggagcgggtctgcgaggccgcccttccctcccggcacccacctcgcgcgcccctccccccgggtcgcgcgccgcgggcccgagcgcgagacgccgctgctcccgcccccgccgcctcctgg

SEQ ID NO: 2332 - DNA, 543 bp, Homo sapiens
  source 1..543: mol_type = other DNA
agaatattccgtggaagaatttcgcagtgggtcgtgcgtacccaagggaaaaaatctggctgctgcgattctccagggaccgtgtcggccccatgaacgccccgggacctctgttcgggaggggctggagcggggccccgggcagcagcgggcgctcccggttcggacccacacctggccgggcggggaccctcttgccgcagcccaaattggcgcgaggccccagggacgaccccgagcgacctcctgagcaatccggagtctcccaggccgcggagcccaaggaccccagcgactcccgcgcggggagcgggtctgcgaggccgcccttccctcccggcacccacctcgcgcgcccctccccccgggtcgcgcgccgcgggcccgagcgcgagacgccgctgctcccgcccccgccgcctcctggagtcgccggggcggacgcgcagtccatggggcgcggtgggccggggagttgccccaggggccgcgggagacagggttgggctttctcctcgcccagaccccacccctccttcctcc

SEQ ID NO: 2333 - DNA, 343 bp, Homo sapiens
  source 1..343: mol_type = other DNA
aaatattttctctagtccatggagaaatacactctaagatgtaaaagagtttggtatctagatcctctttcttattcattccaatatttattaagcaccaactgcaagctagatactattatagttaggaatgtgtttatgcctataatcccattcaagcctaggttgctaaccctggaacccttggttcagcctggagaaaggagaggttgacccgccctggaccaccccgggagagaaggagggctcccaggcaaaggctcccgggccgcagcctctgtgccacacccttggcccgggccaggtgtgcgccctcctcgctgcgagggggagcgggcggctg

SEQ ID NO: 2334 - DNA, 639 bp, Homo sapiens
  source 1..639: mol_type = other DNA
aagaatttcgcagtgggtcgtgcgtacccaagggaaaaaatctggctgctgcgattctccagggaccgtgtcggccccatgaacgccccgggacctctgttcgggaggggctggagcggggccccgggcagcagcgggcgctcccggttcggacccacacctggccgggcggggaccctcttgccgcagcccaaattggcgcgaggccccagggacgaccccgagcgacctcctgagcaatccggagtctcccaggccgcggagcccaaggaccccagcgactcccgcgcggggagcgggtctgcgaggccgcccttccctcccggcacccacctcgcgcgcccctccccccgggtcgcgcgccgcgggcccgagcgcgagacgccgctgctcccgcccccgccgcctcctggagtcgccggggcggacgcgcagtccatggggcgcggtgggccggggagttgccccaggggccgcgggagacagggttgggctttctcctcgcccagaccccacccctccttcctccccgggggcgcgcactcgggcacgcgctcggaagtcgggggtcggcgcggagtgcaggctgctcccgggggcggcgcgcgggggcagtggtcggcgagcagcgcggtcctc

SEQ ID NO: 2335 - DNA, 289 bp, Homo sapiens
  source 1..289: mol_type = other DNA
aatatttattaagcaactgcaagctagatactattatagttaggaatgtgtttatgcctataatcccattcaagcctaggttgctaaccctggaacccttggttcagcctggagaaaggagaggttgacccgccctggaccaccccgggagagaaggagggctcccaggcaaaggctcccgggccgcagcctctgtgccacacccttggcccgggccaggtgtgcgccctcctcgctgcgagggggagcgggcggctgtattcacaggtgagtcacaccctgaaacaca

SEQ ID NO: 2336 - DNA, 421 bp, Homo sapiens
  source 1..421: mol_type = other DNA
gaaatgtcacctccccagagaggccttctccactctctgctctgtcagagagtaaattgcattcacttactgtgcattgcacaattgccatctaatatttattgtctatcttcctccagtaaaatgaagacagtgactttgcacataatgagccctcaagaaacacttgttaaatggtaagtcagcaattctcctgcctcagcctcctgagtagctgggattacaagcacgtgctggccaggctggtctcgaggcggatccccataattttcttacagttttagtaactcccctatctctctgcagccagagatcaagattatactactgaaataaacaatggtcatttctcacttaaaattttgaggagagaaagaaaaaataccttaagatcaaacattttttaacttggagatgttag

SEQ ID NO: 2337 - DNA, 256 bp, Homo sapiens
  source 1..256: mol_type = other DNA
agcaattctcctgcctcagcctcctgagtagctgggattacaagcacgtgctggccaggctggtctcgaggcggatccccataattttcttacagttttagtaactcccctatctctctgcagccagagatcaagattatactactgaaataaacaatggtcatttctcacttaaaattttgaggagagaaagaaaaaataccttaagatcaaacattttttaacttggagatgttagccatgctgtgggctcttg

SEQ ID NO: 2338 - DNA, 461 bp, Homo sapiens
  source 1..461: mol_type = other DNA
aatagcccattaaaatccttattttaactatcctatgagggctgcattcttggaaggttttatatagacatatcctaaagtactttgggatagctccttaagtgtaacttgtaaaacgtcaatttcttcaagtcatggatgatgaattttccagctattttcagctttttggcccgaaacctgacacaaaacataaatatccaaaaagatttgttctaagaatgaaacttcttttcctagactaccagacagatgtatccaagcaggatccccactgcggggtgcctatcagagtgatggcgctaacgtgtaccctggcctcctcgcggcaggctcgcgacagctaggtaggggtcgactcgccagaagtcggctatccccgtcggcagggaaggcatcgcggctgtcgtgtgccgctctcctccctcagggaccccgtccaggcgggatcccgcctccca

SEQ ID NO: 2339 - DNA, 437 bp, Homo sapiens
  source 1..437: mol_type = other DNA
cccggctctgagaggaaactacggaggtggttcccgctcgcaggcgggtggaaaagcccatggtgaatgcctcggggtgtccccccagttgctcttcaccaccggcggaagccaacggggaaccctgggtggtttcctgggaatcctaaccacagcctccagttgccatggcagctgcctatccaatccgcaagagtctcccagcgtgcatggggacttcgagtcactctctacgcgcgagggaagacagggaagactttgagtgtaactcccgttctggggtggattggcaggaagccgccaagcgccaccagccggtcgaaatctcgcgagagggaccccctccctcgcccgcccccccgggtcggagtgtccctgcgccccacgggccagagcagcagcgagagcagctttccccactattcacccccaccccc

SEQ ID NO: 2340 - DNA, 305 bp, Homo sapiens
  source 1..305: mol_type = other DNA
tgtctcaaaaatttgttaatgataatttcagctcaattcattcaagactggaaagaactcccatttaacaagggtgtggaaatcaaggcccagtgacacaggattttttctgtgacaccctgcccaggcctcagtgggccacactacctgctgcaggagatggcctgcccactcggcctgggtggggagttttcccctacccaaaggcaggaaagtccccccagtgcgggtgagtctggggcttttaataattaaccagggaggtgcctctgccaaggtctaactgatccttcaggcagcagctg

SEQ ID NO: 2341 - DNA, 410 bp, Homo sapiens
  source 1..410: mol_type = other DNA
cactgtcatgtggctcccaattttgacatttgcaggaaattggtcccctctgaacttcatgaatgttcataacacctgaggtcaggagttcgagactcccagctactcaggaggcaatgagctgagatcgtgtcactgcattccagccattatcctgtctcaaaaatttgttaatgataatttcagctcaattcattcaagactggaaagaactcccatttaacaagggtgtggaaatcaaggcccagtgacacaggattttttctgtgacaccctgcccaggcctcagtgggccacactacctgctgcaggagatggcctgcccactcggcctgggtggggagttttcccctacccaaaggcaggaaagtccccccagtgcgggtgagtctggggcttttaataattaa

SEQ ID NO: 2342 - DNA, 470 bp, Homo sapiens
  source 1..470: mol_type = other DNA
tagcaggtaaaaggctccaagcttccttctaggagttttaacaaattctgtacaatgtatattttgccatttttttttttttttaaaaaggccaatgggctgaaagcacaggggaaatttctggagctaatgtgaccccaggaaatcagaccccaccagccggggccgccttccccagcgccgcgagggcgcggccggcgggaccagttcccgaggcaggcaggcactcgggggcaggcttccaagagtgggaccctcgcgtctcctgccgactgggtaggaaacgggggcttcccccttgccctctcagagcgggcgatcccaaaggagggcagctccgcgccggtgccccgcggatcctgcaggctcccgggtcccaggagaagggcgggagtccacctcgccctcgtcgggcccggcctggccgtcgccccggaagcgggccgacgacactgtgttaaaggcctctt

SEQ ID NO: 2343 - DNA, 438 bp, Homo sapiens
  source 1..438: mol_type = other DNA
ttttaaatctggcctagatggaatcatataaatctcaaatcataatataaatcttaaaggtctggtacagcactgacagataagatttgacctccgtccttggggacttcccgctggccaagaagggtagttccaatcccaggaaacgggcttcctgctcaggaacgcagcctctagcagcgcacagtctgaggcctgggcgcccgggtgtgcatcacctgcagggcactcggtccggcagccagtcggctgcagcaaaagccaaggccacctgccgctgctgcccgacccctagactggaccgcagaaaagcgtttctatgggcagccccgccccttgcctgcggagagcccgcgcctgcgcgctgtgtcctgcgcgctccttccctcgcgcgcgctctccgtggaagagcaggggcagcgtggggcgcgcaggccc

SEQ ID NO: 2344 - DNA, 486 bp, Homo sapiens
  source 1..486: mol_type = other DNA
ccccaccagccggggccgccttccccagcgccgcgagggcgcggccggcgggaccagttcccgaggcaggcaggcactcgggggcaggcttccaagagtgggaccctcgcgtctcctgccgactgggtaggaaacgggggcttcccccttgccctctcagagcgggcgatcccaaaggagggcagctccgcgccggtgccccgcggatcctgcaggctcccgggtcccaggagaagggcgggagtccacctcgccctcgtcgggcccggcctggccgtcgccccggaagcgggccgacgacactgtgttaaaggcctcttcgtcgccgactgccgcggctcggaccgttctgggcctgcgcgccccacgctgcccctgctcttccacggagagcgcgcgcgagggaaggagcgcgcaggacacagcgcgcaggcgcgggctctccgcaggcaaggggcggggctgcccatagaaacgcttttctgc

SEQ ID NO: 2345 - DNA, 428 bp, Homo sapiens
  source 1..428: mol_type = other DNA
gagttcatgaatacacctgaggcccttaggagacaaaacatctcagcttcgagaagacagaaggtgccctctgggtgctcagccaatagttattactggaatgctcactccttcaggtggcctgggaaaggggaatggtccagagtgattgacagtgaattgtgactatcaatgtagagtcttccaggcaatttctaagaggagggctaacacatagctgctccctctcacagagggcgccaggcctggcacctactctagaccaggagaaaggtgctgaggagcaggccctcagaacttgattcttcagctagcaggagaaaaactgcaacatgttctcttatattttcatctttggaacaggtggcttgatatgcaaataaagtagcagtagctactttgcaaacgttaccatggcacccaatcaa

SEQ ID NO: 2346 - DNA, 368 bp, Homo sapiens
  source 1..368: mol_type = other DNA
caaaaccccttatgtatttgaaggtgattaaattcatttagggtgaatagtatgaatttgcaatttgcatggaattctggcaggtgtcaagtttgactgctaaaactggatctaaaaaaatgtaataatcttttatccctatagcagatctttccattatgataaaactcctgctggtagtcatctgatgaagcactgtcaaatggccagttactgggtaattggggtgggaaaagcccagcgcgatattctgacttaattattctaaaatcaaaatagataataggcagataatggaagttttttggactttctccttccattgttttagcgaaggaagagcgtggggaggagtctgctcctcgctt

SEQ ID NO: 2347 - DNA, 376 bp, Homo sapiens
  source 1..376: mol_type = other DNA
cacttgagcccaggagttccagaccagcctggtgtggtcccagctactcgggaggctctctgcactccagccccggacagagttctttgttactctatcatattggcttattacggaaaaagaaaaccagctaagtgaatttattctttcacagccctcctgtgatactgggttcacagtagagtgaggcttcagaaaattctccaagtcttcaaactttgtgttattaggtgactcagtcaagaatgaatttcaatcattttatctactcagtcaataggtgcattatgaaaactggatacattgcatcactgtgaagggcttcagtctcaaaagcagaataaattttcttggggttgtaccgttatgtacacac

SEQ ID NO: 2348 - DNA, 420 bp, Homo sapiens
  source 1..420: mol_type = other DNA
ttgcaatttgcatggaattctggcaggtgtcaagtttgactgctaaaactggatctaaaaaaatgtaataatcttttatccctatagcagatctttccattatgataaaactcctgctggtagtcatctgatgaagcactgtcaaatggccagttactgggtaattggggtgggaaaagcccagcgcgatattctgacttaattattctaaaatcaaaatagataataggcagataatggaagttttttggactttctccttccattgttttagcgaaggaagagcgtggggaggagtctgctcctcgcttgctcgccgcgctccctttgtggcccgagtcgcgcgcaccggcggcggcgggggcagcgcggcgcgtgtctgtgcgctgcggtcgctcgggaccgggaccggggcgaggc

SEQ ID NO: 2349 - DNA, 579 bp, Homo sapiens
  source 1..579: mol_type = other DNA
cgtagagactagtttttgagattcttacaaaacccacattattcactgcttggaaccgtacttgtacaaggcagtaatgtgagtctattcaaactttcgaagaaatctgaaatattaggaatctgcaccttttcaaaataaaatggttaccgtgaggattaaataaatttatcccccaaaggggagctctcagttccaaacttgtttaaacaaagctggcagttgtgcacaccggtccccctcggtgagggtggcgcgcgtcctcagtctcccactgaggaagaaagaaagagagcaggggcctggacggcgccctgctcccggtgagtgcccatccaggcgtcctcaggggcccacgaaggagctccaccgccgtcgccaaagccgcgaacaccgcccggacccaggccgctgcagccgggggtcggctcggaatcgccgcgctcctccatgccggccggtgcggcgctcccgtggtgcaccacgacccgcgcccggccagaagcagcggcgcgcgcgcctgtgggttccgcttccccgaggctcgcagctgcagtgcgagagggctcagaaactggg

SEQ ID NO: 2350 - DNA, 413 bp, Homo sapiens
  source 1..413: mol_type = other DNA
cttcaagcaaactagggtcttagtctatcatggttgaaaaccctatgaaaactcccatttcactcacagtaaattaaaaaatacttaaaatcctacctttctgaacactcgttcagcaactcgaaacgtgggtccaccctgaaagtatggttctactttaaagttctatgtcagggcactgagtaaggcctttcccgtccccagcaaccaactttctcagagagttatcggcagcaaagagattaagagcttcagggcgcaggctactctttaatatttttcacgttagaatttgctcagatttgaataaacgcagagcgaaactagagcccagtttctgagccctctcgcactgcagctgcgagcctcggggaagcggaacccacaggcgcgcgcgccgctgcttctggccg

SEQ ID NO: 2351 - DNA, 494 bp, Homo sapiens
  source 1..494: mol_type = other DNA
aaatctagataaagtcttaaaaagttgttactggtgtttcgcttattaagtacttatatattgaatggcttacaaatattcattaatttaatcctgtaacattaatatccccatttttcaggtgtccaaagataagtgacagaatcaggatttaaactgagtctgattttgagttccctaaaagggcactaaataatatttccatgctattgtttctttttagctgaaaaaggttaactcttcaaacttataccttcaaattttttaattattgctctctagcagaagagtgcaattctgttaaagtaccgtagagactagtttttgagattcttacaaaacccacattattcactgcttggaaccgtacttgtacaaggcagtaatgtgagtctattcaaactttcgaagaaatctgaaatattaggaatctgcaccttttcaaaataaaatggttaccgtgaggattaaataaatttatcccccaaagggga

SEQ ID NO: 2352 - DNA, 636 bp, Homo sapiens
  source 1..636: mol_type = other DNA
tacccttttccagaggctccccagcagacgcagcctacgcctttaggtcctaggaggggggcagcacgatcttgtgtctttcctcccggatgcttcattaatcttgcaggcgccgcatcggtggcagagcccgggcctctgggctgcgcccgcccgttcagcctggcccgggaggggagcggccgcgcggtgggccaaagacgcccggccttccctccgtctgcttccagcaggcacagccgggaggctgggctcaggggctgacccgaatctcccctagagctgggcccacccggctgccccccgagcagcctcgccgctcccacgccaccgcccaagtgacaggcccgggaaggccggacgggacgcagtcttcccgccggggtcttccctccggctggccggccgctgcagggcgcgcgcgcacacacgacccgctccccagcgcgctgcgccccggcggcctccgcaggccccgccccggggaggagagccaggcgcgcgcgggagctaggctcggggaggggccggcggtgggggagtgtctgctgcccccgcccctcgagtgagtgactgagcgaggagctcccctccctcgctcgctcactcccggggggacgttccgtgccgcggccg

SEQ ID NO: 2353 - DNA, 514 bp, Homo sapiens
  source 1..514: mol_type = other DNA
gccccgacctcctgggctcaagtaaccctcctacctcaggttctcaggtagctgggactgtaggcagacagggtctcactgtgtcggactctcagaatgttgggattacaagcatgaaggcgtgttttgtagtcctgaagaattctacacacagacacgtttcacagcaaaattttctcccaaatgagcatattgcacattgtaggcctcttgtgctccaagtagcatctgaaagctcaagttttccgtgtttataaacttaatgagcaaatgctccattgagtgattatatcctttataaataattttgtttttaaaaataaatgttagtgttagtttgttgttggaaatgaataaaagcacaattaatcctttgctttccctggaaggcaaaaaattttgtgacattgaaatgaaatttccttcttagtagtgaaactcctagacatgtccatgtgcaatgtagaagtattcctaatgagaatgtcacaagaagcttttgggagcttattta

SEQ ID NO: 2354 - DNA, 344 bp, Homo sapiens
  source 1..344: mol_type = other DNA
tagttaactgggttgcaagttcctattattaatcatgtacgaggacccacgtgctccttcatccttgtagtactatgccttcaaaggccctgggtgcctcattcagccagctctctgggaaacaactttctgaggaaggggtttcccgggactccgcagcccaccgagacagggtcctcggaggaccgcaagtcccagggtgcagcgcgcctaccccgggtagaagcgagagacacggctccgagtcggctcgcgggagagccggccggagacaggtcctgaggctctacggcttcggccctacccggaagtaacgttggggaggcggtttcctagactacgac

SEQ ID NO: 2355 - DNA, 316 bp, Homo sapiens
  source 1..316: mol_type = other DNA
gaccatttgaccttgaggttaagtcaataggagttgggaaaagaacaaatatcttttctaatgattgatttccagtgcaggaccaagccttaggtttctccactcccacagattctaagtgtgtgtgtgtctgtgtggaagaactgctgggaagttccaggggcgaggaggaggagctggccgacctcctcggttgccagcccgtcggagctcaccagctaggcgagggcgggaagacagcccccgggccggcccacggatcatcagaaggcgcggacctggaggaggcgccccagaaggcgacgcctcttgcctc

SEQ ID NO: 2356 - DNA, 375 bp, Homo sapiens
  source 1..375: mol_type = other DNA
tagcatatataatgtgctgtatttaacacctgattattttccaaattcctatgtaaattcatgtcatttatttggaattgcttatagagagcaatacaattctctcatgaggagctacgcaatctacgtaagtcacatagacacagttatcttctcaagagaacatgacatctcaacacttcttcagctcataatttatatgcattaaatgtcggataatttactggagactttaggtaatgattacatctattaatctattacttcgtaaatcctggtcattttcccaggagcaattacacttgcagttttatcctgcaaggatgaaaagtgtattcatgtgaagttctgcaaaccaaagccgaggacaactca

SEQ ID NO: 2357 - DNA, 431 bp, Homo sapiens
  source 1..431: mol_type = other DNA
attattttccaaattcctatgtaaattcatgtcatttatttggaattgcttatagagagcaatacaattctctcatgaggagctacgcaatctacgtaagtcacatagacacagttatcttctcaagagaacatgacatctcaacacttcttcagctcataatttatatgcattaaatgtcggataatttactggagactttaggtaatgattacatctattaatctattacttcgtaaatcctggtcattttcccaggagcaattacacttgcagttttatcctgcaaggatgaaaagtgtattcatgtgaagttctgcaaaccaaagccgaggacaactcagtggctgcgccgtcatccgggcgttgcccgggggctacgtcggaccgcggtgggcgccgggggggcgtggccggccagcccagggcgg

SEQ ID NO: 2358 - DNA, 461 bp, Homo sapiens
  source 1..461: mol_type = other DNA
gttatcttctcaagagaacatgacatctcaacacttcttcagctcataatttatatgcattaaatgtcggataatttactggagactttaggtaatgattacatctattaatctattacttcgtaaatcctggtcattttcccaggagcaattacacttgcagttttatcctgcaaggatgaaaagtgtattcatgtgaagttctgcaaaccaaagccgaggacaactcagtggctgcgccgtcatccgggcgttgcccgggggctacgtcggaccgcggtgggcgccgggggggcgtggccggccagcccagggcggggcggtggcgcgggttctccaggccaacacgcggcggcgcaccctccctcgcgccgcgggcctccccgcgccgtgcacgtcctcgtccccccgccctccccgcagcgccggccgagccggcttcccctctcatgaatattgag

SEQ ID NO: 2359 - DNA, 356 bp, Homo sapiens
  source 1..356: mol_type = other DNA
tttggggatctgaaacgcatcaaaattaaatgccccgaagcctcagagctctggttattaaaccgccgcgggcccgcgggctccgcacgaaccgacgcaggggcagccccggaggcagccgggccagaaccacaccctccacggagctggctcgtccccggacccgcccacagagtcgccccgcccaggtccgtgtgactcctgagtccccagtccggccggccgcccgcccgccagtatacttggggcgggggacgagggcttaccagcgccggcggcagtggcaactccggagcccgcccccagactgcgcagtgtatcctggtggttggccggtgggccggagacgcaccgta

SEQ ID NO: 2360 - DNA, 545 bp, Homo sapiens
  source 1..545: mol_type = other DNA
ttaggtaatgattacatctattaatctattacttcgtaaatcctggtcattttcccaggagcaattacacttgcagttttatcctgcaaggatgaaaagtgtattcatgtgaagttctgcaaaccaaagccgaggacaactcagtggctgcgccgtcatccgggcgttgcccgggggctacgtcggaccgcggtgggcgccgggggggcgtggccggccagcccagggcggggcggtggcgcgggttctccaggccaacacgcggcggcgcaccctccctcgcgccgcgggcctccccgcgccgtgcacgtcctcgtccccccgccctccccgcagcgccggccgagccggcttcccctctcatgaatattgaggcggaagctgaggctcgccatattgtgcggcggcgccggcgtccgcggcagctgataccagagtcttgctccggccgcggccagcggagccctgggctggggcaggagccaagcagcgggccgggacacgcgtctactcggcagcgttgcaggcgactgacgggggccccg

SEQ ID NO: 2361 - DNA, 340 bp, Homo sapiens
  source 1..340: mol_type = other DNA
ctgcagcagaaagatctgggccttctctcaggggcagaggctagggacggggacagggccggagcctgggccagggcaggggctggggctggagccgaggccggagtcggagccgagtccagagccgaatccggggccggagctgggaccccagccgagtcccgggccggggtcgggacctggacctgggccacctccacctcctccttctccaggggcagcagctcctcccgtgccaagcccgcccggggacccggagcggggctcacggcggggtcagtacggtgcgtctccggcccaccggccaaccaccaggatacactgcgcagtctgggggcgg

SEQ ID NO: 2362 - DNA, 175 bp, Homo sapiens
  source 1..175: mol_type = other DNA
agcgaactaccacttctcaggtgtgttttctttttccggaagggaaccagttccgggacaggcaacgaggaacgagggcgccccccgagcgccgcctatctccttgcagatggattcctgggaggcgtcggcggcggcagcgcacgtggtgacgtgcgagggggtgcggcgcgag

SEQ ID NO: 2363 - DNA, 347 bp, Homo sapiens
  source 1..347: mol_type = other DNA
actggcaagaaaatgccatagagggagcacctttccaatagatctttggctagattcaaactgctcagcaaatgtgaatcttgataatacaattaaaaaatcaattttctctttaatatgaattttatgtcgcagctccccctctacacaatagaaaaacaaaattccctttgtgctttgaaagccattgtttacactagcgttttgcaggttaggaacggtgccggtgggaaccgagctgacaccgattgaccctacaatcagtggagggagcaccctccggggggggcgaggccgagccaggcttcccctcgtcgctcagtcgctggcccaggcggagagcagcg

SEQ ID NO: 2364 - DNA, 356 bp, Homo sapiens
  source 1..356: mol_type = other DNA
agaattaacccgggtccttaaattcccgggtactgaatcacctttttctcttgaaaagagagagacaattacctcggacggtctctccgccggagatgggggtttcgggcccaagtaccagcctctaggggcctcccactccaaagccagggacttgggagtcaggtagccaaagcgactgcggtcgccaccccgcccccttctgggcgccatagagagcgtggcggtatcccggagcctgccgtccggccctaccgggaccgatgccctctagtggctcagtgtccagaggcgccaccgtctctgagctcgggttcccagggttcgtagcttccaacggctgcgcgcgcacttcg

SEQ ID NO: 2365 - DNA, 393 bp, Homo sapiens
  source 1..393: mol_type = other DNA
tcaagtctgtttcccgtctgccggacgaacaaagaaaatgctactgaacttagattcagatttttttttcaaaggcttcttatcaattgctgatcagcaaggaacttttcaagtttgttctggacagacttgggcagcttgttcagctccgtgcgctccaggacttgctgcaacaccgccgccatgtcggtggggccagggaccccagtggcagcggccgacccagacgcctgggccgccgcctctatcacctcgctcggtggctcgcgcgcgcccgcccgccggagactcccgcggcgggaccctgggaacctcaccgcccgcgaccgaagtgcgcgcgcagccgttggaagctacgaaccctgggaacccgagctcagagacggtggcgcc

SEQ ID NO: 2366 - DNA, 464 bp, Homo sapiens
  source 1..464: mol_type = other DNA
ttgctgatcagcaaggaacttttcaagtttgttctggacagacttgggcagcttgttcagctccgtgcgctccaggacttgctgcaacaccgccgccatgtcggtggggccagggaccccagtggcagcggccgacccagacgcctgggccgccgcctctatcacctcgctcggtggctcgcgcgcgcccgcccgccggagactcccgcggcgggaccctgggaacctcaccgcccgcgaccgaagtgcgcgcgcagccgttggaagctacgaaccctgggaacccgagctcagagacggtggcgcctctggacactgagccactagagggcatcggtcccggtagggccggacggcaggctccgggataccgccacgctctctatggcgcccagaagggggcggggtggcgaccgcagtcgctttggctacctgactcccaagtccctggctttggagtggga

SEQ ID NO: 2367 - DNA, 513 bp, Homo sapiens
  source 1..513: mol_type = other DNA
tttaattacaatgcttatctaaaaaatatttttggggaaaaatcaaccttaagcctgttgatttatttttccttagttattacaaaatatcataaaatgcttccatttatatttcttagaaatgcattatttacaatgaataatttaacaaattctttcataagagtaaactttaaaactacagaattatgatctggaaccatacaagttctgttactgtagaaattaacaatgtgtttaaaaacttcagttacaacagttttcaattttaaaaacaatataatgttaggtaaccgtttctgcaacgaaaaatttaaaacataggctacactcaaagtgctaccgtagaattaacccgggtccttaaattcccgggtactgaatcacctttttctcttgaaaagagagagacaattacctcggacggtctctccgccggagatgggggtttcgggcccaagtaccagcctctaggggcctcccactccaaagccagggacttgggagtcaggt

SEQ ID NO: 2368 - DNA, 575 bp, Homo sapiens
  source 1..575: mol_type = other DNA
tttccctcttactaacaaagagtaaataaatgacaaattaatttagtataataaaacataactattaaaatttatttagacactatcactgtttaaattgcattaagatccacttaaagtttctgggtgaagctacatatgactaaaccttataatttaaaaatctaaatgtgttcattttaattgccattaatattaaaaattttgtcctcttgctaattaaaaatttccagttttaagcttagagtaaattaaatctcctactttggcaaagttagatgagaatggaagattaaacacatgcatctacttccttttaacatctgaaaaaattgtattaaaagcctgtagtaagagaagatgaaaatcatagtatctctcttattcctgtagtaatcatagcacttcacctagctactgtttcacacaaatgaatacaactcatgttattgcgataaatagtactaataatgacctctgtctaaaatataaactgactattattaatgaactggccttgctgctatttctgcagtcatcaatatctggagattttaaatctgagcttaaaccta

SEQ ID NO: 2369 - DNA, 647 bp, Homo sapiens
  source 1..647: mol_type = other DNA
aaaataatgtctcagaaatcctaccattgttttcccagaaatatttctaaattcgacattacttttcattgtaaatatgaataaaatatcactgctatacattgagacaaaaatctttgttacttctattttaattaaaatgtcattaatgtttaataagaaaaattatatatgctacttacatatcttacataccctaccatgtaacttttttaaatgttaaagggaataattcaatgcaaaaaaacctatatatagctaaaacaataactaaactgaacagttaagaattgtgaaacattaagtctatgtgcaccacactagtgatctatattgagaacgtaatatcccaagataaaggaatttttatacctgaacattcacacttagtaaaacttgtatgaaagttacatggaattgtgggactattgaaaagttcaaaccattaatggacttttctatttcagagtagacaaatggctctaattctccattcatcagaaaaaaattcaggaattaaggtcattattcttatgaactcccaatttagagaacatgtgcttccaatcttctaatatggggagatttctgccgtttccagaaaaaaaaattatatgcacatgtaattgttcatactgtcttacact

SEQ ID NO: 2370 - DNA, 376 bp, Homo sapiens
  source 1..376: mol_type = other DNA
tgccttaaggcatacgcacattaactatttacctttcccgcctctctttccaagaaacaaggagggggtgaatttcttctgttgaaagcaacttagctacaaagataaattacagctatgtacactgaaggtagctatttcattccacaaaataagagttttttaaaaagctatgtatgtatgtgctgcatatagagcagatatacagcctgacacggcggcggcggcgggagaggggattccctgcgcccccggacctcagggccgctcagattcctggagaggaagccaagtgtccttctagacaggagagtggggactaccccctctgctcccaaattggggcacctgcccccaccgggcttacgcaattttt

SEQ ID NO: 2371 - DNA, 385 bp, Homo sapiens
  source 1..385: mol_type = other DNA
agggaaatttacatctgaggggctcccgctgcgcgtggagatttctccacctgagctcagggaacggaggagagcaaggtgcctggttgaccagctggccccagctcaggctctgcactcagcccctgcagcgctgtatgagagaatagacttaagatctctggagtctcttagcgttaatatttatttattttaatgagctatatttaacgttagtaaacgacgattcctcagaacttcaccaactcccaagaatctggagggcggtgggggatttcaacttgaagctagagcttggaatataaggttgaagttaaaaatctgtctagcttatattatacccactttaaagttgggactgggagcgctctcttccagagtccac

SEQ ID NO: 2372 - DNA, 282 bp, Homo sapiens
  source 1..282: mol_type = other DNA
ggcagttcccttgggaaaccggtttcaaagagcttaccgatcgatcaggcgatcgtttgttcagtaatgcccatttcacactctctctcagttactgcaggaatcagaggggaagcgggcgcctcctccaaagctctagcttctaatgcaaggcgttcgaattgtcttggacctgggagggctgctgccgccgctgctgcatctagcaagtgctgatggaatactattaatcctaatgataatttccgaagtggtgccctcttcttgctgctatatctatca

SEQ ID NO: 2373 - DNA, 697 bp, Homo sapiens
  source 1..697: mol_type = other DNA
ttcctaaaaaagacattactggcttttttttttttcaaagagagagcagatattccagaagatttagtgaaattatattctttgaaaatattgtaagagaagtatttaattaaaggcaaaaacaagatcctgtgtttgaaaaacaagatatactaaatgaacatgtcaatctttaaagacatgaattgattctcatggaatttgggtacatttaaacaatgcaccttcttcattacagtgctataaggtatttggatttacactgcaaatttggaattcaacctgatttcattttcttccctaaatctcaacatatatattacattatttggtatgcctttaatcttaaatttacaaagaaattattatcaacgaaatatttaaacagatttgatttttaaagtggtctgatactcattttttaaaaatgtacatttttatatttggggtttgttataaactttgcctttttaaataatgcaaaaatgctctaggttatcttttcaattttgttctcctttggaaaaaaggaggaagtagttactacttaaggacaagtagtggaatttaggactgattaatttacatattatttaagcatattttctgacttcaaaggttctaataactaagcatttacatttacaatattagcttctatgagaagagagcgttctctcaggataagactttctct

SEQ ID NO: 2374 - DNA, 552 bp, Homo sapiens
  source 1..552: mol_type = other DNA
acttattaaaaataaaataaacttctgattggctttaaaaatacatgggtttaaaaatatagatatattacttgtgttctaacaaaattaacagttgcgtatcagaaaagaaaaggttggccattcatatcttttatccaggtgcagattaaaacttaacattttctcagccaaaagttgttttaagccactatgaaaatattccagtttcaaccatgctaataatatgctgacagtgagcaagtcatttaatttttctcatgtgggatgacgttcatccacagctgtgatttatgtgaaagaaatctgacatatgggcatagcagaatttagtttatagtttaaaaccaagatgatatgtaaaattaacccaatttgccacaaggttaaaattatggttctggaatcatgaagccagaggtcacaagattggtaatctcccctatcgctcctatagataacatcactattgtaaaacttaagatttgtgttttaggtccaggtggcaccacctggagtagtaattcataaaaacttccttcgctggtcttg

SEQ ID NO: 2375 - DNA, 668 bp, Homo sapiens
  source 1..668: mol_type = other DNA
tacttaatccatgtcattataaagaacatttttacattataaagaacattttaacaacaaagtcctttatatcaaaggaattaaaataaagctttaagaaaaaaaacttttcatatttttttccatttcatcacagactgataaaaatttcaaaaatgtctaaaatcattctatagatatgtgcttaaaactttatttatttatttgagatcagccaggttcaagggattctcctggtctggagtagctgggaccctgagctcaggtaatctgcccaaactgttaaattaaatgctttctacaatctttttttaaccataaaattctgatctattgtcttattttgttacaatatgttaagccaatgtaattaacattacataatcttatgtcagttaaatgtgatttacttaactcatgtaataacaataagaaaaatacttttttaagaactggagaaaatatctcctaatgtttgatataatactttgccataacacattttaacacacagtccacacatttaaaaactttttgaaaagttcctgtggaaatagtgttatttgagtctattaaagcatcattctggttgcgcaaactgaacaagactagtctttatcttagagtttgcaaatttgtggtatcatttccctaaacaacttaggacc

SEQ ID NO: 2376 - DNA, 644 bp, Homo sapiens
  source 1..644: mol_type = other DNA
aagtacacattattggtctatccaaatagacttttattctgtgaccttggtatcagtatgtttacaaattatgtcatatttgtatacaattaaacatttatttatttatgattggttttaattaaactttattttttcctaatatgcaaaatatgcaaaaatcaaagtttgatatactagttatattcttaataaatatgaaaataatattaaaaaccatttgccagtctagcacacaccttggaaaatattaacatggaaatttcctgccatggaaaatgtgaagatagcctcttataactttccctcctatcagatatgtgcaaaataattaaacaaaaattatttgtttactttgccctgcttcctgcagaaaagaagagaactcttaaaatattttgatcagatgaattttatagtcaaggactatccaaagcatggagtaagatacaactctatgtgatgaatttctatgtgagtttctatatgataaattaatacgccaaatgaaacagtttattgaaacatgcaacttttttaaaataaacaaactacataagtttcaaccacaagacaccacttttttttattccagtgtctgttttaaacagcaagtgcctgtctgcattctactatataaagca

SEQ ID NO: 2377 - DNA, 225 bp, Homo sapiens
  source 1..225: mol_type = other DNA
ggtatctacatcatagtaaaaatatacatataatgagatatttgaattcaagtcattggcagaaaaagtaagaaagaatgataggccttattttatcacaaatataagttaggaattctttactattacagcaaaaataatgcaagacaaaaatgtaattaaatttatgtattagaagacgaagtctgctactggatcccacagcactgacgtgggttgtagctg

SEQ ID NO: 2378 - DNA, 507 bp, Homo sapiens
  source 1..507: mol_type = other DNA
cttatctctcaggtttgagaaattcaattttcttgggtttgaatctcaaaattataaaagacaagtaaggttaatcttctatctcattgggattctgtattcattagaccttatcttaagcactgtgttcaattcagattttgaaggcatgttaacaaactgtatataactagaaaagatacttttttagatccttcagttgttaaaagtccctagtaatctattacaaacagattgattttaatagttctcaaccatttgctaacatgtgtgtcttttttaaaagggaattttactttagactatacattttctaaaactagaaaaattattttggagaaaaagatttgagtattactttgaagatttcatgaagctgctgcttccaatcatctgatcacttcagatggtctgataatgttagataaaacctctttatcagtaatgcactggagtcctacagcactactttaacctctctttgcatagatacgtgtgtgtaaaaac

SEQ ID NO: 2379 - DNA, 460 bp, Homo sapiens
  source 1..460: mol_type = other DNA
cataaggaaatctgtgagagaaacgggcgagggtctccccattgcctcagttcacagaccagggggtactccggcctcgtggcgggcgacctcctcctgccagggaatcgccgctctggcctcgggctggggagcccgtcagggtgggtgagggagcgccggcgcccccgccgggccgccgccaacttcggctctcgagcccgcccggccgccacgcttcagcaaaaggtcgtgcgcagcggccccacctgccccagctggccgctgctatgtggcccgagtgcgcaagaagccggggccgcagacgtcagcagcgccccggcttcgagacccttcggcagcagccgtgactgccgccggcgggcgctgacccatccccgtgccagtctgcagccgaccaatccgcgtcctcttgaggcggggccggagccgcgaggccccgcccccaagccgaggcctc

SEQ ID NO: 2380 - DNA, 513 bp, Homo sapiens
  source 1..513: mol_type = other DNA
gaaccattccaaatgtttttagattaatacacgacatttgttttcacccgggcgacgcctctccgcgcagaagccgcggcctctcgacgtcggcctgtggggagcgatgccgacaagcaggagcggtcccggcttcggaaagggcccaccctgaggaatggtccggccgggcctagcgaggatgtccctagcgatgctggttccgttcctgcccagcctcaacccctgggatgcgggtgcgtccctggggccgcacaactggcagccgaccccctggatccgcagcgccgccaggagaagtcctgcgcagcgctgccgccggggattccaggttcggttcccgggaacgagtcctgcccctcttgccccgcctccgccccagaggggcgaggatcccggatgttgcctcctcggcgctgtgaatcccagcccttccgaatccgctacgggtgctgcaaggcctggcgtcctcccgcgctcagtcgcgctgcaggtgacggcgcccggaggctg

SEQ ID NO: 2381 - DNA, 525 bp, Homo sapiens
  source 1..525: mol_type = other DNA
gtctagagcctttcaggcccacgcagtcagcgtgtgtggacgtcccgaagagctattcacacattcaaggcgttctgctttgaataaccagaatctcgagttgagaaggcgcaccctagggtggcttctgcaggactaatggcctgagcaatgcacttgaagcgagggccctcaagtcaattacaggatttgggtgccaggtcctgaggatgcagcaggcacaagactacatttcccccacccggactccaggttcctgaagtcacctctccagacgcggggcggcggtggccgcagggaaccactccatgcccagcttgggcctcctcccgtgaccccaggcccaggacggtccccttggttctcaccgaatcctttaatgagctcggtgaagaccccggggtcgctttccatgaggcaccactccccggcattgcccgtcatggcccttgccccccgcaccagctgccgccggccacagatccagcctccgggcgccgtcacctgcagcgcgactgagcgcgg

SEQ ID NO: 2382 - DNA, 581 bp, Homo sapiens
  source 1..581: mol_type = other DNA
atatgtagcttttaaggagtaaatatacacttaacgacttcaatatactcttaaaaactttaatcttaacactatagtattctataagagcctgctgaatgagggcaatttagtaaatatttagtaaatatttggtttaactcatcatccagttttagaaccattccaaatgtttttagattaatacacgacatttgttttcacccgggcgacgcctctccgcgcagaagccgcggcctctcgacgtcggcctgtggggagcgatgccgacaagcaggagcggtcccggcttcggaaagggcccaccctgaggaatggtccggccgggcctagcgaggatgtccctagcgatgctggttccgttcctgcccagcctcaacccctgggatgcgggtgcgtccctggggccgcacaactggcagccgaccccctggatccgcagcgccgccaggagaagtcctgcgcagcgctgccgccggggattccaggttcggttcccgggaacgagtcctgcccctcttgccccgcctccgccccagaggggcgaggatcccggatgttgcctcctcggcgctgtgaat

SEQ ID NO: 2383 - DNA, 605 bp, Homo sapiens
  source 1..605: mol_type = other DNA
acacattcaaggcgttctgctttgaataaccagaatctcgagttgagaaggcgcaccctagggtggcttctgcaggactaatggcctgagcaatgcacttgaagcgagggccctcaagtcaattacaggatttgggtgccaggtcctgaggatgcagcaggcacaagactacatttcccccacccggactccaggttcctgaagtcacctctccagacgcggggcggcggtggccgcagggaaccactccatgcccagcttgggcctcctcccgtgaccccaggcccaggacggtccccttggttctcaccgaatcctttaatgagctcggtgaagaccccggggtcgctttccatgaggcaccactccccggcattgcccgtcatggcccttgccccccgcaccagctgccgccggccacagatccagcctccgggcgccgtcacctgcagcgcgactgagcgcgggaggacgccaggccttgcagcacccgtagcggattcggaagggctgggattcacagcgccgaggaggcaacatccgggatcctcgcccctctggggcggaggcggggcaagaggggcaggactcgttcccgggaaccg

SEQ ID NO: 2384 - DNA, 549 bp, Homo sapiens
  source 1..549: mol_type = other DNA
gattgtgccaaaggctaaattttcagtttggtctttctacaataggtaccatgttaattaagttgggtatcaagtacattttagttttgatgtattttgcacagaaaacattttcaagttcatagttccaataaagtatctcaaggaaatatactgtacagaacttcaagaaagttacaaaaaaaattttttttaaaccaacacttcatacaaattttggataaaatttaccacgtttatttcatggcttcagagtcagagttttacccactaaaacattttttttttctggaagccaaaggtctttcttggaatatgtagcttttaaggagtaaatatacacttaacgacttcaatatactcttaaaaactttaatcttaacactatagtattctataagagcctgctgaatgagggcaatttagtaaatatttagtaaatatttggtttaactcatcatccagttttagaaccattccaaatgtttttagattaatacacgacatttgttttcacccgggcgacgcctctccgcgcagaagccgcgg

SEQ ID NO: 2385 - DNA, 513 bp, Homo sapiens
  source 1..513: mol_type = other DNA
ttccatccttttattaagtaatcaaacatagcccatttgaatgttggaaaagaactgtcagaaatacaagttcttattttgtactttggtaacatgaattttacacttagttgaacatgaagaatcaaaaaagctctggattgttgtaataattgtttagaattttagacatttgacctttgactttaagatgaatttcagtgtcctaggctattattaccaccactgagtggcttaaataatcctgtcatggtaattaaaaccctgggtctcgaccaattgcctaattataagaggatatatttaggctcttatttcatccacacaaaaacttgtgtaacaggcttccaagtgcctgggaacacgtgggtggcactcgctggaatccagcgctcgggcagccctgggaggacgcgctcagctgcgaggaggtgaccggcggcggcgcgggcagtccggaggggcgggacggggcggggcaaggcgggggccgggccggaggaggcgggctcc

SEQ ID NO: 2386 - DNA, 641 bp, Homo sapiens
  source 1..641: mol_type = other DNA
tccatctatgctgtattaaaattaaattgtaacatgatcggttcacctcataatgatctttatttcataaaacaatttgagatgaggtaaaatttgacttcaaaactaacataacaccataaatttccaaaatagttttataaaaaaattaaaaagcactatagatagataacataccttaatttttattttattttatttatttacaagcgatgctgggattacaggactggccactgcgggagctgcggcagctgcggcctctgggtacgtcctgtaatggccacattacaggacaggccatcgcgcctggccaatgccttaattttcaaagtcaaatttgtctttaaaaagaatgaattcctaccctttgggggtatttatttttgcaacttccatccttttattaagtaatcaaacatagcccatttgaatgttggaaaagaactgtcagaaatacaagttcttattttgtactttggtaacatgaattttacacttagttgaacatgaagaatcaaaaaagctctggattgttgtaataattgtttagaattttagacatttgacctttgactttaagatgaatttcagtgtcctaggctattattaccaccactgagtggcttaaataatcctgt

SEQ ID NO: 2387 - DNA, 217 bp, Homo sapiens
  source 1..217: mol_type = other DNA
gagatcctttaaccactaagacccttagcatattaatcattgttttaaattatagctggacatgatataccaggtgaaaggagctgctataaatttccttcccccaagtcactgaggctctgaaaaaaaccccagttagactctagttaactagtttttgctgagggcaggccttgttaagaacaaggattttcctaacatacttagagtcacatga

SEQ ID NO: 2388 - DNA, 466 bp, Homo sapiens
  source 1..466: mol_type = other DNA
taccatttaaaaaattgggtagtctggaagtgttctaaattggactttttttttctggactcggtcttttccactcaaaaccaacaaaaactttcaaaagggcttctcctaagtcctagaggtctttaaagcagggacccgggggagcctctggtcgcacccgagagcacgtgctcaggtacgcgcgcacctgacgccgcttggtgcgcgccgcggggtactgggtacgtgctccgcgcgcgcgcgcccggcaaagttccccgtacgtgcgccgtacgtgggcgcggtgccccagcgctcagcgtttcagcgagtgagtgggctccgtgcccagctgaagtctgggaggggcacttttccaggcggtcgcggctccccctggcggcggatgtgcctcgctggaggggcgcagtcaggcgttctccgcgggcagccggcggcggggccttgccttacagcgcggggt

SEQ ID NO: 2389 - DNA, 338 bp, Homo sapiens
  source 1..338: mol_type = other DNA
cgctgctagtagcagcgacagcagtaacagcgaaacacctcccttctttcagaatgtgagaaaaaaatgggatttgcccacctggactgaaggtggcccccctcctcccagagaagggatgagggggagtctcattggctgggcctccagctccatctccacagggagattgcggggagagccgggttggccgcgtctggggccgaaacccaccgcccccgattcccgccagctcagggctgtgccggatgcaagcccgcccgagggaacagtagccgggaggctgccctctgcccctagtcctggggaccagaggcggtgccgagcctgggggcggt

SEQ ID NO: 2390 - DNA, 471 bp, Homo sapiens
  source 1..471: mol_type = other DNA
ataataaaggctttttactacaacaaaaaatttaaaagaaaaatctcagtgagtgtgtagtgttaataaaatctgcctcatggcaagttattaaatctttctgaaacattagaataagtaaacataattagtaaaatcacaagtgtgctatatctattacatcattttactgaattctacgatacatgtaattttaaagggaaggaaaaataaataaaaaataaatgacaacattaaaaagtgatttaaaataaagttttctgccatcatgcattagtaaagtaatccatttacatggtttcaatagaaaccataggtcttaactacatattagtaaaaaaaataaaatcataaccatttcataatcatcacattttcaaattatttcaacatatataatttatcacataaaagcaaaatctctatccctaccttaggtttttagtcaaaatgaatgcaaagctctgtcag

SEQ ID NO: 2391 - DNA, 553 bp, Homo sapiens
  source 1..553: mol_type = other DNA
attcaaaaagtggagtattaaataacaatgtgtttgaatggtccaaacacaatttttggtgaaaaactctaaacataagaataaactgcttctttttcattatacaaagtacaaacatgttcttgaagatcaatatccagcatatgatttatgttttccttatacatattacactacaatacaaagttttaaaaatcagcatttcaatttgttgatttttggattattaaacctatttacgtcaaagttgcttcatacacatatacaaaaagtatttagaaaactaatttcataaattgctagaaaaattcatcaagcactgcattcttggcaaagtttgtacacattgtctgggtgctgattgtgaaaacattgcctaaaccaaagttttgtatgtgatttctttttctgaggtttatacacaatagacccgaatagagtttaagtttatgaaatccagaggatatcaccagctgctgatttgcacattgaacattttccaacggagaatttccctagcttaaaaagtagtttcaacttccttttgcagcaa

SEQ ID NO: 2392 - DNA, 694 bp, Homo sapiens
  source 1..694: mol_type = other DNA
agtatttgatgattaatcttagctcaatagttcagattgtttgaaatgaaaataaaattccgtaagctcattctagactaaaccctgaaactgttttaccggaattctatttacacttccgagtgagaagcattgctatagtctattcactacaatatgaaactctctgatgaattttgcattgttcagcataatatccttaatcattggcaattaaattatctgaggttatttttattattataggctttttaaaaaaatttttccacatctccaatttggatcattttcaaaatgtttaattctttgcttattcgctaagaaaatgcctatttgagtttatttttaagaggctaaaatgtataagcaggatgattgcaaacaaaaatctggtatcacataatctatttatgctgactttttgcattttataaattaatgttaaataaatagaactggtaatatttgtttactcaaactcagatatccaggaaaactttcgtttacacttacaaaaaatagtttcatgtcttttcctcaatattacatttaaatttattaaaatcaacaaaatatttgatgagattgtctacttattttaaattcgtcttgaaatatatttgtaactgttatcagttgatttgctactcaaaatgaacactaggtggaaccacttcttttttttctagtgtcg

SEQ ID NO: 2393 - DNA, 562 bp, Homo sapiens
  source 1..562: mol_type = other DNA
acggtgaaaccccgtctctgcagtgagccgagttcgcgccactgcactccagccttcaataaaaacaacaaaaaaagtaatttttctctttatatttatattttattttaaagcatttagttgacaaataaaaatatattttgatgtttgacaatatgttgttttgatatatttatgctacaaagattaccacaaattaattagcacattcttcatcacctatgcttagcattaatctgctttcttaccaattttcaaataaacaatacaatattattagctctaaatatcactagatctctatgtttgattatattcatattatagctgaaagtttgtactctttgaccaatatctactgatgtaatgaatcattgataatacacatcgattaccattctaagtttattcaaatcaatatgatgtttctacatagttggtttggatagtgttttgagaaataattcctgaaccatcatataacattctacttgaaaacctgaaagtctatgaagatttgcatactacttaatgtgtaatatcccgagaaattatggaaaat

SEQ ID NO: 2394 - DNA, 512 bp, Homo sapiens
  source 1..512: mol_type = other DNA
agtatgctactctaaacaaaaggatccagacacaccggtttgttttcatacaaccttatgtaattaagttgggtcctgagagttactcattaatgattcatctgtattccagtgtttaattttaaaattagtgttctcattttaagaagagtgtttattttcaacttgaaatcaaccccttcattttcttctgcattgcagaagatcagcctgaaactacagtttctgaattatctggtagcagctgctggtagcagctgagatcaccaacagtgattctggacgttttgctgagaaacatccactgtttatggaaactctctttactcaaaaaatgagaaataaagtaaattaatgttttatgttacttttgcattcagattactgtgcctaaataaaattgtaccagtacaaactggaattattgaagcattttgtaaaactctctgaactttgatatttactaaatgaccttaaagcccctagcttcatggtagtgcacttaaattcag

SEQ ID NO: 2395 - DNA, 529 bp, Homo sapiens
  source 1..529: mol_type = other DNA
aaggaaaagcatagtttttttaaagtagttttattttaatgtatattggtataaattccaatgtttttcactcagcttcttaaatataagtttatgccttattgtcaaaatgggaagttttttattaagtatattcagtgtttttaaaaaatttttatcatacttttccattttataattcctacgggatttttaagaaccatcatcaatttcaaagaatgttgaatatgaaataagaaactttctttgtcatagttttctatgtttagcatgtattcattcggaaagatatttcttaatcctgatctaccataagcagcaatatttgttaatgttttatgtgttccttcagtaaggagaaaagaacttaaatatattactttcagtttaaaggattaaaatttcttccaggactcatttcttttaccagaaatcacaaaactgttgatattatataaagtgctgtgttttattttgatttgctctcacaataaatcaagtgatgaaatgatgctattgacaatggtat

SEQ ID NO: 2396 - DNA, 610 bp, Homo sapiens
  source 1..610: mol_type = other DNA
atagtttgcctacctatataaattctccttggagattgtttgaaatgaaaatacaattccataagctcattccagggaattctatgcacacttctgtgtgagaagcattgctagatgaattttgcattgttcagcatagtatccttaatcattggcaattaaattatctgaagttatttttattattatagacttatttcttgggtaattttcaaaatgtgtttttaaatctttgcttattcactaagaaaatgcctatttgtgtttatttttaagaggctaaaatgtataagcaggatgattgcaaacaaaaatctggtatcacataatctatttatgctgactttttgcattttataaattaatgttaaataaatagaactggtaatatttgtttactcaaactcagatatccaggaaaactttcgtttacacttgtacctgacaaaaaatagtttcatgtcttttcttcaatattacatttaaatttattaaaatcaacaaaatatttgatgagattgtctacttattttaaattcgtcttgaaacatatttgtaactgtattagttgatttgctactcaaaatgaacactaggtggaaccacttct

SEQ ID NO: 2397 - DNA, 524 bp, Homo sapiens
  source 1..524: mol_type = other DNA
actggtttgttttcatacgatccttaaataattaagttatcatttatgattcatggaagaacttcaaacaattttccagtctttaattttaaaattagtgttctcgttgtaaggatagtattatgaccattttttcttctccattgcagaagataagtctgaaactacagtttctgaagcctgtttctcacaaggcattatctgtcagcagctgctggtagcagctgagatcaccaacagtagcgcttctggaagttttcctgagaaacatccactgcaggataattagtgagggcatcactaagattcctgaacttcagaattttctggaaattttcattccctgtattaaaactctctttacttaaaaaataagaaataaaaatgaattaatgttttatgttacttttggagttgattattccaggatgattgtgtaacaagaatcattgaagcattttgcaaaactctctgaactttgatatttactaagtgaaagtttgtggtagtgcacttaaattcag

SEQ ID NO: 2398 - DNA, 625 bp, Homo sapiens
  source 1..625: mol_type = other DNA
tctgagccacagaactgggctgtgagacaaagaactctttttttctggaataaatatttcccaacagtatgctctttggccaatttctagagattatttttataattttatcgagtgaatataccaagacccaggaacaaaattattctgaagtaaaattggttcaacaattttgggaaccattacataccaaaaattattcttgatttgactttttatagtctacaaaatatgaaaactattaagaagttacctcattcttttttttttttttgggagtggtgcgatctcagctcactgtgaactccgcctcccgtggtctgaagttacctcattcttaataccagttttaagtggaatttataactagaacagtgatgctgttatgttaagatgaggactgatcaccttcacttgctttcttggctagaaaaaagaaggggcttcctctttcctcttcaatggcccatttctgaatattccaaactcagagggaaattgaacagcttttattttgctcaagttaatattacatgataaactcagagtattattgtgaaaacactgattagacactatttgcttattcaaaggactttactaaactagcttccagttagtacac

SEQ ID NO: 2399 - DNA, 480 bp, Homo sapiens
  source 1..480: mol_type = other DNA
tatggagactttctggaaaaaatatttcccaacattatgctgtttggccaatttccagagacaaccaatggttacttttaaattttaacaaaatgattttgaattataattctgttcttcaaacatttcaggaaacgttacttggcaaaaattattcttgagtctcgctctgtcgcccaggctggagtgcagtggcgcgatctccactcagagtagctgggatctcgatctcctgaccttgtgatccaccaaaaataattcttgattagaccttttatagtttatgaaatattaaaactgttaagaaggtacctaattcttagtgccagttttaaaagggaatttacaactacaaaagtgatattgttgtattatctgattgttccaaactcagagactcggtgactacaacaaggaaattgaacagcagttattttgcttaaataaatattacataacgagctgagaatattattgtga

SEQ ID NO: 2400 - DNA, 401 bp, Homo sapiens
  source 1..401: mol_type = other DNA
caactctgcaggaggggggaagaaaattaggccacccatcctcctgtaaaatcacacgctctaggaccttgcgctttgggactcagaaatccaaaatctcaggcactagctccaaaagttgtccttggcttatataaacatttttctattttttttctgtgtacaatgataggtataaaattttttttcttagtaatcgcgtttagatttaaccgtttaagtcagaaaaataacgaaacgagtgggttcttgctgtttggtagattacaaactattaaatacaccagaatcctcacggtttcgatcggggtaggccaccgagccactgcgaaaacccggagtaacggattcgaagcggcgtgcgcgcacatgcgcactcgttcgcgcagggtcgcgcgccg

SEQ ID NO: 2401 - DNA, 495 bp, Homo sapiens
  source 1..495: mol_type = other DNA
taaaaaatccctagcctagggtcgggcgccgctcaggcctgtaatcccagcacaggagttccagaccagcctggccagtcgtggtgaggcgcgcctctaattccagctacttgcgcgttgcagtgaaccaagatcacgtcactgcactccactcaaaataaataaataatttaaaaaatccctaatatgtaagctataattattattagatccctacaattgaaataaaaactaataagatatttgtgaagggcattgccagtcaaaacaatcatttatgaattactggtaatctcaggggtaattaacagcatgtaaatgtactgagtcctaaaataagcatgttcatacaaactaattatctataaaccaatttttgcctacgtaacagttttatctatgattgttcctggaaaccgcaatgattactacatgtggaaatgaattctaagccccgggttttagacggtggccaggattcctcattgggacgag

SEQ ID NO: 2402 - DNA, 228 bp, Homo sapiens
  source 1..228: mol_type = other DNA
ttataaaggaaaactacttacgaattctttctaattataactgaatgatgataaaatcacagcttacactacctggcggccgcgagatccgagtcatgctttcctcgggcgggcattcccaggcccgggcaaggcggagaaggctcccccgctggctcccagcagctgagctccacgggcggcgcgcgaccctgcgcgaacgagtgcgcatgtgcgcgcacgccgctt

SEQ ID NO: 2403 - DNA, 450 bp, Homo sapiens
  source 1..450: mol_type = other DNA
ggggggattttttcctattttgtattttaaattaaaactcattagaatgtaaactccatgagggcaataattttaatccagttttttcactcatgacatttctcatgaatgaaaacactactattataagtaatactattctatcattgagacaactatggttatatttcaacatcaggtatctgttatctcatgttcctaagttcatctttttacctgatcaatattagtaaagatctatggcctcaagtgaactttactctatgaatttacaattgggaacttaggttgaaaatttacctagtattaatttattgtaagtaatgtcaattaatatagttgtgttattttaacattatttcaaaatattttaagtgaaatataagactcgttattagacagaggttataaattattaactttttcctcaagagaagtattgtgtactta

SEQ ID NO: 2404 - DNA, 701 bp, Homo sapiens
  source 1..701: mol_type = other DNA
tctttaaaaataataattgtcatgaattctataaaaattaaataattttaaatggataaatcctacttaataatattgataaaaaacattaagctgactgtcaaaatattagaaaatataaagacttcaaaatatatgttatatagttaaatatctggcagatttataaagctttgtaaaaatcagctatagaaattgcattttaaagtgtaacagtgaacagttttaacaatggaaaaataacaccaattagaaaataaagcattctggttttaattaatggatgttttcatggtgtctaataaaaatacaattttaaggacttgaacaatttaatctgagaaaatattgtgtatttaaagcaagtgtattttttaaataagcaaacatgtttacattcatcaattatagtaaaacaaaagctcaagaaatcccagagcatataatttcatgaaccgagaataaaacccaacttacaaacagcagaaatctgagttgtgggaatataatttatgaacagaaaagattacttgtctgtgaattattttctgaagatgaaagtaaatatacaggaacatacggtattcctttaaaagttgccagatcataattgtgtggcaaggcagttatcagaaattaatccctctattgagagcaattgaagacactattatccaatccagcctaagaagcacaaactg

SEQ ID NO: 2405 - DNA, 598 bp, Homo sapiens
  source 1..598: mol_type = other DNA
atttattatatatagagatcttggagctaagattttatataaattttcaaaagtaaaatagccgcgcagagtgtttgtcacatagtatgtgttaaataaatatccactgtgtgactgaatacatgattggtgacttaatccatgaatatacagaaaaacaaattcttgctggaaaattagtttaaaaaaatgaccaggaagaagaaaacttcaatttacctgagacttgatgtcacttgtcttggaaaatttggcttttgaaagtcattctacctcaacatttcagaaattatgcttggctaaacacagatttattagcaagtacaatcttctaattattgatttttgcttttgttataaaaaaaggatttccacagaaaataattccctgagggctctgatgcatgaggatcctggtctgccctgcagacttataaggtttgagcatgacacatctattttctcattctaattaattccgtgtgtatatgtatatatatgtgtacagattatttccattaaaccccaaatgtgttaaagaaattttaagaaacatctccgacattatcaagtagagataaggcaaactttttcttcc

SEQ ID NO: 2406 - DNA, 372 bp, Homo sapiens
  source 1..372: mol_type = other DNA
ctggccttccacagtcatttgaatgtccatcataagatcttcatctgtaaaatgctgatgaaagtatctatcaacctatgacaagtgtctgcctcccacatgcgcagacaagtggggcactaccatttggctacattcctgaatcagctctggatttcagagagcctggaatctggactggacccagaaaggaagccggtttggttcatgcgggggcaccttgcctttctggctaggtggcaaagcctccccctgcaccctctggccgcccgggcgcggggacctggcccccgcctcctccacagtctccgacttgcgagccgcacggcccaggtgaagccgctgggcgcgtccccgcgcgccccttccccc

SEQ ID NO: 2407 - DNA, 490 bp, Homo sapiens
  source 1..490: mol_type = other DNA
catctgtaaaatgctgatgaaagtatctatcaacctatgacaagtgtctgcctcccacatgcgcagacaagtggggcactaccatttggctacattcctgaatcagctctggatttcagagagcctggaatctggactggacccagaaaggaagccggtttggttcatgcgggggcaccttgcctttctggctaggtggcaaagcctccccctgcaccctctggccgcccgggcgcggggacctggcccccgcctcctccacagtctccgacttgcgagccgcacggcccaggtgaagccgctgggcgcgtccccgcgcgccccttccccctcccggcgacttcctgatttgcaagaaggtgcaggagccgcagcgggcggccccggtcgcaggaactgagaggcctcagctttggtggcggctaccggcggagacgggggcggcggccacgccaccgctgctgtcacagaaaggctctggtggggggaa

SEQ ID NO: 2408 - DNA, 444 bp, Homo sapiens
  source 1..444: mol_type = other DNA
tcactacacactgatgcagtaattttattaagtcacttgcaaagcccagctgtcctgattggcagcttctggaattatgcaccgtgaatgtcctttttacaaaggaaacatataaaactaagaagacgttgatcagtttcacagatccttctttctgttccttctttcccagagaagattacaagcaaaaatggtcttaccagaccattttttggcaagtcttacttgcctaagacttgggtctgtgacaatttttatcttgttataatttgcaatagtaagagatcatatgaacttgtgctgtggaattataccattgttattttctcatattttaggaaagcaaaactttgttgaactattatcatcatgttagatgatcatttatgttaaattctaatgacattgctcattggatgtgattactcattaaattatttccca

SEQ ID NO: 2409 - DNA, 577 bp, Homo sapiens
  source 1..577: mol_type = other DNA
aatgaaccaatagggttgtttcaatcacctcctactaagatttaagaaaatgaaaatctacaactgaataagtattgaagagcactaacaaaattggtactcttcagccctccttttcttgaaacccagacggggggtaggaagatggggtggtgttaatttaatcctaacacctgaaattacttcccgggcttgccgtaattttctcaaatacaattatgtgacggtatcaagatcactttcatccatcagaaaggagataatagttttaggttggattttgtaaatattcagcaacatgaacacaacaccccttattctagggtgggccaaagaaccaagcaaagagccttttctggataggcccaaggtggttattcacaaacctcgggtcttttgatcaaacagttgtggagattaagtccaaacagcgggcccgctggtgaaggcagaaggctcagtccgtccgcctccacctgctgccacggcagcgcgaaccgaccccacgcagcgatggccacgagctgcccaagaccggctcgccgcgcccaggcccgcgttggtcgcccctccgggc

SEQ ID NO: 2410 - DNA, 507 bp, Homo sapiens
  source 1..507: mol_type = other DNA
agagatgccccggctctctcgttccgacctcgagcgcagaatactcccgagtgctgggttcctgatacccagcccggtgcaagcaccagctggcggcagcatcttttaggtacaagctgcctggctggggggccgggagcccagggcacgccgcgggactccagtccccctgctgcgccccagcctacgctctgggctttatgaggtctctgggcaccggcccgcgtctaaattaattttcatccaatgctgggaccctcagcgagacgcagggactggcccgcacctctggccgccgcctcccgccgagaaccgagttctagtctggacatcaaggcctccctcggagtgcgcccggacgcccgggagtttcagggacttcttgggagcctaccggaggaaggcccggctttgctccaagccgcgtccctacctgaggtctccacgggaggagcggtttggacgcgccccaccggatgggagcttggggaagccgggccgtaccgc

SEQ ID NO: 2411 - DNA, 408 bp, Homo sapiens
  source 1..408: mol_type = other DNA
tgattttgctgagcaggggcaatatgcaacatttcaaacacccccatttgggggttgggagaggtagacaaagtaggttgaagtcctgtatttactgtgaattgactgaggggacttctcagagactcctcaaggcatgcccttttgtgagaggacctgctgtctctgaaaggactgctgcccccagccgattacttacagtaaatagcagccctgctgtcaggtatagctgcattttggcacccggaggacttaaactgctccattgcaaataacattatttttgaccctgagaaaaatcttcagtttcatggaagaggtcactccaggattcccggtcgggctcccccgggcggagggaagcgggtctgcggccgggcggctgatgtgccaggacacaggcaccgc

SEQ ID NO: 2412 - DNA, 379 bp, Homo sapiens
  source 1..379: mol_type = other DNA
atgccaagctttgtggttaagcactttgctttaaaataacttgcagccaggtcacaaaattaatcactgtatttcaaactccagactcaggaaaatcaccgcttgcaagtgggggcacttacatattagcagccgaccctgggttcttaaaaagcagccggggaagagggctcaggggaccggacgcggtgccccgcaccacgctaggccaccggaagagaggggccaggaggggctcctccagagcgacttcggctggaaaccgccgaggctcccccagctccagggagcgccggggacgcaggcgggaagcctccatcgggcagccggcctggactcacgacgcggggtggggccggcgcccgccccgcccctctcc

SEQ ID NO: 2413 - DNA, 531 bp, Homo sapiens
  source 1..531: mol_type = other DNA
cccaggctggagtgcagtggcagtagctgggactgttattagtgatattcaacatgctttatggttatttccaatatgtctattaggttgttaataaagttaagacaaaattactctgctttatgaagagaaaagtaatcatttttaacttatttctttgttgagaatactttaaaaaagcttttagcaatgagtgtcaggaaacagattccagaaccttattattataggaaattatgtatcagatgaagaatactacagttatcattgttacaaaagaatgaaatatgaaaaccctatacacaattctctttcacagattacatagttttaaatctttgtgagatctctgtgtacacatgtgttaatatttttagggatttatagtatccaaagtagcataaataatatttttaggagacaattttagcataagattgaagaaagtataaaaaataataggttattgaattagaacagtgattgaagaatttgaaaaatgttctattttctggtgttaataatatagtt

SEQ ID NO: 2414 - DNA, 650 bp, Homo sapiens
  source 1..650: mol_type = other DNA
aagtcaacagattagcttttcacttcaaataaaaattttagatacatataaatgatactttgtgatttgtccaattgctactggatcgaatcaaatcaagtatgatggattttattgtattatcttaggacaatactcaccacaaacactgaataatataaaatgcatgtttaaattattttaacttaatcccaaaacctagtctatttctatcatgattactactactaaaattactaattgtttagtcaccatagtaagatcttcctggaacttcaccaaaagaaatctttttattccagtcacctgagaccttgggggaaaaaaatccgggaatctctttcctaacaaaagattaacacgttttctccaagcagaaaagatcttgttacttaaaagaaaaactcagtaaacatgtcaatgtttcttggaagattagggaaaccaacattcttaaaaggtctcttattcattatttataagtagatgcaacacctcatttatacctccttatcaagagctaagattggcagaaatggtaagttctcaatttatgcacattataaagccagtttgaaacagctgcatttggaacttgctgttgacacaataatctgagttatatgttaatttctaaaagaataaatgaa

SEQ ID NO: 2415 - DNA, 271 bp, Homo sapiens
  source 1..271: mol_type = other DNA
ctgccagggtaggcgatggggctagcgcccagtcctgcgggggcaggcgccaagctcccgggagtattggcaagcttcaaatgagacattagaccgtgtgtacaggtccatgccctgtcccctacactctaattttctcaaagaaaattgttttgccaaaagtaacctcaaaattgctggaggaaatccaaagtttgaagttgatattctctgtgtccgatcttgaactcggagtgtgcgcgcgcgcgcgcgtgtgtctttgttgtctgaa

SEQ ID NO: 2416 - DNA, 465 bp, Homo sapiens
  source 1..465: mol_type = other DNA
cttgggaggctgaagcaggagatgttgagccttgcaggtcaaggctgcagtaagccatgatcaggtcactgcggacatgaacagaaatatatttcaattgatgtcaatttgtttggtttactgtggtaaatagatgtttagttaactgttttcaagtacagtttccagtagaaaaataagtatacaatcaaaaatgtccattgttgcaataccctgaaataatttgaaaaattcagaatctacttagttttaaggtctttgaggtcaggagcctaaacataaggaggctataaagtactagacattttgtgttctttgtaattgacatttgaataaataccaagcatggaaagcttctagatgcacattctagatactgtagggaggctctattagacctgcagttgttacagccccagatatcggcagctgtgtttctaaccatggcttgataaccttgcttgg

SEQ ID NO: 2417 - DNA, 670 bp, Homo sapiens
  source 1..670: mol_type = other DNA
tgttcaaataaatgagttgcacatgtgtgtacttttatttttaaaggcatatagatattgtattaataaaaccaattcatctaattgtattgttgaatttatactttttaagatggacttaactaagaacatcagaatggtgaagagcattgtgttaatacaattcattgtcttatttgttaaaaaagttgaaaaagtattgctgagaaaaaggaaacaagttaacttttgttaaaggtatctccagaaacattagtttttggaagcctgtaactatagtagaaatgacattctgattccactcctagcttcacaaggatatctgtgaaagatttggggcaaaactgttaaagtgcttttgcataagaaatgggttttactgctaaaactgccaaaaataaccagattagtagttttttcattcatttggccgtctcagtaagtcaaatattgatacttatctcttaagtaagaaaattattgattattttgtggggatttaatttaaaaaaaatggtaaaaggagcattatttggatggtttaaaaacatcttccttgatgggaaaatcttttaaaaggctttctaacttggtgtaattacttgaattaaggaagtgcaatgccattctactgacttagaacaacttatcatcacctagcagttcatgc

SEQ ID NO: 2418 - DNA, 396 bp, Homo sapiens
  source 1..396: mol_type = other DNA
tcactcgaatgctgcaacaagtagctgggctcaggaataataactttataactatgaaaaatgtgttacatattcaccattttgccagcattaatctcaaagcataagttttaccttttggggataaagagatagattgtgttttagccatatgaccaatgtagatgtagtatttcagagtgtcgatcacatttgtagtcatcacttaaagaattaatgtctgccaatgttatcatctaaaatgtatttacagaggtcagaagagctatgtctgtcctcctctatgcaaagaggtgatgacatcaacaaagtttagttagcctaagttagtgccattatctggcaagaataacctgcatagagtcatgtgatgagtcaaagcctatcaaaagtttc

SEQ ID NO: 2419 - DNA, 431 bp, Homo sapiens
  source 1..431: mol_type = other DNA
caagtagctgggctcaggaataataactttataactatgaaaaatgtgttacatattcaccattttgccagcattaatctcaaagcataagttttaccttttggggataaagagatagattgtgttttagccatatgaccaatgtagatgtagtatttcagagtgtcgatcacatttgtagtcatcacttaaagaattaatgtctgccaatgttatcatctaaaatgtatttacagaggtcagaagagctatgtctgtcctcctctatgcaaagaggtgatgacatcaacaaagtttagttagcctaagttagtgccattatctggcaagaataacctgcatagagtcatgtgatgagtcaaagcctatcaaaagtttccattcttctgattagaaaccatcatgaaactggatacatggtttacagcagg

SEQ ID NO: 2420 - DNA, 494 bp, Homo sapiens
  source 1..494: mol_type = other DNA
taaaaaacattgttgctttacaatatctatttattatttttcagaatgtatttgtaatattttttcagatttcaaaatcttattcgagaccagcctggcctgtaatcccagctactccagaggctgaggcaggagaatcgcggaggcggaggttgcaggggccactgcactccagcctgggctgcagagcaagtttaactctaaacctcagttcctcatctgtaaacgagggataacattaatatttatctcacaagattttcaggactgtttaaaaattcatataagacatttagcatatttcctacgttaattattatggtgaagtcttcgatgtaatggcttcttttagattaaagaccgacaagagtgtcactgtcatgcttttcgaacgaggggcccgctgcgcccgcgaccgccgccccttcctctgagcccaaccaccggcacttccggggggcgggtggaaggcgccgacgcgacgcccagcagcc

SEQ ID NO: 2421 - DNA, 344 bp, Homo sapiens
  source 1..344: mol_type = other DNA
tttgattttaagattttacttcataattttcccttacaagaaaaatttctaaatttgcaatgagtttcaggaaagagttggttaatttttcataaacaatataaagggccagattatccagtagtatgcgcccattattagtgcttccaaattataacataagcacctgttttaataaatgttgagcatttgcttctaggtttgaattttatttcaagacctggattgcaaaacacggccccagtgattgacaggcaggccgggcggaagctgcggcgcaggcgccctggctccttagccctcccctctggccgggtcgaggagttcccagcagacactgcgcc

SEQ ID NO: 2422 - DNA, 456 bp, Homo sapiens
  source 1..456: mol_type = other DNA
atagtttcattagcatactttaaattttacatatttggtaaatatgctcttttgaatgcatcgactattacactgaaaatatttttaaatacttaaggcacctgaatatactgcttgggacacacaaggaacaagaaccgtgacttgtgttattttcttggaaatattatccagcttatcatatatgccacatcaagctgactccgtttaaattttgagtggctctactagctaaagccagaaaagggtttttgggcccaacgggcagaagtgccccagcccggaccagttccgagatttaccaccagcccagagctgggcgggggcgtggaaaacgcgaggagccttcccgcccctctcctccggctcccagccgagctccgcccccgcggtggccccgcctccccgccgcccggaaagcgggctgcggccccctcccaaaacccggggaagtgg

SEQ ID NO: 2423 - DNA, 244 bp, Homo sapiens
  source 1..244: mol_type = other DNA
cctggacagccctgactggaaagttgtcagcagctgtcagggaaggctggcattagcttgttttgtgaaagaatttatgctcttttctgaagagatatagaaaatatctcgatatcatgaaattaacacagaagtgtgtgtcacataatgaacattttaagtaaatatcaacctctcagcagtgcaggcagcagcagccacagccgccccgaatcccgggcgcgggcggggagcgaggctgggc

SEQ ID NO: 2424 - DNA, 332 bp, Homo sapiens
  source 1..332: mol_type = other DNA
aggtgctcggaactgagggcccccttttcttgggctaggagcctggccaggaatcaaccttcgagagttggcgttactggaataaatgcagaagggaagctttcctggcaatcgctgtgggatccccgggagaccagggttcttaccatgctcagtttcttcatttatgaaatgagggtcccattgaagccgaggttctgctactccaggagccgaggttccccgtggccgcgagccaagaggtccctttaaaggcgcgagtccgcggcggctcctgggcggggcggggcccggcctgggctcggggctggctcggggcgggctcggggccg

SEQ ID NO: 2425 - DNA, 242 bp, Homo sapiens
  source 1..242: mol_type = other DNA
ccctgctaatttttgtattttttgagtcctgtgggattacaggcgtgagatgcctggcctcagtgaacatagctgtcctgacttaggctgcccagtgccttctccagacaatgtcatggggctcctcagggcagctgcctggcctcagaagctcaggcccggcaggctgggagcgaggagagtaatcctcctgcccccactcctgcccccgccccctggctggctcagcagggcaggctcag

SEQ ID NO: 2426 - DNA, 276 bp, Homo sapiens
  source 1..276: mol_type = other DNA
gcctgcgaggggcttgattccacctggacccagcctttcgccagggccaaagccccggtgtcctcactccgggtctggaagaggccattttgccaggcccagcacatgtaggggtagagacgttgccgcgcagaaagtcttctgcagcaaagtaaataacatttccagattttgatttctttctaaaacagcaagatgaaacaagctgagttttataatatcccttgcgcaagagtctccccgcccaggtgaaggcgggtgccatggcgacagcgc

SEQ ID NO: 2427 - DNA, 303 bp, Homo sapiens
  source 1..303: mol_type = other DNA
tgctattactctgtccttaaggagagagaaggtggctctttcaaagcacacctgagcaagctcaccttctccagcaggcctgctgcaaaggtcccaagggaccagaaaaagggtcgtataaatgaggcttcatggggcaaatttacactaagcctggttaagagcttaaagctgactgatgtcacaggacccttccatctctgacctcctctgagctagaatgttagccctggggccttgccctgccaagcctggactggaggagagggagcagaggcgcctgcagcaaccgacacctgctcc

SEQ ID NO: 2428 - DNA, 334 bp, Homo sapiens
  source 1..334: mol_type = other DNA
taatggcctctattaacagcaagttgtaaactgtgagtgtttcacatggagtggagcctaggcgagatgaaattaaagtccaggtcaaggaaggtagtttcaatcactggccaacagctgcgtgcccttgggtaagctagacttaagttccattccttctttcagaaccagccaagtaattagcttggtttccttcaagtcaataacaatgaaattggcattccttggactcttcggagtctcagttttatcctcaaaaggcagagaggcgcaggttttagcttaacccactgcggattagaacccgagaggctgccgcggcctctgctccctc

SEQ ID NO: 2429 - DNA, 537 bp, Homo sapiens
  source 1..537: mol_type = other DNA
ctccacgcctggagaggatgctacatgaataaagtaataagtccagagtgaaatttcagggtaaagcagcttttatccgagttagatttaatttaccttaaattaactagcattcacgtattcacctatttaaaatattttttattaagcgcctaatattatgtgtgtgttttaccggggtatactcatgaacaacaaataaccaccgtttcttcagaggaagctcctttagagtagatgggttagcccgggagcctccaccgccggggttggtctctgctatgacctcagtacagaggtggacgcctggctctcctgggcagcctggtcaagaaagactcctttctttcctagagagaggtctccctcggttcctgagctgagcacatgctttctcagtgatccctggggcctcaagcccagcgtcccacacaggggactcgcagccctgcccccaagagcgctggctccgcagcagcagtgccctgcagctccgcgtctgagcagcagcagcgcgcggcccggtggagtgggtgg

SEQ ID NO: 2430 - DNA, 303 bp, Homo sapiens
  source 1..303: mol_type = other DNA
agccaaagtcagctcagctgcttagccttgaacatacaagtgcatgtgcatggtcagacacaggtttatagccccgcactgcttgattttaaagcgagaagacccacccctcactggggctggcagagccggcaacctgcctaaggctgctcagtccattagagccagaagattctggtcccagctggccctcccaggcctgggttgctggcaaatagcttatctgagcagctggaggaccacatgggcttatatggcgtggggtacatgttcctgtagccttgtcagggctggctcaccagg

SEQ ID NO: 2431 - DNA, 637 bp, Homo sapiens
  source 1..637: mol_type = other DNA
gcccacctgaggctggttcctggatagaagcacctggccccgcaccagcccagatgggcacctagggagatatctgtgtttaatctttccttggggaagaaaaactgagcttccgtgctttcacaaatgttttcagaaagcaatgcctcattcatctcagcgaggcctactgggacggggagtggggagggcgctccctgcgaaggggccccgaaggcgcgggcgctctagacccgagatcgggctaagtcgggttcccggcaggggtccccgcccccagcccagctcctcggcaccccgggccgcggcacagcgcggggaggcgtcccagcgccaagctggtcggactggttctgagcaggaagtctcccgccctcgccccgggcagccgaccagccccacgccggccccgggcgtccgtcgttcggtcccgcgatccgtccgacggtccacccagtgcttgcggcctcgcggccgggccggcctgggctgcaatcaatgcggctttgtctgggacgcccacatcccagaggccattcccgggtcggcaaatcggagcgcggccggggcgcgcgggggtgagataagcggccatgtgatcccacctgggctggaggggcgccaggtgaggcggcgg

SEQ ID NO: 2432 - DNA, 532 bp, Homo sapiens
  source 1..532: mol_type = other DNA
gagatctcagagctggaaggcctgagcagcgaggcccaggagcatgagggcagttctggctcggtctcagggcaggaacagcaactgtgcgctgactgcccacctgaggctggttcctggatagaagcacctggccccgcaccagcccagatgggcacctagggagatatctgtgtttaatctttccttggggaagaaaaactgagcttccgtgctttcacaaatgttttcagaaagcaatgcctcattcatctcagcgaggcctactgggacggggagtggggagggcgctccctgcgaaggggccccgaaggcgcgggcgctctagacccgagatcgggctaagtcgggttcccggcaggggtccccgcccccagcccagctcctcggcaccccgggccgcggcacagcgcggggaggcgtcccagcgccaagctggtcggactggttctgagcaggaagtctcccgccctcgccccgggcagccgaccagccccacgccggccccgggcgtccgtcgttcggtcccgcg

SEQ ID NO: 2433 - DNA, 333 bp, Homo sapiens
  source 1..333: mol_type = other DNA
ggcctgactcatatgatttccacaagtcacacagttcacaaatgtcagaagttctcatacccttgccaagaaggaaggctccctggaggagggggcggcagcgtgagatctcagagctggaaggcctgagcagcgaggcccaggagcatgagggcagttctggctcggtctcagggcaggaacagcaactgtgcgctgactgcccacctgaggctggttcctggatagaagcacctggccccgcaccagcccagatgggcacctagggagatatctgtgtttaatctttccttggggaagaaaaactgagcttccgtgctttcacaaatgttt

SEQ ID NO: 2434 - DNA, 221 bp, Homo sapiens
  source 1..221: mol_type = other DNA
gtaaacaggtgcagcccctgtggctccagtcccctgggatctgaacctgggaaatctagattccaggaaacccatctgagggggatgcagagtgtctgcagaccctcagacctccctgagcatgaaagctgagtctttagccctcttgctcagttggtggcacctatgtgcacagaatttgcctctgctcctgagccacaaattcacatggctttatgtgc

SEQ ID NO: 2435 - DNA, 221 bp, Homo sapiens; identical to SEQ ID NO: 2434
  source 1..221: mol_type = other DNA

SEQ ID NO: 2436 - DNA, 260 bp, Homo sapiens
  source 1..260: mol_type = other DNA
aaaggcaaatttcctgccatctactatgtgtcaggcacgttgacactcaagtttctcccagcctggaggagcggctcctagtgcagtcggccagggtagacttcctggacgagtcagtgctccactgagactttgtgatcacagaagcgcatgtgacttgaggggagcaggacaggacttgctgctctcctggctgcgaggaggaagggaatagcggcggtgcctgagccagggtgttgcccaggcagctgggcacatgg

SEQ ID NO: 2437 - DNA, 531 bp, Homo sapiens
  source 1..531: mol_type = other DNA
gggagaagaggtttgaactcaactctgcaaagctcttgtgtttacacaatattctagccagaacagaaagagacctctccctctgcgttcccccaccctggctgtgccatcgggactgcagacagtggcatccccaggtcacggagggggtccctcctcccccactacgaggagggcatgaatgacctcaggcctccccgcgcaatgcatgggggcctctcttgggtgctgtgcagaggctgggggccccatggcgtgccaagtaaccagcagctgtcccagagcccacccccttgctagcagcgcgctctccaaggttcaaggcctgggggagctgcggttccgagaagcggcagagcaggcttgggctgttgagtcgccctgcgcctccagtgagtgactgagcccccgctgcggccccgcccccggggccctgccggagctggtgcgcggcgcggaggggagggccggccagcgctgcgggcgggcggcgcaggaggcgagcggcggaacatgtaagggcacatcccg

SEQ ID NO: 2438 - DNA, 434 bp, Homo sapiens
  source 1..434: mol_type = other DNA
ggcagcaggctaattccccccacagggctcctttctctggaaccaggagccctcaggggggaggaacccaatgggaggaccctgctactggatcccactgtttgcacacctcacctaatctgtggtctcctgaatcccctgaggttgttaggacatcggaaggtcgcgccatcctacttggctcccggctgtgagcagaatgtgcatccgatttttagaaatttctaaaagcctcctctatggagaaggttctgcccaggcctccccgctgctcacaccccctcctgccagtgcagcgcgagtaagagagctggcatcccagcccaggtggaggtcgagcccccagccccgtcggcacctccaggcttccgaggccaccggaacggaggaggcttcggagagcccgctcgcagcctgcatcgccggggctcggg

SEQ ID NO: 2439 - DNA, 563 bp, Homo sapiens
  source 1..563: mol_type = other DNA
gcccagggtggaagacatagcagctgcatctatgggccatctgctccctgaaatgcctgcacggggcactcaggaatgtcccctggaaactgccccaggggcagcttgagtggcctgagcctgtgtctggttggagccccagagaaaagcctctatggaggcttttccaggtgttaaggtctgcgggtcctaccggatcacccagaagggctgtctaggcccagggcccagctagtgagtggatgggcagaatcagacctgccctggaagggtctgtcttaccctacctctaaggtatctcacctggaaaatgcccctcgcacgtgcaagacgttttccgcggtggcggcgacagggcgcacagtgggaccgcagcacgagctcggagcacccccagagtcggcgactcctgcccccgcccctgccggccggccttcccggggcctaggagggcagcaccgccgggcttcgcgccatgacatcagccctggagtggtgcagtgtgcaaagcccactggttggcgtggcccgggacacgccttccgcggagcggaacaaaacgg

SEQ ID NO: 2440 - DNA, 410 bp, Homo sapiens
  source 1..410: mol_type = other DNA
gcttgacatctcaggaagatcctatagtgcccccaaagttggccccttgggtaacttttagccttttcctgtagtctctaattactaagagatattgtcctttttaatcaaaatggaccattctacccaaatttaggcctctaaaagtctacaatacatggacaatgttcccttctcccatggagggaaagaattgcaggcaaacctgagggcaaagtaagcttgcagtgaagaatgggctccaacgctcctctcgggaccgcctgagtgatgctaagaagcccccctgctacaagaagcctcctcctgccacaggcacagccagtagagccaggattcctggctcctggagcccgttccctgccccggccagccaagtcaagttctatgagcgtgaccggcgggcgggg

SEQ ID NO: 2441 - DNA, 303 bp, Homo sapiens
  source 1..303: mol_type = other DNA
ttcttccctaaaagtatgagggagaacagtctaggacctaacagcactgactcgctcttggagtgcagcgattctcctgcctcagcctcccgagtagctgggggcaccaccaagcctggctaaattttgtatttttagtaatgggggccaggtgcaacttgaaagcccacatgtggaatcataagtctctgtcctgaacttctgaggagaagttctaatgccttagtccttccacaccctctggatggtctgggagaggaggctgagtcgccacctcttactcctgcttcctacaggtaccag

SEQ ID NO: 2442 - DNA, 408 bp, Homo sapiens
  source 1..408: mol_type = other DNA
cggattagaggcgtgagccactgcgcctcgccctgctccgctattcaggagcggctctgcataatttctcagggaaaaaaatttatacattttcaacaaataggattcattcccagctttgaggtttggaaaaccaagggactgggccgtggttttcccacttccgctaagatgaagagagtcacttgagccaactttggtttaaaataggggctatttgtgacccagaaagatgcatgaatataaagtcatatatcatgaactttattccaaatgagattgctaacttactgtgcaacaatccagagatccttgcaccgcccgctcccgcccgcctctggtgcgcaggcgcggcttcgcggattggccgcgcgcgggggccgtcattcggtggcgggtcccggccgc

SEQ ID NO: 2443 - DNA, 368 bp, Homo sapiens
  source 1..368: mol_type = other DNA
atactcactgtctacactgtctgaatgtagcatggggcatagtcactggcactcagtataaagtgaagggctttcactgtggatgggccccaggtggccccagcagcctgccttccctgctagtgaggccatgggcgcagggttcaggcctgtgggcaccgctggggacaaagccactctatgggggcggggtgacatccagcctctttccctctccgcccccgacaggatgtcccaggctggacgcggcagaggaggtcccccacaagtgaaggtccagccctgctcctccagggttggcccgagtccagcatagtgattgggcccaggccgggggcgggtccaggacacagccaggcttccctggc

SEQ ID NO: 2444 - DNA, 195 bp, Homo sapiens
  source 1..195: mol_type = other DNA
ctcccaaaggaggtctgtctacagatgcccggtttgaaccctcttcccaagagccttggaacttcatggaaagtgacagccctttaagccaaaggatcctggagcctctgatgctcagccttcaggtcctcccccgggctggcgagttcaccggccctgaggtaggcccgcccccagcttggggattggcttggc

SEQ ID NO: 2445 - DNA, 241 bp, Homo sapiens
  source 1..241: mol_type = other DNA
ggcactgtggttattataaatcactgagacactgtttggggtgcggcggctcacgcctttgcagtgagccgagatctcgccgctgcactccagcctgggcgacagagccagactcccgcccacacagccgggactcgcggcctttgaggacgtgggcagggccagtctcgccacgccgcggccaatgccccgaccacacgctggccacaggagtcctggctcccattggctgcagcgggaa

SEQ ID NO: 2446 - DNA, 570 bp, Homo sapiens
  source 1..570: mol_type = other DNA
atgtagcatggggcatagtcactggcactcagtataaagtgaagggctttcactgtggatgggccccaggtggccccagcagcctgccttccctgctagtgaggccatgggcgcagggttcaggcctgtgggcaccgctggggacaaagccactctatgggggcggggtgacatccagcctctttccctctccgcccccgacaggatgtcccaggctggacgcggcagaggaggtcccccacaagtgaaggtccagccctgctcctccagggttggcccgagtccagcatagtgattgggcccaggccgggggcgggtccaggacacagccaggcttccctggccgcagtgcccaactgcccgcagtgcccatggtggctcggatgggaggaaccaccgcggagccggggggggagcagggcagtgctctgctgggtgaggggcacccagctccagaggctaggtgggcgtcgctggtgggtggactcctgggcgctgcgcggagccgcgccggctgggttagcgcgggcggggcgcttagtcccacccccagaggaggcggaagaggag

SEQ ID NO: 2447 - DNA, 391 bp, Homo sapiens
  source 1..391: mol_type = other DNA
ggtttctggagttaaacaaaaaaccctgacattgaacttacatggaatattaaagtcattatctaccataagcattatttcatgaaataaaataatttcaactttcccttaatgaaaaacattgttctttttaaaaatctcatttcctagctgaacggtaaaaacatcatcattgattagctcctattgtttcttgtgcgacttgcccacacacagttctaacaactggcctatcgcagggtgtgagatctggaactcagaccttcccagccagggctcaatgggtgggcaaacgtgggccacacgatcccaccggcctcttttgtccttttcgggggcggggcccgcgcggcgggggcgggcccgcggcgctcggggcggggctcccctc

SEQ ID NO: 2448 - DNA, 494 bp, Homo sapiens
  source 1..494: mol_type = other DNA
tgcttggtaaatatattaatactatgcattacctccggcagggggctccagcaggcgctgaggggcagagccgggtctcttcaggagcgactgcagcaaccctgatgcttggatggagtccgagccctttagtggggaccctggggccacgactaggctggcaggcccagccagcaagcctggagcaccttccagcccctggccagagtcctgggtgttctgggaaaaacccctaaacctaggctggaactgcctggcccatctctggcctggcccctgggaggaatttcctgggccagagggcagcctgcccaggccagtgccccgtgcccaaccccagagggtgcgggatgacagactctgacaatcattaaaccagccgggcctgatttcccacactgcctgctaagatccgggccaagtggcactgaatatgcaaatcacctggggccaggagcctgagctcagggaggagctccctccaggctctattg

SEQ ID NO: 2449 - DNA, 332 bp, Homo sapiens
  source 1..332: mol_type = other DNA
ggttcactgtcagcctccccggtagctggggctacaggcatggccaggctggtctctgttaagtcatacagtgccgtatgagagcactgcttgtctcttacgtggctggaagtaatgtttgttgactgaatgaatgttaaattgcttttctgcgtagatcctccctcaaggaaggactcgctgcccaggtgtggggagtgaggccaccagatagctcccagctgtcagctctgtcatagtctgcctcagtttgagagagcctgaggtcatgcctccccagggcagcctggcggcagtacttactgcagagatctccactgattggtccagtc

SEQ ID NO: 2450 - DNA, 171 bp, Homo sapiens
  source 1..171: mol_type = other DNA
caccattggccagactggtcttgacttgaactcctgagctcaagttattatcgtggcagggccaggaattaaatccaggcagtctggcccaggctggagtgcagtggcaccaggctcaagcgattcttccctcatagctgggattacagtggtcttgagccccggccccag

SEQ ID NO: 2451 - DNA, 383 bp, Homo sapiens
  source 1..383: mol_type = other DNA
gtctggaacacaacacgtagtcagtaaagacgtcatcttgtgtctggagaccagcctggtcaacacggtgaaacctcactacagtaactgtaatcccagttactcagggggctgaacaaacctcagatttgtgatctgagattaatcaagggttagtgctagcacctagtaagtgttcagtaagtgatcaggagacctgcgccccagttccttcaggggcctgaagcagatgccctcttagggccccacagcctgacatgctgtagggcctgtccagcagagggccctgcccggcctgtggccggaggctgggagggagggcaggcgagtgatgccagacgcctgactggaggcggatccagccggccagctgcctctctgga

SEQ ID NO: 2452 - DNA, 412 bp, Homo sapiens
  source 1..412: mol_type = other DNA
gcagccagcataggctggggactgcccgaagcctgagcctacccgggactgccagctgaggttgtcagcctgcctgagcaggtcctatgagaggagaactatcacttctcctcctgaagaatactctgctcaccaaaacagggctgtcacagacgtcctcactgaaaaccccctgccaagttcaagcgtcggaagtgggtgacccactccgagcccaccaccctttaagaaagggggtgccaggacagggtctaaaataaattagaccccatttccagctgccggtcacccccacctgcgggtgcggcccctggccccccggctccagcgagggaggagcgcgcgctcgggtgcgagcaggacacggcccggccgcgagggagggcggcggcggcggcggaggaggagggcg

SEQ ID NO: 2453 - DNA, 372 bp, Homo sapiens
  source 1..372: mol_type = other DNA
tggtcgggaaggcctggcccctcacccattcccagggaacggggccttgggccccagaagggcacaggcgggaggcagccgacccctggtggcagcggcagcaggcacaggagggcagagggaggaagctggcttcctggagccttcggcagcctgggggccacaggggactgggagtcctgtggccccggggggtgcgaactccggggccaggggtatgggtgctcacagacctgatgtccccaagacgttcttggtgattcaacacccccgccacctcgcccactgtgaccctggctctgggagatagggactgcccccaagaggagatggtcccaccggaggaggaaggaaacacctccagcctacctc

SEQ ID NO: 2454 - DNA, 457 bp, Homo sapiens
  source 1..457: mol_type = other DNA
ctgggctgctggcccgcaaggagcctgccaaggtcaggctgggggccacccttcaggtcccaggcatccagggggagtcccctggtgtgagggccagagactgtccactgtctgtaagtcttctaaggcctgcagggggctgagggcccaggggaagcccctcggactccctcctacactcaggccgtgggctgtggagagctgggccgtggcacaggcgtggagacgaccttggcctggccccggccctgtgccacatctgctctgggaagatgtgcttggccatgaattcccaaggcttgaagcagcaagggctggtcgggaaggcctggcccctcacccattcccagggaacggggccttgggccccagaagggcacaggcgggaggcagccgacccctggtggcagcggcagcaggcacaggagggcagagggaggaagctggcttcctggag

SEQ ID NO: 2455 - DNA, 275 bp, Homo sapiens
  source 1..275: mol_type = other DNA
agccaaggagtgactgtcccctctaccccacatccacccagagggaacaggggctgtgaagctcaggaggggtgggctcacagccgtgtggggagggctttgccgcttcctcccttgataacaatcagcataggctcagagcccagggcccccactacccaccagtggaaacactgactggtgtggggggtgaggcgccagtctccaggtcactgctcgcgccagcccctgtctcaaggggccagcagaaggccagcccccccatttgacagctg

SEQ ID NO: 2456 - DNA, 274 bp, Homo sapiens
  source 1..274: mol_type = other DNA
cccagagggtcggtcctaggacaccttccattgcaccagtgtcagggacttggatgtggtccccaggcccaaagttattccaactccctgtgtgattggcactcctataggaaggaagccttcccagtgaatccagtgtgcacgaagaagaacagcgcacactgtgtgccactggaagcattcattcattcattcattcaatcactcatttgttcatgtgacaaatgtggattgaccctctttcctctcccctggagccttggagagagagata

SEQ ID NO: 2457 - DNA, 519 bp, Homo sapiens
  source 1..519: mol_type = other DNA
tgcagcacccggcctccaggtggacagtccctcagactcccgaggtcctgggagcagggatcaaggtggtccccatccacccagggtgcactcagcgggtgtaactccacacggagtcaaggcccggcctctcagtgaggagactgctcctggctgcagtggaacccagcctcccctctctcctgtcctagcagacaggccagggagggtggacgagagctctggggatgtcccatcagctgtatgggagccccaaggcctctttcagagacctcctctgggtcccatgtgacctcgtggctgtccccaaaggcaagagggtccccagccctgcggccaaggccctgggacagacgggctgagctcctggatgaaattcctgccagctccgaaggacggcgctcccaccgccgccgccgccgcccaatagagcccctggggcggtccccaccgacggtgcagcccgccgggaccgggaggaagcagctgcggccatcgcgccgtgcgtccgcgcccggc

SEQ ID NO: 2458 - DNA, 303 bp, Homo sapiens
  source 1..303: mol_type = other DNA
tctgcatagctggtgtctggtccagccagggcatcattgttacttcgtcccagggcctgactggtagtcttgcaaagggagggagtccagccctttgcctttccttggagaaggcaagggagacaggagcctttctggaggcaccagagagaagcggcagctgctgcctcctaagggcaggcaccaggaggggatgtccactgacattcatgctctcacaacattatcttatggggaatattagatactattttatagacgtccaactgcagcatgagggaagatccagatcttggatctagt

SEQ ID NO: 2459 - DNA, 294 bp, Homo sapiens
  source 1..294: mol_type = other DNA
accatgcatctagcgttggaagatggtttaaaagtcatctattccagctggggtcaggttgcagtgagccgagattgcaccattgcactccagcctgggtgacagagcgagatctaattgatagaatgctttattgaactaagttctgcataaaaataaaggaagacagctatcacgtattctcttttcgagcgaggaagctgaatggctgcgcccagcgcgcgctctcatttgaatgcgtgagcgttcagagcactggccaatagagaggagcggtggctgcgcttctttccc

SEQ ID NO: 2460 - DNA, 569 bp, Homo sapiens
  source 1..569: mol_type = other DNA
tgcactcagcctgggtgacagagtgagactctgtctcaaaagaaaagaaataaaaatcatggaagacatctattctgtcttgtaaaaatttaaggtatatgaattgatccaatatgtgccaaagatagtattaggctgtattatatgactaccctgtgagatgttattcccattttacacataagaaaactggctaagagaagtcaagtaatttgtctgcggctgtgaattcaatttaaattcacagcttaaactctatttatgtaaaacatgtaatactttcacatttaccgtgattaatacacatgttaataaaaccctagacataggatatagaatccagtcgtttaggtacttaatgtttagttctctcctccagaaaacaggaataattaccgccttttttccactccaaagaattgatgtgataattagggagataagattagttactagtcataacaagaataggcgaaagagagagccgccggtcctcgcctttacggccaccaagtgcacttagggcaggcacgagtcccgtgatgacccgaggccgggcagcgcctgcg

SEQ ID NO: 2461 - DNA, 403 bp, Homo sapiens
  source 1..403: mol_type = other DNA
tattctttatgctaaaaatattagtatgcaaacaagtacactcaatactatgcagtagtggatatttttgatttttaaaatcggttatagtgacgattgcataaatctgaatatactaaaaatctttaaatggtacacctaatgggcatgtgaattatgtctcaataaagctgtttaaaaataacattagtactgttaatctccacccaatgagatttagagccttgaataaaagagtctattttcttttttccccaccacttaacagttcaggagtggaagcttaaagtgtttccccctcccccaaagcccttatcagccatgttttatttttcagagctgtgaatattggtgacatgtaggagggaccaaaattttcaattttcccatgttagaaaaggac

SEQ ID NO: 2462 - DNA, 460 bp, Homo sapiens
  source 1..460: mol_type = other DNA
tctgcaggcgagctgctgcccttctgaagagaggctccagcccggccaggagcagcgggtgctgcagcacttcagtccccggcttccgggtattgggaatttcccggttccccagactctgtggggatgagaagccctggaaacccccccaacacacatgcacactggatttttgtgtgtgtgggttgggggatgaggaatgtcacttcctgggtcaaaccccaaactcgagtcctggttccacctggcgagctgtggccccgaggtctccaagggtgacactgaggcacaggagtgctgcccaggctctcggtcctccctcctggtgctcaccgtgggtgtcagcctcgcttttcccaagtgggagaagcagagcccttctgctgggttcctgtctgggagcaggcaaggggtcctgtgccagcagacgcctttacctcaccctccaggacagactgag

SEQ ID NO: 2463 - DNA, 254 bp, Homo sapiens
  source 1..254: mol_type = other DNA
ctgccctggcagctcctgggcaccacttaactgtctgcagctccttggtccaacgcaccattcagggcttacgtcgctcctagcgctcctttccagtccgccttcctgctggggaagcagcctccttgaccttgagcaggaggcgggggcgccgagcgcctggggggctgcgcagaaagaacccgtcccggggggcaggcccgccctccgcctcctccgggcctgcagcgctcgccgcgcgcgcccatcgatca

SEQ ID NO: 2464 - DNA, 261 bp, Homo sapiens
  source 1..261: mol_type = other DNA
agtatcttctgttattagccatgtgaattatggcaaattgctcttattgtaaagtgttacgttattattattattactactattgccttctcatgaacatgctatgtgtatgttcaaggaatctaccagacaggaactctgctccatccacagcggaaggcgcggccccgcccgattcgggggcggggcggggagccgcgcgcggagtcgccgtggcggcggaggcgcacggcgtgggcttgcggcgagacgtcgtcgtcg

SEQ ID NO: 2465 - DNA, 82 bp, Homo sapiens
  source 1..82: mol_type = other DNA
aagggcagccccggtgcccacccattgtggaggctccctcaacaccgtggagacattcttcttccctctagaacctggagcc

SEQ ID NO: 2466 - DNA, 512 bp, Homo sapiens
  source 1..512: mol_type = other DNA
tatctttctgaagcacagataggatcattacatcagacagtaaatatcgaacagttatttctggcctaaaattttgttcatgttattaatgttaaattccttagcatgacattaaagccatggtgggataatactgttctgtctgaaataatcttgctttcctgacaatcctagttaattaagagcagtaaggaaactgatgatttagtaagtttctaaaggcgctttgacacattttgccgcatagtaaatggtcacaatgagtagaagagacgcatctttttgtttcctatagaagaagctaacttgatgggaagtccgacccagaccatttattcaggagactaaattcagccagaaaactaaacagtaaggtcaacctaatgatttgtctaggttttaccaaaagtgtccctgtcacaaaaagcgggcgcctgcgcagagacatagtgaccgtccgctcgccgccccgcctctgccaagccgcgccagcgcagtagccagcagagaca

SEQ ID NO: 2467 - DNA, 315 bp, Homo sapiens
  source 1..315: mol_type = other DNA
cagcttcccgagtagctgggactactggcgcccgccacagagacagagtctcatggcgcgatctcggctttcccaggctggagtgcagtggcgatcctggctcactgcaacgccaagtgatcctcctgtcagcctctcgagtagctgggactacagggggtctggaactccggagctcaggtaattcgctcgcctcggcctgccaaagtgccgggatcccgcgctagggtgacaggtcacgtgacaccacctcctcacgtgacgcagactctggagcggggggagggcggtgctccagctgcattgcgtcatcac

SEQ ID NO: 2468 - DNA, 293 bp, Homo sapiens
  source 1..293: mol_type = other DNA
caaaatcagtcttttgtcaaaaggaaactcccatcctcttggggccgggcgcgatggctcacgcctgtaatcccagctcgagaccaccctgaccccactgcactccagcctgggcgacagagcgcctgagccaccgagtagcggagggaaagggtggcgcgcagaggggcccagccccgcctctgccggaccccgcccccaaaaggccccgccgccgcggccccgcctcctgcccccccagccgcgaggtcctgcctcctgcccggccccgcccccggcctgccccgccctcc

SEQ ID NO: 2469 - DNA, 478 bp, Homo sapiens
  source 1..478: mol_type = other DNA
ctgtgccaagtactctatctacatcagatagtttaatccttatgataatcctgtgagttaaaggtttgctcacaagaggaagattgacattgcttttctgctttatctggggctccagagcatggggctctagagtcacatagagccaatgaaaagtgggaataaaataatactatttcattcttgggagaaatgatgtggttcagacaacaattctgctctctgataactgaggtctagcccagggcctggcacatggaaaattcagcattcacttcaggataacgaggtggagtgtagaatccgacgaacgtcctctaccccggggcgggtggaggttacctggctgcggcggggagggggcggggcccggggcgggaggtgtggccggcgggcgcgggcctgtgagggcctaggattggagggcccaggcagagcccggacgcggctgcggaggtgacgcgggaggtcgcgcgcc

SEQ ID NO: 2470 - DNA, 293 bp, Homo sapiens; identical to SEQ ID NO: 2468
  source 1..293: mol_type = other DNA

SEQ ID NO: 2471 - DNA, 266 bp, Homo sapiens
  source 1..266: mol_type = other DNA
ggggtgcctcctcccaggctggagtgcagtgacccgatctcagctcactccgagtagctgggactcctattttgagaattcagaaatttatttatagctttcgtaaaatagagtgaagactcttctctgatagagcacgagatgacagtgtatgcaaattctaatcaacacaggtgtgggctggaacccggacccagcttgattcgcgggtgccggatgatgacgtatccttgctcgcgtggagaggcgtcgtccgacaacgcgac

SEQ ID NO: 2472 - DNA, 326 bp, Homo sapiens
  source 1..326: mol_type = other DNA
tgtcttcaaagagacgcaatagtttgctgctgatatagaacatgctgtgtatatatctataaatacacacacatgaacacattgcatgtatataaaaattgttcacacttttagttttcatactatgtatatgtaatagacaaaccctctacagatgtagtatccggatatcaagtttcccaaacttgacaacaagatggcgcgcggcctcaaagcggcgctctcgtcacgtgcccggacccgaggcgcttgggggcgggaggcgtggcctcggtcgcggcagcccagccccgcctagggggcggagccggggggggttgtccgcg

SEQ ID NO: 2473 - DNA, 223 bp, Homo sapiens
  source 1..223: mol_type = other DNA
catcttgaccttgccgctctggggaaggtggcaatttatccctggatactgagtgcccatgctttccggagggaagtctttaaaagagtctcatcgacgctcttaaggcccccaggcaggtgtcctcccccaacgcccctgccccacaggggctgctgagagcctcccgacccgtgcacaggagcccgcctgggccaggggcaggctggcagccgcggggagg

SEQ ID NO: 2474 - DNA, 154 bp, Homo sapiens
  source 1..154: mol_type = other DNA
ctaggaaggagagtttacacttcctaatttctccattgctccccctaaaggcagaaatggaagttatttttcccactgtgattcagtgcagcccccaatgggagcgttgggttgtggctagctaacgacatccatccatggcttagcgctgtgc

SEQ ID NO: 2475 - DNA, 286 bp, Homo sapiens
  source 1..286: mol_type = other DNA
gacatccatccatggcttagcgctgtgcctgccaggagatcctgggaagctaggtcacttccctgagcaaaatagaaattgctaatagactaaaaggcaattctttgggagatcccagagggggcattctgaagtcctgcctggaggccagaccagggctcccaggagtcccacaggaaggatgcgcctctgtccagtcctgaggctgggcatgaggagggaggggctggcgggtgccgccgccgcccccgccccctcccggtgtgcggagcccgattgtcactca

SEQ ID NO: 2476 - DNA, 462 bp, Homo sapiens
  source 1..462: mol_type = other DNA
ctttgggagatcccagagggggcattctgaagtcctgcctggaggccagaccagggctcccaggagtcccacaggaaggatgcgcctctgtccagtcctgaggctgggcatgaggagggaggggctggcgggtgccgccgccgcccccgccccctcccggtgtgcggagcccgattgtcactcagctcctgcgccgggggcgacagagccgcaggcgcccgagtcgagtcccagcctctggccggccggccttggcttccccaggaatccctggagctagcggctgctgccagccctcggttcacccctggggctccccaatgggggtgcaggagggccatgggcgaccgggagaaacgccccagccttgtcctgggctccgtccccagacccacgtctgccaccccagtcccaggtgcgaaacaggggcgctctctttaaaagcgtccggggctgagtctc

SEQ ID NO: 2477 - DNA, 288 bp, Homo sapiens
  source 1..288: mol_type = other DNA
aactctcacattttccagagtgacgaacaaatgaatcaatgactagaaatctggccatatctgcctcctttgaagcttagagccaggagacttagtgccccttcctggggttccaatgctggaggaccatcctctgagcagagtccctgggagctctgggaatcctcccccagctgggcaccagcaccctggctgttgaaggccagtcggatgaggaagtgactcctcaaggggcccttgtggttcctcccacagctgggaatcgtttgctgggggtggggcagcccc

SEQ ID NO: 2478 - DNA, 263 bp, Homo sapiens
  source 1..263: mol_type = other DNA
tcaggcttgggttccaaagcctcactgagcctccatggtgcctcactgcagcaccgaattgtctttccctctaaataatcagcatgtaaattgcaggagcgctcagacagccttgtttagggcactgtggcttacgttgtgcccagtttccacctggccaggggcctggaattgctggcgcggctgagtcacatctccagaagcccctctgctggcaggtgcctcatgaagacctgacccaaagttttcaaaactctgcggtt

SEQ ID NO: 2479 - DNA, 337 bp, Homo sapiens
  source 1..337: mol_type = other DNA
agaataaacttctgttgtttcaaatcacctgtttggtggccatttgttacagaagctctgggaaaccgacacaaagtgcagtggcgcgatctcggctcactaactgggattacagcattattattcttcataagaaacataggcttatagtcactatttatcattatctatttttctccatcaatggatatgcaactattactatcatgaaaagtaaattatatttgcaaccccattatcttctaggtctggaacccagctgcctgactcgtgagtcactaagagtcatgtgtcaagtttcccagtgcccctgattgcaacactcctggctggggtg

SEQ ID NO: 2480 - DNA, 316 bp, Homo sapiens
  source 1..316: mol_type = other DNA
tatgccagaccctgggccaggcttacattaattctttctctccagcaagagaaaagacattcccatttcgtctaggaaggcttctcggaggacctcgaagaggcgaggccggggcctgccccgcgcggagtactcgggagccgcctccgctcagctcagccgggcgcaacgacagcgagcgatgacctcagcgccgccaaggctgcgagggcgggggctggggtagcgccggagcggggccgagcggagcggctccgggccccgcccccatcctctggccgcgaccaatgagcgccgccgccggctgcccccacgc

SEQ ID NO: 2481 - DNA, 280 bp, Homo sapiens
  source 1..280: mol_type = other DNA
tggctgaggaattctatggctgtgaaatgggtaggacatgtgccaacccagcaaggtaagtgttattaatgcataagcagtgatcagcaaatgcttgtagcctagaaaagtctacactgcttagggatgtagcctgatgacctgtctatagggggagctgagaagcgcgagttctcgctctctggaggaatccaggcgctcgtgaactccgcccctgcagcagagctgaaaaaaaccaggatccgggttcctcagccccttttcacaatatttgattagg

SEQ ID NO: 2482 - DNA, 221 bp, Homo sapiens
  source 1..221: mol_type = other DNA
tgcctggccatggcaggaaatttcccgtgtgatgaccacacagatctcacctaagtgtgatatggagaaggaacagtgactttaggtcttacattaaatcttaattctgccttaactttgctaactcatggcattgttttccaaacatgggtcaaacaacccctctccagaagcggcagcagcagaaggaatttggctgccaaataaagactttattgtca

SEQ ID NO: 2483 - DNA, 224 bp, Homo sapiens
  source 1..224: mol_type = other DNA
ttatataaatgtggatttggtatccactggacgtgcagaaccaatcccccatggttactgagggtgcgggagaggatacttcccaggccccctcccgtatcctcatgatcatcatctgtgaacttgaagttggctttcaaatccgatctcccttctctgaggactcagaatctgagggatggggccccttccttgcaggggatggcactccctgtaggcctggc

SEQ ID NO: 2484 - DNA, 209 bp, Homo sapiens
  source 1..209: mol_type = other DNA
tgatacaaagtacaggaattccctcaactaggaaatgaggttaataataagtacctttgtgtccacagacacctcggggagctgcaggaagccagccgcctgcccaaagccgacaggggagaggattgcttccctttcttttcccattcccgagtaatggtttggcctcgcgccaagcctctctcttcccgcactgcttggggagagct

SEQ ID NO: 2485 - DNA, 294 bp, Homo sapiens
  source 1..294: mol_type = other DNA
gtgtccacagacacctcggggagctgcaggaagccagccgcctgcccaaagccgacaggggagaggattgcttccctttcttttcccattcccgagtaatggtttggcctcgcgccaagcctctctcttcccgcactgcttggggagagctggtgagcatagagctgttgccatgacaagcattttcttaagaaagctctacgaacttcgtggggcaccatccaggtccttcccattggaggggcagggggaggagacccagcccactccccggccttagccagaaaggcaaga

SEQ ID NO: 2486 - DNA, 370 bp, Homo sapiens
  source 1..370: mol_type = other DNA
gggactctgtgagagtctggatgcagacaggccagggaatccatttccttgtggaaggactctcccaagatgcaaagagtgtttccggagcaataaattttgaacaatcttcaaacacttgttcagcttctgagacaggtgtgtgacaagtaagactgactgatcttcagaagagcagcaggggtcctgctaacccagccctccacccactgaatcagaagagggtcccggagatctgcatttcactctaaaaggcaacctccagtgctttagaaaatactgtaaatctgaagacttatacaactctaagtgtctcagaaacggttgaagatgttttctgcagattagctgagcagagtttcctgtgccc

SEQ ID NO: 2487 - DNA, 466 bp, Homo sapiens
  source 1..466: mol_type = other DNA
atagagattttaactttctactctctatatttctgtattgtttctaaaaaaacttacgtgtattaagttttttacttttttttttattctcctgcctcagcctctcgagtagttgggactacaggcgcgtgcatcaccatgttgaccaggatggtctcgatcgaccttgttgccgaggcctcccgtgtattacttttataaccgggggaaaaagtgaattacttttccaatacacaaatttgctttaagaaatcaaactaacaaatcattctacattgcatgcttaggaaaagtacagtttatttctaaattaaatgtatacatggtttgggatttactcattaagcaaacactttggtaagaataaattgagcgcttactacctcatttgatttaaaaacaaaaacaaaattcgaggcattcctctgaagggaagggactccccgacccagcgcccccgtgaccc

SEQ ID NO: 2488 - DNA, 446 bp, Homo sapiens
  source 1..446: mol_type = other DNA
tctgtattgtttctaaaaaaacttacgtgtattaagttttttacttttttttttattctcctgcctcagcctctcgagtagttgggactacaggcgcgtgcatcaccatgttgaccaggatggtctcgatcgaccttgttgccgaggcctcccgtgtattacttttataaccgggggaaaaagtgaattacttttccaatacacaaatttgctttaagaaatcaaactaacaaatcattctacattgcatgcttaggaaaagtacagtttatttctaaattaaatgtatacatggtttgggatttactcattaagcaaacactttggtaagaataaattgagcgcttactacctcatttgatttaaaaacaaaaacaaaattcgaggcattcctctgaagggaagggactccccgacccagcgcccccgtgaccccctgtagccag

SEQ ID NO: 2489 - DNA, 755 bp, Homo sapiens
  source 1..755: mol_type = other DNA
caacttggcaaaaagaaaacccgtgaaattgttttatatttggaaatttctaatttcagctttataatttcaaattgttgagtgtgatagtgttaccctttagaattggatcttatataaaagggaaatattagaaaacaattaggaaaatatacttttagtctttgaaatgcctgttttaacctttataaaatattataaaaatagattgtgtaggtactttcaaataatttatgggtaaaaacagactaaaatgtttgcaagaattggaaaaggttggaaaaacccagtagacatttcccaaagattgtttctgtaattttaggtaatctttttaaaaacatacttaatgacccattatactgtattaactgggccactgaattcttaatgaaaactaagcagtcggtatttttatgtgtaaatgagtgaattgatctcattttaagatccctttctactctgaaagtatatgacttttagtaaaagtctattaaaagtttcagactgaataactaatgtgagatcccaatttttcctttttttcattttagatttggggatattccctgcccaaaaaattcctggaaaattgactagtattaagtgtgagtaaaaggtgtccactttttgatagtatttggcaagatttagcctagaaattatgtagtatttattacataagaatcaaaattgctttgttactgctggtttcaaagtttagaactcatttctatgtatcaaaatcgggtttt

SEQ ID NO: 2490 - DNA, 770 bp, Homo sapiens
  source 1..770: mol_type = other DNA
agatttggggatattccctgcccaaaaaattcctggaaaattgactagtattaagtgtgagtaaaaggtgtccactttttgatagtatttggcaagatttagcctagaaattatgtagtatttattacataagaatcaaaattgctttgttactgctggtttcaaagtttagaactcatttctatgtatcaaaatcgggtttttttgattttttttttttttaaattcttaaatggtaaatatgccattgtgaaatgaaatctcaactccaaaagtttacccttttactaactggagtaaatgtatacttacaaagtctttagctgtagccattagtagtaactatttaatggcaaaccagtgatactggtgttgatacaaaataagaaataaattttcccttagataaagctttctgtgttttgacagtgccagtttagaatggctataatgctgctctgccttctacagcttgcgatgatggatatatatacatacatccatattatacataatgatatatgtgtaaggatttactacaaaatttagtgtaacaataacttcatgatactttggtataagagtaagttctttatttttataatgaacccaaatctaaagtcttttatagtgcattttaaaaggggaaacttatccaaatgttatatttctatacatttttgtgtatatggtataacagttagtatatatctgtatgtatattatatacataaaacactatatttttacatacaagtatgcttttatta

SEQ ID NO: 2491 - DNA, 656 bp, Homo sapiens
  source 1..656: mol_type = other DNA
ataaaaatgcttgtgaaaatatttgaagtttttcatttagatgaaacattctactttatcatattttgttagcaagtattttgtgttagtaacctaagtcccattaataatctaaaatgtatgtagtcttttgagactttcaaattagtaggcaaaaatacatatatacatacatatatacatatatgtataatgtagatcacccagcatgatcctgtctttacaaaaattttttttaaaaaattagctgggtatggagttcagtgttgctgtgagctgtgatcacatcattgcactccagagagtgagacactgtctctaaaaagagttaaaaataaaatgtagatctttagttaacaatgcttatttacaatgctgtaactatataaaagaagggcatggcctttctagtcaaaattttacattgtagatgggaatgtacagtattcgcaatcagtgtgtttacaaggctctgtataagcaaggtcgtattaataaaatttgactctggaagaatttacctgaaatattttaattcattgtctcctcattttaggattacagtttaaagacaatttctgtgatcaagttgtcactggtccttgctttgaggaagcagtggcttgtttcaagaagccactttgctattttttttt

SEQ ID NO: 2492 - DNA, 328 bp, Homo sapiens
  source 1..328: mol_type = other DNA
aacgttttgccacccattgttgccagcagaggacaatccctgtgcagcagagctctgagagcagcaccagctccccgtaacaagagaacttggtctctagtaccacgtccccacataatattccagaggagtgttccgtgggatcttcctcagataacgttgaaaacactgaattaaatgaagtttttcagtattgagacagagtctcactctgtcacccaggctgcccaagtagctggggctacagacatagcacactactttcattaaataaagttttgtttaacatatctatcatgaagttgcagcttaaataaaataactaatg

SEQ ID NO: 2493 - DNA, 610 bp, Homo sapiens
  source 1..610: mol_type = other DNA
tagtttcatctattgtaacatttacctgagatgatcatttctttagtctagaatccccaaatcagaagtatacctctgaattatcaaagttactttataaccattttgtccatttgatgccattgtttatcatcttttgagaaaaaagttctgtcatacccttctctccacaatggatgaagacagctgctaccattaagtaaacaaaaatacccactcagtctgtgttaaattgtatgtctttttaaaggtatttaaagattcaactaagctttaaagagggctgagcagctcagcaatatctaatttattattactgtaattttttaaaaggctttaaagtgcctcaggggtcccctgaaactaattttctatttctgggattccctggattcattatatgagatattagaggaattcttttttagtatgaaaattgtccttttctccttgctggcattgaattaacacagggacaaaatttggttaattttttataacactgttgcccagtatttgtttggtggcctttctgagggaaaaaagcttattcaagctgccaatatttatctatgggctgtagcagtacactgaattgtactgtgccagg

SEQ ID NO: 2494 - DNA, 508 bp, Homo sapiens
  source 1..508: mol_type = other DNA
cttttgagaaaaaagttctgtcatacccttctctccacaatggatgaagacagctgctaccattaagtaaacaaaaatacccactcagtctgtgttaaattgtatgtctttttaaaggtatttaaagattcaactaagctttaaagagggctgagcagctcagcaatatctaatttattattactgtaattttttaaaaggctttaaagtgcctcaggggtcccctgaaactaattttctatttctgggattccctggattcattatatgagatattagaggaattcttttttagtatgaaaattgtccttttctccttgctggcattgaattaacacagggacaaaatttggttaattttttataacactgttgcccagtatttgtttggtggcctttctgagggaaaaaagcttattcaagctgccaatatttatctatgggctgtagcagtacactgaattgtactgtgccagggatatatcacctcaaggtttagatttgtgaa

SEQ ID NO: 2495 - DNA, 344 bp, Homo sapiens
  source 1..344: mol_type = other DNA
aaagttaatctttacctaagccaagacatggcgaggctgagtaatttatccttggtcaccaactggcgtctggctttggaatgcagaccgcctctggccgactgccagaggtgggaggcctgaagtttgggctccttgcgcctaaactccagcaaaataggctttagctagtcccagctactcgggaggctgaggcaaggttgcagtgagctgaaatcgcgccactgcactccagccctccaggtggcgctgtaggaccggcccaccttcggaggccatgcagcgaagaaacgtgacttcatggctagaggggcatttcccaggagccgcccatgccgccgcgt

SEQ ID NO: 2496 - DNA, 265 bp, Homo sapiens
  source 1..265: mol_type = other DNA
tctcccaccctcccatataatgggacaggagaaaatcgccctgtcgcccaggcaggagtgagtgcaatggcgcgatctcggcccactgctcagcctcccgagtagggggttacaggcgcgcggggtttcaccgtgaaatggggtttttaaaaaacccgagtcccaataacttcttaggtcttgctttaaaagaggtttccagctgttgatgcctggatggacccggctgcagggaggaggaggaaactctctgtccctcccttct

SEQ ID NO: 2497 - DNA, 528 bp, Homo sapiens
  source 1..528: mol_type = other DNA
gacaccctcccccaacaacgctgggcagtggcggctcctccctggccgacttggggtgtgtgtgtgtgtgtgtgtacgcgcgcgcgcgcgcgcgttcaccacgcgggtcgagcttagggtgcacccccaacccgctcctcgccgaccgcagaggactaggtccgaagcgacctgcgcgcgtcctgcgtggggctcaggtgcctgcgacgaggcgcagagctcctccaccatggttgcgtggggtgctgggggacagacgcgctccccttgccacggtttcagggtcgttccccagcggacagcggctcgccattgcgtacgtaaacacacacgcacacacaaggttgtgtgtgtgcgccggctctggctgcttcccgtccccaggcgcgcagggatcgcccgcgggattcgctcagctgcccgcatgggtcttcaggctggaggcgctccaggcggacagtaccgggcggggcggtgagccgggcctgggcgggaagtgaattttgaacttcagccctggacctttcc

SEQ ID NO: 2498 - DNA, 543 bp, Homo sapiens
  source 1..543: mol_type = other DNA
aaatggggtttttaaaaaacccgagtcccaataacttcttaggtcttgctttaaaagaggtttccagctgttgatgcctggatggacccggctgcagggaggaggaggaaactctctgtccctcccttctagtcgcctcgcagcagcgagccgcgagcgcccttctccagtcccggcttggaactgaactgtgtgagcacgggtcctggaacccgggcccagaaccggcgagcccaggtctgagcccagagctcagcggtcagcctcgtaggccctgactcggaatcgagccgaggcgctggcagggagggcgggccggctgcgcgtccgacgagtcgcagagggcagagagcggcctggctcggcggagagggcgccgcccggccggaaccaagctcgccgcccgggacggcgggccccgtggggcgcggacccagggtggccgtgggtccgcagcgactccccggccgacggcggggggcgtgccccctcccagcccagcctccccaacccggcccgcccgccgcgtcgcgggggcatgtg

SEQ ID NO: 2499 - DNA, 722 bp, Homo sapiens
  source 1..722: mol_type = other DNA
tgccttgctttggcagctgcgccaggcatttggctgtcctccccaggacgcaagcaaagcactgggctcgggtacaccgctggcctgctacctggctccattcacacgctcaggatgggagggaggctttaactcagtctggccccaagtcctgcccagggccacacccaacgccctggctgttcagtggcctgccaggggacagcgcagtctgctggactggaggacctttgagatgcagcaggggccgcccctgcagagccatttcccggggtccggggactgggggcacggagcaggggcgagcccagtcgtgggagcagcggatctctcaggatgaggtgggggcgcaggacgagccctcccccgcctccaccccaggctaccgggagagagctggagtctcgcggcctcggaggccgggaagccagccccggcggggacccgggcggggcggagccagcggaggccccacccccggcgtcaccggcccccaggggggcgtcgcccccaccccgcgctccaggtagcggcggcctcagctgccggcggtggctggctgagctccccagcggcccgcgggccggggcgggggcgggccgggggcgttcccgcgggccaccgcccgtgatgtcacaatcgcggcgggccgcggcgctccggggtcggcggtgggcggcgggccgcgagccggcgatcgaagcgggcagctcgcgcctgag

SEQ ID NO: 2500 - DNA, 649 bp, Homo sapiens
  source 1..649: mol_type = other DNA
tagtagagggacttgccccctgagccggcctggctgccttgctttggcagctgcgccaggcatttggctgtcctccccaggacgcaagcaaagcactgggctcgggtacaccgctggcctgctacctggctccattcacacgctcaggatgggagggaggctttaactcagtctggccccaagtcctgcccagggccacacccaacgccctggctgttcagtggcctgccaggggacagcgcagtctgctggactggaggacctttgagatgcagcaggggccgcccctgcagagccatttcccggggtccggggactgggggcacggagcaggggcgagcccagtcgtgggagcagcggatctctcaggatgaggtgggggcgcaggacgagccctcccccgcctccaccccaggctaccgggagagagctggagtctcgcggcctcggaggccgggaagccagccccggcggggacccgggcggggcggagccagcggaggccccacccccggcgtcaccggcccccaggggggcgtcgcccccaccccgcgctccaggtagcggcggcctcagctgccggcggtggctggctgagctccccagcggcccgcgggccggggcgggggcgggccgggggcgttcccgc

SEQ ID NO: 2501 - DNA, 455 bp, Homo sapiens
  source 1..455: mol_type = other DNA
tgttaccattttttttaaagttgaactgcaagctaaactcctataattagctggtctatgtacagagctaagcagaagcttttagcctaaaggataatacccctgggggtcagaggcaaaagagtgcagtggcatgatctcagctcactgcaaccgcaacttgcctcagcctcctgagtagctgaaccacacccagctaaggaactcctgacctcagaagtgctgggacaggtgtgagccaccatgcctggcccctctaaccagctgttgcttttcctgccaagaaaccagtcatgaagattcacccatgttctagatgggaaaactgggctgtagcctgggtctgcctgctccaggggtcacagggccaagcctgagatattgctgactgccctgccatctaccccagggtaataaatcagggcagagcagaattgcaatcaccccatgcatgg

SEQ ID NO: 2502 - DNA, 345 bp, Homo sapiens
  source 1..345: mol_type = other DNA
aaaagtcactttatctattgagggccctctctgtatgtgcccacagggggaagggggcctgtccctgtcctcaaaggtgccacgagacaagaaggtggggcccccaagcaggctgtctggatgtctaaggtctctgaccagtccatagcctccaccaccaccctgtgccagtcacagggcgcagtctaggagccgcctggagacccacgccctggctttccctcagagctgggagcatgggatgtgaggagcccctgggtcagcctgtgccaggaggagaggctgcctccagtcacagagcccggaggcagaggcctcccaaggtgccatgctcttcaggagggt

SEQ ID NO: 2503 - DNA, 258 bp, Homo sapiens
  source 1..258: mol_type = other DNA
agacaacaaaatgctgggattacagacataatgcattttgtatgccaggcctatttgcatttttaaatgatgtatataggtagtctttgaaattcattcaatgccacgaaaaaggatgttaggaactaactgcctctctttttcagggggaaaggaggtcgaagaccttcatttcaagatgaatttagtacattcccggcggtgccttccccgggcaggcgcggcaggtggaggggcggggcattgccctacgcaact

SEQ ID NO: 2504 - DNA, 254 bp, Homo sapiens
  source 1..254: mol_type = other DNA
ggagacaacaaaatgctgggattacagacataatgcattttgtatgccaggcctatttgcatttttaaatgatgtatataggtagtctttgaaattcattcaatgccacgaaaaaggatgttaggaactaactgcctctctttttcagggggaaaggaggtcgaagaccttcatttcaagatgaatttagtacattcccggcggtgccttccccgggcaggcgcggcaggtggaggggcggggcattgccctac

SEQ ID NO: 2505 - DNA, 431 bp, Homo sapiens
  source 1..431: mol_type = other DNA
cctaatttcttcctcaaatgaggaaaatcctggcctcatttgcacacatctgcatagatttgcatgtgtccattatttttaaaggataaagagggaatttatctcttcttgaaaataatttctgctttgaactataaacaataactgtggttgcatagtttatgcagatatgaagctctccaaacttctgagtggcgcagagtagttcactctacctggacgagcagttagaggcagttccatggatctgactgcttcccatcccagggctagggaggggcggcctgggtgggactagagggctctccttctccacatacagggctgtccatcagccagctccggctggctgaggcaacccagtaaggccagccagcatgtgtggctgttaatgattgctacccaccagggacctggtgagtattaaagga

SEQ ID NO: 2506 - DNA, 426 bp, Homo sapiens
  source 1..426: mol_type = other DNA
cctgaataatacagaacccaggtaccccgtagcttggctagcatccttgctcaggagaaagggattgcattttttgtttattattagaacaacttgattaaaaaattaagccacttccctcccagggcctgggaggagcctggctggttggtgtgggggcagtggctccacaacccactcacacccttggggggggggcgggggatggggaggccccagggccccagccaagccctcttgtgcccctctctggagtagacagggtgatcaccaggctggctgggtgaggccccccagacggtggccctgctcccctttggggggcagccttctcctggtggtggaaggcccaggaggctgtgctgagccaccccatcctctcccgggcaggcaggctgcgtggatggttccccgggggagccgatg

SEQ ID NO: 2507 - DNA, 389 bp, Homo sapiens
  source 1..389: mol_type = other DNA
gttgctgggactacaggctcgtgccaccagatccagctaattaattattattattatttgtagtactgtgccagtatgaaatgcttgcagtctgcattctgtacacataacacatttgagctaggagaggctccccgggcccctcgctgctcacagccccgggacatgtccaccaggttcctgattcaaagctctggggacttggcgctgccggcgaccttccgaggcggcggcgcggctccgcccccggccccgccggtggttcaagtgcaagatcggagctgggagcggagaggcaacacccctgctcgcactgccggggagggatccctgctctccgggctccgccaggctggagggcagcagagccaggagagcgctgcccgtta

SEQ ID NO: 2508 - DNA, 313 bp, Homo sapiens
  source 1..313: mol_type = other DNA
gcacaccaggggaaagccaaatggacttcaggctggagtacgttgctgggactacaggctcgtgccaccagatccagctaattaattattattattatttgtagtactgtgccagtatgaaatgcttgcagtctgcattctgtacacataacacatttgagctaggagaggctccccgggcccctcgctgctcacagccccgggacatgtccaccaggttcctgattcaaagctctggggacttggcgctgccggcgaccttccgaggcggcggcgcggctccgcccccggccccgccggtggttcaagtgca

SEQ ID NO: 2509 - DNA, 395 bp, Homo sapiens
  source 1..395: mol_type = other DNA
tataacaactagttccatagcacttgcattgtattaggtattatacttaattatatgcaaacactataccgggaaattctcgggttattttgaaaactccccaagacctttaacctagagggctgttggggcggtctcctaggagaccacgctgccgtgaaggcccgccccccggggatcacgttgggcggcgcggcgctagggacgtagacgcccaacagtcctgcgtctcttccgggtgtcctgccggcgcgcgggccctgcggccacaggggcttttcaaccctctgtcagtcggaaaactcgagccgactagggaacctccttccccgccaggatggaagtcgcatcagtcgccgcctattgcgcgcctggagcagcgacgccaccgctgg

SEQ ID NO: 2510 - DNA, 372 bp, Homo sapiens
  source 1..372: mol_type = other DNA
ttgcgccactgcactccagcctggcgacagagtgggcctgtagtcccagctcctcgggaggctgaggtgggaggctcacctgcagtgagccgagatcgcactactgcactccagcctgggctagtataacaactagttccatagcacttgcattgtattaggtattatacttaattatatgcaaacactataccgggaaattctcgggttattttgaaaactccccaagacctttaacctagagggctgttggggcggtctcctaggagaccacgctgccgtgaaggcccgccccccggggatcacgttgggcggcgcggcgctagggacgtagacgcccaacagtcctgcgtctcttccgggtgtcctgcc

SEQ ID NO: 2511 - DNA, 379 bp, Homo sapiens
  source 1..379: mol_type = other DNA
gggagtgatccctttccaaagcataacaaatttatttaatcatggttttactttgttaatcttcatagtctgtcgagaaagaaaccaaatgcaaacgaggagctggccaacatggttttttgggtggagcctttaggaaaattcttccagagaccactgctggaagaaaggtatttagagtagaaaatttaaatataacatattgtatgaaaggttttttttttttactttgttgggttggaggatccgagacagcctaggggccgaacatcgctaccgtaattatggctttcctctcaagtggggagtgctcttcccccacgcaatggcaagtggggcgggagtagaggcgaagggcggcccgggttccagcagccgc

SEQ ID NO: 2512 - DNA, 279 bp, Homo sapiens
  source 1..279: mol_type = other DNA
gctgacctcaggtgatccgcccgttacaggggagagccactgcgcccggcctccctcgtttcaggttaaaaactcccttgagattctcctgagtagctgggattagtagaaacagggtttcaccatattggtcaacctcaggtgatccgcctgccttaggcgagccacagcggctggtgctttcaactcccttccctaccacccttggggagtaagggtgagggtgaccaggtttccggaggcctcaccggaagccctcgtgtgaggccgtgtgggagg

SEQ ID NO: 2513 - DNA, 160 bp, Homo sapiens
  source 1..160: mol_type = other DNA
cagcctccatgcagcctcctccaaggcagaaacacagtctaaagggtcatgatctcagcacacctgtacccatttgttgccccacttggggatcatgtgcaagagaatgtaatgtctctaagacacaaatttagcagtgggagggttctatgacaccccc

SEQ ID NO: 2514 - DNA, 473 bp, Homo sapiens
  source 1..473: mol_type = other DNA
tcatgatgtccagctggcagaactgggcctgccagttcctgactgaaattgacctccttcattgagagccagatgctggaaaagcatgacaactaaaggggtcttccactcggtgcctgggcccagtgacaactgttaacttcgggagggtagcaccatgcaaagcaaaaatgtgatcttaggtgcatgctgagagaagccaacccttctcttcccggacccaagggctgtgcccagccttgtgtcgcgcgtggagggggtgccgggcgccgcgagggcctgctccgggcacctgcgaacgcgcggcgctctcaaggagcgcctggctctcgcccgccagcctccggccgcgacgcgcccagggcgcggagagggggtggggacggattgggattctgccatcgccctcaccggctgggccctggagccgctcccaggataactccacgttggggagggcgcccgccgagcct

SEQ ID NO: 2515 - DNA, 349 bp, Homo sapiens
  source 1..349: mol_type = other DNA
ggcaggcagcccagggaagccactcctcacagggctctggtccagacccatcagtaggtccaggctgaagtccccaccaaggcatgggtgttgggcattgggcctcatgatgtccagctggcagaactgggcctgccagttcctgactgaaattgacctccttcattgagagccagatgctggaaaagcatgacaactaaaggggtcttccactcggtgcctgggcccagtgacaactgttaacttcgggagggtagcaccatgcaaagcaaaaatgtgatcttaggtgcatgctgagagaagccaacccttctcttcccggacccaagggctgtgcccagccttgtgt

SEQ ID NO: 2516 - DNA, 400 bp, Homo sapiens
  source 1..400: mol_type = other DNA
ctgaactagaagcttccaagtgctcttccaagacaaagattctttccactgtttcaggtgataattctgagctcagatcctgtgcacagaaccagttgtggaaactgatgtccacagataaatgtcttgctatcatgtcatgaggcctgagtccccctagggcagagggaatcaatgttgctggagagcacaaacaagtctctgtggtgctttgcacgtagtaggtgccactctccaggcagccctggctctgcgcaccgctccccagcgcgccaggcggggctgcgtccggagcatcctctgtcctggtccccgctcagcggccgctaggagcgcgaagggaggggcgcgggggcgcgcacgcagggtgtcgggggcgcgccggccgcccggggacgcg

SEQ ID NO: 2517 - DNA, 344 bp, Homo sapiens
  source 1..344: mol_type = other DNA
cattataaacaatattctgctgaatatttgtgtgacttaaatattttaattatctttgattatttaagatccattcccagaaatggaatttatgcaatgaagggtataaacatttttaagatgttttcatgttttcctcctccaggaggcttacactctaggagaatctctgacccagtgcattgtcctgtgtggggccagcacacagccctggacgtgtgcatgggggagggccaggaccacccccgccacacgggggtctgctccccaccccacccccgccttggggagcctggcccggcctggtaggcttgtgtcatgggccacacaactcttccattatg

SEQ ID NO: 2518 - DNA, 279 bp, Homo sapiens
  source 1..279: mol_type = other DNA
ccacgccttctccacccacttggagccgggagggggtggggtaacttcacaagcctctccctccagcgaaggatgtgttcctccctgagggggtgggatcggaattcctccccagaggggggagtctgtcagtgactagtagggcctgaatacattcctgcccctaggagcatgaatgccagtcgtgtcaacgacaaccagggtgggcttccttgctctccatatacaaggatataaatacaatgacgtgagttgtaccattgttgtatgtggcagtcc

SEQ ID NO: 2519 - DNA, 325 bp, Homo sapiens
  source 1..325: mol_type = other DNA
ttcttgctcttctctttctagaggaggagaagaaaggtttgaatgatttcttgtgcttgaggatgaacactgaatcatcatacatgctatacttgcagaaatcattcatttttctacaaaaatgacaaaaagtcctttgtcctgggatcaaaggacatcagtgcgatctcatctctgtacactcagcacatgtggttcagagaggctgtggctgggcctgcaggccaataggccacagggaacaattgccaatgtgaggtaaactctgctccctgtaggattgctagagcaaaccacaagttcatgaaaaactcacttgctctta

SEQ ID NO: 2520 - DNA, 438 bp, Homo sapiens
  source 1..438: mol_type = other DNA
ggtagagttgtggagcccagagtatgcttcagcgtaaaagtgtccaagatcagttacacagttaaaagtctttggccaacacatttgtgtgatgtaattgtatacacgaaaataataaacctggggtacctttcactatgtatttttaaatgtcctctaatatttagatattttgacaaaaagctcaaactactttaacagcccctccctggaggagtaagagccactttcttttccctcctctcctgccccttcagccctgggcagggggactagaaggatcgggagggcaggcgggccagacagcgccccgcggcctgtccatgagcggcccatgcattatggaagacgcgcgctgggctcgctccctggtccttaaatgagaaggaagccatctccagggcccccgagcgttggctgaggaccagagagatgctg

SEQ ID NO: 2521 - DNA, 564 bp, Homo sapiens
  source 1..564: mol_type = other DNA
gaggagtaagagccactttcttttccctcctctcctgccccttcagccctgggcagggggactagaaggatcgggagggcaggcgggccagacagcgccccgcggcctgtccatgagcggcccatgcattatggaagacgcgcgctgggctcgctccctggtccttaaatgagaaggaagccatctccagggcccccgagcgttggctgaggaccagagagatgctgcagtggctccgggcgcgctcacacacacgcgccctcacccgccaccgccgccgcggccgccgccgcacccggacagcgagcggctgaggccgccagggcccaaaggacagcggcccagacaggggctggcggcccggccggccccggctcaccgactcgggcagcatccacgccccttgtaacttgggagggaacaggctcccctcagccccagggtgggtgctggggctcccctccgccctgtctacgtgggcggcatcccgcagggctctctcaggccgagcctggccgaaaagctggaccccaggagtgtgtccaggaattccagttggccagc

SEQ ID NO: 2522 - DNA, 495 bp, Homo sapiens
  source 1..495: mol_type = other DNA
cagggccctgggcaacatgaaaatgctgtagttcaaaagtttcattattgtttccaaaagtttgcaattgcagacaatactgcgattaataaacttggccacagcatttatagtaggaatttgttcatataaaatttgctgtatgactgagctccgggaaatccctgtcaacactgtttggtaaagggtaaaaccttagataataaggtttttattatcttaacacagacagatcaatagcatatctttacaaatgagaaataattttcgccttggtgaggtcagcggcgctacacacccgagcactaggggacgtccggaacctttcctgcggagtctgaggtaggtatgcctggaatttctacctcacctacatgttcccggacaaataatcttaaattgtcgcgctatttaaagtccctagtgacgataaccataattaattgtttccgagagtttttatttgggcagcgccgcggggccttctaaggccga

SEQ ID NO: 2523 - DNA, 439 bp, Homo sapiens
  source 1..439: mol_type = other DNA
agacggtgtctttctatagcaagaaagatacagatgggctctgaaaagaggtgacgtcaagttttgccccctttgtagtgactgtgtgtgtcaatgaaaacacccttcctttccaagtctggagaaggaaagttggaaaaatgcaaatataagagatttccctattgtatctactgtatccgaaacactagcgatgactgtcttcaggtcctgcagctcctccctctcctcaggtcccagcccggactgcaagtcccaggagaccccgcggcgagggtgtcctccagcgatccttccctcacgcttctggatagtggagagaaaggcggcagtgacggaggttgggagccaggctgactgcaggcgggggcgtcaggaggcggattcctcctcccttcggcactggggggcggggaggagggaggccgggcctgcggcc

SEQ ID NO: 2524 - DNA, 339 bp, Homo sapiens
  source 1..339: mol_type = other DNA
gtgcctaggtaaaagacggtgtctttctatagcaagaaagatacagatgggctctgaaaagaggtgacgtcaagttttgccccctttgtagtgactgtgtgtgtcaatgaaaacacccttcctttccaagtctggagaaggaaagttggaaaaatgcaaatataagagatttccctattgtatctactgtatccgaaacactagcgatgactgtcttcaggtcctgcagctcctccctctcctcaggtcccagcccggactgcaagtcccaggagaccccgcggcgagggtgtcctccagcgatccttccctcacgcttctggatagtggagagaaagg

SEQ ID NO: 2525 - DNA, 457 bp, Homo sapiens
  source 1..457: mol_type = other DNA
tagtccaaggatcacaatttgtgaaccactggggaggcatacaatatggggttgttattattactactgagatttatgcaaagagagacagcattccctttccacacatctatatttaaaagctgcttcacagtttgtaaggaactctcacatacgtttatatgaaattcttcccaatttctgagcataaattatgccaagtaaagtctcatgggcgatgaggagagaacgccccctccccttggcatttgcagctctgaatgtaggcatagatttaataggtgtctcccttatgagtgataataaacatccctcttgtgctccttgggcgagccctcctcggcagggtccctcaagctggagccgccagccctctcctgggggatcgcaccagccccgcgggctagcctcgccttcccgctcccgggcggaggcagccgggcggggtaggttgcgc

SEQ ID NO: 2526 - DNA, 633 bp, Homo sapiens
  source 1..633: mol_type = other DNA
atttaaaagctgcttcacagtttgtaaggaactctcacatacgtttatatgaaattcttcccaatttctgagcataaattatgccaagtaaagtctcatgggcgatgaggagagaacgccccctccccttggcatttgcagctctgaatgtaggcatagatttaataggtgtctcccttatgagtgataataaacatccctcttgtgctccttgggcgagccctcctcggcagggtccctcaagctggagccgccagccctctcctgggggatcgcaccagccccgcgggctagcctcgccttcccgctcccgggcggaggcagccgggcggggtaggttgcgcgctcgccgcgggctcgggccgcggtcgcggctttgcggcaggctgcgcgtcaggcggggagcggggcgcgcgggccggggagggggccgggcgcgctgcgggctccgcggccggaccatgcggggcaggggccggttgcagggccgggggctgcagccggcgccgatggcggccgactaggacctgcccggccggctgccccgcgccccgcctcgccccgcagcccggccggccgggagggatgcgctgtgccgcccagctcctctccgtcctgcccatgccctgaagc

SEQ ID NO: 2527 - DNA, 414 bp, Homo sapiens
  source 1..414: mol_type = other DNA
tctttctgaacgacagttctgctgtaggccccaggactcagctggccagccggtgacactgctcactgctcattgtcctcagctgtggaccttgctggccatttcctgctggcactgtcaagatgaaggaggaagagactgccagggcaatgctggcagtgcagaagaattcccctggtgaggctggctgctgtcagcttcctccgttaggatctgccagggagcccccctccctatcctggaaggctggctgggaggctcacttccattccgagaggagcttcttgcaggtgcacatgtcatgtgtcctcgtgcacatgtggcagagctcggtcctccctgtctcctgccagatgggaaggagcagcccgtgagccccaggggagggggaaatctcctagagcaatccgcccc

SEQ ID NO: 2528 - DNA, 363 bp, Homo sapiens
  source 1..363: mol_type = other DNA
tgtaaaaatgttaaataaatatgtatcccttctaaataaattccactaagtggttgagggaatctactaaaccttagaagcccgtgattcactgaaacaagcgattcggacctcaagcgattcgcctaagaagccctcgtcctttatggactcaatgaagtggtcaagcaacaattactgctccaagggccctcagagtaagcttctgggcctcaggcggccttcacctttcccggccacgccgagggggaggaggcggggcctggagccccggagagccaatgtggacggccgtggtcacgcgccgccgtcgagcaggccaatgggcgccggggggcgtgtccagggcctcgggctcagggc

SEQ ID NO: 2529 - DNA, 419 bp, Homo sapiens
  source 1..419: mol_type = other DNA
taatagaaaacatttatataatgctttctatgtgccaagcactttatgtgtattataactcattgaataacatagccctttgatacaggtaccatttttattatcccccattatggacaaagaggaggagacacagtgaagttagtaacttacctgatgtgatgtcacccagctggtaaatggcagaactgggattcacgtctttaaaatctaagcagtctttcttgaaagatgcagatgtagatgataatatctgtctcagctggcttataagagtatccagattcttattttcttaattgaataatccttaacaaattaatacaggtgtcaaattgcccaactactagtatggttaaattaatcatctgatttgcacatcaatccactgtcagtattatgattaccataatatctaa

SEQ ID NO: 2530 - DNA, 575 bp, Homo sapiens
  source 1..575: mol_type = other DNA
ttttaaaaacagcacccagcccgtgtcatggcacgggtggtgggggtttaggaagctgctttgaaccagagggcatttccttccaggcagttaatgagctgtctgcgaaaagcaaagatccttagtgccatctcttcaagcgggttgggctcaggtgaccaacccctgctgcccccccccccccacttccgcctccttgggaagggggcgtggcgggagaggaggaaagatactgggatcttcggcctctaggccttttcccctagtatcttcgtccccaagacccaagaggggaggggcggggcggcgcggccagccggctggtgtcccctgatgtctggagccgaggccccgggctctcggcctccacgaagcgaggcgagccggagctgtgcggtgaatgcaaagagccgggagagctcccagcccggcgccgccgacggcgtcctcagccacagcccaatgagaagagagcagataatttattctctaatcccggttcgggtacccggcgctggcgagtggcgggggtaggaggggtgggtctcctcttcctccgtcccctccccccgggc

SEQ ID NO: 2531 - DNA, 421 bp, Homo sapiens
  source 1..421: mol_type = other DNA
gtacactgtggagcaccccctcctaaggagactttccctgtgggagaccccagccttgatgaggtgccatagagccaaggcacacctcctctcctcacagccctcaggaggaagcagagatgagaggggcctggcggtggggcactgtgcccttcacccccagtgcaatggccattggcctgacagagtgccactattctcaaatatcctgtggagtttaattccaaaaggacaagttgaattatccttcggggagggaaatgcacattcgttcctagggcgccaggtacagggaggtacctaggcaggcaggcactctcagtgtacccctggcgccttggtgtcctggggtgatccagtccagaaggcctcatcccctagcggctctcagggccggcttggaccctggttcccagagtgg

SEQ ID NO: 2532 - DNA, 402 bp, Homo sapiens
  source 1..402: mol_type = other DNA
gccttgatgaggtgccatagagccaaggcacacctcctctcctcacagccctcaggaggaagcagagatgagaggggcctggcggtggggcactgtgcccttcacccccagtgcaatggccattggcctgacagagtgccactattctcaaatatcctgtggagtttaattccaaaaggacaagttgaattatccttcggggagggaaatgcacattcgttcctagggcgccaggtacagggaggtacctaggcaggcaggcactctcagtgtacccctggcgccttggtgtcctggggtgatccagtccagaaggcctcatcccctagcggctctcagggccggcttggaccctggttcccagagtggatgtgaaaaactctggcgggggccgggcatttt

SEQ ID NO: 2533 - DNA, 395 bp, Homo sapiens
  source 1..395: mol_type = other DNA
tctttggtttcttgttaaacaaacacctaatttatttcttggaggcaagtgtgacctgattccttaagaattttacttaatgagaacctctaagctagaaactcttgctaggtgtttcaagagattcgatgagaaagctgtgacggccccaacttcttggtcccccgcaggttgctctgcgagcgccacctcttccctgaaagtggcgcgcctccgaggtcccggcccaggcggcagcttgggtcctggcgggttccggacgggcgcctcagggacctggaagcactccggaggcgccccccggccacaccaaacccgggtttgctggcagacgcggctcacgacaccccttagggtcgcagcccctcccccggaagtgacgtgtagcgactacg

SEQ ID NO: 2534 - DNA, 513 bp, Homo sapiens
  source 1..513: mol_type = other DNA
gccagggatttatccatggaagaaagaattttccccagaactctttttaaatttttttttctaggagattatttcagtctctgccctcctccaactagttagaaggagagagagagagatcctcctccttcccgcacctggccaggtggggaggagggcctcatctcaggcccttccagggagctaaagggcaatgtgattaacctcttggggttccactgccacagcccgggtgcggggagagggcccctagccttatccggagatcggtccctgggggctgcatccggaggctgcgggcggggggcagcgcggctcccggttggtctccgcagccgggggagggcgagagggggaggccggcgcctggcaccgcacggggaaggcgcgggagcggacgcactgcccacccgccgcagaggcgcccccgccgccgcccgggcccaagggcggggcccctcgctggggcggcccctccccgcccctccctccccgccgcgggcctccccagcc

SEQ ID NO: 2535 - DNA, 429 bp, Homo sapiens
  source 1..429: mol_type = other DNA
tcagctggaaggtgccctcccctcttacagaggcccagaacacttggcccacgttatgacacagggccagcattggaacccagtgccccagtgcctggttggctaaggccaaccaggtcttccccttcgaatgggactttgtagtattcaagtcaacaatccaactaaattggatttctctccacccaataaaactccatggagcaggtatctgttcggtgctcaacagctgacaaagagaacatttcattggcaatttatcatccttaagaagaaaaaaaattggaatttggttttcagcgcagagtgacatctcctttgaagagcagctctgcctggagggcggtgccctgccctaggtaatgatagggcagtctgggagccacgcgggggctgcccgtcgcggcgcggctacaaagccagccagcg

SEQ ID NO: 2536 - DNA, 344 bp, Homo sapiens
  source 1..344: mol_type = other DNA
ttgtttcccattttacagatgagaaaactgaggctggacctgggattccacctgaaatacctttttcttaaaatagtaatgcaccagactgggactttaatgaccctgaagtggatctcaaggtccaggggtgaagatattccttgattatgatccttaaggtcaaattttttgaacctaaggaatttccctcgctctcagagcatcttgactaacaggacccccacggtgaaggtttggggaggagcgcacaaaccctagtgggttgggggctcgtctgttccaggagccctgaaccagaagccagcagctcggggttcggcagcagcggtcccatcggctga

SEQ ID NO: 2537 - DNA, 338 bp, Homo sapiens
  source 1..338: mol_type = other DNA
gaatcatcttttaaaacttggatttcctaaagacttttgatagatatatcaactcatttaatactaataacttgtttcccattttacagatgagaaaactgaggctggacctgggattccacctgaaatacctttttcttaaaatagtaatgcaccagactgggactttaatgaccctgaagtggatctcaaggtccaggggtgaagatattccttgattatgatccttaaggtcaaattttttgaacctaaggaatttccctcgctctcagagcatcttgactaacaggacccccacggtgaaggtttggggaggagcgcacaaaccctagtgggtt

SEQ ID NO: 2538 - DNA, 522 bp, Homo sapiens
  source 1..522: mol_type = other DNA
ctcaagtgatacatgagtagtatggctagaataggcattgtagaagtctggatattaaatgctgtaatttttgttttccaaagactggtctcttgggtcaagttttcctgaacttgcctggtattgggcaagttcacacagaaaatatgagtcatttcagtcctgggcttgtctatctacttgaaggattttactaatgaaataagtttcaatcttaactcagttaaacctttaaatctccccttaagggatctcaaaataagattccaaactgtcgagggagtttgaagccttgaaacttggtgtaggtttgcttaaaacaaaatgggaaggtgccggctgctccttcctcaaggggagggtccccatcatctggccccagtggtgtaaggagctgactgggattcagtcactgacttggagccgctcggccgcggcgcctggtccagaaggtgcgaacagccgggggctcggagctcgcgccctgcgccccacccaggttgcggccgcccggggaggaag

SEQ ID NO: 2539 - DNA, 523 bp, Homo sapiens
  source 1..523: mol_type = other DNA
aacattctgggcaaaatatattgtgaaccatgctgatgttctttcgccacaaaactctctatcaagagatcttcctctattcctagaaaagtatagaaaatggagctctctttgcttgagtaaagttacaggctgagaaattaaaattatttgccaaacactagttttatgattatctattaacagcttctagctcaagtgatacatgagtagtatggctagaataggcattgtagaagtctggatattaaatgctgtaatttttgttttccaaagactggtctcttgggtcaagttttcctgaacttgcctggtattgggcaagttcacacagaaaatatgagtcatttcagtcctgggcttgtctatctacttgaaggattttactaatgaaataagtttcaatcttaactcagttaaacctttaaatctccccttaagggatctcaaaataagattccaaactgtcgagggagtttgaagccttgaaacttggtgtaggtttgcttaaaacaaaatggga

SEQ ID NO: 2540 - DNA, 513 bp, Homo sapiens
  source 1..513: mol_type = other DNA
ctcagtgggtcagaggaagtgaggctcccctcctctccgacctgggggaggagggagcacgcggctggctgcttgagcccgggggtcagaggtggctggctggctggtcgcacacgcctctcaaagtctgctggggctccgacgcggcgcagcgggcccgggggcggtagcaccacgcagcgagcccgggcagcgggcccctcggaccccgggccgatgggcgctgggacccgcgcgctccaggcgcatggagccggctcccggttcccgttttccccggcgccccgcctcctgggcacgaagcgaaggaagggggccgggccgaggttgatcccgccccctccccagtcccgatggagcggggggggtgccacccagtctgccccagatcacgtttgccaccggcagccaaccagttgggcccgagtccgcgggcaagaagcgattgggggcgcgtgagctcggctccccggtcccccgtccgggtgcccccccgccgggcccgaagcgagc

SEQ ID NO: 2541 - DNA, 465 bp, Homo sapiens
  source 1..465: mol_type = other DNA
gggttcctttatgagggaggtcacaccccctgcacaaaaacatcccaaagagaactggcattgagcttgtgctcagtgggtcagaggaagtgaggctcccctcctctccgacctgggggaggagggagcacgcggctggctgcttgagcccgggggtcagaggtggctggctggctggtcgcacacgcctctcaaagtctgctggggctccgacgcggcgcagcgggcccgggggcggtagcaccacgcagcgagcccgggcagcgggcccctcggaccccgggccgatgggcgctgggacccgcgcgctccaggcgcatggagccggctcccggttcccgttttccccggcgccccgcctcctgggcacgaagcgaaggaagggggccgggccgaggttgatcccgccccctccccagtcccgatggagcggggggggtgccacccagtctgccccagatcacg

SEQ ID NO: 2542 - DNA, 268 bp, Homo sapiens
  source 1..268: mol_type = other DNA
catttcctagactagcagctacttctcctggcagaaaaacccagtatttgaggccaaaactggggtctgagacactgatatctccagagcaaaagtgtgtgctcttgtgagcacgtgcccaaagggggtctagtcacaggttccactgtgggggttcctttatgagggaggtcacaccccctgcacaaaaacatcccaaagagaactggcattgagcttgtgctcagtgggtcagaggaagtgaggctcccctcctctccgacctggg

SEQ ID NO: 2543 - DNA, 273 bp, Homo sapiens
  source 1..273: mol_type = other DNA
atgcctggtatatttcaattaaaaaaatacacacacatttcctagactagcagctacttctcctggcagaaaaacccagtatttgaggccaaaactggggtctgagacactgatatctccagagcaaaagtgtgtgctcttgtgagcacgtgcccaaagggggtctagtcacaggttccactgtgggggttcctttatgagggaggtcacaccccctgcacaaaaacatcccaaagagaactggcattgagcttgtgctcagtgggtcagagg

SEQ ID NO: 2544 - DNA, 566 bp, Homo sapiens
  source 1..566: mol_type = other DNA
aagaaaagaaaagaaaagtaactacatggctgaatttttttttttaagcaaatcttaaatgaaatgcaaacacttactgaatttttcttgagaattctaaaatttgagagtgatgccagataaaattgcatcaagaaatctgaaaggaacgatttattctggcttcaggaaatctgattttatatttctgtgacataagacaggttttcttttttccagaatgataaccataaaatttcacttgtggaatacatcaaaattatttatacatcaaaattctcttaaatattttatagtaatctttctaaaaatccttcagtcttactgtactctagagttgcaaaaatgtagtgttaacattaatattaaaagcactttcaatgaaatttctaaacttcaaatctataaacagagcaatttgttccaatttcagatgaaatcaagctgggagctcccccgccccaggcagcagagtatggtctgataagcttttgatttgttgtcatacaggaaaggacagacatgactctagcctggagcccgaaaggccttaaggatcctgggcg

SEQ ID NO: 2545 - DNA, 280 bp, Homo sapiens
  source 1..280: mol_type = other DNA
ctgggaagttgggggagcaacttctcccagctctgggaggtggaactcctccgggcctcaggggccctggcactcagctctgcccatctcagctcctgggcaggtggaccatcctggtttccccacacacaccattgtccccctgggaaacctgttggtgatagatgtcttatccaagaagggtcctcttgaggtcatctcagctatcagctgactggctgaatggtaggagcctttctgccagggtccacctgctgaatcaagtggggcctcctgccct

SEQ ID NO: 2546 - DNA, 277 bp, Homo sapiens
  source 1..277: mol_type = other DNA
gtgtcgggtagtgactctccctcccaggaagtaagtccttccgtagcactgggatgggcagctctgctggcagcagccggagcagtgataacagaactgggaaccaggtctcgggtgttcagaggactactgtcttccagaggctctttggcctgacccccagccccataagcagcaggacagcaagctcagaggagcttgtcctgccttgtctgcctcgtccccctcctccagggccgccttgggggagccggtggggcaggagccccgttataaa

SEQ ID NO: 2547 - DNA, 173 bp, Homo sapiens
  source 1..173: mol_type = other DNA
ggtgggccctactccatgagaaaataaatttctgttgtttaagccccctgtactcataaatctgcagctacactagagcacttgcagccaggcagccaggtgcagggggaacgccctgttccacatgccgtattccctcagactgggcccgttcccactgccctcggggagag

SEQ ID NO: 2548 - DNA, 225 bp, Homo sapiens
  source 1..225: mol_type = other DNA
acactcaataaatgtttgttggatggatgaaaacaaatttaattcctctgccctcagtcagggggaaaaaaagtgcagctcttttatatcctccactagctagtatcaatacatttgagttcttcttttttaaaattattattcagtctttaaaaaatgcaaatagaaatagctgaggaagaacctggtttttccttaaacttgtcatgcctgcacagcatgaaa

SEQ ID NO: 2549 - DNA, 378 bp, Homo sapiens
  source 1..378: mol_type = other DNA
gcagatctactttaatggccatttctctaattttacacacatatttacacctgtgcaaatgatgtttgttgcagtttaataattacatcatcatttcaagtgtaaaaagtggaaacaatctaaatttactactagatgaccagttaaagaaagttctgtatgtattaataataaattaactcctagatatattaagtatgtagtacacttttgctcatgtacacataacttttgaattctaaaaattaaaaataaaaacaattttaacacttagaaaacctattctctaaaagaattctctgtatttgccaataacacaattgttagaagaaatgtacaatgtaccatttcacaaataggggaactgagtccaagtaa

SEQ ID NO: 2550 - DNA, 397 bp, Homo sapiens
  source 1..397: mol_type = other DNA
ctttggcataatgaattggaccaactgtaggttagaacaatacaaatggtggttattctctgtcacccaggctagagtacaatggtgtgatcatggctcactggagctgggactacaggccaggctggtctcaaactcttgagctcaggcggtcctctgaataatagtctgatcactgagttcttaaacaactccatgaggtaggcattcatattctgtctgtttcacagatgaggagattgttttatactcagtacctgttttaaggaaaaacaacagtccggcgccaggcccgaaaccaggcctgggcctgcctggcctaaaccagtagttaaaaatcaactcataacttagaaactgatgttattcatagattccagacattgtatagaagaac

SEQ ID NO: 2551 - DNA, 456 bp, Homo sapiens
  source 1..456: mol_type = other DNA
gaaaggacattctgttaagtgcttcacttacttacttatattatttaaccttaaacaaccttatgagatttaaaaaatatcagatatttattattaacccaattttacagatgaaaaaactttaagtaacttttcctcatagaggcctacaaatctctgtattttgggattttaggccctccaaagagcctgaaatcatgcttaatgacaaagaagttgtcctcaaaaatttattcatctttgaatacatcacatatagattcacagatgagctaggttggaaagtatctttgctaatatctagagacctacttcttcattttacagaggaagaacatgagttgagctcatgtggcacattggtgccaatctaaatgtgtgccacagggagagaaagagattactaatctcctccatctacacaagaggcattatctctccctttgttgaaacact

SEQ ID NO: 2552 - DNA, 462 bp, Homo sapiens
  source 1..462: mol_type = other DNA
aatacctctctattgagcggctggttctagaccggcctctgcagtaatcttctacagcaagttcttgaactgcgtttaggatcttggaagcacctaagcgcaaataccgggaatttctccggctgttacagggtctgcggtcagacgtcactcccaggtgactggcaatcagggatgccgcctcgctggatcctgcaccggctagccggctggcagagggcgcgccaacagccgccagccgaagtgcccccgcgtaggtgggaggagtgactgcctctcaccatcccccggggatgcacctgtggagagacctgcctgcctgcgggtcggtgtgtcctgccggctgctgggcgctggccagcagccggcctctcggtcatcccgccgggtgggtgcctgcctctgcaggagccaactggcgagccgcaggccgccgggctcggcctgggagcccataaaacc

SEQ ID NO: 2553 - DNA, 173 bp, Homo sapiens
  source 1..173: mol_type = other DNA
tggaggtgtgactagcactgccgagcccgggaagcgggaagggcgtgccttgccactttcactagggcgaaggcagggtttgcccctaagctctcgtgaggggaggccccggagccttccaatgagggactggcgctcaatgccgctccgggaaaggggcccgcggacccgca

SEQ ID NO: 2554 - DNA, 356 bp, Homo sapiens
  source 1..356: mol_type = other DNA
gattccgggcggcaccgctaaggcgatgccgcgagcagcatccgcgccctctccttcccgccccagccccggtttgttcagtcagggctccagcccggcggccgggaggaagctgacgcgacgggtcccaggcccccggctcccggtgccccagtccctggaggagcctccgccaactccgcagtctatcgaccgatggggcccatagccaatagtggaggtgtgactagcactgccgagcccgggaagcgggaagggcgtgccttgccactttcactagggcgaaggcagggtttgcccctaagctctcgtgaggggaggccccggagccttccaatgagggactggcgctcaat

SEQ ID NO: 2555 - DNA, 567 bp, Homo sapiens
  source 1..567: mol_type = other DNA
cgcggcgggggtggggtaggggacgtcgttccgagcccgccctgggcctctccccgcccgcagagcctggcgctacgaggtggggaggaaggaagctccctccgagcagccgcctgcgcgggctccgggcggggactgcaggaacgcggggcaccaggcggggactgcggcacctcggcggcctcctgagccccgccagcgctgggcagcggccagcccgagggagccctcccgacctagcccccgacgtggccccagacccccggccggggcacctccctggggacagcaaaaggggcggcgagcggaaggcagccgtcgcctccctcaagctagggacagatatcccacccaatcccaggctggggatgggaggaggtcggtgaggtcgcagtcctgactcctcgcaccaggcggtgcccgagaagatccggccccggacgaggcccagggggctggagggacgcaagcgggagcgcggagcccggcgactagctccctcgcgtgccgcagttttcctccgagcgccgggaggaggaagctcccgctagcgtctcccacttcccg

SEQ ID NO: 2556 - DNA, 575 bp, Homo sapiens
  source 1..575: mol_type = other DNA
ttttgctgtccccagggaggtgccccggccgggggtctggggccacgtcgggggctaggtcgggagggctccctcgggctggccgctgcccagcgctggcggggctcaggaggccgccgaggtgccgcagtccccgcctggtgccccgcgttcctgcagtccccgcccggagcccgcgcaggcggctgctcggagggagcttccttcctccccacctcgtagcgccaggctctgcgggcggggagaggcccagggcgggctcggaacgacgtcccctaccccacccccgccgcgtttcctgcatttacaggcaagtgaaccggagcaaacgacttccgatccagtctcatctttgagcctctactcccggggacacagctgggcgcgtgcagccccacaccatgttgtgcggaaggacccagcctccgggcgctgcagttctcccggctaatgctgaggctgcggctccggctctagcacaggcaccagccgccgccgcacccggccccagcgcccaccgtctgcatgtgcccgccgtagccgtctgcccagcccgcagcccgcgctccacggag

SEQ ID NO: 2557 - DNA, 349 bp, Homo sapiens
  source 1..349: mol_type = other DNA
gtgttctggggtgcacagcacatgaattgatgccaagtgctgggactctggatgcctgactggtgacatcaggcagccagagattagagtgaagtcagctctctgtggatctgagagttggctcaggccagcctctcagctggggctccatttgaagaaaggttttttcttttcaagcaagttctatccagatgtctctctgcagacaagaaaggtgacaggagctgtctccacatgggtcatccaggggactgtggatgacctcattctccaatgggagacgtggaaaatgccaggatttgtaaacacatgctggctgccagcagtggcaatctcctgcttggccact

SEQ ID NO: 2558 - DNA, 302 bp, Homo sapiens
  source 1..302: mol_type = other DNA
agttgcagcaactcctccagctggaggtgctgctccagtgtccaacattctatagaaacatggaatttcctggttttaaccattctctgagctgaccagagcaggacatgggaagttggcacctgggtgccagccccagcttcaggtcacactggaaggcatcagctgggtccccgggacctctgcaggcctcctgggaaggtgactcagatccaacagagccctgaacttccctgctccagtgaactccagaagggccccgagttgcctctgtctctttaagagagaaagagagagcgaga

SEQ ID NO: 2559 - DNA, 414 bp, Homo sapiens
  source 1..414: mol_type = other DNA
agagccctgaacttccctgctccagtgaactccagaagggccccgagttgcctctgtctctttaagagagaaagagagagcgagaagctgagagccaggactcagtgctgagcttggtgtcccaccgcacagttgcaactgcctgcctgtgggtcctaggggcccttggctaccaggaggctaagaacactccctgaaagctctgggggtgtcacccagtcccacaagcctgcatcccctgcagtggagatgggctgcagggcagctcagccggcacatagagcgttgtgtgtggcatggaggtgagccaccacgggccaaccacaagccctggccggagtctcaggagtaggcccccagcccagccctgtgcggcggcctgcaactgcactgaggggcgcctctcatccgccc

SEQ ID NO: 2560 - DNA, 556 bp, Homo sapiens
  source 1..556: mol_type = other DNA
caagggtccatgaaggcttgaagcaagccttcacggaaggagatctctctttgggtcccatgagtgaaccatccataccaggttccacttagggcggactaattactagagcaggaagaaaagctcccccaacccttggggcgagggagcgttctctcaatggagctaccctacccggcagggcttgccgcccttggaggcatccggcggtcacccacgggacaaagcgcggctgcgggagcgcgcgcggggcattccggacccgcgtcgagctccgctctagagggggcggcgggcggcgggagggccaaggagcacggccctcctgtcggcaccatcagcgggagagtggcgacggaggggccctactcagatccgacctgctccctcccggggcgcgtgagggtgcgggtcgaaggcctagggccccccgcaatgcgccctctgagctgtactgtacagaggcgctcctctgcggaatcctgcagctgctccaggtgaagatacccccttcggtccgtcggccccagcaggctgcggttcctttaaaggcgcg

SEQ ID NO: 2561 - DNA, 434 bp, Homo sapiens
  source 1..434: mol_type = other DNA
tgtaccagtgactggggcgtaggcagctgcacacaccagggctgagtcccagcacacgtgttctacacagtctctgtctcaaggctattggaatgagtcaatgatagagatcacttgcacagagagttgttcaaacaatggtagctagaactgctattcctttgtccagtcagatgggaaaatataaatgagcccttctcaatgttaagactatccggaagatacacagatgacctggacagtgtctgcaggctcctgtgtatcctgaggcttccggcagcttgacccggctcccccacccagcgaatgggggagggagggggtgggcctgagtcaccggggcagagggaatgttccccctcgggtccacctgagtccacttgccaccgggggcgggtggcacccaggcggcggggaggcggccgagccggctt

SEQ ID NO: 2562 - DNA, 353 bp, Homo sapiens
  source 1..353: mol_type = other DNA
ctcgagcaggctggagtgcaattgtgccagcctcccgagtagctgggattacaagcggtccgcccgcctcggcctcccaaagtctgggataacaggcttgggccaccgcccggccgctgaactgtttatcagttcaattatttttgcggaattgaaccgaaccgagcttctactcaagctacggacggggaacccgagccgctcgcgcaggcgcagagccaggcccgcgaggggatgggaaggtgggggggaggggcgttccctgggccctgcccctccctgccctgcttccaggtaccgccactgggggcggccgcggcctccccagcggcaacggccacgaagctgcgcgg

SEQ ID NO: 2563 - DNA, 580 bp, Homo sapiens
  source 1..580: mol_type = other DNA
tctaacaggaaattttttttttttaaaaacaaaccaacccaaaaacacttgtattcgggtgttttaacctccatggaaattaacattggtgtttctgaggtgtcttagcatcagaagggccttgcagaggtaggtcctgagcttctaggctttgccgcttcatgctcatgaggaagcgcggctccagtctgtaaaagacgaaagtcgtcgggtacctccgttactgatcataaatggaagcacgtgtcaataaatgggtttaccaacccccggagggccgtccccgcggtgggaaagcctaaaacaatacacatatgttttcactaatttaaaattcatattgaacgttttagaacttccaggacgcaacgtgctaggggcgggcagccctagagcgccagggacccaaacagcctaggccgcgagctcctccccgcgccagtactagcacccgctaggagcgccgcgtggcctttaccggccacgggccccgcccctgtgcgtcagcccgtagctgcgccgaggcgtttcccgggggcgtgccgcggttgctaggcgaccagaccgctccccctcccgc

SEQ ID NO: 2564 - DNA, 288 bp, Homo sapiens
  source 1..288: mol_type = other DNA
aaagaccccttagagccctgagggtctctcacccttcccccctggtgggctcccccaagtctctgaaaggtgactgggagaggaggcactgtctgcctcccaaggaggctgtgatgcttcctggtcccacgaggctagggtgatcttccctgtcagaagccagcatcactgtcacccatgcctgacaaggctcagtcctcgtggctgctaggattctttcattctggtcaggaagtcacctttccagctgcctaggctttattattgacatttattttaggtatctta

SEQ ID NO: 2565 - DNA, 304 bp, Homo sapiens
  source 1..304: mol_type = other DNA
tgtgtgtggaggcctcctggcagcttctatgcagggtccagctagatccctgggcttttcctgagaacggggctaggtctcgctgttcttcccacggagagagaggtgcaaggcttgctcagcctcacacagccaatccgtggcaaaggatggcgggaattcaggtggccccaattatcctttttagtttatttacaggaaaacatgttcaaaggtataattactaaagtgctcctggttacacaataatacgtctttactgaaaaacaataaattaatctggcccctcccctttaaggaccgg

SEQ ID NO: 2566 - DNA, 418 bp, Homo sapiens
  source 1..418: mol_type = other DNA
ctttagacgaagcttacaactaaaagaatttaatccaaggtttcattctcactataaaatagagagtcatggtgagcactaaagctttcagcaagtgcagactactcttacccacttcccccaagcacagttggggtgggggacagacacatcctgtgaccccgcctgtcccagagacctaaggtgactgcctaagttagtttctcaatcccattgtattctggaatgggcaatttgtccacgtcgctgagggcctctgcgcacagaacagctgttctccccaggaaatcaactttttttaattgagaagctaaaaaattattctaagaatgtgaagttcatgttcaaccaatcatttttgcttacgatgcaaaaattgaaaactaagtgtggctttttaatgaatgaagaggcctcc

SEQ ID NO: 2567 - DNA, 387 bp, Homo sapiens
  source 1..387: mol_type = other DNA
gggttcacactcacacgtgtgagttacagcagctttaactatagctcagtgcatagcagagggctgctctcgtcacatgtgttgtcataagacatgcgttaaggctaagctctatttataagcttgtgtctctgtgcgcattatgtggcacaatacgtggcaaacctctcagggtctggccctggctatgaagcagctagctcagcaggtgaccgacgggaagttgccaagctgcccttgaaatgattttaagcagatacactcttgaggtttataataaaagggtgttactcaggggcaaacatcaaaaaccaagtgtgtttttatggtttttccctatttaatttattaaaaacaatgcttttcgtgatatgcatacaagtatgc

SEQ ID NO: 2568 - DNA, 479 bp, Homo sapiens
  source 1..479: mol_type = other DNA
acattctgatccattcaggaaaagaccttacacactgtttagtctgtttctctcattttacagatttgtaaactgagatccagaaagacaatgccaaagtcatactgtaatgtggagtctttggactcaaatataagacttcagaattttagatatttaatttttaataagttgataaagaacatatgatagtctctaccatctttattgaatttaattttgtctgggagcatggtcctacatgatggactagtcccagcctaaaaaattttccagtgctttcactgccaaagaaaaatctgctattggggagaatcccccagaattctcaggaaggtggagccagaaggaggcacatcctttccctcaggcagtgcttcttccaggaggaagtaagctgctgtagtgcttagggagttccctcacctgcctgagctcacttccttcatgtgacatgtatatacagatataaataatgg

SEQ ID NO: 2569 - DNA, 405 bp, Homo sapiens
  source 1..405: mol_type = other DNA
gaaacatgaaaacatgtgaatagtggtacaaatttttccttttgaattttgtctttatataaaattttgatattttgtttgtcataagctttttaattcattttgatattgcactaaaatatttttatcaaattttgcacctaaaatgagtgcctcaatggtctaggacctgagttgcaggtccaggaaagcgtgtactctcgaatccacccaggagtgcctgactacagtcctcctgcagagggcgctgctcaatctgatctcagacaaatgccaaacagagctcagtttctctgccctgtgggtttctccccagttcccctgtgggtctgaggggaccagaatttctgaaatgtcactgcaagtgcctgctgttccaggccttacctgctgggcactaacggc

SEQ ID NO: 2570 - DNA, 557 bp, Homo sapiens
  source 1..557: mol_type = other DNA
gtgtgcatatatatatatgatgtgtgtgtatatatatatgtctttataaattttatgtatttatttctttcaaaaatattaaagtatttgagaaaattgaaaaattaaaaagtaggtttattacgactcatgactttaagtttaaatattttatttctgccccaaacaaaatttattataattttactgtcctggttttaagggaaggaaactcatcaataatattttcatcatatgcttttgagaaacaagaaacatgaaaacatgtgaatagtggtacaaatttttccttttgaattttgtctttatataaaattttgatattttgtttgtcataagctttttaattcattttgatattgcactaaaatatttttatcaaattttgcacctaaaatgagtgcctcaatggtctaggacctgagttgcaggtccaggaaagcgtgtactctcgaatccacccaggagtgcctgactacagtcctcctgcagagggcgctgctcaatctgatctcagacaaatgccaaacagagctcagtttctctgccctgtgggt

SEQ ID NO: 2571 - DNA, 293 bp, Homo sapiens
  source 1..293: mol_type = other DNA
caagacctgaggtcttctgactttacccttgggcccttggggtcctgaaggagattcaggcaaagtggctgcatgacctgtcacaccccagttctggcattgccttggtggtcactggacagaggcctgagcccttgccacagggcagcaccttgtagtcctcaggaactgtgttctgcagttcgtttatttcctagatgaagaaattcaggctcagagaactggtaaggactacagtcagcatcttctgacttcaggcccactctttttagcctgagaatagttagcaaaca

SEQ ID NO: 2572 - DNA, 222 bp, Homo sapiens
  source 1..222: mol_type = other DNA
gggctagcacatgccaggaggatcttgcaagacaagaattcctcaaacctagagtctgaggactgtgcttttcactgggcatcagagctcttgactgccctggctcctctggatggattaaaggagaggtacttacaggttattacagtaataatgtatttacatgtgtacagagtttaccgtgggacaaattttttaaaaatttatacataatgaagtatt

SEQ ID NO: 2573 - DNA, 314 bp, Homo sapiens
  source 1..314: mol_type = other DNA
cctcactttggggaacacctgggagtcccaaccaggtcatgttagcaccgtccttgctatggagccgagcccgggtcctaacaagtgttcaggggagcccagaagcagcgagtctttcatgactctggggagtgaaacaggaagggccacagtcctgccagttcctggagctctgggaccatcagatgatgtcaacttcaaatcggtattaccatccctcttttccagatgaaaagaaataggaaggtgcatcttcacgcttgacattctgtccctcgtgagagtcacatgaccctggctggccacggtgcctg

SEQ ID NO: 2574 - DNA, 438 bp, Homo sapiens
  source 1..438: mol_type = other DNA
catatctgttaagagtggtctctgtacctggtgggaaatttcttcccaaaaatagtagaagtatcagtccatgaaaggagacaagaataataaccaaatgacagagtgcatgctctctcctttcaagcgatgaatggttttatttcccccagaaataaattaggccaaggtgttggcggcgagactggcccaactacagcatccctagcctgggacacaaatgagtttagcctaggtagttctagatgaaaaacctgtttcacatagacctatggaaaagcacactgcccagaggactgtcttcctttatatcaacattaaatatatatactatctcccttttttaaagagctctttattagctctaaacagagggaacagcaccaccctgctcattcccctcccattccctccctgaggaaacagctggaatgagag

SEQ ID NO: 2575 - DNA, 288 bp, Homo sapiens
  source 1..288: mol_type = other DNA
aagcagagtgctttcagccagtattggctgtgtgtctcacaccgcaatgaatacttgttacaatgaaggcaggaatgaagtcttcataatgacacgcgttaacctgaatgaggcagctgccctgggcgaaaggccagtcttttggcccgagtctagtcacaagtgtgattgtccaatttaataatttccgacctcactaaatgctacccacgcggagggcaagcaagctttaggaatacggaggtttacatcttccaacttctcgcgatgtttggccccgctaaaggt

SEQ ID NO: 2576 - DNA, 355 bp, Homo sapiens
  source 1..355: mol_type = other DNA
tagtcccagctactcgggaggctgaggcaggagaatcgcttgaggtggtaaatgacttccccaaggtcacctcaggaagaggggtaagctcatgcccccaattcagcagggggctggtgaggacggagctcccggtcccagagtctgcctgccatgcctggggaccagtacccggggctgcgcagctgtggctggccccggcgcctgccctgtaacgcgaccgaaccgagccgacagcttgtggccgggaccggcgctacagtcgccggcaaagtgagcccgtctggccccgccccctcgcgcgtaggtcctcacctggatcgggcgcctgcaggacccagggggcggggcaggg

SEQ ID NO: 2577 - DNA, 281 bp, Homo sapiens
  source 1..281: mol_type = other DNA
ccggggtggccgggcgctggtcacacctgggtcgtgccattgcactcacacccttattagctcaagtgttgtggtagtttattctagcaaaaacatctttaaagcttattcactctcgcgagagtcagaaaaaagtcaagctttttattagtgccaccaggctcctcggcgctgggaaactcaggagcttgtgatctcccctgccccgccccctgggtcctgcaggcgcccgatccaggtgaggacctacgcgcgagggggcggggccagacgggctcact

SEQ ID NO: 2578 - DNA, 359 bp, Homo sapiens
  source 1..359: mol_type = other DNA
tcaagaccagtttggccaacatggtgaaaccctcgggagaggcctgaacctggcaggtgtcaagatcatgccatctcaaacaaaaaagaaaacagattattttttggaaaggcaagtgggttttctgaaatttctctggagaaggaatttgaaatatgttttactcatgctctcccctccaggatagacctaccctccttatctcaaggttgctgcctttagtcagataaggaaagcactgaatctcaaatatcttcagcttaaaagaatcttaacgccaaatatttgggccttaatgctttattattctattaaaacctgaaattttgtaggaatttttccccagtttcatacaggcc

SEQ ID NO: 2579 - DNA, 305 bp, Homo sapiens
  source 1..305: mol_type = other DNA
tttaaagaaatagcagctttaaagtcaagactgtgcaaaactcttctgggactttcagtatttattacagaaaaagtgaagttctcagaaagaattgccttttaatagcaatcttctgagcacacaaatcttaaccttgaggattagtattcattgcgttcttctgtatagcagttaacatttgctgaactccaaatacgttactggacctagtgtcatggaaagtgggccataacccttatgtgtttatgaaaagaaaaaagaattctggcttcaaattcaaattacctttccacttaggggaa

SEQ ID NO: 2580 - DNA, 347 bp, Homo sapiens
  source 1..347: mol_type = other DNA
ccttatctcaaggttgctgcctttagtcagataaggaaagcactgaatctcaaatatcttcagcttaaaagaatcttaacgccaaatatttgggccttaatgctttattattctattaaaacctgaaattttgtaggaatttttccccagtttcatacaggccacaggtaaggttagggcaagaaccagggattgacagcccgttctctttccccagtgctggccagagttacagaagttggactgtaaacattggcaactattgacagaagtcaacgtttcaaaaagactggtcaactggatttgcattcccagaaaccaggaaatttctgaaactgagttttaaa

SEQ ID NO: 2581 - DNA, 358 bp, Homo sapiens
  source 1..358: mol_type = other DNA
aatatatatgaatatataaatataaatatatatataagctccccacgtgtggccagtcttaagctatttattctaaagggtttgtaacaagccttcctcttaaaatccagttttggggtctgtaccgccccgaggcgcgcgcgcgcgcgcgcacacacacacacaactggtgaatttctctctacagtcagtctggagtaaacgcgggtagagcaccgcgtctcagcgcctgagtctcagcccccgcttggcagcactcaagcgcggggatgctccgcttagacgaactcacgtgcgggcagcaaggccctctccccgagtctagggcccccggggcgtatgacgccggagccctctg

SEQ ID NO: 2582 - DNA, 498 bp, Homo sapiens
  source 1..498: mol_type = other DNA
catttttacaatacatgatcctgaaatgattctggaccaggaaaaacaaaggttggtttctattgttgttattgtttttaccataacacaggttattgagattgtcaaaatttaaatacagattcaatgttacagaataaatgctagatggttccaaagtaataattatataattataattatataatcacatatatgtacatatatgtctatagagaaagaatattctctgcagtactcttgaaacttttctgtagagattacttcaaaataaagaacagagcagaagtggctgctgttcctaaattcccttcaaactgggagatgaatccactaataggttttgaatctaataagaataggatagcctagcctagtctagcataacatgagccaaagagtggctcagagctccccgcccacccgccgggcggcgccgcgtcagcccccaggccgcctgcaggtgtgcgctcagaactagcacgtgtgccggacact

SEQ ID NO: 2583 - DNA, 301 bp, Homo sapiens
  source 1..301: mol_type = other DNA
gtgcacaacgtgcaggtttgttacatatgcatacatgtggaagctggaagaaaggaatatacacagatttacattttttaaatgtgtatctaattgtccctcccttttaaaaaatcttacaatggcatgacgtctcaattcagggtaaggaaattgtttcttcacattccctgtacaagagcaggtggaggcgagctgccatcatccacaagctctgctgctgcacctgggtcagcaaggtggggaagctgtggtcaaaagcattttgtcccacactctgggcgcggagcacaatgattgg

SEQ ID NO: 2584 - DNA, 362 bp, Homo sapiens
  source 1..362: mol_type = other DNA
ccactttaagacttttaacattctgaaaagttatgttacaaagaagagaaattttccaacattgttcctgagattgtttcacatgcatgtatatttcgtcttcaataaaacatttagttgctcaaggcaagggtcccatagagtctcaataagattctgaccctctctattgttcccaataatgggcagtcctgacagcctgcagtgccccaggattaaccctgaggggtgctagccaccccctgccagggctctggacacgccctgtctcctcgaaggccaacgggctgcccctgcgcgccgaggccccgccccgcggcccgccgattggccccagccgccccggcgccgcacctgtcatg

SEQ ID NO: 2585 - DNA, 411 bp, Homo sapiens
  source 1..411: mol_type = other DNA
tgttcatgcatgtatatttcgtcttcaataaaaaatttagttgctcaagggcaagggccccatagagtctcaatattctaagcccctcctattgttcccaataatgggcagtcctgacagcctgcagtgccccaggatataaccctgaggggtgctagcccacggaattcctgcctgggtcacaaatatgacggcgagccagtcctttcccgcaggacgcctcaggcttccgggatggtaggccaagcggcctcggggaacctgttctgttaggttccgccagggcctccccctgacctctcgaaggccaagggctgcccatgaacgccgaggctccgccccgcggcccgccgattggccccagccgccctggtgactcgacgcacttccgccccgggcgcggctcgggcc

SEQ ID NO: 2586 - DNA, 477 bp, Homo sapiens
  source 1..477: mol_type = other DNA
aatcctcccacctcagcctcccaaagtgctaggatgacaatccatcattttaattgccgtacatgcaaactgattgacgcagtgtcctatattcagggcttgatacattgtcaaggtgtgggcagacctatttcaactggagatacttcctcctcatccagactctcggtgctggggagcgggggtgctcaaggggaagccatgtaaggctcccctgttcaaatgctgttcagaaaaacggatttttccagagttagaacgtctatccaaggacttacctgcagaattgctccttttcctgaggaatgaagcagcagtggcctgagaactcatttctcagtttggctaaccacactctcctggccttatcctcaaattccagctgggtcctgaggccaatctccttgggtcacagcagtgggaaaatacccaggctccattccaactgggaggaccctgtggccttgttgcaagcag

SEQ ID NO: 2587 - DNA, 284 bp, Homo sapiens
  source 1..284: mol_type = other DNA
aaatgaatacactaaatgtgccacattgtggttaagttttacctgattaacgaaatgctcacacttctaaactgaggtccttacagtagattccttttgcaagattgttactggcttacaacttaaaacttgcccctgccctggccaccggcaaggctgcccgccctccgcctttgggaccaaccaggggagctcaagttagtagcagccaaggagaggcgctgccttgccagaatcccccacccctctcccgggcggagggggcgggaagagcgcgtcctggc

SEQ ID NO: 2588 - DNA, 292 bp, Homo sapiens
  source 1..292: mol_type = other DNA
aatcagaaaggaccacagagtgctggtctggcttctcttttttccctttaggctatgtggtacagacatcatggaagagcctgaactgagtatttataatttcatgattctgctctggatatcagagcagcaaatgaatacactaaatgtgccacattgtggttaagttttacctgattaacgaaatgctcacacttctaaactgaggtccttacagtagattccttttgcaagattgttactggcttacaacttaaaacttgcccctgccctggccaccggcaaggctgcc

SEQ ID NO: 2589 - DNA, 295 bp, Homo sapiens
  source 1..295: mol_type = other DNA
aagaaccactagattccagtctctagagacaactcactgagctcagaatgtcagcggagcctattagagggagcagccggccaggcagtgtgctccaccctttaaggtagaaaagccctgccttgccatttttttctcctgaggaacaaaaataccaggctccttccccgtccacaggcaggaggcccctcgtgagtcgccggctgggatttcacagtgccctgacaacactgagctacgaggttttctgtaaggcaaacaccccaccccctactctgagtgacccacagggggt

SEQ ID NO: 2590 - DNA, 501 bp, Homo sapiens
  source 1..501: mol_type = other DNA
aatcgcgagcagggactacgcagatcctgcgaactcgctggggtccagcttgcaggccgcttccggaaagccgtgtctagagcgtggccttgagggcaagattaggttattaaaataagttatcttattgaaagattctatgcaagtcgggaccaattcagagcaaggttcatcttctcattgcaataataataataacaacaacttcaagcgttggcctttttctttttttaatttacaagaagaggaaatttgctcacccctcactcaaattacagatgaagagggaggttcccccgggggccaagccagctgggctcgcaaggcccgactcgaattcccgggccctgccttggctacttaaggtggccggtccgggctgagctgggcgcaggacaggcagccgagcggcctccggatgccaaacctgctggcggtggcgggcggtgccagcagcgggcgcggccccagcccgggcggacgcggccggcggggaggggg

SEQ ID NO: 2591 - DNA, 203 bp, Homo sapiens
  source 1..203: mol_type = other DNA
aatagactctaccgtccaactgaggggccccttttggggtggacactgtcttcagtccctacatgtcagagggaggtgtttttagacaacatacaccaggcagacaatcctagaaagcttctctgatttttttctgtcacattcaggataatgggaacttataatttgatgtagatgcaagccaccctagctacttttactcc

SEQ ID NO: 2592 - DNA, 250 bp, Homo sapiens
  source 1..250: mol_type = other DNA
cctgcctggtgcgggccggatgcgagctcactcaggtaagatttctttttcacatttgataagcacctcagggaccccaggccacatgttccgattttgaagcattaggatctataatttaaagatgtttccacaaggcaggcctgcctctgggaccccacggtggctttcgagtgcttccctttcagaagaaaggaggcccctccaggccgtcagccactctgactcattcactttgggcgtctaggcc

SEQ ID NO: 2593 - DNA, 443 bp, Homo sapiens
  source 1..443: mol_type = other DNA
acctgccacttccatttacagtggctggaagcccaggatccctgctgtgttctcaggcctggcaggaggccagggaaagtctgttttgactttgtcagaaggcgggcattcctgcctagggagggaggggctaggagactaaccctccccacaggtgggaggagtgactcacaggcagctacctgtcccagggctccctgccaaccctgtggagggagctgggaaccttgccttttaaggatcctccaaattctcaccttccagcccggtgatatgtctggagctttacacattgaggggccccttgcagcccccacaggcaggtggtgggacggaccgaccaacccacttgcccagtcccgtcctgggaggtgggggtgacggctgccagattcctgagacccgccctgcggtggggctacacccagccagggagtctccag

SEQ ID NO: 2594 - DNA, 412 bp, Homo sapiens
  source 1..412: mol_type = other DNA
agcgctctgacagagtcagagctgacctaataatctgagggttagaaatgcccaatttaatccacaaaattctacttaagggtcttcaagccaatttcttggattgccagtgcaggctctccagggccaagatatggactggctgacccttctctgaccctaacctgggggaaagagtgtccttctctggacctgccacttccatttacagtggctggaagcccaggatccctgctgtgttctcaggcctggcaggaggccagggaaagtctgttttgactttgtcagaaggcgggcattcctgcctagggagggaggggctaggagactaaccctccccacaggtgggaggagtgactcacaggcagctacctgtcccagggctccctgccaaccctgtggagggagctgg

SEQ ID NO: 2595 - DNA, 512 bp, Homo sapiens
  source 1..512: mol_type = other DNA
atgaaatacttccattctaaaatggcagatgactcaagtggaagtgagaacaatttgaatttgaaggctcttccctgatacagcaaagagactaatctctctctctttctctctctctctctctctcacacacacacacacacacagcaccatcaatgaatagttttctatcaactgactctagttatacatgcatgtacctctaaacatattgccacacgtgggaaggaacccttccgaataaaaatgaaagctttcttctttagatgatgtcaggctgtcctggacaaggttgccgccatgtcagagatgtccgcggacacctccctgggctccgggtcctcccctgcgctcgcctggagtgggcttcccacgcgccccgctgcgatggcacccgcgccgggccccctagctcacacagtcggagcgtgctcagcgcgtggccacctcctgccaggtcccagccggcccctggctctgaccgcgctggcctgggccggagagcccaggag

SEQ ID NO: 2596 - DNA, 143 bp, Homo sapiens
  source 1..143: mol_type = other DNA
cttcactagccactttcctggctccagccctggaccctgatctggcctcaggctctattttaggcttctgaagctccagagcttgtgcctggagccctggagtccctcaggagtgaggctggctggattggcggcccttatta

SEQ ID NO: 2597 - DNA, 431 bp, Homo sapiens
  source 1..431: mol_type = other DNA
ggtgcctagcatagagtagatgcttattagatatctgttgaacaaatgaagaaatagaggaagaaagtacatttttgttcacaaacctctgaattgggatcggcaagaatcatggtagaattattgtccctacatcagctgatgcagtcactaaaatggtttataagtcacatatgagattccctaaggagtttataattgagaaatgtgtggacacacaggcctcacagaatgcactggatcactagagtctctcctccagtttttgtttcagtaacttcctttgagacaaagtcaggaatctgagatctcccatgttaagagctaacaatagtaagttctggctgccagctcggtcctagcataagggacttcttccttggcctggggtatcaggtggcagaccagctggtttcagtcccaaatcaggt

SEQ ID NO: 2598 - DNA, 251 bp, Homo sapiens
  source 1..251: mol_type = other DNA
aaacttaacaatgatacatcttaaattctttctttgaggattattccttaatgaattcttatatttccctgataataaattctaaattgctaagggtttctcagcacagcatttacaagaccaaaatgtgcacattttttttttgacaaattacttttgaaagatcattgatcccggatgctcaggaatccagtcctgtacagtcatgatcctcttgctcaatgaaatggagtaaacattgtcagggagct

SEQ ID NO: 2599 - DNA, 413 bp, Homo sapiens
  source 1..413: mol_type = other DNA
tctatgtgtcaagctccagacacagggccttgagctgttgtctcttccttgtcctttttctcctcaaagaacagagaaagaagcagctctccacatgttaataaatgttatcacagctatttttaagtctcattacgtgtcaaaccttagaattacaaggttacaaagctgctcagttaactactattttagcctgaacttcttgggaatttatggcttcatcttaatgcatgcaaataaaaaaatgtgtagaagactctttgctccagaaaggagcaaatccagagttggtctcattccagaatctgagatttcaaaggtctgaatctgacccagaggactatccttttctaatcatggaaaggaatcttgactctgatgggaggagctcctgagcccagccctggaggcct

SEQ ID NO: 2600 - DNA, 421 bp, Homo sapiens
  source 1..421: mol_type = other DNA
ccttgtcctttttctcctcaaagaacagagaaagaagcagctctccacatgttaataaatgttatcacagctatttttaagtctcattacgtgtcaaaccttagaattacaaggttacaaagctgctcagttaactactattttagcctgaacttcttgggaatttatggcttcatcttaatgcatgcaaataaaaaaatgtgtagaagactctttgctccagaaaggagcaaatccagagttggtctcattccagaatctgagatttcaaaggtctgaatctgacccagaggactatccttttctaatcatggaaaggaatcttgactctgatgggaggagctcctgagcccagccctggaggcctcagagttcaggggcccacttatttcctgtttcagcaaggctgctgtgcaaaaag

SEQ ID NO: 2601 - DNA, 468 bp, Homo sapiens
  source 1..468: mol_type = other DNA
tccagtgtagtccaagtataaataaattggggccatttccttagatattgggggaaaagttaaaaaggtgttaactcttacgtgaaataacactttttcttcacttctcatttcttatttgaaatcagcaaactggattcagtagacatgaacttaagcccctagagagctgttgtgaggctattctgcaaaatatgttgtcttgaggtatgtttcgtctggacaaaacgtatttccacagacacaaatcaaaggtgtttattaactgctgtgtgccctgtttctggattcccagtcaagtgggacaccagacgcagcagcgggaaaccagtttcaccaggttccgcctcagatggggccgcgttcagtctggccggaaagggcgggccgcacggtggcccaaacttccggcgcgcagtaaggctgcctagctagtgattctaacgcgaggcgcgcgagcggctggat

SEQ ID NO: 2602 - DNA, 306 bp, Homo sapiens
  source 1..306: mol_type = other DNA
gtgagagcaggtcttgccttgctcttaaagtgccctcgaaggtgacctatcctccttctcaggtggggcttgagaagttccagtgtggagtttctagtgtttagtaactaacaccgtgctggcacacagtagctgatgaacaaatatttgttgaatgagtgttctttttccacatctcattctcatcttaagtaaaaacaaaatacaaacaattctccagtgactgtttttttatcagattggcaaccaaaagggaggaggctgtcctagccatgcaaagcttgtctcatgactgcttttagtact

SEQ ID NO: 2603 - DNA, 279 bp, Homo sapiens
  source 1..279: mol_type = other DNA
tgacccatgcctatattttcgttctcattgtaacttacccagggtcaccagacaggaccaagtgtcctggttctcttcttcatgtgcaactccacttacacaggcccaatttgtgcttaactgtctgcatactgcagggtaatggagggaggcataaggctaggcctgacggacgccgctgggccgggcagcccagaaacgcggagtgcaactcgccaatcccgaacgccggggggcgtggccacacctgggaggcgtggccgggcggatgcgaaggct

SEQ ID NO: 2604 - DNA, 174 bp, Homo sapiens
  source 1..174: mol_type = other DNA
tctgagtccaaaacctgtgtctgatgctcagctgggactctgcaaaacagtccgctttgttctgtggaacttcatcccaacagcagcagttctgagtagcagctaaaatgcagtttgcaggtgccccttttccgagatgcgggtcccagcctctgtaggaacttactccagaaa

SEQ ID NO: 2605 - DNA, 310 bp, Homo sapiens
  source 1..310: mol_type = other DNA
gactcttccaatactttcagaaaatgcgagaataggctcagacttgtgggccccatgattgatataacacacacaggcggcagtaggctggagtgcagtggagtgatctcggctcattgcagtagctgggattacaggcggtgagccaccgcgcccggccgctagcttggttgatatttttattgcagtatactgtaaagtcactgcattccccgggaagcccagctgcccacgttctagggctctgagaacactagtgaacgaactcccgtgctttcaaaatggcaccttgctttcgccgtaaagcgca

SEQ ID NO: 2606 - DNA, 483 bp, Homo sapiens
  source 1..483: mol_type = other DNA
cttcttgattcctagggagccaggcagccagatcactgttttaaagaagtgttatatttagcacatctggtatagtggcagtaaacaaacattatagtctttgtaacactttttgacccatctcgactatggaggggtccctagacagaagttatgaattaatgattttaaaaaataaactctggagaaaattactatttgcaaaatattctgattccaaggcttaaattacattctcttgagcaaggacaatgctccccacccagaaagggttgccaattcaagtctgtttctcatctccgtttgctgtggcaaaggagaagaaagtcttttgcctggagccaagcccccagggctagggcgggagcccgagagcgcgtggggtctgggctgcgggctggagctgggcccgcgtgtccccgggcaccgggaggggaaggcgccccgtgtgcagcctgaggagcggcggcggcggcctggagg

SEQ ID NO: 2607 - DNA, 584 bp, Homo sapiens
  source 1..584: mol_type = other DNA
agtgccaattgttgttggactgttcacaatggtcacaggtttacaaatttttaaaaacctgcaaaacgtcatgtgcgtttgcaatgtgtagacaaattccaactcagagttctgtgtgtgtgtgtgtgagagagagagagagagagagagagagagaccactgctgtgctcaggattcctctcttaccaaatctgagagtcagtgggtgggaatccttttcaaccaaggagacctgtccatggtcctgttgctccaagtaccggacgggagggcgcccggcgccaggaagcttgggcttgggcccccacacgagctcggcgcgcttcgggcgggtctcgggcgcgggcccgtggctctccgggccgggcacctgtttcgaatcgaggcgcgaggcgcggcggggtggcgtcacgtgccagcggcggccccgggaaggttccatttcttccgcggcccgcactcgcggcgctcggggcccctccctcgccccgcccgcggcgcccctcgcggccgcacagccgggcgactccgggccgggccccgcccctctcgctggcggactcagcgcgtcctccgccagccc

SEQ ID NO: 2608 - DNA, 474 bp, Homo sapiens
  source 1..474: mol_type = other DNA
agtaaacaaacattatagtctttgtaacactttttgacccatctcgactatggaggggtccctagacagaagttatgaattaatgattttaaaaaataaactctggagaaaattactatttgcaaaatattctgattccaaggcttaaattacattctcttgagcaaggacaatgctccccacccagaaagggttgccaattcaagtctgtttctcatctccgtttgctgtggcaaaggagaagaaagtcttttgcctggagccaagcccccagggctagggcgggagcccgagagcgcgtggggtctgggctgcgggctggagctgggcccgcgtgtccccgggcaccgggaggggaaggcgccccgtgtgcagcctgaggagcggcggcggcggcctggagggagggagagcgggcgcgcttgtcatgttccctctctcaccctagaacctctcctcggaaatccacgggga

SEQ ID NO: 2609 - DNA, 465 bp, Homo sapiens
  source 1..465: mol_type = other DNA
atacccaggatgtaaatttgaatttcagatataccattgggattacaagcttcctgtaagtacttaaaaaaaataagtatatcccctaaaaagttacatattgttcacctgaaattatttacttatttttttgagacagagtccggctcagtcacccaggttggagtgcagtggtgcgatctgagctcactgcaacctctgccgcccgggttcaagcgattctcgtgcctcagcctcccaagtggctgggatttggccaggctggtggcgtgggccaccgcgcccagcctgaaattcaattttaattgagtatgctgtattactaacacctgcttactgaacaccatccagtaccaggtttagctcttggagagttttcctggagaattctaaaatcattaaaataatcctctcgaccattacaatgactgctagatgaaatttcagaagcccgaggacgtgatt

SEQ ID NO: 2610 - DNA, 477 bp, Homo sapiens
  source 1..477: mol_type = other DNA
cggttcattgtttttaagaattaaatctgaggtgagattgcatcactgccctccagccaaaaatctttcctagtccagaaattataagcataatcttttgaaaagtatatctcatttaatttatagtacatatgtcatttgaaaatcgctgaatttttagtgaggcaatctgagtttaagttaaaatcaggtcccttattggccgcataattgtgggaaaatcattgaatcatgcattcatgcatttacatatttactaagagccaggctctgttaggtaccattggctgttaaatgcctgtaatatacaatccctattttccttatagtttgttaagaaatgtttgtgatgatgctttgtaaatttaaagttctactgaagtactaattattattttcttaatagacaacaacttataaattcatgtttagaattactttaacagaatttattgtagttataatagtgctatatac

SEQ ID NO: 2611 - DNA, 514 bp, Homo sapiens
  source 1..514: mol_type = other DNA
gcatgcttgtacttagtacagaatagatacacaatacctgttactgtggttattgttacttttttcttccatggatgaataattccttcctttagcattaagaattactgattcttccgaggtgggcggatcacctgaggtcaggagtccacgaccagtcgcggaggttgcagtgagccaagcctgcgccattgcactccagccaaaaaaaaagaattgctgattctccctctgtagcgaggtaacgttctacagagagacatttacatgtagaaaggagctctcaaaatcctaatgcattatgaagagtggacacattctgaaattgcctctaaataagctgttctttcagaagtaaaatcagagtaaagaggtacttctataaagactttttaagatttggcttatttataaatgcctctgcattttaatacttccattttgactcatttaacacatgagttaaatgcacacctgctgtgtaagcagcttccaggccacgtgccagggatgc

SEQ ID NO: 2612 - DNA, 391 bp, Homo sapiens
  source 1..391: mol_type = other DNA
gggacataggcttagtctcccagtttgatactgatcataccaaacatcaggagcctgcatttgtgtctacggtaaaaacaacccaagactattgcaatacgacttcattaattactaggctaaccttactcacaggtcccgggggccccggcccctaagacttgttgggggtgaatccgcccttgaacccagagggtggcgctgccgtcccagccttggtccacggccgcccgctctgcgggagccccccagcttggtctcccgcaggccggcggtggggcacgagcccggtagggggcgccgccggcccaggcgccgctgctccctccgcccacccggaggcggctgccgctagccgaggccggcgcgagtgcactgcgaggcgggcggt

SEQ ID NO: 2613 - DNA, 650 bp, Homo sapiens
  source 1..650: mol_type = other DNA
agacctggcctggtgtgacttctaagaatttgtaatgtttctgaggaaccataatttatttttagctttttaaaaactgtatttgcttttaaatttataaacttatttttttaattataaaagtaatatagaaattaagtaaatataacaaaaatatttacaaaatataaaattgcctgtaatttcataacttgctaatgcagcaataacctctattaatattttggtgtatttcccaaccattttcagcacatatatgtttgcatacttatgcacaatataatttggatgaaatgttatgcaatatgaaataaatgttatgcaacccttaaaatttttcatattatgcaatatctcatttccatgagatgaaatattatgcaacccttaaaattttttaaagtaagtaatgatatggaaagatgcccacaggtatttgtttacttatgtacaatataattctaattatatttgttttgtggcttgcttatttgctttttaatggaagtagaaaatgctaatgggaatttccattccatacatcttggaataaaattctaattttactttttttaagggttgcataaaattgcatctcatggaaatacgttgtccggctgctccgtcttgggcgagtggcccgtaagctg

SEQ ID NO: 2614 - DNA, 614 bp, Homo sapiens
  source 1..614: mol_type = other DNA
caggctggaaacgctgccagaaagcggggactccgccctctcccccagcgctccaagcggagaccgctgaaaacgcgtctactgggccatctctcgggaactgggccctacttcagagcgccggttgggcctcagagccccaaggccgccctgctatactgcgcgactgcaccgcgggccagagcgcgcccctagctcgaggctgccagcggacaccgggaaactgagcggcctgcgggtccagacatctgaggaacgccgcgctcaggcccgtgcctgcagcccggtccgcagagggggggggccgctccccccggtcgcccagtcgggtcgcgccggtccttcagggtgaccgcgttccttccgcccagagagggcaaagagtcccgctccatctcccgcccgcgctccggagcgccccctaggaagaaagcccgagcggcggccacgcctcggtggcgatggggtggcccggctgcctgcgagcggggtttccccgccccccctccccccaggcggccggaacctccctgcggagcggagtgataccggcggcggcgtagagcgcggtgcggccgaggggcgcccgggactgcgcggggcgggcggcggcg

SEQ ID NO: 2615 - DNA, 536 bp, Homo sapiens
  source 1..536: mol_type = other DNA
gggggccgctccccccggtcgcccagtcgggtcgcgccggtcctcagggtgaccgcgttccttccgcccagagagggcaaagagtcccgctccatctcccgcccgcgctccggagcgccccctaggaagaaagcccgagcggcggccacgcctcggtggcgatggggtggcccggctgcctgcgagcggggtttccccgccccccctccccccaggcggccggaacctccctgcggagcggagtgataccggcggcggcgtagagcgcggtgcggccgaggggcgcccgggactgcgcggggcgggcggcggcgtgcgctactgccggagcggggcggttatggcggctccatattaacagcctcctccttgcccggcatgacggcagcgccaagagcccggcaggcggcggcggcagcggcgcctcgtccaccaacgggcaggacgacgagcacggtggtagcctcccctccctcccctcagagcctgggcgctgcggtagcctcgaactcccggtgcagtgcagcagcaccccc

SEQ ID NO: 2616 - DNA, 656 bp, Homo sapiens
  source 1..656: mol_type = other DNA
tgtcatgtacatgtattttcctttgagaacacagcaaatgttcttaaaggaattccccttagaaatgtagtcagaaatgcttatttccaaattctcaatttaaaataaagcagaatttaaaagtgggattgttacatcatcatattaattggtattggtaagaatagcatttctgctgggtattaacatatccatatattattctctcatctgtgatcatatacatgttattaatttaaactgttttctggtatttttaaaagcagttatcaaattataaaaattttcagcaacttttctattttgaccttctagaatgatgaacttcttttagaattcccttaagaggaaattattatctatttaaaattctatagtatagttaacagtctcaacttcttaaatcaattattaccctttattataatgaaacttccttagtgtaaagttaggttctcaattaacaataaatatctcttcttaagtttaaggtagtgatgatgagcacaagtgctcttcaggtagtcattactatcatctttcatccattcagtctttaaaactactagatgagttaaaatccaactgactctgaaaaaaaatcttctcttttttcaaaatccatcatgttgaagttagtattaagaccaaaatta

SEQ ID NO: 2617 - DNA, 343 bp, Homo sapiens
  source 1..343: mol_type = other DNA
ttctcacttggatctagatagaattggaattttggtccatttcatttatatagaatgtattgcccttggagagaatatattgtaagaccagcctgacctcccagctactcgggaggctgagaattgcttgaacctggccagggttgcagtgagccgagatcgcgtcaccgcactccagcctggcgtgagagcgagactcctcatctgtaaaatggggatgaccaggcctacttcaccagcttgttttgaggacgagatgtttgccggggagctctacaactctcagagattgctggtgttaggccattctaagcaaggccttgagggctgagccttgttgtgc

SEQ ID NO: 2618 - DNA, 292 bp, Homo sapiens
  source 1..292: mol_type = other DNA
caggcaggtgggcaacctgagtaaaaccagatctattataatgcagcttcatggtgcggcccacacatatgctgcagaacagcaacaggatgcttctgctgaaagtcagaactgtctgctcttagatgtatcttcacaggtccccccttccctgtaggagggagctgatagaaagaggggatctccatccaggagccacccacggcagctggatggtcttgcccagtttgtgccacactgagcctgggtcgcctcaggcttttgtgtatcagccactaggtgggtctccagg

SEQ ID NO: 2619 - DNA, 393 bp, Homo sapiens
  source 1..393: mol_type = other DNA
atatagaatgtattgcccttggagagaatatattgtaagaccagcctgacctcccagctactcgggaggctgagaattgcttgaacctggccagggttgcagtgagccgagatcgcgtcaccgcactccagcctggcgtgagagcgagactcctcatctgtaaaatggggatgaccaggcctacttcaccagcttgttttgaggacgagatgtttgccggggagctctacaactctcagagattgctggtgttaggccattctaagcaaggccttgagggctgagccttgttgtgcagcgggtaggttagctttccaaccgcctggatgacgcgcccgcccgcgcccctccgcccgcgccccggccccgccccaggcctcgcctccgcttcgc

SEQ ID NO: 2620 - DNA, 777 bp, Homo sapiens
  source 1..777: mol_type = other DNA
gaccgagtactcgagggccccgcgctcaggggctcccctccggcccctcccccgccgccgagctgtcacacagccgccgcgcggcccgcccccacgtggactgggctcggaggatcaaagtctgtttgcagactttgcagcccggcccccgcaggtgtgctgggagttgcgatggtccgcaggccaggactccgccacacccgaggggacccggccagcccctccccctcccgctgcacgcggcccgcgccccgcccgccgctgcacccggccacggccccccggcccacgcccggctccgggaggaaaaggccccgcccctatctgttggagccgcgaccccgccctccgaggctcgcgtggctgggcgggacgtgccgggcctggtgggcggggcggcaaggccttgtcacgctcgggtccgtgtgaaaacggcaaagcaaagtttttttaaggcgcccgagaccgggccgagtgcagctgccgtggccgccgcctctctactcctcagtccagccgccgcagaggagaccagcaagcagagccctcagatgctcggagctttctcggcgcgaagccggctcttggtaccccggctccgggagcccagctccccgccaccgccgccgcctgggtgtgggggctgctgaggctgagccgggcctcggcgccggctctgaggacggacgcctgaggagctgcgcggcgcggcgccgccggctggcggagaacgcccacaggcgcggggctcggcggcttgacccgggcttgtccccg

SEQ ID NO: 2621 - DNA, 683 bp, Homo sapiens
  source 1..683: mol_type = other DNA
accttcgggaggactaactcctcagctcggcgtccagcagagtctgttccgacaggaccgagtactcgagggccccgcgctcaggggctcccctccggcccctcccccgccgccgagctgtcacacagccgccgcgcggcccgcccccacgtggactgggctcggaggatcaaagtctgtttgcagactttgcagcccggcccccgcaggtgtgctgggagttgcgatggtccgcaggccaggactccgccacacccgaggggacccggccagcccctccccctcccgctgcacgcggcccgcgccccgcccgccgctgcacccggccacggccccccggcccacgcccggctccgggaggaaaaggccccgcccctatctgttggagccgcgaccccgccctccgaggctcgcgtggctgggcgggacgtgccgggcctggtgggcggggcggcaaggccttgtcacgctcgggtccgtgtgaaaacggcaaagcaaagtttttttaaggcgcccgagaccgggccgagtgcagctgccgtggccgccgcctctctactcctcagtccagccgccgcagaggagaccagcaagcagagccctcagatgctcggagctttctcggcgcgaagccggctcttggtaccccggctccgggagcccagctccccgccaccgccgcc

SEQ ID NO: 2622 - DNA, 300 bp, Homo sapiens
  source 1..300: mol_type = other DNA
gtgtatttggcacacataaacactgggtgtcactctgtcgcccaggctggagtgcagtggcgcacggctcactgtaacctctgcctcccaggttcaagcaattcctcatgcctcagcctcccaagaagctgggattacaccaggctagcgaggtttgccctgttgcccaggctggtctgaactcctgggctcagttacgggcgagcgtgaccccacccaggttcagggtactggaacctgagctctatcagagggttagagttgccgagaggcgccagctgccgcttcctctctacagcg

SEQ ID NO: 2623 - DNA, 685 bp, Homo sapiens
  source 1..685: mol_type = other DNA
gaaagtggaattgccattaatgttccagctgctttcctgaaacaagacttttgaccgtaaaaagaatgaatttgaaactctagtttcattaagaatccgtgttggctgaaaggtcaactgaaaccaaggcatctggactcactgaggtcctggccgagcgtccaggtagccccgagggccccgactcgctggcgcaggggtagggggagcgggccaggcggggcaagcgggccaggcagcggcggcggcgctttcattagagggcgctgtgggagcggctccgccgcagtcccgactcccgccgccccgccgcccctccccgccagtccgggcgaacgcggccgggcccttggggaccgagtctcggcgccgccggggaacgggcgcgggccgcgccacagccggagcggggcagggccccgccaccgccttcttccgccggccccgccgccggcccaaagccccggctggggcccggccagcccgaggtaacctccggctccgcggtcgcaggccccagagcggcagcggagccgggccaggggaggcgctggtcgtcgtcgcgtggcccggggaggcggcagcggcctgagggacgagggcgcggtaggccccggggaggaggcgggggcgcggggcatccgcccgcctccccgggacccgcccgggtgacaggtccggcctc

SEQ ID NO: 2624 - DNA, 449 bp, Homo sapiens
  source 1..449: mol_type = other DNA
tctataatttaaatttttatgaccgtgtagtaaacggggaaaataagattttgttcctgttagaagcagatatcctctggtatatacctatagcacatagtacaacaaacgaatgaattaatcaatgattaggagttttgagcatctcaaatgcatgcattttcccgttaacgcgcaaaggggccttggaaggcagttatttcgacgtccctgtctttagtagtccctgctaacactaatttacccttgccatgggagaactcagaagctgagttcagaatgggggaaatgaattccgccagctccgagcagcggttgggaccgttgccaagctgggattggcttccgagcgacgtccgggcgcctccccagccgcgggaacctggagtccaagagctccttgagcgcctgcgcagggggtagcagaggcgcggacaaaccgcggggtg

SEQ ID NO: 2625 - DNA, 306 bp, Homo sapiens
  source 1..306: mol_type = other DNA
gagaatgagcagggcccttgattcagcacatttcatgaagacctggtctcaactgaacagacaaaaatttcacaatttctttgcagtgtctcttagaaactagccactgtcactgcttagaagacatgcgcatgcgcttcgccatagccggcaccgaatagttactcgactagcctagtcagaaagcttgcaaacaccccgcggtttgtccgcgcctctgctaccccctgcgcaggcgctcaaggagctcttggactccaggttcccgcggctggggaggcgcccggacgtcgctcggaagccaat

SEQ ID NO: 2626 - DNA, 398 bp, Homo sapiens
  source 1..398: mol_type = other DNA
tacaaatgtgcttaagggacataaggttttataaacaggatttttaaaaactaaaatttaggcagatcatttaaggtcaatggacttattttcgaaagtggaattgccattaatgttccagctgctttcctgaaacaagacttttgaccgtaaaaagaatgaatttgaaactctagtttcattaagaatccgtgttggctgaaaggtcaactgaaaccaaggcatctggactcactgaggtcctggccgagcgtccaggtagccccgagggccccgactcgctggcgcaggggtagggggagcgggccaggcggggcaagcgggccaggcagcggcggcggcgctttcattagagggcgctgtgggagcggctccgccgcagtcccgactcccgccgc

SEQ ID NO: 2627 - DNA, 365 bp, Homo sapiens
  source 1..365: mol_type = other DNA
gagaactctcacgcgagagtagctctctggagttgcggagtccgaacctcccaagagccgcaactaccaattttgcggtttggggccagtaaggcgccaagacccgcccaggtgtccagacctcgcgggcgccccagccctccggagaggtgagggagcagtcgcgcgtgagcgcaaaaatgcccgctggtggaggagcgcttcccctccctcccaatgtgggccgtcgctgccgcttagccgtgtgattggctaagagggctggcatgctttcccgccccctcccccgccgccgcaccaagaggcgggcgggaccccgcggacccttgcgaggcccctccccgggccgcgcgccctggcgcgcg

SEQ ID NO: 2628 - DNA, 518 bp, Homo sapiens
  source 1..518: mol_type = other DNA
cgagagtagctctctggagttgcggagtccgaacctcccaagagccgcaactaccaattttgcggtttggggccagtaaggcgccaagacccgcccaggtgtccagacctcgcgggcgccccagccctccggagaggtgagggagcagtcgcgcgtgagcgcaaaaatgcccgctggtggaggagcgcttcccctccctcccaatgtgggccgtcgctgccgcttagccgtgtgattggctaagagggctggcatgctttcccgccccctcccccgccgccgcaccaagaggcgggcgggaccccgcggacccttgcgaggcccctccccgggccgcgcgccctggcgcgcgcacacgcgcacacactcccggtcgctcgcctggggttctccgtgggcggccgacgggcgcgtgggggagggggttcgggccgcccagcgcggcaaggagcgagtggcacgcagagggccggggctacggggcagcgccccgggcgatgaggggccggcgttgaccg

SEQ ID NO: 2629 - DNA, 389 bp, Homo sapiens
  source 1..389: mol_type = other DNA
cttatcactgaggagagaagcacacaacagctgtatgtggtcttcaggtccaccctggatttgacgccacatctagcgcttgaggcttcttcctccaggacaagaacctaggggtactcctgcccctggctgaaacaaagtacctcagtttcctcatttgtaaattagggagaaaaatgtccttcttacagggttccttgcaagagcgctttgtaactaacataaccgttttaaaccgccagagtccctccccctccaacaaagagaggaagtgagagctggcccagggtcacatgcaggcctccgccacaggggtgagagctggtgtgaggggcgcccccgcccagaactacagcgactcctgggcggcagcggccaggcgcatgcgc

SEQ ID NO: 2630 - DNA, 352 bp, Homo sapiens
  source 1..352: mol_type = other DNA
ccagcctggccaagtgggccgagatggcgccactgcactccagcgtaggcgcacaatgtaagcttcacccactcaaaaatatttgttgcataaagtaatgagcaaagtttggcacaaatgttagctattattatttcattaagacagttggggtcttattttagaaatatacgtttggatttaggagttcaggattccaatcctaatttccagctgcgtggcccgagtagcccggccagccccaccccggggcgcaggaggcgcgcgaagggcgggagttctcgggtccccgccctcggggaggctctgggcgcggggcgggactccgggacgctgggcgggcgtgctaggg

SEQ ID NO: 2631 - DNA, 625 bp, Homo sapiens
  source 1..625: mol_type = other DNA
agttactttctagatgggaagaaatataataaattattgaccaagaaactgtttttaaaaagtcacataagctaattgatcggtccttggtcaactttttttttttttttttaaggaaaaaacaaaacttcagtttaacgtttctgcaatgcaagcttgtgatttctctctaagtggatatcaggattgttatgaagacttaaggcccagtattttttaatagaatactcatctaggatgtaacagtgaagctgagtaaactataactgttaaacttaagttccagcttttctcaagttagttataggatgtacttaagcagtaagtgtatttaggtaaaacgaattatgttaaatgttgccctttgccatgttacattgaacactgtttggttgcatgttgaaagacatgcttttatttttttgtaaaacaatataggaactgtgtctacaattaaaagtgaaacattttggcatgtttgttaattctagtttcatttaataatctgtaaggcacgtaagtttaagcttttttttttttaagttaatgggaaaaatttgagacacaataccaatacttaggattttggtcttggtgtttgtatgaaattctgaggccctgattt

SEQ ID NO: 2632 - DNA, 452 bp, Homo sapiens
  source 1..452: mol_type = other DNA
tcactgacatgttcttgtcaatttcaaacgctttgtgattgtaaaaaaaaaaaaattccggggctgcgggctcgggcgcacggtgccagccgagggctgccctccgcaccggcgggcttctcgcggtccccgccgcagaggtcacacccggcgggtaacggcgccctactccgcccctgctagagaagtaggaggccagtgggggatcctgaagctccagaaaatgaccacgcatcccgcttcccagcctcacctagtctgggctggggccgggacccgcctccccaccttccccgccccccccgctcttcaacctagcggagggacagatgccagcgcggtggagtcatgccgctggcttgggcaccattggtcatgcctggaacacgcagcagcgacgggcggctccctgggggaacgcgcctgggctggctcctccccttaatagcatt

SEQ ID NO: 2633 - DNA, 520 bp, Homo sapiens
  source 1..520: mol_type = other DNA
ggggtgaagaacccgcttgggcccaacttcgggctaaattccagcttgacgtcaagcctctttgaaaaagaggcttttttttttaagtgaaagaaactttattttgagtaatatacaaaaaaaaaaaaaatgagattactcatgatttttaaaatggcctcactgatttttaaaaaatgttcttcctcttttttgtggccacatttgcacataggcacaccagcctcttgtgaattcagagttataaatttcaaataggcattttgttcatctatgtgtattttaagaacctgctttacttaagatgaggatcagaaacccaagggcttatgggacggtgggggagggggacttgatcccatgccccagagcccctgaaacagtttgggtttcaatgtgtctttcagcaaaatgatgcttcaacacccaggccaggtctctgcctcgggtcaaggaagagctgaggtttgccacctctgccaccggatgcagtcactgtcagcgacagacccctcggggt

SEQ ID NO: 2634 - DNA, 558 bp, Homo sapiens
  source 1..558: mol_type = other DNA
cttgacgtcccacgtggcatcggggccgccccgcctcgttccctcccacagcccggcggacccgagacgggaagggcaggcactccctgcagagtccctggggcgcccgtggctcggggtgcgcggtgggactcggtgaagccggcgtcttcaccccagagccgcggcttcggggccgctggaggagcgagagtggcgcccggatgactgatcgccgcggagaaagtcccccgggactgtgacccccgcgccggggggcggacgcagggcgtggctgagctgagttccccggcagccgccgaaggaccccaaaggctgcatggcgcccccctggtccccacccccccgggcgtcgcctcgcgtgggtgggcttcgcgggtttcagagccaccacgtgacttccacgaagcgcggggcgccggcggaaagccgcggccggctgccgggactggcgcgcggggacactgggccgagccggcgcgaggccgtgggtgcggcacgaggatgccggcggcgggacagcgcccgtaggcagccccacgggcagggcgcgcgggc

SEQ ID NO: 2635 - DNA, 495 bp, Homo sapiens
  source 1..495: mol_type = other DNA
accacacttggtaggcacttcagaccacagcccaggtggacagggacttgccccccggtcttgacgtcccacgtggcatcggggccgccccgcctcgttccctcccacagcccggcggacccgagacgggaagggcaggcactccctgcagagtccctggggcgcccgtggctcggggtgcgcggtgggactcggtgaagccggcgtcttcaccccagagccgcggcttcggggccgctggaggagcgagagtggcgcccggatgactgatcgccgcggagaaagtcccccgggactgtgacccccgcgccggggggcggacgcagggcgtggctgagctgagttccccggcagccgccgaaggaccccaaaggctgcatggcgcccccctggtccccacccccccgggcgtcgcctcgcgtgggtgggcttcgcgggtttcagagccaccacgtgacttccacgaagcgcggggcgccggcggaaagccgcggc

SEQ ID NO: 2636 - DNA, 296 bp, Homo sapiens
  source 1..296: mol_type = other DNA
tgcaatacatatactgagcacctgttgagtaacccagcgtagcgctggctctgctgcgcagccttgctgctgtggagtgtggcgctgcaactctaaagggctgttcactcaagctctctcaaagcttttgcaagaggtgcactcatttaagacttaaaaaagcgaccacacttggtaggcacttctgcagaccacagcccaggtggacagggacttgccccccggtcttgacgtcccacgtggcatcggggccgccccgcctcgttccctcccacagcccggcggacccgagacgg

SEQ ID NO: 2637 - DNA, 395 bp, Homo sapiens
  source 1..395: mol_type = other DNA
gcctctcatagtgctaggattacaagtgtgagcaaccacactgggtctcactgttacccaggctggagtgcagtggcttgatgtcagctcactgcaatcccgagtagctggctggtcacctggacacaggagatgcgcagcgcccgcctcgtgctgggattacgggcgtgagcccgcgcccgacctctccccgatttgaacgcgtttcgaggaccgcttacgaggggaaaggacgggggcctccctgctccctctggtcccgacctacgccagccgctcgcattgcgccccggcggctgccgctttagaccggccagcagagccggagccggaacgtttcagctgcagcgtcctgagtttccagccggatgcatgctggttacaccagtgtgaac

SEQ ID NO: 2638 - DNA, 469 bp, Homo sapiens
  source 1..469: mol_type = other DNA
ctggtcacctggacacaggagatgcgcagcgcccgcctcgtgctgggattacgggcgtgagcccgcgcccgacctctccccgatttgaacgcgtttcgaggaccgcttacgaggggaaaggacgggggcctccctgctccctctggtcccgacctacgccagccgctcgcattgcgccccggcggctgccgctttagaccggccagcagagccggagccggaacgtttcagctgcagcgtcctgagtttccagccggatgcatgctggttacaccagtgtgaacacgaaaccatgggacaaggagctcgcggctggcacagagagccaggccttggtctccgccactccccgagaagactttcgggtgcgctgcacctcgaagcgggctgtgaccctgtgcggccgcttcgtgcaacggggacgctctgccggaggagattcgggagcccgctctgcgagatgcgcagt

SEQ ID NO: 2639 - DNA, 595 bp, Homo sapiens
  source 1..595: mol_type = other DNA
agaattaccctttccaggagaatgagccactagccactttgtagttactgagcgcttacgaacaaaagaatgtaaaatatctcattcatttgatattattacatgttaaaataccttggatttattgggttaaacaaaatgtcttatttccattaacttcacctatttcttacttttagtttaaaactacataaagattagcttgccttgtattttcacagcgctggtctaagtaattaataagacccagctgtctacagtagcctggggcacaaggcttctgaatcctaagatcctgggtgttgtggctaactggtcccgtacccactgcgcatctcgcagagcgggctcccgaatctcctccggcagagcgtccccgttgcacgaagcggccgcacagggtcacagcccgcttcgaggtgcagcgcacccgaaagtcttctcggggagtggcggagaccaaggcctggctctctgtgccagccgcgagctccttgtcccatggtttcgtgttcacactggtgtaaccagcatgcatccggctggaaactcaggacgctgcagctgaaacgttccggctccggctctgctggcc

SEQ ID NO: 2640 - DNA, 377 bp, Homo sapiens
  source 1..377: mol_type = other DNA
ctattaaaaatacctgtgatcccagctaccaatgacctgagatcatgctattgcatttcagcctgagggacacagccagaaatgaaaataaattttaaaaaagccctttaatgaatctgcattgtgcttcaaatgcaatccctttttggcaactgaaatgtgccaaattctagcttgctcctgggaggatttccccctgaaatcacgtaatgggtaaaacagtttgtaactgattttacgtgtgtattattattttaggcctctcatagtgctaggattacaagtgtgagcaaccacactgggtctcactgttacccaggctggagtgcagtggcttgatgtcagctcactgcaatcccgagtagctggctggtcac

SEQ ID NO: 2641 - DNA, 435 bp, Homo sapiens
  source 1..435: mol_type = other DNA
taaatatttatggccaccaagtctgcggaattgtccagatgttcgcccaggctaggctggagggcagtgtggtgcgatctcagctcactgcaacctccgagtgctgggactctgggattacagacgtggccaccgagcccggcccagccctctggattaatggtcattagtgcaccaacagcctctaagtagtgacactaccgaaggacgggagttcctcctcctgcagtctgaggacttgcactctaacggagtagattccacttggggtctggatcgaggcggggccgcctcccgcccaccctcaggtgcaggagaccccggggcaggaaaatgtcagccagcgctcgccggccgctttcctcgcccggtagctccccgactggctctcgcgccggacaaaggcgccgacgcgcgactggtgactgccgcgcg

SEQ ID NO: 2642 - DNA, 626 bp, Homo sapiens
  source 1..626: mol_type = other DNA
ggcccaacatggtgacccagaagagatgctgctgcacactgccgcacggccggagcccagcagggcggtgagccgcaggcctctggtgtccagcagccaggtggccgggaagatgaggggcacgtaggccagcatgtacaccatggacagccagtcgatgtggtactggatccactgcgccgcggggagagcgccgtaaggggcagcgggctgctctcggcccccggggtctcagctcccgcgcccgcaggcagcagccgggcctgggtctcctcttctggggccagtggagtctgaggcccgcccagaactcccgaggcggcagcgaggctgtcccggggggccccattcaccgggaaggtgcccgctttgggccttcccaacgggcgcgcccctcggcaacgggaggtatcctttcgcgagcgggtgtccgggcgccaccgccgccccctcacagcccgaggtcctcctggggcccggcccaccgctccttccccggtggcgcgcgccgcgaaccgcaatccgcgctaccgcgaaggtctcctcccccgcgccgcgcggcagtcaccagtcgcgcgtcggcgcctttgtccggcgcgagagccagtcggggagctaccgggcga

SEQ ID NO: 2643 - DNA, 379 bp, Homo sapiens
  source 1..379: mol_type = other DNA
cgggaggtctgctctcctttcagaaagagaagctaaggcccagagttgtccagggtcacacagctaaacctggaccaggagccagccttcaggtcagcagtctggtgctcacctgctctcctctttcttaaagaaaaagaaagagaaggactcaacagctgtggcagaacagtcagggcctgcctgacccccacttgttaattttgaggaatttttaaatgcgggatttaaaaaagatttaatttcacatgacccctcatcatcccaggtagaggatgaacaactcatcatcccggcccgcggggctctcaggacacgcgatcggtggccggtcgcggagcccggggttgtagagtcccgagcccgggacccgcccctc

SEQ ID NO: 2644 - DNA, 587 bp, Homo sapiens
  source 1..587: mol_type = other DNA
tcgcggagcccggggttgtagagtcccgagcccgggacccgcccctctatatgtcacagaataacattcagccccagccccagccccaggcccagcagcagcagcagcagcccctgctctcccgccgcccggagaggctctgcagccggtagcttggagctgccgcgcgcccttcctgcgcgccgcccgcctgcagccagtccctcccggtgataggcgctggaactcggggaaaagggggcggatggagctctttccactagatccccgccggggtccgggagggcttcctggaagaaagcgggccgccttgcaagccaaggctgctgcagcgccctcgcgccagctctgggcgctctgaggacccaggaatgtgtggagccttgcgggaacctcctgttccttcattccccaaccccccgggtttaggtgtagcggggagtgtcgtggagacactccgggacccctcacggtgtcagctgtgtctccgctgatttcaggcaccgccggtaagcagggagcctccgcggagctcccgccgccgctcccccttggtgagtcctgccgcagcgagaggcatggagaag

SEQ ID NO: 2645 - DNA, 302 bp, Homo sapiens
  source 1..302: mol_type = other DNA
tttaaagtgagagtgtggtacccccagaggatcctcagctgggaatgcaattaaaaattttcactgattagccggggccattgcacagaaagaaaaagaaaaaaaagaaagtttatttctgtttctttaagattgcacgcgcgtcccacgctctgcgcatgctccttgagcagaattccgggttaaggcattcagggactctgtggagtgtaggccggccggcgagactgcacctcccagcatgccttgcagccaggactggatactttaggcgggcgggcgtccgggactaacccggggcg

SEQ ID NO: 2646 - DNA, 333 bp, Homo sapiens
  source 1..333: mol_type = other DNA
ctacagtcctataatacatttaataaaggtggacacacaagacatacaagtacttttttttttttttttttttttgtgcctgcctcaggctcccgagtagctgggaccacaggcgcccgccgccttggcctcccagagtgctgggattacatttaaagtgagagtgtggtacccccagaggatcctcagctgggaatgcaattaaaaattttcactgattagccggggccattgcacagaaagaaaaagaaaaaaaagaaagtttatttctgtttctttaagattgcacgcgcgtcccacgctctgcgcatgctccttgagcagaattccggg

SEQ ID NO: 2647 - DNA, 271 bp, Homo sapiens
  source 1..271: mol_type = other DNA
tttggaatgtcattgaaacagtgtcttagatcacatgtggagtctacgtttcagaagacaaaggaattggtactaagggccatagctgcttcttcctcttcttttttccctgtaaagaaataatggcaaagacttggcatgaatatctcaaggcagggaggaccacgctctcccggtgtggcctgaggtctccgcagtgacgggggtggcagcgcgacccctctaaggaggagtctcccctccccctagaagcgggagatgaagcttctct

SEQ ID NO: 2648 - DNA, 331 bp, Homo sapiens
  source 1..331: mol_type = other DNA
cttgcctaataaactttaaagtttgttgcccaggcgtcaaaactgtgtaattgcaacatatatatttttaaaggctaactgggactcagccaatgttgatcttcgtctaataacagatgcagcggaccaaatcggaggagcgctcactcggagctagtgtgagccgggcgccgctcgcgccgtctcccgctttgcatagtgcccgcagatggctcgctccggcccaggcgcggcgatccagtcgtcccgaagctgtggtggaggccggggagggggagcgcagggcccctctcccctcctctcttcctgaatccgaaggcgcctcgcgatc

SEQ ID NO: 2649 - DNA, 543 bp, Homo sapiens
  source 1..543: mol_type = other DNA
ataataccatctcctagatagtataatattttggcatattattctagactctgtagcttattaatatgtatatgcctttttacccatctatgtatagaaacctcaaaaatggaatcttgctatgtatgattttgtaacctggttttatataacagtatatatattttttctttattttttatatgacagtatattatgattgtcttttcatgtcaataaaaagatctacattactaattttaatatgtacatagtattccagtttttgaactgatttattaaccaatcttttactgttactcagttttgagatgatgcatattgtctcattgttttaaataattgtaacatcattttcctttatacattggaataacttttaaattattattattattttttgagacagagtatcactctgtcacctaggctggagttggcttcccaggtagctgggaccataggtgcacaccacctgtagaaatggggttcaccacacagttgtgatccaccgcgcctggcagataacttttaaagaggcat

SEQ ID NO: 2650 - DNA, 305 bp, Homo sapiens
  source 1..305: mol_type = other DNA
gagctagtgtgagccgggcgccgctcgcgccgtctcccgctttgcatagtgcccgcagatggctcgctccggcccaggcgcggcgatccagtcgtcccgaagctgtggtggaggccggggagggggagcgcagggcccctctcccctcctctcttcctgaatccgaaggcgcctcgcgatccggagccctcagctgagggagcgctctgaaaagagctctcgcctgtgtgcactcgcgtgttttcctctctctgccgggggaaaaaaaagagagagagagagagagagagaggctcggtcccact

SEQ ID NO: 2651 - DNA, 598 bp, Homo sapiens
  source 1..598: mol_type = other DNA
ggattatattttcctttctcatatgaaaagtaatagcgggttgtgggctttaaatcctttgactcctaatctagcgcagtgtcctggacactggccacacaacgttcgcagcatgcctcagagactcggtgagctgggccggccaatgcatttcctcttccgtccatgagccacaaggtttaaaaacctctaaccttcgcccccttctaccgggggctggtcagggaggggtggccctcggatacctggtccccgcaggtgacccccctccctcccaccgaggaggagggcgcgtcccgctcgctccgtggagacgccgcggaggcgcacacgcctcacgcctcctcgcagaagccacaggggctgcggctctttgtcgcggccacaccggaaacggcccggagcgcgcgcggggcggccgccgagggtcgcggcgctaggcggggccgccgggcccgtccccctccccgcgggggcgcgcgaggcccgggcggggccgccctcccttccggggagcggggagccgccgccgcgtccgccgggcggctcccaccccgccccccgcagctctaggtgacgcgtctccaataacagctcg

SEQ ID NO: 2652 - DNA, 467 bp, Homo sapiens
  source 1..467: mol_type = other DNA
ccagttgcccttttaaaatgaaagacttcaagaggaaatagattaaattaattttacaacttctaggcgaggcttgtgcgcccgctcccgccctggccaccagtgcccacccggtcggcctggcacagccatgatcaaggcaagccgcggctctccagggagactttccatttggtatctaagagagatgaaaatgtttgtaatttccgatttatagacattacacaacgttatattttgtcttctgtgtagattcttcattcaagtatttgtggaaacattagacaaatgttttgaaaatgtctgtgacaaggttcacagtattcttgcagaaatagtatgggagattgttacacaaattgatgcacaaaatatgaatcttcctgagatcccaagaaatattaacattggtgacatcagtataaaagtgccaaacctgtcctcttttaaataaaaatgtaaaaagg

SEQ ID NO: 2653 - DNA, 454 bp, Homo sapiens
  source 1..454: mol_type = other DNA
ggaagttccctcccagtgcctacccaggcagggtggggcgattctgtggcatggaacaaaccggggtccagtacccagagattctagggagagatctctgagtggagggttccgcaagttcctgccgccgccccccaacggcgggagcagcccagggttggggtggctgtctccgggcctgcagaaggagctcctgcagcccggcattcctcggattccagcgctgtgacgtccccaaggacggcgcgcctccagctcgggagctcgggagctggggctccacgtttcagcgcgcgcccgcggcgcccccggcgcgcgccctcccgggccgcattcctccccgcccccggccgcgcgcccagcgctccctccgcctcccggcccccagggccgcggagcccggctctggggtgggggagccgtggccgccggcgcctgctccgtcccctcccac

SEQ ID NO: 2654 - DNA, 557 bp, Homo sapiens
  source 1..557: mol_type = other DNA
gcaagttcctgccgccgccccccaacggcgggagcagcccagggttggggtggctgtctccgggcctgcagaaggagctcctgcagcccggcattcctcggattccagcgctgtgacgtccccaaggacggcgcgcctccagctcgggagctcgggagctggggctccacgtttcagcgcgcgcccgcggcgcccccggcgcgcgccctcccgggccgcattcctccccgcccccggccgcgcgcccagcgctccctccgcctcccggcccccagggccgcggagcccggctctggggtgggggagccgtggccgccggcgcctgctccgtcccctcccaccggagtgacagcgggcgcagactcgggggcaggttggcttctccgggctcagccgcctgctctcctggctcaggtcctcggggagccctagacagaccaagtggccactggagccatcctccccggcctcctcgggcgggacagccctctgctcggactctcgcgccgggatcgcggcggaaaccgtcactggaatcaattccgtggggaatcggc

SEQ ID NO: 2655 - DNA, 299 bp, Homo sapiens
  source 1..299: mol_type = other DNA
ttagagatctattactttaacaattaattgttttgcttctgcctttagaagcttatttatagtttaatagggaaataaaacgagtatatatttgaggattcttctgaattttaaattctgcgtagattcaatttcaaattactgtacttagcttctatgagcctgttaactttttaataaaatgaggataatactttcctcaaagaattgttacagcacctagtatctatgtcctaaatttacgtttaattaagtagatagacgcggcagtctgagtgcgcaggcgcggattggtccgg

SEQ ID NO: 2656 - DNA, 499 bp, Homo sapiens
  source 1..499: mol_type = other DNA
aaatttcctacagattagtgcaaaaaaaaacagctgacagtttgtgcgcgcacatgagtgtgtgcccatgggccattttttgcatgtgcacaaaaataagtgtctgtttctcatatgatctgaaaagtattcattatttcagtcagatggaaggattatgttacttgaacactggtatttaatgtacattatcacatttattaccatatcaaaaccagatgtttaaaattggggctagaaattccatcatacagattgtgttatgttatggctttaatagagcaataatgtgtttccacaagtcttagcctgatattagatgacatgtgggctaaatgtgaaaaattattgctagtctccaaatctcagcaaaaactatttaaaactttcctcttatttgacttttttacatggcttctacaatcataaaacaagcatgctcagaaatctgataacatttctgatttaagaaattattatcgatgcaatttagataaca

SEQ ID NO: 2657 - DNA, 522 bp, Homo sapiens
  source 1..522: mol_type = other DNA
atttcagtcagatggaaggattatgttacttgaacactggtatttaatgtacattatcacatttattaccatatcaaaaccagatgtttaaaattggggctagaaattccatcatacagattgtgttatgttatggctttaatagagcaataatgtgtttccacaagtcttagcctgatattagatgacatgtgggctaaatgtgaaaaattattgctagtctccaaatctcagcaaaaactatttaaaactttcctcttatttgacttttttacatggcttctacaatcataaaacaagcatgctcagaaatctgataacatttctgatttaagaaattattatcgatgcaatttagataacaaagccaagccggtttgcctagcaagcacatgagcttaaaaataaactttgggaatggaaaacattatgtacttcaaagcatactaagcctgatttgaaaacttcacacagtgcgtggatgcttcgtgtgtaaatgcttgagccacaaacttgtggacg

SEQ ID NO: 2658 - DNA, 400 bp, Homo sapiens
  source 1..400: mol_type = other DNA
atgtgaaaaattattgctagtctccaaatctcagcaaaaactatttaaaactttcctcttatttgacttttttacatggcttctacaatcataaaacaagcatgctcagaaatctgataacatttctgatttaagaaattattatcgatgcaatttagataacaaagccaagccggtttgcctagcaagcacatgagcttaaaaataaactttgggaatggaaaacattatgtacttcaaagcatactaagcctgatttgaaaacttcacacagtgcgtggatgcttcgtgtgtaaatgcttgagccacaaacttgtggacgctggcaactttatgctcattcataaggaagaaacttctatagttcctcattttaatcagggaatttcttcctgaacca

SEQ ID NO: 2659 - DNA, 577 bp, Homo sapiens
  source 1..577: mol_type = other DNA
aatctagatagagcatatcctattttttatttttttggtaaaaattatgacaatgacaataaaaacttaacatcagatacattatcagtttgaattattatgatacaactatgacaaaacaattcatgttaagaatttagtaccacaaactaatgacctctgaaacataacgcactatctttaagtattatagtattccgatttaaaaaatattttaatagccactaaggttttgggtttgaatagataccgtttaaagcaaaaacaaataaataaacaagcgcataaaattgtgtgttttctgcgtgtcctttggtttccttcctgcttaacaaacaaaagcaaaaaacaataaacgctgtaaggttttaaaatctccaaatgttccctgcatttgcactgtctacatttaggcatcaaagtgggtacgaatcagcttcctcgttttagaaaatctgaaattcccgcgtgggcaggcggctggccaggagcacattcccctagcctccctacgcgccagccccgcggcgttgggaagctcctcctcctcctcattctaggcggcagtggcgggcga

SEQ ID NO: 2660 - DNA, 458 bp, Homo sapiens
  source 1..458: mol_type = other DNA
tggaagaagccagggtcttcattacctcccctacacttccctgtacaggtctggggggccacgagggcgaggaggacgccctagtgcaggggtccaaggactcgcgtcccagagcttggtcccacacccggtcccacaccccgaacgctggtcggcggagggctgcagagctgcgggcgcccggaccgtgccacacaccccccgcggggcacggagggcattgcggggggcgccggggcgcacggcagctggggctgcacccaccgcccccgcgccgcgccgtgccggggccgggccagcgagcagcccggggctgagcgcgtggcggcggcggcggcggcggcggcggcgggcaggcgcgggacccgggtcgcccgcgctctccgggtgacccgggcccggcagcaggcgcgcgcgggggcggcggcgcccaagcccaacttggcctccgcctcgcc

SEQ ID NO: 2661 - DNA, 540 bp, Homo sapiens
  source 1..540: mol_type = other DNA
tgctttgccctaaaatttgttttaaattaaagtttttctggtaagaatgtaatagaattgataaaattgatatataaatggagagaaataaaagggaatctaataaagaacaatgttggtttttctctggctgctttactaagaaagaaacatttctctcatttctaaacatttctataaaaaagataacttatagagaacaaacaaattttccatttttacaatacaaagggaaagctacaagctgatttagaatatttctcatctaggatgagatgtcccagatgtttggatataattgaaactctatagaattggtggcaaatgtgcacatatacacagcaatcccattgcttctttagtttaattaaagtcactgatttgatgctactcataatgtaaatcaatgggccaagctttgggagcatcaatatataaaagtttagaattccattttgtatcctccaaaaagaaagagcactggaaattattccttgtgtcattttgattaaggaattaaatggattgtttaaaattgga

SEQ ID NO: 2662 - DNA, 574 bp, Homo sapiens
  source 1..574: mol_type = other DNA
aagtattatagtattccgatttaaaaaatattttaatagccactaaggttttgggtttgaatagataccgtttaaagcaaaaacaaataaataaacaagcgcataaaattgtgtgttttctgcgtgtcctttggtttccttcctgcttaacaaacaaaagcaaaaaacaataaacgctgtaaggttttaaaatctccaaatgttccctgcatttgcactgtctacatttaggcatcaaagtgggtacgaatcagcttcctcgttttagaaaatctgaaattcccgcgtgggcaggcggctggccaggagcacattcccctagcctccctacgcgccagccccgcggcgttgggaagctcctcctcctcctcattctaggcggcagtggcgggcgacggtgacccctcctcccaggcaggctgcggcggcgtcggtggcagcggagcacggagaagaggcccgggcggcccggcggcctggaggccgcgaaaggtggaggccgggccgcccttgtgcagctagcgagccccgcccggccgccgggaaggtgggggaagccccgtgcaccccccgc

SEQ ID NO: 2663 - DNA, 392 bp, Homo sapiens
  source 1..392: mol_type = other DNA
aagaatacttttagtgcactgtttagtaatgctctccctacaaaaaaaaaaaaaaatgctgtctttattttgtcaaaatgcatcgagagagatttaatatctatatgtaaagagagaaaggtttacacatataatttacttaggcattctttactgcacaatttagaagaatgcctttattattattatttttaatgcccagcatacatgcgtttctccttttcaaggcaaaagagatcttaggttagaaatcaaacttagagagttaagttagttatgtttcttttgtagcttcccagaagaaaaaaaaaagaaaaggccccccaatcggctgcgcggctgggccggtggccctacttcatattaataagctccaatcggggctttaagtc

SEQ ID NO: 2664 - DNA, 411 bp, Homo sapiens
  source 1..411: mol_type = other DNA
gcttgcagcaacatgacatttcaaatcatctcttgaaattacatcaaaaagccagcctgttttgttttgataggaatcaatttgataagtggtaacacagctcattgtttcacattaattagactaattgctgatttatgctttatatactggctttcaattatagcatccctgtttccaacacctaaaggttaaaaaaaatccttttttttttttttccaattacaaaacagtgttctaactttcagtttgacagactgtagactgtaccaatttgaccaaattggacagtgtgatatttatgacaacagcacatgtcaatctcaattggcaacgaagggaatttcacttgtgagtgtctgatgcaatggaacagagctcttttccaagtaagaggcatcctttaaaaac

SEQ ID NO: 2665 - DNA, 322 bp, Homo sapiens
  source 1..322: mol_type = other DNA
taaaaagtgagtcagggtgacccccagtcaaggtttcatcaaattgcagagtggtcgaagaaaaaaacacactgaattttagaatttcgttgtatggtaacagaaactcccaattgtactacttaatgaattagggtaatcgttaaatagccgggctaacgtggccatggtctcttgggctaaaccatagctcactcccgtgctgctttgactttaagagcactaaaaagagaattaagaaatttctgtgtagcacaaaagtttaatttatttgtctctgtctctactggttgctccgggcatccggtttccgccgcctgtc

SEQ ID NO: 2666 - DNA, 308 bp, Homo sapiens
  source 1..308: mol_type = other DNA
cattgttaacggatacagaaggaaactgctaatagtttgaccgtagcaccaggctaaaatcatttgagaaagaaaccctcggtgtcctgtctccccagagcggaaagggacgaatgaggtggcctcgtgcctctccctctcctctcgaggacagcggcttggccggccctcctcgtctccccaaggggctagagccagagggaagatctatcacgcggggtagctctcccgcagccacagagacgctgttcgtgcgtctgtgactcggaacggtggcccaagccaatggcccgcgagagaccgccccg

SEQ ID NO: 2667 - DNA, 446 bp, Homo sapiens
  source 1..446: mol_type = other DNA
gcgagccgcgaacatgagtgtctaggtttgggatccctagccgtaggaatggaaaccccagcattcgggctgagggggctcttcaaaagatgaacgcatgcttgctttccgtttgcagcggctgcggcggcggcaggagcagcaggataaatcatgacagtgccgggaattttttttagaaaaatatagatatttatttttaaaaagagaaacggagaacctggcagcctctctcttcttctgccggggaggcgccttggcgctccggctagccgtgggcgcccctctgcccctcgcagcccggctcggtgagtgcacagccgctcgggacgcggaccccgggtgccaggccggccccgcgcccgcgggggcagagcggggggccgtgcccttgccaccggagggccggccagcaccccctcgcctgccgaggtcgcgggagccca

SEQ ID NO: 2668 - DNA, 551 bp, Homo sapiens
  source 1..551: mol_type = other DNA
atatctcactttaacttgaatagaatgttcaagagggtgcaggtaggttaccctctctctttaaaaaagggggtgagagttccagaactctagatttctggaatttatcttccaaaagactattaagataaattcttcctgtccctagtgttgtcaacaatcaatgaggagatgaattgctcctggagtaccttgacttctaaaatattgttaaacaagcaatcagaaaacatttactgtattctttcacaaataggaatgagtgagagcaagggcctcaccagctgttcccggctgctggagctccgatcggttggcgcccggcggccccgaacattaacgacacccgggagcctggcctcgaagctcaggcccgtgaagttttgagatgagcttccggaagccgacaggcggcggaaaccggatgcccggagcaaccagtagagacagagacaaataaattaaacttttgtgctacacagaaatttcttaattctctttttagtgctcttaaagtcaaagcagcacgggagtgagctatggtttagccc

SEQ ID NO: 2669 - DNA, 396 bp, Homo sapiens
  source 1..396: mol_type = other DNA
aaagcctttagaacaagtctagccagtaaatttgattaactttgtcaatagttatattctgtcactcattcattgattcattcatcccttccaaaaatatttttggaaaattcacttaaatacgttcccctcaacattggaactaggagctggtgacagaggctaacttcagagaaaagctagccccgggaggcaggatcctcgcgcggatatctgcactgcgcagtcgggcgccagaaaccctccaggccccagccgggtccgagggagaagggtgcggttggattcaacacccgcctacgactgctgcggcgttcagtagtcggctgaggccattcagccgctgattttgaggctccggccccggaactctgggctagacgaccttcctctggt

SEQ ID NO: 2670 - DNA, 502 bp, Homo sapiens
  source 1..502: mol_type = other DNA
ttcggggagagtaacgagaggacttctgactgtaatcctagcacgtcacatctcccctccccggcaagatcgtgatgttatctgctggcagcagaaggttcgctccgagcggagctccagatcatccggggctgcccggctgcggtggcaagtgcctacctaccctaagcgagcaattccacgtgggagtccaagggagcccctgcgcaaccccgccagggtgtcgcaagggctgccgttgtgatccgcagggggtgaacgcaaccgcgacggctgatcgtctgtggcgcgtttgcaagcggcggcggcagcaacgtggagtaaccaagcgggtcagcgcgcgcccgccagggtgtaggccacggagcgcagctcccagagcaggatccgcgccgcctcagcagcctctgcggcccctgcggcacccgaccgagtaccgagcgccctgcgaagcgcaccctcctccccgcggtgcgctgggctcgcccccagcgcgcgcaca

SEQ ID NO: 2671 - DNA, 620 bp, Homo sapiens
  source 1..620: mol_type = other DNA
gcaagatcgtgatgttatctgctggcagcagaaggttcgctccgagcggagctccagatcatccggggctgcccggctgcggtggcaagtgcctacctaccctaagcgagcaattccacgtgggagtccaagggagcccctgcgcaaccccgccagggtgtcgcaagggctgccgttgtgatccgcagggggtgaacgcaaccgcgacggctgatcgtctgtggcgcgtttgcaagcggcggcggcagcaacgtggagtaaccaagcgggtcagcgcgcgcccgccagggtgtaggccacggagcgcagctcccagagcaggatccgcgccgcctcagcagcctctgcggcccctgcggcacccgaccgagtaccgagcgccctgcgaagcgcaccctcctccccgcggtgcgctgggctcgcccccagcgcgcgcacaacacacacacacacgcacgcacacacgtgtgcgcttctctgctccggagctgctgctgctcctgctctcagcgccgcagtggaaggcaggaccgaacttctttaaatatatacaggtcagcctcggcggcccccctcaccgcgctcccggcgcccctcccgtcagttcgccagctgccagc

SEQ ID NO: 2672 - DNA, 510 bp, Homo sapiens
  source 1..510: mol_type = other DNA
tctgtctcaaaaaaaaaaaagagtctttatttggaataaaccttcatgtaggtcagagtagaatattctcttcaatacacagaggaggtcagccctggtttctttggcggccaagggacttgtgtctaccacaaagtagaccagccttcgagtgctaggcaggagtgtacaagtggggtctgctctcctgagggctgcctgcgattcacccagggaaggaatcctgcaccgtttaagggcaagttgccccaagcctgtgctccggggccttgcgtgcctatgggcacgtacgcgaaggtgtcccacactggcgaccctgccaggagaagcgtcccacctctgcatggggagggagtctgtgaagattgacgtccagacacgccccccgtggccacctgccaagtcaggcccgaggcggtgcacgggctgttcagatactgcccccgccactcctttagactctggacgtgcggggactggtggcgctcggcctcgcgttataaaaagcgg

SEQ ID NO: 2673 - DNA, 631 bp, Homo sapiens
  source 1..631: mol_type = other DNA
tctcatgtaagtggaatcatacaattatttgttcaaggttcatccatgttgtagcatgtatccgaatcacattctttttacaggctgaataatattccattccaatatgtacatagcacatttggtttcatctgtagatgaatgtgaataatgctgctacagaacactgaagtacaagtatttatacctagaagtggaactgctagtacctatgctaagtcaatgtttaacttgttgaggagccaccaaattatttctattgccgcaacatcaaggtatttctacacatctttactattgataagagccattctaatgggtatataaagcagaatctcattaaattagatttgctttgtaaactatttattaaaaataagagacacgaagagaacttattattatatgcttcgcttaaaagtgaaaggtaaaatatggttctattaaattttaaacatagtaacacgaatatttctccaaataaggtaatcttgagttttgggattgcatttaaaattcctacagcaaatgctcaggagagcgggccagcagcgctgcgcatgcgcgctcccgggcgtgctcccgcgcgtgcctgcgtatttgcgtgcgcggccccgcgcggcaacgcagg

SEQ ID NO: 2674 - DNA, 425 bp, Homo sapiens
  source 1..425: mol_type = other DNA
tgaagctggtctggattacaggcctgagccaccgcgcccggctcccaagtagctgggatcagactggtctcgaactcctgacctcaggtgattgcagtgatttttaaagagtcttttatatttcctttaaccattattttcaacacgcaaataactcttgaaaatacgttcttgttttggaaaaaaaaaaagacttttctttttacataaagacagtgcatgctcttaaagatggttttacaacctgctgttttacgacctgctacttgacgaagtgtcgtaaagtaaggtggcggccagcaggctctggaacctgcgggcggggacgaagacggcgcgcgacgatgtcgcaccgcggcgtgcgcggtgtcggcagtagctgcggcgcaggggcggagcgaaggctgcggcggcgtcgggtacgc

SEQ ID NO: 2675 - DNA, 340 bp, Homo sapiens
  source 1..340: mol_type = other DNA
ccgaggtgagcagatcacctggggtcaggagttcaagaccagtcctagctactcagcctgggcgcccatctgtacacaaaaaatattttaattagctgggtgtggtggcgcgcacctccaccagtagtcccagctacacggaaggctgaggcgggcatctttgacacaattctgcataaagttgacctgctgaagcctgtccacggaccgtacaaaaacattttaaaaaaaccaaaaccaatcttttttttgtttcaacacacaagttgacacatctttcgcttttatttaatgatcgctgttgtgcgcttgcgcgcagtttcctagctgaggtagggat

SEQ ID NO: 2676 - DNA, 568 bp, Homo sapiens
  source 1..568: mol_type = other DNA
ttcccaagttgtatactcaacaatgaaatggtaacaattgtgaactattatgaaagttgctatatataccatactattctatgagtgggatataacagggatttcagagaatcttaaaaaaaggttagattgttttataatattgttaaaatctatgggaagtcgttccaggaacattaagccaaatggcgtctctattttgtagaaaggtttaggaatatttaataatagccaattagatctttaaaactcgatttgctgaaattttattattttacaatattttcactgaacttgagatgtgcagtatgtgcaaagtacatgtcaaatttcaaaggcttcgtatgaagagaatatgtaaaatatcttactttttattggctacatgttaaagtgatacaatcatagctatgttgtgttaaagtaaaaaaaaaaaaatatatatatatatatatttaaaaagcagggcctgagcccgccccccggcggctgcagggaggacccggaggtggctcagcctccgcggactccgggaaggcggtgcccaccgccccgcccccaccgctcc

SEQ ID NO: 2677 - DNA, 563 bp, Homo sapiens
  source 1..563: mol_type = other DNA
aaatatttatgaagcacttaccatgatcacaatttcagttaaatagttaagtactccacataattattcaatttaattattagttattgttaatctttcactgtgcctaatttataaatttaactttatcatatatatgtataggtaaaaacataatacacatacataggtttcagtactatccatggtttgagtcatccactggggatcttaaaacatatccccttggattaaagggaaatactgtaattaattgcttactgcctgtatcagtcactagaattcctgggaaaaggctggcatttaaaagactaacaaatatttgttgaatggatggatgaatgcatgaatgaaagtgtataatacactataacacgtactatattgggcttgcgtagtactatggcactagtttaaaacgaattagtttcttccacgtcgactttggctccacctgcagcggcggcgccgtagtcacgtgacccgggcccccgcgccctaggcgcctgggccagcctgcgcctgcgcagtactcggagacagcggacccgtgtcagtgacag

SEQ ID NO: 2678 - DNA, 292 bp, Homo sapiens
  source 1..292: mol_type = other DNA
tttcgttctacaggctgaatgtgcaaaatgtaagagtgacacttccttgtgttgactcgcgggtctcacccactccgagggtgctgcagggcgcccagagcgagacgtcttccgccggccccattcccgaagaggccgcgccgtcgggggctgagacccacttgtactgagtctccagccgcctccctaggctgctggcgcgccaaactctgagggtgaccctgagtaggattgaatccaattcttcaggaggcggccccgcatccctaatgagggaatgaatggagaggcc

SEQ ID NO: 2679 - DNA, 456 bp, Homo sapiens
  source 1..456: mol_type = other DNA
ctgaatagctgggatcacaggtgtgcgccccgggattacaggcgtgagccactgctttcggcccttaatttcagcttgttgagattcacagtacactgataatgcttatctcacagagagatattcctgaaaatcatgattttaactttttcactgagtcagaccgttgaacaccgtggacacactgtcttgcgtttccgaatatttcctagaatacggacgtttcctaagactcacgataaagttttctgccatcgttgctaatttgaacatgagcagagcagtgcgcgccgtagtctgcacgaagggcggggctggcggagcgcgcccgccgcctggtaggccagttcggagcggagccaacgctatcccgggccccacggccagggggcgctgcggcccccccaatcccccgccccgtccgggctggggcggaggagcgggcggggaccaagg

SEQ ID NO: 2680 - DNA, 348 bp, Homo sapiens
  source 1..348: mol_type = other DNA
ggaggtgttaatgaaaacagattttactcagtaactacttacagtaggagaaaaagctgatcattctcatttgtgcatggtcagtattaatgacgggcagctgatcctcccacagagactgggggacagaggcctatcctcagagcaatggctttcaggacttctgaggtgtaggcgatacatatacatcaggattcacagttgtaagcccttttaagaaaatatcctaaaaaagggatggtctttgtgtgcagaaagtcctgcagttctcacagcccccagaggccgccccattagctcgcttgctttgggcggcgtcgctcccacggcgcccagggtacccccgcc

SEQ ID NO: 2681 - DNA, 343 bp, Homo sapiens
  source 1..343: mol_type = other DNA
acagagcctccctgagcactgaactgctctgcagtgagttgccagccttgccctgcatgggcaattcaggcatggctgagctggggtttagcaagaatcctgcttacctgttaagtgggtttatcaagaatcctctacacacagagaacaaagcctgactcctaaaccagcctgcaggaccaagtgactttccctcccgccggaagcagcccggggaccttgtgcagcgttaaactgagccaaggcccttgccgctccagctcgaggctccccgccggtaggagtcgagcgtccccgagccgtgtagaaggcactctcagacgcccattgccgctcccagggg

SEQ ID NO: 2682 - DNA, 445 bp, Homo sapiens
  source 1..445: mol_type = other DNA
gaatcctgcttcctgttaagtgggtttatcaagaatcctctacacacagagaacaaagcctgactcctaaaccagcctgcaggaccaagtgactttccctcccgccggaagcagcccggggaccttgtgcagcgttaaactgagccaaggcccttgccgctccagctcgaggctccccgccggtaggagtcgagcgtccccgagccgtgtagaaggcactctcagacgcccattgccgctcccaggggccgccgggagaactctggccttggctcgccggcgcggagggccaagctcctagcccctgggcagactgaggagctggacactgcacaggccaggcagggcctaccagggctgctgccagctgtctgattctaatttcaaaatcatgtatattgtttattttaggtcaaataaccccataaatacgtaagtaaataaa

SEQ ID NO: 2683 - DNA, 470 bp, Homo sapiens
  source 1..470: mol_type = other DNA
ctggatgtggtggaggggtgaggctaacatttcctacaacctcctgcaaaggatggaagcgcgtgccgctctcccgggttcctctgaggctccggggacgtctaagagagacgtttggagccatccactcgttcaatttgtcactgtgtgacagctctcctcctcgcttcccggaggatctcctgggaggcacgattgggccgggactcagggcaagcgcgctccgctctccaccgggaggcgggctttgcagagctccggagcggctgcctggcccctacgcagagtagcaagaagcactgcgatgtgcgctactaagcccacgcggccgcagcaaaaactttggcgtggccggggcgtggctagggtccggccaggcccccattggtcacgaggatgaccaatgagcgctcggatcgaggtcctaccccgggccactcgaaagctcctgccaaaactttgggagtttt

SEQ ID NO: 2684 - DNA, 516 bp, Homo sapiens
  source 1..516: mol_type = other DNA
acagagaacaaagcctgactcctaaaccagcctgcaggaccaagtgactttccctcccgccggaagcagcccggggaccttgtgcagcgttaaactgagccaaggcccttgccgctccagctcgaggctccccgccggtaggagtcgagcgtccccgagccgtgtagaaggcactctcagacgcccattgccgctcccaggggccgccgggagaactctggccttggctcgccggcgcggagggccaagctcctagcccctgggcagactgaggagctggacactgcacaggccaggcagggcctaccagggctgctgccagctgtctgattctaatttcaaaatcatgtatattgtttattttaggtcaaataaccccataaatacgtaagtaaataaaagcgccctgcagcgcagcagtggggcgccgaccaagtggaagctgagccaccacctcccaagctgcccagcctttgggctcggggccaaaggccgcaccttcccccagcggccccg

SEQ ID NO: 2685 - DNA, 464 bp, Homo sapiens
  source 1..464: mol_type = other DNA
tcgttcaatttgtcactgtgtgacagctctcctcctcgcttcccggaggatctcctgggaggcacgattgggccgggactcagggcaagcgcgctccgctctccaccgggaggcgggctttgcagagctccggagcggctgcctggcccctacgcagagtagcaagaagcactgcgatgtgcgctactaagcccacgcggccgcagcaaaaactttggcgtggccggggcgtggctagggtccggccaggcccccattggtcacgaggatgaccaatgagcgctcggatcgaggtcctaccccgggccactcgaaagctcctgccaaaactttgggagtttttgcggccccagcgcccctcgctctcatccagcccgcgaggagtgcgggcgccgcgccgcctttaaagcgaggccagggagcgaggcggtgaccggccgagatccggccctcgcctcctccct

SEQ ID NO: 2686 - DNA, 561 bp, Homo sapiens
  source 1..561: mol_type = other DNA
ggcgtcgactcaagcctcctcctccgagcagccctcagtggcgccgccttagtgctctgggtcgagccccgggagggttagcctgccgcagcagggcggcgcgcggcggtcaggccgggacagccagagggtctgcgggcgggcgggcgggaggcggacgcttcccgggcggagcagggccctccggaggacgcaggccgcgtcgaggctgaagggcctccctgtccgggacggtcagctgccaagttcgggcccttagcgcgtggccccgggccgcggctcggagcggaagcgtcgcccctggctgcgcgctcatgctggtcctagcgcagaagacccggcgaggtccgctcggagagaaagaaagttactccgatacttttgatcatctgtccatagtaaggaggaaaaatccagcccgctgacacttcagcctggtaaagggttaactgcatcctgccggttcggtttacatgtaaatagagagcagctgctccgcgcggccccggcctaggctgcccattggtcgcccaacccgccgtcggtcggcggcgagtccgc

SEQ ID NO: 2687 - DNA, 224 bp, Homo sapiens
  source 1..224: mol_type = other DNA
ctggagtggcctcaggcgcagtgctgggattacatgcaatacatttctattatttataattacagtctgtggtgttttgttacgttcagcactgtagaaacgcttgaagctttccttcgggcatccccacagacagcaggaattctttgcagttttaaggaacttttggctaagcaaagtaacactagcagcactagagtgggggggacacctcccactgcttt

SEQ ID NO: 2688 - DNA, 236 bp, Homo sapiens
  source 1..236: mol_type = other DNA
gaaactcagtgactctgctgctaagaaaaagggtctgatccttctttcactgatcaggagaagcacactgtcacacggtttaaccatgtccgcagaacaacttttgctgagaaggccaaataaaggctatgcatgggtaaagtgactaaatgaaactgggtcacttccagaagtcacttccgggatacgcctgctgcagcaggaggagttacgagccgggccgcgcgctgcctaaa

SEQ ID NO: 2689 - DNA, 178 bp, Homo sapiens
  source 1..178: mol_type = other DNA
gaaactcagtgactctgctgctaagaaaaagggtctgatccttctttcactgatcaggagaagcacactgtcacacggtttaaccatgtccgcagaacaacttttgctgagaaggccaaataaaggctatgcatgggtaaagtgactaaatgaaactgggtcacttccagaagtcact

SEQ ID NO: 2690 - DNA, 258 bp, Homo sapiens
  source 1..258: mol_type = other DNA
tttatattcaactcgaagagagacctttaaaggtctaaaaatggtattttttatctacagataccattttttccccacagattaaatgtctttttaccgcgcactgcagtggcgccccatctgagcggtggtccttccacgctgtgacaggaagggccagctccgggccggcacgcggttcctggcgaaagcgccagtcacttccgcctctggccccgccctcgccggccggctcctttggtgccttgaggtgcgcca

SEQ ID NO: 2691 - DNA, 296 bp, Homo sapiens
  source 1..296: mol_type = other DNA
tgaagattaatcttaattctggcatgaaataagtataaaatggaagctcatcacactgttattaaattaatttacttttttcctatggatatagatctaggaatctcaatggtgcccccaaggaagccctgggctggttcgggacaggccacagggacccaagcgcgggagaggaggaggctgctgtcagtcctcctcctggaggtctcccgcatccctctctgctgacgtgtcagtcggaaactgctcagaccttcgcgggcgccgccgcgctccgcctggtccctgcccgcgtc

SEQ ID NO: 2692 - DNA, 372 bp, Homo sapiens
  source 1..372: mol_type = other DNA
gagctctgctcccgtgcccagtcccgttcgaggcagcgggcggcgaccgtgcgcacgcgccaacctctttccaaacaggcattttcctcaaggcactagaaggagacttttggtccactgtccaggggtctatggagactattactgagaaacacccatcctctgacatacactctctcacgtgacccggcggccatgatagctaccgaggcggtagtgcgcgcagctcaggggcgggtattgccgcggcgttgcagtccccctccggagccgagggagaatgccgcaatagcgatggcggccctcggcgcagtggggcggcctcaacctaacccggggcggggcctcgggggcggggtctcggcggggcgg

SEQ ID NO: 2693 - DNA, 327 bp, Homo sapiens
  source 1..327: mol_type = other DNA
gaggagacccttcttttggcagaagaggtatccctcctttcctacgcatggaagaattggggcctgcgccccggagccgttgtccctagagcagcctcgctggggctggtggcgagggatctcagccccagtgcctgcggagccccaggcgcacgactggagccggtctggcctgctcccggagtcgaagggcgctggcgccccagcgctgcagcagactccgggtcacctccgacatggccagcaaggccgggttctagggcgccatcctcccccggcctggccccgaccgccccgccgagaccccgcccccgaggccccgccccg

SEQ ID NO: 2694 - DNA, 364 bp, Homo sapiens
  source 1..364: mol_type = other DNA
ccgccccgccgagaccccgcccccgaggccccgccccgggttaggttgaggccgccccactgcgccgagggccgccatcgctattgcggcattctccctcggctccggagggggactgcaacgccgcggcaatacccgcccctgagctgcgcgcactaccgcctcggtagctatcatggccgccgggtcacgtgagagagtgtatgtcagaggatgggtgtttctcagtaatagtctccatagacccctggacagtggaccaaaagtctccttctagtgccttgaggaaaatgcctgtttggaaagaggttggcgcgtgcgcacggtcgccgcccgctgcctcgaacgggactgggcacgggag

SEQ ID NO: 2695 - DNA, 274 bp, Homo sapiens
  source 1..274: mol_type = other DNA
attccgttgcacggagtctctgaagtccaaaatttttaagcatagggcacaacgttctttcatttatttcagtctcaattgaagagtcattactaataatgaaagaagaaacactgtcttgtggcgtgatttagccagccgcccgtcgcccgccgccggcgatccctctcccggggagcggtagtcaagcgaggccagcgggccgggagcgggccgggagcgggcgaggggcgggacttccggtcccgctcgcgacgcggaccgcgccaggcgg

SEQ ID NO: 2696 - DNA, 383 bp, Homo sapiens
  source 1..383: mol_type = other DNA
taattcctgttggtgggaatataaattagtacaaattatttggaagacaataaattaatcattatatcagaaagatacctgaactcaatatgtttattgcagcactgttgacaacagcaaaaaagaatgcagtcatgtcttttgcagcaacaaataacttagaaagtcaaatactacatgttctcacttataagtgctaaataacatgtacaccccttaaatttatgcaaataaataaaaataaataagtaaaaagcaaaaaagtatatgtgttttgaagtgaagcttgtaaaactaaaaaaagaattagcaaagtgttttaatatatgtagaacatatttcttcccgacctttttcaacttgacaaataggtatagctactt

SEQ ID NO: 2697 - DNA, 618 bp, Homo sapiens
  source 1..618: mol_type = other DNA
tatattctgaatactagactcttagatatatgacgtgcaaatattttgataatgtcttttgatcttcaaaagtttattttgatgaagtccaattttatagttagtacatcctgctacaagaattgcatacatatttttattaccaaagtcatgaagagttagatttcacggtttcaataaattataacttatttgctaagggatgtcatttgtaaatttaaagctatttaagtttaaatactggcatcatgagggccatatgtttataaaaagcagtgtcaaatttatttaacaaactgctgtttttgtttggaaaattgaagaaaaacacttaaaactactctaacattttaaaagaagattctacctctttttaaaaccatgaactttctgtcctaaaagtaggatctttgtaaaataaatgtattttaaatgttagcactgtgtgttagaaaactcaaaatatcagctaacatggctttaatctactaagtaacttaaaccttcatgcagtttccctgtggaagcaggaaaaggctagaaattacatgtcacctcattattaagaccttgccccaaggggttaagtaggagaaaaactctcctgtctcaaagcaa

SEQ ID NO: 2698 - DNA, 601 bp, Homo sapiens
  source 1..601: mol_type = other DNA
tctttctgtttgctgtatggagaatatagtgaggtgacagcgtgctggcagccctcgctcactgcttgaggagcccttcagcccaccggtgcactgtgggaggccctctctgggctggctgaggccggagcagaccagggctggggtgctcacgggccagcgcgaattctgggtgggcgtgggcttggcaggccctaactcggagcagccaggggcagtgaggggcttagcacccgggccaggagctgcgaagggggccccgggtcccccagcactgccggccccgccggcgccacagacgggcctcagccgcctgcctgcagggcagggctcgggacctgcagcccgccatacccgagtccccctgtggtgggctctcacgcggccaagcctccccaacgggcgccgccccctgctccacggcgcccggtcccatctggggtgggactggcgggcagctctgcccctagccctgccagctgggctcggtagaggattgtaaatacaccaatcagcaccctggtaaatgcactaatcagtgctctgtgtctagctaatgctctttgtaaaacagaccaatcagctctgtgtagcaggctgc

SEQ ID NO: 2699 - DNA, 370 bp, Homo sapiens
  source 1..370: mol_type = other DNA
catctttgcactgtaattaagtgccaccgccaagctcctccaggcagtgagtggggagtgtcagctgctctgtgattacaccccaagtggcaggtggcagggagctcctccgcctgcagtctgcgcccctgtccttgaactgggttttgaaagtttcagcaaaccccagttcttataggacatgcagcagattctgctgacaggaatgtgtcactgtgatcttcacattttagcctgaagtcctcctccgtacgatgaggagctcacagccctcagagaaaaccctgagctgcggcgtggccgagacgggggcgtggcctggcaggtgggcgggcccttccgtgggcggggccgcgaggtttcaggagcc

SEQ ID NO: 2700 - DNA, 674 bp, Homo sapiens
  source 1..674: mol_type = other DNA
tccccgcccccgggagcgcctcccaggccaaggctccgagggccccgcgcatctccgagggggagagtgtctctcagccgcctcagatggtccttcgggctccctggggacgcgcagagcttcggcggagggcaattggcggggttgggagctgccggccgcgcactcgccccgggtctgcagccaccgccgcggcggtagttctagggcggagcgctctcccgcgccgcgccgcgggctgggggcaccagaggccgcgcggaggccggggcgggcacctgagctggcgcgcagccggggcaggggctgcagtccagcgccggggaaggggcgtgcgtgtgcaagaccggccgccggcgcctcgcgccccgacaggtgcaggcgcgcgggcttcccattggtcgcggcggcgggcccctttccccgtccccgccctcgccagtctccggccacgccgcggcgccggctgggttggcagaggcgcgtgctcgcgcgcccgcgcacccctcgccccgtctctctccgcgccgccgccgccgcgcgctcgcgagttcaggtagcgggcgcgcgggcgcctccgcgggggcgcgcggccgggctcccgtcctcccccaacacccgcccgctcgggggcgcctggggagggagcgcgcgggcgggggagctggagccga

SEQ ID NO: 2701 - DNA, 260 bp, Homo sapiens
  source 1..260: mol_type = other DNA
acctggtatccttgggggaccatgtgtgccacaaacactaatcacttctgagattggaatcaaggctcctgattccaaggcctttctgggaatcctggcttcaaggagctcttccagtttatagataaaaaaacttaggagaaaagttgccttcctaggaaatatgcaccaaaacatttctggcaggaaaggaggcccctgtaactactttcttaggctaatggcctgggatgggccctggaaagttcccagaccccctg

SEQ ID NO: 2702 - DNA, 331 bp, Homo sapiens
  source 1..331: mol_type = other DNA
aatgattctgaccaaagatgccaacaagttttccctgggaacgcggtctctttgtatcaccaggtgattgtgcttttcagtttatattcaagtccacattgcagaatcatgcttgagtggaaagaaattcctctaagacactcccttctgagtatgagtcagaaagctgaggtctccccagcatagggtgacagggccagactgagcagagcctgcagagcgggcagcaggatgggacctctcccgagagtctggaagccccagctggctccggccctctctagggctgcggtagactggacaggaggagacagctgtgactcaaacttct

SEQ ID NO: 2703 - DNA, 351 bp, Homo sapiens
  source 1..351: mol_type = other DNA
taaatatgagtttcaggtaaacaatgaatcatattttcttttagaataagtatgtatgcccatgcaatatttgggccctacatatactttaaaagtatctgttgtttatctgaaattcaaattaaacatttgagcgcagtggcgcgatctcgtctcacccgagtaactgagatcacagtccggcccccgggtgcactggggacgtcttagcgtctccgaggctcagttttctcatctgtaaaatggggacaggggcctcgggttccggtgggagccccaactctggaccgcgattcgcgagcctccccggcgccgggccgcgccatcccgggagctgtccgcagatggcag

SEQ ID NO: 2704 - DNA, 385 bp, Homo sapiens
  source 1..385: mol_type = other DNA
ttgtttatctgaaattcaaattaaacattagcgcagtggcgcgatctcgtctcacccgagtaactgagatcacagtccggcccccgggtgcactggggacgtcttagcgtctccgaggctcagttttctcatctgtaaaatggggacaggggcctcgggttccggtgggagccccaactctggaccgcgattcgcgagcctccccggcgccgggccgcgccatcccgggagctgtccgcagatggcagcaccggccccgggtcgcggcgttcccggcgctcggcaggccgcaggatggcctggtcccgggccgggagcccagcaggccgggagcggctgaggccacaccccgcgggccgggccgcttccctccggtgaatcatcg

SEQ ID NO: 2705 - DNA, 724 bp, Homo sapiens
  source 1..724: mol_type = other DNA
ggcagccctgccatttccctaggccttggcctccctccctggaaaaggatggtatccaccggctccccgtatcggaggctgtttgcagggtgttcccagcaccccccagggaagctcctcagaatgctgcctgacacatttttacaaaatttatttttattgtggtaaaacatacacaacataaaagttatccctttatccagtttgggtgtacgtttgttaaccttacaaacgcgccgcgaggtcgggacagggtcggtcctggccgcctccagggagtcgggtagtttccgcggcgtggcccgggcctcccctgaagtccgtccgcctctctccgcctggcccagcggcgcggccgccggaggactctgtccacgcgcccaacgtcgggcgccctgttctgaaggcaaagggtcccctgcctcgcacgactcggagccgccgaggaggtgacggcggcagccctggggcggctgcggccttccaattgccccggctccgctaggaggcgcgcgctccagccgctccgccgcgcggccccgaccgcacttcagtccggggcgaagaaagaaaaggcggccggctcccgccgctccccgtctacccagccgggcccgcgcaggcgcgcgcagctcccgttcccgcggccgcccctcccccaggccgccgggcgcgccgcgggcggggtcggcgcggggggcggagccggcacgggctcggctgg

SEQ ID NO: 2706 - DNA, 531 bp, Homo sapiens
  source 1..531: mol_type = other DNA
aatgtacgtataaaatatgattttctaacatagacaagacatttctttcttttggtagaaaatgatttaccatcactgtctagttaattgtagactaggtacggagacattttcttctgtactataaagtgtgtgtcaaaaaaaataaattgcctgcaattctggcagtatgaactgcatattaatttctctttcaagaacatttttatttattaattccttacaaaaacaataagccaggacatcttcagaaattgtctgattaaaaacaccaccaatggagtttcattaaatttgtattgctctgactagtgaaacacacacatctatgctgctgaggatatttttctgcgttagaagttaatttgctttcttacaaggccacattctatcttgtaactaaacaactgaattttatgtctttactttctgttttttctttagtaagaatcctataaaaacactagtatttttctctgagtttaaaattcaacacatgcctactgatatggttaggctttgcagtttccc

SEQ ID NO: 2707 - DNA, 469 bp, Homo sapiens
  source 1..469: mol_type = other DNA
tgagtcaacatgtaaactatttcttttcatctttgtaaataatacataatttatggggagttagactatggaaatatcatgtcctaaatcagttattagaatacaattcatatatgataaaattcattaaagtatatagtaattcagtggtttttgtatattcatacggttgtgtaaccatcctatttaagacatcctatataaatgcaatcatacaatatgtggtccttctaaatcaatcatttctatgattcctaaaaaatggtgctagtctaactacattatttcttaagaaaactgcacagtgaagttcattttaataaatagggtttccttagttactaatcttagacaaaagggtctaggatgaccacctttctttgaaaggcaccctgtgagtctctcttcctccaggtaccccttccccggcggctgcaggaggaggaagtgacgcaccggaagtgtccct

SEQ ID NO: 2708 - DNA, 562 bp, Homo sapiens
  source 1..562: mol_type = other DNA
cctgatcaggctggtctcgaactcccgacctcaggtgatgttctattttctataaattaacagtcagatctaggggctcgatccgtgcacaggtaactaatgttgaaacaaaattagtttcgtttcaaaacctttctttcaggaagaggttgagcaatcatctcttaacagaagtggtcacactattccctgaggtattatttccagaaggcagcgaaatatgactcaatggctaatttgctttttaaaaattaaacaaaacttaggccagctaagaagggctccggggcctccagactcggtgtgaccgtagccgtgcccggtgctcccctcgcggaggcgttctccgggctccggcgcagcaggccgcaggggcgggcactcgcaagaacgcggcatcctggatggtggccgagtcaccgtcagaaccccgcgtcccagaatcgctgagagccggccccgcacgggggcctgggagcgccacgcgccctccacccagagaggcaggcgggcgggccggggggggcggggcctcgggactccgcccacgcctccgtctcct

SEQ ID NO: 2709 - DNA, 322 bp, Homo sapiens
  source 1..322: mol_type = other DNA
acaagaagacagaaactaaagccagcattttttttttaatgcttcctgcactggatatattcaaaagtaacaaatgacttagttatctggataaatccgtagcagcggctggtggtgtgttttaaaccaggacgccgttgacagcgtctccgcacaccgcgccggggtaggaacttcctcccacctggttcgcccggcggggaaccgggtccactgggcaggcctgcaaataagaagccccaggaggggcgcatttcaggtgcaactggcccggcgatcgcggcgggcaacccctacgaggcccccggttgactaggagctg

SEQ ID NO: 2710 - DNA, 370 bp, Homo sapiens
  source 1..370: mol_type = other DNA
ttcacttcttaaagatcttaaaatctagagccaggagcattaagttagatttgtgctttgagatgaaaaccccttacaaatcctaagtccaggcctgtaattccagcactgtgcctgtaatcccaggtgagctgtgaccatgccactgcactccagcctgggcgacagagtgagaccctgtctcatgcttgagcccaggaattcgaggtcatagtgagctctagctctttaaaagaaaagcgttgagtaaatacttgttgattaattccatttctggaaataatcggatttatgaaagaggcacctctttgatatggacttgtacttttttaaaatagcctcagccagccccggcaagggcctatcaggg

SEQ ID NO: 2711 - DNA, 604 bp, Homo sapiens
  source 1..604: mol_type = other DNA
ggtcgtggatggggtcggggcggaccccgccggcccgctggcctccctcccctgacccccgggacagcccccgatgcacgtgctgggtgacaggccccctataggttccatacctgccaccggaagtgagtgaggagggcagtataggccctgcggatccgaggacagaggcggcagctgcctccgctgccgcccgccgccgccgccgccgcagccactgccggggctcagcccagcggcgggccccgcgcccccgcagccgccccgcggcgccccccggcgcgacccccgggccgcgcaccccgagctgcctccgggaggggggggggaaagggcccggatcctccttctccccctcctcctttcctcctcctccgactcggacaccggcggagcctccccgcccccgcggaagaaaccccgagcctcggcggcggagggagtaggagagcccggggcttcggcaggcagagcaggcctctccccttcctcctcctcctccgtggtggtagtggtgggacttcccccggctgctgcccctcccgccgccgctgctgtcccccaccgaagtagcggccacagcctgcagcggcagcatcatgca

SEQ ID NO: 2712 - DNA, 537 bp, Homo sapiens
  source 1..537: mol_type = other DNA
ccacagccctgtgcctggaagttcctgcctgtcgaagcccatcctcaccttctgcacctgatggagaaggtgcagtccgccatcccatgcacgcccggcttcggagggcggctacgggtcgtggatggggtcggggcggaccccgccggcccgctggcctccctcccctgacccccgggacagcccccgatgcacgtgctgggtgacaggccccctataggttccatacctgccaccggaagtgagtgaggagggcagtataggccctgcggatccgaggacagaggcggcagctgcctccgctgccgcccgccgccgccgccgccgcagccactgccggggctcagcccagcggcgggccccgcgcccccgcagccgccccgcggcgccccccggcgcgacccccgggccgcgcaccccgagctgcctccgggaggggggggggaaagggcccggatcctccttctccccctcctcctttcctcctcctccgactcggacaccggcggagcctccccgcccccgcggaagaaaccc

SEQ ID NO: 2713 - DNA, 523 bp, Homo sapiens
  source 1..523: mol_type = other DNA
ctgctccagaaaaaaaaatagttgccgtgggcagtactagtgatttgttaattatatatccaacaccttctagtctagtctggactggcttataggaacgtttttcaaacttttttgacaatggcctacagaagaaatatattttactttgtaaagcatagacatgtgtctgtcattgaaacaaaaatttactttgccaccttatttttaaaaatacaaattatggcccactaaatggcagaccttgaaaaaggcttgtttgctatttcaaggacaagaagttacctcttatttggaacctaacacaagatgggtcaaatagagacccgtttttaacaggtctctatttaaaacagtacagaatgaatcaagtatcaaaatacacacttgatttcttttttctaaaagataacttggacctttgtacccatcttagtcctttttaggaggagtctagaaagccttctctctgatgacctgaagaaggggtctgccttcgtgattgaggagcctaataaatgac

SEQ ID NO: 2714 - DNA, 281 bp, Homo sapiens
  source 1..281: mol_type = other DNA
gtgcaattaataatccctaccacttattgaacgtataccatcttatttatgtttttctgataaggaaactaaggattaaagtaacttgcagctagaaaacactgagtaggatccaaggccgaactgcaagaaccgggaggggcggctggcgtgcacagctgcagtggcggcggcagcggccaccaagcgcccggcggcgcttcgccacccctcagcccccggcgctgcagtctccgcccgccggggagggcgcgctcagcggaacgaggagggaatcccgg

SEQ ID NO: 2715 - DNA, 418 bp, Homo sapiens
  source 1..418: mol_type = other DNA
ctggagtgcagtcttggcttcccaaagtgctgggattacaggcgtgagccacggcgtgaagcatattcactttaaaacttaaattttaattcttcagttacagtaaccatgtagcacatcaactttatttagagactttctgtatcttgtttcagaaagaatgatgaaattagttcatcagcttcagctactttcctaagttctttttgataatttcccctaagaaaataatcttaaaacttatcattatctttagcatgctatttaatgtaagctaaaattgtatgtacataaaccaagagattgccctgagaaggctaactagcttagtatatatattatattaagctgggaactatatatgccattttgaataccaattgtcatagctgtcagattgtattgtatattaaatata

SEQ ID NO: 2716 - DNA, 703 bp, Homo sapiens
  source 1..703: mol_type = other DNA
actttttggccaattttattcaaatggaaatgattattggcatataaaaacattatttccaaaatgtttttcctttttaaagtgacataactcaaattcatacatagattttactgtaatatgccgaatggttatatatttaaacttattaaatattgtaacaaaaatgggaagctgatttttaaaatattaaacacagccttagatctctacatttttttttcctgtggatcccaccaagaaatatgaagtcacggtattttttgtgcctagctcagtgcctggcacatagtaagtgctcaataaatattgtagttgttgcgtgagtgaaatatagaacattaacttactaaatttttataagacctttaaaaagaaatggggtattttaatatatatgtaattatttttaccttagaattgtatacctcttagacctgttttattacatatatacgatccttcactagtaagtgaggctttttaatgaaaattcacgcccacgagttgtgaaaatcttaagtgtaagtcacctctttcagaggtctcagagccacctttaggccatacctaggtaggcatgccaccgtcggtgtcacatcgggggccgccgcgtacccgcggtggaatgtgcccggcacccaggatcccttgcgccgcgttcgggaccccacccccattgtggcctcttcgccagggcgca

SEQ ID NO: 2717 - DNA, 577 bp, Homo sapiens
  source 1..577: mol_type = other DNA
aacttcaatggactgctttaaactctagattcggagtcaacaatctcagcattttggggttcaattaaaaccaggcttataaaccggtcccagcatcggtccgggttcgcttctacgcaggttcagcggccgcggacacaaaagcgcccctgctcgccttcgatgccgctgcttggtccaggggcttctaacacgctaaggagggcactcatagtgttttaccgagaaacgctttcgagcattagttttctttgtagcttaaaaaaaaatctcgttccacctggcaccccaaacactgctgcgagcgctgggagggaaagggcgggagcgcgcgggctccgtgtgctgcgagggcgcctgggcgcggtggcaaacgtcgcgctccgggccgccccgccagactcggccccgctcaccggcctccccgcccccaggcagggtggggcggggcggacgcgccacggcgcgcgaccaatcgacagcgccggggggagccccgggcggcctcgccggtggggaggggaggcgccgcgaggcggggccggggaggcgcgcgcccggcttgcgggactgcggg

SEQ ID NO: 2718 - DNA, 434 bp, Homo sapiens
  source 1..434: mol_type = other DNA
tgctgggattccaggcgtgagccaccgcgcccggcctgtggatccggacccctttccggaacctgaacagtgtcccccccgtccaggggctcagagatgtccccatggggtcctcctgggtggccagactgtgcccagggaccccttcagggctcttgagatgggggagctctgtggctcttccagggcccacgccacgggctgtgggcagtctggctgcctgcgcaggaggcaggcaccccaagcccaaggcccccttcctgctgggcctcggtcttgcctgggcagcccctgaagcacagagaattcctactctgggagcctggtggaggagcacaaaggccccagcccgtagccctgcctgcgtcaccaggctgtcaatgggacaggagcaccctgctgtacccagaaaaaaactttgtaaaaggctttgt

SEQ ID NO: 2719 - DNA, 738 bp, Homo sapiens
  source 1..738: mol_type = other DNA
gcgtctcccggcgactgcgtttccccgagagtcggggggatgaagtcatccctatacctagtgtgcacaagggaacaatgatgaccatattttccatttcccctcctcaactccgcaggaatcgctgggcgcagccgcggcgagggcgggcagttgggctgaccgggatgccccccgattccctcatccccgtcctgagaccgcaacagggcgggctgagcactcgccccgcgcgagggcacccggccgcgagccgacccggagtctcctggcccggccctgtgcccagtcacgcgtccaagctccccacgccggtgcctacgggtctggcgcccaggaggtctcggcgcctcggtctccgcaccgtggccgtgggggaggcctcggagctccccaagcctctggggagcgggagggggcgaggaaccccggccgacaactggccggaggtgttgggcgggaggggggggtggtggcccgcccgaatcccagggggcggggtagggaggcaacaaagagcctctctccgccgccgccgccgtcggcctcgctctccgcagtccggcgggggcccggccgccggcgcgggggagtgcgcccggccccccgcctcccctttcctcccctccccccgcaccgccccctcgcccccgggggaaggaggggaggagggcggcgcctgcgtgttcctccgccgcgcgccccgcctcctcccgggttcctcgcggcgatcccgac

SEQ ID NO: 2720 - DNA, 577 bp, Homo sapiens
  source 1..577: mol_type = other DNA
gtatctcagtctcacttggtaacaaataattgagttagatgaagctaatgtttaaagattctatgacagaattggccttttcccctttaatatttatctttggaggctagaatttaaaatctagtggggtctttagaaattacctcattttacattttcatttttaaatgaagaaatttgaagcacaagcaagcctgaggataaaagtaattttctcagtaaagatagtatactaaacatgtatgcaattaagcaaataatgattaatttacacttgtattaggttggtgcaaaagtaattgcagtttttgccattaaaatagcaaaaagtgcaattacttttgaaccaacataatagttgtattcagtttagtgaatgaattagatactcaaatttagaagaaaccatttcttgtgtttgtcttcaccattagactgtacacataaagacaggtcttccattccaataacagcactggtggaacacttagcatattttaaatattgcaagtttgaatattttattttattttttacagtgaacaggctggtggctcaactggattcagcagagttc

SEQ ID NO: 2721 - DNA, 312 bp, Homo sapiens
  source 1..312: mol_type = other DNA
tgtccttctctaaaagttataaacatgcacaaaatctttccatcctgcagcccctcctgcttggaggatcagattttttatccttgcagaagtgataatatggcttctaaatgtttatcatataaagtcaccaagctgtgtgacagctgggagccgcagctgcggttcagccctgagggccacgggacggacgccactcattcagccctaccgggggcgctgtggcagccggcagctctcgagccacacgccctgtgcccattgggcgagcatggacggggctgtccaatggagcgaggtgcgaggaggcgc

SEQ ID NO: 2722 - DNA, 348 bp, Homo sapiens
  source 1..348: mol_type = other DNA
ggatgctggtggggccctggggaggggattctagaggttgctcccctctgtataaagacactaatttgtttttagatttccaaatatgtttgttaaatatactaagaatgaattggaggatcgcttgaggctgcagtgagccgagatcgcaccactgcactccagcctgggtgatagagtgagactctgtctccaaaaaaaaaaaggacatacatcatgcaagtttggatttttgtttttagcggggccgcggagccttaggcaggcctagagactttcccgggtcctccaggccggggaacgccccgctcggaggccgggcttgggcggagactgcgccggggctgc

SEQ ID NO: 2723 - DNA, 693 bp, Homo sapiens
  source 1..693: mol_type = other DNA
actgctcagagctcagagacctgagaggaagctttggtccaaccactcatttcgcgcggtcctccccgaacccagcctcgcttcccgcgcagcgcccagcagtccctggcgcggcgggccggccctgccctcgcgagcttgcggtccggttgtggaggccaccggctccctggaaacatttggctcccggccgggaggcatgccgcgctctcggacctgggctggagtgcccttggcggccctggctcgagcagtaatggaagccccagggggcggaaatgctgcgcccgaacggagaccctccgggctttcacggtccggccttctacagcggcgggggagccgtggcctcttgcagggcgctccgcgcggttcccgactacccggagccgaggtgcgggctgacccccgcaaccccactctcccggggcgggtctaagagcttggcccagttctcccggaggcgtccagagactgggctcgtgccgggggacggaagagggtgcgccccggcggatcccttcttggagcctggtgagctggccggtccggggcttgcagacctccgggaggagctgcggggctgagcggcgaccaggaggccaggccggggcagaggaccgccgagggccaccgcgggaggcgcagtcagctgcgtacaggcttgcgccgccgcgggccaagactccaaat

SEQ ID NO: 2724 - DNA, 757 bp, Homo sapiens
  source 1..757: mol_type = other DNA
gccatcctcagagctcccctggagtcgggggaggccctgctgaccctgctctaggtggccggcaggttcctggcgttggaggccagcacacacctgctggtgttcggcatggagcagcggctgccgcccaacagcgagctggtgcaggccgtgctgcggctcttccaggagccggtccccaaggccgcgctgcacaggcacgggcggctgtccccgcgcagcgcccgggcccgggtgaccgtcgagtggctgcgcgtccgcgacgacgctccaaccgcacctccctcatcgactccaggtgggggtcgcgggggcgcggctgctaggcccggcttgggggcggggacgcgggggggcggtgcggggtcctcggggcccgtcccagtccccgccctcaagcggccgtccacgagagcggctggaaggccttcgacgtgaccggaacttctggcagcagctgagccggccccggcagccgctgctgctacaggtgtcggtgcagagggagcatctgggcccgctggcgtccggcgcccacaagctggtccgctttgcctcgcagggggcgccagccgggcttggggagccccagctggagctgcacaccctggaccttgggcaattacatttattttgaaatgatgagacaatgtatacaattcttcctctgactcttaggagatcctcagtaaatatcggttattaattttcaatatatcacaaacatccagctttttgaagttgagaggtggatcat

SEQ ID NO: 2725 - DNA, 391 bp, Homo sapiens
  source 1..391: mol_type = other DNA
gcagtgtgatttaggctaagccccttgcctactcttgccttaaataagccagcaggctgccatcaggcctccgagctccttcgccaggcggggctcagtcaagagggcgccactctgcctggccagctctccgacaaagcagacgggggggtgtggagccgtggtgaccccctccgtcctccccagggtgggctccttgggcttctggtggattgcctgcagcaagaaaaggcggcagcggggttggaaacccacccccacgcattaaccacctgctattaaataaagggctgttactaggtggcatactaatattcttgttatcttaattagaatgcaagagatcgtgtttttaaaattctctcccgtggggagtgggggccagtgcctg

SEQ ID NO: 2726 - DNA, 362 bp, Homo sapiens
  source 1..362: mol_type = other DNA
cccctgactttatatggacattgatcattaactttgtgagcttcggctcctaggctcccttgcctaggaaggtcccccaaactggggaccaccagctcaggatctcatgaggccccgggaccctctgagcacgggcccggatgctcatcccttgagccattctggttcctgtcagttgtttggttgcagcaaggaacaagactctaggtccacttaccagcagctgggggaactgagcctcttgcagagaacgagagccccacctctactagacagctgtagccagctgttcacagcccctcccagctcagggactcgtctggctgtgagcttccaggaggtctcaggggtgtgacctccct

SEQ ID NO: 2727 - DNA, 586 bp, Homo sapiens
  source 1..586: mol_type = other DNA
ggaccgctcccgcggaaagaggttcagccagagcttccgaggtgaggccctccctccctgctgcccctggtcccatggggcaggtcagatgtgcccactccggtggtgttggcggggcctcagcatgcagcggtgcatgcagtcaggactccggggctgagttctacttggagcatattgctttaaaatcatctcacaaccaggcaaaatgagttgtcaggggtgcagcgggcctgaatcctcctgcagccggcctgaatcctcctgagctagacccaatgccaggcacctgggtgaggattctgctcccagcatctcagctgaggcaaacttgctagccagggtcccacaggcgcccctgcctgctgtggcctggctgccagctcagtggccctgccatcctcagagctcccctggagtcgggggaggccctgctgaccctgctctaggtggccggcaggttcctggcgttggaggccagcacacacctgctggtgttcggcatggagcagcggctgccgcccaacagcgagctggtgcaggccgtgctgcggctcttccaggagccggtccccaaggccgcgct

SEQ ID NO: 2728 - DNA, 536 bp, Homo sapiens
  source 1..536: mol_type = other DNA
gaagttaactcacttgctagcaggtcaaacagttagcagatggcagttctcatatttgaacgtggccagtctaaaatgtgtgtttgaagagacacaggggggctcccacctcaatcggacaggccatgcctttgggcagctctggcctaatgacctgggctccagctgagtgctggtggcatgaaccggccagccagctcactggggagagcacaccccagaataattctgctgtctgaagggaggactcctgtgctgtggtcacgtgactgcaaaggcacttgctgaaattgctgttcctgggactcctaaagacaccgagggaccgaaccagcaggaaggcagaatccttcccgcccttagaacatgctgacagcacagccagaggccccaggcctgggtggcatccagacagccctgtcctttctagacagccccctcctccaggctcagggacctgtctggctgtgagctcccaggaggtcccaggggtgtgacctccctccccaggccagcccagggccagctataaagct

SEQ ID NO: 2729 - DNA, 466 bp, Homo sapiens
  source 1..466: mol_type = other DNA
ttttaaaagcaagagcccagctaccgcttgagattgcagtgagccctttgtcctcttgtatctttggacaaattcgcgagggctgaccaccctggtgccgcctcgccgccacctggtctgatgtgggcctgaggggcatctgatggccagcgctaatattagccaggcctgggccaggcctcagccctgagcccgaggtggcttagggacggcgacctcagccgggtgggggcggccgggcgtcctgggccggcgggcgcctggagctcacgccaagctgccacaggggcttccgggactccagcccggagttccgccctccagtcgcgagcggaggaggcgggcacgcggcctggctcgggccgcggattggcctgccccgagatcctggccactgattggtcgcccggacggggcggggccacgtggcctaaggcgccatcagccgcccgggagatatccgccg

SEQ ID NO: 2730 - DNA, 328 bp, Homo sapiens
  source 1..328: mol_type = other DNA
tgtgtttacagatatccagggttttagaaataccataatctcattctgttaaatattaagggactctttcggattccctgagccttaaggttacgttatgtttcacaagagcccacttgctgtgaaatattttgaaaacaccggccactgtttaggggcctcctcccctcgggttggggagctcctctaggccaaggaagcggccccctaaaaccgcttccggatagccggtccctcgagccccgccctagccccgccgcccggctcacttgacccgccccaggggaggggaggggtgaagctcgcgtcatcaagaggcgccgggcga

SEQ ID NO: 2731 - DNA, 813 bp, Homo sapiens
  source 1..813: mol_type = other DNA
cccccacgggcgggcaggacaagccaccaggccctggtgcaggagctgcgcgctccacacattgtttagaggccgacgcgacacagccatcttgcgtcgggggcccgggcccgggaggagagcgagccccgtcccctgatcccggaggccaacaccggcgaggggctgccctgcacgcaggcggccggcccaggctacggcggactcgggccggtcccgcaggacccggccgcacttggccgagcgcgcaggcgggaaggaggccgtcggtccgcccctcccgctgccgcagcggccaggtccgacagcgggcgcgggacgccttcctgctggggagcgttttccaatggggcgcggcgacccggccgaccgcgtcctcctcccccactgccgcccgggtctcctcgggggcgcgcgccggggcccgcgcgggggcagcccctccctcccctccccgccgcggcccgagacgcccgcaggccgggcgttcacccgccgcgcctccgcccgccgggcgccccaaacccgggcttcgggggttcgacgccgtgcgcacacggagcgggatgggagtgcagggccgggggcgggggctggccgggtgcgggcggcagtctcggcgggagccggcggcccctcagcgtgtcttttgtgtttgtacacacacggcgcgaggcggcctggaggagggagcgggcggcgcgcgggggaggggcgagcgcgcgccagcgaacgggcgcgcggggggaagggcgggggcgggggcggggccgagccttccctccgctggcgcgcggcgcgggggcggggcgg

SEQ ID NO: 2732 - DNA, 366 bp, Homo sapiens
  source 1..366: mol_type = other DNA
cctctggcggcggcggctcccccgtctctcgccgcctcagcccaacagcagcaaccgccgcggcgccgagcctgctctccctccgcccccgggccccagcccccagttttcgagcgggaaaggggtggaaatcgccgccgcttcgcacccccatttcaaaaaagcaagaatttttaaaagagggacgtttttttcccttttttggagatgcatttgaaatgcaaaaaaaacttttgaatcggatacgttagttggttcctgctcgaggcgctgggagcggggaccctgtgccgacccgtaattaaagcctgggtttgtcaacataactgtaaagatgcaaaaccaagaatattttcagatatttac

SEQ ID NO: 2733 - DNA, 349 bp, Homo sapiens
  source 1..349: mol_type = other DNA
tcaggtgctgggggcaaaaagacctgggcctctgtgtttctctttcaataaggagagctcagtgacatccaatttgcttgctaagactttatatctagcagatagagcgtcttaagcattgttgagtatctccagaaaggccaaactgcgccggccctttgaccaacctggtacagggtcaaggctcaaggcccaggccatgtaaggcacaggccaggcaaggtgcttccgccgccgagaagtcgcctgcggcccgcgcacccgggcccctccgggctgcccccgccgtccgggcggggggggaagaacacggagggggccgggacccaagttcacgcctccctcctgc

SEQ ID NO: 2734 - DNA, 381 bp, Homo sapiens
  source 1..381: mol_type = other DNA
aattgtgctcccaaagtctgtcttttagaaaaaaataaaaatattacgttatgtgtgtgatattaacttttaaaatatcaacttgtaagtttccccttttaaaaaaattgggaatttgccctgagctctgccaaccacgcaggcccctgcaaatgtgaagggcctctgacctggagggttgggtgctgccgacctcgtcgacccccgcgcggggctccactgaccccgcccctgctgggcactgacagccgcagcaccgaaccgagcggtgggggtggtagcacccgcccacctggagcaactttccggagggggtggggcgccaggcctcagcccctctcccggagccctccagcctcctcagcagcggaagttccggtg

SEQ ID NO: 2735 - DNA, 410 bp, Homo sapiens
  source 1..410: mol_type = other DNA
tgcttgctaagactttatatctagcagatagagcgtcttaagcattgttgagtatctccagaaaggccaaactgcgccggccctttgaccaacctggtacagggtcaaggctcaaggcccaggccatgtaaggcacaggccaggcaaggtgcttccgccgccgagaagtcgcctgcggcccgcgcacccgggcccctccgggctgcccccgccgtccgggcggggggggaagaacacggagggggccgggacccaagttcacgcctccctcctgcatcccgcagccggcggaagcgattattccccggcgtctggcggggccgggggcgggctcgcacccggaggagacacgggtctccccgagcccgccccgccttcccagcccctggcccgggagggtataagtgcgg

SEQ ID NO: 2736 - DNA, 511 bp, Homo sapiens
  source 1..511: mol_type = other DNA
tcaatgacattcgttaaatgaatttttgaaaagcaacagtgttttattactggaaagtgttacacaggtactttatgcacgcagctcagcttccaacattcgggaaaggcgtgcccggatcgcgaggggccgctgggaccgagtcccggacgtcgcgacgcgcagggggctgctgcggccggcggtgcgtaccctcgggcaatgcgacctgcagttcccgcagctgcagcgcgggccgcggaacatgcgccgggagcggggcccgggcgggactccggagctggtactgctccccccgcgctccggcgccgggcctcgccgtgcggcctccttcctcccttcctcccgcccggctcggccggaggcggcggcggaggggcgaggcgcggccccccttcggcggcacctcctccccgggcaggcgcgggcggagccgggcccgcctcagccagccgcggcgggagcagcgcagcgcggcgccgcgggcagcgagctccgcagccccacaatg

SEQ ID NO: 2737 - DNA, 563 bp, Homo sapiens
  source 1..563: mol_type = other DNA
gagagattccccgtcattaccacaatttcgagtagtgatgagcttaataatatttcgagttatcaccaacaactgtatactcctggtatttgtagtcaaattcataataaaggaaatgctaggtattgtggacggcaggttagaacgcccgtccaagccaggagggtggacctagcactgcagggtccacctcgggccttcccgaggcgggggcctgcgcttcccggacccagctgccctcaggggcccctgatcccagcactgaccctgtccctaaaaaaaatttttttttaattagccagttagtcccagctactcgggaggctgaggtgggaggatcgctgggctcaggagttccagactgcagtgagccatgatggcggcactgcactccagcgcggtgagactcacaagtaagacttccagcccaagccccgcctcggcccccagggcagcggcccgcagagctccacccggcaggcgcccgggaaactccgccccccggccggcagggggcgcgcgcgccgccggccccgccccgtggacgcgggttccgtgggcgt

SEQ ID NO: 2738 - DNA, 664 bp, Homo sapiens
  source 1..664: mol_type = other DNA
aaaatgcttcggctgcggccccgctgcccgcccaggccttcgtaggccgagaaaggtaaacggcgggcacgcgggcgccctcccagatccgggcgctggcagcggctcgggcaaggcaggtcccgcttaccctccgagccggtcggtctctgatgccccgagagggtggagcagggagaccctgaagcccagggcgagggctgccgggttgccctggatagccttgctcaggctggggagacccggggtggctggggtgtcctcagcccgggagagctgagtcagccgcgccccgcacaccctcgcttctcgccggtccgcgagacagcgcatcgcagcctggggcgaggtggggggcggggaagcacacccgaaaccgcgctggcgaccgaggcagccggggcatgccctcgccgagcctcgccgtccccatagctgggtccccggggctctctctgggcggagctttgggcgggggctgagcccgcggtcgtgcccccagcccgctgcccaggccatgccgccccatctgcgcgcggagccgcggctgccgggcctccggggctgagccgggagcgccgggaggaggaggcgccggcggcggagcaggagcgggagccgcggcggcgggcagcgcgggacccagtactatggctgtgtacga

SEQ ID NO: 2739 - DNA, 748 bp, Homo sapiens
  source 1..748: mol_type = other DNA
tctcatggtgttagctcacattgggccattagtgctcctttaatgtgccccacgctgctgccaggcccgcaggaagatgacaggcccggcctaggtcgtcgcttagttccgacgtcgggatgaccctgtcatccacgcggcgtgaaggccaccctccccgcgcgcccgggactccaggtggggccccagtggacgagggaacgcggcgtcgcccaccgggcgtggcctgggcgggcgtggggcggggcctgggccggcgccgggtccggccgggcgctcagccagctgcgtaaactccgctggagcgcggcggcagagcaggtgagcgggcggtgccggggggtgcccaggccagggccctgtcgcctgcggcgctgagggcccggggtggggctgcgccctgagggccctgccctgccctccgcacgcctctggccacggtcccttccccggctgtgggtctgcggcccctgcgtgcgcagcgctcctggcctctgcggccagcgcgggggcggagagaggagagtgcccggcaggcggcggctgggccggcccggaactgggtcgggaaggatcgcggggagcggccctcaggccttcggcctcactgcgtccccacttccctgcgcccgcctgccgccgagccccggctgggggtgggcgcggcgcgagcggttaaagggccggtgcatttaacgggtcctgggcatgctttccccgggaaggaggcgcgcgggggctctgcccg

SEQ ID NO: 2740 - DNA, 632 bp, Homo sapiens
  source 1..632: mol_type = other DNA
ttggctcatacgttccttttctcgttaaggagggagtggctggtggcggtgcctcccagggctgctcggcggggacgccgagggctgcacccgagctccatcccgtgttggctgcgcgccctccaaaaccccggctgtcagcgactgcgggcacctgcacgccgacgagaccggcgggcggacagcgactccggtgagggtactatctctctaccctcggggcgcgggtggcagaggcttcctgttttgaggatggcgccacacaaaacaacggccgaagggccggaagtggaagtgcgcggccttgcccgccgcgtttcccctcggcaacgccccgcagtcgcgtctgcttggtccccctcccaggcccgcgcagaggcccagcaaaagcacgcaggggtgcctttgcggccacgcacactgcatcgcagtgaaaaaggctcaggcgcatgcgcgcaggcaaagccaggcctccagccccggtttgctaccgctctcggtcgcgattggctacgggccgggagcacgggccgagcacgctcccacgcgcagagcggcattcggcaggcggacggcggtgcagccaatgggagcggcccgcggggcggggcttgtgagctggggctcccccg

SEQ ID NO: 2741 - DNA, 636 bp, Homo sapiens
  source 1..636: mol_type = other DNA
tatgcccttatgactgacttcaaaaaagaatacagaaacttaagtgcatagattcttttagttttaaaagttttattgcaactggggagacataagataacaaatacctttggaaaattacaaagcttaggaaatcttacagtcataatctgtagtctgtatgtttttcttattactgagaggatatttcagccttatttctaaaaaggtaacctaaaagtgaagagacctaccgttttttttctagtgtagataagacctttgccatttctcacaggactattgcaaaaggtttttttaagacacagatatccttaaaactttttatcagttcttcatcagatttaggatgcagtaacaataattgtaaataaattagaaatttaaatgtaaagcaacaaaaatttgaataaatatgtaatctttgtgtgaagaaaactttttaaaaacagcaaaatatttgcaatatatggcaggcaaaaagttagtagatttaacatagaattttatttttgttaggatgtacaaaaaatgcagttatatgaatactcatttatattacagaaagaagttatttaaatattttattattcttgtagatgcactaatcttttgttattatttctatagcaaaaa

SEQ ID NO: 2742 - DNA, 591 bp, Homo sapiens
  source 1..591: mol_type = other DNA
cactaaatgctgtagtttaagatttagagaattatgtaaaaaaggggtaggatcccctgcctaggggagaaagtttcttgaaaatgatccagtctacaggagacagtctacagtttcaggactatgctttttcttaaaataattctgagaattaagtgcaaaaatatgcgaatgtcacatgtgccgtgtgcatttataaataaatgtgacatgtaaaggtgtatttatatatctaccaattgcacctctgcaggaaggtgacctcaatgtaccttctttgaatttgcagaactgtgtacaagaacacaaactgtttatacaggattgtagccttttttaaatgctaaaaaggtccccatgatttgctttgtttaagacatacactcaaaactttattaaaaacatttttcaaaaatagtttcataaagctggaaaatgaattgtatatctttaaaccgcagaagttaaaagccttttttgttgttgttagctaacaatggaaacttttttttaagtgtttccctccctcgtcttgccaagcaatagaaaaaatttttttttttttaatcgtgcattgaacaaacactgaag

SEQ ID NO: 2743 - DNA, 597 bp, Homo sapiens
  source 1..597: mol_type = other DNA
ttccatcctttggtcctgggaaatgactgtcggaagcctaaagccctctgcttctgggcgcccttaacaaacgccgaggacggcaggagccccccttcgcgatctgcaccagaagcctcggggagccggggccacggcgcggcggtggcgcagttcccagcctgcgcccagtcccgccgcagctcccggcgcggcccggtcagcagctccgcattccacgctgcggcagccgcagcctcgccgcctaggcagcctcgggctggcgcagccactcgggccccgagcccgcgcccccttgggggcctccgctgggcgcgccggccggaccccgcccggcttggccgccggctggggctgaggctcgggcagggcgggcgtgtgcgcgcgcgtgtgccggggccggggggccaggccgccatattggatccagactcgtccgcaagcctccgcctctgtgcggcgggactggaggagcctcgctgagcccagggcgtgggagccgggctgccgcagcctctagtctcctcagccgcggaagcgacccctcctcctgcgccgggccgcctccctcctcgctgtggaaagatgcccttagcc

SEQ ID NO: 2744 - DNA, 473 bp, Homo sapiens
  source 1..473: mol_type = other DNA
ggaagggccctacagggattacaagtgtgtgtgcgcatgcacacaggggtgtatgactgccttcacaggctgaggattccatcctttggtcctgggaaatgactgtcggaagcctaaagccctctgcttctgggcgcccttaacaaacgccgaggacggcaggagccccccttcgcgatctgcaccagaagcctcggggagccggggccacggcgcggcggtggcgcagttcccagcctgcgcccagtcccgccgcagctcccggcgcggcccggtcagcagctccgcattccacgctgcggcagccgcagcctcgccgcctaggcagcctcgggctggcgcagccactcgggccccgagcccgcgcccccttgggggcctccgctgggcgcgccggccggaccccgcccggcttggccgccggctggggctgaggctcgggcagggcgggcgtgtgcgcgcgcgtgtgccgg

SEQ ID NO: 2745 - DNA, 618 bp, Homo sapiens
  source 1..618: mol_type = other DNA
gcacaaagcgtgttcgacttggttaatcaatgcagcagtaaacccgctgcttctggagcagactcttccacctgaagaagacctgctcacaccccaggggtcagctccgcggcttcttcttggtgaagcctctggaagccgcgcactgtgcaacagaggcctgcgctcgacctcgcggtgcactgcagggagccagtaccctagcccagggagccgggttgggcgcggcctggggaccgggcgtgggaagctggcccacagggtcgcccctcaccagagcgcgcatgcgggagccgaggccgcagcactgggtgggcagctagctcaccgaagacccacgcagcgggccaggcgccagcggccgctaggtctgggcgcggggccgggccggcgagagggtccggggcacccagtgggctcggatctcgagcggtccccgtgacggccccgcgactgcgcgacttcccgctctagagagtttggaccctgtcccaggagggctccgcagccgccagggaggtaccggagggaccgcggcgctgggagagggtggcgccaggcggccctggagccctgggcgacgcggccgggccggccagagggcggagaagtcaaagc

SEQ ID NO: 2746 - DNA, 451 bp, Homo sapiens
  source 1..451: mol_type = other DNA
tctgtgaggtacggaagatttttctggcccagagagacttggagagacacatctccacaccctttcccaggggcgtgatacaaagaacaatgtatagccagtcagtgacttctggattttaatgtaaatttttgatgaaaattttaggaactgcctcttttcttaaaacccacttgtaatggttactagttggaatgtataatcagtaggtatcctaaacatatgcttttgaatatacttttgaaaatagattctgacttttttagctgccctgcccagcagaagaggcgggtggacagcaggccggcgcaccggaatgcgcctcccgaggaaaactcatcttcaggtttttctccaacagaagatgatgatgacgtcttaagagtgcgccctttattaaagacaattttggaaggatacaaaaaaaattgcccattttgttacgggtcct

SEQ ID NO: 2747 - DNA, 364 bp, Homo sapiens
  source 1..364: mol_type = other DNA
tggggccccttcatgccctccaggtcccctgtgggccctgggcgcccccgcccgcataccccccaccccccggggatgcgggaaggagggctcgggctgtgtcagccacagcgcgcggactgagccgagggcggacgctacggcttggcttgggccgggcgcccaacagaccaacaccgtcgctcacctgagggacgccagacgagtcccagagccgaccgcggcgcctcggccgctcggcgcctgcgcagtgaagaccgcggcgagccgcgcgcatgcgtgcaggcccggagccccaggcgctggcggggcagaaacgcggcgccctgcgtctctcaccgtttccgctccggcggaagtgagg

SEQ ID NO: 2748 - DNA, 680 bp, Homo sapiens
  source 1..680: mol_type = other DNA
agacaatccagtttcttttaaactgattaaagtgccaaaaatagctccgttgtgcacccaggggccaccttcatcagaaaggcctctgggttcacgcagcgctgaggcagcgcctcggtgcgtcgccctgcacaagtgccagtctttgagggtattcctggaccccacagtttgcaactggaggcacggtccatgccatctcagaggaactctccaggggccacgcgcctggcctccctcaccctccctggtgcccctctctaggcgggggcctcccgggcctgggtcccgccggcctttcctccccgcccggggtctgcggccgccgccccaccgtaggtccgtagggtggtcgaagtcgggcctccccgcgggcgtcacccagcgccgccggctgccccagccctgcgtgaaggcgctggaaaacacgcagggctaggagaaggcgcccggctccgagacgaaggctacccggcccggagcctggccgacgccggggacatcgacccccaggcctcggaagtggctgtcggcgagggcgcgcgtctcgcggtccatccagctcagcacgggtcgaaggaccctcctcctcacttccgccggagcggaaacggtgagagacgcagggcgccgcgtttctgccccgccagcgcctggggctccgggcctgcacgcatgcg

SEQ ID NO: 2749 - DNA, 221 bp, Homo sapiens
  source 1..221: mol_type = other DNA
cctgtgtatggcccactgggcccttgctgtgactgagggggtccctccctaggaagggcggctctggcccacccattcctgggaggcctcccgtgggctccggcctcccatgggctccagcctccctgagccgtgctgtagtcactgctgccaggccttgcaggctcttgctcagtggcagtcacaggccgtggtcagccaaggtgccctgggttcctgcc

SEQ ID NO: 2750 - DNA, 616 bp, Homo sapiens
  source 1..616: mol_type = other DNA
caccattctgcttcagaagcagctccgaatccgtatcgcagtccccgggctgtgactgagcgcgtccccgtcccggccaggacacaggctctgaggctagctccactcccacaatttaagaatggggagagcttctccctgccagaaaggagcgattctctggccccgctccttgagggggtcagcatgcgcaagaggcgcaggcatcaccggctggcccgactcctcctcaccaagcttcccccggagcagccgcgcagcgcccagctcggggcagacggctgggtcctctgtggaaccatccccgaccgtcccggcctggagccccgccggcggctagcccggcggccaacgccgccccgggggccgccccaagctccggccccccaatgccgtcccgccgtggtcgccccgggtcttcctccatccccgccgggcagggcgcgcccgagacccgcgccgggagcggcggccggggccccgagtggccgggaggggctggcgggctggcgcgcgcggctcgggtttcggcccgcccccggcgccggcgtgatcccctcccgggcgcggggcggggccgggcccagctggccgcgctccgggcgctataagaggg

SEQ ID NO: 2751 - DNA, 725 bp, Homo sapiens
  source 1..725: mol_type = other DNA
gccctgcccccgggcctcggcctagggcactgtgctgcagggacacttcacagagggactgcaacggtcctctgttcaggtgcctgagagcgggatctcctccgcctcaaggccagctcattagagaccactgtgacctcccttctgggcggccgtccccaaccctgggccccacccgggcctcaccccggggtccccaggccccggcgtctgctccgggcccaggtatgagcccgcgcgtcactgcggccgccggggcgccgaggccagtgcggggacacagcaagcggccttccgccgtggccccgcgagtgccacaggtttccacagggccggggcacgtggacccgcgcagcctgggagccaggaaccccaaccccggcgaggggcgcctcgcacccccgtcctcacgcagtccccgaggcctcccggtgactgccgggtgtgggaggaggcaaccagccccgcagctccagttgctgcaggagccccccgggcctccaggctgtcttcgcggaagactcacaggcgcaggcgcagacgggtgcgcgcccctagggtgcgcgcgagctaagaccgcggcccggggcagggtgtccccggccccgccccctgcagccctaccggagccagcgcgcctgcgtcgcgggcgcacggtgggcggagttcccggcgtctccgccccttacccggcgtgccccgcgcccggaggcgctgacgtggcc

SEQ ID NO: 2752 - DNA, 653 bp, Homo sapiens
  source 1..653: mol_type = other DNA
tgaccttgggcaagtcactgggcagacctggaggttggtggtcccagaacctgggggcagcactgcgctactgttctcttccctggtggagtgataatccctgcgccacagagagagtcccactcgtccccagctgtgacccacagacgcgtggctgcaccttggaggtccacctggccgctgtccccattgcaggctgctctggtctcagcggaaggagtccggccgcaggcagacggggccaaaggacgtgcacccgaaggttgatggatcccagccacctcgggggcaagagacggagctcgccgggggactgcgggtcccaccgtgagcgcagggcgcgcggggctggaaacccaggacgcggcccgggagctccaggagggcgcctgcggatcgcgcggccccgggccggccgcctgcccatctggcgcaccccagcgcgccgcgcacacctgggggcccgcacacccacggcagcaggcgggggccaacgccgccgccgcggttcgggctcccgtggccccgcctgcccctgcctgccccgcccgggccccggccccggcgggcgccccccgcggcgctgccccgcccccgccgccccgcgccgccccgggcctcggcccgcagcccggccgccggcccacctggcg

SEQ ID NO: 2753 - DNA, 769 bp, Homo sapiens
  source 1..769: mol_type = other DNA
gagcccgcgcgtcactgcggccgccggggcgccgaggccagtgcggggacacagcaagcggccttccgccgtggccccgcgagtgccacaggtttccacagggccggggcacgtggacccgcgcagcctgggagccaggaaccccaaccccggcgaggggcgcctcgcacccccgtcctcacgcagtccccgaggcctcccggtgactgccgggtgtgggaggaggcaaccagccccgcagctccagttgctgcaggagccccccgggcctccaggctgtcttcgcggaagactcacaggcgcaggcgcagacgggtgcgcgcccctagggtgcgcgcgagctaagaccgcggcccggggcagggtgtccccggccccgccccctgcagccctaccggagccagcgcgcctgcgtcgcgggcgcacggtgggcggagttcccggcgtctccgccccttacccggcgtgccccgcgcccggaggcgctgacgtggccgccgtcagagccgccatcgctcggagcagcagcctccgggccgggccggcctcggggcgacttgaggttcgcgaagggcacgtcgacccccgcggcggcggcggcgacagggccgggccgggggcggacgcagacgggccgggctgaggctggggcccggccggagtcggggctgggcggacgggcgggtcggtgagctcctcgcacccctcacacgcccgtcgcccggaagtccgcttggacgccgggctcttctccaggaaacctgggctt

SEQ ID NO: 2754 - DNA, 428 bp, Homo sapiens
  source 1..428: mol_type = other DNA
gtagaaagctgtcctcatgacctagtcacaagcaccaacgccttggggtgcatccagaagtttactgggtaatactcagaaattccacaaatcattaaggtcattaccttgttaacgactagcagtgaccaattggcgggatcctcccgcctcagcctcaaagcgttggggctacaggggcgcgcgcgcgcctggcccattttctcgctctgtcgcccaggcgggagtgcagtggcgcgatctcggctcactcagcctcctgagtagctggaattacaggtgtgcagcgttcccgcgcccggcagggtaggcgcagtgcgcaggcgcccaaagccgacgtggaggtgatgcgcgggagcacagatccggggcagtgcgctgcgcagaggcgcgcggcgaagccgagtgggcgcgggagtgacgtcacg

SEQ ID NO: 2755 - DNA, 358 bp, Homo sapiens
  source 1..358: mol_type = other DNA
agagtggccaagggactctgtttctcagtcagcagtgcccagcacgctggtagaaagctgtcctcatgacctagtcacaagcaccaacgccttggggtgcatccagaagtttactgggtaatactcagaaattccacaaatcattaaggtcattaccttgttaacgactagcagtgaccaattggcgggatcctcccgcctcagcctcaaagcgttggggctacaggggcgcgcgcgcgcctggcccattttctcgctctgtcgcccaggcgggagtgcagtggcgcgatctcggctcactcagcctcctgagtagctggaattacaggtgtgcagcgttcccgcgcccggcagggta

SEQ ID NO: 2756 - DNA, 219 bp, Homo sapiens
  source 1..219: mol_type = other DNA
gacataaatcccgcccgggtgctcccgcagtccccctgggagcagctgagtcctccctcaggacccctgggtcctccctcagccctccgggccgcgggtccccctcgacctcgccggcccgccctggtcctcccggtagggacggaggtcacctgctcgccggccccgcctgggttcttgtaccgccacagcgcccccgcaggccgcgccggccccgcc

SEQ ID NO: 2757 - DNA, 518 bp, Homo sapiens
  source 1..518: mol_type = other DNA
ctgagtcagcctgcggcagggcccaggctgtctgttgccgttaccgagtctgcgaaacctctctgaatggactgcagcctcatttaataaaaactcagtgaagtgaggaagaatggaggcccagggaagcccagttttcaatactcagggccgagcgcccagcttcctcaccagcacaggagcctggggctggtccaggagggtcttcggggaaagctccctctcctttcctgctagactgcatggggacaagggcttatcacaggtgcagccccctgctccaccgggagggtacagcgcgcctctgttcccggcccacacgaggcgccaacctgcggccgccacagtcgctgcggaggggtctgaggacaggcggtcctgactcccgctgcccggtggaactaagacactgcgttgggtgctgctgcgctgcagcccacgacgtcactggcaggcgctgcgtcgcgcgggcggggccggcgcggcctgcgggggcgctgtggcggtacaagaaccca

SEQ ID NO: 2758 - DNA, 460 bp, Homo sapiens
  source 1..460: mol_type = other DNA
gggcgcctgtaatcccagctactcgggaggctgaggcaggagaatcgcttgggttgcagtgagcagagatggcgtcactgaactccagaggctcactgcagcctcgactgcccaggcgcacaaaaaagtttttaaattttttggtacagctcccggctcggactcccaaagagctgggatcacacgcccggccacattccccaattaatggtttttggagagtggcagcgctgtgacgtagcagatgaaagccgggcccgcgctgcactgaggtacttctctgagtgacaagcgggacgggccggcgtggcgctgtgacgcagccgctgtgctgaacgcccctgcggtcgcgacaggccagcgcaggtggaggcggctagcgaggcactgaggtaagtacttccctaggggcagtcgcctcatgacgtcagtctcgcgcgcgggcggaggtgggccggtg

SEQ ID NO: 2759 - DNA, 562 bp, Homo sapiens
  source 1..562: mol_type = other DNA
ccctgtgtgtgcagctcatgtggactggacagccgcagagcaggtggatggggctgcttccctgcaagggcccagggccaggccccctggggattggggattagggactcagcacccccagctctacagaggctgcacctcagcaaacaggtaggccctgttcttggggaggattcccaccaggcaaaggccagctcccgggccctcacctgccacgtgttgggggctgggagggaggcctccaaccccctctggcatttcacagataggagtcccaagtcctatgactcagcaccatgcatgggagcaaatggctggactcctctcagagcaggctcccagagggcttggaggtgactccaccaggtggggacggcagctcccaggtaggcagcattgcttgctagggacccctggggaggctgacagggtcagtgggtttcagttggggggctcccctgctgagaacccagtaaagccggccttcctcccgtgtgcccagagcctggtctgagggccgccctgtgcatgccggcccttccaacgtggcagagctcagcct

SEQ ID NO: 2760 - DNA, 671 bp, Homo sapiens
  source 1..671: mol_type = other DNA
ctcaaaggaccggcgcctgaggcttgctgtctgttctcggcaccccgggcccatacaggaccagggcaggccccggaacatcctggggtgacccccgacccagcctcgctgggctgtccaactgttggattagggccccaaggttggtggggccccatcatcccgatcgggccctgagctccggagatggcctctgcctaggcatctgctgcctgccggctcgtggctgctgccccagggcagcatgatgcttgactggcaggcagggaaggtggcagggctggtcccaacccacctggcaggctggcaagtggggagcaggaagcggctgcatggggcagcctgaggctgcaggggtgggccctgagggctgcctcttggtgcccgaccctgtgggtctggcatgggccagaggttccaggagaggcccctgagctctggcagctggaggttctagatctcgaggtctaaggggttccctgagggagatgcccctcccctagctgccccaggggctgtgtgtggtgtgtgaggagcctcctctgctcaggctgccttgcctgtctaaggcagcacagggccgtgctgccagccacccctagggtcagccccagccctgttctgagcctacccggccggaaatgggggcggggagaagagtccccgcccag

SEQ ID NO: 2761 - DNA, 815 bp, Homo sapiens
  source 1..815: mol_type = other DNA
ggccccaaggttggtggggccccatcatcccgatcgggccctgagctccggagatggcctctgcctaggcatctgctgcctgccggctcgtggctgctgccccagggcagcatgatgcttgactggcaggcagggaaggtggcagggctggtcccaacccacctggcaggctggcaagtggggagcaggaagcggctgcatggggcagcctgaggctgcaggggtgggccctgagggctgcctcttggtgcccgaccctgtgggtctggcatgggccagaggttccaggagaggcccctgagctctggcagctggaggttctagatctcgaggtctaaggggttccctgagggagatgcccctcccctagctgccccaggggctgtgtgtggtgtgtgaggagcctcctctgctcaggctgccttgcctgtctaaggcagcacagggccgtgctgccagccacccctagggtcagccccagccctgttctgagcctacccggccggaaatgggggcggggagaagagtccccgcccagagcccagactgccggaggatacaggccagagccgcctggactgggcggctgggcaggggaggggaggggagggcccaggcagcccccggtcgcttgctccagggcaggtggactgagcttcggaggctggggctggcctctgacctgcttgggcttggagagccctgcccgctgccctgccccccaggacaatcagggattcagaccctgaggccgaggggggaacaatggggcccttgagggcccctcctccagcccccattgtgcttggtggtga

SEQ ID NO: 2762 - DNA, 349 bp, Homo sapiens
  source 1..349: mol_type = other DNA
gctcagtaagatttacagaaatgctgtgaggatagtgcagagttcttatagacctcataatgagatcccacatggtgtcagtcaccgtcaagatgctgtgaagcatccacaccattcacgatgcttgtgatgacaccttggccgcctggccagggttggtgtaggaggcatgctgcagaggcgctctccccctctccctagggatgggggtcatgctcccctccagtacagagtgtccacatggctgctttggattgactctgcacagaggaatgtcagtctgtaatctgtaacacaagactacttgctcaggcactgggtgctctacgtgcaggtgctgcttgcacag

SEQ ID NO: 2763 - DNA, 222 bp, Homo sapiens
  source 1..222: mol_type = other DNA
gcctgtgactcctcctggagagctggtcctggagggatgcccccgtcccatccaccttggcctgccaaggctgtgagggccgggccttccgaggatacccgccctgggaagcacgggctccaatgccccaggctgcggaccctgcgcctgagtcctccccagggcaggggtaaaagacagaattccgtcccgcccgcgggccgcgtgactggcagcggccaa

SEQ ID NO: 2764 - DNA, 341 bp, Homo sapiens
  source 1..341: mol_type = other DNA
agtttctggaattgtttagcatataatcagtacccctgcccaagatccaaaaccctctcttggggtctggatcaggacctgtttctggtaacaaaaccacctggggtgtcggcaagacccaccccgtcccgcctggttctaggggacctgacctgccaggtggtccctccaaactggtccgcccacaggattgggacgcccctccctgtaccctcagccgctgactgccaaccatgtgggcagacctggcggctgactggctggggacccccagcctggggctcgcgtgccctcccgcagccccaattcgctgggctgtggaccacatcctccccaccgcc

SEQ ID NO: 2765 - DNA, 644 bp, Homo sapiens
  source 1..644: mol_type = other DNA
tgcagtgagccgagatcgcgccactgcactcaagcctgcctggcaacagagcgaaatgctcttctgtcatgcatcatcacagaatcaatgagggtagcttcccagggggcccgggatgggtccacgcagggagatcccacgcagggtgccgttcaagggcgggtccctgaaggaagggtgcacgcagggcacgtccacgcgggcaggcccgtgcacgcagggcgtgcccatgcagggcgggtccgtgcaggatgagagcagcggaggaggcccacgcaggccatttcccgccccgtccccagcccacgcgggcgagctaccgcgggggtacgcgcagctcagatccgccttttaaaaatggaaccttcaagtaaaaataaaactttgtttccctctttagcgcgcagctgccaggacttgcgcggtgacgtgcgccgctgccaggaccttgcaggtcggaggagcgcaccgccgctaggatccaggcggagaagcccaccgcggctgctgccaggatcttgtctgtggagcgcagcgcggccaggacctccggctgcagcacaccgctgccaggatcttatcggcagagcgctccgcggtccggaccccgccccgtgcgcgtccccgaccccgccccgtgcgcg

SEQ ID NO: 2766 - DNA, 623 bp, Homo sapiens
  source 1..623: mol_type = other DNA
cgggcgcctgtaggcccagctactcgggaggctgccgagatggcgccactgcactccagcctgggcgacagggcgagagcttagcttccgagatcagacgagatcgggcgcgttcagggacgctgaaggaggcgcctggctgccccaagagcccagcccggcccggccgtgcccgccggattgcagccgacaccgccagcccggggccgcggggctcggatcggggacccccgagccgctggcccgcggccttcccccggctcccgcgctcccgagcttccaccacatcgggcccgctcggagcagggagtgctccgaggcgtcagggcccagggcccacgatcctgggacgccctccggtcctccgccctgtcgcggaggcagcgttttggatccctcgccgcacaggggctcctgcgaggccccctcttgccccacccacccagagccgtcagggctggccgaaggcgaacagccggcccagccgcgcggggcctttctctcaccgcccccaccacggtcgcttgtcccgaccaagacccggccgggggggcacccgggctggcactagaggcggcggcctgatctcgggtgagagggccttcgttctcgttccggaaccc

SEQ ID NO: 2767 - DNA, 419 bp, Homo sapiens
  source 1..419: mol_type = other DNA
ggtgattaaaatacttttttttttttcaaaatttacagaaacatattaccacgtgtacacattgctaggtcttccaatgtgaaaggccatacgcaagattatgtcatctgtaagtaatgttaagattaaaagaattagttcttgaagagtgcttacaacagtatctgacacattatgaaagttcagtatttgttattgttatttttactaccactagtatcaatgtgtattaataatacggaatattttttcagacatattaatgtctccgaattacctttaagtaaatgaaggctggcatccttttgcttcaaaatgagaagacttaaggctgtctgtccccctgggtggagccgtggccagccgggggctccacggagtgaaggcggctcaggcttcctggctcgcgtgggcgccag

SEQ ID NO: 2768 - DNA, 581 bp, Homo sapiens
  source 1..581: mol_type = other DNA
gcttagcttccgagatcagacgagatcgggcgcgttcagggacgctgaaggaggcgcctggctgccccaagagcccagcccggcccggccgtgcccgccggattgcagccgacaccgccagcccggggccgcggggctcggatcggggacccccgagccgctggcccgcggccttcccccggctcccgcgctcccgagcttccaccacatcgggcccgctcggagcagggagtgctccgaggcgtcagggcccagggcccacgatcctgggacgccctccggtcctccgccctgtcgcggaggcagcgttttggatccctcgccgcacaggggctcctgcgaggccccctcttgccccacccacccagagccgtcagggctggccgaaggcgaacagccggcccagccgcgcggggcctttctctcaccgcccccaccacggtcgcttgtcccgaccaagacccggccgggggggcacccgggctggcactagaggcggcggcctgatctcgggtgagagggccttcgttctcgttccggaacccgcacgcgagcacgggtgcgcagacgcacgcacacac

SEQ ID NO: 2769 - DNA, 621 bp, Homo sapiens
  source 1..621: mol_type = other DNA
tcatctgtaagtaatgttaagattaaaagaattagttcttgaagagtgcttacaacagtatctgacacattatgaaagttcagtatttgttattgttatttttactaccactagtatcaatgtgtattaataatacggaatattttttcagacatattaatgtctccgaattacctttaagtaaatgaaggctggcatccttttgcttcaaaatgagaagacttaaggctgtctgtccccctgggtggagccgtggccagccgggggctccacggagtgaaggcggctcaggcttcctggctcgcgtgggcgccagaaagcggaacctcccgggccagtcgcgcggtggtcaccctcttgggagctggggaggaggctgcggaggctggcccggctccttcgggcgtcgcttcccggaccgggtgcgcggggtcccccggaacgtgtgttccaggtcctcccgcgccagtgttcgcagtccccgcctggtcgcggcggcgcctcgggcgcgggtgcaggcgcgcggcgcgcaggcggggggcgctgtggtcttggcgcggggaccgagccgctcggccagacccgccccgcccgcctgcccgccccccacgcgtcgtgtcg

SEQ ID NO: 2770 - DNA, 356 bp, Homo sapiens
  source 1..356: mol_type = other DNA
cccagcatgaactcaggacccatctctacaaaaaatttaaaaattggcgcggtgctagccccagctactcaggaggctgaggcaatttggtgagggccgggagatacttctatgtggagaggctgcagcctgtaccatccaagagggcccggcagtttggagtgaaagcttagcttcccaacgggtaaatgaacctgcctcccattcacagggcggcctctggctggaggccaatttggcaaacagcgcacaccgccagagcgcccagcccgcgcacgtgcttccggcgcgcgccgaagtcctcacgcgccccgccccggcctccccgtgcgcacgcgcgaacgcggggtgggccg

SEQ ID NO: 2771 - DNA, 478 bp, Homo sapiens
  source 1..478: mol_type = other DNA
cagctactcaggaggctgaggcatttggtgagggccgggagatacttctatgtggagaggctgcagcctgtaccatccaagagggcccggcagtttggagtgaaagcttagcttcccaacgggtaaatgaacctgcctcccattcacagggcggcctctggctggaggccaatttggcaaacagcgcacaccgccagagcgcccagcccgcgcacgtgcttccggcgcgcgccgaagtcctcacgcgccccgccccggcctccccgtgcgcacgcgcgaacgcggggtgggccgggcctcgcgtagcccatctcctcttcctcctcgcggtcgcggccggacggagggtggagggccctgcgcctgcgcggagctggagtccggctgggccgcagccgctgggagaccggcggttgccgtggggaccggtcgggcccctccctcctccggtcccccgccaggtccttccccaccgaga

SEQ ID NO: 2772 - DNA, 653 bp, Homo sapiens
  source 1..653: mol_type = other DNA
ttgatcaaaatctgtgtcgcccccggccgcagcctgggggggctgcaaataagtgggccagggacctgggcctgggcccctcggactggcaggcacgcccgcacccccgcgcctcgcgctctctacggaagcagccgcccccacggagcgggcggaggcccgggggccgggagcgcgcgtggaggctccgggactgaggcggcgccaccgcctcccgcctgcagctggagcgcgggccgccgcggcgacatcttgctcaggaggaaagcgcgcgggagagcgagctgcgctttagctgctgcgccacgcgcgcctcgggcctgggcgcagaggatcggccgggcgcggcgggaaggaggtaaggcagccccgcgggaccgcacgcctagctcaggggacgcctccggagaccccaggaccacccgatcacgggccccgagcagccctcctcggcggcgcgcccctcgaccccagcagccccggtccccgcctctgctcttggtcccggccgccgggtgaggccgcccccgccccgccccctccccgccctcgccgggacccgccccctgctcccgtccgggcggggctccgggtttaaacgtcgcggcgggcagggccggcggaggggcggggcggcctctgtgtcgtgtacc

SEQ ID NO: 2773 - DNA, 391 bp, Homo sapiens
  source 1..391: mol_type = other DNA
ctcaggatgggacacttttgaaactgtaacaaatggggcaacgttgtatacttctgcacaaagtgtggggccacttttgaaactgtaacaaatgggacaactttgtatacttctgcacaacgtaatatctgtgttttgatcaaaatctgtgtcgcccccggccgcagcctgggggggctgcaaataagtgggccagggacctgggcctgggcccctcggactggcaggcacgcccgcacccccgcgcctcgcgctctctacggaagcagccgcccccacggagcgggcggaggcccgggggccgggagcgcgcgtggaggctccgggactgaggcggcgccaccgcctcccgcctgcagctggagcgcgggccgccgcggcgacatcttgc

SEQ ID NO: 2774 - DNA, 370 bp, Homo sapiens
  source 1..370: mol_type = other DNA
tccacaactgctatatatatatttagattttccaaaagttttttcctttcaaatctttttgcagctactgtatcaaggctctttttttaagaaagggaaaatagtgccacttctgaaactgtaacaaatggggcaacgttgtattctttgtacaactgtcgcccaggctggagtgcagtggcgcaatcctcaggatgggacacttttgaaactgtaacaaatggggcaacgttgtatacttctgcacaaagtgtggggccacttttgaaactgtaacaaatgggacaactttgtatacttctgcacaacgtaatatctgtgttttgatcaaaatctgtgtcgcccccggccgcagcctgggggggctgca

SEQ ID NO: 2775 - DNA, 275 bp, Homo sapiens
  source 1..275: mol_type = other DNA
ccttgcaaaggagcttagcaaataacctactggcatctccctcccgctggcagaagcaacgtataccatgatcttaggagctctctccttggacaactggccagttttacctttcggcgtcatcagcgtggatgatcctcagcttggaatgaggaacatctttcatttcacaagaggttcagcctaggcgcagtcaagaagggcgcctggctttccggcttcacgtccctggaagctcggcactgcagcggttctagatctggggccgccggctg

SEQ ID NO: 2776 - DNA, 554 bp, Homo sapiens
  source 1..554: mol_type = other DNA
ctgggggagggcctcagcccacatccctttaggagacccaagggcgctgcgcgtccctgaggcggacagctccgtgtgctcaggctttgcgcctgacaggcctatccccgggagcccccgcgcctcctcgcgacagctgcgcgccctccggccgccggtggccctctgtgcggtgggggcgtaaaggagagggagttcgccttccttcccttcctgagagactccctcttcccggtagtcgcaagtgggagtttggggaaccttcccgagcgcccagggcgctcagagacaggtgcggttcccggagcgcaggcgcacacatgcacccaccggcgaacgcgcctcgccccaccccatcccctccggcgggcaactgggtcgggtcaggagggggggagacactccatatacggcccggcccgcgttacctgggaccgggccaacccgctccttctttggtcaacgcaggggacccgggcgggggcccaggccgcgaaccggccgagggagggggctcattcctgcggggtggcgcggagggaatgcccgcgggc

SEQ ID NO: 2777 - DNA, 560 bp, Homo sapiens
  source 1..560: mol_type = other DNA
gaaacgatctcaggccgggcgcgggcggatcacctgaggtcaggagttcgtcccagctacttgaaaaaaaagaaacgatctcttcccttctcaaagttattgagctgacacgcagcgaagtcctctcagtggtccctccgcacctcagccctgtgcttggcagcgagacgagtgacagggccgccccagcatgggtctcccgggccgcggacccgccccacgcctcgcgtctgcgcgctccgcccggtctgccggcgtgagaaagagctccctgcgcccagtacgcaggcgcagccgtgctcctgggcttcccgggcctcgtcccagctggcgcgcccggcgctcctccgccagcgggcagttgggggcgctgcagggagggcacccgagcgggttgggggcgctcggaagggtggcttgcaaggtccgggtagctgcagtccccggagtggggcggagaggcgcggcaccgcgcggacgaggatggggcgggggcgggcgcagcccgagcagccagcggggaggggcgggcgccaccgcgtccacgccctttgctcggg

SEQ ID NO: 2778 - DNA, 449 bp, Homo sapiens
  source 1..449: mol_type = other DNA
gtattaagatgaaacgatctcaggccgggcgcgggcggatcacctgaggtcaggagttcgtcccagctacttgaaaaaaaagaaacgatctcttcccttctcaaagttattgagctgacacgcagcgaagtcctctcagtggtccctccgcacctcagccctgtgcttggcagcgagacgagtgacagggccgccccagcatgggtctcccgggccgcggacccgccccacgcctcgcgtctgcgcgctccgcccggtctgccggcgtgagaaagagctccctgcgcccagtacgcaggcgcagccgtgctcctgggcttcccgggcctcgtcccagctggcgcgcccggcgctcctccgccagcgggcagttgggggcgctgcagggagggcacccgagcgggttgggggcgctcggaagggtggcttgcaaggtccgggtagctgca

SEQ ID NO: 2779 - DNA, 684 bp, Homo sapiens
  source 1..684: mol_type = other DNA
aacttggctttgagtttcctaaaagttatagtaaaaaggaacgttaagacgttttcattttagaaattaagttatccttcactctactgcagagaacaagaacgtcaagtgctgtcagttttcctattttgtcaaaatgtccaaaacgctttctaagttcaaccgcccttaccgggcaatgcgaagtccagggcggacagcacagccctgccagcactccctgccttcgcgaatggagcgtgccgaagccgctccagcccagagtctgctggcggcaccggaactgggcagggttggggggccccccatctgggcccggccttaggtagggggatctcctctggaccagccccgggtggggggactcacctcgggacctggctgcccgcaggggctgaccgcaggtgggggactcacctcgggatccggcccggtagggggctcagctcgagacaaggggaggacggcggcagcggcggcggctgctgtcccggtgcggcggaggccgctgtacgggtcccgcgtccccaccacgtgggaccggtacccgcgctccttccgccggacgccggcggcgcagcggggaggggctgcacgcacgccaggcgtcgccagccgagcgccgaggcgcctcgcccattggcggagacggttgcgcgttggaggcccgagcggcccagcccg

SEQ ID NO: 2780 - DNA, 664 bp, Homo sapiens
  source 1..664: mol_type = other DNA
taagcactctcctgcagcagctagtctaactctggctcccccgtgtcacacgcggcatttccttttcccctaaggcccgcgggcgcccctgcgcaggaacgcgacgccagtccaggtgtagccgccgactgcaggccacgccgccggccgcagcccgggactcgggaggccgagggcggaggcgcggccgtcgcgcccgcgcagagccgcccgccgccccccagccccgcctcccgcgccccacccccaccgcccgccggcgggagccaaggcgcgccccgccgaggccccaccgccccggcccccgcccgcccgcgcgcgcgcgcgcctcgcgaccctcccggccctcccccaggcggctccggctccccccgccgccgccgcctccgggatcgggttgcttcagggtctcactccgacggccggctcagctgggcccccgcgccccgcgccccgccgcccccgccgccgctctgggcggccgctccatgactgactgacacggagcgggccgcgggctgggccgctcgggcctccaacgcgcaaccgtctccgccaatgggcgaggcgcctcggcgctcggctggcgacgcctggcgtgcgtgcagcccctccccgctgcgccgccggcgtccggcggaaggagcgcgggtaccggtcccac

SEQ ID NO: 2781 - DNA, 378 bp, Homo sapiens
  source 1..378: mol_type = other DNA
gtgcaggggtcattgctttacatcttgattgagtgtctgatctcaggtcttgcaatacatctgcagagagaagagcaggcctgggtaaaccacttaacaactctgtttcctcagtgagttgcaatcatgattggggtcccacctcccaggcccccctgcaggtgcagcaggaggagcaaggacactggcaccaggctgcagccatgaaacaaggagattggagctcgattctactcctccaggttttgcaaaagctgtgagtttgaaaagaaacaaactcaaactttgagagtaagcgcaacaaagccccagtggcacaggctgtatttgggcagcaagattgccttggctgggaaccaaactcatcctggtttcctg

SEQ ID NO: 2782 - DNA, 624 bp, Homo sapiens
  source 1..624: mol_type = other DNA
tcacaagtacatagattatgttacaagacagattcttgtatcgttaaagatgcttaatgtgctttttaaagaacgcaacgaatgagaaagaaaagattttaaacaatatattattgctttccttcttcgtgtttattgaaaagaacaactctaccattgatagctctgtcacccacagaaaaatgttcttttgaaaattaccttctcagctatatagataaataaaatcgttgctgcccacgtgtgcgcgcgctccagtcgggtcccggggcagccacctgtcactcacgggggagggggcggccggcggggggagcacgctgaggggcgggcggccgggggcggggcggcgcccaggccctcacggcggagcccggcgtgctgcagccatggagacgcggcagtcccctcccgcggcccgcgccccggcccccgcagccgccgccgattggtcgccgcctccgaggccgctgcttcctgctctggtgccgcgcggcgccgccggcccggggcggagctcgggcgccgagtgcgcgccgccgccgagcagtagcaccgcgcgggaggaggagccgccgccgcgcccttccccttcctccgctcctcccccggcccccaccgcgc

SEQ ID NO: 2783 - DNA, 574 bp, Homo sapiens
  source 1..574: mol_type = other DNA
gagcactgaagcctggatcatgcaatattaatggatattttgagttggcacccttaaattacaggtcctaattagcgagattcccagaagctggacagcagctggcagtgacccccaggaaacctcggcagcagccgccgccgcgggtgtggtgacctcgggcccgccgcctacctggagcgtttcggcggcgcctggttcagaaccaccggggcggacagctccctggagctgcacgcggactgcggaaggggacagtgagcgggatcggcccgcactccgtccgcgggcccggaccgctggaagcacccgggtccccctcccctcccgccctccccctcccgcgctgcgcgtggcggtcccgggctgcgcgtccctgtaggaggagaccggcactgccgccggcggccctccccctaaccgccagccccggccgcgcgccccgccccgccccgcggaggagggtgggggcgttccccgcgccgggcccgcccagctcccccgcggctgtccgggccgggctccccattggccggcgggcgggaggtgaggggcggcagggcccgcctctggc

SEQ ID NO: 2784 - DNA, 408 bp, Homo sapiens
  source 1..408: mol_type = other DNA
aagaaaaatgaatcatcatcattttttggttgcaccagtactggccacaacacaaaaatttgtccattcctggttgaaattaaaaataaatgtgcatgcacatgtatttgtctgcctctgggcgggggtctccatagaggcgttagcgcccaccttgtaggacaatttttccacggtgggggtgggagggagacccgctcaccccttttgaccccagccacgcctcctagggaggtgggcagccttgcaggagcccgcgcgaggctgcagtaccgccctccgccacatgagggcagcacggcctacccgtgcagcagcggcggcccccgcgcccctcttggccagagccaggcgcaggccggcttgcggtgccgtcgttcattggccgcggcgcgggcgctgccatgt

SEQ ID NO: 2785 - DNA, 284 bp, Homo sapiens
  source 1..284: mol_type = other DNA
tgtgttgaagcaggatcttccagcaagtcttacctataggaaaataagaattataacccttttactggtcatgtgaaacttaccatttgcaatttgtacagcattaacagtctccccagctacactggaaacttccagaaggcgggtcagaagtggcccccgtgttgcctaccgggctgggtcagaaggcctgggtggttggcctcaggctgtcacacacctaggtctgtttaagacttcctggaagaggtctggctccagcctgtgcacaggcagcctgggaa

SEQ ID NO: 2786 - DNA, 440 bp, Homo sapiens
  source 1..440: mol_type = other DNA
ccagactggtcttgatctcctgacctcgggtgatcaacccttttgtaggactataacaacaaggaactttattaatatgatgtcctctctcctctatcaggggtcaggttggatgaaatctaacccccacctgcctttgtaaataaagttttatctgtgtcacatctgctgctttgtcactacaacagcaaagttgagtagttgcagcacagactttgcgtggcccacaaagctgaaaatattcatggtctgggccttcagctgtgttcacataatgcatccccctgagcgcactaagcagaggtgccgcctctgagtggaatgtgccaggccccagagctgcctctgagtctgcaggagtgcagagtgggcagagggctctctctgctgttttccatctggtgagggccactcagcccagtggccctctgagctgttcc

SEQ ID NO: 2787 - DNA, 558 bp, Homo sapiens
  source 1..558: mol_type = other DNA
ttctcacctgagtcctgttagtcttgttattttgtggtctgtctgggacacacctcacacctgggccaccgggtacttcatgcacccacctggccccgaggggcggcgggagctgacttgagcaccagatgccccgaaccttccaggtcgccctccagcctccgggctgccctgcgcccccggctatctgcagctcaccgcgccaggccccgggcccagcgtcctggacgggcccagaaggcagccagcggcttgttgaaaaaagtttccggcggtcactaccgggaattaaccacggccaccctctcagagcgccgggcgcggactcagggacacgccggctaccacctgagccgggtaaggagcccgacctgcggcaccgcggtcccggagggaggagctcccggggagggggccacggagggccggggtcccggggcttggggagctgggttttggagacccgggtacgcggcggtgcagggcggggttcccggagggggcggggctccgggtggcgcggggcggggcgagggcgggcacagcgaggggcggggc

SEQ ID NO: 2788 - DNA, 498 bp, Homo sapiens
  source 1..498: mol_type = other DNA
gataataatgtctttaacccacattcatgacattccaaaaatattctgaggatttctggctcacatttaaaataggactttgcaagttatttctaactggataacagctgaattctcacctgagtcctgttagtcttgttattttgtggtctgtctgggacacacctcacacctgggccaccgggtacttcatgcacccacctggccccgaggggcggcgggagctgacttgagcaccagatgccccgaaccttccaggtcgccctccagcctccgggctgccctgcgcccccggctatctgcagctcaccgcgccaggccccgggcccagcgtcctggacgggcccagaaggcagccagcggcttgttgaaaaaagtttccggcggtcactaccgggaattaaccacggccaccctctcagagcgccgggcgcggactcagggacacgccggctaccacctgagccgggtaaggagcccgacctgcggcaccgcggt

SEQ ID NO: 2789 - DNA, 392 bp, Homo sapiens
  source 1..392: mol_type = other DNA
cagaaagttcaaggtattctacgaacaccttgaaatgagaatttttacttccttgatgaaacctttaaaaagcatcgtaggtgaattcaccatctctctgtcaaaggaaccaaaatgtcaacctaattgatctttaaatttcgtgagttctctatcagtacagatatggccgaggcagcagtaggagtcgctgccaccccatccacgctgcagtccagaacttccgattctgtggagggtaagacgtcagacgccagaccggaagacttgcgccgcgcgggcttcgtagtcccggcaccggcaaggcggccccgggctggccgagctgggactaccattcccagctgccacggtccacctgcccgccgtaggttagaggcggggaggcctga

SEQ ID NO: 2790 - DNA, 857 bp, Homo sapiens
  source 1..857: mol_type = other DNA
ccaggcgtctccctccgggggcgggctccgcaagccgccgggctggttgctcgtccgcccgcccctccctcgccccttcggcatcctcgggaggccggcggcgggaacagggctgccccgggccacctgccatctccaggagagaggccgccctggccccaggagcatgctgtcagctgactcgccgccctgcccaaaggcggctgcaggagggcgcgcggcggcgtgggtggcagcggcgggaagctgcccgccaggacccctggccgagccggctcccgcggatcgcgcgccgcagccggaggcgtgaggcccgggcgacccgtaccccggcccgggaccccagccccgctgccccgccgccccggccgactcggacgcccgccgccgccccgcactcggcagagtactggtccccccagtccccggactgcgggctgcagccgccgccgcccgccggggcctcctgctgctgccggtgctgcagctcctgcttgagcagggagagcggcgagtagtgctcggtggccagggcgcctggccgcagcccggcggacaggacccccagcagcagcagcagcaggacacgccgggcggcgcccgcggcggccacagcgccgccccagaagcagcagcagcagcagcagccggcaggtgccatcttccaggcgcatgcgcgacagcccttgcccggtcaggcctccccgcctctaacctacggcgggcaggtggaccgtggcagctgggaatggtagtcccagctcggccagcccggggccgccttgccggtgccgggactacgaagcccgcgcggcgcaagtcttccggtctggcgtctgacgtcttaccctccacag

SEQ ID NO: 2791 - DNA, 281 bp, Homo sapiens
  source 1..281: mol_type = other DNA
acctgcccgggtctggggcccccagccgccccccgcggcgagtgggaggcagcaggaggcgggctggattccgccctcggggagggccgggggtcctgggaccagagccaggcctcctgccctcgacgtcctgccggttgtgagccagagcctcgctgaagctgggccgccccctgggcagggcagggatgtggaggcgagcccggctgctggacgcggacgccacccggacccggggcccgcgcaggggcctcgaggagagggggcggggccccttggtt

SEQ ID NO: 2792 - DNA, 456 bp, Homo sapiens
  source 1..456: mol_type = other DNA
tttctggaaggcttatctgagagttgcagatctacacaaggcagatgaggacaaggttgttaccatctcttcaactttggcacaaactggaagcaagctgcaaagtagtgagcacactgcctgggtctgtatttgcagacatgagtattatgacaagccagtggtcccggggcgtcctgacttccaaggctctgggccttcgtgctgcggccaggagcgcgtcgccaagcgcctccccaagggtccccctgcaggggttcctgtcccctaggcacagagccccaagccctgggcgcaggctgcagcttccccctgcctgaccccgccagcctgcgcctcctcacccggggactagcagaagcctgggcccgcgcctggcgctacgactccgacttcaatattcatatcgttgttaaataaacgatttcctaatttgtatctgtttctctgtaggca

SEQ ID NO: 2793 - DNA, 745 bp, Homo sapiens
  source 1..745: mol_type = other DNA
actcctcggcgcgccgcgcggggaggcagcggcagcggcgggagggaggcggggaggggattcccgagccagccggacgctcgccctccgcccgccggctgcagcgtcgcgcggcccaaggtcagaggcgccgcaggagcagcagcaagccccagggcgcagtcagccggcgtccacagccgcccaggagtagggtgagcggctgtctccgggccggtcgggtcccgccgaggtggccgcggccccagcgacccggcgggtggcggcccaggggtcggcgagcaggcagctggagccccaccttcggctcccgggcgctgtccgccgcctcgtggtgctgatcccagccccacggctgagcggcgggcctcggggtagccgcccaccggagccagagcagcgagcgcacagcagcccggccgctggtcctggggtggagaggaggcgcgcgctgcagccggcggcggcgctggtgctgattcatcacctagctcctcgcaggccaccgcgagggcagccgaccggctccggaatctggccgcaggttgaagccgctggtgcgggaccctcgggcaggaggtgaggaccccctcccttctctcgcccctcaatcatcttagggcggtggctacaggacagagagaggggcgtgcccctcggctgtgaagtgggcatgcccgtgtgatgcccccgcccgtcgtctcaccggggcgcaccgcgctggtcctcctccgccagtctcccg

SEQ ID NO: 2794 - DNA, 305 bp, Homo sapiens
  source 1..305: mol_type = other DNA
atttcttcatgaaaatcgtgggtgaccaaccaaaatgatttgttaaaaatgtctagaagttctaaattttcctgaagtgtttaaaactctatagagatggggagactccaattctccaggagctttctgaaggccccagggccttgttgtcctggggagcctaggggccagccctcttttccctgggcgcctaccgagtagaggagcacggccctacttcgcctagggcggcggcaccctctgcagccgctacacaggatcccgggcgccgccatctcagccaggacggaagccgcgcagggccc

SEQ ID NO: 2795 - DNA, 414 bp, Homo sapiens
  source 1..414: mol_type = other DNA
aacagttttaactattattcctactgtttaggtgaacttagaattttgagcagtcattccaaaataaaaatagcttttaaaatatcacgctgtaaatttaagaaatgtgtgggtgtcaccttctcccgggaaagctcttcagagtatgaggcaccatgcgactttaataggctcttttattttccttttcccccatcaagacaaagaatttagccttggtgcttcctacaagcaagtaggatggtccccacacttgtctgttctccacgtgggctcctgggaccccgcactcaccagaactgggaggcgtggaggaccccggcccttgctcctgcgaggggtcagccgaggaatcaaccctcattctgccgcgctgcacccccgcttccgggttccgcgactgcgcgcatgcgc

SEQ ID NO: 2796 - DNA, 406 bp, Homo sapiens
  source 1..406: mol_type = other DNA
gggtgtcaccttctcccgggaaagctcttcagagtatgaggcaccatgcgactttaataggctcttttattttccttttcccccatcaagacaaagaatttagccttggtgcttcctacaagcaagtaggatggtccccacacttgtctgttctccacgtgggctcctgggaccccgcactcaccagaactgggaggcgtggaggaccccggcccttgctcctgcgaggggtcagccgaggaatcaaccctcattctgccgcgctgcacccccgcttccgggttccgcgactgcgcgcatgcgctgcagggccctgcgcggcttccgtcctggctgagatggcggcgcccgggatcctgtgtagcggctgcagagggtgccgccgccctaggcgaagtagggccgt

SEQ ID NO: 2797 - DNA, 631 bp, Homo sapiens
  source 1..631: mol_type = other DNA
gcacccgctgcagttgggccatgtggtccgcatcgtattccactaggtccccattgctccagcagatgcctgcagccttccaccttctcaagcagggtggtgagagtgcgctgctttccttcctcgcctggaccggagccgtcgcgggaggcacccccgggggtggagaaaaagccggcctggcctcggaggtggtctcggccccccgccccaccgactccctcctcccctccagaggcggcggcggctccggcggcagcagcggcaggcagcaacgtaagcgggatgctctccaggctgcttttctgctcggtcagcaaatggctgagctggtacatctcgctctccaggtaggagatctcgcgggccgtctctatgaactgccggtaggccgtctcctccgccagcgcctggatgcgctgccggtgctcctggaggtcccggtccctccagctgccgacgcaggcggctcgcgtccggtcactatcggcgccgcagccgccgcggctgtctagacccacccagcccgccgggtctgagcgtcagacactgcgcctgcgcaagtgggccgagcgcagacattgcgcctgcgcagcaatgccatcggttaaagcgcatgcgcaagatgagc

SEQ ID NO: 2798 - DNA, 580 bp, Homo sapiens
  source 1..580: mol_type = other DNA
cgggaggcacccccgggggtggagaaaaagccggcctggcctcggaggtggtctcggccccccgccccaccgactccctcctcccctccagaggcggcggcggctccggcggcagcagcggcaggcagcaacgtaagcgggatgctctccaggctgcttttctgctcggtcagcaaatggctgagctggtacatctcgctctccaggtaggagatctcgcgggccgtctctatgaactgccggtaggccgtctcctccgccagcgcctggatgcgctgccggtgctcctggaggtcccggtccctccagctgccgacgcaggcggctcgcgtccggtcactatcggcgccgcagccgccgcggctgtctagacccacccagcccgccgggtctgagcgtcagacactgcgcctgcgcaagtgggccgagcgcagacattgcgcctgcgcagcaatgccatcggttaaagcgcatgcgcaagatgagcaagcttcgtagggcccgagccctgtgagcccaggttctgcgcccactagcgcgtttccgcgaactctcgcgggattgacgggccgtctcgaga

SEQ ID NO: 2799 - DNA, 392 bp, Homo sapiens
  source 1..392: mol_type = other DNA
gccggcggtgcattgtgtggtggacgacttcctcggcaaggagaccggacagcagatcggcgacgaggtgcgcgccctgcacgacaccgggaagttcacggacgggcagcctccattgggctgctcatgagcagcatgtgctggacaggcccttctcggcgggcagcccctgcctgcagcagcattcctctatatagaagggactcgctctttcttgtgtagctcaagcacccaaagcaagtcctggttctgcatctgccttcacattgattgagagtcaaacgctgtgttcagttaggaatttgccggctgaccgcaaaaaggtacatttaaaataagcatttagtcgaaagactctgtattcattcctactgttttgaaacccgttacaa

SEQ ID NO: 2800 - DNA, 277 bp, Homo sapiens
  source 1..277: mol_type = other DNA
agctaaagtttcacattaaattcttagggacgggtgaagatgaatccttatatagagaattagaggctttccaactggtgctatgatctggcattacagcaattactgaactaggatggccgcccccgattcacagcctacggtgagatgcagaaaaacgctttgcagccgggccgactacaacgcagtggccgctctcacgtacttccggcctgcgtccggaggggaggggaggccgtcgccgctggctccgcccaccgcgtggtccaaggaccac

SEQ ID NO: 2801 - DNA, 772 bp, Homo sapiens
  source 1..772: mol_type = other DNA
aaagaaacatctttggcttatttctggtaaggtttttatgctctgtaaaacaaagaattgtattcatccgcgcagcacagattctattaaaaataaatgtgagagtgctcatttaccatcaaaattcacttttcaggaataatcccatcagtttaaattggatattggaatgagcattgttttgaactcggcgggatttcaaaggttttaaaaatgagtttttgattttttttaaaaccctcaaatttcattaccttaacaccatagtaatacttattttgttcttaaccatttctagaacagccttggaatctgggagcctgattcctggattcagtcaagttagaatttcctctgcaaaatgaggatcgcaatagccaccttgcaaccttgactggagcgagcctcgcacaccccgcgccggcctggaggaagagcagccatgattacgccgccttcgctccgctacccgcttgcggctggcgccctcctccagcaggtgtaggcgctgccgcgctgccccacgcctttccgccgctcgcgggcctgcgcctcggcgtccccgaggaggccgctgcgggctgaggtagcgcaccggcctctcggcgtcccagtccggtcccgggcggagggaaagcgggcgacccacctccgaggcagaagccgaggcccggccccgccgagtgcggaggagcgcaggcagcccccgcccctcggccctcccccgccccctccgccctcgcgcgccgcccgcccgggtcgccgcggggcc

SEQ ID NO: 2802 - DNA, 452 bp, Homo sapiens
  source 1..452: mol_type = other DNA
tttaatatttaattgagcagttatatgtgaaagaactattctatccctatgttacagataaggaaactgaggcagagaagttgcgtgcttcatcaaggtcacgctgttcactgccaggaatggaaagttaaaaaactccagctctgtaaggttctgcctaaatccctggcccggggcaccggaggtcccgctccggcggaggaactacaacccccacagcaccgcgcgcgaagctgggcccccctgagggaagggtaaggtgtcccgaaggtgccttcagaaaaaaattacgtacgtttttcgtgacgtagagtcgcctctctcttcaggcgcagcagagggcggccgcaatagtacgctcgcgcggcggtggcgggtggtccttggaccacgcggtgggcggagccagcggcgacggcctcccctcccctccggacgcaggccggaagtac

SEQ ID NO: 2803 - DNA, 486 bp, Homo sapiens
  source 1..486: mol_type = other DNA
tttaaaaataagaaaaatatttatccacatttaccaatttttgtaaatgttcattccttgcctaaagaacttcttttaatattttttgtactgatcagtactcaactgaagacttgaggaggttgctctctgaagctctctgtttcacttggaagcttcccagggatcactgctccatgcaaagcagacatttatccatatatcatatttttatgaacaaaatttttcttatagtaaacatacaatttttgtatacttttttcacttaacagtgtgttaataacattttcatgttctccatactatgaatagttttgagtagttttgagttagaagtatatgaatgcatacaatatttagccctatgtataattaggttattttagtttttcactgttaaagcatctgatgttctaaaagttcccaatatcttgatcatagtgctcctgatatggaagatatattgactgaatcagaaattaaatt

SEQ ID NO: 2804 - DNA, 369 bp, Homo sapiens
  source 1..369: mol_type = other DNA
cataactcagtgagtggtactcagccacctgaataaaggactaatgagtatattttagtatcattaatggatcacaaacttggagggctgtatggtttttcatttaagaaagtaattgtcgtgcaataaagttattaagccttgttcaagaatatttttattttgtacatcgtttcataatgatatatttcaaaagtatcttgaagtcatctggggttattaagcaaaacagatttattttatttagaaaaaattagtatgactgatttgctattgattttgtacttctataataaatgtgatacatgctatattcagagtttacgaggtttctaagaagctgtataccttgaaacaaagtttggccaa

SEQ ID NO: 2805 - DNA, 405 bp, Homo sapiens
  source 1..405: mol_type = other DNA
gatcctctcaagcaatcctcccacctaagcctgccgagtagctgggacaaacacactgattttaagtacaactgtgtgctttcagtcttaagatcttcagcttttgaattgcaagaggttttgtgccaagcctctggcacatggcacatgcctggaggtgagctgcttaagggcaaagagctcatagagcaggtgctacctagctccagtagcttccctggaaccagcccggagctgctggaagatgctagaagttggaatcctatctcatttctctggaaggcgccctcctgtaccccatcctggaggcttttgtttcttccagaaatgagtcagagtgaatgaggtcctgagcccggagacaggctgtgagggccgctggccccgcccgctccagcagcgtgt

SEQ ID NO: 2806 - DNA, 424 bp, Homo sapiens
  source 1..424: mol_type = other DNA
aaacacactgattttaagtacaactgtgtgctttcagtcttaagatcttcagcttttgaattgcaagaggttttgtgccaagcctctggcacatggcacatgcctggaggtgagctgcttaagggcaaagagctcatagagcaggtgctacctagctccagtagcttccctggaaccagcccggagctgctggaagatgctagaagttggaatcctatctcatttctctggaaggcgccctcctgtaccccatcctggaggcttttgtttcttccagaaatgagtcagagtgaatgaggtcctgagcccggagacaggctgtgagggccgctggccccgcccgctccagcagcgtgtgtgtgtgtgcgcgcgcgcgcgcgcgtcaggggccagagaagaaaggagccgcccccttcgtcgccag

SEQ ID NO: 2807 - DNA, 514 bp, Homo sapiens
  source 1..514: mol_type = other DNA
gatgcagttccagctgggccagtaagatctgcatgtttatggaccacctgcagcgtgctttcggaggcggcggctggcacggaggccgggctggcctgggatcgggttcctttccccagcagtgggcacactgttccggttcccggcgaggagtcccaccactcggagtccagggccagacagtgtggccttgactcgagaggcctcttggtccggagccctgtttccagaggtgagaggaacctcggcgcactttgggattcagctcagaggtggcaccacctgacaggcttagctggcctggtggcagcaccctggacgccagctgggaggcagcctgcagcgatggagcaaggcgtgtccgggcagcaggctctctggcaacagctgcagccctggctgtggccctccaggagatgggagccaaagctgccagcttggacgggcctcacgaggacccgcgattctctgcagacttggcccaggccgcaaggaacagctctggaccctggct

SEQ ID NO: 2808 - DNA, 232 bp, Homo sapiens
  source 1..232: mol_type = other DNA
tgtggggtcctctgggagaatccaccggaaaacctgggtatctcaaggactttcagaaaccatgaaggcttcatgtatgcttgagtcttgtgccactgcagtccaaatctaatgactagttaataacatgacctttttctcgtgtggccaccctgagacatcctcattatctgggtgacaccgtagggaggtgaggcatcagactgctccctgccgaatatttgggctttcc

SEQ ID NO: 2809 - DNA, 639 bp, Homo sapiens
  source 1..639: mol_type = other DNA
accctccgacccacagggcccggggcgccctccgggggccggcacacagcagggtctcgcttctcctgggctgtgtatgtagccccagcggccgaggctcacggatccgaccgcccggccgccgcgtctgtcccaagttgggagacgggagggccgggtggggtcgcgcctgcgccagggggcggctcagaaccaacggcgacggctctctagaagccggggtccaggtaggctgcccggccctcgagctcgcccagcgccgctcatgatgcgccccgcagccccctccccaagaagggcgtccgggcccctcctggacgcgcagctcccgcgcgccgcggggcctgggaacagcgcaccggctgcgcccggagccgggcggacggtgagactgacggcgtccgcgcccaatcgtggggcggggccgagggggcctgcaggcagcgaccaatgggagcccgcagagcgggcggggggcggtgccgctgggcgggcgggcggtggcatcgggagccggcgcggcagactgacggaggaggagcaccgcgcccccgccggccgcccgagcgcaggccgagagctccagccgcagccagcgggtccgggccgcctccgccggagcccggcgcggggagagtc

SEQ ID NO: 2810 - DNA, 442 bp, Homo sapiens
  source 1..442: mol_type = other DNA
aatgtttgttaaatgaatacatgacaatcttgtaaatcaaaacctggagtgctcaggaattgtatagttatatctaatcccacagattatacctataatttaaaaagatacgaaagattgtataatgtgtacatgcttcagtagagataacactttttcttcaggaagaagtctgactctagaaaggcagagtcaattcagtctagcttaaaagattcttctgagaccctttaatctttcagcatctaattcaaatgtcaagcaatttacaataatagtttcaaataatgcttcctcacaggtgagtcaacatttctaagaaagcagaaatcaattcttcctcgtcggtctaccgtgggctgagcgctgcctggagggcaggaccctccgacccacagggcccggggcgccctccgggggccggcacacagcagggtctcgc

SEQ ID NO: 2811 - DNA, 438 bp, Homo sapiens
  source 1..438: mol_type = other DNA
agtagagataacactttttcttcaggaagaagtctgactctagaaaggcagagtcaattcagtctagcttaaaagattcttctgagaccctttaatctttcagcatctaattcaaatgtcaagcaatttacaataatagtttcaaataatgcttcctcacaggtgagtcaacatttctaagaaagcagaaatcaattcttcctcgtcggtctaccgtgggctgagcgctgcctggagggcaggaccctccgacccacagggcccggggcgccctccgggggccggcacacagcagggtctcgcttctcctgggctgtgtatgtagccccagcggccgaggctcacggatccgaccgcccggccgccgcgtctgtcccaagttgggagacgggagggccgggtggggtcgcgcctgcgccagggggcggctcagaacca

SEQ ID NO: 2812 - DNA, 498 bp, Homo sapiens
  source 1..498: mol_type = other DNA
ttcaggaacttcctggagttaagaccaattactcatgttaaacaagatttatgggaggccattgttttggactaacctcctgcactaggtcctagcaacttgtgccaagtgccatgtaaccaaactgaactttgaaacaggcccgttttcccaaaaagattgtagttaacctgagtcagtacaataagctttatgaaatgatctatttctcgattctagatcctaaatataagccaattagatctttaaactaaacttgtaattttgtaagtttaaaactccccagctgattctattctgcaggaatgtttgagttaacatggcatccccctttgaggaatgcttccaggtcacaaaccttctacaaaagggctgtccactgccgcggcacaggcgccaatgccgagggctgaatgcgcaggcgcggaccggggactcgggagaaggcgcatgcgtggtcttgagggcggtgcttccggtcaaagcaccgcttggggg

SEQ ID NO: 2813 - DNA, 371 bp, Homo sapiens
  source 1..371: mol_type = other DNA
caggataatctaatattttagaattttaataactaagctcttctatcggtttctcgacttgccactcgcactggcccaggtctggcaccgcgctacttaatttaaactctcccgaaaactcccagaccatgtgggcgcggctcaccattgctccggagcacctgcggcgggggcggggtgggaccagccaggcgggcccagggggcgggcccggcccaaggtggtgggggacgggcccgggcgccaggggcgggacgaggctccggtcccatagggcgggcgcagactgggcgcccgggacgggaggccctggggactggcctaggggcgggcccggggggggcggggcggccctggcgcggctagggtgg

SEQ ID NO: 2814 - DNA, 554 bp, Homo sapiens
  source 1..554: mol_type = other DNA
actgtagaaaatttgaaaaatattaaaaggtacaaagttttattcctatgcagttgattaataatgcagatgtcattttattttgtaacaaaatacaaatattttacatatttgagattctacacagttttgcttcaatagtctttagacacaactttaatgtgtttaatgtctatatggtgtccatgctgtagagatgccataacttatttaaccattctctattttggaatatttagattgtacatgtgtatgcactatattatacaactacatgtatgtatatatagataccgtctatgaccaattgttttttcttaggacatatcactgaatcagaacaaataaaccctttcaaggttcttgagacgcacatttttgtcactttaaaaagaagtgacagttgggaaagttgggatgttttttcaccaaaaaacctaaggtcatgttttagaaaattcgaactcagaaataggacttctctgagactctccttttccctcaagtcccaataagacaaagaaggaaagtacttcagcgcttgctgttttgta

SEQ ID NO: 2815 - DNA, 517 bp, Homo sapiens
  source 1..517: mol_type = other DNA
acatgtgtatgcactatattatacaactacatgtatgtatatatagataccgtctatgaccaattgttttttcttaggacatatcactgaatcagaacaaataaaccctttcaaggttcttgagacgcacatttttgtcactttaaaaagaagtgacagttgggaaagttgggatgttttttcaccaaaaaacctaaggtcatgttttagaaaattcgaactcagaaataggacttctctgagactctccttttccctcaagtcccaataagacaaagaaggaaagtacttcagcgcttgctgttttgtacacgcacacgccgcgcgcggtcagctagagtttggctgtcgggtcggggtctgggcgccaccgagcgcccgccccacctctggagtgcgcagaaggcggtgcgtcccgggccccggcagcccagcccaggcgctctggccaagtttgcgcgcggtctccgctgactctcgggttacctgagccggcaacctgggctttttatattgc

SEQ ID NO: 2816 - DNA, 497 bp, Homo sapiens
  source 1..497: mol_type = other DNA
aaccctttcaaggttcttgagacgcacatttttgtcactttaaaaagaagtgacagttgggaaagttgggatgttttttcaccaaaaaacctaaggtcatgttttagaaaattcgaactcagaaataggacttctctgagactctccttttccctcaagtcccaataagacaaagaaggaaagtacttcagcgcttgctgttttgtacacgcacacgccgcgcgcggtcagctagagtttggctgtcgggtcggggtctgggcgccaccgagcgcccgccccacctctggagtgcgcagaaggcggtgcgtcccgggccccggcagcccagcccaggcgctctggccaagtttgcgcgcggtctccgctgactctcgggttacctgagccggcaacctgggctttttatattgcaaggaaacagcggcgctgcccggaggagcggggcgggcgggcgcgcgggggagcgggcggcgggcgggagccaggcccgggcg

SEQ ID NO: 2817 - DNA, 207 bp, Homo sapiens
  source 1..207: mol_type = other DNA
aattctccttgaggctgggacccacactgatggctggcaaggccctgggagttctggggctatgagccctgtgtgtcctacctgcagggatgatagcagggcacctctgatgatgcactcagctgtgccagcgcctgcagaggcaaatgtcagatctgcagctgactgcttacttgtgcaacgctgaggcttaagttctcaggcctc

SEQ ID NO: 2818 - DNA, 413 bp, Homo sapiens
  source 1..413: mol_type = other DNA
cacacaagataatatatcacattttctataatagacctttgtaatttttgacaagtaattcacctctctatgtttatttcagagaaagcagagcacactctgttctgagaactcagtaatagcctaggggctataatagcccctagccagaggcccatctggtataaatggaaaaagttttataatttaactcattaaacttaatgcaaaagtataacataattaggaaacacacctttgatttctctaaagatgaaaatatgccggaccggcagcccaggtagtggccaatcatctcgggcttgacctccacctggttgaaggtcttgccgttgtggacgcccaccatgctgcccaccacctcgggcaggatgatcacgccttgcgcaggcgcttcagcaggtagtgccgct

SEQ ID NO: 2819 - DNA, 404 bp, Homo sapiens
  source 1..404: mol_type = other DNA
aactccactatgagagtgcattaactattcaacacatatttgaatttggaatggatcaaactgcactgagtgcaaaattgtaaattgcatcttatataaatgttttagaagaccataaacatgctttttaataaagactctgctgagagattaactcatatattttctaaaatttttatttcttgttcattttgtttctaagatattcactcacatattaaaaataacaactcaaaacatttgaagcaactctcttcatctttggagattaaaacaatacaaatatttattttcccaactcccccagctacctgggaggcagctcaccactgcactctgtcccgcgggactagcataccctcttgcccttgaaggccggaagtcggtcttacagataaaagcga

SEQ ID NO: 2820 - DNA, 413 bp, Homo sapiens
  source 1..413: mol_type = other DNA
cataaacatgctttttaataaagactctgctgagagattaactcatatattttctaaaatttttatttcttgttcattttgtttctaagatattcactcacatattaaaaataacaactcaaaacatttgaagcaactctcttcatctttggagattaaaacaatacaaatatttattttcccaactcccccagctacctgggaggcagctcaccactgcactctgtcccgcgggactagcataccctcttgcccttgaaggccggaagtcggtcttacagataaaagcgaagccagcggggcgaccctgcagtggcaggactcggcaccgcgccctccaccgccggttggtggcctgcgtgacagtttcctcccgtcgacatcgaaaggaaggcgcgtggactatgggcccg

SEQ ID NO: 2821 - DNA, 486 bp, Homo sapiens
  source 1..486: mol_type = other DNA
tgtcccgcgggactagcataccctcttgcccttgaaggccggaagtcggtcttacagataaaagcgaagccagcggggcgaccctgcagtggcaggactcggcaccgcgccctccaccgccggttggtggcctgcgtgacagtttcctcccgtcgacatcgaaaggaaggcgcgtggactatgggcccgggaggtcccttactgtccccgagccgcgggttccttgtgcaaaacggggtggcactccaatcgattgtggcgaacagtaaccctgtaaactaggcactgctgtccccgctttactggacagaacgttctcagccgggctttctgagccccagcagggaatcacacagtgtgagatacactgagaactgattgggttcagttgcatcaaaatccctaagcattttttttttttagttttaaaggaagaggagattgacggttttcctctttcttatcttctattacaaagttcattgt

SEQ ID NO: 2822 - DNA, 404 bp, Homo sapiens
  source 1..404: mol_type = other DNA
agcacatgcattgtgcaggaatcctagcacattgctataggtatcttcatttacatagggagtacaccaagtaaataactttgtaacttcattttatcctcttcagttacatagtgtgtacaccaagtaaccaattgaaacctctataggtatttaaaagcggcttgcttggtcatgacttatttttaatgcagagaaccaatttcagacctactgtgtctggaatactacattaacttttaacgaaggcctcgtttctcctaaaaataagagaccaggtgggttctatcgggttggtggcaggaacccaagggaagctgagctgcaccaagccgggctgggatccccctctctgcggccgcgcgcccggctccgtcggcgcacgcgcacgtaggggccggccg

SEQ ID NO: 2823 - DNA, 516 bp, Homo sapiens
  source 1..516: mol_type = other DNA
atgtctcttgacactgatcaacttacagtgtctgtcaatatcttaagttagatcatatatatatatattttgtttttttgagcagttctcagcctccagagtagctgggattacaggccccggccaccatggccggccaggctggtctcaagctataaaacaattcacgttttctattttttcttcaattgtgtatatttttcaagaaattactccatttaattttattccagttatcataaaatgaggcgcacaatggattgtggcaatttaattcaaacaagtcacaggctgcctgtgttagacaagatgaagattcgcagtctgggacgtctctgtctgccacaaacaaggctgtcagctagtcttctgagtacgtgcacgccagtaacgcgtacgcctctccagtgcgtacacccagcggcgcaggggaaacgccggcttcgcccactgcgcaggcgcaggagccgcgctctgggcctctgctcaggctctgccgcggacgacctcgaggcc

SEQ ID NO: 2824 - DNA, 597 bp, Homo sapiens
  source 1..597: mol_type = other DNA
gccgcccggcagcgagcctggcccagccgccgacgccgcagccgccgcccgtgaacggcatcgtgcggctggagccgcccgcatcgccagagcccgaacccgcggcgcggccacgcggtgccgcccaccctggtgccgctcatgaacggctcggccacgccgctgcccaccgcgctcggcctcggcggccgcgctgccgcctccttagccgcggtgtccggaaccgcggccgccagcctgggctccgcgcagcccaccgatctgggcgcccacaagcggccggcatccgtgtcgagcagcgctgccgtggagcacgagcagcgtgaggcggcagaccgccgccgcctgcgcaccggggcccggccgacagcctgtccaccgcggccggggccgccgagctgagcgcggaaggtgcgggcaagagccgcgggtctggagagcaggactacaggcccaagaccgtgcgcgacacgctgctggcgctgcaccagcacggccactcggggcccttcgagagcaagaaggagccggccctgactgcaggcaggtttgcctgaggcggaacctgctgaagcagcatagcacattggtactttt

SEQ ID NO: 2825 - DNA, 848 bp, Homo sapiens
  source 1..848: mol_type = other DNA
ccagaggaaaacaaaagcactcgatcactttgcgcggtgttccgaagggaacaccggcgctgcgctgctgcgctgccccgcgggcgggcgggcgccgcgtagccggctctcccggcagcgctccttcggcgcgcggggggagggggagcgcgcgcgcgggagggcgggcacgcgcacgaggggagggggcccgcgcaggcgccgtgcgagagtggagcggtcgcggcggcagcagcagcagcgacggtggcggcggcggagctgaggcgggctggccgctgacgctggcgctggagagcggcgacgccaggagctgtgagagagcggcggagcgacccggggcccgcgccgcgcccgagctccacgccgcccggccgccgccaccccggcgcggcatgccccgccgctcgggctgagcctgccccggcggccgccccccgccccctgcccccccggcctccccgccccccgccccgcactccgtgccggccgccgccgcgacctgctgcgctcccccgcgcccgcgcggcccgtcttcgccccggtctggaggcccgccgcggctccggccgagcccccaccgccgcgcccgccgccccgccgcgccgcgccgcccgcccgtgcccgggccggccggggggaactgctgccgcggctgcagcccctcacctcgcgcccgccgcccctcgtgcaccgggggcgctgcgcgggcgccgagccttcgcgggctttgccgccgccgccgccgcctttgcggccgccgccgccgctggtgggggagacgcggggtgcgcgtggtgccggtggggggcggcggcggcgccccctcctcctcctccgcctcctcc

SEQ ID NO: 2826 - DNA, 187 bp, Homo sapiens
  source 1..187: mol_type = other DNA
cttgataagcttctaaagtcctttaacaaacatctcatggatatttctaaatgctagagggtgtcaatattgcatatgactaatctagtctagacctcattttacaatcattgtgactttcacaaggcaaagtgacactttcatcttttgcagaatacagattctgttcatcttgctctgaaattaa

SEQ ID NO: 2827 - DNA, 292 bp, Homo sapiens
  source 1..292: mol_type = other DNA
gcatttctgtcgatatggcttgacttggggacccagtacagggccaagcctataatatttgctatcactgtctttttgtttcagagagacaagaatctcccttatagtaagtttgtttaaacaaagtacagttaatattactaaataaataacaaggaaataagaactgagtagtaacttaatgttttgatttaagactaattttaaagcatgcaatacatgtactaaaaagtggcaatataatggcttattttttatttcagaagttgaagaatctgccattgagaagcac

SEQ ID NO: 2828 - DNA, 250 bp, Homo sapiens
  source 1..250: mol_type = other DNA
gggctcaagggatcctcttgcccgagcctctctcttttctgtagagaataagtctcgctagatcgaccaggctggaaatactaagttagacagtatctgatatctacttttccaggtagaatagcaggtcccatgtttcagacaaaagaattcctttgtactcttcacagcgatgcgcctcccttcgccgccgcccggcggccgactgccggaggggagggggcgcccggaacccggaagtgcgagctgg

SEQ ID NO: 2829 - DNA, 140 bp, Homo sapiens
  source 1..140: mol_type = other DNA
gtttgggcgtatacagtgctagaagaaacggtgaggtttctgcttcctcgcttaaagctaggggatggaaatgtagttggtgcaagaaaatggcaggccgcccccgcaccggtccacgcaggcgcagggcattgcgggcc

SEQ ID NO: 2830 - DNA, 371 bp, Homo sapiens
  source 1..371: mol_type = other DNA
agttaacatattgacatctaagaggatacaagaaacaactggtatctctgaattgtgtaaaaaatcacaaaaattctctttttaaatctttcaattaaattatttttgtgacgagtcaaagagttttctgctaaaattttacagtactgttcacacaataaataagattctctttcatcagtgtaactgataacctgacttgcttttattttaccttttaaaacacgattgccagctgaccccggtctctctggggaagggctcggtcaccaagtcaccaaggccaggttcagctgcacctggagggggcccctctgcactggcgattgtcgagacccgacggagtttcccgtctacgacaatgacgccat

SEQ ID NO: 2831 - DNA, 420 bp, Homo sapiens
  source 1..420: mol_type = other DNA
tgtgcggccgcccagccagggggcggctcggacacagcggctgcggggggtgggggttcccgggaggccgaggccccgaattcgggcgccgcagggaccgctccttggccgggcccagcgactcccaaagagatctgaccctggcacgtccagcttctcccccccaaaaccagcaggcccgggggagagatggggagggcggcgggtccagcggctgctgaggcagaggctccggctcctcctcctcccgcggcggcgtcccccccggactggaggtccgggcccccaatcgcgctgccctccagaggacggcggcgatggaccctctgcagctccctccgggcaaaggtccaggcggtggccgtggcggcggcaagaggcccgcaatgccctgcgcctgcgtggaccggtgcgggggcg

SEQ ID NO: 2832 - DNA, 180 bp, Homo sapiens
  source 1..180: mol_type = other DNA
gctgccctccagaggacggcggcgatggaccctctgcagctccctccgggcaaaggtccaggcggtggccgtggcggcggcaagaggcccgcaatgccctgcgcctgcgtggaccggtgcgggggcggcctgccattttcttgcaccaactacatttccatcccctagctttaagcgagg

SEQ ID NO: 2833 - DNA, 363 bp, Homo sapiens
  source 1..363: mol_type = other DNA
tgtcagaaagccctgtttatatcttccaaggaatctcaatcaaaagggagagatggctccgattggaatgtcatccgcgtttgtattaatgattatggattcactcttctttttagttttgaaagtgagaagtttcagactctcacttagttttttcactctaaaaggaaactagtagagttcatgtaacacacactaatgcctctttacatttaactttagtatgtgatagctgaaatttccagctgtgataaattgggaaatcctttgatttaaaagaaaaacgtgtagaatcctttagactcttaagaagacacaagggcgcctgtagtcccagctactcgggaggctacgagatcacgc

SEQ ID NO: 2834 - DNA, 273 bp, Homo sapiens
  source 1..273: mol_type = other DNA
aatgggtggtaatcatttaactacaattacaacttagaagaataagggttattatcatttaaactataaactaaatttctcccaaagttagtttgtccttgagcaaagaaaaccatgtcagatttctcttactgtcaaaattttgcaaaggcggtttcaacagaaattaacatgtctaggatagttgcttttggaactgaacctcttacaggagggcccccgcccagaggcggggcttgggtgggctgaccactcctccggtggaggcgggac

SEQ ID NO: 2835 - DNA, 380 bp, Homo sapiens
  source 1..380: mol_type = other DNA
cctgtcttaatttaaaaaaaaaaaaaaaagtaaaaaaattatttttgaatattgtaaagaatggtaatcaggagagagtcctccacttagatgtaggcagaaagaacacagaccacagagctgctttctagcaggcgcctccaggcagacctgggggaggcgacccagggtacgctattccagaggctgaagaatcacttgcagtgagctgagatcatgccactgcactctagccattaaaaaaaaaaagagtgtaaaactgaaattcttttttcttttctaataaacccctgagttctgtcaatgttaaaaagaagggtgaaaactagatcttgtccctctcaattgacatgttagaaaaaagctttgtaataggcttg

SEQ ID NO: 2836 - DNA, 377 bp, Homo sapiens
  source 1..377: mol_type = other DNA
tgccacagaggccactcagtgagagacaggtgggccccttgtctactccctctcaagtcacacctgcaatcccagcgcttcttgagccgctgcagtgagctaggattgcacctttgcactccagcctgggtgacagaacatagagagatcctgtagatgctatatatatattatatattattatacataattatataatatataataattttttgtaatttttttttttgtaaaaaaaaaaaattaggctcatcagaaagacgccagcaagttcgtggatctgtgcgtgctgcagaaatgctccaccagcaactgctgaacgtggccaaggccagtgaggtcacgggcaggtttaacagccagtttaaaacctgtgc

SEQ ID NO: 2837 - DNA, 418 bp, Homo sapiens
  source 1..418: mol_type = other DNA
tttaaaaagaaaacgttaatgactcgctccctttatagtatcattctggtttattcagattaagaaagaaatacactactatgaaactcactgtcaaagggcacttaggtccgttggcttcccctaattacttacttgggtaaagtgacagccaggcgctgggctcatgcttgtaatcctcaagaccagcctggccagcacagagcaagacttacttaagtaagtaagtaagtcagtccattgcaatgatcttacaggtaactgtcatttgagagaagacttttcttgtcttttgataggctccatgacaattcaaaaggtgaatcctatgaaagtcccaaagtaagttgcccagcaaaatatattatgacattaaactgtctctagatagcaacagtttgattctaaatggagacca

SEQ ID NO: 2838 - DNA, 518 bp, Homo sapiens
  source 1..518: mol_type = other DNA
tgggtgacagagtgagactccgtctcaacgtccccgctttccggctgcctcggcgcgggcctggtgggccaggagggctcccacccggggcaaagcctcaagacgcggggccggcgttctccctggaaggctcgctgcggccacccttccccaggtccccgggagcaccctgcgttcccctgatgagtcaccgctccaggcgcggacactcgggcttcctcgccccactctacgggccggcgtgatttcactcggatttccttcaaatctgaggcaaagcgcatttcccttcgcggctccgggcagcctccgagcaccgggtctccggcactacctcccctgggccgtggggtggcagcaaacgtcaagggggatgcgcatgctctgtgtggggcctcgcccttcgcccccgcggccgccgagtgacggaagcgcgaccgcgggcgccccctgcctgggcccagagcgggacttcagctcccggccggctggctggcgcgtgtggagccaggcggagg

SEQ ID NO: 2839 - DNA, 769 bp, Homo sapiens
  source 1..769: mol_type = other DNA
gtcgctcctagaaccggggcgcgaagggcacccccgcctccagcacgcgccctccgccctcccggcctcgctccccccggagtgggggcctcgccggcccctggtccccgtcactcagcaacgtcgggtcagccttcgccgggttagtggcgacgcggccgcgcgaattcgcacaggtaccccgccttggccggaggcttccgaggcgtcccttggtgcagggtgggaagcggcccgcgccccaacggcccaggcgctggagctcaccccgagcgagggcggtacctgaggcttcggggagcccgcgctgaccgcggccccgtccccagacgacccctccagtggtcccccggccacgcgggctccgggggggcggggcgggggcgcggccctttgctgggacagggggcgtgggcccgagtagcgggcggggggcgcgggcccgggctggggcgggggcgggggcggggagcgcgggagccccggtgacgcagcagtgacgtcggtggcagcgggcgggatttcccgggcgagaccccgcggcggagtgggcgcggccagcgtggaacgggggcgagggtcgcagagtcgccggctctcccttccccagtctgggcccccacggcacagggggccgagcagaagcccccagcgtccagggccgggggagggtccgcctgcgcccccaggcccgcgtggtcgggccctgcagggcgggaggcgcggcgcggggcggggccggtgacgggacgcggagaccccgcgggcg

SEQ ID NO: 2840 - DNA, 652 bp, Homo sapiens
  source 1..652: mol_type = other DNA
atcatgatgcacaaagggaattaatattggcctccttttctacaaatcttgccaacactgcgtgattattttaccaagtgctgtaatcactaaagtgttttaaaatctccagcgtcgctcctagaaccggggcgcgaagggcacccccgcctccagcacgcgccctccgccctcccggcctcgctccccccggagtgggggcctcgccggcccctggtccccgtcactcagcaacgtcgggtcagccttcgccgggttagtggcgacgcggccgcgcgaattcgcacaggtaccccgccttggccggaggcttccgaggcgtcccttggtgcagggtgggaagcggcccgcgccccaacggcccaggcgctggagctcaccccgagcgagggcggtacctgaggcttcggggagcccgcgctgaccgcggccccgtccccagacgacccctccagtggtcccccggccacgcgggctccgggggggcggggcgggggcgcggccctttgctgggacagggggcgtgggcccgagtagcgggcggggggcgcgggcccgggctggggcgggggcgggggcggggagcgcgggagccccggtgacgcagcagtgacgtcggtggcagcgggcgggatttcccgggcgagacccc

SEQ ID NO: 2841 - DNA, 251 bp, Homo sapiens
  source 1..251: mol_type = other DNA
ctgggccccacccccagagtttctgattccttagggatcctatcttgaatgatagtgtaacactgatttcccttcaactcatatatctttctcacttttaaaagtctgcaacaagcgcgccctgtgtccttcatatttttcatcatgatgttcacaaagggaattaatattggcctccttttctacaaatcttgccaacactgcgtgattattttaccaagtgctgtaatcactaaagtgttttaaaatct

SEQ ID NO: 2842 - DNA, 209 bp, Homo sapiens
  source 1..209: mol_type = other DNA
ggttgtagtgagccgagatcgcgccactgcactccagcctgggcgacagagcgagactccctcccacccagggtcctggtgtgggaatcacaggttgctgggccccacccccagagtttctgattccttagggatcctatcttgaatgatagtgtaacactgatttcccttcaactcatatatctttctcacttttaaaagtctgcaac

SEQ ID NO: 2843 - DNA, 615 bp, Homo sapiens
  source 1..615: mol_type = other DNA
gttgattctacagcaattcctgtcaatttgtagattatctgcttattaatagtttgtattgtttggcagaacttgaaaactaccgaacgattacagttcaatgccaaactgcctaccgcagcagtctgccagcagcgtgctgggcccagagccggggatgcagccaaaacctacagctcccaccctctggagggactggtgacagtgcgcactgtatacaaaccgtgtttgaacaggagtcggttggaaaatacaccactgcactgaattacttctgcagtggctttgcaaagctctttttgtttcttgaaagaagccgacgacctacacaatgggacaggttgacacccagggtctgacgcagcccactacgcagagccctgggaggaggtgcggacccagggtacgacccccgaccgctgagaaacccagaccgggccccggctgcagccccgcgggtcggcccgcccccctgccttccctattggctcggcagttccacgcgtcacgcctgcgacgccggcgctgccctcccagaggaggcggggcttacacgcgcgaggcggagccaagggcgcacgcgcagacgagcgggtctgggtccgtggggagtgc

SEQ ID NO: 2844 - DNA, 283 bp, Homo sapiens
  source 1..283: mol_type = other DNA
ggcgccgggcgcggcgcctgtagtcccagctactcgggaggcccgagatcccgccactgcactccagcctgggacagagcgacccttgcgacactgcattctggcctggatgacagagcgaaaccttgtctctgaaaaaagaactcagattttggggtttagttttatgtcctcaaggactggatggtcctcacaaggacaaacttaggtccaagagagggccactcgcagaagccatcccaatgaccttttggctttgagaagagcagtcctcataccagag

SEQ ID NO: 2845 - DNA, 285 bp, Homo sapiens
  source 1..285: mol_type = other DNA
agtagtttttaattaaaatattttaaaggtaacaaaagtttgccaccagaaagctagtggcagtatccatgcggcgccgggcgcggcgcctgtagtcccagctactcgggaggcccgagatcccgccactgcactccagcctgggacagagcgacccttgcgacactgcattctggcctggatgacagagcgaaaccttgtctctgaaaaaagaactcagattttggggtttagttttatgtcctcaaggactggatggtcctcacaaggacaaacttaggtcca

SEQ ID NO: 2846 - DNA, 435 bp, Homo sapiens
  source 1..435: mol_type = other DNA
ctttcaatagtttcttcgaattcaaattcctaaaatcctctgctgggggatggtttgatgacttggggcccccaccaatgggtggatgagcccatgaaaattggaccccggacgcggccgagcggcaatggggtgggcgccgttccaccacggtgcgggtcccgcgctctgctccccctcccggaggcgccgttcgctgggagtcgggctcgcaggcaccggcgcccaaggcgggaggttcggcttcgcccctcgccctccccctcgcggccattgggctgccccgcggcgcgcccgctggacggggcggggccctccgctctcccctccgctcccctcccctatttcccggggtgggaacgccgggaggcgggaggagagggggctgccaggggcgtccggttacatccccgccttcctctgtcctggccgcgg

SEQ ID NO: 2847 - DNA, 330 bp, Homo sapiens
  source 1..330: mol_type = other DNA
ctttcaatagtttcttcgaattcaaattcctaaaatcctctgctgggggatggtttgatgacttggggcccccaccaatgggtggatgagcccatgaaaattggaccccggacgcggccgagcggcaatggggtgggcgccgttccaccacggtgcgggtcccgcgctctgctccccctcccggaggcgccgttcgctgggagtcgggctcgcaggcaccggcgcccaaggcgggaggttcggcttcgcccctcgccctccccctcgcggccattgggctgccccgcggcgcgcccgctggacggggcggggccctccgctctcccctcc

SEQ ID NO: 2848 - DNA, 520 bp, Homo sapiens
  source 1..520: mol_type = other DNA
atgcaactaaatgtgtgatagtttcttacagcatcaatgagaaactaatacacgtgtattactcgttttgtagaaatcaaaggcattaataaaactaatagcagttaccatttattgagtgcttcctaggtgctaggcagtatctaatcttatgtagccctagaacaagatatgaggtgggaattaaggcccaataactagctagaatgtcttgaatcctagagcctggcgtctgcgaggactccaggagcgagctcagcctggtttcccggagaagaggtcgccccgcttcccccgcccgcaccccccggtgttttggaggcccgcgtggtcccgcctcattggccgccgcggagcccgaggcctcggggaggcggggcggccttcgccggctccgccttcctgccgcggcgcctaggcgaccgcccaggaccacaactcccacaaggccccgcgcttgggggcgtggccgaggagccaagcgagccgggggcggggccgcctgggggatgaagtgggg

SEQ ID NO: 2849 - DNA, 707 bp, Homo sapiens
  source 1..707: mol_type = other DNA
aggggggccgtgtgccgtcagctgccccacttctctctgaagcccagtgggctccatccactgacccgcggcccgcgcgcctcccggcaccggctacatcgctgggaggtgaggcgctgggagcgcgtgaggctctccggccagaggaggcagcagccgcaggcaccgtctatttcctcactcagtatacaaatttgacctcaaaaatacgaaatgtctgcatttagaaataaacattgtaaagttttttttttaaatttgtttttaaataaaggaattaacttctgcaaaacaccacgagtgcgatcccccgaggcgcggggcgcggctgggaagttttgggggcgcgcggcgcggtgccgggaccggggaggaggcgcgcggttctgggggcgcgcagtgcgggagcgcgcggccccggggatgggccggggacgggtagcgcgcggcccctgggacgcggggctctgggggcccgcagtctgggagcgcgcggccccggggatgggtgcggctctgggggcgcgcactgcgggagcgcgcggtggcgaggatagggcgggccggggttcgcggggcgaaggcgcgcggtgcccgggggagggcgggccggggcgcgcgggccggggcgggggcgcgcgggccggggcgggggcgcgcggggccggtcggcgcgcgggggcggcgggcgcggcgctgccaatcgc

SEQ ID NO: 2850 - DNA, 304 bp, Homo sapiens
  source 1..304: mol_type = other DNA
caggcctcacctgaggtcaggatgacgcgtgcctgtaatcccagctacagatctcaccactgcttcaatttggctgtataaagcaccgggggtcctgggtggggacccccggggttgccccgtggttcccctcacttcctgggcgccaaacaggctgcccaggcagcccggaggagcagcagcttgctgcccgtcgagcagtggtccgaggtcgggcggtgagaaagctttaccccgccccctggaagcccaccgagggcaggcagatgccaggcgcggcgcgcaacgctgcagtgccacgccc

SEQ ID NO: 2851 - DNA, 420 bp, Homo sapiens
  source 1..420: mol_type = other DNA
gaaatatgaaatttttcacatgactgggaaatgttaaaaatgtccattttcttgacagagtctcactctgctcagcctgagtggctgggagtacaggcatgtgccaccaatccagtgctggggttacaaaatgtctattttcaatagtggtttaaaacactcttggacagcatcatttttaaattactttttttgtaaagtgcaaaacaacaatagcacccatttgcgtcatactttatagttcgcagggagtaataactacgtaactagtcaatccaccatcttctatttgatataatgcagaatgggaatgataaaaacatgaattacatttcagagtttcaaaaagcaaaccagctttatagcaatgcttgaggttgggctgctaagattctaagataaaatacccttaaaaaaaat

SEQ ID NO: 2852 - DNA, 468 bp, Homo sapiens
  source 1..468: mol_type = other DNA
gtcaccaagaatttacgataattcttggatatattatacactaaatactattattatcctttctgttcttatgtgtgaaggcagagaaagattatttagagctcttcaaagattcctatttaatttaaaatatagttatgatggatgatagctttagttaaaatgtagcaatcttaaatatattcttcataaccaattccttaagtaatgggtataaaaccccacttaagcgtaatattttaaatatttgctgaggggtcccgggcggcagtcgtgtcagccccccgctaggacccgcccagggggacgtgggtaccgggcaggacgcgcgctctgggcgctggggacgcccgggacactcggggccccgccttgcgtcccagccccgggtcgcggcaccccggctcccgccccgcgcctctggagggaggtaccgagggacgcgcagcgaaggggctttgctaattg

SEQ ID NO: 2853 - DNA, 364 bp, Homo sapiens
  source 1..364: mol_type = other DNA
aaaaaaaaatttttaaattactatagtcccagctactcctggggctgtgtgaagatattcaattgctcctgactttatcaataatctaacatttcaacctaacattgatatctattttatgcaaagcattacactatgcactggagactgtataagacaagttccttttctcaaactacagtcgagttggattatgtcaagggtaaattcacctattcagattggaatgaattcctcaatttaggcacagaattgtgctccatactgcttaaactgttccctaagtgtccaatttggaggcgagtgacgcggagtggctgcgagtgagcttgggctgggcacagtccagcgtactgaacccttc

SEQ ID NO: 2854 - DNA, 392 bp, Homo sapiens
  source 1..392: mol_type = other DNA
acatttcaacctaacattgatatctattttatgcaaagcattacactatgcactggagactgtataagacaagttccttttctcaaactacagtcgagttggattatgtcaagggtaaattcacctattcagattggaatgaattcctcaatttaggcacagaattgtgctccatactgcttaaactgttccctaagtgtccaatttggaggcgagtgacgcggagtggctgcgagtgagcttgggctgggcacagtccagcgtactgaacccttctctactgtctggacttggatccgatgaccccgtggacctgggcgccccgggaaggccagcgcttggtccaggcaggcggggcctgtgcggtgaccaccctggtcctgaaaagtccc

SEQ ID NO: 2855 - DNA, 373 bp, Homo sapiens
  source 1..373: mol_type = other DNA
taggcacagaattgtgctccatactgcttaaactgttccctaagtgtccaatttggaggcgagtgacgcggagtggctgcgagtgagcttgggctgggcacagtccagcgtactgaacccttctctactgtctggacttggatccgatgaccccgtggacctgggcgccccgggaaggccagcgcttggtccaggcaggcggggcctgtgcggtgaccaccctggtcctgaaaagtcccagccccgagcgccctccctcctagacctggaggcctggaacagccaggtggacgtcggccgtgcaggaggccgagctgggtggcgatcagcggcgggtccctgtcgcccccgaggactgactcctgtcgcttcc

SEQ ID NO: 2856 - DNA, 349 bp, Homo sapiens
  source 1..349: mol_type = other DNA
acatacaataaaatgagaatggcatgcaaatttgtgccttttttaaagcttagtaaatgtcataatttgagagatttttctagatctgccctttattttagaattaaagtgctgtgttgggaacattaatcatgcctgacacatagtaggtgctcaatatatgtttactgtcaataagttacaattaacacccccatatggtaattcagagttttcatagcgcggtcaaacgccacacagcgtgtcgagatcagcacgaacttgcccgcgggaaactggggagcgggactacatctcccagagagccccggggccacaatcacaggccggaaggggcgggacctcccac

SEQ ID NO: 2857 - DNA, 296 bp, Homo sapiens
  source 1..296: mol_type = other DNA
cgcgaatatccaaatgatatttcgcgccgctaaccagccgctctcagagcgtgggtggcaggcgtggctctgctcggggccggccgctcccctcacgttcccggaggcctcggcggaaggcgtgcaggcggcctctgggcggcggctgcaggggagacagtggaggggcccggcgcccttgtccgcccgcacgtgctcggggcggggcggctggggcccgacgggcggggccgggggcggtggcggcgggggcgtggccgggcggccacgtgacgggcggcgcggctattaagccg

SEQ ID NO: 2858 - DNA, 377 bp, Homo sapiens
  source 1..377: mol_type = other DNA
acaatgtctgcatctccgtagtactgacatttgaaaactttactttgcacatacttattttaagtacgataaatgaaagaggaacaagagacaaattgctttcttgtccaaattgtctcaactttagacccatccagtggtttctgtgcaccaaaaccgtgcactttgcatcgattatctgcgaaaattctctacttggagattgggaccccagcggggcgcaggtaggaggctgtgcgctcgccgggtgcgctccggccccgattcccagcgcagccagtaagtggcgctgggcctcgggtttggcggcccggaggagcgggctgcggattacctgcagcagcggggagccgccgagctcctccccgcccgccccc

SEQ ID NO: 2859 - DNA, 293 bp, Homo sapiens
  source 1..293: mol_type = other DNA
aaaatttcaataatcacgattttactattagacttaaaataattatcattggtgatataaggaaccacaagcctttgttcataatcatgcctttatctcaaaatgaaaacccaagtgagttttatatcaatttgtcttaagatacaggtaatgattgaggtcagatcaaaactgtttcgttgcagtgagccaagaaaaaaaaggtgacattcaagtaaaacatcctttattagtttcacatttcatgattttttattttcagtgaataagttacccaaacttttaatctcaga

SEQ ID NO: 2860 - DNA, 265 bp, Homo sapiens
  source 1..265: mol_type = other DNA
tttcccttccctgccaaggggccaaaggtttatctctattgacacatacagataaaaaattttcatccaggaacctctatcagcagagtctgaatgtctttggctggtgaatcacactaagggagtctcagtcctgagatgatctattttttgcactgaattcattcaagattttattagttaagctctctttttactggcctcagttactgcaaacaaaaggatgagaatgtcagacatatcacacacagcttcacattggttc

SEQ ID NO: 2861 - DNA, 528 bp, Homo sapiens
  source 1..528: mol_type = other DNA
gcccttccccctgaaagccagagaccgagacaaaagtgatctgtctcctttatgtcattctaatccttacagaagaaagttcctctgagcaccttctgttaaaaggagaagccaacgtttcccatttctccaacttaggaagaagctgtgaaaaacggggatgaatgattcatttggtcctggctctctactctgttatttaagcataataataataataataataataataataataataataataataataataaatcatctgcttcctgaagtttgcacggggctccattctccaggcctccggcgcacgtacacacgcgcgggcgagcgggcggggtgtgcgggagcgcgggctggccgcgccgggggcaggactacagcctcccgaggggcgcgagggcgggaggccggggaggcccgggaggcccgggcggtgtggcggcggccgagccgagcccatccgagccggcaccttcggacgcccctgctcccagtcgcgcgcacgggccgggcgtctcgactccc

SEQ ID NO: 2862 - DNA, 490 bp, Homo sapiens
  source 1..490: mol_type = other DNA
ttgtagttcaactattacaatctcatttgaatttttatattttaaatatgtgtcaaatttataagtcacaaaataacataatgttaccaaaaggtttggcaagtttgtaagtttgactcataattttaagaacctctttactgtcatctggttccaagcaatagaaaagagaaaagataaaactgtggttcagatgcaattttatatcaattcctgcttttctgtaatcaactattatattaaaacaatatgcctttaatttgaaaatgtataaattagctatgcggttccctataattgtgtacgtctttaaaagaaataagtaagtagcttatttttcagttgtgggattatgaataattactatttcattatctacacttaaaatttctacacagaagataagaacgtgtaatgagtgattacatgataaataaaacaataaatatttctttctaggatatttccggaacggtttctgacaaccggc

SEQ ID NO: 2863 - DNA, 507 bp, Homo sapiens
  source 1..507: mol_type = other DNA
agtgagaaatatgatgtggaaaaagtttttaaatgtatgtttaaaaacacacaccaaaacagttgttgtctttggggattactattcacctaatttcatgccatgttaatgtattacctattcaaaataaataaaatacctaaaaagggaaaaaaacgttctgaattctttatgtgcttaacaggaagtgaagaaacaacttcatttatgttcttattttacattacaccacatcagtaattagactctaaattttcgattctaaaattagattctaaattttctagcatctggcaattcaaaatgttgatcgggagaatattaagaccttgcagagaattttccctggtagagcctgttaaaaacaatccatgaggaccctttagatgaaatttttgattggtcttaaccacaaaaatgatccacagatgaattatgaaaccatgtcatcttactctctaagggaggtataagatctccattcatggttaatcatgaatgaaaacg

SEQ ID NO: 2864 - DNA, 547 bp, Homo sapiens
  source 1..547: mol_type = other DNA
taatttcatgccatgttaatgtattacctattcaaaataaataaaatacctaaaaagggaaaaaaacgttctgaattctttatgtgcttaacaggaagtgaagaaacaacttcatttatgttcttattttacattacaccacatcagtaattagactctaaattttcgattctaaaattagattctaaattttctagcatctggcaattcaaaatgttgatcgggagaatattaagaccttgcagagaattttccctggtagagcctgttaaaaacaatccatgaggaccctttagatgaaatttttgattggtcttaaccacaaaaatgatccacagatgaattatgaaaccatgtcatcttactctctaagggaggtataagatctccattcatggttaatcatgaatgaaaacgcttaaaaatttctgtgtcttacacagaagatagaaaaaatagagtgtctccaattggatggattttttaaaaaatttggttattgtaatggacaagggaaattagccctgtggctcatgaatgcactagg

SEQ ID NO: 2865 - DNA, 602 bp, Homo sapiens
  source 1..602: mol_type = other DNA
gcaaccacaaaggcagaagcagctcttggatgagggaaatgtgtgctgttctaaatatagcacctgcctcctatacctgctagatttaggttgaatctttcactgcctgtgaaggactttacagctacccacgctttcaagcgaaggacggtattggaaggccttggggtccagcccagggcttaaagtcagttccattggaatgccattttcagagagttttcatcccagactctccaagggtggcaggctcttgtatcagccctgggacatgtgtcctctagcagtcaggtagttaggcaggcacctgaagacttcccaggaaggggagaaacccaattcttgccagcacgtggtgggcgcaggcgctcataaatacttaggaataaatgaatgtataagtgacgaggctaccctgcggccctggcccccaggctatcccgcgacgcgcgtccacgccgaccagcggaaggtgcccagccagtgggggcggggcgagctagccgcgaggacgcgcccgcgggggggcggggctacgaggacaggccgcggggaggggcggggccacggggggtgcgccggggaagagggcgggcccggcg

SEQ ID NO: 2866 - DNA, 497 bp, Homo sapiens
  source 1..497: mol_type = other DNA
gtccactccaagctagtttagggttaggtctaccatagcctttggaagagggagggaagataacttttctcatctctcctagtcccttccccaaatgtggcaccttttcaacaattttagtaacaaatttaaggcatcatagatgcctttaaaattggcatgatagatgttagagtgatcataaaaagactttatcaaatggggagcatgtttaacaatgtgctcacttcttccccttcaattccttgaattgagtctgcattatcattcctattgatctttgagcccagaacattactttgtggtctcctaaggtttcttccaattttttaaattacaatatccctaataaagtctttgttttttccccgacttatgtcaaaaataatttatcactacgtgaactgaattcaatttcgatttttcaggtttgaaaagcctcaacgggcccagcagccccggcgggtgtaaacactcccaacttccgaggcggtgct

SEQ ID NO: 2867 - DNA, 539 bp, Homo sapiens
  source 1..539: mol_type = other DNA
tttagtaacaaatttaaggcatcatagatgcctttaaaattggcatgatagatgttagagtgatcataaaaagactttatcaaatggggagcatgtttaacaatgtgctcacttcttccccttcaattccttgaattgagtctgcattatcattcctattgatctttgagcccagaacattactttgtggtctcctaaggtttcttccaattttttaaattacaatatccctaataaagtctttgttttttccccgacttatgtcaaaaataatttatcactacgtgaactgaattcaatttcgatttttcaggtttgaaaagcctcaacgggcccagcagccccggcgggtgtaaacactcccaacttccgaggcggtgctcaccatcggccatcagcgccagtgccactcgcgccctcaagaagccgcacggagttcgggccggcagcagcggctgcagtcgtatggcagtgagccgctgtctacccaaccgggttgacgcgttgacgtcacatcctctgggcggggccgcaaggaa

SEQ ID NO: 2868 - DNA, 463 bp, Homo sapiens
  source 1..463: mol_type = other DNA
tttttcaggtttgaaaagcctcaacgggcccagcagccccggcgggtgtaaacactcccaacttccgaggcggtgctcaccatcggccatcagcgccagtgccactcgcgccctcaagaagccgcacggagttcgggccggcagcagcggctgcagtcgtatggcagtgagccgctgtctacccaaccgggttgacgcgttgacgtcacatcctctgggcggggccgcaaggaacccgcgcaaatccgcaatcggctccgctcaaggggaggaggagtccctgggggtcgacctgcgcgtcacctccgaccctcctctcgggattcgggtcttccaggaagggaaggagagggtctggcgtgatcttcccaacccccaaccagtctttccgcagaagctggcagtccaggttttacatgcaatctctccacctttaaatgttgacaagtacattttcccataa

SEQ ID NO: 2869 - DNA, 457 bp, Homo sapiens
  source 1..457: mol_type = other DNA
ggtgtatggggaacccccacccacccaacacatctagtgtcaaaagtgatctgtgttgtgagaatatacccagtttcaaaagcaagatcttggggacaattgtccttccttccttcttttatcccagagaaaactaagtgacagaatatactggagtgtagtacttagtgcaatggtgtgacctgagctcactacaaccagcgattctcttgcctcagcctcctgagatccacccgcctcgccccacgtgctgggattacaggcgtgggccactgcacccagtgtacagctctaacttcaggctgaggtggatccagcttggacccccccttttttattacaaaccctaatttcttttgcaaagaaacatcttgaactggtcatgaacatcagaactgacctcctgctgcccagggaagaggagaggcctgatgtcactcagccctacataagggcc

SEQ ID NO: 2870 - DNA, 296 bp, Homo sapiens
  source 1..296: mol_type = other DNA
caatttgtgggactttgccaacatttccaacagtaatgggaaatcaatgtattaactcagctagtaaatattctagagtggaatagatgctgccctcctgcacaatttggcaatcaacagatgtttttgcttatttcttctgagataaatttttaaacgataaactgagaagccatggtccctgcatttgaagaactttgacttcaagctaaagctgtgcaccttacactgccttgatgagtaaagaacttttctttcaccagcacggtaacatagcagtccccagtgcttgctta

SEQ ID NO: 2871 - DNA, 561 bp, Homo sapiens
  source 1..561: mol_type = other DNA
ttggatccagatttctaatagcattatgggggctcctttttttttttaaaaaaaaaagtaaggttctagttgtctttaaaacagttttatttagcatagtaaatggaaaatcagaagttatacatacttccaagtgatttcaaaactaggaattcattgagctgatttaggagttacattgtgcttctaaaagcatgtgtttaacctttaaatatcctcacataattcaaagcccttaagaacttgaagaaaagcagtatatgctttattactcctttcagagttaaatgaaataatcaatgttttcttttttttccccatactttacctatactttttaaagttaaatctgtttatagttggagcaggtgaaaactaaccttaatttatttcagtggaagaagatggatttcatatattggccaaacggttatgagcattatctcacaaagtgctgttatatcatttaactctagtaattaggtgtaattgaatataataactacaaaaactacttactttccaccagaatttaactgatgctgttattcatgagcctca

SEQ ID NO: 2872 - DNA, 503 bp, Homo sapiens
  source 1..503: mol_type = other DNA
ggagcgttgcagaggagccctggatcaccctcccaggatcggaatgggtgcggcccggggagcccggttctaggtggacaccgagggctggggagcaaccggtcccgcgtgcctgcccgaggggctactgcccccgggcgtggtttcctgagtgtctccctccggagccatccccgcgctcagccagcaggaccgaggaggcgcggagacggcgctcacttctcccctcgcctgccggctaggcgggtgcggagcgggagcgcggccgcccgggcctgggcgcggcgggaggggcggcggcggctcctcactgcaccaacctgcaggcgcgggctggctgggccagccgcggcccctcccaccgcaccccacccccgccgccgccgccgccccgggagccggcccgggtcccagtaggtgccgcaaggagccggcgagcggagcgcccgctcgggaccgcagccgccgggcgacgtcgccgccgcaccgggcactttcccgcc

SEQ ID NO: 2873 - DNA, 478 bp, Homo sapiens
  source 1..478: mol_type = other DNA
ctccgttgatactgccccagaatctcctccagggtagagttctccggggacttcgccgcactctaggcccagagctgggagttacgtggggaaatgtcccaacaggcctgtggccggggagcgcccgcctgcttcctgccgcggctgtcacaggggagcctagaatcccgcacagagctcttgggggctctcgggagttgtagtcctcacgttcagaacctgcaagctctccaggcgctagcttggacggtttggctgccagagcctgctgccaagagacaggcttgcaggccccgcgtaaactctgaaccctgcttcagttgcgagattttttaaaacggtcgaataaatcttcaagaaatagaagctctaaggggcacgcctgcgcagtgggcaagctggaaaagcgtgtgggtgagaccctcgcacaaccccttttcagcaggaggggatagggtccggctcctcgccctttccc

SEQ ID NO: 2874 - DNA, 584 bp, Homo sapiens
  source 1..584: mol_type = other DNA
ctccacggggtgcagtcgccaggcagggtgcatgacaccgcgtcttccacggattggcccggggagctgctccaatgggggaaaaatcccttccccagcggcagcgcagccccgcccgcacccctcgcaaactgctacggcggaggggggaagccggggggccgcaggactggagctccgggggtggtcccgtcaagccccgggtcccaggcgggcagagggtgggggtggcggcgccgcgcggagcacccgggaagcgcccccttcgcggtccagccccgcacccccgccccgcggcgggcggcgcccgagtcctcgccgcaaagaaagcagccgcggcggtggctgcggctgcggcgcctacaccgagcagccagagggaccggacgggggaggcggggcgcgtcgcgtcccgtgagtctctcgcacgccgtcctccccccacctcgtcgtcgtcgtcgtcgccgctgttgtcgtcgctgccgctgcggtcgagctccggggccctcagctccgctgggcaatgcgcaggcgcctcgggaaagggcgaggagccggaccctatcccctcctgctgaaaaggg

SEQ ID NO: 2875 - DNA, 476 bp, Homo sapiens
  source 1..476: mol_type = other DNA
aggtgttaggaaacgcacctggtctgctcccgcccactaggccctgggcacctcggggctagggacagaggtttggagcaactcaccccggagactccgttgatactgccccagaatctcctccagggtagagttctccggggacttcgccgcactctaggcccagagctgggagttacgtggggaaatgtcccaacaggcctgtggccggggagcgcccgcctgcttcctgccgcggctgtcacaggggagcctagaatcccgcacagagctcttgggggctctcgggagttgtagtcctcacgttcagaacctgcaagctctccaggcgctagcttggacggtttggctgccagagcctgctgccaagagacaggcttgcaggccccgcgtaaactctgaaccctgcttcagttgcgagattttttaaaacggtcgaataaatcttcaagaaatagaagctctaaggggcacgc

SEQ ID NO: 2876 - DNA, 568 bp, Homo sapiens
  source 1..568: mol_type = other DNA
agccggggggccgcaggactggagctccgggggtggtcccgtcaagccccgggtcccaggcgggcagagggtgggggtggcggcgccgcgcggagcacccgggaagcgcccccttcgcggtccagccccgcacccccgccccgcggcgggcggcgcccgagtcctcgccgcaaagaaagcagccgcggcggtggctgcggctgcggcgcctacaccgagcagccagagggaccggacgggggaggcggggcgcgtcgcgtcccgtgagtctctcgcacgccgtcctccccccacctcgtcgtcgtcgtcgtcgccgctgttgtcgtcgctgccgctgcggtcgagctccggggccctcagctccgctgggcaatgcgcaggcgcctcgggaaagggcgaggagccggaccctatcccctcctgctgaaaaggggttgtgcgagggtctcacccacacgcttttccagcttgcccactgcgcaggcgtgccccttagagcttctatttcttgaagatttattcgaccgttttaaaaaatctcgcaactgaagcagggttcagagtttac

SEQ ID NO: 2877 - DNA, 559 bp, Homo sapiens
  source 1..559: mol_type = other DNA
tgtgtaaaatattcacacgattggtgtaagctgcagatgatttactgtatgtaaatagcctaaatcaattaaaagggggctcttgtgattaaaataattattagtgtttccattcaatccactgtgccataatttaaatgtgtaaaaactgtgaatcagacttttattaggtgttaggaaacgcacctggtctgctcccgcccactaggccctgggcacctcggggctagggacagaggtttggagcaactcaccccggagactccgttgatactgccccagaatctcctccagggtagagttctccggggacttcgccgcactctaggcccagagctgggagttacgtggggaaatgtcccaacaggcctgtggccggggagcgcccgcctgcttcctgccgcggctgtcacaggggagcctagaatcccgcacagagctcttgggggctctcgggagttgtagtcctcacgttcagaacctgcaagctctccaggcgctagcttggacggtttggctgccagagcctgctgccaagagacaggcttgcaggccccgc

SEQ ID NO: 2878 - DNA, 462 bp, Homo sapiens
  source 1..462: mol_type = other DNA
cggacgggggaggcggggcgcgtcgcgtcccgtgagtctctcgcacgccgtcctccccccacctcgtcgtcgtcgtcgtcgccgctgttgtcgtcgctgccgctgcggtcgagctccggggccctcagctccgctgggcaatgcgcaggcgcctcgggaaagggcgaggagccggaccctatcccctcctgctgaaaaggggttgtgcgagggtctcacccacacgcttttccagcttgcccactgcgcaggcgtgccccttagagcttctatttcttgaagatttattcgaccgttttaaaaaatctcgcaactgaagcagggttcagagtttacgcggggcctgcaagcctgtctcttggcagcaggctctggcagccaaaccgtccaagctagcgcctggagagcttgcaggttctgaacgtgaggactacaactcccgagagcccccaagagctctgt

SEQ ID NO: 2879 - DNA, 617 bp, Homo sapiens
  source 1..617: mol_type = other DNA
attacattccagactgaaaattcaaagtccacaatattttttaaattacagctttttattatagctttgggtttttaaaaaataataattgagaggaattttcacatgttgtacaatagcttttgattgcactagtagtgaatattaggttaagtattatatgattgatatgttgatattattgaaacgtgccactcaatagctattctaataattttaatccatgaaatgttttactacaatttcagtttttaacaagttgatggtatttgatcatgagtaataatatatcttatttttcagaatctactccattctttaaaatctcttggataacccttttaattaaggcttttctttgagcctcgattccttggagaaaaggaaattgtcagaaacgacacacttctgtgatatcagccttctctttgttatctagctaatttagtgccttgtttgtctaaacatataattatatttcaggaaaaggagaacataagtcttccgtactttatcaacaaataaaaacactgcttaataatgcttaatgtgtttggttttgtttattataggaggaactctctggaatgaaaaataaaatacaagtagttgtgctt

SEQ ID NO: 2880 - DNA, 798 bp, Homo sapiens
  source 1..798: mol_type = other DNA
agcctaaatatttttaaaggttcatcttttattttctttgcttaattttacagatgttctattgataaataaatatttctactttaatatataaattatttaaaattatggcctatataagatatttttgctttgaaatatttgagtttaaggataatttcatcccgaaaccaaaaaataaaccttcataaattttatatattcatatttgtcttcttgttgactttttaaattgcaaatttaaatggaaatattattttagctcagaaatctcatactttcctggattattttttccaagtaatattgaacatcataatcatgccattttttacacctcacatttttcgaaatttaatttgggttttgaaacacccaaatgaagccataaatttatcttttagaataaaaagtacatacttgatgtaaatcactgcatgtgtctgattgaatctcacacaaaaatgttactttttaaaggcagtggtattttaagtaaatattactttttaaagggaacgactcttagaatgaaagtgcaattatccactttgactactctcatttaatcatttcatttttaaaattagatttcattttacaatccaaaataaaacctcattcatgtgcatttttggacttttgtcataaaatggaagctagcctaaattttctaataattttttatcaaattgaaattcatggcaaaaaataaaaatgagctaattttgaattcaagtgcatgtattttatatggatgctttttccccttctctctacctaaggaaatagagaaat

SEQ ID NO: 2881 - DNA, 515 bp, Homo sapiens
  source 1..515: mol_type = other DNA
taaggttataaagatcacataagaataatagatgtaagtacccgtaacagttcttggcacatcttgagtactaaatatttttttgtttcactttactttataataagtacataatatgaaatcaattattttttaatctccttaaaatatttcttggaaagtaagtggtacgttgtattttatatcacttaaagtattcacgacagcctggccagctgcttgcgccactgtactccagcctggcaaaaaacaaaaaatttacaattgcttctgaaattacagggatttagggcaattaactttcatcaccaaacaaattttctctattatttgggtcttttttgttgcaacctcttaggttaaaagtttcactatcatttgaaattggtcatagggaagtgctttcattatagaactatttaataaataagttccccaatttacaaagaattagttgtttgttattgctctgtgagttgcaagaatggaaaaaaaattctttcttcaatacttcc

SEQ ID NO: 2882 - DNA, 550 bp, Homo sapiens
  source 1..550: mol_type = other DNA
attttactgtaatgctctaaaatttggtcacttttacttgtaacagtacgctgcgtccccagctccccgatgtgcacctgggcgcgggacgccgcaggacggagcgagagcgctcctcggtcccgctcccctgcgcacgggccggcgaggacccgggcgtcttcaccccgcctcgagtcatccgtgtccccgggtgccctgcctctccaggatacctgcttgtggttgtcacagtgcacaccgaaaagctcgctccgcacccgcagagtgcgcggggcctctgagcctggaaacaagcccctcccagcgcagctgtcgccgccgcctgcgggcgtcacccagaggggcgccgctgctgccaccgccgctgcgcccgaggactccgccccgcgccgcttcgctccggatccccgcccgaacagttgctgcctgcgattggaacgcgcgggagggcagctacggctcgccacccccattggctgggcccccttgtcagtccgacgaggctgggggcgggcggggagcgccggtccagccgctttcatctggc

SEQ ID NO: 2883 - DNA, 598 bp, Homo sapiens
  source 1..598: mol_type = other DNA
gcctcgagtcatccgtgtccccgggtgccctgcctctccaggatacctgcttgtggttgtcacagtgcacaccgaaaagctcgctccgcacccgcagagtgcgcggggcctctgagcctggaaacaagcccctcccagcgcagctgtcgccgccgcctgcgggcgtcacccagaggggcgccgctgctgccaccgccgctgcgcccgaggactccgccccgcgccgcttcgctccggatccccgcccgaacagttgctgcctgcgattggaacgcgcgggagggcagctacggctcgccacccccattggctgggcccccttgtcagtccgacgaggctgggggcgggcggggagcgccggtccagccgctttcatctggccggcgccgccgcgtgcgtgcgtggtgcgtcctcccgccccctcccgcccccgcccccccacccggcccggcggctccgcgctcgctgtgtctggcaggctgcggccgccgctgggctgctgccatggggagccgttgagagtggggccctcttcgctccgccgcgctcctccggctgccagcgggggtgggcgggagggagggagcccaccaagtcc

SEQ ID NO: 2884 - DNA, 490 bp, Homo sapiens
  source 1..490: mol_type = other DNA
ccggtcagcccagcccgggtttttcttgtgatcagttctgctttttctgagcagaaagatcagatatgcaggtgcagcattcattttaagtgactggcattgaactgaagtactttccaggatttcagaaagtgcagtttcagcttgttggtaccgagaattgaaatttgcattgactgtggcagtgtaagaaatttttctgagaaggtagttgtagataagtaattacataactgaagtaatagttctgaacaagtctgccaacatttgagacatgtataccattatctcagcagtttaaaaatatccctaactattccataaatacagtagaactccatatgctgagtttttcaatttcttctgttagaaagtttggaaaaaaaggaagactttgaagtattttgtttatactaacagaagagaaaagttctccggtagcatttccatctgaacatgatgtcacagctgacagcctgccatcctattc

SEQ ID NO: 2885 - DNA, 407 bp, Homo sapiens
  source 1..407: mol_type = other DNA
ttatggaaatattttacattctaacctgcaaactgtatataagtagccgggcgtgaatcggtggcactgtactccagcctgaaaaaaaaaaaagaaaaaaaaatgccagtgtttcgttttggtttggtttgtggtcagaataaatatttttgagcatatttttaaataattaaaattatcctttgatacctgcaaaggagcaggttggagcctgacctaaccttggacaaggcggggctggcctcatctgcccccgtccttgggacaatctttacaggaaagcaagctctagtgattagatagctctccctagagaccaaaggagcactctttttctaagcccaggacctgaaaggcattgcctggcaaaaccttgcaagccagtgtgcgtcacaatttgaatgatg

SEQ ID NO: 2886 - DNA, 472 bp, Homo sapiens
  source 1..472: mol_type = other DNA
ctagttacaaatgtaactgagagacaggacttagattatcgaagtaccaattcaagttacccagcttttaaatcctgtaaaataaggataatagaggatcacctaccttatatatgacggtatctgcatatatgtactatatgcgacatattttaatttccaattctgaaattccacagtttgtattttgtacacattcattccttaataaagagccgcagcccagagcgttgcatgctgggatttgtagcgcttccgcgcctctccagtttgaaagcgccgcctcgcgaggtttgcacgggagtggcgcgccaggccgcggaaggggcgtggcctcggtccggggtggcggccgttgccgccaccagggcctcttcctgcgggcggtgctgccgaggccggcctgcgcggggcagtcatggtacccccttgagcgggcgagggtggcggcccggcggggcgggggcggggc

SEQ ID NO: 2887 - DNA, 426 bp, Homo sapiens
  source 1..426: mol_type = other DNA
aactcattgaaaatactaaagtgtactctagggaccattagtgaacatacagtatgtacaggcgatttgggagacggtacatataatgtgattccattcccacttttaccttttatcagaattaaacatcatagttaatttgtgttgctagttacaaatgtaactgagagacaggacttagattatcgaagtaccaattcaagttacccagcttttaaatcctgtaaaataaggataatagaggatcacctaccttatatatgacggtatctgcatatatgtactatatgcgacatattttaatttccaattctgaaattccacagtttgtattttgtacacattcattccttaataaagagccgcagcccagagcgttgcatgctgggatttgtagcgcttccgcgcctctccagtttgaaagcg

SEQ ID NO: 2888 - DNA, 585 bp, Homo sapiens
  source 1..585: mol_type = other DNA
ggggtccccgacctcccgccatttctccacgtagccgcagctcaggacaggaggaggccagtggatccgggttctgggtccgagttcccgggcaccaggagccaggcagcccgagctcccgggcccggcttcccatgagaggccccgtcgcctcacctggcagcggcacacgatgtcggcgtcctgcgccagcaggtccaccatcacccggtttcctccgggccgcgccctggggcggccgcaatcgccgttgggcagggaggatgccgccgggtaggtctcggcgaacgccatggctccaactgctctgcggccgccagccacatgcagaggaagaaggagccagaggccggccccgcccccgccccgccgggccgccaccctcgcccgctcaagggggtaccatgactgccccgcgcaggccggcctcggcagcaccgcccgcaggaagaggccctggtggcggcaacggccgccaccccggaccgaggccacgccccttccgcggcctggcgcgccactcccgtgcaaacctcgcgaggcggcgctttcaaactggagaggcgcggaagcgctacaaatccc

SEQ ID NO: 2889 - DNA, 347 bp, Homo sapiens
  source 1..347: mol_type = other DNA
aaactgtgctccccaattgcttggggagactgatttgagtaataataaaactccagtctcctgcaataaataaataaattaattaaataaaaatcatttatgctgtcgcgccactgcactccagcctgggggacagagtgtgactcagcactgccagatatgtatttgctattgcagtgtctactttcaggcctctagggagcccaggtagcggcgcgcacgcgcacgcgcacacttctccctcgctggtcttcaggcccggcccgccctgtccagaggcgccgggacccaggcgcctgcagccgcccgccgggccgacgtcccacgggaatgcgcgaggcctggac

SEQ ID NO: 2890 - DNA, 582 bp, Homo sapiens
  source 1..582: mol_type = other DNA
cttcaccttacttaaattttctgcaaagcacataccagtgatattttgtatacatttgttgaattaatgcagagctgcatactaggattgtgctaagctacggttactgtacccttcccatctcagcaggatagtttcacaaaatgtaaattccacattgaggattaatttgccaaataaaattcgctggcttcatcgagctcaacgcaacatgagatttcaccgcccgcgggcggcaagggatctgccgcagctctaaagcactgcatgctgggagttgtagtctcccggggaggcctggtctggtaggaccggggcccccgcggcagagactccgcctctgcacttatagtagcaagggggaatcctcacttgggtccccgttcctccaggacgcggaggcgccggagttgccgccattttaggtcccgaggtgcgccggccgagaaccagagcgcaggcgggctcagtcctggcgccgggccggccccgcccccggggcgcctggcgcccgccccttgctcaagcccccccacgtgtctgccgcctaggggaggtgcctcatccggagcgggccgccaa

SEQ ID NO: 2891 - DNA, 308 bp, Homo sapiens
  source 1..308: mol_type = other DNA
ttgatggatcagctggcaccacccagatcagtaaactggctcatctgatcttgtaaactgtgctccccaattgcttggggagactgatttgagtaataataaaactccagtctcctgcaataaataaataaattaattaaataaaaatcatttatgctgtcgcgccactgcactccagcctgggggacagagtgtgactcagcactgccagatatgtatttgctattgcagtgtctactttcaggcctctagggagcccaggtagcggcgcgcacgcgcacgcgcacacttctccctcgctggtcttc

SEQ ID NO: 2892 - DNA, 213 bp, Homo sapiens
  source 1..213: mol_type = other DNA
attataaatttttataggtgaccctgtcccagctctgggctgcatccccagcctgttaggcattctacaggttgcagtgagccgacatcccaccactgcactccagcctgggtgacagagcaagggccatgagagtgacctctggtcgtcgcaacatcaggaagttaccctaaggggaagcatgaataatccaccgcagccctcgcggctgct

SEQ ID NO: 2893 - DNA, 423 bp, Homo sapiens
  source 1..423: mol_type = other DNA
gagctgctggtcccgaactcctgacctcccaaagtgttgggattatatgtagtttctaactacaatttcaacataaatacacaaccttaactgtgtattttactgaatgaacagtacttaatatgaattcgacatcgttaacactgagcgcttgctgtgtgccagcgcgcagcataatgactttgcacaatgacatctaaggagtgcccttaggttacatataacctaaacgtgaaatgtagttataaatactagaaaaaattgcattgtattattttgatgcctgcatgcacgcgttctccattgagctcgacgttgcagaggcatttttccttcggggacgccggaagacttcgccacacgcctctccgcggacaccaacgtgctgacgcatgttccgcggttctatgttaaagccactta

SEQ ID NO: 2894 - DNA, 539 bp, Homo sapiens
  source 1..539: mol_type = other DNA
acataaatacacaaccttaactgtgtattttactgaatgaacagtacttaatatgaattcgacatcgttaacactgagcgcttgctgtgtgccagcgcgcagcataatgactttgcacaatgacatctaaggagtgcccttaggttacatataacctaaacgtgaaatgtagttataaatactagaaaaaattgcattgtattattttgatgcctgcatgcacgcgttctccattgagctcgacgttgcagaggcatttttccttcggggacgccggaagacttcgccacacgcctctccgcggacaccaacgtgctgacgcatgttccgcggttctatgttaaagccacttacgtggggctgccccggcaccaagggctcgtcccgtggccggcgagggccgccgagccagcgcggagcgccttccgggtcggtgggctggggcgggctgggggctggggccgggccgacccccgcggtggggcccaccccgcaggacaaagcagcggccccgcccctcggcgcgcgcccgaggctcg

SEQ ID NO: 2895 - DNA, 498 bp, Homo sapiens
  source 1..498: mol_type = other DNA
cctgcatgcacgcgttctccattgagctcgacgttgcagaggcatttttccttcggggacgccggaagacttcgccacacgcctctccgcggacaccaacgtgctgacgcatgttccgcggttctatgttaaagccacttacgtggggctgccccggcaccaagggctcgtcccgtggccggcgagggccgccgagccagcgcggagcgccttccgggtcggtgggctggggcgggctgggggctggggccgggccgacccccgcggtggggcccaccccgcaggacaaagcagcggccccgcccctcggcgcgcgcccgaggctcgtgcgtgtgagcacgcgcgccggaagcggggctgtctggctcggttacgcccccacctccctgcaggctgtgtgccgagcttggaagaaagtgtgacccgttccgcggaggcggcggcgcgtgggggcgggacggggaggggcgcggccagccgggcttctgcttccgcgac

SEQ ID NO: 2896 - DNA, 509 bp, Homo sapiens
  source 1..509: mol_type = other DNA
ctcgagagccggggggagctgcagctgccgctgtagggggaggagccgcgggcgggcggcgggagggagcccggtcggcccgcggtggcgccgtcgcgctgcgtgcgcgcggtgcgggcacatgtctcggggggaggggagaggccccaggtcccggggcgggcgcgctttggcggctcctcgccgctgtatgagcgcaggggctcggcgtgacgtcacttccggcgggaggagccgggcggggcatgcggccgcggggagcgcgggcccgcgggggaggggagcgccgccgcgccgggctcggcccctccccctctctgaatcatcgaggagactggcaaaattagtaatgtgaattcgtagttgattgttctttgaattcacatttgagtcctcggttaaaacctcagttaaaaagcaggataaatcggaacggaaaagcgtttggagacaattctgtctttcagagccaaatctcctcagccacctgttgaagaagaagatgaaca

SEQ ID NO: 2897 - DNA, 426 bp, Homo sapiens
  source 1..426: mol_type = other DNA
acggttagctactgggacttcgtagctgatgaccaggtcctagtagctacagaaaacttggaaatgcaattctgaggtttattcagggtgcatgagaatagctgccctgcaaaggcaggctctacttcccaggccccgcacccggggtgtggaacagacaaatacggtattataccagtcaaaactgaaatacgatttgaattgaactgaaagccaattggaagcgcactgcgcggcctccaccgcgctctcggcccgggttcggcgtgggggcggggaatgggcggggccgagcgcgggcgcgctccggctttcctcctgcgcagtgctcccgtcagcgcagggggcggggcgcctatattacgtgcgcggcgccgctcctgcgagaggacgttgcgtgctcgctcgcgccaggcgagtctccgc

SEQ ID NO: 2898 - DNA, 585 bp, Homo sapiens
  source 1..585: mol_type = other DNA
tactatgttccagtatagtaaacttatccagaaaataagacaaaaatttaacttcatgctatagctgaagcgggatttaaaacttccattgtaactttaactagcggtcatgtcaaatttcacaactagcattatgtaatactgagcacaacatgggcacgtttttgttgctatgagatagacattgcagcttctctgggaaagaaccgggagggcaggcgcggccgttctgcagcagccgggccgcttcccggcgggaggcgggctgcgaatgggaagcgggaggaggaggccgggccgcgggctggttctatcaccccctttcaaaatctgcagttagaggggtgtgtgcgcgcgcgtgctgtccccgctaggcccgggacaagtccggctccggcctcgggtctggagggacaaggccgggggccgggtggcagacggggcctctggtcttcccccagcgcgagggtcgtggcgcgaaacggggacagggcgcgcgctcggagcctcctccccgccccgccccgagcggcccctcctccaggccaggctcgccgcggggcgctgagcaggccgggacaccgc

SEQ ID NO: 2899 - DNA, 649 bp, Homo sapiens
  source 1..649: mol_type = other DNA
tccagaggcgtctcgcgctggcatacgccggcttcctgcgctcctgggcgctgcgccgggggactggggcgggggggtgctccggagaccccgcggggcccaggcgcaggaagcgggcggcggggggcgaggggcccgatcccacgcacgcgccacaccccctctccaggccagagtcgtccgcgtgcagcgcggcgaagccctcagtttcccctgcccggcagcggcccgctgggtcaccaggctcacctgtcccagccccgggcggcttagtccatcacagaccggggctcgggcgggcgggggaccaagggccctagtcctgcggctgcggtcggggagggtggccccccggccggcccggggtcggtagggcaatttgcccggcagctctcatcacagacagacctgcaagcctggcgggggaggctggggcaccgcatttccgtccagccacgctcgctcgcgcggcccccgggctccaggctcgcgcagcggcgtttcattagagccccgggcccgggccgcgcgccaggaacttccccgcacgcggcgagatcgacgatcccccgcagcccggctccaggcctcgcaatgatcccggccggcgcggcgagggcggcaggttcccgaggctcctccgcgctgc

SEQ ID NO: 2900 - DNA, 758 bp, Homo sapiens
  source 1..758: mol_type = other DNA
ttcctgcgctcctgggcgctgcgccgggggactggggcgggggggtgctccggagaccccgcggggcccaggcgcaggaagcgggcggcggggggcgaggggcccgatcccacgcacgcgccacaccccctctccaggccagagtcgtccgcgtgcagcgcggcgaagccctcagtttcccctgcccggcagcggcccgctgggtcaccaggctcacctgtcccagccccgggcggcttagtccatcacagaccggggctcgggcgggcgggggaccaagggccctagtcctgcggctgcggtcggggagggtggccccccggccggcccggggtcggtagggcaatttgcccggcagctctcatcacagacagacctgcaagcctggcgggggaggctggggcaccgcatttccgtccagccacgctcgctcgcgcggcccccgggctccaggctcgcgcagcggcgtttcattagagccccgggcccgggccgcgcgccaggaacttccccgcacgcggcgagatcgacgatcccccgcagcccggctccaggcctcgcaatgatcccggccggcgcggcgagggcggcaggttcccgaggctcctccgcgctgcgcccgggcgcacacgcgcgctgtgaccgccgaccgctcccgggccacgcggagccgcccctctcccggccctcgcgcaactgtcaggcgaaacgggccggcggatattggctcggcgacacgccgaggctcctccccgagt

SEQ ID NO: 2901 - DNA, 368 bp, Homo sapiens
  source 1..368: mol_type = other DNA
ggcgcctgtagtcccagctactcaagaggctgaggcaggagaatcgcttagaggttgcagtgagtaccactgcattccagcctgggcgagaatgagaacctgtaattccagcagcctatagtcccatctagtcaggaggcccaggcgggagacatgcctgtagtcccagctactatggaggctgaggcaggagaatcgctaggttgcagtgagccgagatctcgccactgcactccagcctgggcaactgcactgttttcaactgttccgtatgcgttaaaattcttctgcgcagtcgccatgggcacgagccgcacgcggcccaccgcgcccgccccgcccctcgggcgtacgtgtgcgcgcagggc

SEQ ID NO: 2902 - DNA, 494 bp, Homo sapiens
  source 1..494: mol_type = other DNA
atacagtaagcatcctaaagtcttaatctttttaagcttagaaaggaattgtaagcttttacatcttcatttttaatcttaactttaagtcttttaaacacacaaactgaaaagtggaagccgcaggctcctccaggagccgggtgaggacacctcacccggagggcagaggctgcgcggcttccgaaaggctttccatcccggccgcgagccggcgggtcccctgcatcccgctcctcctctcctcacctgggaatcggaggcgcaaggagggctaccgctgggcgccgggtctgtttccagccccactcggcgacatggcggccgacgtgctgtcacgggtctcccctggctccggtggaggagacacctcccgcctccctctgcgcacccctcgcggctggccggctggaggctggcggcccgcgaccgcggagcagagtccggacaccagccggatggtcggtcgctctcctccctcgggcggctgagcc

SEQ ID NO: 2903 - DNA, 402 bp, Homo sapiens
  source 1..402: mol_type = other DNA
gcgcgccgtagttcttgtgaggcaggagaatcgcctgaacccggggagatcgccccacatccaagaaaatgcaattcagctggactcacctggattgcactccagcagtaggaataggccaatctccgatcggttacgtaacgcttaaagtctaagctggccttagacgccttccttggcggattcctgaaatccggttcgggccacagctgcggagagagcccacagtggttcctcgccggcaaatgctttcgcgtcgccgcttcacgccaaggcggagagcctcagccgccgaggaagcccgaccactgggccacgcagggtatcccacgtggaacattttctggggctcagccgcccgagggaggagagcgaccgaccatccggctggtgtccggactc

SEQ ID NO: 2904 - DNA, 459 bp, Homo sapiens
  source 1..459: mol_type = other DNA
tgaggcaggagaatcgcctgaacccggggagatcgccccacatccaagaaaatgcaattcagctggactcacctggattgcactccagcagtaggaataggccaatctccgatcggttacgtaacgcttaaagtctaagctggccttagacgccttccttggcggattcctgaaatccggttcgggccacagctgcggagagagcccacagtggttcctcgccggcaaatgctttcgcgtcgccgcttcacgccaaggcggagagcctcagccgccgaggaagcccgaccactgggccacgcagggtatcccacgtggaacattttctggggctcagccgcccgagggaggagagcgaccgaccatccggctggtgtccggactctgctccgcggtcgcgggccgccagcctccagccggccagccgcgaggggtgcgcagagggaggcgggaggtgtc

SEQ ID NO: 2905 - DNA, 508 bp, Homo sapiens
  source 1..508: mol_type = other DNA
tgaagacataattctattttatctgatttaaaaatatttaggactccaggtcctggagggggaaaaaagtgtatttctgaatctatgaaaatgttttcgtttgcacaacagttgatgagatattttctatgatgtcctaacaaatttataatacacaaaaggtcatatttagttgtcaattctttatccgcttgagcttcatcagatgagtataatcttcagactatttgctggtgatacattccttaggaaccttttcctcgtgcatttaaataagctctaagtttgatccaaggccaaaatttccattacagcatcctatttttagtcttcaaaattgggtcttttaaatcgcattccacagtacgatgtgtttgactaagtttacataaggaatacagtaagcatcctaaagtcttaatctttttaagcttagaaaggaattgtaagcttttacatcttcatttttaatcttaactttaagtcttttaaacacacaaactgaaaa

SEQ ID NO: 2906 - DNA, 522 bp, Homo sapiens
  source 1..522: mol_type = other DNA
atgaaaaatgttttataggcaaaattttatgagatgtctgctaatatcataggcaaaagtatttttgcaatatgtattatatctaattaatttaatggtatccagtataatataatatcctttaactggggtttttttaaatagaagtgtcttttcattacagcttaaaagatggttgtaaactttcatataagtcaagtacgcagttgttaataaccttatatgtatgtactccttatatttagcaagatgaaatttttcagatccatatgctaagagttatcagatatcaaaaaacgaagttaaacacgactttgctgttgctgttttctcaccatctgttactgacagttatcagcatagaccagcctggagtgcagtggtgtgatcccggctccctgcaaccagtagctggaattacaggcacgagccactgagcctgcctagtaattggttcatggcccactaggggaagaaaagatggtctttcacaacagatagtctgaaaagcgctggtctcaa

SEQ ID NO: 2907 - DNA, 410 bp, Homo sapiens
  source 1..410: mol_type = other DNA
ggtacaagaattttattgtagcattctttgtattatattgcacaaaagcactatacaacattgtacaaaagcattgtagaatttggtattctgaatcatttgggaataagttcacgacatcatgaccaaatggattgacatttacaaaatattcaaaatatgcaaaacggtactataatatttataaatacatacatatataacaagcagaggaatgaatacctggtttttgcaagacatatatttcaaaatttttaaaagcattcatttattcctattttaatgagagtttttaaaaatcaggaacctggcgtgggggcgctcccctgtaatcccagctactcgggactgcgctgcagcctgggcgacagagtgagactcctcggggtgggccatccccgaggccaggc

SEQ ID NO: 2908 - DNA, 540 bp, Homo sapiens
  source 1..540: mol_type = other DNA
ggaatgaatacctggtttttgcaagacatatatttcaaaatttttaaaagcattcatttattcctattttaatgagagtttttaaaaatcaggaacctggcgtgggggcgctcccctgtaatcccagctactcgggactgcgctgcagcctgggcgacagagtgagactcctcggggtgggccatccccgaggccaggctgccgcctccagcttccagcagggctagaagatgcgctgcccggggcggccagagccctgcagaaccgcacggaattaggggccgccgtccgcgcctgccaggcttggaagcggactcgcccccagggccaccgccctaggaaacctcccgtcggaagcctcccaagcaagccgctcacccgcggctcccgcgcgaggcggcgtgggcgtgggcgcggccctggcgcggcggcgcgcgcggggtgaagggagcccggcgcgctggctgcggcgacggcggccgttgctgcgccgggtactggggtcgctgcctgaggcgcaggcgccgtggactccacccg

SEQ ID NO: 2909 - DNA, 727 bp, Homo sapiens
  source 1..727: mol_type = other DNA
gcctgcaatcgcagcaggcggctggcagagcccggcgcgacccccagctcccaactgcgcacggggcgcgccgccggggccgccagggcggcttcacgcgcaaggcatctttctccccaccagctcctcggaggcggagagacccaaattcccgcggagccggcgctagagcgcggaaccatcgcgagaactctggtccctgcagccgcgatgcgcagagcggggccggcgctgtccgaggcgagcaggcagcaagcgcggcgggagcagcgactgcgttttagccgctgagcggtctgcaggcctacagcccgcgaaggcactctcgggggcgtgtggctctgaggtggccggggaggtcgcaggcggcggccggagcgcagaggagcggcttcagccgggcggaggggtgtgagcccggcccgtggcggccacgtctcccgggagatgctgtgacggacccgcacgggaggagctcgcgcctggcctggcgacccggtggactcggcccgcggcggcgcgctcacccgccccgttcaggtagggggaagggagggagggggttgggcccgcgcggcggagggcgggtcgcgcggcctggacccgcggcggcggcggcggcggcggcggcggcggcggggcttctgccccgcgagcgccgggcctaggccgggcgtgcgcggggccaacggatgggagcggtggcggtggcgggtacggcaggctc

SEQ ID NO: 2910 - DNA, 365 bp, Homo sapiens
  source 1..365: mol_type = other DNA
ggccagtccagggtttaggtcttagaaaatagctttgccctaaatttctgcagactcacgcgagtctcctgcctcagtctcctgagtagcactcctggctaatttttaaaaatacttttatactggccaggctggtgctgggatcacagcctagaaaattttaaatgacacgcgtggctcacagctcaggctgcctggtcaaaagaccaaatcggaaactttaaaataattatcattcattgtttctatttgtgaaatatatattatgaatggatataatcttatatacaaggttaaatgccattatcccccgtcactcaagacctgagggggtggggcctggagccccatccagtcagcgcgct

SEQ ID NO: 2911 - DNA, 432 bp, Homo sapiens
  source 1..432: mol_type = other DNA
tccagaaggtcctggagccagaaagtctggaaaaacggctagtttctgtcttagctgattagcgtgacactacggtaataaacgggagtgaaacatcgatcatatattgaaacaatatttttggatatatttggttaaataaatcattgtaatcaatttcacgtgggacattgtcttttcaaaattcaagctgcctctaggttgtgaaatctgaaattttagaataattgtcatcatagtgtttccaattgtaaatatcacaaatattactcataaatggacataatcccccggggggcgccaggtctcagctcactcagcgccgtgtctgattgcatctcccgtcactcaggactgaaggggcggggcctaaggccctgtccaatcgggcgctgggaaggggactgtactgcgcgccgcgaaaggagggag

SEQ ID NO: 2912 - DNA, 497 bp, Homo sapiens
  source 1..497: mol_type = other DNA
ggaaatcggtctgaccccagcccatgccagaggtagggactgcgttaattgatgcgagcagcacgcttctgcagaagtaaattgcgttgctgagaatgtgctctgaccaccttgggcacatgtcatcaaggacacatatgcctgatttgaataatcataaaactccaagcctgcactccagcctgggagacagagcaagattctgtttcaaactgtctaggtagcgggcaaggtgaactccctgggcagttacagaactgtcattatattgcttccaattttatatatatatatatatataaaaggcacaaatagctataacttgtatacaggttaagtcattctgacctcatccagcctcacgtgagatcgcaatctcctgtcactcagggcctgaggggcggggcctgaagccccatccaatcaggggcgctggggaccgttcaatcaggcgcgccgccggaaaggagagggcggcttccgggatctgcctggcg

SEQ ID NO: 2913 - DNA, 542 bp, Homo sapiens
  source 1..542: mol_type = other DNA
tgtcttatctatagaagaggctcagaaggagggcattccctcacctctagcagaaaagaggggttcgggcccttcactccctgaggtcaggggaaccagagccctcttcagtgtgacagtagaacaacaaaaaatacttcattaatattatatttatcatatatttaaattataatattttgtatatattgagttaaataaagtattgcaatcaattttaccttgttgctactagaaattttaaaatgacacctgtggctcacatgtgatttctggttaataagtctgaaattttaaaagaattattattatattgtttcctattttaaatatcatatatattattcacaaatgaatgtaacattgtatacaaggttaagtgtatataaatggctgggtcccaacccagagaggaaaccctcttggagaagagcctagctgtcacctgtcactaagagtctgagggggcggggcctgaggccctacccaatcaggggcaccggggcggggactgcctaatccggcgctccgctagaaaaccc

SEQ ID NO: 2914 - DNA, 719 bp, Homo sapiens
  source 1..719: mol_type = other DNA
cagcggccagcagccggggtggggtccggaggccacagctgcaaccgtgttctgggtcgactcccgcagcccctctgcgcaagccccgaggctctgcgtggcctccggatgcgcggcctttcctaacccggggactccgcacgtgggcgccaggcccggaaggcgcggatgtgagcgctaccttcggcgtcccgcagcggcaggaggggctgggcggcccgggcttcggctggcggcgggaatgaggcggccgacggcgcgcggggcctcctctctccgctccagccgcgactcccggtcggccgttccgggcgtccactggccgcgtgtcctgggggcgccgccccgggccgaccttccggaccggcgggcccgcggggaagcccgggcgcggcgacgtggctgacccacaaagcccccggcccggcggccaggcccaggcgcgcgcggagcggggcgggccgggggtgtcggatgtcacccccagcgcacacctcggccggggggcgggggagcgaaccggagacctccccacccaggggagggagccggagggctccggcctttcctttcctcggcgtccggcgggctcccgcggcggccaggcctgcgccgcccgccaacagggacgcgccgcggcggtgagtgcaccccggctcccgcggccggccccgccccgccctcctcggcccgcgcccggcctccgcggcgccgcctcc

SEQ ID NO: 2915 - DNA, 614 bp, Homo sapiens
  source 1..614: mol_type = other DNA
cttctccaccttctcctctgcgtaggagaatccagagcctgaaaaatgagcattccccggggacgtgcagcggccagcagccggggtggggtccggaggccacagctgcaaccgtgttctgggtcgactcccgcagcccctctgcgcaagccccgaggctctgcgtggcctccggatgcgcggcctttcctaacccggggactccgcacgtgggcgccaggcccggaaggcgcggatgtgagcgctaccttcggcgtcccgcagcggcaggaggggctgggcggcccgggcttcggctggcggcgggaatgaggcggccgacggcgcgcggggcctcctctctccgctccagccgcgactcccggtcggccgttccgggcgtccactggccgcgtgtcctgggggcgccgccccgggccgaccttccggaccggcgggcccgcggggaagcccgggcgcggcgacgtggctgacccacaaagcccccggcccggcggccaggcccaggcgcgcgcggagcggggcgggccgggggtgtcggatgtcacccccagcgcacacctcggccggggggcgggggagcgaaccggagacctccccacccaggggaggga

SEQ ID NO: 2916 - DNA, 229 bp, Homo sapiens
  source 1..229: mol_type = other DNA
gcaattattgtcaccctttttttcactcacccagaggctgagcgagtgcctctcccgtctcatgatcaatgagtcagtagaacattccagccatcttgctgtgagaggacagggctcagtggagccgttgcagcgggcagtgtcagaggcaacaccctgcttctgtggggtgcctcagaggagagcagacacggttttgacaacactgttgatcccatttggaaaatcc

SEQ ID NO: 2917 - DNA, 460 bp, Homo sapiens
  source 1..460: mol_type = other DNA
tgtcctaaatgaggccaatttggaagactttattttattatagaatcaaagacaatgtgcaaaggtatataggtttacgggaagaaaagctaccattataacatcaagtttttttttttttttaaattaaaagaatcacaaatgtggttaaggttaaagttaaagttatatttcaggtttgcaaagcaaaaagtttgtttgggtgttctagtttgtgaaataaaacaacaagttcctggaaatttatattaaaataaggtttataaagcatctcagtcatcagtgctggcaatggaggtgtttatttctgcccaagataaatacaccagggttctgttcccagggaaaaagagcacatatttctaggtgaccccatgagaaaatctgacattatgttctcttctcttggaatagaaatggaaaacattggagcccatctgcttccaatctgctgttttcc

SEQ ID NO: 2918 - DNA, 562 bp, Homo sapiens
  source 1..562: mol_type = other DNA
tcctgatttcctcattgggagaaaaaaagagtcatatagtttctgatttcagcaaatagattttgtgttgtataaatccttcggcaggaggcgatttcagtctcctgacagccacggctcagagtcagctgttagctgatctcctgccgctgatattgtggcctcgaaattatcactagaccagatgctggcaacaggtcttccatagtctttgagctgacaaccagaacctttgaaagtatcagacctctgaggaaaggctattgacatttgatctgattatcgttgctagagccacaaagagaaattttatttctaacgttgtttttttcaggacaacatatttggaatcttgagatctcagatctctgtaatgagcagtttgcctaagaaatcatgaatccagattaatcacttttattccagcaaaaatgcaacgtcttgcaatactagaatttccttgaaagcaaagtgaacctggagtgatagattcactttcatgtttcagcgtgtgtgtatgagtgtgtgtgtgtgcgtgcaggcacacacacgcacactcaca

SEQ ID NO: 2919 - DNA, 429 bp, Homo sapiens
  source 1..429: mol_type = other DNA
ttatttaaatatttagaattatacactttctttatcaagaggtaattagtgcaagagaaaaaaatgaagtttgaaaaaaacatttaaaaattgattatgccatataaagggggaaagccttttaacaatttacgctatcacagcgatgcctgcgctaaagcctagactttatgcagtgttgcactaaatctatataatgatgatggaggctgggcgcggtggctcgcgcctgtaatcccaggtggtggcgggcgcctgtaatccctgctgcttgcgaggctgaggcaggagaatcgcttgagaggcggaggctgcagtgagccgagatcgcgccaccgcactccagcctgagagcgactccagatctactgccagtgaaaatagcactgaagccagcggacaccacccgtcggcgcctgctttcctggg

SEQ ID NO: 2920 - DNA, 355 bp, Homo sapiens
  source 1..355: mol_type = other DNA
ggcgtttattaagggcttgtccttctaaaggacctgagagccattcctttggctaggctgggcgtggtcctagcacgcccaggcgggtggatcacctgaggtcaggagttcgagaccagcctggcaatcccagctactcgggaggctgaggcaggagatctaacttctatagctgctagctagcagacacattctgtacaaatcggaacagaggtcagttcttttcctttctgtaagtagttactgaaaaaagtctttttcactgaggaggggaattcagcccatttgccttttccatctgcagggcaaagttttgagttgactctgaggaagttacgccttttgtaaaaacaaa

SEQ ID NO: 2921 - DNA, 466 bp, Homo sapiens
  source 1..466: mol_type = other DNA
ttgactaaggttttacacactaattaggggaccccctgagcagagctcagaacagcagtaaaggaccttgagggccatccctgggcgtctgttctgatccaaaatgcatttccggaaaggaatactagtagcatttcctagtagaagacataggataaatgctcataggttgagagataatagctatccagtctggcctcacttaataagacggggatggctgccgcggccccgtccgcgccgggcaccggctaccgcgccggaagcaccgaagggtacacctgtctgtgtcccgccagcggccgcgggaagagctgctgggtggaccgcctagctcccgggactccgcggctgggggctgaggcgcgcgcagggatcggcgccctttcctctgattgggcgggacgaggcccagggcggggccttggcccgcgcgggaggcgggagtggagtccccccgcaggcc

SEQ ID NO: 2922 - DNA, 281 bp, Homo sapiens
  source 1..281: mol_type = other DNA
acacgtgttagctcagttaacacatgtaagttttaaccatggtaggcctgagccagggcacacttcatctgaagcgccactgtccacagagggctctagctggaccctctgtgggtctttacaggccgggtgggctggggttggagcacaggaggcctgaccctgccgcggggctccgcgacacgcgcgggcgacttgagtcgggcaaccacgattcccggcgggcgttgcgcggggcacccagtgcgcaggcgcacggcgtcggcctccgactcgcccct

SEQ ID NO: 2923 - DNA, 380 bp, Homo sapiens
  source 1..380: mol_type = other DNA
acagggatttctgtgttcaaagcctttcagggcaaggcagttttctgcggagtacactgtccttatagagccgtgcctacaattaaggttctatttttaccaagtaaaaatataggtagttaaatgtgaatcttagatgaacaacactgttacctgaaactcaaatttaactgtattttatcgccgattattgggcacaccctcagagtttcttactcagaaggcctaggtgaagctgctgttagattgggggcaccatgctctcctgattaggaaggacgggatccctctaggcgccgcggaggtcctggagtctcgatggtcgctcgggccggggcgtggcctggcccgggggcgtggcatggaaggccggccgaggt

SEQ ID NO: 2924 - DNA, 308 bp, Homo sapiens
  source 1..308: mol_type = other DNA
ggttttaagtaacttgtagtaaaataaattatgttttaatttaataaaatacacttcattggcttttacaatcaagaaaggactcaggaggcccctaagagcttggcttgtaggggctgtggctgcagatgccaagagccccggatatatggcaggcggaacaggggcgctgcggcacactcctagtaagtcggcgccgttccgccatcttcccgcgcgcagaggcgccgagacaccgcggcgttccgcacgccgacgcggcgcaggcgcactgccaccctcttgccccgcgcgcctgcgcaggagcc

SEQ ID NO: 2925 - DNA, 458 bp, Homo sapiens
  source 1..458: mol_type = other DNA
ctggggctcaaggagattaaagaccccaagggctgctgctgctcggagcgttcaaccacaaggctgaaagcacagcctgttcacaacgcgataacgtgaacatttcacatgtctgagagataactttagtattttgtccaaatttttgaaataatggagtttgggaagtattttatctctcggttaccgtaaaaatagcaatgattctggacacttggctaatccactgagccgcgcctggggccccagcctgccccactgagagtcctagctcggtcctcgggcccggccacgcccgctgccggccagcgaccgagtcggacccaatccgaggccctctgttaataagaacgtgaggtcactttaatgtgaggcacctgcccgggggaggtggggggacgtcccctctgctccccctccccggaaacctgcgtccagcagtgacctcggggatctgg

SEQ ID NO: 2926 - DNA, 626 bp, Homo sapiens
  source 1..626: mol_type = other DNA
gttccgccatcttcccgcgcgcagaggcgccgagacaccgcggcgttccgcacgccgacgcggcgcaggcgcactgccaccctcttgccccgcgcgcctgcgcaggagccacgcctgcgcaatcggctccagtgcgcctgcggaggcggtcctatgacggtagtaggacgggcggggagggtccgcgggtcacctgcagggactgggccgccgttcacctgcaggggcggggctgcaggttgtccggaggaggaaaggttacctatagggggccgcgggtcacctgcagggcgggctcaggcctcgcggctccgcgggccgcccacctgggttggggcacagcgcgagtctcgcgcacgtggcgggcctgggcgggtcacgcggggaacctgccttgagccccgcggggtccacgccggaccagggcggccttgggcctgggcgctccctgagacccccacccccaacaccgtgcttggagccgccgcggggctctgggccgaagtccctgagggcgaaggcctgagcgcggcccggcgggcgcgtggtttttgtcccgcgaaacgtacacggcgggtgttttgcgctgccgcaggtacgccctcgctggggcctccttgtccgcg

SEQ ID NO: 2927 - DNA, 673 bp, Homo sapiens
  source 1..673: mol_type = other DNA
ggacaggtgggtccccgggtactcactgctgcccgcccggccgcggcgccccgtcccgaggctgcccaggaagaggaaggcgcgctgccccgccccgcggacaaggaggccccagcgagggcgtacctgcggcagcgcaaaacacccgccgtgtacgtttcgcgggacaaaaaccacgcgcccgccgggccgcgctcaggccttcgccctcagggacttcggcccagagccccgcggcggctccaagcacggtgttgggggtgggggtctcagggagcgcccaggcccaaggccgccctggtccggcgtggaccccgcggggctcaaggcaggttccccgcgtgacccgcccaggcccgccacgtgcgcgagactcgcgctgtgccccaacccaggtgggcggcccgcggagccgcgaggcctgagcccgccctgcaggtgacccgcggccccctataggtaacctttcctcctccggacaacctgcagccccgcccctgcaggtgaacggcggcccagtccctgcaggtgacccgcggaccctccccgcccgtcctactaccgtcataggaccgcctccgcaggcgcactggagccgattgcgcaggcgtggctcctgcgcaggcgcgcggggcaagagggtggcagtgcgcctgcgccgcgtcggcgtgcg

SEQ ID NO: 2928 - DNA, 805 bp, Homo sapiens
  source 1..805: mol_type = other DNA
cccgctcggagcccttggggacccgcctgacgtcggcgggcgcggggataagaagctccccgaggtctgaggcgggactcggagccggcgcaccccaggtcggccgtgggtccagcgctcggagcggccgagtccccgcgtcccgtgcgctccgcccgccgggcatggagtagtggcgcagctcggggcgcggggacagacgtgcgcacagacggcgacgactccggcggctccaggtaaccggcccggccacgacgcgcaggtggctcccgggtggcgccgggcaggtgcgggagggcgccatggccgggaggtggaggggcttccagcacgtggcgcggccggggccagcgcgagggtccgcacccggcctcctccgtgggcttcggggactcggcgctcgccggcgaccaccgcgcaaaggcgacgctggaaacttgagcgcggccgccgggcccggcgcgcggcgccgccttcttggagagcggtaggcgcgggagcgcggcccctccgaggtccgcccgcggccggggagctgcctggcacccgcggcttccaaagttgcgcccgcgccaggcgcagcgcgctcggcggacgcggcctttcgggcgaaaggaggggccgggctggcgggcgggcgggttccgggggctcctttccgcaccagcggcggtcgctccccgtgggcgggacctcgggcgtgatcgtcgaggagaccgcggctccctcacctgccggcttgttcctcggggtccgcggaggtgaggggccgggtccagcgccagcggctcctcccgcctcccct

SEQ ID NO: 2929 - DNA, 391 bp, Homo sapiens
  source 1..391: mol_type = other DNA
tccttcaatgaaagaaatgttttcccataagaaaagtccaccactagaactatttttagaaacattaaactagttcaagagctaacatatgcaattaaagtatatacacttaataattcatgatgttaaaataacagaatgtttaatttgaaaatgtcaaagttggggtataaaaaaaaattcgctggaagaaaattaactttatatttttgtatctgtcgttgaacaacgaaggagtgcactgcccttagggtctgcagggtccgaggagtgggcaatgtccccggctcctgcagggtctcggggcggacaccgtcgggagtcccaggtgggacagggtatcgcgatatctggacctagcaatgccatgaaattaaagtttcgtgctcac

SEQ ID NO: 2930 - DNA, 587 bp, Homo sapiens
  source 1..587: mol_type = other DNA
aatttatcctaaacttactttcatttacattaaaacaagacgatttgagtctaccaggaaacgccgtctcccctggcgtctgatcccgccccagccccgtgcgccccaggagggcaccgccgagcgccgggtccccgcagggttcgggagactccgcggaccggaggagggatggacccccgagccgggccaggccgtcctcggggccctgcgctgcgtctccaagtgctgggaagactccgcgggggacgcggccggctggcacagcaacccatggcttcgaggctgtggggaggggtcgtcaagccggtccagagcgcgcccacctgcgccacaagggagaagaggtgccccccgcccccctccgcccaccgccgccacgatgcgccgcggacctcggcgacccagcccgggtagaagcgcgcgctcccctcctccagcctcgtgcgccggcccctgccccgccaggcgggagcgcgccagtggaagcgcccctctccctccccgctcgccgccctccccgcgggtgcgcgcccggcccctccctcgcccggggcgggtctgcgtgggcggtgctccgggtcggc

SEQ ID NO: 2931 - DNA, 232 bp, Homo sapiens
  source 1..232: mol_type = other DNA
tgggcttcagaacatcttctaacaaagattaatgttccatgaagaggcgatgtgttattttatcattttcatgatgagatacagccactgtgctcatttttcacctcaacaaattggaaaaaagtgtactttattcacctcttagtgataaggcctgggacagcccctttttcacagggtatttaactgtgaaagtttgtttctgaccagtcaggacacacttcctagcatc

SEQ ID NO: 2932 - DNA, 289 bp, Homo sapiens
  source 1..289: mol_type = other DNA
tctttttaaaagtgggtggcagttttaccattgtgggaatgatcccccatcttttcctatgcctttaacttcaaaggtccatggacagtccaagctccagattacaatacgcaaactaaaatacagttgtttgttttaagatgaatatatgtagcttcaaaatacttaagccaactgtataaaagataagctgctaccttgggatttcagtttcagaagtatttaacagccagtggttcacactgaggatggcatctcagatagccccgtggctcccttaaattgagga

SEQ ID NO: 2933 - DNA, 614 bp, Homo sapiens
  source 1..614: mol_type = other DNA
cagccgtgaaaattactcagcagtggaaaaaaggtcaggttgtaaagctttttatttttccattttctaagagaaattcatcattggaacttgtaaagtggcccaagagtggctgtaatttgggccattatagcaggtctctcagcaaagctgactgactgactgattcctgtcagcatggactcactggtgctatctttgaaagtagaaatgatgaattttgaatcttctgttttgtcttaacaactagaattctaaaatcattttatggacataagaatgctttaagaaattcaataggcatttaggggttttatttatcacttttataaagactaaatttctaatagtactcactttttgccacatagatgcattaggggaaacagatttttttcattcccaataattattcccagtactgttacactatttgacattaccaaaaatttaaataggttattactgagatatattggcaactggagctgccaacataaaaactctgtttttgaataatggggcctcagcgctgcactctggtctcgcagaccccaggcctgtgagggtcgcgtggagggagccccaaggacacagcggttcccatggccttg

SEQ ID NO: 2934 - DNA, 481 bp, Homo sapiens
  source 1..481: mol_type = other DNA
gtgaaattcagacctctagacacacccgacgtggggggccctgggtctcctcctaggtctgtcccaggagggcacgcgagaatcccgggggctgcattgcgccgcgccaaggactcgccaggcggccggcagagagcaggtggctgacaggccccggggagccggaccgcctgggtctaagcgcgcctgcgcgcctggaatcgtgcccggatcagagcaagcgctctaaaagtgttcgtaggccccagggtcccgagccccgagtctcgagcgcagaatcaggggtgccaatgctctcctccgcgcccccgagcgctcgccttggccatgcgggccgccccaccgggatgagggcgctcaggccggacgctggggccccgggttctcgccccgccccgccctcggggattcagaggggccgggaggagcctcgcgcatgtgcacagctggcgccccccgccccccgcgcacagctgggacg

SEQ ID NO: 2935 - DNA, 542 bp, Homo sapiens
  source 1..542: mol_type = other DNA
gtctcttggttaggcgtgtgaacgcgccaacaatggaccctctctcaaaagagcttctccttcagtgtaatgccattgtgtggcttgactcaagaagccatttataaaatcagcacttttttaagccagaaaaaaatgctaatgaacatcaggtatctatgttcccttagctattttaaaaaccatattaggacttgtcttttcaaagaaaactttttctatatttttttcttcaaacaataataaaaggtgaaaaatgttttaactttcttagacaagtagtttcatagcttttgttttaaaagaaaacgatgcaagcaacccgaaaacgattttaagaattggttagagttaactcttgtgtcaccattcttttattttaagaagtgacaggttttggaatttgttttgcttggatgttaaccagcaatgccatctaaaatacatgaatttaccataacatcaatgatacgagagatatttttagatatattgcctagctggtagctgctaacagtatttgtctcatctattacattaaa

SEQ ID NO: 2936 - DNA, 364 bp, Homo sapiens
  source 1..364: mol_type = other DNA
aaaagggtgatacctttttaaaaaatgaaaggcaggccgagcatgcttgccagacaagcagcaaagctgagctccagttccgcccagacaatcagcctgctcaggatggctgcaggatgtccccctgggagccaaggtggaagcctgagggcaaaaggaaaagaaaaaagtcacattgtcatttcattatccaaacagtgaccatgaaagatttcagactgacaaccttattatgcagtgagtttattatgagagacattcaattttctctcttaaaatgaattcagcctcatttgcatgactgataagcaatttttttttttatctatttaacagaaggtcatatgaaacagatccctgaggc

SEQ ID NO: 2937 - DNA, 427 bp, Homo sapiens
  source 1..427: mol_type = other DNA
cggtggaaccaggctaatttctgctggcccaaggccagggcagtttggagacctctaggaaccccagggccttcccttccgactcccattcggaggcatatgcagtccaggaccaccagtggtgcggtgccggatgcattaggcatggccctgacttagggcaccttgggccgaacctaagggagtcagctcaggtgcccatcctggctacccaagtgcgtgtgaagcgctggcccagcgctcagcttagatgcgatggctagctaaggctaatcgccgcttgctcccgacggcctgcgctcggagccggcctccacccacagccggcctccgcggcccgctcacctccaggagtccccgcgctgagagcccggatgtgagcccaagtggccatgcgcacaagccagcgccgctgccattggtcgct

SEQ ID NO: 2938 - DNA, 222 bp, Homo sapiens
  source 1..222: mol_type = other DNA
aaattttagagattcccagctactcgggaggctgaggcaggagaatcgcttgcagtgactcgcgccactgcactccagcctgcttgcggagctaagagggccttctcactgatatctttatcattaattttattatacaagtactgcaggtgcatggtaagactgatttctaggatatgctggaaacgaaccccatttccggcctgggggcagggcctcggg

SEQ ID NO: 2939 - DNA, 317 bp, Homo sapiens
  source 1..317: mol_type = other DNA
atgtatttgcaaagccagaaatgaaataagtgtgtatttttcttgcaatatttctggaagttcaagagtcaattgacgatggctgagataatctgatctttttcaactcgttggttaagagctgtgaagtctcacatataacaaaatccttaaacggcagcacacacaaggcacgtgcgatgcctacggtgagcttcacctgcccggcgcgtctggcgaacggctggccccgggccgcgggcctcaggcaggtccgagggtgcccaggacagggtacagcggagccgtggggcctcccccgcgccggccctgcctta

SEQ ID NO: 2940 - DNA, 367 bp, Homo sapiens
  source 1..367: mol_type = other DNA
caggtgatcggagtacagctgagtagctggtccagcctctggggttagagctttgaatcatgttgtaatacctgttaataaatatttgataaaaaatattcgaaaggtctgctgaccagcagaaaccccagtggccaggtggacacatgcttagctgaggtgtgtgaaactctgtgacatggcacagtgtgtgtatctgagattcgtataatatgtagtgttttaggtagacaacatgctttattgatggggatcacatttaggaactgaatgcgatgggatgggtgtccctataaggagagaccccagagtgctcgtgctccctcctgcctgcaggggcactctcccgggacagaccacgcaccag

SEQ ID NO: 2941 - DNA, 531 bp, Homo sapiens
  source 1..531: mol_type = other DNA
gaatggtctcgatctcctgacctggtgatccacccgtttaaaattacttgattagaattctaaaagttaccttctcatgcagtggagcagggaggggacgcgccccttcgggggtgggcgcccaaggcaaggggaggaatgcggcttccacggcctcccctctctgcccactaaaaaatgtgcattcattcatctgccctggagctctcgaggagccgcggttaccgcacgtgggtgccgggcgccagggggttcaagggcttcccgcggtgacccgagcacgccggggcgtggcccccgaactgcggcctgggggcggggagagaaggggcccaacatggtccatctcgaccttcctctgccgggcccagggcttcagccccgctcccatgctccgcttcttcaagtaccgacaggaagttgacgagttcgggctcgtcaggggccgagctccgggctccgccctacgacaccgcccctccctaggccccggccctcatcaggactccgcccagacgtgcgtcatcttcc

SEQ ID NO: 2942 - DNA, 340 bp, Homo sapiens
  source 1..340: mol_type = other DNA
taggttatgtaagttattacaatatgtcattatatatttagtcatactgctttcggttttacttaataattagcacctagtacagtactagcaattttttttaaatttatttttagacagccaggctggagtgcagtggtgcaacctcggctcacggcagcctcgccagcgatcctcccgcgtcggcctccggggtagctgggactgcaggcgcgtccggaggttgcggcctccttctctctcccaggcccagggctgggacgaggccggttcccgcctgcaacctgcactgaagacgggaaccttgggagccggtaccggaacgctcggaaacgtggga

SEQ ID NO: 2943 - DNA, 435 bp, Homo sapiens
  source 1..435: mol_type = other DNA
gttttacttaataattagcacctagtacagtactagcaattttttttaaatttatttttagacagccaggctggagtgcagtggtgcaacctcggctcacggcagcctcgccagcgatcctcccgcgtcggcctccggggtagctgggactgcaggcgcgtccggaggttgcggcctccttctctctcccaggcccagggctgggacgaggccggttcccgcctgcaacctgcactgaagacgggaaccttgggagccggtaccggaacgctcggaaacgtgggagcgctcggcaaggtaggttggcggcctgctctccgacagaacttttctacccgccctgtgcccgcttctgcggggcgagcggggcctggccggggggtgcgggcgggagggcgagccagcggcgcctgcagcccgggccgcgtaacgctg

SEQ ID NO: 2944 - DNA, 513 bp, Homo sapiens
  source 1..513: mol_type = other DNA
gggtaataatcaactttataaaatgaattggtaaatattccctcctcttctattttctggaaggggagcgtttaaattgcaagttcaattaagtggttcattttgtctaagttgtcaaatttatgtataacttcaataatacgttttaaataaagaatccattatttttccttaattttatttttattttatgatttctcagtctaaataaatattcacctttgaacctagcttcttatgattgtaattttatatgtatctttttcttaaagcaagattcgggctgcatagaagctggatctgtccagctgtttctggcattaaatgaaacttgcctttaaatgaaacttaaatgcgtagagtgagtttccggactcacgtgtgacaaaggaaaggagatcagtcagctgccctcgtttctgtctccacagtagtcatgcttattttttcaaaaaacgaaaagaaagggcatctccaggagggtcctgcgggttcccacactccccaggcagg

SEQ ID NO: 2945 - DNA, 572 bp, Homo sapiens
  source 1..572: mol_type = other DNA
ggggagcgtttaaattgcaagttcaattaagtggttcattttgtctaagttgtcaaatttatgtataacttcaataatacgttttaaataaagaatccattatttttccttaattttatttttattttatgatttctcagtctaaataaatattcacctttgaacctagcttcttatgattgtaattttatatgtatctttttcttaaagcaagattcgggctgcatagaagctggatctgtccagctgtttctggcattaaatgaaacttgcctttaaatgaaacttaaatgcgtagagtgagtttccggactcacgtgtgacaaaggaaaggagatcagtcagctgccctcgtttctgtctccacagtagtcatgcttattttttcaaaaaacgaaaagaaagggcatctccaggagggtcctgcgggttcccacactccccaggcaggacggtggacgcactccccgagataacgctgcggccgggcggcctgatttgctgggctgtctgatggcccgggccgaggcttctccctgcgcctgggactgcggccgcctctctaaatagca

SEQ ID NO: 2946 - DNA, 393 bp, Homo sapiens
  source 1..393: mol_type = other DNA
tttatttgcaacttctccggggggaccttgctggaaggcacctggctttccgtcaacacatggcctcgtgtgatcctccccatgagatgatctcatgtggaccattttacagataaggaaatttgacagagaaaatttgcaacttgtgttaagttccctgagagctcttaatattttattttaaaaattaaaaaatccctggtaggggaaaaaaaaaagacaggaacttttttttttcttgttgctttgtcctgaggctgcggtatctgaagcctccagagcagcatctcccaagcctggggtgaaaatgtgggccccttgtttcgggtggcagggccggggctgcaccggccgcagcagagtccaggccgccgctgaggggagtcacgtggg

SEQ ID NO: 2947 - DNA, 361 bp, Homo sapiens
  source 1..361: mol_type = other DNA
tccctgggacgcaggttgtctttctggagccccaagggcccctgtgcgcagtcaaggccccagctgattcatctgcagagtggatagccgaagccgggctcagctctttctgcattgcagaatgccacagaaattccatgaaaattttgtgtgtataggggctctagccaaaccctcccaagggcccctagtaggtcaggacccactgcgattaagtgacgtctagagataaaactttaagtcaggttactggccggaccaggggtttcaggcccaggccagtggccggaggcagggaagggccctgggaccagcagggaccatgtctggcttcgggcctctccggggaggggctgctccc

SEQ ID NO: 2948 - DNA, 589 bp, Homo sapiens
  source 1..589: mol_type = other DNA
aacactgttacactgttaggcagttacactgttaggcagcaacagtgctgatgctggactgtggcaacttcaccttagtgcaggaaacttcaatttggtggaagcgacacttcccagttggagagtgcaactgcgccctgttcccgcaggaaagcagctctgcccatggtctgcagggcctggtcagtcatccaagggcagtagtgcgcctgcaagtgggcgttgaagagcccgttacaccgggaagggacttctctgtccctcgcgcgtgaccttggggccgacggcgcggggcctcattcggtgtcagccccgggagccggcgcctggggaccgcgcaggcccgcggagccgcgcacctggggccccggggccaagcgtctgctcccgagcgccggccgtttatcgcgcacatctcgcggcgaggaggagaggccggaagggcgccccagccccagggctcctgccccgcctgggcctccgctggctccctccgggtttcgtttcccgccggcgcctggctcccgccaggtttcgtttccgaggcggggccgagggcggcgtcgctgaggcgcccatggccttcgcc

SEQ ID NO: 2949 - DNA, 847 bp, Homo sapiens
  source 1..847: mol_type = other DNA
ttggaagatccttgcaaacaagaatcttaaaccggctctacagaccagcctcttggtccagttctctggtctgaagggttcagatgccacgctgggagctggaagcggacagaactcttacctcctccaaaacggcccgggcggcttcccggtccgggaagaccacggaactgggcaagtctggcaccaccgggtgcagcgggggctccgggacgggcacgacctgtgcgcagcccacctgcagccgcctgccgtcttgcacctcccagaggcgctgccacagctggccgcgcgggtcggcctcgaactcgcccaagtgcgggcgtggtgcctcctgacaggcgcccagcagctcgagcagcgcttgccgggtgccagggggtcgcgcagcaggaagccttgctgtgcgccgccggcctggccgcccgggcagtagcagagcagcctgagcagctggcaccgctggaaggggccgcggcgcagctggtgcagcaggcgctggtgcagccgcgccgcccggacccgggccccgcagccggcgtccggggtcacgggcacgcacagcgagtagctgcgctccgggggccccagcagcgccgccaggcgggggtcgggggcgtctgcgtcgccgggggcgtcggcgcctagggcgaagtgctccaggacgaagcggcgcggcggagccatggccccagcgcagaccccgcgccgcccgagcagcggccccgacagtggcccgcgcaggagccggcgggcgaaggccatgggcgcctcagcgacgccgccctcggccccgcctcggaaacgaaacctggcgggagccaggcgccggcgggaaacgaaaccc

SEQ ID NO: 2950 - DNA, 517 bp, Homo sapiens
  source 1..517: mol_type = other DNA
agactttttttttcagaattaaatataatcccaagtttaagtccaatactattagacataaaaaaaaaactgctttcagctcatcttatttttttgagagagtttccctggagaataaactgcgcaaacactgttacactgttaggcagttacactgttaggcagcaacagtgctgatgctggactgtggcaacttcaccttagtgcaggaaacttcaatttggtggaagcgacacttcccagttggagagtgcaactgcgccctgttcccgcaggaaagcagctctgcccatggtctgcagggcctggtcagtcatccaagggcagtagtgcgcctgcaagtgggcgttgaagagcccgttacaccgggaagggacttctctgtccctcgcgcgtgaccttggggccgacggcgcggggcctcattcggtgtcagccccgggagccggcgcctggggaccgcgcaggcccgcggagccgcgcacctggggccccggggccaagcgtctgctcccga

SEQ ID NO: 2951 - DNA, 485 bp, Homo sapiens
  source 1..485: mol_type = other DNA
aaagtcgcttactcagtcacccagctacatgatttgtggctctggaagtatgtgtcgcagtaattctcaccaattaggaagcatcttagattggatttcctctagttaaaaacatctataaaaagtgatatcaaaatataggaagatgtaaatatctaaattttaacactgtcaccttgcataaattaggctgaatctgatggaataagacctaaattcaattttgttccatgcctctgtttattatttggctttaaaaagaaaccccttcaccatgatggagcaaaaactgttacttggctatgtcaagagaaagcaatgcaacaagtacaaagcgtgctgattaatgcaccttgtctatctctatcagacagagagctagatattgatagagactgctatcctcatgtgtaactacatcaagctagagagctgttatatttcaactttcagtttcacatgtggaaaaatcgaaactctaactc

SEQ ID NO: 2952 - DNA, 498 bp, Homo sapiens
  source 1..498: mol_type = other DNA
caggtgtaagccatggcacttggcctatttgacttgtttaatcccatttagaccacacagtgtggaggtttaatattgcagaaaaaagaatctatatatttaagaaggtgttatttttgttcatatatgcacatctgacgtataatttaacatttgtgtaacttcaaccgccctctttcttcatccttcaagacaaggatagtgggggcagactttcggctctgggctcatctcacagccgccccagcgagggtcggggaggcaggtgctggctccggtggggtctgcggcagagcaggactggagcccagggcgcagctgcacagctcaacgccggttcgcgccctggttacatgttagcgtgcacgggcggtctccgcagcccctcctcgtgccggagcctgtcctggggcctgcggggcggctccgggcctcgggccggcgcaggcgggcggcagggggcgctgtgcggctcggcgcgggggcggggccggggcc

SEQ ID NO: 2953 - DNA, 510 bp, Homo sapiens
  source 1..510: mol_type = other DNA
tattcgaaattaacatagctttaacatgaatcttcctatttgaagtaggtttcctgtggacaatgcaacatgtagttgacacttttaactggtatatttagaccattcacaattacacacactttaaaaatagaaaatactgtgtattgctatttggagatttttttttccttaatatattaagttaccttattcctttacaaaattacatagccaaaggaattgctttctaagttctttaaaattgatctcaccattctaaataaactatttttttccttaacaagcttggtatccggtcagataaattggagtttaagcctaagactcagcttcatttttatgagtgataccttagaatcaggaaaatgccttttatcacaataagagaattttaaacaatactcaatcaattgataaccaatgaaccaacaagtttgttccatagctataatttgacaaatatctccactgctgaagagtgtattttgttttcccccagagaagaca

SEQ ID NO: 2954 - DNA, 323 bp, Homo sapiens
  source 1..323: mol_type = other DNA
tatgtaaatgtagtttcaatatgcaaattctcctaattatttccgattaatacgatcattataatttgtgttaacataacttttccttatctgaagagacgaactcactctacacttcagtgacgagctgcaacacccccagggcaagggtcccgccgcgcgcttggaattaagaatgcatccaccccagctgggctcgcgccccgcccaccccgcggggattggctgcgaacgcgcgcgcccgcgcccaccaatggaagcgcccgctcgtcttgatagacgtgccaccttccgccaatggggacgagtgcggataaaagccg

SEQ ID NO: 2955 - DNA, 358 bp, Homo sapiens
  source 1..358: mol_type = other DNA
gggtgttagtgcagtggtgtgatctcagctcactgcagcctcgaactcgggctcaagtgatcctccaggtgctcccaaaatgctgggattacagtttcaaaaatcaagattgacgcttgtctcgctcctggatccggaagaaggctgtatgtgcagtttcttctgaagatataattgatgtttatttctctgaataagcttgattataatggaaaatagggataataaattaactgtaataagagtgacattgacactgaaaactggggcgcttgtcctgggtgtccccgccccgcggcccctccacgcccctcccctccacgcccagggggcgtggcaacccggagtccctccccta

SEQ ID NO: 2956 - DNA, 596 bp, Homo sapiens
  source 1..596: mol_type = other DNA
tatatacacgtgacccgccagggtatgtaaacctggcggacttcaacagtcaggggagccggtctccctgcgcccgcgggcgtcgaacccaggcccagctctcaccacccaaaggcccgggtgcggctgcagggtgacgaaagcgtcagaccccggggctgctctcagctcaaaggggctcagccggccgcccccggtgttgtctgccgtctctcccagagaggggtggggggaagacgctcttccatgctctcacccgaggagcgcgccccacgacgctggccagccgttctccggcgacggcccgggccgcgcctcggcgccctcgcccgggtcctcggcacgggggaggggcgtggcgcggccggcgctctctgattggctgcgggcgtcagggcgtcgcgccgcgattgggtcgcgcagctgtctgcgccggggcggggacgacgggggcgacggcaggacgggccgcgcctgtgcagggcggtcgggggcggcgggcgtggcggcggagggggaggtgcgagccgggcaccgcccccggcccctccccggccttccccgcgcagagctccgaccgcgggcggcccaggggc

SEQ ID NO: 2957 - DNA, 601 bp, Homo sapiens
  source 1..601: mol_type = other DNA
cttgaaggagggtgtgtaaaagtgtctatttcacacggttattgtgaggattaaataccaaaagtattaaagctgtggttaaactctcagtaaacattagttatttctaccaaagttaaacaaagtcttctgaacagaagttgacgtttgcattttaaaggaactcaaatggcttacttttgattatatatacacgtgacccgccagggtatgtaaacctggcggacttcaacagtcaggggagccggtctccctgcgcccgcgggcgtcgaacccaggcccagctctcaccacccaaaggcccgggtgcggctgcagggtgacgaaagcgtcagaccccggggctgctctcagctcaaaggggctcagccggccgcccccggtgttgtctgccgtctctcccagagaggggtggggggaagacgctcttccatgctctcacccgaggagcgcgccccacgacgctggccagccgttctccggcgacggcccgggccgcgcctcggcgccctcgcccgggtcctcggcacgggggaggggcgtggcgcggccggcgctctctgattggctgcgggcgtcagggcgtcgcgccgcgattggg

SEQ ID NO: 2958 - DNA, 631 bp, Homo sapiens
  source 1..631: mol_type = other DNA
tttttcagtataaccgagaatttccttaagagctgtaaataaaaatcggtaccagttcgaaccagcagccttcccagggtgggtgtaggggcccctcttgggcacactgtgtcccctatatgcaatgactgcacgcaaagacttctggcgtccggctgtggtccccgcagggtgcccgccggcggagcgcatcctccggcagggggcgagctccgcaccccgctttcctcatgggccggcgcggcccgccgttcaagtggggagcccagaggtgctccgcgccgtgggcggggggcggttggcgcgcacaaggccggactccggcggggcgcacctccacacgcaccctcgcgggcagcgggtcggagtcggggcctcgggccggctgggggcggggcatgggcgcggcgcgcggggcccggaacgccgagacaatgcggcgcgcggcggccaggaacggctcggcgggccggggcgcgcgccgccttccttcctgcgggatccgcttcccggcggcgcggcagcggcgagcgcgccgattggcggcccggtcctcccgccgccccgccccacgcccggccggccgccgcccccggcccggacccgcccctctccgcgggaggcgtcgggg

SEQ ID NO: 2959 - DNA, 262 bp, Homo sapiens
  source 1..262: mol_type = other DNA
tgagctgagaagtcgagatttctaacttctggcacatgtgaagccctggtgttaagaaacagacttgagctgagaagcctggcccgcaagcgcggaccaaaggcaggctgcgcgcgggcgacggaggaggccagtctccggttacccctcgcgagcgggtcttcctaagactcctcccctcgacttccggtcgggggacgccgctcgcgaggcttccctgcgcctgcgcatagtcttggaggcgcggcccggcggacgtggc

SEQ ID NO: 2960 - DNA, 552 bp, Homo sapiens
  source 1..552: mol_type = other DNA
ctttctggggaggtgacaccccaacagcctaccacgtgccatgcacggtgctaggtgcacagcggccaagctcggggcctagggagagccggctccgaagttcctcccagacgccagcctgcttggcacctgtctgtcaggcaaggaaacggcccgcggccgcccgccttgccgcccctccggggcgacagcggctcgggaagctgcagtccgcaagcccacgcccgatctgcgtggttccaagctcctccacccgcgccccgggagcgcggccccgcccggaaccaagcccgagcccaggccgctctcgggaccgtgttcccgtcaggcctccgcgagctcggccccaagcgggacgagggctgggcgctcacctcgcagccgcgggcccatccccgggttgcggacttcggggtccgcgtgggagtgccgcggcctttggcgcccaggcagctacgccacgtccgccgggccgcgcctccaagactatgcgcaggcgcagggaagcctcgcgagcggcgtcccccgaccggaagtcgaggggaggagtct

SEQ ID NO: 2961 - DNA, 489 bp, Homo sapiens
  source 1..489: mol_type = other DNA
ggcaaggaaacggcccgcggccgcccgccttgccgcccctccggggcgacagcggctcgggaagctgcagtccgcaagcccacgcccgatctgcgtggttccaagctcctccacccgcgccccgggagcgcggccccgcccggaaccaagcccgagcccaggccgctctcgggaccgtgttcccgtcaggcctccgcgagctcggccccaagcgggacgagggctgggcgctcacctcgcagccgcgggcccatccccgggttgcggacttcggggtccgcgtgggagtgccgcggcctttggcgcccaggcagctacgccacgtccgccgggccgcgcctccaagactatgcgcaggcgcagggaagcctcgcgagcggcgtcccccgaccggaagtcgaggggaggagtcttaggaagacccgctcgcgaggggtaaccggagactggcctcctccgtcgcccgcgcgcagcctgcctttggtccgc

SEQ ID NO: 2962 - DNA, 636 bp, Homo sapiens
  source 1..636: mol_type = other DNA
ccgtgggaatcacgtggggtgcatcacaagtgcacctgtgcccaagtcctgccaccagtacgcccatcgccccgccccagggagcggggtcggcctctgcgccggcgcccctggccctccgaacttcattgcacagttgaggtaagaacgttgcattacaaccacgttttaacaggtgaatcccttgtccgcggggttctgcatctgcgcatccaccccacggcgagcggccggctgcgcgcgcactgaaggtgcagctgctttcccttgtcattcgcagaaccacgaggtactgccagggtttccgcagtgcctgcgtcctcgacaggccctccagagtgacgctgggcgcaggaggccgcgcgcgcatcccacgacctcttccaggggggcctggagcagccctccgccccaccgagagccagtcccgccgcgcgtccgaacgcacctgcgcccgcggagcgcggggtgggcttagaagggcctccgggaaccacgcagcgggacgcgggctccggactccctgggggcagccgcaagcgcggaggccgagcttcttgcaagtgactgcgtgggtgcccacgagcccggctcccgcaacccacgggcggccactgcgcaggcgcctctcgtggc

SEQ ID NO: 2963 - DNA, 658 bp, Homo sapiens
  source 1..658: mol_type = other DNA
ttgcaaacaaactgccttgggaaatttccagtcttgtctgcagaccctctccctacaattagtccccccaaaacctttttcgtgacgacagacggatggaggcctcagacgactccggcagtagctcgtctcgcaggagctggcgagtggcacgggcttcggtggccgggctcggggctcggggctcggggcccggggccggggggggcggggggtccgtgcccagggcactctgtccgccctcccacctgagcacactgggcagagagcctgcggcatcgggccagtcgcgcctcctcgtccgccctgggcaggtcgctgggccccaggccgctctttaggaggcggccagacgcgcttgagggcctgctcgctagctcccgcccccccattccgcggtcacccggggacagaggccaggccggactgggtggagttgggactcatacgtctgcgtccaggaaggcgccgggcgagccccagctagacgtgacgggcggggccgaacacggcagcggaccagaggcccgcggcgcaccggcgtggggcggggcaagcggagcctcccgggatgccgcgcggcagccggcttccggctgtgggtggtgcgggggacagcggcggccggaagctggctgagccggcctttggtaacgcc

SEQ ID NO: 2964 - DNA, 589 bp, Homo sapiens
  source 1..589: mol_type = other DNA
ccaaacccaccatccgcagcgggagacgcagccgccgcctaggaggtcgtgcgcgcctctgggtctcgtgccgcacccagaagtgccggggcatcgccatggcaacagtgacgtcctttccgcgcgctcggtcctcattggccagcggcgcgctgggggcgggactctcgggagaagctcggcgcatcattgggcggtggaccgcccctcggccccggggtaggctgacaccgcgtcgcggccgcggagacgtgaaggtgagcgcctgggtcggcccgcgggcttcctccggccgcgctcggattgagggccgggcggaggtgccgcccttgagagcagccggttgtcgatgccgctcccctcagggacggctccgggcgggaaggtgcggggccaacggtcgcttccatcttgggccggccgggcgggggtggcgggagcggccgcggctcgggctccctgcgcgcggggcctccgcgccgcccccgcctcctccagccgcgggccgcggcctccccgggtgcccagcgggggagggggcgggggagagacaaaagcgggcggcgggccgcattgtctgacggcgctc

SEQ ID NO: 2965 - DNA, 508 bp, Homo sapiens
  source 1..508: mol_type = other DNA
tgcacatgtgacaacgatgtcctaaaagatacataaaaattgctttttttttgcgcaaattgtgcttaatgtcatttctcattttaaagaaaaccacaatattggcattgtcacagaaacgggaattttttgttttaggatgcccatctgaaaacttgaatttatcatgtaaatgccatactgaagacaccgtctccagaatcaattcttctttaatggggatgcattcggagccctaatggcaacgtcattaaggtctgggtttagcttgggatccaaaccttcaccatccgcagcgggagacgcagccgccgcctaggaggtcgtgcgcgcctctgggtctcgtgccgcacccagaagtgccggggcatcgccatggcaacagtgacgtcctttccgcgcgctcggtcctcattggccagcggcgcgctgggggcgggactctcgggagaagctcggcgcatcattgggcggtggaccgcccctcggccccggggtaggctgacac

SEQ ID NO: 2966 - DNA, 396 bp, Homo sapiens
  source 1..396: mol_type = other DNA
atgagatctctcttgaacatcacatttcagactgaaatcagacacaaaccagttcctgtttaataaataaaacaaggaatgaatgagctaaatttattgagcacttactgagactcaattatattcactcatgcatttatttattcagttatttactgcccgaggcacggagggcgaacccacagaggacagagcccgcgctcgcgagcacggccttgtccgaccccccgtgccgccggaggagcaagaccactccagtaggcgtcgcccactttcttattggtaggggtctgcgagctttgcggagcctcgcccccgagcgcgcggtttccctgccgcgcaggcgcacggaatcctaggcgcggatctcgcgtttccggccggaagctcccggaa

SEQ ID NO: 2967 - DNA, 258 bp, Homo sapiens
  source 1..258: mol_type = other DNA
catggcaatggcctggaagggccagggtccctgcctcaggtacagttgccctgtccccggcgtctggggccgcgcctgtccgagggtcaggtccgacgctggtcgcggtggagtggtgcccggggccggcccggggcgcgcgactgcacgggcagcgtggggcggccgcgcggggaagtggcgcccgggaggctgcggggcacagacatcgcggagccccagggactgccgccgaggggaccgcgggagctgcgacgc

SEQ ID NO: 2968 - DNA, 734 bp, Homo sapiens
  source 1..734: mol_type = other DNA
tgccctgtccccggcgtctggggccgcgcctgtccgagggtcaggtccgacgctggtcgcggtggagtggtgcccggggccggcccggggcgcgcgactgcacgggcagcgtggggcggccgcgcggggaagtggcgcccgggaggctgcggggcacagacatcgcggagccccagggactgccgccgaggggaccgcgggagctgcgacgcggctctcgggggaagccacgggactcgggcgtgacagcctgcgagacctgagacgcgcgaccggggagcgcggcgaccggcagaggcgcccccgccgggcgagcgcaggggcagcgcggggcgctggggccggaacagcgggcaatgtgggcacggggcgcccggggacggcggggacggcgggggcggcgggggcggtggcggggcgcgagcgggggcgctctcggtgcgcgcggaggttggcgggtgcgcgccgcagccgcagcgctccctctcctgtcagggcaggcgcgtacggccgcgagtcgggcgcgcagccccgggagcgcagtcccgggcgcaacctcgcggaacgcgcggcccccgccccccgccccgcgccgctcgtccccgtcagccccgccccggcgctcttctcgccgaccaatcaggaggcgcgaccggcctcccagccccgaggcctcgcccccagccggcgcatcgccagccaatgagcggccgagcccggcgcccagtgcgcgc

SEQ ID NO: 2969 - DNA, 766 bp, Homo sapiens
  source 1..766: mol_type = other DNA
tcgcggtggagtggtgcccggggccggcccggggcgcgcgactgcacgggcagcgtggggcggccgcgcggggaagtggcgcccgggaggctgcggggcacagacatcgcggagccccagggactgccgccgaggggaccgcgggagctgcgacgcggctctcgggggaagccacgggactcgggcgtgacagcctgcgagacctgagacgcgcgaccggggagcgcggcgaccggcagaggcgcccccgccgggcgagcgcaggggcagcgcggggcgctggggccggaacagcgggcaatgtgggcacggggcgcccggggacggcggggacggcgggggcggcgggggcggtggcggggcgcgagcgggggcgctctcggtgcgcgcggaggttggcgggtgcgcgccgcagccgcagcgctccctctcctgtcagggcaggcgcgtacggccgcgagtcgggcgcgcagccccgggagcgcagtcccgggcgcaacctcgcggaacgcgcggcccccgccccccgccccgcgccgctcgtccccgtcagccccgccccggcgctcttctcgccgaccaatcaggaggcgcgaccggcctcccagccccgaggcctcgcccccagccggcgcatcgccagccaatgagcggccgagcccggcgcccagtgcgcgcagcccgcgcggagccggctcagagcgagacaacccgtcggggccgccgctccggacccgcagccgccgccgccgcctcctccccccgg

SEQ ID NO: 2970 - DNA, 328 bp, Homo sapiens
  source 1..328: mol_type = other DNA
caagcagccccaaggccttgttgtaggacagtggacagggctgaggctgcccaccccagggcctgcccccggagacgccggcccctgtccctgccaagctttccagggtccccccatgctggggtgacagaggcagtcccccaagaatgaggtaccacacacacacaagctgtttctgcttttggcccagtcagccaaaaactcccctggggtgggggcatgtgtgtgtactttacacacccaagaaagcccagccctgattgcctgccttgttgaaactaccagaggccagagggctggtgcctccctgctgtcacgtgaggacatg

SEQ ID NO: 2971 - DNA, 423 bp, Homo sapiens
  source 1..423: mol_type = other DNA
cagcatggttcctgctctccacgaacccctggacagcgggctagatgtctcctgcaggctcgaggacttcccggagggggcggcgttttctcggggcccccaggggcgtcagcgggacactcaggcccggccagctttccgacctctccggtcgggtgggtcccctctccccgcaccgagtccggccccggccctgggatttccccagccgccgccccccctggcgccgccgtgccgcgtcccgccctgcccgatcacgccgcggccaggctccgatcacgcggccccccgcggcgctcattggccggccgggcacgaattggctggtggtggccggccccgccccggcaggggcgcggtgtatcgcctccgcgccccgccccgccagccgctccctccgcggccgccccgcccctcccgcgc

SEQ ID NO: 2972 - DNA, 537 bp, Homo sapiens
  source 1..537: mol_type = other DNA
gagttaaacccaggacttttgaattgccctgtcttggaaaggctggaattaggaaggctcaaaagtagtgactatttggaggttttgatgaggctcaaccttcacacatccgccggagggggctgttggtgcccggaggatcgccccttccctcccggggcgtctcaggcctggcggacactgaaaggtcggggcgcactgacggccggacctcgcgaacgcagcgcgcgcagccctcagggtctttcccccgcccaccccgcgcatcgctagggggctcaggctttgggaagtccccccaagctcccgcggcctcccacgggcccggcgagcgtcgtctggggagctgaacaaactcagccgggccccccgcagggttcagcaattccagaaggccgggacagggctgacccgacggcggggagacccgggaggggaggccgcgcccgcacccggtgctcctcgccggggtctcgggcccgcccctccctagggccggtgtgcgccccctcgggacgcctatgcagccctgcctcg

SEQ ID NO: 2973 - DNA, 585 bp, Homo sapiens
  source 1..585: mol_type = other DNA
ccaagggccttctcgccatgtcccgtacgagtcccattttactcacggggacaccgaatctgtaagaagcctggtcgcttgtcccagcaaaacgagccacggggctcagcggccctaacttttaggctgtagggtcctcgccgtcggggcccttgcacccccaccgcaggaggggttggctaagccccctgcccggcggcggcccggctgggaggaggtgctttcgggaggcggggccgcggcccggggatcctctcgcgcccgcgggctccaatcgctaacggttcccgggcgaaccggggcccgcgcgcgccaaggccgccgagaccctcaggggctgcggccctggtcccgcgggacctgtgggggcctgggcggcggcgcccccgacccagccagcggacgggccggggggggaaccgggaggtcccggggggcgtccacgggggtgtccccgggggtctccggaaggcgccggcggaggctcccgcgctgcgcttgaaaatcgcgcgcggccccgcggccagcctgggtaggggcaaggcgcagcatggcacagccaatggggggccgcgcgcggcgcgt

SEQ ID NO: 2974 - DNA, 715 bp, Homo sapiens
  source 1..715: mol_type = other DNA
cggcccggctgggaggaggtgctttcgggaggcggggccgcggcccggggatcctctcgcgcccgcgggctccaatcgctaacggttcccgggcgaaccggggcccgcgcgcgccaaggccgccgagaccctcaggggctgcggccctggtcccgcgggacctgtgggggcctgggcggcggcgcccccgacccagccagcggacgggccggggggggaaccgggaggtcccggggggcgtccacgggggtgtccccgggggtctccggaaggcgccggcggaggctcccgcgctgcgcttgaaaatcgcgcgcggccccgcggccagcctgggtaggggcaaggcgcagcatggcacagccaatggggggccgcgcgcggcgcgtgctggagtgaggggtcgcccgtgcaccctgtcccagccgtcctgcgcgcccatcacggacccgcagcagctgcagctctcgccgctgaaggggctcagcttggtcgacaaggagaacacggtgagcccgcgggggggaaagcgaagccgctcctcactcacacgcgtctccccgcagccgccggccctgagcgggacccgcgtcctggccagcaagaccgcgaggaggatcttccaggagcccacggggcagaggggccagggacggccttgggcgtcttggcgccaaagccgcaccgcctaggcggcccctccccagggctgcctccc

SEQ ID NO: 2975 - DNA, 684 bp, Homo sapiens
  source 1..684: mol_type = other DNA
cggggacaccgaatctgtaagaagcctggtcgcttgtcccagcaaaacgagccacggggctcagcggccctaacttttaggctgtagggtcctcgccgtcggggcccttgcacccccaccgcaggaggggttggctaagccccctgcccggcggcggcccggctgggaggaggtgctttcgggaggcggggccgcggcccggggatcctctcgcgcccgcgggctccaatcgctaacggttcccgggcgaaccggggcccgcgcgcgccaaggccgccgagaccctcaggggctgcggccctggtcccgcgggacctgtgggggcctgggcggcggcgcccccgacccagccagcggacgggccggggggggaaccgggaggtcccggggggcgtccacgggggtgtccccgggggtctccggaaggcgccggcggaggctcccgcgctgcgcttgaaaatcgcgcgcggccccgcggccagcctgggtaggggcaaggcgcagcatggcacagccaatggggggccgcgcgcggcgcgtgctggagtgaggggtcgcccgtgcaccctgtcccagccgtcctgcgcgcccatcacggacccgcagcagctgcagctctcgccgctgaaggggctcagcttggtcgacaaggagaacacggtgagcccgcgggggggaaagcga

SEQ ID NO: 2976 - DNA, 616 bp, Homo sapiens
  source 1..616: mol_type = other DNA
cctctcgaggcaggtgcaggggatggaggatgcccccctccccgagagccaggaggcgccgaccctgggcaggaggtgccagaccggcgcctctcccgcgtggagcaccttccgcagaggcggcccaatggactcgcctaaacccagagctggagccaggcttcccactccaggcccggggctctcccccgaacaggcgtgggaaggggtgcgagctgcagggtgcggggctggggcaactcggctcttccccttcctaggccgcccgggccacttcctgcggcgtgggggcggggggcgcgggcgcagggctggcccctcccgggcgccgcctctcggcctcttctataccagcaggccagaggccaagggttaggggaacagaaccggtgcccggctccgcccctgtcccgaaagccactgggggctgggacccggcagggccaggtttgggccgcgagggccgcaggggctgcgagggccgagccgggcgctgagggtccggcaggggcccggagggggcggggccgtaggaaacttgagcgcccgcctctggccgcgcgccccgccccggcccccgcctccgggtcccgcctccaggtcccgccttcgcgtc

SEQ ID NO: 2977 - DNA, 337 bp, Homo sapiens
  source 1..337: mol_type = other DNA
gggccgggcgcggcagtcccagctactccgagatcccgccactgcactccagcctgggacagagcgaacaccactgatcactcagaagtaggtgggttgtgaatcttcagcattctggaaaatgtaaaaagttgttcagtgggcagcagctcctccgttcttgcccactgtccagggctcaaggagattggggatttttttttttcctaaatagatacagagtagggctatgagggtctcagaaactggtacctactttccgggagcccctgccggaggacagacagccctgggctcaggcttggagagtgcattctcttccccattttggcaaaac

SEQ ID NO: 2978 - DNA, 702 bp, Homo sapiens
  source 1..702: mol_type = other DNA
ctgggcgctcctcattattccgtaactctcagagcgcgcggcttggagactcaggatccgggtcccctcacgctcctgtgagtccctggcttcacaggggaaacccaggacagttacaggatacctcgatgttacaaagacgaggcttccagcgcgggggcgtggaggcggctgccagccctgcccgcagcgtgctggcgacccccgggacgccccttccctcccgcgcctctgctccctagctggtgggagcagagcggcaccgggcaggtcccttgcaccggaggaatgggcggcagcagggtccggagtcggcccggcggggcccacgtggccagcacatcggtcaggtggaagcacagctgtgcagctacaggctctgccgttcagctgccgcgggccggggccggggcctgcggcgtcgtgcgcgtgcgcggaccagttccaggcgggcgagaccgccgcagggcggggcggggcgaggcggccgcagggcgcccggggcgcgaagccgggggcgggggccacgcgtggggcaggcggtgctcggctcggctgacgtcggcccgccggcgccccaccagctccgcgcgggcccgggttggccaccgccgggcccccgcccctcccccggcggtgtcccggccggaaccgatcgtggctggtttgagctggtgcgtctccatggcgacccgccggtgc

SEQ ID NO: 2979 - DNA, 259 bp, Homo sapiens
  source 1..259: mol_type = other DNA
tcactctgttgcccaggctggactgctggtcttgaactcctgacctcaggtgatgcctcgcccccgcccgggaggatgacatctcggcctgggcagagactccctcctgccgctcagtaacagcagccccaggctggagtgcagcggcgcgatctcacctcccgtgtagctcgcgcccggcttgtgtctagtcttgcccgtagcagcgtcgccgacagccacgccgggttgtcttccgggaacttgcccgcgtgttccg

SEQ ID NO: 2980 - DNA, 521 bp, Homo sapiens
  source 1..521: mol_type = other DNA
agcttctcgggaagctgaggcaagagaatcgcttgaaccaaaaaaaagcaaaaaaatttttacttttgccgggcgtatgcctgtgatcccagcactgcagcccaggagttcaaggctgcagtgaactgtatcatgccactgctcttttttgcatattttacaaagcacaaccctgtcagcgaggccctggggttctccagagaaggaggagaaggctctgcagagccatgcgccctggacggaagaactttcaaaagtaattcaacaacacggaatattcgtcgggcacaagaggaattccctgtcagctcccaggaccgtgggtgccctgaggccgagtcacgctcccccgggataaagggactcccctccgagcagcaccccgagagggcccggaggagctgaggcggtgcgagccgagactgccagccccgcccccagcaggccccgcctgaccaatgagccgcagccacggcttggcgagcgccttccggcccgcccccgcgcggccgcccctcgga

SEQ ID NO: 2981 - DNA, 313 bp, Homo sapiens
  source 1..313: mol_type = other DNA
gaccctgtgtcaaaaaatatatatatatataaagagaaacatgaaaaaatattgctgatacattactactcaggaggctgagacaggagtgcctctaaataaataaataaataaataaacaattttaagctgggtacaaaatggtaggcacattgacactgggtgcttcctctgcggtcaccgcctggtaggatgccttcaagttttcatccctcgcgctcccaagctccggggcccctgagccctgcgccggcggaacggggcggagctcgcgaccctccctcgtccgccgacccgggaaggggcgggggcc

SEQ ID NO: 2982 - DNA, 300 bp, Homo sapiens
  source 1..300: mol_type = other DNA
gctgcctccctcatagaagcagaatccagcagggctcagtggttcactggctgccctgctgccctgcaccccgggcactctgcgcactcttccatggagctcagctgagcggctggtgactgactgtgtgaccgtgggcggtcactctcagataaagcagagtgctgtgtgaacgctctgggtttgcagacagagtgcaagcaggaagcttcacactgatgcctccacggcctgacgggctgccggaagcaagtgcaataatggtgggggtggcccccaggagccccagctttgctccct

SEQ ID NO: 2983 - DNA, 319 bp, Homo sapiens
  source 1..319: mol_type = other DNA
ctcttccatggagctcagctgagcggctggtgactgactgtgtgaccgtgggcggtcactctcagataaagcagagtgctgtgtgaacgctctgggtttgcagacagagtgcaagcaggaagcttcacactgatgcctccacggcctgacgggctgccggaagcaagtgcaataatggtgggggtggcccccaggagccccagctttgctccctccccctcccccaccctgtgcggaggactccggccttggggtagggggctctctgccccccagccctagggggcccgcccctttcctaggagctgtccgttcccag

SEQ ID NO: 2984 - DNA, 426 bp, Homo sapiens
  source 1..426: mol_type = other DNA
aaaaccagggatcgtgaccaggccaagttactttatcaggagaaatccttaagaaacagtttcactgtgagtggcccctcagggcccacgccgctaggagggaagccttcagtcccaggctggagacaggggctctggtcccagctgtaagtcgggagggtgcactcagcccggcagaatggcccatcccccggggccatttgcctggctcccccgcaggccagggtgggactgtcgcccggggcgagcccgggcgggcccgtaggggctggccagggggcggggcgggcccgggcgggaggggcggggcggggcgggcccgggcgggaggggcggggcgggcccgggggcggggtgcgtcccgagcgaggcgggtccggggcctggcggcgcgcggaggggcgggccctggccgggtggtcccgg

SEQ ID NO: 2985 - DNA, 522 bp, Homo sapiens
  source 1..522: mol_type = other DNA
taatactcaatattaggtagtttgtatagcttccttatgaggaatgtgggcaacacactctttactgggcaggtaaaggaaataaagggcacttaatctctcaaatcattgcaagttggacagagctagaggaagaaatatttagcaccatatattatctgctgaaactaaacacagataagtggtttttaaaaatcatcatgccaaatatattgatgccacagctgcatatttctaaatatatagcttggaagtatagctttcacacttctaagatcttttaatttaaacatttgatctatttcttcattttttagaaatatgaaagcttccttcattttgtactaacctcataactgtagtgtaagaaataagaaaagttgttgatttgcatggaatctccattttaaggataatgcattttccagtgtaagcaatatgtaatcattgtatatctagtaataaatggattcattgcatttataaacagcagttggaacaccggattatatatcacctgag

SEQ ID NO: 2986 - DNA, 536 bp, Homo sapiens
  source 1..536: mol_type = other DNA
ttggtcatcacgaacattgtgaatagccccaaaggggctctatgaacggttcggccgaatgcggcggaacggtcccgataaccacccctcttccggcctgcggctggaaagccaagccgggcagaaacgtcagtcctgacccccggccctgcggcccctcgcgggcgccgagctcggtcgctgcgcgggtgaggcgaggcccgcatagctgcgcgctgagtcagcgggggccgcggcggggggcgcggccgggctcccccccagcgcacggtgcgctgggcccggcgtctggggttccgcctcggggccgcggggtagtccgcggggtccggcgggaggggcagggggcgcgcggaaggacccggcctgggtgcgtctcccctcccccagcaggagctcggccgtgaccgcgcgcccggctattcgcctcagagaacctcgccagggggacgcggtgcgcggggcggggcggggcggagcgcgcgcagggccggcggggacgcgcgccggcggctgcgggcggaggggcttgtggg

SEQ ID NO: 2987 - DNA, 466 bp, Homo sapiens
  source 1..466: mol_type = other DNA
tggtgtggttgctcccctgtctctactaaaattaaaattaaaaattagccaggcacagtggcgcgcgcatcccgggaattcaaggctgcagtgagccctgacaacatctctgcggctcagaactttcagttatcacctcagaactttcagttagaattccaggcgaccgctgggttttcctccgtggattccgcggtccgggtttcccgggcggcagccgccgggagaggatcggtgcgtgggagcgctccggcagcggcgggcatgcgcagaatggcgggccgggcgacttgagatccgcgggtctccctcctcgggagctcccgggcacgtgaggccgtgccgcgtttactggcgggcgggacggcctagccgggcggcgcctcggaggaagccgcggaccccttaggtgctgggcctgctcgagctgagcaggacgcccggccgggcagcatgagtcagcagc

SEQ ID NO: 2988 - DNA, 359 bp, Homo sapiens
  source 1..359: mol_type = other DNA
acagattaagtaactggcttaataaggtcttatacgtagaggcagccaggacttgaaaacatggctccagctaaattaactggcatattcaaacgatggtgtggttgctcccctgtctctactaaaattaaaattaaaaattagccaggcacagtggcgcgcgcatcccgggaattcaaggctgcagtgagccctgacaacatctctgcggctcagaactttcagttatcacctcagaactttcagttagaattccaggcgaccgctgggttttcctccgtggattccgcggtccgggtttcccgggcggcagccgccgggagaggatcggtgcgtgggagcgctccggcagcggcggg

SEQ ID NO: 2989 - DNA, 532 bp, Homo sapiens
  source 1..532: mol_type = other DNA
tggtcctgaacagagaagaaattgcaggaaagggagccaaatttcctaaccattttctctgtcaaacaggttttatgcaaagttgagcaattttctccaacagtgctctgaagatgctgttcgcagcacgtgatgggcagcgcctggcccagggggagcagacgacccagacgacggccagcggggttggcggcggcgcggggaggagggggccggatttgggagaccaccgcccgtccccgtcccgtccgccctccacgttgatggggtctcggcaccgacggcgaaccgtctcctccgtcgggtccaggaggagactgggtaacttcctcgccggccgctgctgactcatgctgcccggccgggcgtcctgctcagctcgagcaggcccagcacctaaggggtccgcggcttcctccgaggcgccgcccggctaggccgtcccgcccgccagtaaacgcggcacggcctcacgtgcccgggagctcccgaggagggagacccgcggatctcaagtcgcccggcccgccat

SEQ ID NO: 2990 - DNA, 268 bp, Homo sapiens
  source 1..268: mol_type = other DNA
tccaggctggagtgcagtggtgcgatcacagctcactgcacccccatctcggcctcccacagtgctgggattacaggtgtgaagtccttcggaggcaagccaggctgccagctgactgtcttccaccaacagcgtactgtggctccagtccaagtacacatgtagtttaaaaagaatcagtttaactgtggttagacagattggtatgtacctgtggcatttgccatctgacccggcaggcgctggggcagatgaagctccagttgga

SEQ ID NO: 2991 - DNA, 240 bp, Homo sapiens
  source 1..240: mol_type = other DNA
gacgggcccctcaggcctgtgttgcccaggcacacttttcagacagctgatatttacctttgtttaaggcaaaatcctgattctggaagaggaaagttctttgcttctcacagggcaggcatagaacaggccagaagctgtccatgtgtggcgagccctgagaccccgaaggcccccggctgcatctgctcttggagctagtcaatgccacactccctgtggccccagggagaggcttaa

SEQ ID NO: 2992 - DNA, 309 bp, Homo sapiens
  source 1..309: mol_type = other DNA
gctagtatggaaacttgatcacctgagatgaccagcctggtaggtgcctgtaattccagctactgattgcagtgagctgagatcgcacctggcccagtgtaggatgttcataatgacatgctatttattaaatgacatttaaagatagagaagttgagaaagatttttaccccaaatgttgcttatctgtgtacccagagccactgggctgcccaacacacagttgtggccctgtagtgacagagtgtgtgtccagggagttgcaggatttccatggccacccctaggcttctgaaatattatttcact

SEQ ID NO: 2993 - DNA, 336 bp, Homo sapiens
  source 1..336: mol_type = other DNA
tgagacagggtctcactctgtggcccaggctggagtgcggtggcgtgatcacagctcactgcagccttgagctcctgggctccagggatcctcccacctcaggctcctgagtagctggaaccaccagcgtgtgccaccacactcggctaatttttaaaatttttaaaattttctccatgttgtctgccatgcccagggcagtgccatgctccctgcctgtcatctagcccctctcccagatggtggggggcaatggccatccccaagtcccagctactcgggaggctgaggcagcgccactgcactccagcctgggtgactcagcgagactctgtc

SEQ ID NO: 2994 - DNA, 470 bp, Homo sapiens
  source 1..470: mol_type = other DNA
atgcctaagaatccagccctggttgttaatgattcttgtcgttcaataaatgcttataatttcaataaatttattgtgcagagtaaaagtatatttacataatctcaatttcaatgtagatatggttatatgcccacatggaagattataataaaagtcaggatccctgggttcttggatgaaatgagaaggcctctgggcttttcagctctaaagtttctgcatgaatttagaaaagtgaaaggttttaaaacatgctaaaaacactatgacactctcaaatgtattctcagtgacaaaggagcttcctggggctcttaggatggatgaaacagaagtgctgggaaagtctttcccaagatcttgcttaaaaaacttgcccaagttcacaaagttcgaaagtggtggagttcggcccaactcgggactatcagtgaccgacgcaacgggctggcactcgcggtcccacg

SEQ ID NO: 2995 - DNA, 452 bp, Homo sapiens
  source 1..452: mol_type = other DNA
caatacacgtttatcacctgatgagggaggatgcattcccttctgggagctctaggggagaattcatttcttgccttctctccacctgctgggattacaggcgtgagcatctgcacccggcatgcatcttcatgtctagcacaggtcctgatatgtgagagcaggtggccttggggcccgctgggaatgccgtgctcagggccatgtggggagtgcagcatcgcactggacccggctctcctgatgctctgcggggtgctgagaaagcaccatttccatccgagccctactgcctctgaggagctggagtggggagggcagggtacacagtgccccgcggctggccggcaggggtcattccccccacaaaggtgacagaaactggcatcttctggtaggagagcatttgcaattcaacttggccggggctcccgggactggtgtaaagggaa

SEQ ID NO: 2996 - DNA, 452 bp, Homo sapiens
  source 1..452: mol_type = other DNA
tgtcccagctactcggcaggctgaggcaggttgcagtgagctgagatctcgccactgcactccagcctggagcgttccttgctgagcagacttctgatattttaaaggattccattctgttgaataactttccattttagcatgttaaaaacttctaattttagttgattggacaataattcaaaaattgtatactgtaattattcttcattttatcttgatgccttttttattcaacaacatttattacaaaaatctcaatatcaaatttggagtgcagcattctgaattaaaaatctcttctagttagcttgctatgaattcagaaatcagtggagaaatttgatttcgtgagtgtggaccaggctcaagtctgaatccagggctggtctcctgtccccgtggggggcatcagaatcctgccgcccaacaatggcctttcccaggagagc

SEQ ID NO: 2997 - DNA, 354 bp, Homo sapiens
  source 1..354: mol_type = other DNA
actgtagcttgggtgacagagtgggaccctgtctcaaaaagaattggtttggaataacatttaaataatacctaaactcggaaatcatttcagctgcctgcctcccggctggagaggcgcagggagctgcctgtccctcctgttccgcacctggaccaccgcttggcagaggcgggagtggtcagatcccgccactggtgataagcgggacccatgaccgacgtgatcgcggccaggccctgggataggcggccaggggtgagcgggcagggccggccagcaggccctgaaagcagccgggccaccagcgcgtcccgagtcccccctgccccgcccccgaaggcgagctgcgct

SEQ ID NO: 2998 - DNA, 514 bp, Homo sapiens
  source 1..514: mol_type = other DNA
gcccgcggactggaatctcccactgcagccttcaaacagcgctccctggaggtgtgggtgcaaagttttgtctagcttggcctccaaggccctccaggcaatgcttaaatttgacctgaatcaaatgccttcagttcctcttctgctgaaaggatttccttttagggccacatctgagcctgggggcccaattggggaacggctcgggagtcgctgctggtaaccccggcccagccgcccgcagctgggctcgcagccggctcgcagccgacacccagggtgctgcgcccggggccccgggccgcggaaggatatgtttacctccccggccgggcgagggagctgcgaggccggtgctggcgcccccggcacggagctgcaatggcagcggcgcggggagccgcccgaggactggcagcggcggggctgattgatgggcgcccggcgcaatgaggggggcccgggcgggggcggggcggggccggctctgggctgagccagtcgcgggggcggc

SEQ ID NO: 2999 - DNA, 544 bp, Homo sapiens
  source 1..544: mol_type = other DNA
aacagcgctccctggaggtgtgggtgcaaagttttgtctagcttggcctccaaggccctccaggcaatgcttaaatttgacctgaatcaaatgccttcagttcctcttctgctgaaaggatttccttttagggccacatctgagcctgggggcccaattggggaacggctcgggagtcgctgctggtaaccccggcccagccgcccgcagctgggctcgcagccggctcgcagccgacacccagggtgctgcgcccggggccccgggccgcggaaggatatgtttacctccccggccgggcgagggagctgcgaggccggtgctggcgcccccggcacggagctgcaatggcagcggcgcggggagccgcccgaggactggcagcggcggggctgattgatgggcgcccggcgcaatgaggggggcccgggcgggggcggggcggggccggctctgggctgagccagtcgcgggggcggcggagaccgagcgcgagcgaggcgcgcgcgcgcacacgcgcactcacggccccgctctaataccg

SEQ ID NO: 3000 - DNA, 644 bp, Homo sapiens
  source 1..644: mol_type = other DNA
aatgttgtatatatgaagttcattttttcagcatccaatattcagaacacatgcttagcaatcccaattctgaggcttggaaaatttctactctctgcttgcatgtatgaactcacatacatgagttgtgaggtactcctcctatattcagaaaattggaggccaggaatgcaccggccaaagctcaggcttttgggtggcatttgacaccaagccacgtctgggggggtcttcgatccaaggacctaccaaggctctgggggatcccagcagggcccagacgcccgcctcgggcaatgtcgctgcctgccccgggccgctcgcagtgcctgggccatacagtctgtcttcctggaacacggaacgcgggcgggctgtgttctcatcggatgagctggggggcgcgggcgcaagcgggcatcggcacctggcagaaagcgccgcgccccccgcgggtgcgcacacctccgctccccggggcggcgcgcggtcgggtgtgcggggtacggggcggggcggagcggagcagagcaaagcgcacaggaggcccgcctctgctcccctcccccgccggacccgccccaaccaatgagcgcgtcctggggcgggccctgggaccggctgctccggctacttagagtcgt

SEQ ID NO: 3001 - DNA, 367 bp, Homo sapiens
  source 1..367: mol_type = other DNA
tgtctttcttcatggtccaaaacatataaacaaaaggaagaaacaaataagccataggtctacttttctttatgcaagttaactccctgctacctggtgttatcaactgagaaagtcgcactggcgacacgttgaaagagttctttcaactctaaatgcttctccagtagattaaaattctagctccacgtcctccaggaaatccctgcagacttagttgtttattttaaaaccactgtttgagaatatacaaatgaactgttttatggaaactgagttataagagaggctcaatgacttggccgatctcatgtagattaatgacaggagtgtatcaggaccgggacacaagtcgttcccaagacaa

SEQ ID NO: 3002 - DNA, 483 bp, Homo sapiens
  source 1..483: mol_type = other DNA
gcatgcaccaccacacccggcttcttctgtgtgtgtgtgtggtctacaggcgtgagcccccgcgcccggccgctgcaactgtctttagataagtgacttaactttcccgaattttagagtcctcatctaaagattctaataccttcctgacagagtgagtgtttactttccccatctctctgcaaagagaaaggagttaaaattgcatgatcattacttagtttaaaaaaaaaatgtaacaaatacctactggctgccaggcactcactggcattggtgctcagggcaaggtgtcagcctgagcccactaccgcgtggtgtgctccgaacacatggtgcccagaacgacggcgtccagaagccctaggtcccagaggtccgctcagcggcaggcgcataaggcggggccggcgcgggcctttccttccatcggattctcccggggctgagtccctgcccggactccgaacgccgaagaccagg

SEQ ID NO: 3003 - DNA, 571 bp, Homo sapiens
  source 1..571: mol_type = other DNA
cggctgcagggaacgtacgcccattccccctaggaagcagagccaggccgcctcctcctccgcagtggtgaggacgcgtggacagtcccgcgggggcggcgggagacctgcggagtggccgcactccaggtccgcgccaaggccgggcagctcgcgaggtgtcgccttcggccgaagaaaccaccgcggcgccaccctcgtagctcgcactttatttattttcaaacaaggggggcgcccctcttctttcaatttgaaactggaaacatccagagcaaggccttgctcaacgttggcctcgcgctcagctgcgggggctgggttagaagcattttttttcttttaatgacaagcaattgccaggctgggtgctgcattgcaccgctccgcgcgcagctggttctcagagtgcagccggtgcaagcgggaggagcacaccctgggcttcccagctttgcagccttctctctgcaaagaaaagcaagtggcttttggcgcgaaagccttggcgcctcccctgatttttatggaaatcaggagggcggggtaaagccgctttcctctcctttct

SEQ ID NO: 3004 - DNA, 570 bp, Homo sapiens
  source 1..570: mol_type = other DNA
gtcccgcgggggcggcgggagacctgcggagtggccgcactccaggtccgcgccaaggccgggcagctcgcgaggtgtcgccttcggccgaagaaaccaccgcggcgccaccctcgtagctcgcactttatttattttcaaacaaggggggcgcccctcttctttcaatttgaaactggaaacatccagagcaaggccttgctcaacgttggcctcgcgctcagctgcgggggctgggttagaagcattttttttcttttaatgacaagcaattgccaggctgggtgctgcattgcaccgctccgcgcgcagctggttctcagagtgcagccggtgcaagcgggaggagcacaccctgggcttcccagctttgcagccttctctctgcaaagaaaagcaagtggcttttggcgcgaaagccttggcgcctcccctgatttttatggaaatcaggagggcggggtaaagccgctttcctctcctttctgagcttcaaagcgcaggctgtgacagtcatctggccgagcaagcgctagccaggcgcaagcgcgcatcgcctccggatcccct

SEQ ID NO: 3005 - DNA, 300 bp, Homo sapiens
  source 1..300: mol_type = other DNA
gaagccggggtccccaggagcctctgactcacaacctgttttgggatgttttacagacttactctttaaggttaattaagcctttgggaagactttacagtggtcctatcggagcttcctctgggaaggcaaggccaagggcaggggcgaccgtgctggggcgggtccgcaccagctcctgggacggccggtgacagcgcgggtggggatcccccggggccggggcggggcggctgccgcgagccgggctgggggcggggcgggggggcggggcggggctccgaggccgtctcgcaggct

SEQ ID NO: 3006 - DNA, 578 bp, Homo sapiens
  source 1..578: mol_type = other DNA
tactgagcaccagttacatgtttcttaagaaacatgtatataataataataaacattttgaaaaacattttcttcttaatgattatagaattcacaaaaaccagaattgactggaaatcataaataaatttgttagtaggtatgagtcagacctgtattattatgtttacactaaatggggtagttcaaacatataatattttatctctaaataattttatccacaatatttgagaagaaatcagcacatagtaaactattttttttttagtcttaagtgaagaataataattatccggataataatttccacacattttttccaaatattaatatgaaaggattaaaaagtttttccatacacagagagatttggtctggtgctgacagaactataaacaaaattttagaatttagaaaataaagttgttaccattcacaaattttttttttttaagttaacttttccccgaccttcagtggtgagacaaccggaaccctgagattaggctaaggccaggtcttgaggggcgggtcaggggcgtgaccagagcggcccggaaccgcctattaaggga

SEQ ID NO: 3007 - DNA, 453 bp, Homo sapiens
  source 1..453: mol_type = other DNA
ccctcctaaagaggggatttgccttctgtaatttaaacgataatattccttaggagtgctacataatagctggatattaaacattacaatatcgcatttatgatggtttaaagtatacattttttcctaaacacaagttgcaagtaagttatcggtatataaagacgagattttgaaagccttttgaaagtcgtttttctagctaaaaagaaaaagtgacttattcaggctgactccccctgccagtcccaggaaacaggagcagcccggcgcgcccgggagccccgcagcgcagtgcgcactgcggctccagagcgaagggctggcgcccgccagatctaaacgtgctcggctgccgcagcccgccggggccgcgcgccgtggtccgcgcgactccgcgctccgggtttccgcggtcaccagcactggcggaagagccctgccgagagggga

SEQ ID NO: 3008 - DNA, 437 bp, Homo sapiens
  source 1..437: mol_type = other DNA
ccgaccaaacatactccttgccaagccttctaggctttggcaggccaatggggaaagggggcgcgcttggctcagggtacacagggcaagaagcctcggatcccagctccctggaccggactgtccggggcactgggtgctgcaggacccggctcccagtactcctagcaccaggtagacgtgctcacagcttgctgggaagtcttctttcggaaaagcggctccacgtgttcccggtaaccactgggcgtggcgagtccgggtaacccgcagtccctcgcgcccgtccaggtgcgggttgctccggtagggaaactccgagcccctccgactgagcatgcgccatcgccaggcggcgctcccgagttctcctagctggggctgcggagcttgcctggagaggcggaggctcgcgcgcctgcgcatccagctccagg

SEQ ID NO: 3009 - DNA, 271 bp, Homo sapiens
  source 1..271: mol_type = other DNA
agtctcgctctgtcgcccaagctggagtgcagtggagtagctgggacaacaggcgtgagccaccgcgcctggccacaaagccctgacattgcctggaaagtgcactaaagagtgagaaacaattttacaatttgcaaactggctccagggtttggcaaattcgttgaggcagaaactttcacaggaggagtgcagatcaaagacctttagttctcaggagaaccctgaggtgacatctcagcacctagtgctgggagtcagagtccctgac

SEQ ID NO: 3010 - DNA, 560 bp, Homo sapiens
  source 1..560: mol_type = other DNA
ttgtaaataactacaataccttaaagtaattactataacagccagggagggctctcccgggggaattatccccatcgcatgcccgggggaagcacagcgggacccagcagcttcggccaagcgcaagcggccggagaacgcgcagctttcccgaggcggggtgacgcagggccctcgcgagtggaaaacaggggccaagtcgcggcctggcggctcggttgggaggacccgggcggcgccgtctctccacgtcccgcggaagaagctcaatttctgaattttctcaaaaggaaaaaaaaaaaggaaagtcctctttctttacccaccgggctcgccaggcccaggagccgaatccagcgccgggcccgcgcggccccgcctcttccgggaagtgactgacccctttcccccaatggggcccgctcggctttcccttgccggctcccagccggcctagcggacgcatgcgtagaccgagtccggtcactgcgggggcacttccggcctctcagactccggcggcgcgaaaccccgcaactgcgcaggcgcgggcggagccc

SEQ ID NO: 3011 - DNA, 511 bp, Homo sapiens
  source 1..511: mol_type = other DNA
ctgcaggtgccttctgcagtgcttagagattcaagtaatggactttttggataaacttagtgattttaaaatgattaaataggtaaagcattcttctaaggtgttgataaaatgtaaatatatttttagaacaatcttagagcttatgctaaagatgaactatgtaagaaagttaccttcttcagccaatgctttggatcctcttccacaggagagagaacagtgctctgcagacacatgcatctgtactttgcttcccagaagccaaatgaaagagcttggtgggctccaggcctcagggggaagaccaccctaggaacgtgggtttttcattaagcaaagaacaattagaaaacccaacatagggtattcagtaagttcaggaagcgcttggctcaaggtctggagcttacccagggaacactgggcgccccgaggaattgttccacgtctgcacaacttaaaaatctgcaggcgcgggggtgggtcccgaagcgtcccatttctcctc

SEQ ID NO: 3012 - DNA, 718 bp, Homo sapiens
  source 1..718: mol_type = other DNA
ccgaggaattgttccacgtctgcacaacttaaaaatctgcaggcgcgggggtgggtcccgaagcgtcccatttctcctcactgagcgctctcgctcagtgcagcgaggccagcgatgccttctggaccacacgctgtcctcgccgaggtccttccgaaaggggacccgactggttcctcttctacatatgaggcgcatctgcttggtgcaaatgtccaagcacctcttctgactcggtgagtggaggaataagacgttctgcactgtgcctgagtcttcaggcagcgttgttttaaaacattcctgaggaattgggccgcgactttagaaaggcggttgccccagccgccggggccgcgggggaggtcatctttttcccgcagggccacggcgcttccggcccaggagggcgcgcaggtgggaggcgcggggcgcgctcctggtcccacccggacagcgcctgccgctccggggtgactctgcacttgggcctgggcgggggcgcgcggccggcagggcagcatctgtctgtccgcctgtctggcggtcggagccccgcagtcctcagccgcccgcgccctcggcccggggcgcccggctgcgggcccgaagcgaggggctggcggagctgcgaccaatggggcggcggccgagcggcgggccccgccccgtcccgtccggccccgccccgcccgcagctcccgggagcctcgctcta

SEQ ID NO: 3013 - DNA, 327 bp, Homo sapiens
  source 1..327: mol_type = other DNA
gtccctgtgacacttgccttccatcgttgtaaatggaggcatttgtaaatggcctgctcagaagcctatatttacaataatagggaccaatgacataatttcccagatctgcagcagcagcagcacctggaaacttgttatattgaattagaaactctaatactggggccctggtttgtctcatctatgaaaaacaggtgaattgtacagagatctgtgattcaaagtactcatcagacattcccatggggaagtccgcaccctgaacactgtgctggttgcccagcctccatcatctggcccgcgcaccgtcaggggccgacccgc

SEQ ID NO: 3014 - DNA, 466 bp, Homo sapiens
  source 1..466: mol_type = other DNA
cttccctatttgggaagatgatcaccggcacaaggagctctgaaggccctggggagatgctccagtctccagacaagagactttcggccaagcaagatccattctgagtaggtatatgccaagcaggggacagaactttgcaaaccatgtgtcaaagcagacagtctctgtgtctgtttaacagaaccattgtcttgctgcagctccccagcagctccacgagctcccggcgccgctgtccgggcagccctcgctccagccacccgcgtcgccccagctgccccggtcgctggactcgcggcctcccacgcccccagagcccgatcctggctcccggtccggaggcctgggcccaaggcatcgtgcgggaaatccgccagacccgggactcgcagccgctggaatattcgcgcacgtcccccaccgagtggaagtcctccagccagcgcagggggatctaccccgc

SEQ ID NO: 3015 - DNA, 398 bp, Homo sapiens
  source 1..398: mol_type = other DNA
aaacctgcctcatgtctcctatctaaagcttgggtttagattctgtaaaccatactttttacaaatatcaattctatttgtaactgtatgtttcctgttacttgccaaaatgaatcacaaactcatttgtgctcagatctggaaactatttttacagcaagtttagacttgagtttgatttctgtctggcagaaatgattggatccacaaatgactttgccattcattttggcaggtaatattgatattgctacatattgaacatttgaacaatgtttagacatcaatttctgaaaacaaaatacactcaaaatgaagaaacatttattttttgttttttaagaaaaggttaatcacatattcatagagtcagtttgttactatggaatcacatatga

SEQ ID NO: 3016 - DNA, 429 bp, Homo sapiens
  source 1..429: mol_type = other DNA
atgcctaggcaatgaagatagaatttttaatgtccagaactctgagaggctggaactgacaactttgcagctcgtctagcttctcagagagttctgggccccaggaaaataacactggactccagaacttagggtctggggtcaaccataagcactcaccagcgctgcctgggttaacaccctggccccgaccaggagctgctccacactcggggtctgccgcctctgcgttgaaacccaagccgcggtgtggggatcccggtgcacagagctactgcccctccctccctcctcccaaagagcacgggctgtgtcctaggagcccaacgtgcggtgccagcgccaggcgtgccgctctggacgtccaagcgagagcagctgccaaagtctgctgcccgggtcagcaaaaactttgtctttcattgcgca

SEQ ID NO: 3017 - DNA, 165 bp, Homo sapiens
  source 1..165: mol_type = other DNA
taatttaaactgtatttgtatttttttcagtggtggtaaaaggaaaaaattaaaaaggtagcaactgttcttacaaaattttaatttgaattatacgtaatgtacgtaataaattactatttggattcaattctagaaccccttttctaggaaaagttcgcgaga

SEQ ID NO: 3018 - DNA, 409 bp, Homo sapiens
  source 1..409: mol_type = other DNA
ctactgatgcataaattacatgccaaataatttcaagactttgaggctttgtaactctcaagcattcattcctttaaaaggagttgcggtaataattaaactgttaaaaaatatcaaaacaaatctttcaagaatgttggaactttggaacttacaaaatactaaataatttgcccttattcgaacgggcgcctctcctcttaggtttatagtaatgccacctgaggcgcggctccatagcgatcatcacacggctggcagtgacaggtcgcgacccagctccttgcgcagctagtcgcgcctcgcgccctgccgacgtccgcgcaggcgcactacgccggtgcccggtgcgagggcgtcaccggaagtgtcccgcggcgccccggatgcgaccgggcaacagcggttg

SEQ ID NO: 3019 - DNA, 380 bp, Homo sapiens
  source 1..380: mol_type = other DNA
tctatattgttgaatcaggactggggaatgaatttacaaatcgatgcaaaatggcttttcccattgaagacattcagtaattttttgtctcaatgtgtttcataattttcttcgcccccaccaaggaggcttcggagggaaaagagggtgtaaatccaatccctccacatttccgccacaggggcgaggatggctcaaggctgggcttggctctgtcccttccccgccccgcccccagcccgcgcaataattgagctgcgcgcaaaggtcacgttatcagcctgtgacgcttcccaggcacacattgctcagaaaaccttcgcgtaacaggcggagactcgcgccttccgctccccattggcctgtgtggaggaagaggg

SEQ ID NO: 3020 - DNA, 495 bp, Homo sapiens
  source 1..495: mol_type = other DNA
tcaaaccttctcacagacagtgagttccatgggggtcccctggcagcctccagccctgtaccatactttctattcccggtaatataagttcaaatgtttgtggatattctttctttttttttttttaaacaagagcccacagcaaaactttacttggctgagagcagagcccaggggtccccatcccgtacctggggcgcaggccccgctggggtgggagagggccgggcaggctgcagccgcggatggctgccccccctgccccggtgttactgggaggacggaggttgcgacagcagccgagcccacccagttgcagccggctcggggcttagggcaggggcgggaggtgaccaccgcgccgctggccgcctcgcccagactggaatgcgcggacaaggctccttgttggccttgggcggggttcgccgggccggcctggcgctcgaggccccggggcggggcggggcccgaggccgcgggacctttaaatcc

SEQ ID NO: 3021 - DNA, 503 bp, Homo sapiens
  source 1..503: mol_type = other DNA
cctttagcgtgggcgagtggtgaatagtctctgctctcctaaaatttgtattttattggggagataatcaacaaatacatacatactttactctgaattcagtgtagaagggaagccctttctattctctgaaaagaagtgtgtttaccaaagcattaaatgataaatacattttttaacggtgaagtcacaggtctcacagaaatacaaaatgaacacgtgtaaaaaatttatttactcattaaccatctatattgttgaatcaggactggggaatgaatttacaaatcgatgcaaaatggcttttcccattgaagacattcagtaattttttgtctcaatgtgtttcataattttcttcgcccccaccaaggaggcttcggagggaaaagagggtgtaaatccaatccctccacatttccgccacaggggcgaggatggctcaaggctgggcttggctctgtcccttccccgccccgcccccagcccgcgcaataattgag

SEQ ID NO: 3022 - DNA, 581 bp, Homo sapiens
  source 1..581: mol_type = other DNA
agggaagacaggggaggacgacgccatctttggtctcagggcccaggtgcgaaggtcgtttggcaccatctctcctgcctgccagatgtgggcagggcccgtccggttcccaggggggatctcgaaggagcagcaactgcacggtgctcctcagatccgcgtgcccgaggtcaccggggaacaaagaagttacttatttttccttttagctcagatgaagagagagggcgttgtcttccacagaaaaacgaactaaggccccaagtctccagcactttgtggagtgcaggggccggcggggcgcagcgagccgcatcgcagctggaggacagcgggtccgttccccaagagagctaggagtcctgcgcacctggagcgcgctccgcgtccacgcccagagggcgctgcacactcgcgcccgaggactgcctgccctctcccgggctgcgcctccgcactccgggcccgggcagaagggggtgcgcctcggccccaccacccagggagcagccgagctgaaaggccgggaaccgcggcttgcggggaccacagctcccgaaagcgacgttcggccaccggag

SEQ ID NO: 3023 - DNA, 455 bp, Homo sapiens
  source 1..455: mol_type = other DNA
ttggccaggctggccaccacacctagccaaatgttgggttttgttgggacacttttgtggtggtcagcagcagaaatttctgctcaattcttccttaatatatgtgcagttcaggcgtcatctgaaaatcccagtgtaatttatacacgggacatggcgtgcattaaggctggattcttaaaggaatttaaggactttaaagtatagactttggcacacagaataattcaagaacccttgacctaatgtttttctacaggttttaaggtagattgctgtcataaactgggaaaacctgtcttccctacagaaatctctcagatcatgctaatattagtcatagcagcaatataatataaaaatagttgaagaagtctgtttaaacatttctttgtactaattttaggtttgatctgtggatgaaatgaatcatgattttcaagctcttgcattag

SEQ ID NO: 3024 - DNA, 420 bp, Homo sapiens
  source 1..420: mol_type = other DNA
taaaccttttgtcacatagagataatacctgagctcagttcaaaatgaaaatgaggggcccttttgtcaaaaaccactaagactttctagatttaaaccaatcgtagaatcttgttcaactgcacaggtcacgtgcctgtgctgacttgcatgttgttagtaccaaacaaataacacagaaattcactttatctagcttaaggtgaaagagagacattgtcagcactctccttttctctctgtcttacaggatggaaccagtctgcccaagggatcccaggtccaagagactttcgaggttggggtctctatttatctagtttcacccacactaagcaactgtatataactcttctgctattatcagctcaaacttgatcgtgagacatttcttaaaggaacatctattaacaacagcac

SEQ ID NO: 3025 - DNA, 506 bp, Homo sapiens
  source 1..506: mol_type = other DNA
cttgggtttgaggtgcaggaggctgctcggctccagagcctgctccacggtggaaggtggaggagagtccagggtcccacggtcagtccctgcgtggcccaggaaggtttaattcttttaaagagggcctagggaagacaggggaggacgacgccatctttggtctcagggcccaggtgcgaaggtcgtttggcaccatctctcctgcctgccagatgtgggcagggcccgtccggttcccaggggggatctcgaaggagcagcaactgcacggtgctcctcagatccgcgtgcccgaggtcaccggggaacaaagaagttacttatttttccttttagctcagatgaagagagagggcgttgtcttccacagaaaaacgaactaaggccccaagtctccagcactttgtggagtgcaggggccggcggggcgcagcgagccgcatcgcagctggaggacagcgggtccgttccccaagagagctaggagtcctgcgcacctggag

SEQ ID NO: 3026 - DNA, 575 bp, Homo sapiens
  source 1..575: mol_type = other DNA
caggggcagcagtttgcaccttctgctggccctctcaccccatggagagtctgaggggaactggctcctggaccccgttgccctgctccagctggggacccaagtgcagccatcccaggcaggcccggccccgggaggcctccaccagggctctgccaagcagcagaggctgcctctctaaagatcccctgtcgggagagtgcctgccatttatggagataggcgagctagctggaggcagcaagctcaaggggactgggctgctgcgtggcgttcactgtgcagcttgaagaagaccccacgggtaaatatttgttgaccgatcctctacggctaaactttagcaccgtgtgccagggccaggcttgcggcgggcgcggctcagcctgggtgctccggaagctccgagcagcgcaggccgacggcgaccgtgcgggacccgcccagccgcgcttccgccccgcctctggccacaggcgcgaactgcgcggccgctgccaccagggggcaggccagggcagcgggaggcagggcggggacgcggtgacgcgggcactgccgggtcccgtgactgc

SEQ ID NO: 3027 - DNA, 596 bp, Homo sapiens
  source 1..596: mol_type = other DNA
cgccgcgtctccgcggtggcggggagcctgggccgggcctctctgtgggtcccagcgcagcgcagccaggcaggcgtcgggacctaggcggctttggagcgacctcgctttgaagctgatcacccgctcaaggtgatcacgacgtgccgacccagtctagattttgagttctgcagaaaatgcaattttaaaaggctgccggcggagcagagccgataacccccccccagccgcggagcaaactgctctgcggcccgcgcgagtgcgccccagggcttcgccgctgccgggcgtcccctccctcgggacccgcgccatcaccgcggcggggtaagaagctcggaggcgccatcccggggctctgcgccgtccgctctcccggctcctggccgctcacgcacacagccggtagctggttagccgctgccctcgcccagaaggcgggtggaaggtcctcccgcgcgagatcccccgagcttggctcccgctgaagcgcaacttccgcgcccaaaccttgcttttacgacgggcggtccgcgtccaaaggtcaggagtggggaaccgccgacccgcgatccggaacgcgactttgaggc

SEQ ID NO: 3028 - DNA, 404 bp, Homo sapiens
  source 1..404: mol_type = other DNA
gaaagtagccagtcaatagcttaagttttttaaatataaattcttggtaaacaagtggtggcgggcgcctgtagtcccagctactcgggaggctgctttcagtgagccgagattgcgccactgcggtccgcagtccggcctgggcgacagagttggagtgtatattcaaggcaacttgaatctaagctcctgagtggccattctcaagcactgaccaaataaactctatacttaatattattctctgaattttcttaaagttggcaacaccttaattaaaaaaatactttattgatcatgcttatgaacatgatcaaatgaccggctccaagccactcccagccagctgtgcgccgcgcgccaggctgacatcggcttcccggatcagctccggcgcggtactg

SEQ ID NO: 3029 - DNA, 366 bp, Homo sapiens
  source 1..366: mol_type = other DNA
tgatcctgggttagtaaaccgacgctgattccctccagctgggcagaggcagcgagcgctggctgaagcttccggaggtgcgccctcggaggttgctcttccccagaggcctctcctgctgggaccaggcaggccacccatcctcaggggcagtgactggtcactcattctgatcaggattagggtgttctgaagaaggcacccctggtcagggcaggcttctcagaccctgaggcgctggccatggccccactgagacacaggacccacctgggacccagcccctggtggctgcggctgcatcccaggtgggccccctccccgaggctcttcaaggctcaggcccgggaggcgccctttaaatgg

SEQ ID NO: 3030 - DNA, 450 bp, Homo sapiens
  source 1..450: mol_type = other DNA
gaggtgcgccctcggaggttgctcttccccagaggcctctcctgctgggaccaggcaggccacccatcctcaggggcagtgactggtcactcattctgatcaggattagggtgttctgaagaaggcacccctggtcagggcaggcttctcagaccctgaggcgctggccatggccccactgagacacaggacccacctgggacccagcccctggtggctgcggctgcatcccaggtgggccccctccccgaggctcttcaaggctcaggcccgggaggcgccctttaaatggggtgcgggcgccggccgcgcattcccaccgggacctgcggggctgagtgcccttctcggttgctgccgctgaggagcccgcccagccagccagggccgcgaggccgaggccaggccgcagcccaggagccgccccaccgcagctggcgatggacccgc

SEQ ID NO: 3031 - DNA, 392 bp, Homo sapiens
  source 1..392: mol_type = other DNA
ttattaaagcttaactgccgcaagtcaactgatcccaagttacaataatgatcctaggttcagctgaacatgtccttaaagggtgaaaaatagcagaaatgtgctcccatctgttcctcatcagcagactgccatagagggacgaccaaggcccagtggaagcctcgacggcccttgaccatggaagtggggccatgcctgggagttacaaacatgtgctgcctggtctgaacatgatgctgtgctcagacactgaatttgatgaagtgcattgtaaaatttaaaaacaaatttaaaactctattaactcactctggttcagtaagggaatggggagcccacgcaccctctgcacccagggcagcacccagggcggcacccaggcccctgct

SEQ ID NO: 3032 - DNA, 247 bp, Homo sapiens
  source 1..247: mol_type = other DNA
gaaaatatttaccggctcagtcctccttggccctggtagatggaggcaaggactggcaaagccctccccaggccagctcctcccagctgaggcctcaggcctcaggcctttacccgggggagtattctaaggctggtcaggctgttaaacagagaaggcttcgcagggctctccctggtccttcagaggcagacggggagctcgcctcagtcccgggcccccaaccctgggccagcaaggccaggag

SEQ ID NO: 3033 - DNA, 444 bp, Homo sapiens
  source 1..444: mol_type = other DNA
ttctttggaagttaaattgcaaatgcagaggcggctcttactctttggctccgccttagctcgctttgtttaaaaacgcagcacagctgtcattctcatttctacaggcatgaaaagtgcgactcacggccgtcccctgctccatccaggccacgggggtgacggtggggtctggggcattcaggcctggctgggcatgagggcttcaggcccaattccacgcccgaacttcctttctggtcgccccagccctgcggtcggggagagctggaaaccaccgagctgacagcctagagcgtcgctccccggccgccgagcgctgacgccgcgccgggggcggggcagctggaggcggagcagccgggaagggctggccggcttcgcagcgccccgccgtggctgcggccggaagcggtctcgttggccctgcggcgctggagcctt

SEQ ID NO: 3034 - DNA, 377 bp, Homo sapiens
  source 1..377: mol_type = other DNA
gtctggctctgtcatccaggctggattcccgagcagctgggattacaggtgcccttctttggaagttaaattgcaaatgcagaggcggctcttactctttggctccgccttagctcgctttgtttaaaaacgcagcacagctgtcattctcatttctacaggcatgaaaagtgcgactcacggccgtcccctgctccatccaggccacgggggtgacggtggggtctggggcattcaggcctggctgggcatgagggcttcaggcccaattccacgcccgaacttcctttctggtcgccccagccctgcggtcggggagagctggaaaccaccgagctgacagcctagagcgtcgctccccggccgccgagcgctga

SEQ ID NO: 3035 - DNA, 651 bp, Homo sapiens
  source 1..651: mol_type = other DNA
aagcaaaggggccagcgtcgcggcccttctctgggtgccaccccgcgcccgcagatctccagccgccccggcagcagggccggcacttccgagcctccggactcgggacgccgcgctcttaccctggcctcatccagagtgacgccggcgccaccgcttcccccggctttggcggcggggcagctggcggcgcgggtccgggtccgagaggagatgaaatggctgctgcctccggtcgccccaggctctgctccggccccaggcccaggcccgggaccaggagacttggacccgagtcaccatggtccagccagggggacggagtccacgccgcgcccgggagagccgagcaaggccggcccgccggccggtcagtcagggccagcggagccgagccgggccgagccggcccggagaagcgggggcggtgctgcagaccggcagcacagacactccgccggcttcgccctcctcagcgggagccgagcggagctccgtgcgtcaaggctccagcgccgcagggccaacgagaccgcttccggccgcagccacggcggggcgctgcgaagccggccagcccttcccggctgctccgcctccagctgccccgcccccggcgcggcgtcagcgctcggcggccggggagcgacg

SEQ ID NO: 3036 - DNA, 401 bp, Homo sapiens
  source 1..401: mol_type = other DNA
tgcggctgaggctcggtcaccgtgtagagaggcccggcctgaccttgtcaccagcacattgggagaccaaggcggcggatcacctgaggtcagcgggcgtgctggcaggcgcctgtaatcccagctactccggaggctgaggcaggagaatccattgtcagaatgcagggatgtctctccatggtttctgaggctgaggaggtacccaggtaagcacactctgggttctctggtgagcacacaccgagctgccctacccatgaaggcagctagccgccgggccagtggtgggaaggggaggcggccattagcgccgttcccgccgggacttgaagcgcccggccgcggcaagccccgccctcggcgcgcccccgcgtccgcgcgcgctcctcgggtctgcg

SEQ ID NO: 3037 - DNA, 386 bp, Homo sapiens
  source 1..386: mol_type = other DNA
gctggtttaaattttggcaggctggtggcatgccatctttatttttaaaaaaagaaaagaaaagaaaaagacataaaaactgatgtgaagatatgattcttggaattcctcataggcctgggacaggcccatgcagcggcttcagctcaatgcacagtattttgtgtacagataagaacattttcctgagagattttatcagattttaaagaaggttaaaaagccgtggtgatcctagggctcctggactccttatacggggactaccactcccagcgatccgcagtgcctctgctaatgtgccatctcggagcgtgcctatcctatcagaggaccacccacctatcagaggaccgatatcaccgcccacctatcagaggactgag

SEQ ID NO: 3038 - DNA, 412 bp, Homo sapiens
  source 1..412: mol_type = other DNA
gaggaactcaaagtagaattcatttacatattcattcattcattcccatgcagtaactgtctcagacttagtacctggaagacagccatgggggagagtcagcaattactggtgtcctccctccctccccgagcctagcgagggtagccgcaacgctctgaactgcacggcactgagcgcatctaattaaagtgatggtttcattagatagcaactcgcgcctctagtcccagctacttggactccagcctgggacagaaatgatggttggactgggcggggccaggctcgctaacagccgggcggggtcccttcccccgggccccgccccggccgaccccacctttccgcgcggctccgccccgccgcccccttgccagtggcccctccccgcgcaggtcccgactccagc

SEQ ID NO: 3039 - DNA, 405 bp, Homo sapiens
  source 1..405: mol_type = other DNA
tgcggctgaggctcggtcaccgtgtagagaggcccggcctgaccttgtcaccagcacattgggagaccaaggcggcggatcacctgaggtcagcgggcgtgctggcaggcgcctgtaatcccagctactccggaggctgaggcaggagaatccattgtcagaatgcagggatgtctctccatggtttctgaggctgaggaggtacccaggtaagcacactctgggttctctggtgagcacacaccgagctgccctacccatgaaggcagctagccgccgggccagtggtgggaaggggaggcggccattagcgccgttcccgccgggacttgaagcgcccggccgcggcaagccccgccctcggcgcgcccccgcgtccgcgcgcgctcctcgggtctgcgcgga

SEQ ID NO: 3040 - DNA, 288 bp, Homo sapiens
  source 1..288: mol_type = other DNA
gagtgcagggccaggctggtcttgaaaccttggcttcccaaaagtgctgggattacaggtgtgagccaccacggttggccaaccctcttttcctaaagaggcctattctttggaagagggtttcagtcatacacaaattgaataaccagtaatgtttgtcagatgcatgaactctgtgagggttactgccccacagtcaatgtatcccatgtaaaattcatctgagatcttcagagttaacattgaggatggtttgggaaaatgccatagtcatctaactccctgcta

SEQ ID NO: 3041 - DNA, 166 bp, Homo sapiens
  source 1..166: mol_type = other DNA
gctagaggcccaggcccaccacctccggcacctgcccgcgcgccccgcaaccagtgggcaccacagcaggccccagccctgccggcgttcctctgctcagggcctccccgactttacggtacagagcccggaagtgtgcgtaagacggcgctattccgctgtaaca

SEQ ID NO: 3042 - DNA, 362 bp, Homo sapiens
  source 1..362: mol_type = other DNA
ttttttaaaagtttccgtaacactgtactctcaaacactagaatgtgtattcccaatacgtaagactagtgtctggcacatagtagctattcaataaatataattgatgaattatgtcccatacatgctcaaaaaatattgttttaattaatgttcctagttgttggtgaaccattaagttagttgaggactcttctgagatatcgactttaagtcaaggagataatcctaacgccaggtccttaggtacaggataggaatgttaccgtagcagatactgaaattcctccggagctcgctcggaagctgttacagcggaatagcgccgtcttacgcacacttccgggctctgtaccgtaaag

SEQ ID NO: 3043 - DNA, 189 bp, Homo sapiens
  source 1..189: mol_type = other DNA
tatcgactttaagtcaaggagataatcctaacgccaggtccttaggtacaggataggaatgttaccgtagcagatactgaaattcctccggagctcgctcggaagctgttacagcggaatagcgccgtcttacgcacacttccgggctctgtaccgtaaagtcggggaggccctgagcagaggaacgcc

SEQ ID NO: 3044 - DNA, 142 bp, Homo sapiens
  source 1..142: mol_type = other DNA
acaggataggaatgttaccgtagcagatactgaaattcctccggagctcgctcggaagctgttacagcggaatagcgccgtcttacgcacacttccgggctctgtaccgtaaagtcggggaggccctgagcagaggaacgcc

SEQ ID NO: 3045 - DNA, 648 bp, Homo sapiens
  source 1..648: mol_type = other DNA
gaacctctcccccaggactgtcaggaggaggcgagtgataaggaagggcttgcccacccatgctcaagatgggcgggatgccagcctgttaatgtgccaaaagcctggccatgcctggaaaatggaccaatccgccaagaggttgggtctcgttccctagagagaaggaagtttcctctccttgaagtgagagctagaatcgcactttctgtcaagctgagagaaagactcttttccagaggctaaaaggacaagaaaatctgatttgcttgcttctaactttgcgttttaaagggggaagggggggagggtggttctgcttagccccacccctccggctaccccaggtccagccgtcgtggaggcagaggcagtcctggggctctggggctcgggctttgtcaccgggacccgcaggagccagaaccactcggcgccgcctggtgcatgggggccaggagtaagtaactcatacgggcgccggggacccgggtcgggctgggggggccgaggacttcccaggcaggagctcggggcggaggccgggtccgcggcagaccagggcagcgaggcgctggccggcagggggcgctgcggtgccagcctgaggctgggctgctccgcgaggatacagcggcccctgccctg

SEQ ID NO: 3046 - DNA, 421 bp, Homo sapiens
  source 1..421: mol_type = other DNA
gctgctaaacatcctacgatgcacaggacgatctcctacaactagctagtccaaaatgtcctggggctgaacctctcccccaggactgtcaggaggaggcgagtgataaggaagggcttgcccacccatgctcaagatgggcgggatgccagcctgttaatgtgccaaaagcctggccatgcctggaaaatggaccaatccgccaagaggttgggtctcgttccctagagagaaggaagtttcctctccttgaagtgagagctagaatcgcactttctgtcaagctgagagaaagactcttttccagaggctaaaaggacaagaaaatctgatttgcttgcttctaactttgcgttttaaagggggaagggggggagggtggttctgcttagccccacccctccggctaccccaggtccag

SEQ ID NO: 3047 - DNA, 360 bp, Homo sapiens
  source 1..360: mol_type = other DNA
ccattgactctggctagcttttaaaaggcatgtgaatacaaatgtcctgatcaactttgagctgagtttggaaaatcacagcctggtgattttctattatctgcgatttaaaaaatgattatgcgtggccataaacccaggcacaggcgccgccttccagtggtttggtccccgagcaggacccaaggcggggcagtgaattccctggcaccgaggactcgagggagcggacgccaccccgctctgtggtgcccgcaaggacccggcgaccaaggacccgaccgtcaacggacgcggttgcgggtgggtggcggcggcaggattggccgggccacgcgccggtcaccgagcgtcctccgc

SEQ ID NO: 3048 - DNA, 632 bp, Homo sapiens
  source 1..632: mol_type = other DNA
ataccacctgtgtccttgcacacacgcaaaatggattttgaacgactccagatgacggcttcagagccagcctcctttataagcaggcgagatgctctttgaaagaatcccccgtcccttggaatggattcccgccagtgtggcagcttcagcctggcctctcggagttttctggccacagaagagtcttcgagctctgagcggctcgaagtcctccccgaggcacgggtgcgacggggatgtcgtaggcgtccgcacccctaggccgggcgcctgcggcctccacgccagccccgggccgggggcctcccgcgcaggcgcgtcgtgcgcggggaccgcccggcctggcggggaggtcgccggccgcgacaggcacctctctgccctcccaaggccagcaggcccgcggccgtcctgctacacactcgggcccggcccgacgaccccggagccgtccgactgcggctggaagggagcccgcccgcgtctgcggaacgcgcgaatgttggcgcccaccgtctcccggacgcagcgccgcgcgagcactccgccccctgcgccgcgggttccacagcgagtccgcgcgggcggtgccggggcggcggaggacgctcggtgaccggcgcgtggcc

SEQ ID NO: 3049 - DNA, 395 bp, Homo sapiens
  source 1..395: mol_type = other DNA
ccattgactctggctagcttttaaaaggcatgtgaatacaaatgtcctgatcaactttgagctgagtttggaaaatcacagcctggtgattttctattatctgcgatttaaaaaatgattatgcgtggccataaacccaggcacaggcgccgccttccagtggtttggtccccgagcaggacccaaggcggggcagtgaattccctggcaccgaggactcgagggagcggacgccaccccgctctgtggtgcccgcaaggacccggcgaccaaggacccgaccgtcaacggacgcggttgcgggtgggtggcggcggcaggattggccgggccacgcgccggtcaccgagcgtcctccgccgccccggcaccgcccgcgcggactcgctgtggaa

SEQ ID NO: 3050 - DNA, 649 bp, Homo sapiens
  source 1..649: mol_type = other DNA
acactatttgatatatacctccataaaacaaaggggcttgggctccaaccattcttttgagctcttgagcttgtctacatttttcattgtggtcacaaataaaaaaactaaaaatcatcttatttagtattgaacatttcataccacctgtgtccttgcacacacgcaaaatggattttgaacgactccagatgacggcttcagagccagcctcctttataagcaggcgagatgctctttgaaagaatcccccgtcccttggaatggattcccgccagtgtggcagcttcagcctggcctctcggagttttctggccacagaagagtcttcgagctctgagcggctcgaagtcctccccgaggcacgggtgcgacggggatgtcgtaggcgtccgcacccctaggccgggcgcctgcggcctccacgccagccccgggccgggggcctcccgcgcaggcgcgtcgtgcgcggggaccgcccggcctggcggggaggtcgccggccgcgacaggcacctctctgccctcccaaggccagcaggcccgcggccgtcctgctacacactcgggcccggcccgacgaccccggagccgtccgactgcggctggaagggagcccgcccgcgtctgcggaacgcgcgaatgttgg

SEQ ID NO: 3051 - DNA, 464 bp, Homo sapiens
  source 1..464: mol_type = other DNA
ctgattagctcagcagttaagctttacccaatctttataataatattcatgtcatcagtacacctgatacaagataatatcctgtatcttgactgtaatcttggttgtgataatgtaccataccttaaactattaacaataattctagatatcattaaatttgtagtcagagttttgaagtcggtttcttcacatcagaatacaggtaaaagggcggcgggggcctcggcggttgaaggcccgcgtgccctggctcctgcgaggggagggcgcccccgagacagacgtggagggagggcgagggccaggcgctgggcttgtgaaatcaaatggcgcctttccctttcccgggaagtcggtgtcaccgcccgtttgctgtgaaatcaaatggcgcgggacttcggcgtcaccgtccagctggcgtcggggcagcaccccgggatctggcgtggcgcatgcgcccc

SEQ ID NO: 3052 - DNA, 582 bp, Homo sapiens
  source 1..582: mol_type = other DNA
cccgtcttccaggtccctgagaagggttcaagaggcctgtaacagacccatgggcaagggtgggatcaacctccttcccatcagtgaaccccgtggtgggtgcaacagggatgtggcaggcactgcttgggactttccaaaaccccggcgtctccaggaagggctgccaggtctggggcttcggggcctccccgagggcagagaggagcgcttcggacccgaccgactcggagcagaccttcagggttcaatgccccggaactcctggggcgaggagccacgcccgggcagtttcgggctccggagggtggggagtcggtgcccggcagcgggcgggccgtcagctgcccggcccggcgcctacctccccgccccccggcttcctgcggaggccgcggccgccatgttgttgtggggctgaggcggcgccggcggagccctgagcggctgtgcaggcttcgcgggcggcggcctgacgaccaagccagctgcagtggcggcgacggcggcagagcagggtctccccgcgcctgcccgcgcccaggctgccggtgctgagggacgcggagtcgcgctgtgaca

SEQ ID NO: 3053 - DNA, 427 bp, Homo sapiens
  source 1..427: mol_type = other DNA
aagaaagcctttccccttgaagaagcttcttgtcaagggcaaaccccgtcttccaggtccctgagaagggttcaagaggcctgtaacagacccatgggcaagggtgggatcaacctccttcccatcagtgaaccccgtggtgggtgcaacagggatgtggcaggcactgcttgggactttccaaaaccccggcgtctccaggaagggctgccaggtctggggcttcggggcctccccgagggcagagaggagcgcttcggacccgaccgactcggagcagaccttcagggttcaatgccccggaactcctggggcgaggagccacgcccgggcagtttcgggctccggagggtggggagtcggtgcccggcagcgggcgggccgtcagctgcccggcccggcgcctacctccccgccccccggcttc

SEQ ID NO: 3054 - DNA, 253 bp, Homo sapiens
  source 1..253: mol_type = other DNA
aggctggagtacagtggtgcctcagccttccgagtagctgggactgggccaggctgaagaaagcctttccccttgaagaagcttcttgtcaagggcaaaccccgtcttccaggtccctgagaagggttcaagaggcctgtaacagacccatgggcaagggtgggatcaacctccttcccatcagtgaaccccgtggtgggtgcaacagggatgtggcaggcactgcttgggactttccaaaaccccggcgtct

SEQ ID NO: 3055 - DNA, 644 bp, Homo sapiens
  source 1..644: mol_type = other DNA
gggagagacataggtatatattgcattgccagcctttggaatgcgggatgcggtccagataaggccatcgcagctcagagaggctgttcagccgctgttcgattcctctggtgacaagaacactctacttttggaagtagcacttctattagagaagttaaatctgtgaatgacagacattttagataattcatggaattcagatctttttaaaacgaagggggcagacgatcttccgcgggatatgtctcgagtggagggacaggcccggagccgactccgccccgtccgcagggcctctgcgggaggcggcaggcccggcggcctagctgcgagcgccctggtgttcgaggccgcttcccggcagttcgggcctcctttcccacacttcgttaggacgccggctggggcgggccggcagagggcgcggggcggttcctcgctcggcgggcccggcaggcccggcgggctgggggcgcgctgtcccgggcgcactgtcggagctcgcgggcaccgggtcgcggcggcccgggcggccggagccggcaggggaagtgcggcgggcgggcaggcgggcggccgggaacgggcggggcggggcggggcgcgaagggggcggtgccgcgagcggggggcggtggcgg

SEQ ID NO: 3056 - DNA, 675 bp, Homo sapiens
  source 1..675: mol_type = other DNA
ctgtgaatgacagacattttagataattcatggaattcagatctttttaaaacgaagggggcagacgatcttccgcgggatatgtctcgagtggagggacaggcccggagccgactccgccccgtccgcagggcctctgcgggaggcggcaggcccggcggcctagctgcgagcgccctggtgttcgaggccgcttcccggcagttcgggcctcctttcccacacttcgttaggacgccggctggggcgggccggcagagggcgcggggcggttcctcgctcggcgggcccggcaggcccggcgggctgggggcgcgctgtcccgggcgcactgtcggagctcgcgggcaccgggtcgcggcggcccgggcggccggagccggcaggggaagtgcggcgggcgggcaggcgggcggccgggaacgggcggggcggggcggggcgcgaagggggcggtgccgcgagcggggggcggtggcggcggcggcggtggcggccgaggaggagaacatggcggccgcggagagcggctgaaatgcctgttcttcaggccggacggctgcctcgcggccttgagggcctccgccgcctgctcgagcggagcctgcgtcaggttccctctgcatccccctgcggggggacccctgctccggaggagggggccggagagccgcg

SEQ ID NO: 3057 - DNA, 421 bp, Homo sapiens
  source 1..421: mol_type = other DNA
ctatccagcagcaatttttctcttgaaagataatctatctgcttaaagccgtttttccttattataaaaagccgtttattattaaagccgtttttccttattataaaatatgtgcttaaggtagaaaattttaaaaatacagattaagcattagaaaatctcaccatgcactacttaatatgtagatgtatttctcataagggctcccatgaatatccttgtggctacatctctagcagcaggatacatctgcaaacagaacctgactgctattttaaaaggtgtaccgacgaagctaggttcaatttatactaacgtttttagtatttattttcaaataatttggactccaccactttaccgcgagcccagcagggggcggaggactgctgtccactcggcccttcccaagggcgcacct

SEQ ID NO: 3058 - DNA, 283 bp, Homo sapiens
  source 1..283: mol_type = other DNA
agttcagaatataaacactgagcatatgatggatgcaacttatccgtttcaaaaggggctctctcagcctgcgggtcatctttgggcagcagcaggaaggaggcggcgaccctctgaatacccgcgcccatcccgcggccccggcgcgctcccgaggccacggctactctggtccagcgggcttcccggccacggaagaccctggccacggtccggtcgcgtgctttgcgatcctcgtacaaaagcatggcggcgctcagggccccgccctgatcccaagatg

SEQ ID NO: 3059 - DNA, 393 bp, Homo sapiens
  source 1..393: mol_type = other DNA
cataagggctcccatgaatatccttgtggctacatctctagcagcaggatacatctgcaaacagaacctgactgctattttaaaaggtgtaccgacgaagctaggttcaatttatactaacgtttttagtatttattttcaaataatttggactccaccactttaccgcgagcccagcagggggcggaggactgctgtccactcggcccttcccaagggcgcacctgccgcggtggccgcgtgacaagcctgcgctaccagtgcgcccgccggccaggagaacttcgtaacaccaagtattgtaccaggacctgcggctccgccccagcatcttgggatcagggcggggccctgagcgccgccatgcttttgtacgaggatcgcaaagcacgc

SEQ ID NO: 3060 - DNA, 878 bp, Homo sapiens
  source 1..878: mol_type = other DNA
gttgcccaccgggccaccgccacccgcctcctgggagcaggacagggctccgctgccgagcccctctgcggaaagctcaggcccggcgctccggagtctgggctcccggggtgggcggggatacttaggccccacgtgccccgcggcggagcggtccccatgagccctggcctctgccggcccggaaggaagccgcggcggaggagggggcggcggggtgccccgagcgcgcctcacctgcgggcgggcgcgtcccgggcttccatcctcctagaccgggcctcctcgctggaaggggtggattcgccccagccctgccgcccaaccgcccacgcccgcgcccgcgcccgcgcttccacgcagccatcgccccagcccgccgcccgcgccggatcgggggccgcccgggcccctccacctctcgcccgcgcgggtcctgggaccgccgcccggcgcctccctcgccgccccactccggaacgcgccgccgagagggcggagactggggcgagggaggggccgccccgcccgcctcccgcctcccgcctcccgcctcccggggcctggagcgcgcgtggccccggagccgccggcgccgcgcggggaatagctgtgcagcacgccgagcccggactcggctggctcggctcggcgcgggcgggcgagaggatgctggcgggcttccccgggctcggcccgcgctcccgccggggagggccccgcgcgcgcccctagcagccgccgccgccgcgggtgcaggggaggggtccggagagccgcgctcgccgccgcccgcgcctgccggcccccgcacggcccctgcccctgagcctcagccccagggcgggcgcgctgggccggcgcccacggatctccca

SEQ ID NO: 3061 - DNA, 354 bp, Homo sapiens
  source 1..354: mol_type = other DNA
cctgtaatgcacttcccttaagatgtttaaagttaggtgaacaatgctacttttgtctttgtaatatacagggaaattggcagccattttttttcagggcactataaataatcattgtcaagttctatttatcttctgtaactgaagatattcactgaaaaaaaattaccgttcctgtcagactgacttttattcaagcactgtcacattgtcagccatcagagatctgttggcgtacgccgccttcccgtcaggggacgaggccttagaaactcggtaactgcagtcgcgtctccagggcctgcagatgacgtcagcagccccgcgctagcatcgcgagactcccgtctccct

SEQ ID NO: 3062 - DNA, 387 bp, Homo sapiens
  source 1..387: mol_type = other DNA
ccaggcatcgtggctgtagtcccagctctgaggctgaggtgggagaatcagactcccaaaccagtgaacattaattttggccattctcatttcttttattaaaattcatgcagtcttacacacacagggagtcttaatctgcctcataatattcgaagtagacatagtatatatttttgaaactttaaaagaacctcagtgacaaggctgcttgttttgcacatgggaaaacatgcagagctagatctgcatttagaacctgctagagctgtgtgtctcctttgagtggacagacaccctgacgcttcagcacctcaagtctgttccagccttgggggcttatgaaggccaggcagccgaaggccgacttcagccttctttctgtga

SEQ ID NO: 3063 - DNA, 375 bp, Homo sapiens
  source 1..375: mol_type = other DNA
ctggcatttggcagattaagcaagtgtcttgatttgaagtcttagagtttggaactaaagcaaattgtctgagtccccagaccaccctgagcgacggaagggagcctcccctaaaccaggcccttggagagcaggccccagggtcacagtttccaaacaatggggaaatcggaggcctccccgtgtgcagacggtggaggctgcccggcctgccccacacgggggtgctaagcctcccgccacgccatccataattaagttcttcctgagggcgagcggccaggtgcgccttcggcgccccgcggccccccttcccctggcccggggagctgctccttgtgctgccgggaaggtcaaagtcccgcgcccaccagg

SEQ ID NO: 3064 - DNA, 534 bp, Homo sapiens
  source 1..534: mol_type = other DNA
ctgcacctggaggccgcacctggaggccccaggagaggagggaattgctgaactttctgaaccagagtgacgcaggggccctgggactcgaagcctgacctcctcacgccgcgcggcccccccgcttctctattcacctgtagtgtggaggcgggagaccctggagcgctcccaatgcctgcgcgcgcctgctgttcccaggccgtccgaaagctccggcttgctttcgcccggacccccggctccctccgggcaggcggctcgggagcagccccttccctcccctcccggccccccggccccgcgctaatctcttccagagctgggggaggggccaggcggtcttcccgaaggcggggcgctccctgcagcccggcctgggcgggccctgggaacgggcggggaacggcctcgccccccggccccgcgcccctcggaccggagaagaggggctggcccagcgccagcgtcggagcgccggccccctccccgggccgctcgcagccaaccaggccctccagcggggcccacgtg

SEQ ID NO: 3065 - DNA, 704 bp, Homo sapiens
  source 1..704: mol_type = other DNA
agctggaagagaccttcaatgtcatttcattcccttcaaggcagcaggctttggagcctgcgggacggccaggaggagcctggcgctccgccctgtagagcagagtggcctctactccgcggcggcacctggctgggggttgcggcgcggttgggccagcgctgctgtccccagccccagtgctgaggcaggcagagcgcagtgggctcagggcgaaggccgccgggggctccgcgggctgcggggggaggcacttgacaccggcccggggagaggaggggccgctgtccctgcggccagtgctggatgcggggacccagcgcagaagcagcgccaggtagcggggcgcccagcgtggggagggctgcggcgaggcccggagctcggctacgactcgaggggctctgagtggccgggagcgcggccgaggcggggcgcccggggcccggcccccggtctgggcggtgcggggtccagacctccgccaagcggcgtgcggggaccccggcggggccgcagaggccgggaagtcgcgccgagggcgctaggaccggccgcgcgcccaggccgctcccgccgcggcgccccggggccccccagtcggcgctgcctcccgggccggctccgcagcgccggggccggggccagcgcggccgcggggggcgagcggcgggcggaggcctgggcccgcgggcggccggagg

SEQ ID NO: 3066 - DNA, 461 bp, Homo sapiens
  source 1..461: mol_type = other DNA
aaggaaaaccttcccgtcgcttcactgtgaagtgagtcggtccctgggaagggagcacgccatgtcctgtgccagtcagggagctcagggcacgaggcgggggtgggggggtgcccagccccaagtcctacagcggctgctggagagcagcgctccattgtgtaggcacacacagaatcttccagctggaagagaccttcaatgtcatttcattcccttcaaggcagcaggctttggagcctgcgggacggccaggaggagcctggcgctccgccctgtagagcagagtggcctctactccgcggcggcacctggctgggggttgcggcgcggttgggccagcgctgctgtccccagccccagtgctgaggcaggcagagcgcagtgggctcagggcgaaggccgccgggggctccgcgggctgcggggggaggcacttgacaccggcccggggagaggag

SEQ ID NO: 3067 - DNA, 326 bp, Homo sapiens
  source 1..326: mol_type = other DNA
tcccgaaggaaaaccttcccgtccgcttcactgtgaagtgagtcggtccctgggaagggagcacgccatgtcctgtgccagtcagggagctcagggcacgaggcgggggtgggggggtgcccagccccaagtcctacagcggctgctggagagcagcgctccattgtgtaggcacacacagaatcttccagctggaagagaccttcaatgtcatttcattcccttcaaggcagcaggctttggagcctgcgggacggccaggaggagcctggcgctccgccctgtagagcagagtggcctctactccgcggcggcacctggctggg

SEQ ID NO: 3068 - DNA, 519 bp, Homo sapiens
  source 1..519: mol_type = other DNA
tgcaggcgtcttaagtaacgttgagaatgaccatttgaaccattcaaaaagtccttgctatatgtatttcacagtttggaaagaattctataaaagatgctagccctctgcggcgtccaagcagaagtcgtcttcgctaagtttggggcgcctcgagcccaggcgccgtgaccgtgatcgtgcgcccacaggcacctggtgcagcgcggggcgcacgccgcggctgggctagcttgcacaggcttgtgacccaggcgcggagaatgattcaccgtcgggccgggcaccccgccgacggagcgggagaagcctggatggagccagcttcccgcctgcccggaacccgccggcgaccggtgggcggggcgcggccgcgggggcggggtggaggggggttgctcggccgctcccgccccctccccgcgcgcggaagccacgcccccggccgcgcgctcgcgctgggcgcgcgcccgcccatccgccctccgccctccgccctcgcgccctcgcgccgggggc

SEQ ID NO: 3069 - DNA, 423 bp, Homo sapiens
  source 1..423: mol_type = other DNA
atctgccttatgcaggcgtcttaagtaacgttgagaatgaccatttgaaccattcaaaaagtccttgctatatgtatttcacagtttggaaagaattctataaaagatgctagccctctgcggcgtccaagcagaagtcgtcttcgctaagtttggggcgcctcgagcccaggcgccgtgaccgtgatcgtgcgcccacaggcacctggtgcagcgcggggcgcacgccgcggctgggctagcttgcacaggcttgtgacccaggcgcggagaatgattcaccgtcgggccgggcaccccgccgacggagcgggagaagcctggatggagccagcttcccgcctgcccggaacccgccggcgaccggtgggcggggcgcggccgcgggggcggggtggaggggggttgctcggccgctcccgc

SEQ ID NO: 3070 - DNA, 371 bp, Homo sapiens
  source 1..371: mol_type = other DNA
ggtgacagagagagactctgtctcaacctgcctgcatggaattttaaataagtaaattacagtatatagtatgttagggaatgcttcactgagaagagtattccacgaatgcaaagctactttgttattagaaaaatattgattcattaaattactaggtcaatgatgaaagatgggtacatataggtacaatccttgtaaagattttatttcctagactctcttgtgtctagatagtgccaagtgactatttttgcaagtaatacgtgtcacttcctagccaaccacatggcttaccacatattggaaagagccttgtttaaattagacatgtgacttgctatcatattctagaacttgtagcctatgta

SEQ ID NO: 3071 - DNA, 485 bp, Homo sapiens
  source 1..485: mol_type = other DNA
tcttcttactttgcaaggtatcaaggtgtaaagatgccacattctggatctttcaggaaataggtgaatcattcagcaaatatttactgggcgcctgatatgtatcattgatggtagcttcacatgtaaaagcatgttatgagcttggcaagtcactcaatctcagttgcttcgcctatcgaatggggttaatttgttgcctatcttcaaaaagataacctctgtaaaggtctacacagcctgtgcagcgcctcgcaagaggcgggatccgctcagtaagctttcccggccgtgagcgccaggcgtcagactacagctactgccggggcctccttggcgcgcatgctcctgcggggggcgtggcgaggtaccgcagaccgccggctcgatagctcagcggccgggcttgggaggcgggggcgcgcccgcgctcgttcgcgcggccggctgcgtacagtagtgacggccgcgcgggagcggtcaca

SEQ ID NO: 3072 - DNA, 389 bp, Homo sapiens
  source 1..389: mol_type = other DNA
gacccagatccgctgtctggaacacagatttttctagaggcctggcgacaccctgacggggaggggtgacgcgcacccgggaggcgcctcccggactgggggaccgggcaggactacaattcccggcatgctcgggctcggtggggtgacggcgggcggtggctgcgctgcacccgactggtgggcgcaggacctgggtcggcaccggagcctgtcatcccggagcggtcggcgggggtgcagagacggcgatgcgcccctgtcccccgcacccgggccgctccgggctcgcgcctcccgccccgcggccccgccccctgccccaccccagtcgggaggcttagctggggccgcagcgcggcggcaacatcactctcgctgccgctgct

SEQ ID NO: 3073 - DNA, 334 bp, Homo sapiens
  source 1..334: mol_type = other DNA
tcagtcactgtgcccagcttaaaaactttcaagacttttaaaatactttgtaacattgaggcttgagttaatctaacttattttgaaaggaataatcaaggtaacaagatttactgaccatcactcactttgtgatttgcatagctagtctattttagaattgttattatcataagcgaaagaccagctgcactccagctggtagagtgagagtctgtctcaaaaaaaaaatgtaagacggaattgcctgaaagtctaactttaattacatatcaaatacacatttgttttccactttatcaggttgaaccagctcaccaggttcaactcacac

SEQ ID NO: 3074 - DNA, 309 bp, Homo sapiens
  source 1..309: mol_type = other DNA
agggcccgggcgcgggggctaacgcctgtagcgggtcacctgtcaggtgttcgacaccagcctgtagcacatgcctgtaatcccagctaattgcactctgcaggcagaggccccacctcctctgcagagcgctctcgggttctcccggattcctgaaggttctctgagcaccgcacagaaccctccacttcgcagggaggttcttcctccttcctctcctcgcccaggaagaggttgtgaggattacctcatcccaacccttccccgtcagggctggccctggagagggggcacgccgggaggcgtctc

SEQ ID NO: 3075 - DNA, 491 bp, Homo sapiens
  source 1..491: mol_type = other DNA
gcaggcagaggccccacctcctctgcagagcgctctcgggttctcccggattcctgaaggttctctgagcaccgcacagaaccctccacttcgcagggaggttcttcctccttcctctcctcgcccaggaagaggttgtgaggattacctcatcccaacccttccccgtcagggctggccctggagagggggcacgccgggaggcgtctctcgcgttctgtgcagagaaaccgcagcgcagtccagcgggagaccccggagggggggcgctgcgcctgcgcagtcgctaggtagcgtctcccccggggcgtgctcgtaacgccgcgcaccctatcaggcggccacagggagcgcgcccgcggcctcgccctttctcgccctctgggtccagcctcagactgaggcttggagacagcacttcggcgcgcccccatgccctcttgtgcgcgtgcgcagaggcggaccgcaaggctagggcgtgagggaagggc

SEQ ID NO: 3076 - DNA, 619 bp, Homo sapiens
  source 1..619: mol_type = other DNA
ttccccgtcagggctggccctggagagggggcacgccgggaggcgtctctcgcgttctgtgcagagaaaccgcagcgcagtccagcgggagaccccggagggggggcgctgcgcctgcgcagtcgctaggtagcgtctcccccggggcgtgctcgtaacgccgcgcaccctatcaggcggccacagggagcgcgcccgcggcctcgccctttctcgccctctgggtccagcctcagactgaggcttggagacagcacttcggcgcgcccccatgccctcttgtgcgcgtgcgcagaggcggaccgcaaggctagggcgtgagggaagggcgggcgtacgcccttgcgtgcgtctcaggcagcgcgcacgccggcgtgagagggcacgtaactgagctcgttcgctgccctcgccgcgtgctagcagggagtttccgctcgggagagagactgtcctcacgcccgctgcgcctcctcgacggcagagcaggcttgctcgcccgtgggagcgtcccggccgagaagccctgaggggggaggggaggccattttgtcccgaccgactccccggaaccgggcggacgggctgggagaggctgcggagccgcggtcgccgccct

SEQ ID NO: 3077 - DNA, 450 bp, Homo sapiens
  source 1..450: mol_type = other DNA
accgcagcaccggtgacgcagtccacaccgcgtgctgtgttggagtcaaatctgggttgaagtccaacctaggttgaagtcctggcaaaatggggttaaggaggctgcctcgcccagctccacggagcgacagggcgcgggtgggcgcggcctccgggaggccagcacgagggggagcggcggggcccggacacacccagccagaaggaggaggccgaccccgcgccgactccgcagatgccgctcgggacttccaggcgcccgccctgggtcctccatcacccgccgtcacctgggcgcggggaagctggcgggagggggacggagcgcggggctggggacccggggtcccagaagggggcgcggggaccggcggcgagtccgggtcggggcccggggtccgggaggagggggcggggcccgggggcggggccggggtcggcgccctgc

SEQ ID NO: 3078 - DNA, 438 bp, Homo sapiens
  source 1..438: mol_type = other DNA
gcttaagctgaggtgtgaacgaccagatagataatcatccagatcggtatctgtgggctactgtcccgaacttcagctggaacgctagtccaagtcactgtcctaactgcagctagcactgccgctccctcaactcccactttcccagggaggggagggggccgggggcagcccgggcggagagctgagggctcgccgtctcaccttggctgacgtccgcgaggactcccaccaaggggcgggtcctgcccagaaagggcccctcaccccgcgggcggtcagggccgttcttgagggctgccctccggccgcctgactggaaaaccgtcctcccccggagaatacgacctttcggccatgttagccagggggctaaggggccggcggccactcgggcagtgctccaggcgcctggctgccaggctacgggagaaaagc

SEQ ID NO: 3079 - DNA, 432 bp, Homo sapiens
  source 1..432: mol_type = other DNA
gcggggtaaggtgctggatcccgattctcctggaactccggcgggaaaccgggtcccagggcagtatccccacagagggctgcgtctccgggctggggcaggcggcagcgaaagggagacgcggctccggggccaccccagtcccggcaggagttctgcccggaggtctgggatgccctcggccaggcctcacctcgggagcggaggatcctgcaggccaccatcttggcttttctcccgtagcctggcagccaggcgcctggagcactgcccgagtggccgccggccccttagccccctggctaacatggccgaaaggtcgtattctccgggggaggacggttttccagtcaggcggccggagggcagccctcaagaacggccctgaccgcccgcggggtgaggggccctttctgggcaggacccgcccct

SEQ ID NO: 3080 - DNA, 211 bp, Homo sapiens
  source 1..211: mol_type = other DNA
ctaggctcacctccaccgctgcagcaggctgtgagaggggaaggcacgttccctttggagtgcatgataaaaaaatttttaaaaaggatttagaggtctggatgctcaaaatttaaggacatactgtgaattaaggccgaaggcactttgtattgattcatggctaaatgaatgcatggcgagagacaccagctgtgcagccttgtaactc

SEQ ID NO: 3081 - DNA, 432 bp, Homo sapiens
  source 1..432: mol_type = other DNA
tattatcaatttaaaaaaccttccgcagtttaaaattattttatgaaataacttgataattttttctagtattctctcagattatttaagactctaggccagtgcagtggtgcacatgtgtaaaagctattgtgagctatgatcatgagctttgatcatgctactgcactctatctggaaattattttagagtaaaaatcagctctcatatttttatcttgactgtttgatcagtgattcaggttagatttcccaggtccttgggaacatgactgaacctggtagacatgttgctggtcctaagcctctcctgctctcggagctttgggtccagagcctaagaagagcctgggcaccattctcactggggcatgtgggctccaggtggcccccacagtgacctggattcccatttcactcagagtcacaggc

SEQ ID NO: 3082 - DNA, 509 bp, Homo sapiens
  source 1..509: mol_type = other DNA
tagcgccacaagctgccgcttaggaagtccctgccgggagggatggcatcggcaaggaactccatcctttcgggggcttacgaaaataataagtttattccctatcactgagcgctctcctaaggaaggaaatctcccggggggtgccgactacgggcggcgggcttaggatgctcccacgcccaggacccgcaggacctccggaggaacgcccgccagcccgcccggagccacgcggcacaaggtgacacggaccgcgccgcgcgggcccctcagccgcctgggcgaggccgggagcagggagaggggcatccgccggcccgcggtaccttccggctggctgggctgcccgagaaggtaggagagccgcgctccgcccaccgcgcacgcgtagccgcctcggccccttcggccgccgcaagcgcagcccacgcttctccccgcccatcgagggggggttgctagcccgctcgagcggcccgtcccccgaatttcccagcgggctttgc

SEQ ID NO: 3083 - DNA, 405 bp, Homo sapiens
  source 1..405: mol_type = other DNA
agcagcaactattataaaattttattagtagatactcactagccattcaattaactgggctccagttatgtaaaaaaggttcctaagcaacatagacctgaggggcttgtcccctgaccgcacaaagactcccgtggccccggcagcacgcagcgcaccgcaccaggagctgggagcggctcgcggtacagacctcgctgcagcgggagaactaagtcgaggcatcccaccttcccccgggaccgggagcaaagcccgctgggaaattcgggggacgggccgctcgagcgggctagcaaccccccctcgatgggcggggagaagcgtgggctgcgcttgcggcggccgaaggggccgaggcggctacgcgtgcgcggtgggcggagcgcggctctcctaccttct

SEQ ID NO: 3084 - DNA, 401 bp, Homo sapiens
  source 1..401: mol_type = other DNA
agggcagggctaggactagtactcacccttctcctgcctcagcttcccgagtagctgggattatgggtgcccaccaccatactgttgggaggctgaggcatgagctttaattctcaatgagaacactatttttgttgaccaggttggtatcctgtatccaagcacagcgcttggtatttgatgaatgaatggaagatgaattaatcatcagggtcagcaagtgatgaaccacaacttggtccagttcttccgggccttcgtgggcctgacacagacctgacatcccacgggcgggagaggcgtcagcccgaggctgggatgctcggccggaacggcggctggcggcaggctgggcccagggagctgcgcgcgcaaccactcgggctgtggctccggtgacc

SEQ ID NO: 3085 - DNA, 370 bp, Homo sapiens
  source 1..370: mol_type = other DNA
gattctttataagaaaaaggagatttcctattataaacactgctcccattgaaatagctattttattggcacttagaaaggtaaggaagaaaatgttttatatgtcaatatttaccgaccctctttccacttaaaatgttaagacaagtcatcatgtgaccttctaaggacccttgctttttttttttttaactcgagttaaacaaaatccattatgactttttcagttattcattcattccacaaatgcttactgggtgcctagtatgcacatagcactgtgcttactctaatgagttgggcattatattcttcacaaattcgaagctattactttcagataaagaaatctgacttttgtaatcaggtt

SEQ ID NO: 3086 - DNA, 365 bp, Homo sapiens
  source 1..365: mol_type = other DNA
agtcactcagcctccagtgaatcctggggcaggagttgatttttccagaaatcttacacgcctgtaatcccaacactttggggccaaggcaggtatcccagagccaagatggcgccactgcactccagccgtctgaagctcaggagctgccccctcctcctctgcccacccctctccccccatgagccatgggcactgactgggcgaggagtgcagctgttggcatgagacctccttctccccagcctggggaagcagggaccagcagtccctgaagctcagccagctcatattttataaaaatgaattaaacacaacctgtgggacctgggtctcacagccctcccagtgctctcagagccaga

SEQ ID NO: 3087 - DNA, 472 bp, Homo sapiens
  source 1..472: mol_type = other DNA
attccagcatcagggattctggcccccagcgtccctttccttggtgagcagcttataacagcagaaggccattcaattctgctcctctggctggaaagcaaacatcagcctggcttaccttcgctagcctgcctgacccccagccttggggtggggctaggttagtgcggctggtcctgagcctcccctcaggcagcagccccagcctctctgcttcctgagattcagaaacagggatcccagggcagggctcagggcccagcctcttgggggcacagtctccagcagtgtgggtgggagtgccccccgccccacaactggtggcagggcttgcttagcagggaagcagcagagccctgcagaggggtgggcagagcctcccttccaggagctgctttatctgggagccggcggctgctgaataatgaattccaactctgccgcactgtgagtcgctgcaggagcagcttag

SEQ ID NO: 3088 - DNA, 346 bp, Homo sapiens
  source 1..346: mol_type = other DNA
cggcatccccatgcctggcatagtcctggggttgcatcgctcactgcagccatgaactgactacaggtgtgctggtgtgcacctctgcacccagcatagcctctggagtcactgggactacaggtcccaaagtattgggattaaaatagctagcatttattgagcacttactatgtgccattatcatcccccaggcactgtgactcctgagctgacagtgtgactctcagccccagaaaataatttgcttctttgctaactcagcaactcaggtggaatgggaatgaaaagaatttgtttctttgccaactcagtaaggcaactggatcaacgaggtgcctcagct

SEQ ID NO: 3089 - DNA, 320 bp, Homo sapiens
  source 1..320: mol_type = other DNA
ccagcctggtgcacgggtgcaagcctgggagcgaagcaggaggcctagactcccagcctgtgccttctcagccagttccaagaactgtgctgacctgggaaggcatgtgtgcccaggtccacagctgggccctgccacagccagagtgtctgtcacgaaatcactgcgtgcccactccatttcctcatccataggataagggcaggacagcgaggccccaagtgcctcctggctgcaatgggaggggctcgctcgcgggaggaggcggcctgcgggcggggggcggggggcgggcgcggggccgggcaagggacagctcc

SEQ ID NO: 3090 - DNA, 554 bp, Homo sapiens
  source 1..554: mol_type = other DNA
cccagggaaggtggtcagcccaggggaggccccctccactgggaacaaatctggggttggggccaggctgagccagggtgcccccttcttcagcatgactctgagtcatggattttccagagggtcaggcaagaccctccagggcttcctggggctctggagcaggggctcctcttgtccttggtccacctccaggaggggccggagagccctggagtcccgagcactcatctgcctgggctccaaagaggccctgctgtcccctgcctgcttccagggggtgggccaggggccaaggaaagaggggtgaaacctggggcgagtcatacctgcccctggccttgtctgtgagggactgggctggtggcacctaaagcccttccagttggggccgtctctgttgcagcatgtcctgcttatcagcacagcgagtccactgccccagcccctggggctgctggaatgcaggagcctcccacccggacagggtcagctgctcacggctcccacagtagtccctggaatggagtgcgggagggctggtgctgagggca

SEQ ID NO: 3091 - DNA, 346 bp, Homo sapiens
  source 1..346: mol_type = other DNA
tccaagaactgtgctgacctgggaaggcatgtgtgcccaggtccacagctgggccctgccacagccagagtgtctgtcacgaaatcactgcgtgcccactccatttcctcatccataggataagggcaggacagcgaggccccaagtgcctcctggctgcaatgggaggggctcgctcgcgggaggaggcggcctgcgggcggggggcggggggcgggcgcggggccgggcaagggacagctccgcggcggcggcggcggcggcggccccgggcgctgagcgggtgcccggcgcggagagcggcgagcgcagccatgccccaggccgcctccggggcagcagcagc

SEQ ID NO: 3092 - DNA, 362 bp, Homo sapiens
  source 1..362: mol_type = other DNA
caccagcaggttcttaagcaaatctgcttcgtggagctagatgccttcgccactttgctgcaaggtgggcggtatcagataggagccccgaagtggaaacgtccagcgtgggaatctcctctctacagggtccccaaggaactcccggcaggcccacctgtaatcccaatactttgggagagaccagcctggccaacatggtgaaagtgagccgagatcatgccattgcaggcctgggccgtgatttgccagggccacggcgtggccaccaaagcgctccaggacgactcggcagagcgcgggcaccgtggctcaggcgcgctccccgggggcggggcgagcaggaggggtcacgtgacgcc

SEQ ID NO: 3093 - DNA, 696 bp, Homo sapiens
  source 1..696: mol_type = other DNA
ccggctccttcagcggaaaccctcgtgggacactggaggatgcaccttctgccaggtgggccagcagccgctcattgccgtggcactgctgggcaacatcagcgccaccacccgcatggtgttggacagcttgcgcggcactgagcctggcactgggctgggaggccttccatgcactgcccgtccgctgctgggccgcctgtccaggggccggcccctggcagaggagagcgagcaggagagactgctgggtggcacccgcactcccatcaatgatgccagctgaggttccctggaggcttctatgccacccgggtgctccttctccctgagactgaggccacacaggctggtgggcccgcagaacccccagggcagctgctgccacagatcactaccacctgcagggtggtgttacccagcccccacaagcctgagtgcagtggcagacctcagctcttacagcactagagctaaatcatgaagttgaattgtaggaatttaccaccgtagtgtatctgaatcataaactagattatcatagttatctagtttatgagtcataagctagatttgattcttcaaagaagaaaagtcagtgagcaaatttaaaccagaactaagcattatattttctttttttttttttgagacagagtctcgctctgtcccaggctggagtgcagtggcactaca

SEQ ID NO: 3094 - DNA, 422 bp, Homo sapiens
  source 1..422: mol_type = other DNA
tttggatatttagccagaagtggaattactggatcatctggtaattctatttttgattttttgaggaaccacaacatgaaatcactaattttataacatttttcctgattacatgttcactgtagaacatttagaaaatgcaagaaataaaatttagaaaattaaaattccccttattctacatgagagtcgcagatacgtgcgttgctaaggcaaagcataaaatgtttgaggaaagcgacttttctagaaagcacgttctacaaacaacgttccaaactgagcttcggtgttttgactggaggggtcaagcagggggcaggagaatttcccgccccaaggggcgttccagagtcagccactgggagtcgctggattcgggttttaaaaaacgccggccgcggagcgagcgatttgaacgc

SEQ ID NO: 3095 - DNA, 479 bp, Homo sapiens
  source 1..479: mol_type = other DNA
catgaaatcactaattttataacatttttcctgattacatgttcactgtagaacatttagaaaatgcaagaaataaaatttagaaaattaaaattccccttattctacatgagagtcgcagatacgtgcgttgctaaggcaaagcataaaatgtttgaggaaagcgacttttctagaaagcacgttctacaaacaacgttccaaactgagcttcggtgttttgactggaggggtcaagcagggggcaggagaatttcccgccccaaggggcgttccagagtcagccactgggagtcgctggattcgggttttaaaaaacgccggccgcggagcgagcgatttgaacgcgagcggcgcggacttctgccaagcaccggctcatgtgaggctcgcggcacagcgttctctgggctccccagaagccagcctttcgctcccggacccggcagcccgagcaggagccgtgggaccgggcgcca

SEQ ID NO: 3096 - DNA, 707 bp, Homo sapiens
  source 1..707: mol_type = other DNA
ggggatgatcctttgtttattttggtaaattatgtatgtatttaaacatgaagaaacaaaattgggttataaataatttccgctgggcaaaatcttctcagtggagagaacgcactccgggttcgagacctccccgggtgcagatgcgaactgcggtggccccaagtggccgtccactttgttcatgagaacaccctttgcatcccgcaatcccgcgggcgtcggagcgggtcttggcgcgaaccaggcggcctcggcggggtcctgcggcggagggcagcgcggccgcagcccgggagaggcggccgcggcattgtttcagcccctggggtgggatccagctgggggaggggaggcggggtgtcctccggaaccgcccccggccctccctggggacccgtgcctcagcgctgagtcgccatggaaacccgagggaacgcggagccgggtgctaggggggtcggtgagttctccggccgcgccctccgtccgctctcggaccccggccctgcagcagggcctgccgggagttgtagtccccaggcggcggcggcgcgcggcgccaaggatgcgggacgccgcctgtccccgcctccccttaacctgctagctgaggtggggagcggcgggaggagccggccgcgcggtgattggcggaggccgctcccagcccccgacacgcgcccctcccccgctccccactctgg

SEQ ID NO: 3097 - DNA, 353 bp, Homo sapiens
  source 1..353: mol_type = other DNA
tgactcagcccccaaagcagcgtgatggtgaacctttggctcctgcccatcattctgatgcttcatgagaactgaggtgtgacaggcagcgaatggctcacactgtccatacctaaaaagtaggtgtttgaggaactgaaagatctgaaatggattgattttagcgagttatgatagggtgacctagccagaacctaccccaaggactccttcgaacaatcctggaaggccgtccagatccctgtcctggatgtgtgggagggggcgcatgctgggctccaggccaaccctgcaacattgattaatccagctttgagaggctgagcctctcaatgaatcaggtccttgctcag

SEQ ID NO: 3098 - DNA, 250 bp, Homo sapiens
  source 1..250: mol_type = other DNA
cgcgccagtgcactctagcccattagctcttccatgtcgctgaaagagaagaaaacgtctctttttccttttccgtagccataaaagatgaatgttgccagggaaaaaggaagtgacgaggtaggcgcgttccctcggtaccgccgcacacgtctgaagccgcctcccgccgcaatcgctaaggcaaggtggaggtagggccttggagacggcgggtgccctggccccgccccgctcggactgacagcgg

SEQ ID NO: 3099 - DNA, 466 bp, Homo sapiens
  source 1..466: mol_type = other DNA
aaaaaaaaattattctcgatttgtatagcccattaaacccgagaaggaaggaagcatttaatcttcaatctctccctagccatccttccagctctacgagaaaggaaagaaaaacagtggccgggcgccgtggctcacgcctggtagtccctgctactcgggacgctgaggcacgagagtcgcttgaacctgggtggagctgagatcgcgctactgcactccagtctgggcgacagagcgccaatcaatcaatcaattgatcaatacgttcgaatctcctcccggcctcttcgcctgggcgggggccgcaggctgccgcggaagcctcttcccgatgctcttcgctcaggagagcccggcccaggagagggaccaagtcccaggctgccttgcggcgggcgccgggcgccgggcgcgcggtcctgcgaggagacgtggcagagtgcggcgcgctcgcgccggaccg

SEQ ID NO: 3100 - DNA, 297 bp, Homo sapiens
  source 1..297: mol_type = other DNA
gccctggcaggttccttcagctggagaaaatcttcgcctcaatttaattcaattatcccataagccgtgtccaaggaatgttttctgcttaagcacacgattatatgcttgatttttagaatcttcctgaactgtggttgatccactggtcagtgaacagtgcagtgaacctcgctgcatgcgagaggtagcgggatcgatgcccgcatcctcccgcctcccggcaggcaggccgttaaccgtcttccggaagacgctgctagaaccctccggccgctggcgggtcgccagctgcag

SEQ ID NO: 3101 - DNA, 569 bp, Homo sapiens
  source 1..569: mol_type = other DNA
caacagcccagcccccggccccggcctggctcagtgccgttcccttggagagttccagggtgcctctcccctcgccagagaccctcggctacccatccggggggtgatccacttggccgaagtcctccgccctatttccgacgcccacctccggggggtagggtggagggacacccggcagcaccctacccctgtccccgccgtccgggccagggagagggcactgagggcaggccggggccggaagggggttggagtatcccgccggccccgccgctgcaccctcgccccagcccactcctcggctccggggaggcggccaccacggcttcgctagccgcgtcccgagccacgccagctgcagccagctgtgcggtgccgggcccaggcgcgcgtccgcagccccgccccaccccctacggctggacctcccaccgcagccgcgcccgaggccccgccccagccgcggccgtaacgcgccgcgcggagccgacgagacggcggggctagagaggccgtcccgaccgcgccccccgccggaagcggcttgttcgggcctgagctggcgc

SEQ ID NO: 3102 - DNA, 216 bp, Homo sapiens
  source 1..216: mol_type = other DNA
gagtctcgctctgccgcccaggctggagtgcagtggtgtgatctcactgcaagactagacggagtgaagtcccctctctggggccctctcccccaggggaggcctgctccagccccaggggagctgcggccctggctcctgttcccagtggccctggctccatgtggcccatctgagaggctggcctcaagcccggcgccgccagggaggaggagg

SEQ ID NO: 3103 - DNA, 871 bp, Homo sapiens
  source 1..871: mol_type = other DNA
gcccgcgtagactccggtggctacgagcctgagccgagagccagcccagcccgggcaccctgggcgtcttcagcctcatcctgccgctgcaggccggggacacggtctgcgtcgacctggtcatggggcagctggcgcactcggaggagccgctcaccatcttcagcggggccctgctctatggggacccagagcttgaacacgcgtagactggggtcccgcccgacgtgtctacgtcggctgaagagacagcgggggcggcgggctcctggggtctcgcctgagacggggcacctagccctgggcgagcgccgcacccgggcccgcagcggcaccgcgcccagagcggcctctccccacgcccggggcgcgccggctcagggaggctcggggccgcccatgcagacttttggcctggcgcgatcccccaagaacccctccagggccggcctgcggaggagccgatcctcgcaccctccgctcccctgggctccaggctcccccgcgcgggcgccgcccacaagacacttggtttttctaaaaaaaactaaacgaaccgttcgccgggcgtgcacagggcacggggcgggagagacgacggcctccggagaggaccccgggttccgcactgcgttcgccgcctccgcccggctcggggcggctcggggttggctcaggcagcaagcggcgcccgcccggctcctgcgacgtctcccccgtgtcacgcccgtttcgccggcgtccgccagggggcgctctgcgttcccgccacgtgaggctgcggcccacccggcgggtcctgctcctccgcggcggaggcgtggcctcggctgggactaaccggggcggggcggggcggggcggggcgggg

SEQ ID NO: 3104 - DNA, 657 bp, Homo sapiens
  source 1..657: mol_type = other DNA
cccctccagggccggcctgcggaggagccgatcctcgcaccctccgctcccctgggctccaggctcccccgcgcgggcgccgcccacaagacacttggtttttctaaaaaaaactaaacgaaccgttcgccgggcgtgcacagggcacggggcgggagagacgacggcctccggagaggaccccgggttccgcactgcgttcgccgcctccgcccggctcggggcggctcggggttggctcaggcagcaagcggcgcccgcccggctcctgcgacgtctcccccgtgtcacgcccgtttcgccggcgtccgccagggggcgctctgcgttcccgccacgtgaggctgcggcccacccggcgggtcctgctcctccgcggcggaggcgtggcctcggctgggactaaccggggcggggcggggcggggcggggcggggccgccgcgaccgcgggcttcaggcagggctgcagatgcgaggcccagctgtacctcgcgtgtcccgggtcgggagtcaggcccaggcaacctgctacgcggggaccaagacctctggctttcctagacccgctcgggtcttcgggtgtcgcgaggaagggccctgctcctcgctgcaggtggctccctggaggaggagctcccacgcggaggaggagcca

SEQ ID NO: 3105 - DNA, 273 bp, Homo sapiens
  source 1..273: mol_type = other DNA
gctgggcataattgccagttcttgagcacagaacaatgcctgtccatagagggctggaagggctggggctgacctcatggagggcattccaacggggagccagctgattgcccaggagggttcacctggctggctggctcaccaaggcagcaccacttccaggctgggcctcctggaggcaggcacggtgcccccacatgtttccagcgtccaggctcttttcagggtccctagtggccctgccagctacacggtcatcatcaacgaggccta

SEQ ID NO: 3106 - DNA, 336 bp, Homo sapiens
  source 1..336: mol_type = other DNA
tggtccttgaccactccgggcacctccgcagtgctcccatggcaagctttaactaactgtttttgaatggtacacttgtgttgcaatgccaccactgagcagctttgtgacagtgtggggtgtcacagtcggacagtgactggtgagggtcactgtgaactgtagtgtgtgacagagcagagtcacactctggccaggctgctggactcggggcgtcgcccgcaccaagatggcagctgggggaggccgcttgtctcgggctgccactcgggttagatccgcgcgaggcactagggcgccgcctctcgccgcccatcccggggcaccggcggtggg

SEQ ID NO: 3107 - DNA, 514 bp, Homo sapiens
  source 1..514: mol_type = other DNA
aagcaagagactccggtggtttctggtaagatgcaaaggcctgtgctcctaggagttggcatatcactcctcagatgggaacagtctagctctgttgcccaggggctggagtgcagtggtgacatcactggtggtccagcgcagcctcgacctcctcccgcctgagcctcctgggcacctgggcccacaggtgccacgatgtttttaaatacaggctgtctcgaaagcctgggctcaagccatccggactttccgaaagtgcccaggctgaagagcaatggcaatggcaagtgattctcctgcctcaggctcccgagtagctgggacgcctaaaaggttgacctcgccccgcgccccgcacaaaaatggcgaagtcggtgctgggcgactctgcctccgcgccaggggtggagaaccgaagccccgccccgggaaacgcggccccgcggccggctagtgctgacgcgtgtcggcgctcctgcgcctgcgcggagggagccgcgagacaggtgcg

SEQ ID NO: 3108 - DNA, 382 bp, Homo sapiens
  source 1..382: mol_type = other DNA
agtcccagctactcaggaggctgaggcaggcactgcgccctccatcaattaatgaatggataaacaaaatatggcatatagatacaaaagaccatatattgtataattccacttatatgaaatgtctagaatatgcaaacctatagcaaaaatgttctaaaactagattgtggagatggttctacaacccactttaaatgggtagattgtatggtatgtgaattatatcccaataaagcagttaagaaaatagttattaaaacatataataggtactcagcccagacaggctgtgttactgaagaattctggcttcacagcgttatcaagggccagcctttggatggtctcttgaagaagtgatgtcagcacctgacctttg

SEQ ID NO: 3109 - DNA, 304 bp, Homo sapiens
  source 1..304: mol_type = other DNA
ggggctgctgtggcagatttccccatgtagccttcaaagtccaactgacggcttggattttcatcccacaaactgagtctctttttttcttaaaaggttgctctgagaaataaataagatgcttagcacagtgcctggcacacggacccatgggctcgtacctcctggcgtatgcaggcagccttctggcacaccatggacgtgagctccaaggaccactgttgaggttaggcatggccggaaaggagctcccttcccagcacccccacctctcagctgggttaggaggcaggcggaactgagt

SEQ ID NO: 3110 - DNA, 536 bp, Homo sapiens
  source 1..536: mol_type = other DNA
gaacttaaagttattctaaaattgcaggactgggcgccgaaggcctgcagggagccgctggcgagcgcgacgcacggctggccagcgaccctgcgcccagagcgaggagcagggcggcagcccagggcaccagggtcgtaagactacccgctccgctgctcgcgcgacccggccccgcggccccgccccgcagcgcgtcaggccctcttccccgggcgtggcctaagcggcccggtccagtcgccctggggctgcttgggtcccccgtcgccgcgcggcttcccggagccgactgcagactccctcagcccggtgttccccgcgtccggacgccgaggtcgcggcttcgcagaagggcccctccatccgccctcagtaaacatggcggcacggcgagcggggcgggcagggggcgggcagggggcggggcccccgcgggctcccggccagggctctcggccgggctctggctacccacgtgtggagaccgggcaagccggtgccgagaggcaccggggagcggcgtctggaggggc

SEQ ID NO: 3111 - DNA, 426 bp, Homo sapiens
  source 1..426: mol_type = other DNA
gcagtggatcgcattgactcctacaaaaggcaatgctaatagctactaacaccttagaaaatttcgcgccgggagcagggatcccctggcgcccttcagtcagggcgctggcccaccctggggcagcaacgcactcccttacctccgtggttcagtcagagctaggaaggtccctttgtgctacatcgctcccttttcctgggaaggcaaagaaaatgagtgcccggggcgatccaggctcgtcgccggaggccggctcgctccgcccctccagacgccgctccccggtgcctctcggcaccggcttgcccggtctccacacgtgggtagccagagcccggccgagagccctggccgggagcccgcgggggccccgccccctgcccgccccctgcccgccccgctcgccgtgccgccatgtttact

SEQ ID NO: 3112 - DNA, 471 bp, Homo sapiens
  source 1..471: mol_type = other DNA
ccgcacgatatatggcgttcgtggaacttaaagttattctaaaattgcaggactgggcgccgaaggcctgcagggagccgctggcgagcgcgacgcacggctggccagcgaccctgcgcccagagcgaggagcagggcggcagcccagggcaccagggtcgtaagactacccgctccgctgctcgcgcgacccggccccgcggccccgccccgcagcgcgtcaggccctcttccccgggcgtggcctaagcggcccggtccagtcgccctggggctgcttgggtcccccgtcgccgcgcggcttcccggagccgactgcagactccctcagcccggtgttccccgcgtccggacgccgaggtcgcggcttcgcagaagggcccctccatccgccctcagtaaacatggcggcacggcgagcggggcgggcagggggcgggcagggggcggggcccccgcgggctcccggcc

SEQ ID NO: 3113 - DNA, 370 bp, Homo sapiens
  source 1..370: mol_type = other DNA
ttttgacaaattttgtgggtgcatatctgtgtcccacccttgtaacaggctaggctaggagatgcgctcccgacactttcagtaccgatatcgcacagggaaggtcccgcacgatatatggcgttcgtggaacttaaagttattctaaaattgcaggactgggcgccgaaggcctgcagggagccgctggcgagcgcgacgcacggctggccagcgaccctgcgcccagagcgaggagcagggcggcagcccagggcaccagggtcgtaagactacccgctccgctgctcgcgcgacccggccccgcggccccgccccgcagcgcgtcaggccctcttccccgggcgtggcctaagcggcccggtccagt

SEQ ID NO: 3114 - DNA, 575 bp, Homo sapiens
  source 1..575: mol_type = other DNA
cgcgccgggagcagggatcccctggcgcccttcagtcagggcgctggcccaccctggggcagcaacgcactcccttacctccgtggttcagtcagagctaggaaggtccctttgtgctacatcgctcccttttcctgggaaggcaaagaaaatgagtgcccggggcgatccaggctcgtcgccggaggccggctcgctccgcccctccagacgccgctccccggtgcctctcggcaccggcttgcccggtctccacacgtgggtagccagagcccggccgagagccctggccgggagcccgcgggggccccgccccctgcccgccccctgcccgccccgctcgccgtgccgccatgtttactgagggcggatggaggggcccttctgcgaagccgcgacctcggcgtccggacgcggggaacaccgggctgagggagtctgcagtcggctccgggaagccgcgcggcgacgggggacccaagcagccccagggcgactggaccgggccgcttaggccacgcccggggaagagggcctgacgcgctgcggggcggggccgcggggccgggtcgcgc

SEQ ID NO: 3115 - DNA, 345 bp, Homo sapiens
  source 1..345: mol_type = other DNA
tggaaaactatagaattctttgggcgacccagcgccgaaaagccataggtcttaccattgacctaagatcaatctgaactatcttagcccagtcagggagctctgcttcctagaaaggcatctttaaggaaaggcgccctgcgcagtgcggagaccacgggggcccactccccgtggctccgcggaccccgccccttacgtgcccggccccgcccctcacgccgcctgtgtccgcgccgccgcagtctctgctgctgccgccaagcgcgcccgaggctcctacgctgccgcgcccggcttctctccagcgccccgcgccgttagccacgtggaccgactccggcg

SEQ ID NO: 3116 - DNA, 307 bp, Homo sapiens
  source 1..307: mol_type = other DNA
cttcctttatcctagcaatgattgagagaatctaagaatacctaatgaaatggataaagtgatgttctctatttctctctggcctggaaaactatagaattctttgggcgacccagcgccgaaaagccataggtcttaccattgacctaagatcaatctgaactatcttagcccagtcagggagctctgcttcctagaaaggcatctttaaggaaaggcgccctgcgcagtgcggagaccacgggggcccactccccgtggctccgcggaccccgccccttacgtgcccggccccgcccctcacgcc

SEQ ID NO: 3117 - DNA, 432 bp, Homo sapiens
  source 1..432: mol_type = other DNA
tacatgttacaggagccattgagtgctcttgcatagaggcatgctcccatgccagcaggtggggatacaaatcctccttctgctacctttccagaacttctaagaatgtatccttaggaaaaaaaattagacatttgttcaaggatttctgttgaattttccttataaggttattatattatcaaatagaaacaactgacatgctcatgatggcatcatatttaagtgacgtttgaagcacggtagtgacttttggaaaaggctcaatacatcattttaatgagacgtgcaaactcatcacctgctggggaagaggggctcggtgggaatccctgccccaaggcctggcagcaacgctcctacgctgccttgggccgcaggcctgctaagccctccggccaatgtggcctccccacccagtgcttccggggg

SEQ ID NO: 3118 - DNA, 346 bp, Homo sapiens
  source 1..346: mol_type = other DNA
gacacgctgcccagccccgccgtgtgagcgctctccagttgccagtgcggatgggggtccaggccgggccctttattcacagcctactcatttgaaaagcaacccaatgtttctgtataaaaataaatgatcatttccgaccccagattctccgtaaaggggtttctggagtccctggaatcttgcggccacagggtgacggcgtggtgggcgacacccccgcgcaggcatgcacaatgaggagttctccagaactcgggtggcggggcgctcccgggctctggcaggcggagcttggggagctcgccccacgcggggcggggctccggcggcagcgggatctgca

SEQ ID NO: 3119 - DNA, 440 bp, Homo sapiens
  source 1..440: mol_type = other DNA
tattatgcccaaaaaagacaaattgtgtctggggtagagaaaaaaggcctaaagaaattgcttcttggccttttgcctaagatcaagtggcattcagagcataggtccaggccttttcctagggtgatataagaaaagcttcctggagctgctcagggtcactggctgagcctgtggaggaggcaaccgctactgactctaagtctgggctatgtatgggtgcctctcacacaggcagatttagattctgtgtgagagggcagcacctttgctgacccacctttcactgtaagcagtggcactcacccctgcccttgctcaagggagtcacccattcctgagtgagtcagggtcactcactccatgacagctgtggctcgccttacatgagctaaattgggaattggaatgtcatcaacccccacagtaaaattaatctg

SEQ ID NO: 3120 - DNA, 365 bp, Homo sapiens
  source 1..365: mol_type = other DNA
tggcattcagagcataggtccaggccttttcctagggtgatataagaaaagcttcctggagctgctcagggtcactggctgagcctgtggaggaggcaaccgctactgactctaagtctgggctatgtatgggtgcctctcacacaggcagatttagattctgtgtgagagggcagcacctttgctgacccacctttcactgtaagcagtggcactcacccctgcccttgctcaagggagtcacccattcctgagtgagtcagggtcactcactccatgacagctgtggctcgccttacatgagctaaattgggaattggaatgtcatcaacccccacagtaaaattaatctgctctctggggag

SEQ ID NO: 3121 - DNA, 391 bp, Homo sapiens
  source 1..391: mol_type = other DNA
taacttatagttccctaactacgtctctggcgggccccacaccagggtccgcagagtgggtggccgagttaggcggaaggggcgggacttgtggcggaagttcctaggccagcctgtcacgtgggagggaggctcggcgctcaggtgagtggcgggcatgagtgcccacaaggtgtgtggtcatcccaggaaggttacaaactggttccaaccaagtctgaatcttctgggtagaagccagagcaaagcttcctctccgtcgggaatggctggtggctgctaccaggagtccaaggcgactcctgcgacaggaagctgtctgggaagcatccttcatgtggcctctgcccctttaagtcacattggaagtgggaaggggagagggacggtg

SEQ ID NO: 3122 - DNA, 247 bp, Homo sapiens
  source 1..247: mol_type = other DNA
ccagcctgacacttgccagggctcttagaaagaaatcacctagcttactggttttcaaacatgctggccttaacatcaagtctagtcatgagggagccaatacctaatgtcttgctttctgtggaagaatcatacatacgcagtatttcttataacttatagttccctaactacgtctctggcgggccccacaccagggtccgcagagtgggtggccgagttaggcggaaggggcgggacttgtggc

SEQ ID NO: 3123 - DNA, 285 bp, Homo sapiens
  source 1..285: mol_type = other DNA
catcctccagcggccggcggcgacgccttgggctcggacgccgccagggttgcactcttccggccacaggcgcggcagtccggccggaaaggccggattcagggatccagagcgcgagcccggcctgggagtccgcctactcccggctcccgtcgaggccgcgtgggatcccgttggccgcgcaggccatgaggccctgcagcgtccctggcgccgctgaagacgccctggaactcggctggcttcggagggcaccaagcacacgtgtttaccttgtgcactggg

SEQ ID NO: 3124 - DNA, 217 bp, Homo sapiens
  source 1..217: mol_type = other DNA
tcaggtgttcaagaccagcctggtcaacatcatcctccagcggccggcggcgacgccttgggctcggacgccgccagggttgcactcttccggccacaggcgcggcagtccggccggaaaggccggattcagggatccagagcgcgagcccggcctgggagtccgcctactcccggctcccgtcgaggccgcgtgggatcccgttggccgcgcaggc

SEQ ID NO: 3125 - DNA, 145 bp, Homo sapiens
  source 1..145: mol_type = other DNA
aaactttacacatttgaagtaatttagatgcaaggttaatttataatagcaagggaccattgtttataacagcatcaggtgttcaagaccagcctggtcaacatcatcctccagcggccggcggcgacgccttgggctcggacgc

SEQ ID NO: 3126 - DNA, 673 bp, Homo sapiens
  source 1..673: mol_type = other DNA
ggccgtcgggagtcggcggcccaggaccaggcccgaagggtggcggtcaggcctcagaggccgctccgagatggctcgggcccgttatccccgcccctgcccggcccggctcggctccggccgctcctcaccacgtaggcggagccgccgctgtccccgctgcgggactcctacggcacggcacggccgggctccggactgtgagggccgcagcggctctgcacgctccccctccgctgctcagcgagtccgatgggaagggagcccaaagtggagttggccctcattgcaacccgtagtgcggggcggggcctcggggcccgtcggaaattgtagtccgattggggctgcgcgcttcgcttctgcggctcagcctccagcccaggtggcgctgtggaccctgcagccgcggagcgaggcagcggggcggctccgtgaccacggcgggggcgatggctgctgtggccgtggagccgggcctgcctactggtacgcggagccgacgagctccggaagctagtgccgggccttgagcgcctttgggccccgccgctccgttccagcgccacgctgggctccggtctacacagtctcgagcgcagtcccgcgccgcgcaccggctggttgctgtgaggagggtcgccgcgcagtgcgtccccacgcggatccctgg

SEQ ID NO: 3127 - DNA, 591 bp, Homo sapiens
  source 1..591: mol_type = other DNA
gacagtgcaggactccattcacgtgaatgttataggcgaagttgcctggcaactcgccggagtaacgcgctaatctcccgagggatcagtctcactgcccaagaggccagtgacgcccaccagggcagctgcggcctagctcggggaagcgacccggcctaagggcggccgtcgggagtcggcggcccaggaccaggcccgaagggtggcggtcaggcctcagaggccgctccgagatggctcgggcccgttatccccgcccctgcccggcccggctcggctccggccgctcctcaccacgtaggcggagccgccgctgtccccgctgcgggactcctacggcacggcacggccgggctccggactgtgagggccgcagcggctctgcacgctccccctccgctgctcagcgagtccgatgggaagggagcccaaagtggagttggccctcattgcaacccgtagtgcggggcggggcctcggggcccgtcggaaattgtagtccgattggggctgcgcgcttcgcttctgcggctcagcctccagcccaggtggcgctgtggaccctgcagccgcggagcgaggcagcgg

SEQ ID NO: 3128 - DNA, 610 bp, Homo sapiens
  source 1..610: mol_type = other DNA
cctccagggacagaatcatatatcccctggcacagcctcctgcgtagcgcttggcaggcggcttgggagggaagcctcacttaccccaggcccagggggaagctccgccttcatcccggatcccgagtctggtactcggcgcagccggctgctgggttggcatgaccacggatccgccggcaggcgcgaggcgagccagggatccgcgtggggacgcactgcgcggcgaccctcctcacagcaaccagccggtgcgcggcgcgggactgcgctcgagactgtgtagaccggagcccagcgtggcgctggaacggagcggcggggcccaaaggcgctcaaggcccggcactagcttccggagctcgtcggctccgcgtaccagtaggcaggcccggctccacggccacagcagccatcgcccccgccgtggtcacggagccgccccgctgcctcgctccgcggctgcagggtccacagcgccacctgggctggaggctgagccgcagaagcgaagcgcgcagccccaatcggactacaatttccgacgggccccgaggccccgccccgcactacgggttgcaatgagggccaactccactttgggctccct

SEQ ID NO: 3129 - DNA, 375 bp, Homo sapiens
  source 1..375: mol_type = other DNA
gcgagctgctggtaggccggcctggcgggcgtcgcggctgcccctcgccccctcctgcagcccggtctggctggcctgaagcctggagtcgggcaggacgcctcctgcgctgctccctggccgaggctcccgccgcggccgcttcccacggactacgcgtcccgtgcgtctctgcggcggcggaagcggaagcgagtacggctggaagcggcggcggcggcgggagcggcctgagctgggcgccggggccagggccgggggctgcccagggcccgcgccgctgcatgggggcggcccgcgggccctgagaggaagggcgcggggtcgggcggccgcaggccggaggcgcgtcgggctggagccggtcacgatgcc

SEQ ID NO: 3130 - DNA, 267 bp, Homo sapiens
  source 1..267: mol_type = other DNA
ctgggtggcttcactccgcccattcagagggctctccctccacactgcagccgggagcctctgctgcgagctgctggtaggccggcctggcgggcgtcgcggctgcccctcgccccctcctgcagcccggtctggctggcctgaagcctggagtcgggcaggacgcctcctgcgctgctccctggccgaggctcccgccgcggccgcttcccacggactacgcgtcccgtgcgtctctgcggcggcggaagcggaagcgagtacggc

SEQ ID NO: 3131 - DNA, 389 bp, Homo sapiens
  source 1..389: mol_type = other DNA
gcgacagagcgagactctgtctatgtacactgcatcaagctagctagttaatataccaaacatttctacattgtattaactcgaattatatcacagatcgaggtcttcgctttcagaaaagactcacattcttctcatataggcctcgcatggcctggccaagtacttcctaagctcggaacaaatactggtcaactttaattgaaccaaatccacctgcgcgggacggcggccggcgtggtcgcgctagtctcgcgggagcggccgttgggcgggccgttgtccctgcgggcggggcgagttgctaaggaaatgactgcccgcagcgcctggccccgccgcgcaggccgggcggggtctggagcggcgccgtttccgcttccgctccc

SEQ ID NO: 3132 - DNA, 534 bp, Homo sapiens
  source 1..534: mol_type = other DNA
tttctcccagtgaaacaggattagagattctctttaatgacagtaaaatttggtgattgtagtccgcgcttagttttcgcagattaatagctcaccaagaatttatcatctttcgaaaccaatctaaattcttaacgtagtctcctttaacttaactttcggttaatagcttaatacctctgattcaggtttttgcatttgtcaactaccattgaatgataatttcaatgagttcgttcttatgaggatcaaatgaaataacatctgtgaaaacctcttacaaagtttaagctataagcaatcaccaagcgttaactactaattttcagtgttaggtaaattttaaaagctttctgcgtccagcagaaccatctggggcacctggaccgggcggaaacatcgacccctccgagaggtctcggccggaccggcgcaaggggaggcgggtggaagcccaccccagcgaacgcccgagggccgggccccgcccaccgccggcggtgcggcaccgcccatcgttggtccgggcgccgc

SEQ ID NO: 3133 - DNA, 491 bp, Homo sapiens
  source 1..491: mol_type = other DNA
ttgactcacatagaatgactatcttagaccctaggggctgtctgaagggccccaggtccctcagtcccgtacgtgcagctgagagccggttgacttctctgctagaagagaccttgaacaagttcaattttgccaggatgtcaccgtctcctcttagagctcactcgggccaggccctgatctgcgctgtggctcccttccctcctttattattcaggagggctgggggggctccagcagccgccttctagttgggggctagtcgctgatctgccggctcccgcccagcctgtgtggaaaggaggcccacgggcgggagccgaattctacaatcccgctggggcggccggggcgggcaataaaagtctactttttgctaaaagcgtctgttcgcgcctttcccgccagggggagcgggcccggggcggaggcggggcccaggtgggagggggacccgggacggaggcggggcccaggttggggcggggccg

SEQ ID NO: 3134 - DNA, 172 bp, Homo sapiens
  source 1..172: mol_type = other DNA
agaatctcttgaacccgattaggaagtagggtaccttacgtttctttggatcttccagattctgagaataaatgtcatttattaagctactaatgggattaaatgatataaatgcacgtacaatactttagacacatactgagtattcagtaacccgcaaattgcgacgcgt

SEQ ID NO: 3135 - DNA, 281 bp, Homo sapiens
  source 1..281: mol_type = other DNA
agaccttccactgtgatgtcacctgagaagggaggactccaggttactggggtccccctccctgggtcctggcagtacaatgaattaaatcatccttgagagttcggaagtgcacccggggccctgggggactctctccccgactgtgtagtcactgtcttcagccaggccccagagggcacaggcccgggtggtggtcacctcccgacacgctgcccggggccattctgccgctgcagggagatgaggggagaggaggacagcctcaccccaccaggatc

SEQ ID NO: 3136 - DNA, 529 bp, Homo sapiens
  source 1..529: mol_type = other DNA
ttttcagatgatgaattgggactcacacccaggttctcaattcagtcaagctcaaccaaagcatgatataatgtaagggcttacatgttattgaacaaagaagtaactaacagattggtgcaaattaatctgatttataaagatctttcccgtctcatttgagcctcacaacaaccctgtgagatttcacacgctttgctttacaggtgggaaacctgaagcacagattttctcaagaaaggaataataatttttttaaaaaagccataggtctttgcgctttgattctcccgagaagcaataaatatttggtgaataagtaagggattgttaaagcaattattatctccctcaaggtggaattcctcttcccaacttggctcttccacgcggggaggaaggggatctcccaggtgccggagaccctagcaccccccgccgactcgtccgcttcagctgccggaggcgcccggcggcgagaaccccggctgggcggggcgggcccgcgcgtcccggccgggctgcggcg

SEQ ID NO: 3137 - DNA, 546 bp, Homo sapiens
  source 1..546: mol_type = other DNA
gagggagataataattgctttaacaatcccttacttattcaccaaatatttattgcttctcgggagaatcaaagcgcaaagacctatggcttttttaaaaaaattattattcctttcttgagaaaatctgtgcttcaggtttcccacctgtaaagcaaagcgtgtgaaatctcacagggttgttgtgaggctcaaatgagacgggaaagatctttataaatcagattaatttgcaccaatctgttagttacttctttgttcaataacatgtaagcccttacattatatcatgctttggttgagcttgactgaattgagaacctgggtgtgagtcccaattcatcatctgaaaaatgagggtgtcaatattgaccaacatcttagtgttgtatccaatgagatactgtctgtgaaaagtgttcagtgtaaataaatgttggctaacattgtattttttcccgctgtaatatccagtacagtgtgtgcacactcagaagcttctactgccttcctttctgagatcaagccatgggccaggtcctctga

SEQ ID NO: 3138 - DNA, 560 bp, Homo sapiens
  source 1..560: mol_type = other DNA
tgtgcttcaggtttcccacctgtaaagcaaagcgtgtgaaatctcacagggttgttgtgaggctcaaatgagacgggaaagatctttataaatcagattaatttgcaccaatctgttagttacttctttgttcaataacatgtaagcccttacattatatcatgctttggttgagcttgactgaattgagaacctgggtgtgagtcccaattcatcatctgaaaaatgagggtgtcaatattgaccaacatcttagtgttgtatccaatgagatactgtctgtgaaaagtgttcagtgtaaataaatgttggctaacattgtattttttcccgctgtaatatccagtacagtgtgtgcacactcagaagcttctactgccttcctttctgagatcaagccatgggccaggtcctctgaggcctcggaggacacttgcccagggattctcaggtcctctagggcaagagtcccgagcctcaggtcttcctcttcagggggaagcccaggagtttccctggggttaccagaggagagcccagctggggctcagataaggccc

SEQ ID NO: 3139 - DNA, 436 bp, Homo sapiens
  source 1..436: mol_type = other DNA
ggagatctcacaggtcctttgagaggagccatcgtaggatttctgagagaagtcagtccctctgagaggagaggacacagttcctctgggaaaacctgtcacagtccctctgagagaagccatcgcggacctctgagaggagccatcgcagttcctgtgagagaacccgtcacagtccctctgagatgaggccagggaggccctctgggaggaaccattgcagtccctctgagaggagccgatctagatggaaaggcttccatttctctctaccgaataaaggggcagtgggttttgaggcccagccgaggctccaagctccgccacccataggttcccgggtcccgcgtcgcgatcccagtggggcggggtctcgaggagggtgactcatcacgtgactcgctccggccgcagccccctcggaagctgctaggcg

SEQ ID NO: 3140 - DNA, 359 bp, Homo sapiens
  source 1..359: mol_type = other DNA
tgctttgtaccaagtagcagtgactaggaggctagttgcttctttgtttaagaattgagaaatatcacgctcctggtagtgccactaagggaaaaccaaggtgcgcagaatagactttgacaccagatgtagatatttatctggagctggaaagaaaaattctttttctgtacctcattgcctattttgtggcatatgccacataaaaaacaagtactaccttttcaaattctgaaaggctattaccactttaactcttttccaaatagctttaaaatgtgggcttttgtgaagaccactttcaaacaagggacatggtatatgcactctgcattttcattggcagtgtgcccttaaag

SEQ ID NO: 3141 - DNA, 176 bp, Homo sapiens
  source 1..176: mol_type = other DNA
tcctggaggaagagctttaagcaaagaatctgttttcagcctggacaagtaactttgtcagttaatgaaactttaggaagtaagtgcacaactgtccttcattcaagaatgttccagacattatgatgtagctcgtcatttgcatgggaggtattacctcagttttaaaaaaggag

SEQ ID NO: 3142 - DNA, 318 bp, Homo sapiens
  source 1..318: mol_type = other DNA
atgtagctcgtcatttgcatgggaggtattacctcagttttaaaaaaggaggaacactgtttgcagctacaaagtagaaataattttctaggctctttcatcatctttcctgagtttctgagggaccttcagtgactggaggggaggaagctcccctccagtacctacattcatcctgaaggtcacggcaactgtgtagttcactgatcgcgggaactgctgcccagcaaccctggagactgcaccctgctccagtcccggctggtccagccctgaactgccgagcagccggtcctccagtggctaaaatgacaggca

SEQ ID NO: 3143 - DNA, 369 bp, Homo sapiens
  source 1..369: mol_type = other DNA
aatgctctgccaaccttgcaccggtcttgttacagggccaggcacacagaaatagtttcactctgtagcccaggctggagtgcagtggtgcagtcatggttcactgcagcctcacctcagcctctggagtagctgggactacaagacagggtctcgccatgttgcccacagtttattgtttgattcaattcttccaacaaccctatgaggctaataatcttatccccattttccaacttaactattctgccttaataatttcagaaaaaaaataaatgattcccttactttacgcccaagtccctccaggggtttcctcggccgccggcgcaggcgccaatcacagggtcctgaggtcgcctgacgttc

SEQ ID NO: 3144 - DNA, 401 bp, Homo sapiens
  source 1..401: mol_type = other DNA
cgcattctccgtcagggccggacgccctgtgctgcagcactgcgtggtaccgagacaccgaagggtgctccagtaactcgtccctttcggcagggccaccccatggaggctcttggtaggggggagcccgggctggagctgtcggggggcgcgactgctcctcatcaccgcagtccggctgaggaggagggatgtcgggctccccagaattggagtcctgcaacgcagtgggcccttccttctgtacctcctcagggtttgaagatactccgcgccgctggggacaccggcagagctggcttcttgaagtccccactgaggtcttgcgacgccagggtctctgactgagagagaatgtcagccatcctcaggcggcgatggtgaagttgctccttcacgac

SEQ ID NO: 3145 - DNA, 326 bp, Homo sapiens
  source 1..326: mol_type = other DNA
agacagggtctcgccatgttgcccacagtttattgtttgattcaattcttccaacaaccctatgaggctaataatcttatccccattttccaacttaactattctgccttaataatttcagaaaaaaaataaatgattcccttactttacgcccaagtccctccaggggtttcctcggccgccggcgcaggcgccaatcacagggtcctgaggtcgcctgacgttcagggcagccggacactgctgcgtcgcagagcgggctgggcggctgtcggacctcgagaggcctgaggcgtcgtgaaggagcaacttcaccatcgccgcct

SEQ ID NO: 3146 - DNA, 204 bp, Homo sapiens
  source 1..204: mol_type = other DNA
ggtccattctctctcaaagaaagccacattttacagtgactaagaggagcctgtggcctcacgttgtcctgcattgcactgttcctttccagaaaaggttcacgtttttttgcttttttcaaaaatagcggaggccattttttgcacattggaaaccacttggaggtgcctcttccagttcccaggtgcaggcttgcacctgcc

SEQ ID NO: 3147 - DNA, 262 bp, Homo sapiens
  source 1..262: mol_type = other DNA
aggctggattacaggcgtgagccatgcgattaaatcttatttcacatctgtaagacttcatatgtagatacaaatcacggattaggaaaaaaatccaaaagtcctgattatttaatgattgcaaactggtcccaatgtcaaaatctaggtttaaattcaataggagtcagggccggggcgcgaaccctgagctggacgactggaggcaggttccaggcggggggcgtggcctcgggcgactgccggatgtcctcttccagaa

SEQ ID NO: 3148 - DNA, 279 bp, Homo sapiens
  source 1..279: mol_type = other DNA
aggctggattacaggcgtgagccatgcgattaaatcttatttcacatctgtaagacttcatatgtagatacaaatcacggattaggaaaaaaatccaaaagtcctgattatttaatgattgcaaactggtcccaatgtcaaaatctaggtttaaattcaataggagtcagggccggggcgcgaaccctgagctggacgactggaggcaggttccaggcggggggcgtggcctcgggcgactgccggatgtcctcttccagaaccgggccgtgccccgga

SEQ ID NO: 3149 - DNA, 278 bp, Homo sapiens
  source 1..278: mol_type = other DNA
tttattctcatatagcccttggagagatcctattataatcaaaataagattatgtcctaaataaccttttcagtgaggctttctgaagccacctaacttactatgtaattaacttatttctactgatactgtcttactagaatgtaaacttcatgaaagtgcctggcacatagtataaattcaataaatatttcttgaatgaataattaaaaaaatgggtgataaaaaataaggtttactaatgaaaacatgattaacaaactaaaaatattcacaca

SEQ ID NO: 3150 - DNA, 470 bp, Homo sapiens
  source 1..470: mol_type = other DNA
tataaatattttaaggtaaggttaaaggtgttactgtagcatacctgatcatttttataacacaaagtagcattacaaaactgcagtaatgtaggattttcttggaatatctgaatttattactaattttacagtgaacatacattacttttgtaatcagaaaagctaccttaatttaaaaaaaagaaaaatcagaaggatctgtctactcaatcttactgacctaactcaacaattttcatttcataatttgatcatcgttttcagaggttgtaaatactgttaaaactgcagtaatgccgacaatcaacatggtgaaaggtgacatttctgctcaactcattattttatacaataagctcagacgaataatacccaatttggataatgttacgagccgggccaagaaaggtctttggctttgagtaatattagagctttcactaaaggaaggaaaggcttcgaaaacc

SEQ ID NO: 3151 - DNA, 469 bp, Homo sapiens
  source 1..469: mol_type = other DNA
ggttcttgcaatgtcatggaacggaaaggggtggcatcctgctgcgtcacgtcgacgcactggggaagcaatttcccccaaggggcaacgacgtcttaaaaagggacatggaacgggggccttctccataggaagaggaggcgagtcccctggccatatcaccagccccagtccaggtacctggaacttagtccgatcggtaaccggcgactacgtggggtacaggtacccgagcgcgcccccgacagacgcaccgacctgcgcgcgcgccgcgggcaggatgcgtgcgcactccccggacgtcccgccccgccccctctgcggccccgaagctgggcggcgtgcgcgcccccgcgccgcgccgagccgggcgctcggaaaggcgtccccgcggtgccttcctcagcgcctgccccgtgagtgacgaggagcgcggaggtgggcgacccgcgtaggcgtctgaaaggcc

SEQ ID NO: 3152 - DNA, 397 bp, Homo sapiens
  source 1..397: mol_type = other DNA
gctcaactcattattttatacaataagctcagacgaataatacccaatttggataatgttacgagccgggccaagaaaggtctttggctttgagtaatattagagctttcactaaaggaaggaaaggcttcgaaaacccactgccctggagacccagcgcccaaaagctccactgggcgcatagcgcacctggccccggactaacctgaccaggtcggtcatgcaggagcggcctttcagacgcctacgcgggtcgcccacctccgcgctcctcgtcactcacggggcaggcgctgaggaaggcaccgcggggacgcctttccgagcgcccggctcggcgcggcgcgggggcgcgcacgccgcccagcttcggggccgcagagggggcggggcggga

SEQ ID NO: 3153 - DNA, 461 bp, Homo sapiens
  source 1..461: mol_type = other DNA
gtgattttgtaaagcgtatatcttataaaatgtgaacagacaaaaagtaaaaatttaaacaaatgattgctttacttcagcacagggcagccataatactatgttttaacagtgcaaggtttcacgcagtattaaaatctattgtcacttagccaaaaacactggtcctttggtgcagtgaaccgggtacatatttacggtggtcagagtcccctgaatactactactgcaatttgtatttcctgattttgacgtattgcaaaaggaaaatgcaaaattacaatttttgcaagggtctgctaccccaaaataaagttacaacttgaggcaaagacgtctaaagcaccatccaggttcttgcaattagtcatggaacggaaaggggtggcatcctgctgcgtcacgtcgacgcactggggaagcaatttcccccaaggggcaacgacgtcttaaaaagggac

SEQ ID NO: 3154 - DNA, 416 bp, Homo sapiens
  source 1..416: mol_type = other DNA
atcttctgaagacaacttgatttgttaatatatcattaactcctgggtttaaaataatgtggtgtgttttaattcattacagttattgttactgatgcttaaattcttcaggtcttgttgatctgacccccaaagcctttaaactctgggcctcagtttgattaatttggtacatcaagcagctttaatattactagttgtaggatagaaatagaaataccaaagccttatcttatggcattgatcaggcagaactgtcagagatatgattttataaaatcacatagggtcatgaatagatatcaaaaatttcatttctccaggagaaacatatatttcttcattgaagttcctgaaacagaaatttgagtaccccagatctcatcttgaattcccatgtgttgtgtctcatgaga

SEQ ID NO: 3155 - DNA, 458 bp, Homo sapiens
  source 1..458: mol_type = other DNA
gaggcctaggatgtggtctcatgggctgggcccagggtccctgtgctgtgtgcagcctagggacttggtgccctgcgccccagttgcttcagctgtggctgaaagggaacaatgtagagcttgggccatggcttcagagggtgcaagccccgagccttggcagcttccacctatgcccaggcagaagtttcctgcaggagtggggccctcatggagaacctctgctagagggaaatgtggggttggagcccccacacagagttcctactggggcaccgcctagtggagctgcaaagccacaggggtggagctgtccaagaccatgggaatccacctcttgcatcagcatgacctgggtgtatttaatctaggaagtaactaacttgcttttgattttatattcccacccaaatctcatcttgaattcccacatgttgtgggagtctcatgagatctga

SEQ ID NO: 3156 - DNA, 631 bp, Homo sapiens
  source 1..631: mol_type = other DNA
ataatttgaagttaggagtgccaacccaaaattggagtagaatctaagaatatcatgatggactttaaataggtaaatctagcgatactgaaatataatacagataaatttaaaatttcaaaatggattctaaaatttagttgtcccagttaataaatacataaaaatgttagggcttttagttaataagaagcataataggagtcactgatggctgccaaaaaagctattttaacttacaatgccatttatcaatagaagtttaatacataaattaaggcatggatttttgtatttgtttctgtgctctttagaacacacctagaatcttatcttgagatctgggtgttatcctctgcctgtctaagaagaactgccttcaaataattgaagggctgtgatattacagataaattaaacttgtcccataaagttctcagaaccagcaaatggaattttcagagagatattaaatttcagtgtaaggacacactaagggttagagctaactcttggaaatgagtcacctcttcaaagtttttcgtaaagaaatggtttggatatgtgtcacctccaaatatcatgttgaaatgtgacctccagaaagagttcttgctctgacttcatgtga

SEQ ID NO: 3157 - DNA, 414 bp, Homo sapiens
  source 1..414: mol_type = other DNA
agttctttgagaaatctccaaactttttcttagaaactatgttttcctggcagttattgaaactgatagacaaaatagtatgataatatttcactggtgaggaataagtatcccaatatggtccactctgcatatctggtaagtgagccttcctgagatggtgctgataccttctaaaaattgtcatgtaaataaaatctactttgtatttaacatttctgtgatttcatgtatgtgtcatattataaagcactgttgacggagtaatgaaaaataagacttgaaactcttattttgttccattttatgaaaagttggagtaagcagtgtccaggtaatctgtactctgtgttcatatcatctggaaataaaggaaatgtgatgttcaggtgtccagtatgcacatctgtgcgt

SEQ ID NO: 3158 - DNA, 615 bp, Homo sapiens
  source 1..615: mol_type = other DNA
tttcatcttcaaggctactcctaacgaattagcaggccagccccgcccggcgccgtgccccgccaacacccggccgcagggcggcgcgggcaccctgcgcgcccggggcgcccgctgcactcggcggcgccgcggagggcgcctacgaccgcgcgcagccgcgccctccctgcgagcggctctgcgcgcccggctcccggcctcccggtggcgccgcaccgaaccgcccgtctcgccgtcatccggaggcgagacccgcgcggccgctctcggggccccgccccgagccccttcccagggcgggggagaggccgcagcgcactcgggagcgggcgagggaatccctctccctccacgtcaccaaatgactctttggcaacgtgcgccaatggaacagaccaagggcgctgggcccggggagcgggggactggggagggccggggctgcctcggcgcctccgaaccgtgcgtggcgcccgctcccgcccgtgccaccgcctggcttcctcgcgcggggtgcgcggttggcgtcagcgcggccgggagccggggctgggaggggagagctgcgcccgcctcctcccctcccgcgccctcctccctgcaaggtggagt

SEQ ID NO: 3159 - DNA, 643 bp, Homo sapiens
  source 1..643: mol_type = other DNA
gccaatggaacagaccaagggcgctgggcccggggagcgggggactggggagggccggggctgcctcggcgcctccgaaccgtgcgtggcgcccgctcccgcccgtgccaccgcctggcttcctcgcgcggggtgcgcggttggcgtcagcgcggccgggagccggggctgggaggggagagctgcgcccgcctcctcccctcccgcgccctcctccctgcaaggtggagtagagcgctagggctccgagcgaaccagcgagccggcggcggagaggcgcggccgggcgaggcgggcccgtccgggagcgggctccggggaaggggtgcgggtctgggcgccggagcggggagcggggccgcgtccctctcagcgccagctctacttgagccccacgagccgctgtccccctggcgcgctcggggccgcgggacgggcgcacgccgccttctcctatccgagccgccccgaaactcgggcggcgagtcggcctccggctccttttctaaaaggaagaaacagaagtttctcccagcggatgaaatcgggggtccccagggctggcaggccaggctcgctgggctccgtgggtccccgctgagctccggctgcgcgcgggggcgggagggcgcgcgcaggggag

SEQ ID NO: 3160 - DNA, 318 bp, Homo sapiens
  source 1..318: mol_type = other DNA
tttttaaagtcttagctagacctcagaagtcaggataagcaaggataatttaaatatatttgttcctatcaaccaaggcaattgtttcttgatatttgtgtaaaaaatttaaattctactctcaaatgaattcaacatgcagacaacaaatctatggtgtgcacatccacccaacacaactggccacccatgggtttggagcacagctgtggttgatttggaattccgaccagcacctgggattcccaggcccacgttctatggaaggctgtatggaggcaagaactcttccgcctaagtgttaatatttatcattta

SEQ ID NO: 3161 - DNA, 392 bp, Homo sapiens
  source 1..392: mol_type = other DNA
tgctctgaaaagcagtgagccgtggtcggacagccccctgacagaggtcctgtggacagcgacgatattttcatttccttgttggaaattatcaagcattttcctccctccatatagagagtaaatttccatgaagactggaaggtagatcttccctgagaacagttccaggaatgtctgcggcaccatctccatgtcctaggtggtgaggtagcaggtggcagatatatggtattctactcctctctcttataactcctgagaattcagaatggaaggaggagtctccactttctcattgacaacagcaagtagtcaactgttcatctcagattttgacatggtgagctggccacggctggagccagaagggaagttgagaactgccccac

SEQ ID NO: 3162 - DNA, 424 bp, Homo sapiens
  source 1..424: mol_type = other DNA
caatgtttttattccctccctgcagaactaattttgtagaaccgccggggataaagaccttaacccgggtctgcagttcgcgtttcccggctagaaggtcagccctgccccagcgcgctctgcgtaaccgggacttcctccgcgcggcaaagccggggaacctccctggcgcctgcgccaccgtggcgagactcggcgccgtggacgtggagagggcgacgcacctgcgcgaagacggcagcgggagaagccgctccagtgcggttgcgcggcggcccaggcgtcgaggggagcctcggcggggagcgcaccgcgcgcctgcgcggagagctgcgtgacgcggcggcgcgcaagggacgggcgctgcgggtggggccgtcggcggcgctggtgagctcctgggtctgacgcggccctgttcgag

SEQ ID NO: 3163 - DNA, 517 bp, Homo sapiens
  source 1..517: mol_type = other DNA
tccctgcagaactaattttgtagaaccgccggggataaagaccttaacccgggtctgcagttcgcgtttcccggctagaaggtcagccctgccccagcgcgctctgcgtaaccgggacttcctccgcgcggcaaagccggggaacctccctggcgcctgcgccaccgtggcgagactcggcgccgtggacgtggagagggcgacgcacctgcgcgaagacggcagcgggagaagccgctccagtgcggttgcgcggcggcccaggcgtcgaggggagcctcggcggggagcgcaccgcgcgcctgcgcggagagctgcgtgacgcggcggcgcgcaagggacgggcgctgcgggtggggccgtcggcggcgctggtgagctcctgggtctgacgcggccctgttcgagtgcctccgagtgtgcgcgcgctctcgctacccggcggggagggggtggggggagtgagagaacgccgagccgtcgccgcagcctccgccgccgagaagcccttgttccc

SEQ ID NO: 3164 - DNA, 648 bp, Homo sapiens
  source 1..648: mol_type = other DNA
attctgtaaagaaaccatcagatttgttaaggacatacttcataatatataagtgtgcactgtttatgatgtcacacctttaacttaaggagacgggtaaaggatcttaaatttttttctaatagaaagatgtgctacactgtattgtaataagtatactctgttatagtcaacaaagttaaatccaaattcaaaattatccattaaagttacatcttcatgtatcacaatttttaaagttgaaaagcatcccagttaaactagatgtatagttaaaccagatgaaagcatgatgatccatctgttttcactagaataatggcaaatacttctaatttttttccctaaacatttttaaaagtgaaatatgggaagagctttacagacattatctacttagatatctgtttaatcttactaagaaaactttcgcctcattacattaaaaaggaattttagagattgattgttttaaaaaaaaatacgcacattgtccaatccagtgattttaatcatacagtttgactgggcaaactttacagctgatagtgaatattttgctttaacttattgatgctctattgtgcagtagcatttcatttaagataaggctcatatagtattacccaactagttggtaatgtgatt

SEQ ID NO: 3165 - DNA, 398 bp, Homo sapiens
  source 1..398: mol_type = other DNA
atattatgcagtcattgaaaacgtttcgaaagcccggccagcctgtcccagctactgtgagccgagatcgtgccactgctccagcctgggcgacagagcgggacttcaaaaagctgtttagaattctttttatttgttcattcaacatgcatgtattaagcacccacttctcacaagaagccaccaccacgctgtgcccgcgtgtgccgggcggggaggggaggccgcagccccagccccgggggcctggttgtgggaggcccgcggccgaggctcgggcgggcggggggcagggaggggcggggttcgccggcgcgcactcccaggcaggccccgccccctcggccggctgtgcgcgctgattggcccctgccggcctcgcgctccctcgctccggg

SEQ ID NO: 3166 - DNA, 290 bp, Homo sapiens
  source 1..290: mol_type = other DNA
ttatcattttctttaaagttttaaaaaattgttatttatttattatttatttttttaagctcgagtagctgtcgcccaggctggagtgcaggggcgcgatctcggcggtggccaggctggtcttgacctcaggggatccgcccacttcggcctcccaaagtgctgtgattacaggcgtgagccaccgcgcctttttttttttttttaaaggaacaggactgacagggcggatccgccagaagctctcctgcaggctccgccccgcgccggtgcgcctgcgcacggacgaa

SEQ ID NO: 3167 - DNA, 368 bp, Homo sapiens
  source 1..368: mol_type = other DNA
gctggagtgcagtgccgagatctcagctcactgcaacgtagcctcccgagtagctgggattacaggtgcggtaaactagttatattttaataatgaaaacatgtgttacataagcacatagtgagaatcaacctcggactctccgggcgtgaggggtgggtgaggggaccggcaggtggtcacagccccatcagcaagtggcgcgtcccacgccgtcctaggtgactgtccaagagcgaaggcggccgcgcgcgaggacatattccttagcgcaccgccccctccccgacgcaggcgcagtcgcggagctgtagagccccacgcagctgcagagccatcgggctgctgcgccatgcgcgcgaagaagg

SEQ ID NO: 3168 - DNA, 558 bp, Homo sapiens
  source 1..558: mol_type = other DNA
ggctgccttaaaaggtaatgagttccttgttactttttccagtccctgaaatcaacggtgagcgcttacctctgctcttgcagagacactgacagacgttcattcaacatctgttcctgccaggcactgtgcgagcagccgctgtaggcctcagagacagctgatagatgtaacactgttgtctccatgtttaaggggactctgttaccagatgacagagagtcaggctgtcagagttcacgtcaccctggctgccagcaggtaggtccccggccccagcagctggtgggggcgccgcaggttagagacgtgaggccgcgaggctaaggcggtgggcacgcacggcgtgccggggccgcctggcttcgcggcgggggaggtaacactgcgacaccccgcagacgctgtcagccggggtcgcggccccgcgtgcgcccgatcatctgactgctggggagtgcgggggcgcgggagccaggcgagccagcgcaggcgcgcgctgcctcctccgtccccaccgagtccccagcgcgtgcgcggggccgtggccgaggcctg

SEQ ID NO: 3169 - DNA, 627 bp, Homo sapiens
  source 1..627: mol_type = other DNA
cggtgagcgcttacctctgctcttgcagagacactgacagacgttcattcaacatctgttcctgccaggcactgtgcgagcagccgctgtaggcctcagagacagctgatagatgtaacactgttgtctccatgtttaaggggactctgttaccagatgacagagagtcaggctgtcagagttcacgtcaccctggctgccagcaggtaggtccccggccccagcagctggtgggggcgccgcaggttagagacgtgaggccgcgaggctaaggcggtgggcacgcacggcgtgccggggccgcctggcttcgcggcgggggaggtaacactgcgacaccccgcagacgctgtcagccggggtcgcggccccgcgtgcgcccgatcatctgactgctggggagtgcgggggcgcgggagccaggcgagccagcgcaggcgcgcgctgcctcctccgtccccaccgagtccccagcgcgtgcgcggggccgtggccgaggcctgcgcgccgcccggccgcctgcactgcgcgcgcgcccaccccgcgtgggaggcagcgggaggggcccggagaggtgtggagcggcgcggcgggaggctccgtgggcggccacgggagacagcgccg

SEQ ID NO: 3170 - DNA, 402 bp, Homo sapiens
  source 1..402: mol_type = other DNA
agaagcaacatcttccatcttaagcattgataagggttaagggaacagctgctctttgcaatgaacaaatctcactctctgaggcagaaattcgccatatagaagactgaatttcttcatctttttgagaatcatttccactacccagaaaaaacattcaaatgagttgtaaatatcttgaaaaatatgcgcttagtcgagggctaggggttccctccctaggcagctgtttgtcagaggctccagccgctacctggtgcgatgtctcgcagctgccgcaattagacaggccaagccttgcggggcgagctgtcgcaagcctgccctgggtctggggggcggagccacgccgggtaggcccaaccagggagaggcggggccaaggccagggcctgactaaac

SEQ ID NO: 3171 - DNA, 387 bp, Homo sapiens
  source 1..387: mol_type = other DNA
aaccacttgttataaaaacagctattatgagttctgtgttgctaaggttctgaaccctcattcccaagattgtgggcaaacaattaaatgctctgcaactcagtttctgcatctgtaaatctggaattaaaatgtttgccttaccagggtcagaaaatattctgtctcagggccttaatacaagctgttaaatgtataattagggagagtgattgcaaaggtggggcgggctcactccttttctccgaggcctctgcagatttgcataggagccgatcgagccacgccactgcgtgggtcgggcagcagcgcggagttggcttgtgagccccgccccctccgggccccgccccctccctgcgcgcgctcgcgcggctcagccagctg

SEQ ID NO: 3172 - DNA, 443 bp, Homo sapiens
  source 1..443: mol_type = other DNA
cctaggcagctgtttgtcagaggctccagccgctacctggtgcgatgtctcgcagctgccgcaattagacaggccaagccttgcggggcgagctgtcgcaagcctgccctgggtctggggggcggagccacgccgggtaggcccaaccagggagaggcggggccaaggccagggcctgactaaacgcgacaagccgctggcagccgcggatctcaccgccgctcagggtgagtcccgcgggaggggctggactcggggccggtggggactgaggcgcccgttcgggtcgggcggcttcgaggcccagggtggggggcccaggcaggaagtgcctcttcctcgccgcgctcttcccggggtcccagagcggccgccccagatccttcagggtgggccccggcgctgggaccgcgggcggacgcgcggggcgtgaggcctggcgc

SEQ ID NO: 3173 - DNA, 593 bp, Homo sapiens
  source 1..593: mol_type = other DNA
gcggggcgagctgtcgcaagcctgccctgggtctggggggcggagccacgccgggtaggcccaaccagggagaggcggggccaaggccagggcctgactaaacgcgacaagccgctggcagccgcggatctcaccgccgctcagggtgagtcccgcgggaggggctggactcggggccggtggggactgaggcgcccgttcgggtcgggcggcttcgaggcccagggtggggggcccaggcaggaagtgcctcttcctcgccgcgctcttcccggggtcccagagcggccgccccagatccttcagggtgggccccggcgctgggaccgcgggcggacgcgcggggcgtgaggcctggcgcggcggccgccgtcggcccgcccccgccgcgcagccgggcgaccggtgcgacaacagccgcaacccctccgcgcggcgcccgcgcctccgccccgtttccccgtcgcgtcctccgaggcccgccgccgaggcccacggcgccccctgggcggacggtctggccgcgacccccaacccgccgcgccgcgccgcggctgccccgcccccacccgtcgcatagtcgggggcgcgcc

SEQ ID NO: 3174 - DNA, 511 bp, Homo sapiens
  source 1..511: mol_type = other DNA
acctgtttatttttctcattacttaaatagaaaacagaaaagggaaaggtaacattattttccaagctacatatattttactaacgtctcataacttgctaaaattattgctcgactttgtccacgacttttgattaagttataagcttctagagaaactattctaaattctttgtactttacagccttttggttcaaacacaaggttagcccgaagttacttcaggttttaacagatctctgtaaacagaaaaagtttaaaaataaatccatctacctgcagagaaggtacaggaaaggggttgcaagggcacgcccaccctcccgactgcaagcggagggaaggccgcagcccgaagctggcggagctgggccggcccgggcgacccccgggtgggctcacccggcagccgcagtggggcccgcgagcgcccccgccggcccagctgatggaggccacgtgacgccagccggccaaggaccggggcggcagagcgcggcggcggcggtg

SEQ ID NO: 3175 - DNA, 517 bp, Homo sapiens
  source 1..517: mol_type = other DNA
ctgcgcagctttgactgcctggacagacgcccagagctgcaattcctggggagcgactcctcggagaagacgtgggagtcaaggatggggggcggcgtgcacaccgcccgcccacaccttctgcccccgctgcagaccgggcgtatgaagccaacgcgccccgtgggcactcggtcccccggctccgcggctggggtggaggagtggcgggtgccctaccccggcgcagagcagccgccgagctgtcatgtcccgagcggcccccgcgccctccttgcgcccacctccgccgcgctggagttcggggtgtgcgtggagaagcggcgcggacgcggagtccgggccggtgcgagtgagcgcgtgagcggcgggagggggccgggctcgcagccgcagcgaaccacggccccgggagcagagccgagcgcgcccccgagccgccgcccgccggagctgcgagcgctgtgggcgagggagggcggggcctctcggggccaagccccgcccccgcccctat

SEQ ID NO: 3176 - DNA, 481 bp, Homo sapiens
  source 1..481: mol_type = other DNA
tctgatgcaattttagcacatcttaaatattaaaatgttttggaacaaacttagagaaattatgaagctaatttagatttggggatataatttagctatattgaagctatgcagccaacatgtagatggtcattattattacaccataaattttgtgaggtcaggaaccttgtaattttaaaaatattcactctgtgctttgttgaataaacggataaaacgtatagacatacatgaactactgatgagtggctgtaacagggaacctgggttcaccaaatttaggcttgtaaattaaactcccagatttctgttttccaggttgaatgaaccctcctctccaggaggccataagcgaggcctctttaaaggagctctcaaagaaaggtacccggggtatcccgggctgtggagcaagcgcggggcgccggggacccgggtttcccacgcagccggggacgccgttgcgtcacggcgcctg

SEQ ID NO: 3177 - DNA, 694 bp, Homo sapiens
  source 1..694: mol_type = other DNA
caagactcacacagtgagtgtgacagctaggtcagtactctctggtcagtgatctggccgtctttgcttctagatccaagcggatacaattcccaaaggcccttgggaaaaggggcttttgaaagatcaccctctggttgttccaactttggacctcttttcttgcaagcacaaagataattgcgccttaattttttaaaggatatctttaaagttaaaattagaccagctcagctttccttccgttaagcagaagttggctgaccgcggccttggccctcagtagccaggcaagtgaaccgcgggtttggggcagcagccctgccggcgccctggaatcccagccttggctgtggtaggaattgggggtgggaccccggcttcagcgccacgtgcagcccccgcgatgagcgggaaagtcctcccaggcacagcgccgcctggcgagggccggcccttgggtcccagctggcagctgggggtggcgggcatcccgagtgcaccgctcccgccccgccccgccttgccccaacccacgatggtctgggagctgcgcccagggcttggcgctggcggccccgcaacagcaccgagcgtttcggtcggcgggcggcggtagcgccccctctcagagccccgctcactcccacctgggctcgctccgagtcggcctgtctgtcgggcccgccctccc

SEQ ID NO: 3178 - DNA, 546 bp, Homo sapiens
  source 1..546: mol_type = other DNA
cccagacagagcaagggcctccattttacacttacccaagactcacacagtgagtgtgacagctaggtcagtactctctggtcagtgatctggccgtctttgcttctagatccaagcggatacaattcccaaaggcccttgggaaaaggggcttttgaaagatcaccctctggttgttccaactttggacctcttttcttgcaagcacaaagataattgcgccttaattttttaaaggatatctttaaagttaaaattagaccagctcagctttccttccgttaagcagaagttggctgaccgcggccttggccctcagtagccaggcaagtgaaccgcgggtttggggcagcagccctgccggcgccctggaatcccagccttggctgtggtaggaattgggggtgggaccccggcttcagcgccacgtgcagcccccgcgatgagcgggaaagtcctcccaggcacagcgccgcctggcgagggccggcccttgggtcccagctggcagctgggggtggcgggcatcccgagtgcaccgctccc

SEQ ID NO: 3179 - DNA, 436 bp, Homo sapiens
  source 1..436: mol_type = other DNA
aatgtaacaatgattagtaatagcattgctattggttcaagaacaatggatgtcaattcatcatttaggagccttcactggagtaattcccaatacttgcagggattttgcctaagcctagctaaaagtttgggtagtggtggatcccctttctatgccaaaaaaaaaaaaaatcccccaatactagagtacctgttttcctaggctgtcctcgcagccgtccctgagagggcgctgttcccaaatcgaagccccagaggcggagactgagacaccggcactctcccactggactgggtcagcatccctctccccgcgcggccgcaggtctagagctgagcgcctgcccacaaacatggcggcgccctgcgcggcttcccgtcgccgcaaccgtggggccggccctgccttgccatgcccagctggcatttaaacc

SEQ ID NO: 3180 - DNA, 393 bp, Homo sapiens
  source 1..393: mol_type = other DNA
agccctttagtgctgctccagtggacgtgcacatctgtaatttatttggtgttttgaaatacttttatgagttactctgacaacttgtcaaggatattttcctgagagaaacaaataaaagacaaatctcaaaaatagtttgctattaggattttatttgttgagatgttaagatgtctttctttgcaaatttacaaggatatcattctatgatcctgtacaggatgaaagcaactgagttctgaaggtagtaagtaacatgctgaggtcaaatgccagtgaaagaatgactcttgcattcatgcagtcagtctgtgttgctgtaaacctgaatcagctctattagcagtgactctgagattctctgtcttgcagcaagtgggaggacgaagc

SEQ ID NO: 3181 - DNA, 270 bp, Homo sapiens
  source 1..270: mol_type = other DNA
attctagttatacatttgtctaaatttttttccaagttggtgaggaactgcgagttttccttctaacagacaggaccctcagctgcaggagaggaggacctggccgtgtgaggtgtcagtctgcccctaccggggggtgcctcccagttaggctgctcggggcagggacccacttgaggaggcagtctgccccttctcaggacatttaagtctgcagaggttacccctgcccctagaggtggagcctatggaggcaggcaggcctccttg

SEQ ID NO: 3182 - DNA, 350 bp, Homo sapiens
  source 1..350: mol_type = other DNA
ggccaccacctgatgggccacggctcatggcgccctagactttagcctgagtctgggccactctaggggaccgggagtggggagaggacgcgcagaatctcgacttctggcccgctcagcggacgctcctctctgacccaggcaggcggctcagggacgcggagcgcggcgccccaggacgctcagagagccaggatagagggtgtgtgttggggcggaagaaccaccccagctgaatcgtccccgtggggttttcgtatgcgcatcagacgggcgggcgaactaagaaggccttcgttctcctccggccaccgtgcgaaccgcgccagggctggacgcggcgagggttg

SEQ ID NO: 3183 - DNA, 216 bp, Homo sapiens
  source 1..216: mol_type = other DNA
tgtatacatatgtaacaaacctgcacgttgtgcacatgtagcacacagattctctctctgtgctataaatttaaaactaggcacaattatcctgtaatcacactatgatttttagaaataatttgtttctctaaggagtatttttaaaaatatttagttagattgcaatatgaattcatcttaatcctagtttctaagatgcaaaattatcacttc

SEQ ID NO: 3184 - DNA, 622 bp, Homo sapiens
  source 1..622: mol_type = other DNA
gaagataatgtagtccagaatagactaagttaggaccttaagtccagtattattttaatgtgatttgaaaggtaattaagctgtattgattgactcaaagaaaagcttttcaagaacttaaactaatttttgaaaattgaagctagaataaactgtactaatttcctaaaatctgaattgaatcaaataaaatttgtattataaagtaaatgctgaaccaatcgacaattaaagtaaaaatcctagcatataccttttagatttggattttaatttgtatacatttcaaatttagtcaaagtcagataaagactccgacgtcttaagaagagaaatatatttaaaaagttaaaaagggtttaaaaaatgtgatgactgatacttaattatcaaaaaacaagattagaagttatttgagaaaatgataaggaattcttttttttctattttaatatgatgcaacaagagaaattcaagatcaaaccgcaaacacattgagtgcccagtttttgagaatggaacgtttttgaattatgcccagtcgagccagtgtagaaactggcaagacagttcagtgagtgctgaagctctgaatcctcagggatgcaggcctttaccacga

SEQ ID NO: 3185 - DNA, 521 bp, Homo sapiens
  source 1..521: mol_type = other DNA
atttagaatataaataatattgaatatatataagtaaaatttcacaataacatttttaaaaaaggttttgaatgaacatctgtttctatagctcatcatataaatctgtcaatctgtagagtgaaaagctagaaattaaaacttacttcctttaattctttgtctattctagatgccaatgaaatttgagttgtatttcagactaagtacttgaaaagaattgaattggtgctcttcttttttgagatgttattatacctggtagtaaaatagctttttttacctaaagaggtagtatatatttctgtagtttaaatggatatttttagtattctgtatgactcatatttttaatcgtacccttgtaccctttaaacatttaatttatggattttaagaattcatcaataataattacatatgttatccttaccactattaatacatattaaaactttcatttaagcatcttaaatgacattttttttaagccataaggacttcagtaaatatctagcgga

SEQ ID NO: 3186 - DNA, 585 bp, Homo sapiens
  source 1..585: mol_type = other DNA
ccggcgtgccaccctaggaatgatacccgcgggactgtcctcgtggaaagccgcaagggggcttgccttgcggctgcgtcctgctccccgcgccgcggagcgtgcacgttgagattcctcggcggtgctgggcatgctcagtgggcaggacttccccggttcaggccccggccctgggctgtagctgcagccgccactgcctcctcgcggggctgcccgaccccagatgccgtcaggcctgtccggtttccgccgttaacctcgccgcgcggccgggaggaggagcggggcggggccggcggcgggcggccgggctggagggccctgccggggggccccgcgggggggccgtgggggcggctcggcggaaccagccccggctgggcagcagcggggacgccgggggccggggccagggctttccgggcttcggtgaggccgccgtgggccccatcttccggcggtcgccggagtttgtggtgattgttgctgccgccgccaccgccccggctgccacctccccgctgccgcctcctcctgggctgggcccgcggtgtctcgtcccctcgcggagccgctcctgcc

SEQ ID NO: 3187 - DNA, 569 bp, Homo sapiens
  source 1..569: mol_type = other DNA
gctagttatatcaaacaccttagttagggagatatgacatacacagtgtcaaagccaccattaggtggtaagagtgaccctgtgaagcaaaaactagtatttgcccggcgtgccaccctaggaatgatacccgcgggactgtcctcgtggaaagccgcaagggggcttgccttgcggctgcgtcctgctccccgcgccgcggagcgtgcacgttgagattcctcggcggtgctgggcatgctcagtgggcaggacttccccggttcaggccccggccctgggctgtagctgcagccgccactgcctcctcgcggggctgcccgaccccagatgccgtcaggcctgtccggtttccgccgttaacctcgccgcgcggccgggaggaggagcggggcggggccggcggcgggcggccgggctggagggccctgccggggggccccgcgggggggccgtgggggcggctcggcggaaccagccccggctgggcagcagcggggacgccgggggccggggccagggctttccgggcttcggtgaggccgccgtgggccccatcttccggcggt

SEQ ID NO: 3188 - DNA, 535 bp, Homo sapiens
  source 1..535: mol_type = other DNA
tcttatacaattgtaaaaaaattatttgttcctgacatttatgtgcaaaggtgaaaataatatttgttgtaggcttacccataacgaggctagttatatcaaacaccttagttagggagatatgacatacacagtgtcaaagccaccattaggtggtaagagtgaccctgtgaagcaaaaactagtatttgcccggcgtgccaccctaggaatgatacccgcgggactgtcctcgtggaaagccgcaagggggcttgccttgcggctgcgtcctgctccccgcgccgcggagcgtgcacgttgagattcctcggcggtgctgggcatgctcagtgggcaggacttccccggttcaggccccggccctgggctgtagctgcagccgccactgcctcctcgcggggctgcccgaccccagatgccgtcaggcctgtccggtttccgccgttaacctcgccgcgcggccgggaggaggagcggggcggggccggcggcgggcggccgggctggagggccctgccggggggccccgcgg

SEQ ID NO: 3189 - DNA, 428 bp, Homo sapiens
  source 1..428: mol_type = other DNA
tcctggcctcaggcagtcctactgcctcaggcccccacaaacattttatagtgtttgccccaaaactttcattggatgttttgcaatggtgtactttgtaacaataacacttcattcttatacaattgtaaaaaaattatttgttcctgacatttatgtgcaaaggtgaaaataatatttgttgtaggcttacccataacgaggctagttatatcaaacaccttagttagggagatatgacatacacagtgtcaaagccaccattaggtggtaagagtgaccctgtgaagcaaaaactagtatttgcccggcgtgccaccctaggaatgatacccgcgggactgtcctcgtggaaagccgcaagggggcttgccttgcggctgcgtcctgctccccgcgccgcggagcgtgcacgttgagattcctcg

SEQ ID NO: 3190 - DNA, 654 bp, Homo sapiens
  source 1..654: mol_type = other DNA
tatttaagtatacactgcgaaactttaaaaacttacttatatgtctagctcttaaccaaattttatttactttagatctgattaagttgtagtctaacgccagctggaagtaaaactcaatggtacaccatatttctgtatatgtagtcacaatttttaattttaatcgcttatataaatgttttcaagttttcatattacaaagtgcaattacaaatagaattgtttatcacttttgtttacattaaaataaattgaatttattggaattttaaaaaatccaagtaaagagatgttgtttgctatttacacactgtgtaggaggcaaattatcctatgtacgttttacaactacattactatcagtaggaccacggtttggaaagccagttgcatactgctaatctaatacaaatgtaaggtggcattaacatcgcatattcacagatttaagggcttgaataaaagctgatcaacagtaaaacactgacattctttcagagactgtcagactggtgctgcaccggccgagccccttctaactgctcgtagcttccgaggccagaccttggccaggactcaagcctctctgcgcgcctcccagcttcttgtccgccgggaggttctgcgcaggcgcggcagtcgtgcgacagc

SEQ ID NO: 3191 - DNA, 426 bp, Homo sapiens
  source 1..426: mol_type = other DNA
gtgtagattcttcagtaaactatgggatggtaactatgcaaaacctaagatttcccttattcaaataaattatctttcatattagacatctaaatatgcactaatttagttaaacccctgggttagttgatctcatcactaattcccagattttaaatttttattttatgctctggagtgcaggggaacaggcgcgcgcccccacgcatgggccaattatccttcggagaagacttaggaaggcttcctggcaggagctctccagggctgccgacgtgagccgggcgggggccgcacacgcgtacaggggccccggtcaacagacgcgccgtgcgcgcgcgcgccggagaaaaacacgggaagacgtgcgcgtgcgcggccgccgctgggagccaccaggcggcggagaccaccgactgcaggagg

SEQ ID NO: 3192 - DNA, 332 bp, Homo sapiens
  source 1..332: mol_type = other DNA
gtgtagattcttcagtaaactatgggatggtaactatgcaaaacctaagatttcccttattcaaataaattatctttcatattagacatctaaatatgcactaatttagttaaacccctgggttagttgatctcatcactaattcccagattttaaatttttattttatgctctggagtgcaggggaacaggcgcgcgcccccacgcatgggccaattatccttcggagaagacttaggaaggcttcctggcaggagctctccagggctgccgacgtgagccgggcgggggccgcacacgcgtacaggggccccggtcaacagacgcgccgt

SEQ ID NO: 3193 - DNA, 368 bp, Homo sapiens
  source 1..368: mol_type = other DNA
cactacttatgaatatcttttaaaaatttctttaacatattcaatctttatcgaatgaatttaatattttccaagttttctataattaacattacttctatattattaattttatagagaatccaaatagcattttattaagtggcgcgatctcggctcactgcaacgattagctgggattacaggcgcgtcgcccggcgccaggctggtccctggcggagtccattttcataaggttaaatcacgaaatttttctaacgtaacgaaaaactcctcgtgcccttaacctcaacgcttcaggtcccgaccaatctctcggagagctcagagggagccgctctagccgccttccgccacggagtgcaggg

SEQ ID NO: 3194 - DNA, 284 bp, Homo sapiens
  source 1..284: mol_type = other DNA
aacacaaacgtccagcgctgactgagagaacacatctgctggaagtcctctgggattcttagccaactaagctggctcatttcccatggttaagcattaaaattgggtgacagagaaaaaaaatatatgttggatgttcagaagactttgtttcattttaaggtatagaataagtaactcaacagcaatgaattcatatgttgtgaacaaacaggaaacaaatgagtaattcctttcttgacggaattaaccactcttactgtgctttgaaaaaaaaaaaagga

SEQ ID NO: 3195 - DNA, 446 bp, Homo sapiens
  source 1..446: mol_type = other DNA
tctggaaagacacaatatttacagttcccagggattagctttttattctatattacatcatttattagtacaaaagtaataggtgtttgctatgaagaacccgcctgtaatcccattactttaggaggctacttgagaggctgaggcacaagaattgcttgagcctgggaggcagacagtgagccttctcataaataaataaataaacaaataaaataaaaaataaataagttgataaataaaattagaatatgataagccaaagacagaaatttaaaattgcttataattgtattccccagcaataagcatcattactattttgaacatatgtttatatataggtttcattacaatttaaaaatctagctgatatgccgggaaagataggctactgtcagaatgctctttttgaaataagaagttatgtaacacaaagacatgtt

SEQ ID NO: 3196 - DNA, 257 bp, Homo sapiens
  source 1..257: mol_type = other DNA
gtcccagctacttagatagctgagatgtctgtgagaaaattttccagaaaatttaacacactaatagacatgtctctcgattgctctattgctgttcaagttggaagccacatttatgtagcttgaatattaaagttacgtatgtaaacatttaaaagcccttccagtgaaaagagcacttattaggagatttaggtactgtcctaaatctgtttctatcaagatcctacactattaattaatggctaatacttcca

SEQ ID NO: 3197 - DNA, 504 bp, Homo sapiens
  source 1..504: mol_type = other DNA
gtttaggtattttataaaaataatgtcctaaaagaccacagaggtctgtagtatattttcaactgtaatctatttcaaaataaaaagttttaaaaaaattctccaaggggggatgattagtaaattgaagcttaactatgcgcttcggttccttccaagacccagaggtccgcttccggccacggccgaacagctgcaccgtgcgtaccgggaacggtcaaggcgcagctggaactccgggcgtaccggacaggtcgcaagggcgggggtccccacctagcggaaatgccggaggccaacccctccccctgcccccgcgaggagcggggcggactcggcagccgccactccccaggctcacggacgctgcggacgcggaactggccagacccgcggcgcgtggcacgcgcgagccctcccgcgcatgctccacccgccggcctccagcccgcgccccgggccccgcagtttggcccctccggccgggcgatcgacgttccgcgt

SEQ ID NO: 3198 - DNA, 336 bp, Homo sapiens
  source 1..336: mol_type = other DNA
tggagtggctggtctcgaactcctgacctcaggtggctttggagtgctgctaggaagattcaaactgggatcactcttttccgacagtgttccaaaaacttccctgcaccagcggcaggggcagatttcccacccggccatgccacgtcagagggtctgtgattccctgagagggtacccttaggctgagagcaagggcccacctgcactctgcgcgaaggagcgttctaacccaaaatgctttaagaatccttggaagcggtcccactgggggcggggctgagcgcgaccgcgccctcaactccccctattgcccgccccggggtggggcataac

SEQ ID NO: 3199 - DNA, 270 bp, Homo sapiens
  source 1..270: mol_type = other DNA
gacagtgcagttctgccgtgctttatttacaaaagcaggcagcaagctagttagaagtgtgtagaaaatgccagtttcaattctctcaagttttggaaaaactgaactgaaattttgtgataccacatagcctcggctgtgctattacccctttaaagagcccgttcacaggaaaacaaaatatatgttgcctaaattctaaatgggctcccgcagctgcgtcacagagatgttttcagacatgccgcatgcctaaaacattgcaagtga

SEQ ID NO: 3200 - DNA, 367 bp, Homo sapiens
  source 1..367: mol_type = other DNA
tggatcacctgacgtcagggcatggcggcaggcgcctgtaatcccagctactcaggagcctgaggcaggagaatcacttatcatgtcatcaagccttaacatgtgatgtttatgggccagggtaaagttttccttcctactaagatgtctttaaatttgaatgatgaatattttttctactatcagtaagcaaactatagttctctgcaggttaccttaaactataaaaatctcactaaggcacatacagaacaggatgtcatgttgctccttcttggaagaaaaaacagcccttttcctctcaccatttgcagaggcccaaagagcaaatgcccagctgcactgggggcgttgcatactcagcaag

SEQ ID NO: 3201 - DNA, 406 bp, Homo sapiens
  source 1..406: mol_type = other DNA
ttttttaatttttaaaatttttttagaccccaagtagctgggattgcaggtgcatgccaccatgtcttctcaaagtgttactcacgtaaagaaacactgttgacagacagtaagtgtagatgactgttagataacaaatcaatacatagacatctaatagaattatatgaaggaccttaagtaataacagttttaaaaattgtctttaaaattaatgttttgaaagcatggcatacacagtataatatttgaaagggaaaaaaatatgtatgtcacaaattaaactgtctatttaagtgtctataggatatgacaacttatagtaaaactcagaccaaagctgaattatttgacaaatttttagtttgtttgttggtattcatttgaaagaagcacacatgcactc

SEQ ID NO: 3202 - DNA, 428 bp, Homo sapiens
  source 1..428: mol_type = other DNA
cccaagtagctgggattgcaggtgcatgccaccatgtcttctcaaagtgttactcacgtaaagaaacactgttgacagacagtaagtgtagatgactgttagataacaaatcaatacatagacatctaatagaattatatgaaggaccttaagtaataacagttttaaaaattgtctttaaaattaatgttttgaaagcatggcatacacagtataatatttgaaagggaaaaaaatatgtatgtcacaaattaaactgtctatttaagtgtctataggatatgacaacttatagtaaaactcagaccaaagctgaattatttgacaaatttttagtttgtttgttggtattcatttgaaagaagcacacatgcactcataggaggaagtctgcctgccatttagccaaacaacctttaattcattga

SEQ ID NO: 3203 - DNA, 425 bp, Homo sapiens
  source 1..425: mol_type = other DNA
cttattctagaaaacactgtatcctctatatggagggaaatttctggtttgattaacactgtaaataattatgagacaaagcctaaatataaaagattactcacacaggctcttacactgagtaagatattatgtgttaaaaattatggttcagaaatcccctgggggacttcctatgtcatatctctacctgaagggcaggctcagacactgattcggggtgtttacccagagacatccaaggtcagacactacgtaaagtcatacttcaagggctttcctttgataatctcagctatcacttccaagagctcttcagataaagctgtttgaagtccaacctaagccttagatggtgagtgagggtccagccacctagtcaggcttgtggctcgtctaacaaactggagcccggggttaacaca

SEQ ID NO: 3204 - DNA, 331 bp, Homo sapiens
  source 1..331: mol_type = other DNA
tctttcctttgataatctcagctatcacttccaagagctcttcagataaagctgtttgaagtccaacctaagccttagatggtgagtgagggtccagccacctagtcaggcttgtggctcgtctaacaaactggagcccggggttaacacagagcaacttccacctgctgtgcgagtctctctctttcgagaagatgagagagcatggagcctgccagtctccccctctgcgcagctgtttggcttttgtcactaaaggaaaacaaactctgcatgctcatgagatggctgagccaactcgaagaatgatcttcagtttctgaccaacagc

SEQ ID NO: 3205 - DNA, 379 bp, Homo sapiens
  source 1..379: mol_type = other DNA
aatcaacaggtatcaatatgaaaactctttaattaaatgcctacacgatttaacaaacttatggttaaatatagttttctaaatatgccatcactttgaaaacatttctgatttttcagtaatttctaaacataatgacagtacagccaaaaagtttattcactgtctaaactacgtggatttaaaaatattctattctatttgctatgtccccttctccttaaaaatctgccgtctgcacttggcccgcacccgcgtcctgaagacgggagcgcagagactcggtttcgctccccttcgcgtggtccccacgcccagctgccacgcagtcttgcgcacgctccggacatgcgcagtgcgggagctgaggcgccagctg

SEQ ID NO: 3206 - DNA, 389 bp, Homo sapiens
  source 1..389: mol_type = other DNA
tactccaatttttttgtattgtagtaaaataaacataaaattactatcttaaccatctgtaagtgtatacttagtttttatgaggtctaaacaatttctttgtatggggcacccatgtattagttataacatacacatagggtatctactattaggcattgctctaggtaaaatattcgtaatctgatattaggtcgtaagtttaaagaagtcctttattttagccacatttaggccaagttgggaagtgactcaaggcagttaaggtcttggctttctaggccaccggagacccagggttgggacagcctgggatctagcacggtagcgggcgggggcggggcttcgggccggggcggggccgggctgggcgggctgggccggcctgg

SEQ ID NO: 3207 - DNA, 607 bp, Homo sapiens
  source 1..607: mol_type = other DNA
ttaaagcacttaattaattcacttcagcttcgctggagaggtctcaggcgagaatggaagatggattcccgaggctgcagccatcgccccggccccgagcttctggggtacccgaaggtgcagccgcctcgccctcctggctcccaggccggccgctgcggccacggtgccagcgagcgcccgggacaccgcgactctcgctgctcgctgggtgcgccccaagcccatccgcagcgcacccgcggcgccggggccagagccgcagctcggtggcacggccggctcggtgcgccgggctcggggcccggccgcccggggccggccgggccggggagggggggcagccaatgagcggcgcgcggcgcgtgggggcgcagcccgagcggctgaggctccagccatagtgaggcgagcggggcgcgcggagcggacgccgcggatcttgtgctgcgccaccgcgcccactcggcagctcgggaggcggggaccggcccggaggctgcgccgctgcggggccggccgactcggaggaggagagggaggaggcgccgccggcccgggctggagccgagcgcagcagccaccgccgccgccgcgccagaagttt

SEQ ID NO: 3208 - DNA, 575 bp, Homo sapiens
  source 1..575: mol_type = other DNA
gataatagggtgagccaccccagttgatgctataaactacaggataataacgtatacatacatttatctagtatgagaacttattctatgtatttttagaagtaaaattttgagaggaaaagaaatgatcattttaaattttgatacataatactaaattatacttatgggttgttataaaccggtattaaggtcacattaaagttaatatgtattattaagtcactatctttgttatgaaaaagttaatagagtattgaatgactgttgtacaatatgcaaatggatacccctcactttttttataagatggagataaattccttgtaggactatttagatgatttaagagataatagttgtaaaactccagtacctggcacatagtaggtgctctgtaaacaattaccattttactatatttttataaagagaagtcattatcgtaatagagccctcttaagtatgagaccactggtaattagactttaacatttaaaaatactagtattatttagtgtgagtaagaaaaactgccataggacacccaagtgtcaggagtcataagaagccag

SEQ ID NO: 3209 - DNA, 509 bp, Homo sapiens
  source 1..509: mol_type = other DNA
ccacattttatatagccaatgaagacgtgccagcaatccatgtataagcttctcgaatggaagaaggttctcctccctagctgcgtgagtgcacactccccagcaggaggaggaatgactctttgctaccttctcctgttaatgatgtgatacgttaatacacattttgaatctgaatctcttagatttcattgatgacactaatatataaataactaaaactggcagatttcatgtgagattattcatcagtattttttttgaaacatgagtcatctgtaactaccagcatataattgagtcatttcatatatgtaggaaaaagtacatattttcaattcaaaagctgttcactagcttttgaaaaagaaagaaaaaattgaattgcccctgctgaagtaatttttaaaacatatcttttactctctactttttagaatgtcaaattgtagaatttgcttactgaaagtttgtgctttgggctacaaaagaatatttagaaatcctta

SEQ ID NO: 3210 - DNA, 480 bp, Homo sapiens
  source 1..480: mol_type = other DNA
gtgagtgcacactccccagcaggaggaggaatgactctttgctaccttctcctgttaatgatgtgatacgttaatacacattttgaatctgaatctcttagatttcattgatgacactaatatataaataactaaaactggcagatttcatgtgagattattcatcagtattttttttgaaacatgagtcatctgtaactaccagcatataattgagtcatttcatatatgtaggaaaaagtacatattttcaattcaaaagctgttcactagcttttgaaaaagaaagaaaaaattgaattgcccctgctgaagtaatttttaaaacatatcttttactctctactttttagaatgtcaaattgtagaatttgcttactgaaagtttgtgctttgggctacaaaagaatatttagaaatccttagattagctcctctgagaagaagagaaaaggttcttggacctctccctgtttcttc

SEQ ID NO: 3211 - DNA, 595 bp, Homo sapiens
  source 1..595: mol_type = other DNA
atggaaaaatataacatctttaaagccgttttcaagaactttaaatttaggaaagttgggaatttattatccaaattttaatcgagacctttctataaatattggatgggattgaaaaatgagcatcttgatttggtaagatacacttactccctttgatcacatatatttctgagataactctttcagctataataactaagaccaaatcttgttaataaactgaacttaaactggttatctctatatgcgtgtctgttttaaaggatagaaaactgaggcagaaacaggacctagatctagctctcaatacaaagcctttgctctttttttgtgttgctgcctttcagtaacatacacacacatgtgtacattctacaatttaattgcagtctatttttattttaaagttgcttcaattctgtagagtgactcgagaagaacattctgtctagtaaaaactaccggaataactattataaaatactgatttggtagtctagaaagaatgtgctattagatatattaaagaccagcttcttcttatggtaaatgtaatgaatgtagaggctggtactgcaagagacagctccat

SEQ ID NO: 3212 - DNA, 287 bp, Homo sapiens
  source 1..287: mol_type = other DNA
tttgtttttaagagataactttaaagtgctttctattggtaaaatatactttagcattatccatttccatcaaagataagcataaaatgcaagtggtcgcatttggggtacacttgaccacagacgcaaccaccccggtagtcatggccagcgctgacagctctctgctcgccccggttcagcgccgtagagcgcgcgctgcgcatgcgcccaccgaccaactgcgcttgcgcaagaccagccctccgcgcaagcgctcttcccttgtttcctgcaggtaggagtgc

SEQ ID NO: 3213 - DNA, 578 bp, Homo sapiens
  source 1..578: mol_type = other DNA
tgacagaaacgatgtcatttatcaccgataatcaaaatatttgttcaattaagtagagtaaaaagaacatctattattggatgctaaaacttttacaggatttactggaagcagcagcagaaagctgcggcgttgtcttagaaaggtgatcggcgttccttagaaatgaaaactggtcaggtaacaggttagggcagctggcgggagaaccccggtcccgcggccgcaccgggtagaacggcgcgccgcccgcgaacttccgcgtgcgaggaagactggagacccgcccgcccgcgcccagccggccccagaggaaacccgctctccccgcccagccggccccctacgcggcgagccggggcggggcgggcccgaggccacgcccaagctgaggcacagccctacaggccgcccgggccgcgctagcccgcgccccgccccgcgactacatttcccggcaagccccgggccgccagcgcgccgcagttgacccatttcccggcccgtcacgggctcggccggcccccgcgcccaggaggctgctccctgctgactggggtgtgggcggcggagggagg

SEQ ID NO: 3214 - DNA, 424 bp, Homo sapiens
  source 1..424: mol_type = other DNA
ttattgccaaaaaaggcattattccagaagaaatatgtccacaacacatatgtcatttacccgttctataccctcccgcgctgcacctggccagagggactggtctccaactcttcctacgcggatgggtggggcggccaggcccggcggccgaagcgtcacggatgcacccgagaagcctcgcgcgctcggggtctggcttcacctggctactccaccgcaaggggaaacaccaagaggccgccgcaagcctccgtggggttccgcaggctgtcaacaacatgcatgccgacctcacctcgtagtctggaagggaagatcagctgagctccgggggtagctcccgcactcctacctgcaggaaacaagggaagagcgcttgcgcggagggctggtcttgcgcaagcgcagttggtcggtgggc

SEQ ID NO: 3215 - DNA, 630 bp, Homo sapiens
  source 1..630: mol_type = other DNA
tctgtcaatataaatttttatgtgatgaaagcaaattgtattgttcctagaaagtgtccttccagttctaagttgaagtaaaagcatgtcatttgatgacaattcttgcaacatcttaaaacctgtgtgacaagtatagtaccatttgtagtacgaagctggactgcaactatcgatccatcattgttgaatctaggtcacgggctgatcacccttagcttgagctgatatactctaaatctttttcttctcaacataaaacattctacaatcctgcagcctttttacttttttacacttttttctttcctttattttttaaaacaatttcaaaattgagatggggtttcgccagaactcctgagctcaggtgatccgcccaccttggcccacacctggccaagttgagtttttaaagtagaaaattttggagaaattaactttattgtgcagtggaaagaaagcatttatgtgagactgagatgagtcctataaaggggagtctccccgcattgggaaactcagattaaatatgttctgtgagcatcactcattcaaatgttctttaggatacgggaagaagaaatggctggtgatctttcagcaggtttcttcatggaggaacttaat

SEQ ID NO: 3216 - DNA, 266 bp, Homo sapiens
  source 1..266: mol_type = other DNA
tgacaaattatctgtggcaggcacccccactgcctgggctgtagagagggcctagtcctcgggctacccgaccccataagatgccgcagcatcggcgtcaccgggttttctgcgagcgttttcagcagaccgcgggctactgtgcttagcacgcccacggggcgccttcaaggtggaatgaagagctgaggaaggcgccccacgcggcttccacggcaaccgcgcctcgctccgccaggagctggggcttagaccatttccgggag

SEQ ID NO: 3217 - DNA, 300 bp, Homo sapiens
  source 1..300: mol_type = other DNA
actgactggaatggcagctcactccgtgatgtgtttgtcgttaggatgctccaaaaaagagaacagaaatgaaaattccaataccactggtgttcacctgatggtgtgatggttataccaatacaacgttcaattcgaaacttttcttttgcacatgcttcagaggctgggatctcggtcctggacgcccgcgctctacgcagcgcggaagcggcggggcagtcagcctccagggagctcctcggggcgccaaggccgcttggcatggaactccaaaggctccttgactgcggccatggc

SEQ ID NO: 3218 - DNA, 169 bp, Homo sapiens
  source 1..169: mol_type = other DNA
attcctagctgcctgttggagattgacaaattatctgtggcaggcacccccactgcctgggctgtagagagggcctagtcctcgggctacccgaccccataagatgccgcagcatcggcgtcaccgggttttctgcgagcgttttcagcagaccgcgggctactgtgct

SEQ ID NO: 3219 - DNA, 523 bp, Homo sapiens
  source 1..523: mol_type = other DNA
agaaattatgatacatatttaactatactatgtgataagtatgtcagctttcacacttattgatcattgccttctgaaaggaatgtttcaacaaagcaagtcaagagtcatgtttcggcagaattagtattgtaatattaaaaaaagaatactcttgtattaggaaagtattgtatttgatataactcagtcatgtaattgtaacatagaagtgtttggtcttcattgattaaaaatgaggtaaattttaaaaaatgtttaatgtttaagttttagggatatttttcgagcctctccctgaaattatacttatagtaaaaaaagtctttgctaactagccaaaaattgctacccattaggatttattagtgaattataagcatatgaccaaaaattgtcatttaaaaaagttatgttcttatttttaaattaatgtcgaatgaatataaagtattaaaaacctttaaaaaatttccttccaggctctaatgaaatatgcctgtactattttaaaaagctttgt

SEQ ID NO: 3220 - DNA, 520 bp, Homo sapiens
  source 1..520: mol_type = other DNA
agagagaagaaagaaaactgccctcttgattgtagtccattgtttcaatatatttaagtacttttgggataaaatgttgacataaatcgaaaatttatgcacagtgtatttttgttttggagcaaaacaaatgttaacattgtgtttccagacacctggaagcccaggtttggtgacattcgcgtttaaaggccgaccggaacgtcgggcttgccggtttgggcgccgagctgcggtgccggcggccaccccgggggcaggcagcagggagggatcaagtaccgcgtgtaactgatagacacgctcgcgactcccgcggcgcccctgccccgtgcccccgcgctcacgaagacgcccggaactcgagggtgcggagccagcccgactgtacccggcgctcccggcgccccttcgcggggcagagacaaccccgacctcccgccgcggccacctcccggcgggcgcgggccgaggaactacagctcccggcaggccccgcgctggccgcgcgcccccgccc

SEQ ID NO: 3221 - DNA, 353 bp, Homo sapiens
  source 1..353: mol_type = other DNA
ataacaatgacctttgatgttacaaagtaaatagaattgtgtttggatattgtagatctcattatttcagataattactttgaccatccttttccactgtcatactttctcagtctccccgtcgcacctaggacggtgcctggtgccgtgttcagcagagtcctctttaggagctgtgggaaaattggagatcataaaaaggcctttcatcttctccaagagaaggaagtggcacccagggccgcccagccccggggtttgcgaaggtccggggtaggagggctgcagcctgcgcgacgcggcgggaggctacccgggggaggacgcgcgttcccgggctcgtgaccgccagc

SEQ ID NO: 3222 - DNA, 408 bp, Homo sapiens
  source 1..408: mol_type = other DNA
ccagtataatgtttgacaaaatatttgggcaccatgttgttctcaggaaacttaattgttcttaaggaggtaagatttataaacattaaaaactctgcttaagaaaggtatgtgaggccagctcacatctgtaacattgcactccagcctggaaaggtatgtgacataatgtgttacattatgataaatgatcaatcatattaatcagataattgacccatcagctgtaaagtgtgaaccatgtttacacccaaagtgtaacacacactggagtgtcttcagaggggtctggaccttccaggcaagtccctggctctgctcaggaagtctagccaccatgtgatatggtttggctgtgtccccacccaaatatcatcgaaagtgaataagtctcatgagatctgatgg

SEQ ID NO: 3223 - DNA, 676 bp, Homo sapiens
  source 1..676: mol_type = other DNA
cccggttcacgctccggccccggcggaggggaggggcgcgccgggcggcggcgctggcggtggccgggtgaccggcgggcgcaggtgccaccgcggcctgggccggcagctgcgccacttgcgcctcgtcgcgcgtctggggcagccgccaccggcttgccccagctttaggcaaatcctgcctccctctgggtaggagaacctgcagctctgaggggagcgagctagaacaccctccccctccgcgcccaccggagcccgggctgagagggacctggggagctgcggcctggccggggcggcgcactcaggtggcctcgcttccctgcgggtcaccgcccgccactcgcacagctaggtcggcctgttgggatcggggtgcgggcggagtcctattgtccccgtgcacccgggcggcagcacctccgggtccctcagcggcatcttctccgagagaagtcgcctacgtaacaatgggcgcccattgtcctccgagggtccaacggtgacccccccccgcgcgcgcgcccggccaccggttggccccgggccagggcacaggtaccgcggctgggagggtcggccccgctgcccgcgccctccgccccgccccagtgagtccccgcgccgccggccccgccccgcgccgccccgccctccgcaggttcagtcctcg

SEQ ID NO: 3224 - DNA, 744 bp, Homo sapiens
  source 1..744: mol_type = other DNA
catagcaacagataactgatttcctgacatcagcaggtctaagttccaaaccatactgtatgttatcacatagggtataaagggttttatcacagaaattaaccaccatttatagcataattttcatgatatgtcccatgtcccaaacaatcaaattaaaattattttggatcacaatccatatgggtttgttctggatttcttctaaaatcattacagtagtgtttcagttgactgtcttctctgagagtccaaatatgtgtcttaataatgataggagtataatttttataaaatgcaaaaagttctaacaacggttggttaattaatgtgtctctattgcaatatatgagagtagattctctctgtttctactgaacaatttcttgaaaagggtctgctccgaaagggaaaatcactttcctttgtatagtctgaagacagtaagtctggaaaactgctaaccccaatttttcccagcagaatattgtataaaatagtccaaaatgaaatttttttccaattattatatgtaattaagcatatccagttattttaactttttgtacacgtgttaacaacattttgtctgatgatgatgaatattcacctttatttttaattagcgccagtgaaactgaataccagtgtccctgaacatcatctctttggattgtatccaaggctgtgctttatttacaaaggccatggaaaatcagtggaggaatgtgacttaaaaaatct

SEQ ID NO: 3225 - DNA, 317 bp, Homo sapiens
  source 1..317: mol_type = other DNA
caaacctaagcttgacaatacagaagcagtgtatgtactgttttgaggctggagtgcggtggcgcgatctcgcctcactgcaagaattagtttcattatactttctctcagtaattagtgcaaggcgtctgcctttaattcagtcgtgaggagggcagcaacgcgagagggaacgcgctggggctagcgcggaggcccagagcccagctaggcgacggccgagacacacggtccggcgcgagccaggcgccccgcgacgtgcagtagagttgaacccggagagggggcgggagcggggggccgagcggccgcgggct

SEQ ID NO: 3226 - DNA, 308 bp, Homo sapiens
  source 1..308: mol_type = other DNA
aacataagtcatctcatgtcttctgccagcatccatgatacagtaagagattactttattagtttgtatgtaaactaaaatcaaattacaaatccggtcataggtaagtatacacatacacgtatacctgttatggggacaatagcccaaattggtttagataagaaaggacagtgtttcttttctaataactctaagcaaatcactgatacccctggatttgttggatgactcctccaacagtgaaggtgaattctaatataaactgatgtcatgagattctagagtctgctgtcatcacattctgt

SEQ ID NO: 3227 - DNA, 556 bp, Homo sapiens
  source 1..556: mol_type = other DNA
gggcggggcgcgctcccaagtcgagcgcagcggccggggcaggttgtaccgagcgtggtggtagagctccgaggccggccggtgcgcctggacgggagtccgggtcaaagcggcctggtgtgcggcgcgccccgccccccgcaggccccgccctgccaggtcgcgctggagcgggatggcgcgctttgactctggagtgggagtgggagcgagcgcttctgcgactccagtaagggcatgggaattgacgccactcacccccccagtctccgactttgccaggtccccaagggcagcggggctcggcgagcgaggcacccttctccgtcagagactcgagtggtccaggccgggcccggagccggctgtcccgcgccactggaaaccgcacctccccgcaggtcagtctgtctgccgaggcgctgcccggcgacctcgccaccgccatgcccgcagcgttgtccccagattgcaggaaccgttacgcgccttgcggggagggttacagcgaggtggaaacacgccccttctcttctccaagggagagtgggttggg

SEQ ID NO: 3228 - DNA, 587 bp, Homo sapiens
  source 1..587: mol_type = other DNA
cccacgccaagggtggtggtggccggcaccccaccctcggccgccgcctccgcgtgtcaggtgccgtgagaagcgcgggaggagcggccgcaggcagcgcccagggatatgactggagcccggagcgcggagattcgcctcctcctgccaccccgccctgcgccaacggcttccatcgcagcctgggcggccccgcgcccaccagcgggcggcgccacctggagtggcctctacgcgggaaatctcagggccagctgcgccccaggagcctttgtgtgcccaagcactgtcggggccccggggcgggggagcggctactaaaatttgcatgccaaagagcctccactgaggtggcaatttgttgccactacactggctttccgggaagcaagctcaagtcgcggaaggtcgtgcgctcggggcggggcgcgctcccaagtcgagcgcagcggccggggcaggttgtaccgagcgtggtggtagagctccgaggccggccggtgcgcctggacgggagtccgggtcaaagcggcctggtgtgcggcgcgccccgccccccgcaggccccgccctgccaggtcgcgctg

SEQ ID NO: 3229 - DNA, 173 bp, Homo sapiens
  source 1..173: mol_type = other DNA
gacaaaacagctgtttgtacacctttaaaaagttccccagagcctggcccagcgctatgggggtgtgagacggcggcggcagggacacccccgccccagtccaaccaggcggagagcggcgctaggacccgccggccaccccgccggctcccgggaggttgataaagcggcgg

SEQ ID NO: 3230 - DNA, 505 bp, Homo sapiens
  source 1..505: mol_type = other DNA
atcacagaactttgaaaggcttttgtatctttcgacaataaatgatcaagtgaagtaaatacgagcgcccgcgtgcagcgcctcctgccgacgcgcgcctcgcagccttcagtcaatgctgacagctgtaggggcgggagggtccgcccttttcctcattctctttttaagaggtgataaaaagcatttaaattatccacgcctggcctcgggtaggagccgcatagcgccaacggttgcgggtcgcaactactcccaggcggcgcgccttgcgcgccgggcctcccaggaccgcggcgagttcagaaggcgcgggcggcttttgacgaacggccctcacagccaatgggaagcccggtcgactttcccgcccctgccaatagggagcagaacccgggccggggggggcgcttcccgcaggctgcggctggattcgatcctgcgcgacggccgcgaaggcgggggcggaggctcggcctgcgcggctgggagcgaccggaagcca

SEQ ID NO: 3231 - DNA, 426 bp, Homo sapiens
  source 1..426: mol_type = other DNA
tgcacacagttcctgtctggccctgttgatcacagaactttgaaaggcttttgtatctttcgacaataaatgatcaagtgaagtaaatacgagcgcccgcgtgcagcgcctcctgccgacgcgcgcctcgcagccttcagtcaatgctgacagctgtaggggcgggagggtccgcccttttcctcattctctttttaagaggtgataaaaagcatttaaattatccacgcctggcctcgggtaggagccgcatagcgccaacggttgcgggtcgcaactactcccaggcggcgcgccttgcgcgccgggcctcccaggaccgcggcgagttcagaaggcgcgggcggcttttgacgaacggccctcacagccaatgggaagcccggtcgactttcccgcccctgccaatagggagcagaacccggg

SEQ ID NO: 3232 - DNA, 282 bp, Homo sapiens
  source 1..282: mol_type = other DNA
ccttgttccctgaatcccttcttaaaggaactgtggacttcaggagccagaagacaccagaggtcctgaccctgtctggtccaagctcctcgaggctggcacagctttggccgtcctggagtctcgctctgtcactcaggctggagtgcagtggcgtgatctcggctcactgcaccgagtagctgggactgtacttcccctgtatcaaagagttaaaatctaattttttgaccagctcattacatgttgaggtgtggggagatgggggtagaaccccgtcaa

SEQ ID NO: 3233 - DNA, 298 bp, Homo sapiens
  source 1..298: mol_type = other DNA
ctggtccaagctcctcgaggctggcacagctttggccgtcctggagtctcgctctgtcactcaggctggagtgcagtggcgtgatctcggctcactgcaccgagtagctgggactgtacttcccctgtatcaaagagttaaaatctaattttttgaccagctcattacatgttgaggtgtggggagatgggggtagaaccccgtcaagtggctgcaaagtttgcccctcttggccccaggggctatttttctccctacagggaaagggaggagtctgagccgagtcacgccccttctc

SEQ ID NO: 3234 - DNA, 351 bp, Homo sapiens
  source 1..351: mol_type = other DNA
agcaattctaatgtaaagaagttttgcatttatttggtactgagtgcccagtcctcagcaaatcagttactttgagcttcagatgcaaataatttccaaattgtcactggccaaaatgctttaaacattcagggttttgtcagggggaggggggagcgggaccccacagctctattcctttttcagactccaagaactcagctttaccaccagtcccaaaaccttcgattacctctttacggctcggttaaattgtacagcctttcataggccggtctaatgcatccagggtccctatggcgttcccaagacgctcctttgtgccgcgcagaaccggccgcatatataaac

SEQ ID NO: 3235 - DNA, 286 bp, Homo sapiens
  source 1..286: mol_type = other DNA
cctgggagatcaaggctgcaatgagccgagtggcgccactacactccagctgtaaaataataacaataataaataaataaaataaaataagtcattttggatttctcttagaagtcagtgataaaaaggtagggaaattgccccagtctcatcaccttgccaggatcgcttgagctcgcttgagctcaggagttagcctcctgcagtatgtttaccttgacactagtttctacttgtagaatacaaggccaaagtctttcgttctggagtatggagtatagattat

SEQ ID NO: 3236 - DNA, 319 bp, Homo sapiens
  source 1..319: mol_type = other DNA
tgcttgaaaaatatagtaattaagaaaattaatcctttatcataaataggactatgtctggatcaggaggatttactctgagggttcatattgaggaggagtgcaatggtgcgatctcagcacactgcaaccttctcagcctcctgagtagctgggattacaggcgcccgccactgccaggctggtctcgaactcctgaccggttggtatcccaaagtgctgggattacaggcgcccggccgctttttcctctttaaagaaaaaaagattattgcggttcattattattattattattacagaacaatccgcaaagcat

SEQ ID NO: 3237 - DNA, 398 bp, Homo sapiens
  source 1..398: mol_type = other DNA
ttacttttacaactagatctgagatatgcgcttaacattttaaataccgtaattaggttgtataatccacgtggccaaggcactgaaaagtgactacacactactcgatcacaatatatccagctccatccagatatccagatctgcctgatcccagtttgagcgtggacaacctcagcggcagagcccgccttggttcggtatcagggcctgggatcctgctggtccagattcaccggccccaggcagactggatatcccgaccactcctggagcaggaggcggcagaacagggtgacgcgcacaccgtgcgcacaacgcgcatcacttgtcccgccggcttggagcagccctgcggtggcccagctgcagcggcacagtcccggcgccttccgggt

SEQ ID NO: 3238 - DNA, 371 bp, Homo sapiens
  source 1..371: mol_type = other DNA
caaataattatgcctcagtttcccatccttagatggggcaaatcaagtaaatgagctaatctagttaaagcacttagcccagtgtctaaactctgtaaatattaggtagtacttaaggttaacggatggcagattttagtactaatagttaaacgtaatcatatcagaaactggactgttttcaattgccgctaaaatgttctacattcgaaacttgggagaggcccagggaggttggcacgcgcctcgggcccgtagatcttccaagcgactccccctgggcggccagctctgcggccgggagagaactaggcgctaggacagctccaggtgcgacttggttgctggggcgaccgggcacctctcacccg

SEQ ID NO: 3239 - DNA, 742 bp, Homo sapiens
  source 1..742: mol_type = other DNA
ttccgaaacgaagggcccagggactccgagaagggtgggagccctcacggccagaggccccactttgccagggtgcgacttcccctcccctgcagcccccaggagcgcagccacagcccggccgggcgccctccctgtctttcaccgggagccggaagcgcatgctcagtagcgagcaggttcagttcgcaggaagctccagcgctacaccggcggcggcggtggcggcggcggccgcggcggcacctcagggcagcgccccagctccgccccgcccggggctcttgcgtttcggagtcccaactacgcggagcgggcgccgcggccggagcgtccctccacacgtcctcccccagccgccagctccgccgcggggccagaccgggcccgggagtgcagccccggcgggcgggcggcggccgcggcagagggcagcccggggcggcgccggcgggccggggaggggcggggggcctggccccggggcggtggtgcgggatgccgccgcctccgggccgcgtccgttctccacggccctgtgtcgggtgggtggccaggcgcgggcctcgccccccagccccctcgccagggctagcccggctgcgcggcgcccggagggggccgggccgtccggtggggccgcggccctgttccgcgctgcgagctcgccctctcgcggctccctggcccggccgccgccgcccctctccccgcccagaggcgccccgggggcaccatgcag

SEQ ID NO: 3240 - DNA, 177 bp, Homo sapiens
  source 1..177: mol_type = other DNA
atctttgcaaaggggaccccaggtggccgcgtcctggccagcagggcaggcaaaggcgcggagcgttgcacttgcacctgcagggggcacactgaagggctccgatgcgccgcgctcggaactcggctagcccgcctggacgcgcccccgcccggacgcgcctcgtgcgtcacgtcc

SEQ ID NO: 3241 - DNA, 537 bp, Homo sapiens
  source 1..537: mol_type = other DNA
caaaccctgagctagacacagggagcccagctggcttcaacaagtggatcccgcacaggggctgcaggtggagctgcctgccagtcccgcgccgttcgctcgcactcctcagcccttgggtggtcgaggaaggttccggccgccaggtatggcgggctgcaggtcccaagccctgccccgcaggcgcagcgccggtgggctggcactgctgggggacccattacaccttctgcagccgctggcccgggtgctaagtccctcattgcccggggtcggcagagccggcgggctgctcagagtgcggggcccgccaagcccacgcccacccggaactccagctggcccgcaagcgccgtgcgcagccccggttcccgctcgcgcctctccctccacagctccctgcaagctgagggagtgggctccggccttggccagcccagaaaggggctcccacagtgcagcggtgggcagcgagggctgtgaggactgccagcacgctgtcacctctcagaaggatcagggctggggctgccagcg

SEQ ID NO: 3242 - DNA, 499 bp, Homo sapiens
  source 1..499: mol_type = other DNA
gatgtagacaatcccaaccctcttcgaagagggaggtcaatctctgcctgcctcccacgcgggatggtgggcagctgtttgcaccctggcaggccaactccaagggtccgagtgtcggtgacagggctgcagcactccatggtatcctacatgtagctgcttctaaaataataaaggctgggacattgtatgctacctgcttggaactgggaccagatagaccaaggtccaactttgtcgttaggggaatcagaaacgaaaagaagccactttctgctagtcctaaccccggtccctgggccaggcaaaccttttcaagcgtccggcggcagcggccgggcgcgggtccgcagaaaagccgaggcgtttcgggtcccaagctgttccgccgccggccccggcctggcaggcgcgcggagccggaacgcgcaaggggtcgggtgcgcgccaggcctggcgcgctccctccgggatcgcggctgcgcagtcgggcgggagt

SEQ ID NO: 3243 - DNA, 526 bp, Homo sapiens
  source 1..526: mol_type = other DNA
atttcttgtaatacatcttgctaaaggcttgacaacccttggggcttccaaggttttgataactttatctcaagatgcatttctaaaaataaaagaacacatgatgacttgagtgaatttcagatgtcaactgtggactcacatattaagatctaggattttatacatattgtagagtataaattaaagaaagcttctaagtcttatcatttttgtgtacaagctttgctgtgaaggaaaagcttataggtgagaggaacactaaaattataattctttgtcttcctatttgcttaagtgatctatctatgaactgttacagatgtcatcctagaggaataccaattgatgtagggcactaattaataagtcccattaaatcatggagtaatgacatttagcatgtaatgaatgcctcataatttcttcatcattaatatttcataccctgggccagtgcagcatggttttctgtattgcacctctgtggtatagactgactatacctagcgtttcctcattttag

SEQ ID NO: 3244 - DNA, 248 bp, Homo sapiens
  source 1..248: mol_type = other DNA
gaaattccacatctcatagatgaagtgggagaaaaatctctggtcatcgttcggctgcctaggggtctcagaggcttcatcctgcaggcggcaggcggcaggacaaagggaccttcggactccagcagcccgacctggatgggatttgtcaaaatcaacttggacaagtgacaagagtgagagggctaggagcccgggggccgggccgggggcgggcgggccgagccgggccgggctcgcagggcgag

SEQ ID NO: 3245 - DNA, 414 bp, Homo sapiens
  source 1..414: mol_type = other DNA
ttttactgtacggcccagtaagggagtatcagttcttcaccttaacatcccattctgaagcacagacacacatgcatttatcatttctgtataactgactcaatatacagctacagagctaatttcacgctgtttatctatattttcatttccattttaaaattcagagtttagaaaaataactagatggcacattgattcatctatggctggatggtactaatgagctgtttcagaacgcagacgtttgttagagaacaggaacttctgcagaccattaatttcctcaatctacaaaataaggcaactggactgaattatcaggggccacagagggctgatgcgaccctcccaggctcgcccctgcgcgccgcctccaggagcgagccgctcgcgcccgaggccacgtgaccc

SEQ ID NO: 3246 - DNA, 758 bp, Homo sapiens
  source 1..758: mol_type = other DNA
aggccttggcctgtatcctgcagaaaaacaggctctgtacacagatgtgaagagctgtgcttgaagaaccagatgcccagctgctaatgtatcagcagacctgggctgctctcatcaaaacatgcttttaaaaactgtacttaatgtgtggaaatattgcattatagcagaatttttttctcctcaagaacaaatgccattgagctttgatttcaggcaagcttgaagttttgtttccgcaataggacatgatttcatgaaatacagtgtaagatgctctctaagataatcattttcaaagcatcaattgtaataaggtgcttttggcattgaaaccgtttttggaagatgatgtactaacacaaatttagaagaaaatctgctttagtaaaaaggaggaaattgtttaatgttcaaaatattagcatgcataaatgtgtgtttaataaggcaaggctatataaattgaacttttcctttccagtaagtcaattgtgtatcttgctcagtgaatgggtactacatgtagtaaattcacagaaagattgagttgtaaactttacaaaggattgcttagtcactgatggagtcttagaacaatcattcaccatagattttgtgatggtcaaatataaacaaatttcggttttgtgatggtcaaatataaacaaattttggtaagagtaataaaaataagtaattagtaatgctttggctgcagctctaatgacatccagtaggttgtgacagttggaagt

SEQ ID NO: 3247 - DNA, 562 bp, Homo sapiens
  source 1..562: mol_type = other DNA
ttattaattatgaggaaagtgatttattggcaatgataatgcttctgtagtttaaaaccagcacgacgaaacagactctgggtctttaagggaaataccaacacagagactctgtcccagttcttggccgggggacaccctcccccgaataatctgtaaaaaaaatcattgatatatgcccagatccttttgctaaaagaaagcttcctttagcgcgagagacagcgctagcgcgcggccacaacgcactgcggggccgagagccggcaaggctgggaggctggaagggctccccacccgctcggtgctccagaaacgcgccggctttgccccgacgcgatcgcctggggagcccaaggggcgcgcagggggccccggggcgcccggcagccgcggggccgagcgcgcgtgtgagcgagtgcgaggctgcggggcgggcgggcgagtgtgcgcgggagggagggggagcgcgcgcgcgcccgggccccggccctcccagcctcccggcctccgcgcctgcctcccgcccgcgcgcaccgctgcccgctgccgcggctcccgc

SEQ ID NO: 3248 - DNA, 525 bp, Homo sapiens
  source 1..525: mol_type = other DNA
agcagagcttcagcaaccccctaagggagtacttctccaccctaacatttaggtcacagatatctgtcatttaaactatccttgacaattaacaaatgtaaaaattagtattctattcatatttacattctttaatttttttaaaaaaattacaaatcttaaactatgttctagaaagtagtttaatgtatatgagaagctgtttaaaataacagcttcttctctcttagagatattgataactttttccttgaagacaaatattaagtaaatatgtaaagtacgtagtttttcattattcgtttataaattcattcattcattaaacatttcacagtgctgtcactagaatctttaaggatgaagactctagtaaggaaccataattgtctctctaaagctttatgtaggtaaaaattggttatgatctaaatatttggagagtagaaatttatcatccatgtgttggatgaagcagagagctgccagatagaggtcctttctttctggtaaatttagagaagg

SEQ ID NO: 3249 - DNA, 510 bp, Homo sapiens
  source 1..510: mol_type = other DNA
cagaccccaggcatcttgaggggtagggagcctctatgcctagagctcctgtcccacgcgcgctcgcaggtgctggcccggctgtgcccgcttccccctcaccatcgccccaatccggaatccggggctgagcgaggagccgccacccccggccccacccgcgagagacggggtccacgcgccttccctgcgccccgaggcccccagcccaggagggagcgctgagatcactcggatctccgcaccccgccccggccccgttatccgccctcgcgttgggcgcggagcccccgcgcgcctcctggccgccgccgccccctcccccgctcccagacggagctcgggggaccgcgggctgggcgggaccgcgggctgggcaggaccggagccgcctccgcgccgcttcccaggcccggacggccgcgggaggaggtcccgctgtcagtcagcggggaaggccgggccgggcggccggagggggcggcgccgaggacgggctcgggccgggag

SEQ ID NO: 3250 - DNA, 432 bp, Homo sapiens
  source 1..432: mol_type = other DNA
atgtatatttacatgttttggttacatgtccagacaaccaatttgcaaatgaataaagtgacgcctaaataaattaggtgatttggaactcagtgttacttcatttgaaataacccttattatggttccctagcaggccatcctatagcctgccatatatggtcaagatgaacttttgggtcatgtccagcactaaaacttcgcccctatttgtcccccaccctattgggggagagggagaacctctccctcttggttgtaggacccacgtggcacctgtttggaaccagcttccaaaccgtggtccccaccagcctggcgcgaggcgtgagagggcggggctggcaagaccccgcctccgtggcgtcacgtgggaggcggagtcggaggcgtgcgcggggcggggctactgctgcgcgcgggcgcgggggc

SEQ ID NO: 3251 - DNA, 209 bp, Homo sapiens
  source 1..209: mol_type = other DNA
tactaccagaactgaaagtggtagttccagatctttcaggctctcccaggttgccaggggaagcttggccgacaagtctggtggctccgcgactccgacactgccgggcttagtccgccgggcttagtccgtggaatgggggaaagagggaacttcatatttcctacgccctagtcccagcaccgggtccttgcgctgagtctcgggac

SEQ ID NO: 3252 - DNA, 746 bp, Homo sapiens
  source 1..746: mol_type = other DNA
ctggtagcagtttaaaataatccctgccaagtggaacccgctttcaagagcgcggggtagatcgctctgcggagccttcacggggctcttcccgctcggagggccggtgctgcagccgggcagcatctcgagagggtccaggcgcgctacacgttaggcgccttctcaggactcgcgccccagaacgtgggggccggggccgggtcggggaccgcttccctccgcgggctggcaggcggcaccgaggctgggggatggggtgtagccgccctctgagcacgcggtacgtgggtcgccccgcgcggcggtcgtggctgggatgccttccctgagaaatccttcagaacccgagctgggctccggacagtttctggaaaaagcaaacgccgccgagtccacactgggctttgaaccagggctgttaaaaggggccctggggactgcccaattcatcccgatggcccagggcaggacgcgggagcaggcatcccggcgctgggctccccgctcccccgccctgcggacccctccccgccactacgggccggagcggagggggaggacggcgtcacgaggcggggagcccgaggtccagggcggggcgcccgggaatcccagcccgagcaagccggggaggtgcgggcgcggggcgcggagggaggtgagcggcgcgcgcggagccggcgggcgaggaggaggactgcacagaggccccgcccccgccgccgcgagccggctcttcgccg

SEQ ID NO: 3253 - DNA, 910 bp, Homo sapiens
  source 1..910: mol_type = other DNA
gctggccgcccgggggactttcggcccgagggccccgctgcagccccccaccccaagccgccacgcggggcctgcctgcccgtggctgacgggggagcgcgccgtcggggcccgcgctccctcggggctccgctcctgccctccgctggcccgggggtccctgggctcgagtatctccggcgctgctagtagcgcgccctccgcccggcggtacctgcgggtggccggggagtcctcgccggcgccagcgctgagccccaccggctgggaacgcggctgtgtccgcgccgccgaccctcgcgcccgagggctgcgcacaccgaggccgcggtgccctctcccaagccgcggggccgaccccctgagggctgcgggcgccgaatggagccgccggggcggaatagctccccgtctccggcgctccctgcggccgcgaatccggcggccgccccgccgccgtccagaggcgatcggaggcggcgaagagccggctcgcggcggcgggggcggggcctctgtgcagtcctcctcctcgcccgccggctccgcgcgcgccgctcacctccctccgcgccccgcgcccgcacctccccggcttgctcgggctgggattcccgggcgccccgccctggacctcgggctccccgcctcgtgacgccgtcctccccctccgctccggcccgtagtggcggggaggggtccgcagggcgggggagcggggagcccagcgccgggatgcctgctcccgcgtcctgccctgggccatcgggatgaattgggcagtccccagggccccttttaacagccctggttcaaagcccagtgtggactcggcggcgtttgctttttccagaaactgtccggagcccagctcgggttctgaaggatttctcagggaaggcatcccagc

SEQ ID NO: 3254 - DNA, 408 bp, Homo sapiens
  source 1..408: mol_type = other DNA
taaagaaagctttaggcacgtaaccagttaagtgtccatcgacatgaaactgattgaatacaatctcctctgtttgaacaggccctgcatatacagtgcccgtctagagccagggcctccatcttccccagctgggtctctggcgaggcgggaagcacccggaatcttcctggccctagagcctgcaggctccaggccggccccttgacaccctgctgcctgcacttatttgcatccaagagtttgcattgagactggcgcttgcctactagggcagccacaggggggttccccagggaagaggtgctggggagaggctaagccccagcccccactcgcatttgagtgcaggcctctgcctcagccaggaccctgaccccagggccccgcagcgctccagcctccccg

SEQ ID NO: 3255 - DNA, 483 bp, Homo sapiens
  source 1..483: mol_type = other DNA
aagctttaggcacgtaaccagttaagtgtccatcgacatgaaactgattgaatacaatctcctctgtttgaacaggccctgcatatacagtgcccgtctagagccagggcctccatcttccccagctgggtctctggcgaggcgggaagcacccggaatcttcctggccctagagcctgcaggctccaggccggccccttgacaccctgctgcctgcacttatttgcatccaagagtttgcattgagactggcgcttgcctactagggcagccacaggggggttccccagggaagaggtgctggggagaggctaagccccagcccccactcgcatttgagtgcaggcctctgcctcagccaggaccctgaccccagggccccgcagcgctccagcctccccgggcctcccccggcccggcccactcggccttgctagcctggcgctgggggcgggcaccagcccccacccctcggctccctcc

SEQ ID NO: 3256 - DNA, 629 bp, Homo sapiens
  source 1..629: mol_type = other DNA
cgggcaggccggtgtcgaactgagtatgttcctaagacgcctaaggagttcagcacggggctcggggtccactgcgacactgcgcggacagcggccgctcggctgggcctcaggtggggagggctcgcggtcctgccctgagcccgggctccgcagctcggcgcctgcaccgctcccctcgccgagcccgcggcggagtctgccggccgcacgcagcaggcgggacctgcggggaccgccgtgcggcttcccgctgggtgagcgccgcagccctgagtggcggggcagtcattccccttttccagatgggaaagagcaccgtgttctcaggtgctgggacttgaaccttccctgggattcccctcggggcgtatttgtcctccgccgggagcaggccccaccgcaggcgccagtgtgtggggcgccccggagacggtggcggggaccgagcccctgccccgcggagaagcagagggcgcgggacgccgttccccagcgctgccgccgccgcgctcgccagggcctggagtggcgcggagggcggcgggctcagaccaaatccaccagggggcaaagtccgcgggccccaagcccccaccacggggtcgcgggggtttgctccgcctcgt

SEQ ID NO: 3257 - DNA, 544 bp, Homo sapiens
  source 1..544: mol_type = other DNA
ttcttaaactccctaagaaagttctgagtcctgcagcgggcaggccggtgtcgaactgagtatgttcctaagacgcctaaggagttcagcacggggctcggggtccactgcgacactgcgcggacagcggccgctcggctgggcctcaggtggggagggctcgcggtcctgccctgagcccgggctccgcagctcggcgcctgcaccgctcccctcgccgagcccgcggcggagtctgccggccgcacgcagcaggcgggacctgcggggaccgccgtgcggcttcccgctgggtgagcgccgcagccctgagtggcggggcagtcattccccttttccagatgggaaagagcaccgtgttctcaggtgctgggacttgaaccttccctgggattcccctcggggcgtatttgtcctccgccgggagcaggccccaccgcaggcgccagtgtgtggggcgccccggagacggtggcggggaccgagcccctgccccgcggagaagcagagggcgcgggacgccgttccccagcgctgccgccgc

SEQ ID NO: 3258 - DNA, 764 bp, Homo sapiens
  source 1..764: mol_type = other DNA
cgcaacaggcccaggctgtgccgggcggggagcctcggcaggcagctgcacccccagccccagagggctggggaaggccggcccgaccaggcgctaagtcgccttcaagcccgccccgcccgggacgtcccgcgccactccgcgcctttggccctggctcaaggtcttagccctgcccggcaggccccggcgctcaagccctgtttactgagcctgggcggggagggggcgaacgagcccgggctccaccggcaagactgccgcggcggccgcccgcgtggccacccccacccccaccgcgactccacgtgcagtcgggctggagccgccaccgactggacgcaggccccgagcccccgcctcctggccggggcaccctttgcaaacccgccgggccgcggggatggttgcgataggcattttgcaattcccgctgcagaatcccggccacgctaaacgtaccggggctctccgaccgcgcagccccggaggagaacagccgtgccttcccgccgccacccggcggcatccactggggccgagagctacacgccacaccggccgcccgggccgccggccccgcccggaggcctccagcaccctcccccggaggttggcggcggccaatgggaggccgggaaggcgcctgacgtccgcgagcgggcgggcggcgttgcctggagaccccggcgggggccgagttctgtcccctcccccggcgcgcccgccccgccgcagccgcactcccgggctctatatagggc

SEQ ID NO: 3259 - DNA, 255 bp, Homo sapiens
  source 1..255: mol_type = other DNA
ctgcactcctacatacattatgtataaaaaattcagaaaataattattaaaaacttaagtcattaacgtttagagaactgaaatgtctctattttccaaattaatactcctgataatagcatcagtagctagcgctattgaatgaattcaatgaggtcttttcattcaacattcagccctaacgccatgaggaacgcgcggcgctgacgactaaaccggattgctaccggccaccccggtgacgtcacgacctcc

SEQ ID NO: 3260 - DNA, 358 bp, Homo sapiens
  source 1..358: mol_type = other DNA
cccagatggagaagatgatgatgatgatgatgatgataatgatgatgatttgagacaggatctcgcccaggatccagtgcagtggcatgatcgcggctcactgcagcaattttttttttttgtgtgtatatatatatatatatatatatattttttttttttttttggtagagacagtcaccatgtgaggaaatagcatgtaaacgctcaagtctttggcacactgttcatcaaaactggggtaccactccaggacagagctccctcctggggcagggactgggaggagctagccacacccccggtgacgcccggtggtcggctgtggtctcccattggctacaccggctgccagtcc

SEQ ID NO: 3261 - DNA, 436 bp, Homo sapiens
  source 1..436: mol_type = other DNA
tggcatcttaggctagaaagcctgagtctactcagcattcaataggtgcttataattagcttcaatgattaataatctacattcacaaagtaaatgaagtatgtaggagatgcacttgcttcattaatttattaataaatacacaatgtgctattgaataaaacttgaaacaactaaacatctagaaagttggaaaatattaaaattacgtgccttattttaaattttaaagtccgaatattccttgcttctagtaaattagcagaaaacagctcaagagattgttacaccctctattcctaaatcgtaaaaaaattttaaaataaaagaaaattgcttttagatcccaggtttgtaaccccttatcatctcgttctaggaggtaacaaggagttactaacttcctgaacgcaaccgcggccgcgacgtcgctccc

SEQ ID NO: 3262 - DNA, 343 bp, Homo sapiens
  source 1..343: mol_type = other DNA
gtccttgagcctgaccaacatggtgaaacactgtctctttgcctgtaatctcagctacgcttgcagtgagccgagatcacgccactgcactccgaacatcatttccctaaaagagcatttcttagggcaggaagtgacctcagaggcctctgggaccctgaacatgcaggaaacagtcctgcggccatgtcctcacactgcttgatgtctgaggtatcctggggagtggcccctgccgccttcccggccatggggcccacaggtctgtgaccctgggctgcagctctcttagacccagctgctgcctgccagggagcagggacgggcccagttgctggcaagc

SEQ ID NO: 3263 - DNA, 370 bp, Homo sapiens
  source 1..370: mol_type = other DNA
cttggggccctggaaggggccacacccaggtccccagcattgatcctgtctccgacctggcagatagcgactgaggcgttatgcccaggcccttccctgggcagggggaggggccattcactggcagaggggtgagcgccgggccccgcactcctgggggagcagcagcagcaagggctctgccttctggctccggggcggtggcaggagccccctccagggagctctgggagcctctgtttacttggagacccatggaccctccgggggtcaaagatccgagttggggagcccgtggcagactgccctgcctgctccacctgaccccggagtcccttgggacagcaggagcttgccagcaactgggccc

SEQ ID NO: 3264 - DNA, 196 bp, Homo sapiens
  source 1..196: mol_type = other DNA
gtcctggatttcttgagtggtaaaatgaggaagggtccttgagcctgaccaacatggtgaaacactgtctctttgcctgtaatctcagctacgcttgcagtgagccgagatcacgccactgcactccgaacatcatttccctaaaagagcatttcttagggcaggaagtgacctcagaggcctctgggaccctgaa

SEQ ID NO: 3265 - DNA, 335 bp, Homo sapiens
  source 1..335: mol_type = other DNA
ctgagattacaggcgcctggccaggctggtctccaactgacctcaggtgatcttttcttttacttctcacatgtatatgtgcatttactgaattaaaactataggatttttggtagaattcatttattttctaaagcgaggccccgcgtacgcgcttagatcatgttgaacctgggaggcaaacggcaaggtgtttctcggcccgcgtttctgagagtgaagggccgttcctatggcgggggaaaccttcccacgtcctggggataatgaatcaagcaacatcgtttatgtaaatacgcccggcagttggtctctgccgcgccaggctaccctgc

SEQ ID NO: 3266 - DNA, 220 bp, Homo sapiens
  source 1..220: mol_type = other DNA
cgtctccacgccgaagagaggcgtttagatcctccaatgagggcctaggaggactttcttagccaatcaggccggaaaggatccgtacagactctccgggtgctcagtgactgacccgcaagaaagccagtgactggggtccctgacgttcgggaggtaggacctagtccccaaaccgggggccgtgagagggcgcgcggcatcccagtgggtggcagct

SEQ ID NO: 3267 - DNA, 674 bp, Homo sapiens
  source 1..674: mol_type = other DNA
ttacttaatattagatcagaagtatttttccatatagctgttactgtattcatcaagacacctatttcgtaatttttagtgattataaaccatctttttatgaataatgctggaatgaacatacatatgcaaataactgttttttcttttttaataagtagctttttgtattacttcttaaaaattttttgtgtgttgatggtaattttttttaatatattttaaaataggtactaccaaatagtatctcttgtttcacattaatttaggaactttttttaaaaaacctacagaggcccatgtcatgcgcatcttgtctgcagaaaatatcccaaatttgccaacaaaaagctaattttgagttcgttcataattagtaattaaataatttggggtaaaaaaacttaaatcagaagtacatcaatagtgtttcttatactagagaagaactcttaaaacttcaaccaaaaacgattttttaaaaggaattatctatcatactctttgagtatgaaggtccttctttccttgctaaggagtgcaaaatcagattctaaggtatgttcttgacaagtatagagtgtaccagttacttttttgaaatattgagatattcacaagcttaaaattctgtgtaatttaataaaactaaagcatgttttttttttttaggc

SEQ ID NO: 3268 - DNA, 302 bp, Homo sapiens
  source 1..302: mol_type = other DNA
tggccaggctggtctcccaaagtgttgggattacaggcaaagctgaataatatttcactatatgtataaccacattgtttatctatccatctgatgtaattttttaattgagacagagtctccctctgtcacccagggtggagtgccatggctcgatgtcagctcactgcaagtagctgggggccaggctggtcctgggattacaggtgtgagccaagatcccgagcagctgggattacaggtgcggccattggccaggctagtctcccagctaggtttatttataaaccacacaaagttca

SEQ ID NO: 3269 - DNA, 373 bp, Homo sapiens
  source 1..373: mol_type = other DNA
aagtctagaaggggttcttctgggagcttcgcaggtggctcccggcaaacttcccccttacctgccgcaggagcttccaccgggcggctcccaggggcgccgagactacgggcccccgagtggtgcagccaactgccggactcccgcccgctgctcgcgcggtctcgccggtcccagcgtccgcgactcgcgacccggaggtgccaccgccgcagctcgtcccctgccaggacctgccaacttcttccctgtcaggacctgtgacgcccggcacctcggaccaggcatgcgcgctctccccgaattccgcatttccggtactcgggcaaccagggcggctggaacgctggcgaaatctgcctgttgctcgtgc

SEQ ID NO: 3270 - DNA, 185 bp, Homo sapiens
  source 1..185: mol_type = other DNA
tggtgttctcaggagaacctattcgtttctcagacagccgaagtctgcgttccgcagcccacagaacgcacgagcaacaggcagatttcgccagcgttccagccgccctggttgcccgagtaccggaaatgcggaattcggggagagcgcgcatgcctggtccgaggtgccgggcgtcacaggtc

SEQ ID NO: 3271 - DNA, 333 bp, Homo sapiens
  source 1..333: mol_type = other DNA
cttaagatggaaagaagtttagcggcctccagcaccctgggaattgggctcaggctccctggcgccagataccctcggaatccgggatccccggctggcgccacggcccgctgggccaaggtcggtgcttcttgccactattagtgctcacataggcagaaagaggcggcccgacgtgcaatgtgcaaaccgcgcccgctgggctggtcagccgtctttccttgcctgtcgaatttctggttcttgcaaagataaaaaaaattctctttatccggctgacagtgattggcagtggttgccgtggcaacgccacaacgacacgtcaatgctgca

SEQ ID NO: 3272 - DNA, 345 bp, Homo sapiens
  source 1..345: mol_type = other DNA
gaaacaaagagttgagttgcttcttaagatggaaagaagtgttagcggcctccagcaccctgggaattgggctcaggctccctggcgccagataccctcggaatccgggatccccggctggcgccacggcccgctgggccaaggtcggtgcttcttgccactattagtgctcacataggcagaaagaggcggcccgacgtgcaatgtgcaaaccgcgcccgctgggctggtcagccgtctttccttgcctgtcgaatttctggttcttgcaaagataaaaaaaattctctttatccggctgacagtgattggcagtggttgccgtggcaacgccacaacgacacg

SEQ ID NO: 3273 - DNA, 301 bp, Homo sapiens
  source 1..301: mol_type = other DNA
atccgggatccccggctggcgccacggcccgctgggccaaggtcggtgcttcttgccactattagtgctcacataggcagaaagaggcggcccgacgtgcaatgtgcaaaccgcgcccgctgggctggtcagccgtctttccttgcctgtcgaatttctggttcttgcaaagataaaaaaaattctctttatccggctgacagtgattggcagtggttgccgtggcaacgccacaacgacacgtcaatgctgcatctctgcgcgcgcgcaccgggccggggtgtgggtgtcccttacgccc

SEQ ID NO: 3274 - DNA, 401 bp, Homo sapiens
  source 1..401: mol_type = other DNA
ctgccggagtccccgcccggcgaggaaggccgccaggcagccggcggctccgggaagtcgattctccggcgtccgcctgcggaagccaagtctttgggcggcaccaactctcccatcccactggcctgcgccggggtagaatgtgtagggtctgggcgaggctgcagagccctctccttctccgcctcccaggctctcagagcgccccaggctccagtagagccgccctcagttctgcgcggagcggggcgatctgtcagcggagccggccggggggagccgcccggcccgccgaggctcgggttaccagtgagtctggcgctggcaggccccgggtcagataaccggaccaatcagggcgcgggccgccgcgcctcatgcccgcttagaataatattatt

SEQ ID NO: 3275 - DNA, 361 bp, Homo sapiens
  source 1..361: mol_type = other DNA
ctcatcccggagctcagcgagccggttcccaggctggagtggccaggagccgagccgatccccagcggcgaagcgggaggactgggaatcttgcctccgcccctctcccccgccccggtgggcagactgcgggtctgcgccgtccggggttctgcgtcgcagctgccggccggagtcagcttcctgccggagtccccgcccggcgaggaaggccgccaggcagccggcggctccgggaagtcgattctccggcgtccgcctgcggaagccaagtctttgggcggcaccaactctcccatcccactggcctgcgccggggtagaatgtgtagggtctgggcgaggctgcagagccctctcct

SEQ ID NO: 3276 - DNA, 665 bp, Homo sapiens
  source 1..665: mol_type = other DNA
cagtgttggccgcagggtccccgagagatacgcggcccggcggggcccatccatggccatccacggcccccggcacgcgcatccagcccagcgccgccgcaccccggggtcccgcgcggggtccccgccccccggctgacccgcccgccgctgcgaccccgggcagcctcgcccactgccgtgcgcgcgcgcgcgtgcacacacacacactcacacactgcattagagggagggagactcgctcgcacaccgacagaggggaccgcgggggagcgcgggctggcgggcggcgagcgagcggcagccgagagcggggacgcggggagcgcggagggcgggcgccggcgcccaggaggtggggccgcgctgagtcgcagtccctgccccgccgccgcgctgcgcaccgcccggtgctggcctgcgcccccgagccggatcggcggccgcccggactccgagcccgcgcggatgtgagattccgggctcctggcgcctcccgatcgccggctccggcgcggcgctgcttcgcccaggaggcggcggccccggctggccgtggggcgttcacccccccgccccgcgcggtcagaggcaggcgctgagtgtgcgaagaggatccgggttgaaatctgcgcccccggttggaaaggtaggtaagcgccggg

SEQ ID NO: 3277 - DNA, 502 bp, Homo sapiens
  source 1..502: mol_type = other DNA
gcggaaccagactgactcggcctcgggcggctcaaagcccacgcccgaaacgcagccgctgggggccgagaaattatccccacctggcccgagggccagggacgcaggagcgcagcagcgtggaggggctccgcgctggcccggcgctgcccgcggtcctgccctcgttccaagggcacggcgccggtacgaggacaccgacgctgtggcgcaactgccgtcccccgcagcaatcccggagcccggctcccggccgcccctcggccctgcgcaggctgcctctccccgacgcggagtcccaccccggaggcgggccagggtcagggcagaggctgcggccgcgcgtccccattggccgggacgcagtgagccgcccggagctcggcgcgggcggggcctgccggcgcgtgcccgcccacacacccgcgccggtgcccgccccccgccctccgcgcccgccccgtgcccgccccaagccggccgacggagtttttaaagtggg

SEQ ID NO: 3278 - DNA, 657 bp, Homo sapiens
  source 1..657: mol_type = other DNA
gcccacgcccgaaacgcagccgctgggggccgagaaattatccccacctggcccgagggccagggacgcaggagcgcagcagcgtggaggggctccgcgctggcccggcgctgcccgcggtcctgccctcgttccaagggcacggcgccggtacgaggacaccgacgctgtggcgcaactgccgtcccccgcagcaatcccggagcccggctcccggccgcccctcggccctgcgcaggctgcctctccccgacgcggagtcccaccccggaggcgggccagggtcagggcagaggctgcggccgcgcgtccccattggccgggacgcagtgagccgcccggagctcggcgcgggcggggcctgccggcgcgtgcccgcccacacacccgcgccggtgcccgccccccgccctccgcgcccgccccgtgcccgccccaagccggccgacggagtttttaaagtgggctgccggccgcgggagctttacactcgcgagcggaccgccacacgggtccggtgcccgctgcgcttccgccccagcgctcctgaggcggccgtacaatcctcggcagtgtcctgagactgtttttttttctttgaaaactcagaaaagtgactccttttccagggaaaaaggaacttgggttccctgcccg

SEQ ID NO: 3279 - DNA, 306 bp, Homo sapiens
  source 1..306: mol_type = other DNA
actgcattttgtatttcataattttgaaaaaggcaaaaaagaaaaaaagggaaggagagtctcattttcaaagaagtttcctagccagctctgaattgtatctggaaaacagaccatgctatatatggaagggttcacgagagccgagtctggcttggagggccccttctgctgtccccagcacaggcggagtgggtgccacttagagcatccacctgcttcagcggacaggcatgtgcgtttccactaatgacaggctgtgagatgacttccacctcatccccagttcagaatcctgggattcag

SEQ ID NO: 3280 - DNA, 506 bp, Homo sapiens
  source 1..506: mol_type = other DNA
cagttttggcaactctgtgggccaaaagatgtcaccaatgaagtcaccactgcatgattcatcgttccccactgggaatgctatgacattcccagagcttctcctactcttagctcacatttatagatgagaaaacggaaggtaacactgctaaccagggtcagagctaggaccaaactcagctctctttcaggacacgagtccctgcatgctgcctgaaccaggccctgctctctttctctctaagagcaagaactgaccttaagacaaaatatcttccagattcattgcatctaaagcagctagcaatgcagaatctgcaaggaacttacagtgatttccgaagacttcctgggagagtggaaatcagattcggagtttcaagtaatcgatgaaaggaagcgattacctctagtcagcaagttgaggggaggggtgcggtgtcagcgcagagtgcacccccgccccaatgcccagtgttcaatgctgcattcttggccagtgaa

SEQ ID NO: 3281 - DNA, 448 bp, Homo sapiens
  source 1..448: mol_type = other DNA
gccccaatgcccagtgttcaatgctgcattcttggccagtgaacaggaccctccagggggagcccaggtttgccgggtccggacgcaataagccagggttcctgctttgccgagaggaatatgcatgtataatttggcatgactattgcgtcatcgtggaggtcgtcgtggttccccgagaggcctccacgtcttctctggacgcttccgggcgctgcgggcacttgcgcgaggagccctcggctccccaggcgactcccccctgcgcgcccctccgcgcggccctcgcagggagtggggctcgggtgcgccggcagggccgcgcggcggcagcaggcgggggcgcgtggcgcgggccgcgctcggggaggcgcctgggcccgccctcctccggggcgccgcgggaggggcccgggttggcgcggggcggggagagccgcctggcccc

SEQ ID NO: 3282 - DNA, 245 bp, Homo sapiens
  source 1..245: mol_type = other DNA
agtacacatgggcacaaagagtattttgtttgattctctgcacactgagaatttattaaaggttttaagttagggaaataataatttgcacttacgttgattttcaaagccatatcctggcataatgactaatgagaatgaataaggcaaagtccttagtctttggttctaacaatacttcaacagcagcagcagcagcagtggaagtagactggctgttaggcgtgggtctccgccccacagcc

SEQ ID NO: 3283 - DNA, 449 bp, Homo sapiens
  source 1..449: mol_type = other DNA
gggaaagtttcccatagattctatcttgaatcgcagctgccagcagcagaaggccctggcgtgcccccaggacgcctgcagaagtgccacgggcatgacccggcccacctcgctacgcaccgcagcggagagaaggctcttccgagcggcacccagaggagccttcgcgggcggtccctcgggattctgcccgagcctacgccggcgcaagcgtgggcggcgctgagctgacggcgagcgccggcgggtcggggcgccaaggctcagggctgcttcggcaattcgcgggggtagcttgcacctcgtgaggcgagacgccgagggcgtccagcggggcttacctaactctccctcccgcggaagggaagcggggaacgggcggcccaggcccacgcgcaggcgcagggctgtggggcggagacccacgcctaacagccagtctacttcca

SEQ ID NO: 3284 - DNA, 247 bp, Homo sapiens
  source 1..247: mol_type = other DNA
ggatccctggaacccaggatttccagggagggggcccttcctggatcttgggacaaagccggccggacacggcgcccgtcgcagctgccagactccatggcagccgcgcagagcgcgcacccaagcggccggacctccccgactcccgggccgcccccgtccacggtaggctgcccttcagagaggcgtgcccctgcccgccccccgccccccgccccgggaggtattttccattctggtgggggtt

SEQ ID NO: 3285 - DNA, 137 bp, Homo sapiens
  source 1..137: mol_type = other DNA
acccggtcatacgggtgtcactggaacatgatcaaggttatgtctaacacttaagaagtgaccggtcctgaggatccctggaacccaggatttccagggagggggcccttcctggatcttgggacaaagccggccgg

SEQ ID NO: 3286 - DNA, 276 bp, Homo sapiens
  source 1..276: mol_type = other DNA
tttccagggagggggcccttcctggatcttgggacaaagccggccggacacggcgcccgtcgcagctgccagactccatggcagccgcgcagagcgcgcacccaagcggccggacctccccgactcccgggccgcccccgtccacggtaggctgcccttcagagaggcgtgcccctgcccgccccccgccccccgccccgggaggtattttccattctggtgggggttcgggggcatccggcggagctggggtccccgggctccgtccggaggaag

SEQ ID NO: 3287 - DNA, 373 bp, Homo sapiens
  source 1..373: mol_type = other DNA
cagctactcgggactgttgcagtgagccgccaccactgcaaagctgctgcggggacagcggctgccgcagcttgtgcagtggacgtagggtccaaggccggctccaagaaggaattagcattcctagttgggagccagctttggggtccgccccatccggatccgccactgagggcttccggcgttgcctagcaactgccgggcccctagggcgtccagcggcccaactggagtggtgcgtcagtcccgccagtgctgggcccgggccgattacacgtggactcacgcgagccgtcctcacagcccgccgccgccagcgggaggggcccggcggcgccaatgggcgggcggcagggagcgcgcgtgcgcaggg

SEQ ID NO: 3288 - DNA, 668 bp, Homo sapiens
  source 1..668: mol_type = other DNA
gaatgatgcccaattctggcttgggcacccgggtggatggccatgcccagacttcccccgccgggcccgacaggacctgtggtctccccgagagaggcttccggcccgctgcttttgggccgggccaggagcagtgtccacccgacacagctggtcccacaggccgatcctcgggcccctagggaccagggaagggggcggagatctgcccagtcggccccgtctggctccagagcccccggtggggcacaggcttccgccccgggagacaggccgtgctcctagccggttaagcgtcccgagacggcctgggggcccagcccgcgcccccagactcctctcatcttgagcccaagcctccagcccacaggagaggcgccgggatcccgcccgctgcggagagtgcgctagttcactcacccttacggtctccgccctgcgcacgcgcgctccctgccgcccgcccattggcgccgccgggcccctcccgctggcggcggcgggctgtgaggacggctcgcgtgagtccacgtgtaatcggcccgggcccagcactggcgggactgacgcaccactccagttgggccgctggacgccctaggggcccggcagttgctaggcaacgccggaagccctcagtggcggatccggatggggcggaccccaaa

SEQ ID NO: 3289 - DNA, 619 bp, Homo sapiens
  source 1..619: mol_type = other DNA
ctcttaggagtctgctcaaaagtttgtctgtgagctgcggcggcagcggggccgggcccctgtaagaggtctccccccaagggtggacctcggctgcccccgctaggcccgccccgtagtcctgtgaacttctgggcaccccacagccctgggctaaaccctgctaagcactccatagagctttgatcacagtcttcagagagtcgcgggcctgggaacgggcctgggtcctcgcgagcatgcctggcccgcatcgcaacagggcggggcggacagcggcaggccagctcccgggaggctcgccgtcggggttggggcctgtcggccggcctctctgtcaggggcagcagcggtgacggggccaccacacaacccgggagggggcgggaagcgaggcgcccccgggcgccggggctccgcgcgggattaaagtgagctccgactccgcggcgggggcggcggcggggggcgggtacccgggcggccgcgagcgcccttcgcgcgcctggctgctgtggccgcgctggcagccagcgagcccggctcgccgaggcctccccacgcccccgcgggggtggagccgcggccaggggcgggtccgcagctggcggcgccgggg

SEQ ID NO: 3290 - DNA, 729 bp, Homo sapiens
  source 1..729: mol_type = other DNA
ctaagcactccatagagctttgatcacagtcttcagagagtcgcgggcctgggaacgggcctgggtcctcgcgagcatgcctggcccgcatcgcaacagggcggggcggacagcggcaggccagctcccgggaggctcgccgtcggggttggggcctgtcggccggcctctctgtcaggggcagcagcggtgacggggccaccacacaacccgggagggggcgggaagcgaggcgcccccgggcgccggggctccgcgcgggattaaagtgagctccgactccgcggcgggggcggcggcggggggcgggtacccgggcggccgcgagcgcccttcgcgcgcctggctgctgtggccgcgctggcagccagcgagcccggctcgccgaggcctccccacgcccccgcgggggtggagccgcggccaggggcgggtccgcagctggcggcgccggggcccggggcggaggctgtggcagcagctgcagcggcggcggcggcggcagcgccaggagctgctacagcagaggcggaggttgctcctgtacgcgtacgggccgctcggccggagccgcagcccggaggcgccgggcggtgcgctgggagctgctggtgctgctgctgctgctgctgcccaccctccgccgcccgggcccccgctgccgcccgggccccggctgccgtctgcgcccccgtcgaccccgcccgcgagtgcgccccagccaggacg

SEQ ID NO: 3291 - DNA, 329 bp, Homo sapiens
  source 1..329: mol_type = other DNA
aattttaattaaccatattactcttgaaagtttgtaaaccaaggaaacctttgtttcctcatccagaaaatgaaactaatacctactttgtagggtccctggaatacagtaggtactgtataaaatgaaattgttcctaggttaagaatgaaaccggctgtgtcctcacaatcttagagtgggtgctaaggcagatttctcttaagtatgcctaccaagcacactgcctccgggctctctagcaactccagagccctctagagcgcgggaaacctggcgggtcccccggagcggtcccaggcgcgcgcgctcgggagcccacgggccac

SEQ ID NO: 3292 - DNA, 278 bp, Homo sapiens
  source 1..278: mol_type = other DNA
tattttacaagtgaggctaaaaattaaatgactcacctaaattacccttggcaacagctgaacagctacaccctcagccaagcgcaaagcaggcgactctgccgcctggcgcagttgccaggacagcgcggcccgagcagcaacggcagaagccgcaccgcgtcccggcggcggctgcgagtcccagtgacgcatggggacgcatcgccgccacgatgctcctccgcgccgcaaagtagcgcccctcaggggccgctccaccggccttttaacggctc

SEQ ID NO: 3293 - DNA, 394 bp, Homo sapiens
  source 1..394: mol_type = other DNA
tgtttcaaacaaaataattatctgcacttagttctggagtgcaatggcgcgatctcggcccagttcaggcgattctccagcctcagcctccggagtagctgggattacagtgttggccaggctggtctcaaactgatccgcccacattgggtatttcctataaataaatgctcctataaataaatagtacaaatacctaatctgagaactactagtgagcatcagttttagagataaatagaacaaagctccttttctgcagtaagaatatattagcttaatgttgctttttaaaaaagtttccactgaccttaaaaacactgaaatccaagaaattggattctggaatctgaggggtccctgcaggatgcattctctagccttcccctggggc

SEQ ID NO: 3294 - DNA, 416 bp, Homo sapiens
  source 1..416: mol_type = other DNA
ttttggttctttaatagtaaccaaaacccgaaatcatctcgagctgggattcttacatcttcaagtgctagaaatgcttatgaaaacgaaaaaagaattattaagagtaattataaagaaacactcattttcttcccaagagagccaagatttctttttttttctttctaatttcaaaggagtataattaaattgccaggtaaaagagagcagcgctcctccggttaggctcctcggaggccctggggcggggcggagcggggcgcgcgggcccacacctgtggagagggccgcgccccaactgcagcgccggggctgggggaggggagcctactcactcccccaactcccgggcggtgactcatcaacgagcaccagcggcccgagaggcggggccgccaggtcgggcaggtgtg

SEQ ID NO: 3295 - DNA, 355 bp, Homo sapiens
  source 1..355: mol_type = other DNA
ggctcaggtgatcatctgggatcacagacgtggccatggcccaggatggtgtcaatctcctgggctcaagtgatccgcccacctcgacttgctatattcattatctgaattttctcatattagaatgtaagcagaataaaggcagtgatttttctttttactggcgaatgagtgaatcatcaacgagtggatggagcgtgcctgccggaaatctcccacctgcgggtttccgcgcgacctaggcgcaggcatgcgcaccagcgtgcgcgggaagctgggcgcgtctgcttatgattggttgccgcggcagactcccacccaccgaaacgcagcccccggacgccgctcgggggac

SEQ ID NO: 3296 - DNA, 527 bp, Homo sapiens
  source 1..527: mol_type = other DNA
gcctcaggggagctgccagtgccccgccccgggctagaggggtcggtgagctggggtggcgcgaggagcccggcagtccgccgggcctgggctagcctgcttcagcgaccgcacctgcctcgggtggcgggtgtgcacagcacagcggggtgagcagccttgcccgcgcctcggacccctggcagccctagcggcgcccgcccgcggctgcggcaccgatgcgctgtccgcggtgctgacgccggccgcccgctcggtcgggagggggagcaaacgccctcgttcccaggtcgcccggagcccagcgttccagtggaacccgctgcgtcctggggctgcggttcgatccagcccgagaatccagtgtcggcgattcgcgtcgcgcggcctccagccctggagaccttccccggcggagtggtagcccgcaccgcagtcggacacctgctccggtgccccgcattggtgccgccagagccaccgggaggcgtcgcagcagccgccccgggcgccagtgactccgcctc

SEQ ID NO: 3297 - DNA, 564 bp, Homo sapiens
  source 1..564: mol_type = other DNA
ctgggattacaggcgcatgctcggcatcccaaagtgctgggattacaggcgtgagccactgcgcccggcctctcatagtctcttagctttctaaaatttgaaaaatcctgtagactgtggcccttaagtactttaacgaatgctattacaatattcatttagcgttgctccgtctccttgcgaaaatgctctaacggcaggaggtcacgcgagcgctggacgcgtttctccccgcgagcggttatccccgcccgggcggtgcgcgcccccgctgttcccgctcgcagagaggcagggctttccgagcctgagccccgcggccgcaactaaccccgggtcggagtgttccggcccggccagccccgcggcgtgagggaaggggagctcagcagttccccgcgcggggcccaggcgtcggcggcagggcgggcccctcaccgccagcgtgccagccccgcccagccccgcccttccccacgtcgccgcgcgcccgggggcggggcctggcgcgcaccgcccgcgcacggcgaggcgcctgttggccactggggcccgggttcctcc

SEQ ID NO: 3298 - DNA, 450 bp, Homo sapiens
  source 1..450: mol_type = other DNA
cttaacttgtatgttaaaaatactttagattccaagcaagtctaatgaattagataatttacctaattagtaaattatgtaatcagtatgctttataataatattgtgagtatatgtacataccatattgtataggtgctactaatttggagataccaaaattctgccatggtttttaaactttgattctgagaaagtttctcaccctaataacataactatatttgtgtttgtcttcatagttaaatatgcattatgatatcagcttgcatacattttttaaatgacttgaatatctgactttaaaaattattctagaatttctgtgcttcaatattaatgccagaagacttggaattgtttatttgtaggtaactgcctttaaggaaacttgaccaaatattaactaagttatgtatttccttttggcaacagtctgtacagtttttt

SEQ ID NO: 3299 - DNA, 566 bp, Homo sapiens
  source 1..566: mol_type = other DNA
ggcgagtggaggctccggcggtgtcaatggctcctcctgccacggagcagcagcagaagcagcggcgaaggaggaggaaggacgacgcctctttttccccctattcacactcatttccccttcgccgaggagagaagggggggagggagaaaaattcctcacagaaatctctttcaggggaaaaaaaagagccgggcgccccctgctccctccctccactccccccgctgccggagacgccgctcgcgagtcggcgggaccgggatctgtctcttcagccgccgccgccgccgccgccgcgcttcgcctcgggatccccaagcggcggagtccctcgcggccgccccgcccggcggcttcggccttccccgtgcgtcaggccctcccggccggcctcgctggggccggagacccaggcgagtgtcgcggccgcgcccggtgcagcaacagcagcagcagcccccgcagcagccgccgccgcagccgccccagcagcagccgccccagcagcagcctccgccgccgccgcagcagcagcagcagcagcagcctccgccgccgccacc

SEQ ID NO: 3300 - DNA, 502 bp, Homo sapiens
  source 1..502: mol_type = other DNA
ttcctctttccccctcctaggcgggggagggaggaaacgccgccccgcggccctcccccgcgcccccggccagccccgcggcggggagggaccgactgggcgagtggaggctccggcggtgtcaatggctcctcctgccacggagcagcagcagaagcagcggcgaaggaggaggaaggacgacgcctctttttccccctattcacactcatttccccttcgccgaggagagaagggggggagggagaaaaattcctcacagaaatctctttcaggggaaaaaaaagagccgggcgccccctgctccctccctccactccccccgctgccggagacgccgctcgcgagtcggcgggaccgggatctgtctcttcagccgccgccgccgccgccgccgcgcttcgcctcgggatccccaagcggcggagtccctcgcggccgccccgcccggcggcttcggccttccccgtgcgtcaggccctcccggccggcctcgctgggg

SEQ ID NO: 3301 - DNA, 297 bp, Homo sapiens
  source 1..297: mol_type = other DNA
gaaaaccagataatcagataaactgccaaaaacacgtttgtttttcttttccttgcagtttgtgggacctaaaaaaaaaaaattaaaatcttcaaacaaatcaaattggccaaaggtcaaagccttttcaaggtttagatgatttcgcttaccaagcccaaagctcggagacggaaatcttcagggtttgcaaatgggcacgaaatctctagcgctccccctcgttccacttttttttcagctcaaaaaaatcgggtgattcctctttccccctcctaggcgggggagggaggaaac

SEQ ID NO: 3302 - DNA, 519 bp, Homo sapiens
  source 1..519: mol_type = other DNA
ggttctcagatttagtaaaacgcaaacgggatattcttatatttttaaaaaaaatctccatttttctgaaattcaggtttaaatctatgttattattatggatatgacaatggatgtgaagtccttagcttctgtaaatcctatgcacattaaattttggatttgatgcttttcagtcaagccagagtaacactactttaagttacagcaatgctttaccgttcctaaagcgcttacgtggggtcgaggaaggtctcctcagcccgggcacaggcaccgagggccgtactgccctgcggcagcctagccccgcccccgcgcctcctcgaccactcagcggccgcgccgcgcctccgccgccgccgtgccaggcagccagccggaacccaggcccctcccttcggtaggaggtgggcgggaaccgggaggggccggccgagcccccttcctcggggtcgcgggaggcgggactggagggtcgccttggcgccgcgttgccatggcagcggggaaggggat

SEQ ID NO: 3303 - DNA, 529 bp, Homo sapiens
  source 1..529: mol_type = other DNA
tgccttcaggaaggccttgaaatatttaaaacatatttgtaaatacgtatgtcatgcactttttaaaattaggttttaatttcagtatgtaagaacaaatattttgtatactttcaaactcaattatatggtaatcgatttggtatctatggaatagatatatgtttctggaaaaaaatgcttaaattgtcaaactgtcattacttcttattgaaggcattctccagattctttttaaaagatttgttcactctctctctctcttctttctctctgagggagagggagcccctaaaggaagttatgtcaataaattcagtctctctattaaaatttgataaaggaaactgaaccctattaaagtgggctgttacaaaacatatcaaatgccaactgactaatcctcggattcctcaaattggaataattctacagttagagttttgccttgaaagctactttaaaccacacttcaagctagtgtcaggagtggctctggcagcactctccactgaggagttcctgaaac

SEQ ID NO: 3304 - DNA, 586 bp, Homo sapiens
  source 1..586: mol_type = other DNA
acatgtttttgccatgtttatatatacatatatagatctaggttattaattttaactgccatattgtaatttatggcaaacatatgccctgtatttattcatttctctattaatgaacattttaatgttgcaatgcatacaatacctagaagaatatctttagaaaatttaaatgaatggcttttaacacataaaatctctcaggcagactatttctgctcatatctactctgcatgcatagaaggaatcgatacctgaaatttcctaaaggtcttttactcagtccccacaaaaaagctctgatgtggtgtgtgtggggccagtggcagcagccaagcatgtcctgtgctatcatatgcgtctttccacgcttgtgctgaaagatgtaaccatcaagcgccaggcggttgccatgggaacccggtccaggtcgccatcttggaccatgagtcaagatggcgccccctggtcccaggggcacagcccaggcacgctagcgaggctacgcacgcacgtattcgggcgcgaagggtggggcactgacgccagacgtcgccccgccctctgtggtcgctcccaccttcc

SEQ ID NO: 3305 - DNA, 307 bp, Homo sapiens
  source 1..307: mol_type = other DNA
atgccatggggcccttcattctgactggctcccagtgaggcagccccccttgtgacttgcctggagtcatttgccagcaggcgatggaatatctccctctccatgcactcttgaggcagcaaagaggaggcatctggacgcgtacctttcaaatcatccccacccagaggtgaggacaaggtctgggggtgctgccccccgacttttgcaggagggagcgctctcccctcctctgggaggctggagagcgggggcgggagcgggaggagtcactgcgccgcggccgcccctccccgccctccaggcc

SEQ ID NO: 3306 - DNA, 413 bp, Homo sapiens
  source 1..413: mol_type = other DNA
cttatcagaaagtttagtgagccttttaatttcataccctctttgaacaatattgtgaaataggatttttctttttatctacacactctctggatagagataatcacttttctttttatctagtataaatataaatgaattctagataaatctagaaagttcttatgtaaagcacacgtaatcccagctactcgggaagctgagcagtgagccaagatcatgccactgcaccccagcaaaaagaaaaaaaaagaaagttcttatgtattatatataaccactggtcatcgtgaagaaaaaaacattgatcttaagttggtagacttttttccccttatgacaaagctgtataggtattcaacagattatttgagaagtgtttttaacaaactttcccgaagcaaatttggttt

SEQ ID NO: 3307 - DNA, 294 bp, Homo sapiens
  source 1..294: mol_type = other DNA
cttcattctgactggctcccagtgaggcagccccccttgtgacttgcctggagtcatttgccagcaggcgatggaatatctccctctccatgcactcttgaggcagcaaagaggaggcatctggacgcgtacctttcaaatcatccccacccagaggtgaggacaaggtctgggggtgctgccccccgacttttgcaggagggagcgctctcccctcctctgggaggctggagagcgggggcgggagcgggaggagtcactgcgccgcggccgcccctccccgccctccaggcc

SEQ ID NO: 3308 - DNA, 252 bp, Homo sapiens
  source 1..252: mol_type = other DNA
ctcaattcagccctctgctgaaggagagaggtgtcgatgatgccttcctgagctctgctgtgacaatctacaggagaaggtagaacttcatatttacattttatttgagttacacaaaatttggaaaattacagatctatttattagacaacaattctgagaaattattcatcactaaaccttggggaaaattatcagtctgcttttcccacagcctgcttctcacgtgatagagctcctggctccaggaag

SEQ ID NO: 3309 - DNA, 471 bp, Homo sapiens
  source 1..471: mol_type = other DNA
ggagactgtgtttatacttattttcctattcacagggcatgccaggttcatgcaattttagtggacaattaaaaattactttacaaagtatctcttgctttagtagcatttactagttgatgtcaaacagagagacaaagtccctgtcctcaaatagttagtagataaataaataaataaatatgatttcaactaataacaaattaggggtagtcctggaggacctccaggaaaaagtaatcacggtttttgccattagttttgcagcaacctaatagtttgtaagatggctccaatggctagatacatgatacagccatatattcaggtagagggataattgatcatatgtctagtcagatctgtaaattttttttcagtatacatattctgtatacattttataaaaactacgtttgacttagaagagctctgttgttcaaaaggagagcagagcgcctgttttgcttt

SEQ ID NO: 3310 - DNA, 297 bp, Homo sapiens
  source 1..297: mol_type = other DNA
acctgagctgtaaaagcacatagcattgagccttggctgcttctctgctggagtgcagtggcgtgatctcggctcactgaagcctccacctcccaagccccagtctccagagtaactgggattacaggcgtgcacagcatgcctaacatttttactgcacagtgttttctaagctcctttgtgcacatgaagaaaaatgcccagagaagttagtgacttgcttaatttactggcagagtcaatgagccagtcacaaagaacagcaagctgttttccctctgtgtggtcattgtacca

SEQ ID NO: 3311 - DNA, 504 bp, Homo sapiens
  source 1..504: mol_type = other DNA
cttaaacataattaggagatatttttctctatttgctagatttgttttgagtcaaaactgatttagtgttcttccaaacaacatttatgtgttggtttcatgtgttttttttaatatttaatattatattacattcattgaaatctgttcaaaaacagattaagacaaacatttatgatggtctgtatcaatcagcagattttattgcttttcattattttactgtaaaggcaaagaatgcagacagagtctcactctgttgcccagcctggagtgcagtgtaaattcttttgtatttttactacaacctcaggtgcttataatatcatatgcttgtgggcgcactctacagtgacttcagtctgctcagaacgaatgaggccggccgaaactgatgctgcccacagtgttttatggcatcctgcccacaaagaactcacagtctgattaggatgaacttaatgactatttacacctcaaaatatattcagcattagttgcccc

SEQ ID NO: 3312 - DNA, 190 bp, Homo sapiens
  source 1..190: mol_type = other DNA
ttccaggtttcactactttaaaaccgtgtgacttcagggaagccaaaacatgatgagcacctgttacaaggtctagcctcaggaatacaaaaataaatctgaattggattttgctctcaagttccgggatgaggggtgcgggccgcactcagaggccgtcccccagttcgccggccatgaagcagcggtt

SEQ ID NO: 3313 - DNA, 255 bp, Homo sapiens
  source 1..255: mol_type = other DNA
tgatttctgcctaactaagaaaaggagataggaacgtattagctgctgactttctagattttaacaaaattgagactctttgtctttcagggggttccatcctccagtctgattcaggagggctgggtcttagaaaaatttggctcttgttatatttttatacaacaaaaaatggataaatgcagaggacagatatcactagtctcccctcttttctttcaaagctgaagttattccctccgagggcactgcgtg

SEQ ID NO: 3314 - DNA, 412 bp, Homo sapiens
  source 1..412: mol_type = other DNA
gtttaaatcatagccaagttcacttgcattgctagacacacagctttcagttaaagatgctgtatttcatcaaaagcatataaatgtcctatttcccttgggggcactagatttaggaattttcatttcctgatgctattttctttcttctatagagatcttggaagatcttaaatattcctaaaatattgactgaaatacaagcaattttattcatgccatttctttccttccactgccttatatgagatataatatggtaatgggaagaagaatccttgttatgagtaacatatgtgattaacagatcatcatgcttcaggtttggtccaatattccttttaagatctctaaagacactggttacatctaaaccattcgtgtccctttgatgcgtagctagaccagcctc

SEQ ID NO: 3315 - DNA, 388 bp, Homo sapiens
  source 1..388: mol_type = other DNA
tttaacattttcatgaagctcaattttatgcaactaattatctaaagatagtattgaaactaattttagcacttagagaatattctgccttttaatcttcatagattctacaattgaaagtagaaagccacttttctaaaagtgttgccaacgttatcgaggaggggaatgccaacaaaagtgctgggctgtcacctcagggaacttttaaaagtaagttaaaagcgtagattaaataaattcatttatgccaattgccaaaaggcaagcatttactaaatccccactatagtgccatttttggcataattacagcaaaaaatgtgcttcacttatttttggagaaagtcaatcatgtcactctgttgagaagtaagaaaccttatct

SEQ ID NO: 3316 - DNA, 713 bp, Homo sapiens
  source 1..713: mol_type = other DNA
ttgtatgtatatgtatatataactatatataatcatctcacattgaagaagtgtgtaaacatatctgttattacagtatgatcactggaaacagatgtatttggggatatagttccatatggttatctttgcttaccaaataattattgtaaatttcagagaaaaggcagcaaataagtacatattttcatcattgaataatacatttgttcttttatttttaatgattgataaaatggcatatttattgggacttaaattgtctttaaagagcaacagttgtaattggccaaaaaaaaaaaagcctaagaatgtatttcttaatgttgcataattgtctttacaaactcatcccataaaaatactcattataaacttggcattcaaaaaatgtcattcattaacttacaaataaaattgtaattacaattacaaggcttcgaggagattctactaggagggttccatgctaattgcacagttttaagtcttctaatttaatattaggtaaaaagataattatctcaagaaacctctgtgtttagcaatcacactggatttgaatgtaatatacagaaaatgttcgtgcatgaaaataagcctttttacagcctcgtcaactgcagacggaactgcagcatcccttcctgccgtagtgcgtcagccattggctcctcagtgacacgtgactgacagagcgttttctgtggata

SEQ ID NO: 3317 - DNA, 344 bp, Homo sapiens
  source 1..344: mol_type = other DNA
tgacgacaggctgcagtaaaaagcaccttgtcagacacaggcaatgaagattgccagtgcctgtgtgagtctcccctgcattcctcgaaaagctgcagcttcttttcacctgggcatgctctctctttctttctttccgatggggaagagagggtaaggtccccgcccccaggatcaggctccccctgcaaggggacgatgcacgctccgcagcatccagacctggaggggctgcgaccacgggccgagcccacccattccccagccaaaggacgggcccgccgctctccatggtactgcggagagctcagctccgcccttctctttcagaaggacagcacccg

SEQ ID NO: 3318 - DNA, 262 bp, Homo sapiens
  source 1..262: mol_type = other DNA
aatagtcttgccttacagtatttgaatttaaatgtccccagcaatgcctattgggcatgcccagttgcatggtttactttcaccaggttttaccagctgcaaaaggtgacgacaggctgcagtaaaaagcaccttgtcagacacaggcaatgaagattgccagtgcctgtgtgagtctcccctgcattcctcgaaaagctgcagcttcttttcacctgggcatgctctctctttctttctttccgatggggaagagagggta

SEQ ID NO: 3319 - DNA, 552 bp, Homo sapiens
  source 1..552: mol_type = other DNA
tattcttcaatttggctatatcatgaagtgttcagttttcataatagagaagagatattgcagaaatttgctatgtcatattcaactagctctgtgactcagcttcagtttttgcatctacaatggagataataatagaagttaattaattttaagatgtagtattgtaaattaaatttgtgttaattaaaaaagtttttaaattttttttaataccattataaatgtaaggccagtcacggtggcataccttttggaaatctccacctactcaggaggctgaagtgggcggatcactggagcccaggagttcagttacagaaatgatatcttagagattcctagaatcatttagttttaaggatttgattttgttaagcaaagtattttgtagtaaagatactcatttgtacaaaatatcacaatttgagttttctgtcaatgataattttttttaaaatgacatttaagatgaatgttttaaattataataatacctgttcacagttgaaaattaaaaactgtaactactattaactgtttgtaagaagt

SEQ ID NO: 3320 - DNA, 545 bp, Homo sapiens
  source 1..545: mol_type = other DNA
atttcaaaaataaaacaggactactgttcagttaaggatgtgaagaactagaactgttctccaatatagaagacagaagcttcatttggctgtttaaattttaattttaattaattaaaatggaataaaattaaaatttgagttcttcaatcaaacatgtggctagtgaccatcataagggacccaagttctattgggtctggtctagagattagaattgaattgaattgaaatttaacctagaatactaggtatacctgtcttcaagacagagagccaggcgatcagctgcaggtcttggagtttctagaagctagaaaagtactgtgggttcctagaagactttcccctcttcaatccaaacaggtaagtttcccacaattaacatagtatggaaaaatggcatgagaacatatcctgcaataatttctagggagacattttctggttttgaaaaaacacctttttccatttcctaaattagaggaaaaatgaagcaatctggaaaaacatatcttaggtaacaaaatatttttgaaaacagg

SEQ ID NO: 3321 - DNA, 562 bp, Homo sapiens
  source 1..562: mol_type = other DNA
gcttcctgctgatttctttataagaaaacaaataataccccttgaatctgagtgttttagcattcaagatcatggtataaaaatcttcaagaaagaacaatcacttggtaaggtttctgttttcactaaacaatattttgcagcaagagctctaatgagcagatcttcaaaaaattttaggatccttgacagtgtacaccccaaattttgtatacaaattcaggttcacatttgccctgataatactaaagatgaataaatttgtgtaaaatttaaatatataaacaattcccattgaaatgacagctactctttcacaagcgtaaacttctattgtaaactttctgcttttatttgaaaggcaaaagacttttttttcaggacataaaatcaaatatgaatttgctacctgcggtgctggtacaccgcctccgtatctggacacgagtgacgagccaaatagctccaaaaagcattgtgggtattgtgcaaaagaatccacggaaaatctttctggatctaaactcccagtgcgctttgcgccccaagtggccatcgcgcc

SEQ ID NO: 3322 - DNA, 265 bp, Homo sapiens
  source 1..265: mol_type = other DNA
tggaaaaagttcccttgcagttaattttccgaaaggaagatgagtaagtgcaccgtcagcaagggggacgctgagggcactgaccagagagaactcggtgccgggccagttgactcgaagggctcggccgccgccggacgcctccaggaggccgcagaggaccagtcggcccgcccgggccacaacctcctctgctccaggaggagaggaggaggaggagccgggtatcagccggcaacgccgcatccgggggtcgcggagccgt

SEQ ID NO: 3323 - DNA, 338 bp, Homo sapiens
  source 1..338: mol_type = other DNA
agactgtcgagctttagggaatggtaatttctctaatcaaaacagacaatggcatttttttttgtcagacgtgacttagttcataccccaacacttcaatctagagatggagggtaagccaaattcggaggcttgcggtattcacctacggggagatggcgggctacctcaccccaggctgcccactggagagcagcgggaatggcttcaggaagcggctgccgcctccgagacgctggtccgaggccgcgtctccagagctgcgtcccagaagcccccgctttcggcgcaggcgacgtcccggcccccgtaggcggacggctccgcgacccccggat

SEQ ID NO: 3324 - DNA, 349 bp, Homo sapiens
  source 1..349: mol_type = other DNA
tgtcacttactgtttcaatgaaatggtaatgaaagaatataataaagtattgcaagttgaatgcttgaaggtaattggaataaaaagtttaaaaaaattttgctttttccgggacttcaatttgaagtaaatgagttaattactacatggtaagtcactcccccaagagggaattttcatttccgcgaggttacaaatgttctagaaaactgtaaaggatattctgcataacgtggaaaaagttcccttgcagttaattttccgaaaggaagatgagtaagtgcaccgtcagcaagggggacgctgagggcactgaccagagagaactcggtgccgggccagttgactc

SEQ ID NO: 3325 - DNA, 536 bp, Homo sapiens
  source 1..536: mol_type = other DNA
aatagtagaaaagtagtaagatcctagcctatcttaggagttcattattttggacatgtatgaattctagtgcttaataaaattagcttgtacattgcactatgatttatcaagattttttacattcaacatagtattaagtaatacatcaatattgagttccctcagtgaattcactaataccttaagagagcttaggtaagttcaaataggtttaatttaaattctattacaatgacttgatttgtaaattctaggtctcaaagttccaaactggaagccgccgccaatttaattcatgaggaaattagagcctagggaggcccgcaaagacctccctgggtccctgcgctatttcagggagcttgagttccccaaacaggctcaagcgcccctcgtgaggcgggcagcgggagtggccgggctctgggccccaggaggcaggcgacggaggcgcggagggtgcggggcgcaggcgggacgccaggcccgggtgtccggcggagggggcggtgccctcggcgtctccgtgactg

SEQ ID NO: 3326 - DNA, 503 bp, Homo sapiens
  source 1..503: mol_type = other DNA
ttttaaaaagaatgaagaatccagtataatatttgaatgaaggaaagggcattcaaataacattctctgtttctaaatagcatccctgtagaaaagtagtaagatcctagcctatcttaggagttcattattttggacatgtatgaattctagtgcttaataaaattagcttgtacattgcactatgatttatcaagattttttacattcaacatagtattaagtaatacatcaatattgagttccctcagtgaattcactaataccttaagagagcttaggtaagttcaaataggtttaatttaaattctattacaatgacttgatttgtaaattctaggtctcaaagttccaaactggaagccgccgccaatttaattcatgaggaaattagagcctagggaggcccgcaaagacctccctgggtccctgcgctatttcagggagcttgagttccccaaacaggctcaagcgcccctcgtgaggcgggcagcgggagtggc

SEQ ID NO: 3327 - DNA, 495 bp, Homo sapiens
  source 1..495: mol_type = other DNA
taatatggataatttcattaaaaagaagaagcacttaattaatgagaaaacttgaattgtgatgtttaaatattagtcagtgagtattcttaagtcagtatttctttcagttttctagtagtgtggatgaaatggaaaaataaaatcttcataaagaggctattttgagttgtggatattgtagtatttattaagtgaaaaaacgaaaaagctttaagtgaaatacagatattgtctgtccatactgtcaatatgtaaaggcagaaagtaacactacgatgctttaattttagtcgactttatgtactacaagtactttgtttttttttaaattgtaataggtaataatacattgtgtcgtgggaaacacaacacctaagtgttaataccccttaattataaggcttctttttatttataatgtggcacctattattaagtattgctgacctacatattcatgatagatgtatctttgccaaatctggagaaatt

SEQ ID NO: 3328 - DNA, 475 bp, Homo sapiens
  source 1..475: mol_type = other DNA
tattctgggtaggggcgtcacatccagaaaaaaaaaaccacgctaattttgattggagattgttttagaatgataagcaactatggaagtctttaaaaatcctttttttttgaaccacaggcatgcactgccaacggagcctcactctgtatcccaggctggagtacagttgggtatctgtgacttcacatgacagggtttcgccacgttggccaagctgttcttgaactcctgacctcaggtcatccagggccaccagctgatttttaaaaattatttttggagagacaaattcttaaatacagaattatttttagtttagcctcaaaatcaagtatttgatgtgtttacatgtagattcattttaaatgcagaaattcacatattgaaaacaacacaattgaaaactaattttatctcactgtaacaagtgcattagagacatatatatatttgcacaaatgttgctattctc

SEQ ID NO: 3329 - DNA, 500 bp, Homo sapiens
  source 1..500: mol_type = other DNA
agcaattaagagcattatctagaaacagctgttcaaatagcatttgttcagcgagtaggcttttccaacccctctaacccagaagccggggctgctcggctagggggaccaggccgacctggctgccgcctgtcgtggcgactgggactccagtgggctgccgcttggagtgcgcgacccccggcgaagcctcgcgctgggccggtgaggcctggggtgggggctccgagccgggcccacggcgaagaaggcgcagcccgttgggctccagctgccgccaccaccccgccccggaagtgacttgaggccggtccggaacctctgggcccggcggctgcagcgtcaccagcagagccggtgcggggcgggcagagcggccgctgccgccgccaacgaactgagagccgcgtggggcccagcagcacgccggccagggaagggggcctagcgatcggtccgagggcgacgggccgccagcggccgcagggcgacgaagacgc

SEQ ID NO: 3330 - DNA, 393 bp, Homo sapiens
  source 1..393: mol_type = other DNA
tgaactttgaatttttagaatacatgcttgcagctaaattaagtgcaattaagagcattatctagaaacagctgttcaaatagcatttgttcagcgagtaggcttttccaacccctctaacccagaagccggggctgctcggctagggggaccaggccgacctggctgccgcctgtcgtggcgactgggactccagtgggctgccgcttggagtgcgcgacccccggcgaagcctcgcgctgggccggtgaggcctggggtgggggctccgagccgggcccacggcgaagaaggcgcagcccgttgggctccagctgccgccaccaccccgccccggaagtgacttgaggccggtccggaacctctgggcccggcggctgcagcgtcaccagc

SEQ ID NO: 3331 - DNA, 508 bp, Homo sapiens
  source 1..508: mol_type = other DNA
gattgcactactgcactccagtctgggagacagaacagcagacaagatgactacagtgtttttcttttgtctgttcataaaagacttcatatttttaaaaagtttcttatcccagaaactgtacagaagagctcaagattatcttaaaagctggcttggtagtcacctaaacatttcataaataatttactaactcttaaaaattgatgagagtagatcttaaatgttctcttcattaaaaaatggtgcaatggatacgttaatttcattgatgtaatcatttcacaatgcatacatatgtacccaacttttatttgtcaattacactttaataaagctatttactaactttgagaacagagtaccttgatcaaagcgctgtggagacagcatcctccccagtccgggaagagaggcctaggatgcctggggcccagcggcctcttccctcctggcgcttccgacgcgtgaccccggcgcgctagcgtccgggaccggtgacaggcgc

SEQ ID NO: 3332 - DNA, 643 bp, Homo sapiens
  source 1..643: mol_type = other DNA
tccacggaggacccttgagaaaggctcacctctctccctcggggccggggcccttgggctacccagggccccccaggtgggcttcacaggctctgtcacgccctgggatcaccgctcggggacagctccacgaggacaagcctttccccccggcccggcccgcaggcccgggcacacttacgtggagagtttcctggtccagaagaggcccccgggccacagctcttggagctgcacggcccggcccaggttgcatttgatctgggccagctgcaagtcggactcggcgtctagccgctccgcgtagggcagcagcttgttgtagacgatctccttctgcgggacgaagccccgcgggcccggctcgggacgcccgcccggctccgggggctctccgactcccgcccgctcggccggctccatgagcgcgtcttcgtcgccctgcggccgctggcggcccgtcgccctcggaccgatcgctaggcccccttccctggccggcgtgctgctgggccccacgcggctctcagttcgttggcggcggcagcggccgctctgcccgccccgcaccggctctgctggtgacgctgcagccgccgggcccagaggttccggaccggcctcaagtcacttccggggcggg

SEQ ID NO: 3333 - DNA, 423 bp, Homo sapiens
  source 1..423: mol_type = other DNA
gagattgcactactgcactccagtctgggagacagaacagcagacaagatgactacagtgtttttcttttgtctgttcataaaagacttcatatttttaaaaagtttcttatcccagaaactgtacagaagagctcaagattatcttaaaagctggcttggtagtcacctaaacatttcataaataatttactaactcttaaaaattgatgagagtagatcttaaatgttctcttcattaaaaaatggtgcaatggatacgttaatttcattgatgtaatcatttcacaatgcatacatatgtacccaacttttatttgtcaattacactttaataaagctatttactaactttgagaacagagtaccttgatcaaagcgctgtggagacagcatcctccccagtccgggaagagaggcctag

SEQ ID NO: 3334 - DNA, 336 bp, Homo sapiens
  source 1..336: mol_type = other DNA
gattccaaacatatacgtatgcatagcctgatataaggcagaattcaactctggacttttctttttccgttatactatgacagatgccaaagacttttggctctggtagcaggctgcaacagatagggagcctcatttgcaggagctttcagcctttgacgacgacctgccgggctccggagggcgggcacggcggagacggcagcagcgctgccccgcagctccggaaacagggcgtcgagcccacacgcctagagacgcggccaggcacccccgccctcctcgccgcgcagtcgcgcacagtggtgcgcctgcgcactccagactagcgcccgt

SEQ ID NO: 3335 - DNA, 420 bp, Homo sapiens
  source 1..420: mol_type = other DNA
cagtttccgtttcagggaatgcgcatacggggccctccaccgcggccggacgacccctctctcgggagtgactggggcagggcacctggcctcaggttcgagcggaggtcgccgtcgcccttctccaagttcctctttccatggcgataatcgaattagcctcaaattaaacggctcgggtagcggcagcagcagtgcccaccccgccccggccagcctggtcggtccccgccgctgggaggatgaggtccgggctggacccgggaagagcctcagctggagaggacgtggacgcgcccgaggctcggctccctgggcggctgcggggctccgggcaggagccgggagtgcgcttgtgtgtgtgtgcgcgcgcgcccgccccgcgcgctcctctcccccggaatcagtgccgctgttgcg

SEQ ID NO: 3336 - DNA, 808 bp, Homo sapiens
  source 1..808: mol_type = other DNA
cccggaatcagtgccgctgttgcgtgcagggccgcctctcctcccggagcgagcgcgcagccctgcgcagcagcgcccactggtcccgtcctgtgagccccggccccagccgcggacagacccgcggagtcgcctcccggcccacccgcccggccgccgaggagcgggaggaggacgggaccccggcgcccccaccccatccccgggaggtaggtagggggcccgaggcagggagatgccaactcactggggctgcctcccgggtgggctccgcggcggcggacgggcgggaggaggggcgcgggcccagggccggaggacgccgctgcccgcctgccctgcgcccggggagccgcgtgggggcagggaggctgcaaagcccgggcgggggcggcgcggggagcccgggtcgcgggtgctcggcggcaggctctgcggtgaggcggcagcagacccgccgtgcgcaccgctgccgtccggccccagccccggcgcggcgcggcgattcctcctccctgcctccgccggcgcctccctgcagccgggcgcggcggcccctgacgcggaggcccctggcgcggaggtgggcagcggacagccggagggtctattttcaggtgccctctctgtggccccgcgggtggggagcgggggcggcggtgacagggccgggctctgcgcgtagcggtgcaggggatgcggccaggcgtggtcccggctgcgccgcgctgcagctgagccggaggcggcggccccgcgcccccacctccgcccctctcccagggctgggcgtgagccgcctccgggc

SEQ ID NO: 3337 - DNA, 266 bp, Homo sapiens
  source 1..266: mol_type = other DNA
catgctccgcatggagatatgaacacaattctcatgggaactgcagtcagagcaagctgagggaacagtgccccctggaacaagatgctcttcagagaaatctctttgacactgagggccttagcagaatttgaaagttgaaagcgaccatccttgtaggtcattattttgctgctgaatacataactattcatccctcagtagcaatctatatatggaagatgttaaggatatttccaggaactgcattaaaacattctgcagcc

SEQ ID NO: 3338 - DNA, 467 bp, Homo sapiens
  source 1..467: mol_type = other DNA
ttcccaagaatacattttgatcattctctttttaaaattttggagaaccacaagtttagaggccttgttttacaaatcagagtaggaatttgagggtagtttcggttccctcatcagccgtgattcaggaaaccaccgccttcatatcccccctggctgtggcgctgcacagcgccctgattcccggtggctcgccgggccgccgccgcgtggttggcgccagcgcactggggcagtcgcgcgcgcccaggtgcgggccgcgttacctcagcagacgctagagagtgaatgagccgcgcgggcccgggacccttggggctcttagacttttccgttactaccgcggcgagtccagggcccggccgggggtcggcggctgccgggcggctggggcgaccgcggaccgtgcgggaccggtagggggtcgcgggccggctaggctcccccgcgcccctcctcaaattaca

SEQ ID NO: 3339 - DNA, 565 bp, Homo sapiens
  source 1..565: mol_type = other DNA
gattgcaccactgcactccagtacagaaaaaaataaaaaataaaataaaattatagtttgcttttatgtcattttcccatggcagattatatcattagcccatgaatatatctccccaagctaagaatctattaatactgtctgtagaggtgtctaataaatattcaaagattagtctctggatttccataattgtaaaagaggaaaaaagatattaggaagattaagttgctaaagttttctgttcaaataatatgttcaataaacattagtaatttgacttttattttctgtttatctcttcataaggtgcaaaatgctgaatgttttacgtcttaatgaacttctcatcatttcacaagcttgaaatttaggctattaatatttgatcagtccatttttatcttattaggtaaccattaattttagagttttaaatgaaactgaaaaccagtaaaaaagaaagaaaaaaaaactgcatatggctttaattgcatttcagatacattcagtggttagttctaagaacgaaagcattaatgctggagtattagtagcctagtcc

SEQ ID NO: 3340 - DNA, 386 bp, Homo sapiens
  source 1..386: mol_type = other DNA
gaaatgtaacgtgaaccaaattagctttccaaggcatcttttagactgagtgagcctaactgtcaaaaaacaatttttttcttattttaggactttgagtgaacaaataatcttttatttcaaaaatctttaaaaatcctttcccgggaggaaagtttcctaacgcccttccggtggcgcgccagaaaccgcgccgaaccccaccccaactcacggttacccaaagtgggggtggagctcccagctctcagccccgccgagagaggaagtgccgctcccgcgccagtccctgccctcccctggggagggtgagtcacgccaaactgggcggagagtccgctggcctcactcctagctcatctgggcggtggcgcatcaccggcgcg

SEQ ID NO: 3341 - DNA, 333 bp, Homo sapiens
  source 1..333: mol_type = other DNA
gtgggggagcccagagcgggcggcggccgcagggccacacgtgctcgcacccggcgggcagagcgtagctggtactcatttcaaagcttaagttttagaacccaaattcggaatcatggtctaagacatggtcctaaaatccacctcaggaccttattcggaccttggcccgtacctcgagggtgatggagggtgctaaccgccgcgcaggcccacggggtttcccggagctcccgccgaaggtttagccttcggaatgctttcgaaactgtaggtttaagcaacgtaaaagatgttttaaaaaggcttttcccgtggactacttgtcccaag

SEQ ID NO: 3342 - DNA, 333 bp, Homo sapiens; identical to SEQ ID NO: 3341
  source 1..333: mol_type = other DNA

SEQ ID NO: 3343 - DNA, 304 bp, Homo sapiens
  source 1..304: mol_type = other DNA
cccaaatttggaaattctacaaactttaaaatttgaaaactcctgagatttttcaacatattaaagcgtgtcacactaaggagtgacacacaagacccagactcttccctaggctgggagagactcggaaagggctgaacccccgcttccgccaggagtgagtgaaggacaaccgacttcagtgccttgggacaagtagtccacgggaaaagcctttttaaaacatcttttacgttgcttaaacctacagtttcgaaagcattccgaaggctaaaccttcggcgggagctccgggaaaccccgt

SEQ ID NO: 3344 - DNA, 307 bp, Homo sapiens
  source 1..307: mol_type = other DNA
actttaaaatttgaaaactcctgagatttttcaacatattaaagcgtgtcacactaaggagtgacacacaagacccagactcttccctaggctgggagagactcggaaagggctgaacccccgcttccgccaggagtgagtgaaggacaaccgacttcagtgccttgggacaagtagtccacgggaaaagcctttttaaaacatcttttacgttgcttaaacctacagtttcgaaagcattccgaaggctaaaccttcggcgggagctccgggaaaccccgtgggcctgcgcggcggttagcaccct

SEQ ID NO: 3345 - DNA, 242 bp, Homo sapiens
  source 1..242: mol_type = other DNA
taatgttcccaaccagaaaacagaaagtactgttcgcacaatactattgaaggaggtatcatgaggagccatcagttctcatgggttttccaacttctaattgaataaaggcagttttcttaaaaaaaaaaacacgcgcggctgaccctgggaggagccacaggttgaaccagcgcctcccaggctggacgcccgccgcggacaccgcagacagtcagcccggcggggaccgtagcggggac

SEQ ID NO: 3346 - DNA, 497 bp, Homo sapiens
  source 1..497: mol_type = other DNA
tttgccagggaacttaaaattatttcaaggtcccagtcgtacgtggcatggagatttatgacaaatatgtaatctgtttatttgtcacccaacaaaaaacaatgtctgagtcatgtttgccagcagctctggtttttaaaaaatcttactgtatgtcacttcaagttgtggctcaagtccctctccgaaaaaggctgtctgcatccctcatgtttataagagaaggatttctttccccttccagcgagcgagcagacagaccccttgctctgccttcccgtcctgggcgcaaccgaggagcgggttgtctccgcagcagctgcagcgagcgcgcgcccacgcccgagcccgcgcccgccgccaggatctgggcggcggcgaggctagcccgggggcgcgctcgctcgggagcgcgctcatgcagccggagggagcagcgcgctccctttgacggcggcccccggcattggcgggcggcgctggcgggcggcgagggg

SEQ ID NO: 3347 - DNA, 327 bp, Homo sapiens
  source 1..327: mol_type = other DNA
caatggactcttggagttataataagatttggttaccaaggcatttatttaagtgataacttaagacaatcagcgagtctcacttaattacaaacgcctctgggccaatggtctgaaaatggctgcagccgctgaagacgcagtctcccaggctgcagtgcagtggctcactgcaacctcggcttcccgggttcaaggtacctgggttcaccatgttggccaagctggtctcgacctcctgacctcaggtgatccgcaagctggatacaggcgtgagccgcaatccagaaacgtttttcaaacgtttgcccgcatgagcgactgcgg

SEQ ID NO: 3348 - DNA, 434 bp, Homo sapiens
  source 1..434: mol_type = other DNA
agagagaattcctcctttccttattcagtgcactttctgcatgaattgcctggagagttgtgtcagaaagggctccacgttctttttcacagaaaggtttaaacttatttttcctcctcaggcggacgaagtgagcgtcgttccgtgaaggtatgaaacccctcagagctaagttcctaggaacgtcacacccttccacctagcggcctctcgcggcgcaggcgtggacggggagatcgcgagaacctcccgcccaattgcgaccccgcgccaagaggcgggggaggaagtctcgccgaagtactcccgccccagtcggtacccctcctcgcgagagcgccgagcattccggcctgggaagcgcgtgcagaagcggaggtgctgctccggccgccgtagcccctgctaggacagcccgtgcgagcctgctggag

SEQ ID NO: 3349 - DNA, 626 bp, Homo sapiens
  source 1..626: mol_type = other DNA
cgtttttaattcttaaaactgtgtttgaggcggttatcaccttacacaaaaaatttacatcataatatgaaaatgcccattggttcattcaaaataaagaatttctaagaatggattaatggggtggaagaaatttatccattctctaaaaatttttcaaatcccaaaaacttttttttttcattttacaaaatatttacttcaaacagtagctggcattttgcatttaagagtacagaaatataaattgctaattattagcaatggaaatgaaaatgaatcagaagtgacaataaagatttctaaaattacaagtcgatgaaaaatgaatttactgtaaattggttaacacaaatcgctgtagtaacatatctgctatgtgaaatttttaaaataaaaatctaattcttagttcacagatccaaataataataatgtgttgttctatgacttctagtattaaaagtaaatataaatttactctgcatattaaacatttacattattcacacacaaaaaccttatttatctaattgcctttcgttgggccaaggtttccgttaccccggcgtccctcgggcaccgcggaaacgccgccccacggtctgcggagtgagccaatcagg

SEQ ID NO: 3350 - DNA, 564 bp, Homo sapiens
  source 1..564: mol_type = other DNA
atgtgtttatatatataatatatattatatttgtatacacacacacatatatgcttggcaattgtgaatagtgccaatcttcaactgatttcaagaaatgagattgctggatcatatgataattctactttcagttttttgagaaacctccatttttcttgccaacacttgttatcataaagggaggtttgaaacaaacctttgttagtgcaagttctatttggttcccaacactaagcacacaggtggcaaatatttatttttctccatttgtggaagcagacacctcctcaaaaaaaaatatgaatgggggttaatttactctcctagcattcacttattgaaaagtaactctctgagggagatgctgtgttcccctcctcagagaagaagaaaacgcacacatcacatgtcaacgtgtcctctctggcgtggggtccccgcgagtctgggaacaaagagggcccctggagcagggggcgcggacctcgctgcgctgcgcgctctaccgccgggctcgcaacgctgggctcagcgctcgcgctcctcctgccgccgcggccg

SEQ ID NO: 3351 - DNA, 373 bp, Homo sapiens
  source 1..373: mol_type = other DNA
taatgagttacaaatccattaacacagtttaaaacctcaatgtctataaactgcacagtgcaggcaatgctaagggcttcacatatgtacactgtttaaatcttacacaaatatgatgaaataaattctaaaagttttcctgttttacagatgagaaaagccatggaggactttgtcttgctgtgtcacccaggctggagtgcagtggcgcgatctcggctcaccccaagtagctgggaggctggtcttgaaagtgctgggattataggcgtgaaattagacaatgtgacttcatagcctagtattctactggaagggactttaaaattccatctactccattggttgttttcaaaaagctttttgtcataat

SEQ ID NO: 3352 - DNA, 450 bp, Homo sapiens
  source 1..450: mol_type = other DNA
aattttattttcgcctaaaggctttgatatttttcaaataaaaatttaaaagatccagtaccttctcccgaagcttcttcatattgagcagtgccctgactcgcatttgggtcagcagctgtttcccctgcctggtgacaaggccggtgtgcagagggcagaggagggagcttcttccgccacacggtggcgcgcgcgagcctcccaaagaccgcccgcccgggcgcagaaagagccgcgcccccagccctcccgggcaggacagccgggagcgcacctcgagggcccgggcagcggtcgagtggcagctgcgtccagcccatgcgggagctgctgcgggttacgggtggccccagctccaggctcctcctccagcctctgcaaatcgaaggctttccggagcagcctaggagcggccgcgggcgcagcgaaggcggcaggaggagcgca

SEQ ID NO: 3353 - DNA, 437 bp, Homo sapiens
  source 1..437: mol_type = other DNA
gtcattaaagggctctaattttcctttcagtatttgtatcccaaccaattattggtggttactattaataatctttgtctaagcatttgtttggtttagtctaaaatataagcttactatgagtcttttttttagctgggcaacgtgctgggagtacgtattagaaaactgcttaataaagtcctcaccttattgtcataatcttataaccaataaccttataatctaacaacaagggttatttccatttcacagacaaaaaaacctgaagtttgttaattacggtgttaaattatcctacgattaatggcagaaatctttgagaacttaggcgagagctcggtaaggactagcagccttcgtccagacgctggcgggccagggttctccttcccctgggcgtctccggggcgtggacaggccgctgaaaggaaccg

SEQ ID NO: 3354 - DNA, 433 bp, Homo sapiens
  source 1..433: mol_type = other DNA
aaatataagcttactatgagtctttttttagctgggcaacgtgctgggagtacgtattagaaaactgcttaataaagtcctcaccttattgtcataatcttataaccaataaccttataatctaacaacaagggttatttccatttcacagacaaaaaaacctgaagtttgttaattacggtgttaaattatcctacgattaatggcagaaatctttgagaacttaggcgagagctcggtaaggactagcagccttcgtccagacgctggcgggccagggttctccttcccctgggcgtctccggggcgtggacaggccgctgaaaggaaccggctgcggcctgtgtgaggctccgcgggccgctgcactgcgaggccgacgagggagggcaggctcgagtgctgggcccgcctccccgcgggactgtaggcc

SEQ ID NO: 3355 - DNA, 603 bp, Homo sapiens
  source 1..603: mol_type = other DNA
gcattcttttctgtaagcatccagaatgctgtgacaaattcttgtcaaactttaagaatcttcaggatgtcaaattctgtcttgctcaaccatacaatgatgtttttcaaatagggaaaattggaaaattggaaaatcaaataatcatatggtaaatattttagtaggtttcttatttaatcaactcttaataagatgggatggataacatcaagtccatcagcaatgtgagtgccgtacacagaactgagtccagtgttgacttgagtctaatcaatacacatatacgtatacatgtgtgtgcctcaaatatatctgattgaacttagtaagccacagaactgtaatatatatgatataatcaatgtgttatacattatattacaataattatacacaaaataatacattattctgtatgttacgtccaggctgtaaaagtctttgtaacagtctttcaagggcaatcttccctcccactaccggttggggagccctgatgtcgcctcccgcagaccaggatcttcccgccaaggctggggtttccgctccgcggcgtccgagcgccagcggactgcgcatgtgcaggacccagcaggtcta

SEQ ID NO: 3356 - DNA, 541 bp, Homo sapiens
  source 1..541: mol_type = other DNA
ttgggggcgccctcgggccccggcctgcgccgcctgcctctccccggtcccctctttccaggccgcgcgggctcctggagacttgggcgctgcccttccggacccgcagccctccaaacttaggctggctgcggagctgtaacttggaggctcaggcaaagtttcccgagcgcagccgcgggctcggggctcttcggcccctggcgtccacacgcggggagcgagcgcggcggcggcgggggagggtgtccgggagcaactctacctggcttccctccgcccgcgcttccccagcccggggctgcagcctcccggtgcagtgggggggagcagggcgcacgtcttgctcccccccacccccggccacgccaccgccgcggcgctcgctgcggccactggtgagcccgcggccccagcgccccctcccctcggcccgcccctcccccgggggccgcgtctggcgtccgcggagccccccgccccgcacctcccccgacgttcaagttcgcagggacgtcacgtccgcacttgaacttgcatt

SEQ ID NO: 3357 - DNA, 576 bp, Homo sapiens
  source 1..576: mol_type = other DNA
ggcccccggcgctcccctccgggggccagactctggttaggagccggggagggcgctcagattcccggtccctggctcggccttgggggcgccctcgggccccggcctgcgccgcctgcctctccccggtcccctctttccaggccgcgcgggctcctggagacttgggcgctgcccttccggacccgcagccctccaaacttaggctggctgcggagctgtaacttggaggctcaggcaaagtttcccgagcgcagccgcgggctcggggctcttcggcccctggcgtccacacgcggggagcgagcgcggcggcggcgggggagggtgtccgggagcaactctacctggcttccctccgcccgcgcttccccagcccggggctgcagcctcccggtgcagtgggggggagcagggcgcacgtcttgctcccccccacccccggccacgccaccgccgcggcgctcgctgcggccactggtgagcccgcggccccagcgccccctcccctcggcccgcccctcccccgggggccgcgtctggcgtccgcggagccccccgccccgcacctccccc

SEQ ID NO: 3358 - DNA, 427 bp, Homo sapiens
  source 1..427: mol_type = other DNA
catgcccagctaatttttttaaaactttttgtagtgacatacacactgtatcttgcctcaataaatattttttaatgaattaatcagcaagtaattcaagagcaagcagttcttgacttgtaatgatttagtgcttgaaattacttctacctttcagcattttaaaattggttattattcactatttaaaagtgtaagagtaagctaaatgccagaatgtcacttgaagtgaacagttaagcctccaatttacaagcttgtttttccctgggatactagacaaaatctcaactggtgagttaattatgtataactataattaaatcaaagatctttttaaaaaatgtatgatatatgctgcgcacctgagcttgtgggcggggccccggagcctcccgggacctaaaggcagagggggcacctccag

SEQ ID NO: 3359 - DNA, 519 bp, Homo sapiens
  source 1..519: mol_type = other DNA
cttcatctataaagttaggaataataaatacgtcatagattaagtatggacattatctgatgcatagcaggtactattcaaatgaaggaaacgcctaggtcctttaatgcactaaactaaacttcagtgcactgcctccttttgagtttaaacgggtttcagtaggtaaaatacgtaacccttccccctacagggcgcaacgtcccgccgctggcgcgggggtggagctctcgaaaaccccggccgtcgccctcccaggccgggagagtcggccccgcgcgcccaggagccagcggccttctcacgctgctagccgcccctcccaagccagccgccgcagcagcgccgggggcgtatgcgtgggggccggcggggcgtgcgcggggacaggcaggggcggggcgctgggggcggtcgcgcgcgcggcggccgcgaggtcgccccgcccacgcctccgggtgagggttgctgcgtcgggcctacgtcagccgcgggaaattcccctcccgccaggctgct

SEQ ID NO: 3360 - DNA, 480 bp, Homo sapiens
  source 1..480: mol_type = other DNA
agaagttcccaaacctgattgatgagaattacaaaacttccagtcctgagtaatttgaagaggtctaaaaatagaccccaaaaaagacctcttttgaatgtgtgttaataaacgagctatgaatttacacttctcaagaatgttaacattaaaaggagaaaatacgttacgtcttaaatttggttttttcatcgtgagataattaaatgccaggatttcataagatattagaaatcggttgtccatattagatttattatgttttccacaatgtaatgtgtttgttttatagaaataactctgtaacaagttgctacaaagccgcctttcaggctccctaggaggactgaggaggagaggaaggactttattttcacctcttggacgattacaaaaaccagtcatgagtctcatataagatcttttcattcagctctggaatctactgtggactcttgaaaagttcatcccgaggagaga

SEQ ID NO: 3361 - DNA, 356 bp, Homo sapiens
  source 1..356: mol_type = other DNA
taggaagccgcccccctttctttccacctcggcccctatccccaaggttgggtattggttaaaggggctggaaagtggggcccggtcctggtcccggtccggctcccggaattcggcgggtctcccagggtttggggggaggtggcggctgggacgccatctcctccgcctcctccctgactgtccaggcccgcgtagaccagcacctggagccacgctctgctacaactagacgtcggagtcccaccgaggcttttctgggagtggaccagtccgcacgcactccttcgctcgtgggggaggtagggtgcttttgttctaaaacgcacgtttcctcggggaacttcccttcgagg

SEQ ID NO: 3362 - DNA, 241 bp, Homo sapiens
  source 1..241: mol_type = other DNA
gagtctcatataagatcttttcattcagctctggaatctactgtggactcttgaaaagttcatcccgaggagagaaccccttccggccctcgaagggaagttccccgaggaaacgtgcgttttagaacaaaagcaccctacctcccccacgagcgaaggagtgcgtgcggactggtccactcccagaaaagcctcggtgggactccgacgtctagttgtagcagagcgtggctccaggtgc

SEQ ID NO: 3363 - DNA, 477 bp, Homo sapiens
  source 1..477: mol_type = other DNA
aaaaataatatataaatagtaacatgtaattagatataaaatatatattattgttacattgttaagttttagatataaaatgcatataaatagcacaaacctaattagccgtcttttattttgaaaaattcgacataagtctggcaaatgttaacactgtttaaagttgagtagtgaatatataggtattatcttactctctacgtttaaaatatttcacgataaagtgggaaaatggttaattttacataaaaagaactttaacagatacttgttatgtatatatccttattaaactaagtcgttactgtgttaaagcattttagtgtttaaataaaagatttcagaatacagcagaaatacattccaatatgttggggtttttacgcttaggaaaacctacaatagtaggtgatttgacatttgaatcacacctatctgatgttttagcctttttaaagtcctagaaacttctcg

SEQ ID NO: 3364 - DNA, 415 bp, Homo sapiens
  source 1..415: mol_type = other DNA
cctaaatgctgggattatgggattacagtttaatgtctttgtggagatacaattggtaaaaactcctgacattctgtactctacttaatcatcagatctcgtagtaattattcataatcctaacatttaattttggttctcagaatagaacatgcaatataatgtatgaaaaccgaatttgtaatccagagctatttacatttttaaagagctacctcctggtaaaggtccttacccaaagaccttcacctaagatcaggctcctaggatctggttgctaagagacaagacggcaaggcgacagtcagccgccgccgcccctccggtgccctcccgcccggcaggggctcggcgctcattggctccgccgctgcggcgctggcccgcgattggccgggcggcgtcggctcggcgg

SEQ ID NO: 3365 - DNA, 573 bp, Homo sapiens
  source 1..573: mol_type = other DNA
aatgtatgaaaaccgaatttgtaatccagagctatttacatttttaaagagctacctcctggtaaaggtccttacccaaagaccttcacctaagatcaggctcctaggatctggttgctaagagacaagacggcaaggcgacagtcagccgccgccgcccctccggtgccctcccgcccggcaggggctcggcgctcattggctccgccgctgcggcgctggcccgcgattggccgggcggcgtcggctcggcggctcccccacccctcggcgctagtctccgcagccgcctgcaagcgggcgggggcggggtgtgtgcgggctcggtagcggcagcttcagggcgcgagcgcgggcggtgccgaccactgggcgctgcgagggcagccgcggccctgtggaggtgagcgagacgccgagggggctcgggtgcccaccgcggggcgggaagtgcggcatggggcggtaccgctcacagccagccggctcccgccgcggcttcccaccccgggcggggtcccactcagcctcagccggccgcgcctcgagcagccagctggcccgcgtcccgtc

SEQ ID NO: 3366 - DNA, 373 bp, Homo sapiens
  source 1..373: mol_type = other DNA
acgaccgtgactggaatattttaaaatatgcagattattaaccccgacacttttgaaagcttcctcctcaatataaaatattaatgtaatttggccggggggtggactgcctgagctcaggagtttgagaccagcctggagccgagatcgcgccactgcactgcagcctggtttaaaaaaagagaaaaaaatttaagtaatttaattttttatttttttccgaatttttaaaactcgcgccacaggaagaccccttgtcgccagcccgggttagcggaagcagccttcaggtctcctaagcatgcgcagcggattttccgttaagccgatggggcgcggctccttggagcatgcgcacacagcgagcatgcgc

SEQ ID NO: 3367 - DNA, 389 bp, Homo sapiens
  source 1..389: mol_type = other DNA
ggaagagttgaaattttaaggagactttcccaagaagtatttcgatatcttttccgacacggcctctaaaatggattagagaggtctggggcctaaaattggcctccaaaactgggtgtgccctcccttttccgaacgcagcccccatccgaagggcggatcctgattcccgcgggctcaggcccccgcaggttggcgggagccggtgggggcgggccggccgagtccggggcgccccaccctctccgtcaccgaagaggcccagccaatgagcgcgagggcgggctgctcttgattgacagctcgttcgaacgaatcctccacggccggggcggaggcccaggttccaaacgctccgcggcgcagtctgaaccggtttcaaccggttc

SEQ ID NO: 3368 - DNA, 575 bp, Homo sapiens
  source 1..575: mol_type = other DNA
aagaaaattgttattaattcaataaatcatttatctacctcttggggcacaaagggcctagtaaattttggtgggctatttgctcttaagcaaagaacaattgaaaggcaacgtgcatgtgactttcacagaaaatactatttgatgatgatttagtgttggcatgcaagctcagaatgcgctgtcaaaccaatcacttgggattacaatgttttggtttttgcttgttgaagcagccaaattccagcctggagagacagagttgaaattttaaggagactttcccaagaagtatttcgatatcttttccgacacggcctctaaaatggattagagaggtctggggcctaaaattggcctccaaaactgggtgtgccctcccttttccgaacgcagcccccatccgaagggcggatcctgattcccgcgggctcaggcccccgcaggttggcgggagccggtgggggcgggccggccgagtccggggcgccccaccctctccgtcaccgaagaggcccagccaatgagcgcgagggcgggctgctcttgattgacagctcgttcgaacgaatcct

SEQ ID NO: 3369 - DNA, 417 bp, Homo sapiens
  source 1..417: mol_type = other DNA
tgcaagctcaatgcgctgtcaaaccaatcacttgggattacaatgttttggtttttgcttgttgaagcagccaaattccagcctggagagacagagttgaaattttaaggagactttcccaagaagtatttcgatatcttttccgacacggcctctaaaatggattagagaggtctggggcctaaaattggcctccaaaactgggtgtgccctcccttttccgaacgcagcccccatccgaagggcggatcctgattcccgcgggctcaggcccccgcaggttggcgggagccggtgggggcgggccggccgagtccggggcgccccaccctctccgtcaccgaagaggcccagccaatgagcgcgagggcgggctgctcttgattgacagctcgttcgaacgaatcctccacggcc

SEQ ID NO: 3370 - DNA, 348 bp, Homo sapiens
  source 1..348: mol_type = other DNA
gcggcagcctcggcctcagtaagcaggggctcagggagcagatgtctgagatgggagggtcttttattggtcatgtcaagaaaaaatccttcccactctggcccccgcgggagacatgttaggtagcgggacgccaaccttgtattgcagttaataaaaaagcgttcttttcttcacaaaagcagttgtttcattgtataatgtgagaccagtaagcacccgactcgggtctctggcaggctcctgtagcgtccccagttacggcgcccatagcaaccggctccctagctaggcgcccccgggttgccaggggccgcaccagctttcccgtcccgggccagcgcaggc

SEQ ID NO: 3371 - DNA, 232 bp, Homo sapiens
  source 1..232: mol_type = other DNA
ctggagtgcagtggcgccatcccggctcactgcaacctccgcctcccgggagtgcgccggaggctgaggcagttttgtagccacacccagaccttagattctcgacgatgtgcggcagcctcggcctcagtaagcaggggctcagggagcagatgtctgagatgggagggtcttttattggtcatgtcaagaaaaaatccttcccactctggcccccgcgggagacatgtta

SEQ ID NO: 3372 - DNA, 447 bp, Homo sapiens
  source 1..447: mol_type = other DNA
gtctatgtggccgggcaaaaacagactcagtcatatcccttagagagatccagccggagttaaaggagggcacctccgggtgggcgagccggggaggtcagaccagcctgggcaacacagcgaaacccagtctcgctatgtttcgaatacaaaaattcgctaggcatggtggcggcgcttgggccccggaggtcgaggctgcagtgagccaagatcgccccactgcactcccgcctgaatcccaacactttgggagcccgaggcgggtggatcacctgaggtcgggagcgagaccggcagctactcctctccagcaaatgcggatgtcctcaccactcgcctttaaaatcgcgcgttgtccccggcgctcttcacccacagcgccccgggcgtacaaatcctcctcgcccggcgcgcagcggacagcctcctacgtcacgccagcgc

SEQ ID NO: 3373 - DNA, 437 bp, Homo sapiens
  source 1..437: mol_type = other DNA
attgatttttcaattgagatattcacatactgtgaaactaatcttttaaagtgtacaattcagtgggttttagtagtctatcctggacatttcatataaatggatgtccaatatttggccttttattactttattccattttatggctgaataatatattgattttaaaaaattatatgggtgtatgcatttcatttcgatagtaaataaggtgttaaaatatttgtcatataaaagaacattggatcagagccactgatctagagattaaatctgagtgatcgatcctattcagttaatgggttggccaaacggatatttccgtggaggtataaagctgtaagctgccaactctgacccctggggaagccttgcctccaggttccccgaggttccccgtcacatctcggccgccgtggcggggcacggctcagctg

SEQ ID NO: 3374 - DNA, 399 bp, Homo sapiens
  source 1..399: mol_type = other DNA
tgcctcagcctcccgagtagctgggactacaggtgtgagtggaaaaacagggtttcaccattttggccaggttggtctcaaatttctgactttgcaaagagcgaccttttattaaaatttatttcagtgaattttttgagacagggtctctctctgtcacccaggctggagtgcagtggcgctgtcttgtgtctcagcctcctgagtagctgagattactgagattgctgttattgcatatataccacgcacaaccatgcagtgctgagattacagagtgatttaagagtcactcaaaatataatctgtagttaagaagctatctttttctaattacctatttaattcaaatttggtgggatcacatctgaccaagctgctgtcatttccaaattctgg

SEQ ID NO: 3375 - DNA, 465 bp, Homo sapiens
  source 1..465: mol_type = other DNA
agagaatttctagctgtttctttaaacatgttttattagctttctaaattatgaaagtaaatacaactgagggagtaaaaaaatgtaactcccttgtttcccctccccggtgtgcacccttacagatgttttttctatgaaaatacaaacattcgacttgtttcttggactttacctcgcagtccgaggagaatcgttgacgcttccaggtgagcccctggttaggcttgcctccccgcggagcgcacgcgggtctcgctggctggactgggcctttcaagaccaggttcgccaggctctgggggcctcagaattgtgtcagctgcgtctctgagtcaccttggaacccctcgaaggagcgcggggctaggagggcgcatcggtgggcccggggaccccgctgctaggtgtggttggcgccaaggccgcctctggccggcggagccctgcagtgtccggagggtg

SEQ ID NO: 3376 - DNA, 364 bp, Homo sapiens
  source 1..364: mol_type = other DNA
cagactaactcagagtccatcagagtatttttaaaacagcactactcaagttcttaccttaaaaattattagaggatccaatgagatgacaaagaggaagagcttctcatatgcctcctagtgagaacatctgacatttgtacatttatcaatatgaaacaccatcataaaagcacttttttttttttttgagatgggcctcctgagtagctgggactcacaggtgcccgcaactgccaccgtgttagccaggatggttggcataaaagcacttttatttagggcattatgtggatatgctctgtgtttggaatttgatgaggtcaaagtcaaccaaattctgaagacgctgtcatcagccagc

SEQ ID NO: 3377 - DNA, 662 bp, Homo sapiens
  source 1..662: mol_type = other DNA
cagaacagctgcgtctctgagtcaccttggaacccctcgaaggagcgcggggctaggagggcgcatcggtgggcccggggaccccgctgctaggtgtggttggcgccaaggccgcctctggccggcggagccctgcagtgtccggagggtgcggtcagagtccggccctttaggccttccttgccccttgggccgcggcacgggttcgggccgagcgcccggcaacgcaccactctgggtcgtggtcagaccccagggtggcccaggcctccctcccccgcctccccggcggggccattcctcacccgccccagcactggagggggcggccggggtcggtctagttccggttacaaactggacagaaaaggccactggagtctcgctaggcgatgcgcctagtcccctagcctctccaggggggtcgccttcctagaggcccccttcccacaaccctcgggcaggagggtgcgtgggggctggagggtccctggaagccgcagggagcgcgggcccgggtgggtcctggtaccgggtggggagagcggaaccctcccaaaacttggggcgcggggcggggccgtcgggcggtgacgtgaggggcggggccgggccccattggcgggcgggcaggggaggggcggggccgggcgcccgcggcg

SEQ ID NO: 3378 - DNA, 310 bp, Homo sapiens
  source 1..310: mol_type = other DNA
attggaggttgtatcatcccattttacaacgggtaacttgcctaaggtctccagatgccaaactggttttccagtctgaaaatggatctgggacatctccatagggcagttatttgaagaatacttctagtggctaatttgatttgaaatgatgaatatcatttgagaaaacctgcttataaatacgtttcccttttaatttgaacatgaaggctaaaagtaatggaaattccttaatgttctgtgacttgagtccagggagtcctgaggctcccttgccccggtgaaaacccaggccaggcctctttcc

SEQ ID NO: 3379 - DNA, 691 bp, Homo sapiens
  source 1..691: mol_type = other DNA
gccccttgggccgcggcacgggttcgggccgagcgcccggcaacgcaccactctgggtcgtggtcagaccccagggtggcccaggcctccctcccccgcctccccggcggggccattcctcacccgccccagcactggagggggcggccggggtcggtctagttccggttacaaactggacagaaaaggccactggagtctcgctaggcgatgcgcctagtcccctagcctctccaggggggtcgccttcctagaggcccccttcccacaaccctcgggcaggagggtgcgtgggggctggagggtccctggaagccgcagggagcgcgggcccgggtgggtcctggtaccgggtggggagagcggaaccctcccaaaacttggggcgcggggcggggccgtcgggcggtgacgtgaggggcggggccgggccccattggcgggcgggcaggggaggggcggggccgggcgcccgcggcggctgctgcgcctggaaccggagcctggagtgaggcgcagcggcagcggcagcagcggcaacaagtgccggagggccggagcagtccctgccgccgacaccgccgggccgcccgtccggggcgccgcgcatggagcgtgagctgcggcggtcgccgggctgagccgcgcggagcggccgggacgtggatgtggccgcgatctcccgcccttg

SEQ ID NO: 3380 - DNA, 317 bp, Homo sapiens
  source 1..317: mol_type = other DNA
accacctaaaactgaaaacaattttttgtgttttgagacagaacactttttcccccttgagaaagtatctgtagctttcatattctcaaaagggcccttggctcttttaacaagattgcaataagaaattgtactgtacacattttgtgtctattacttcaggttgtcaggaacgggcgggatcgccttagtcggttccttctttttttttttaaaaaaaaggtagcctgtgcggagcccctgtgatgggcgccccagccgctgtaagacccggccgccgaggtgggcggggcacgcgcggggcctggccaatggcg

SEQ ID NO: 3381 - DNA, 587 bp, Homo sapiens
  source 1..587: mol_type = other DNA
tgccattgcactccagcctgggtgacaaaaaaaaaaaattttagattagtcacacaataaatgttctgatttaaaaaaaaaaaggcaaaactctcctttgctgttagaatttgattacacatacagatttcagtctatgtatatatattacacttatttcttaagtaatatatattacttacaaaaggtgtacaatttttctgtatgtgtattacacttagttttttttaagtaatatatcttgagagaaagctagaaaataagacgtttaaaaatttttgaatcacctgttaacataaattttgctaaattaggttcattctcatttagttttatttctgctgtatttttacataaagttaaactataccattcaatatcctttgcaagcattttataagcagctgaaacatactccattgaatgtatgtgctccagtacatttaatcagttgcccattgctgttttcttattaaaaaataatcagtcacatgtttctctccagaaaggttgtaccgatttacagttccactggtcgagctcaaagcagaactaagggatctgccgttttgtacacggccgaggcg

SEQ ID NO: 3382 - DNA, 263 bp, Homo sapiens
  source 1..263: mol_type = other DNA
caataagaaattgtactgtacacattttgtgtctattacttcaggttgtcaggaacgggcgggatcgccttagtcggttccttctttttttttttaaaaaaaaggtagcctgtgcggagcccctgtgatgggcgccccagccgctgtaagacccggccgccgaggtgggcggggcacgcgcggggcctggccaatggcggcgtgaggggcgccgtccgcctgaggggctgcagatcccggctaccgcgagcgccgtggctggc

SEQ ID NO: 3383 - DNA, 359 bp, Homo sapiens
  source 1..359: mol_type = other DNA
cgagcggcggggccggggctcggggtccgggctggggaccgcggacgagccaccgcctgtctccgctggggggcaggggtctgggctccgtgcgtgaggagactgggctccggcggactgtttccctgaggatgggggagggaggcaccgcaccctgcacagtcccggttggaagtggcctggagccgggacattgccctttaattatcgactgaaaaacaaagtttattaaaaaatactgatgctaacagggggaggtagggccccgagtttgtttaaaagacatgcagagaaccctgaggtggcatggtgatgtctccatgagggaaccgttcttgactgggccattcatctaagat

SEQ ID NO: 3384 - DNA, 475 bp, Homo sapiens
  source 1..475: mol_type = other DNA
tggtctgggaccgccgggcggccccatttgggctgctcggtggcgcccgaacgcccctcagcggcggtggagcgtggactccggcgcctggcggggtaaggcccgcggcaagggcgctgcatccggacatcgctgcgtggtgcccagacgctggctcccgagaacgggcacgagcccagttgggcacagtctgcgggccggagcagaacttccgcccctggtcagatcccctccagagcctggccgggcctggaggtcacctggatgctggatccttgtctccacacccagctccctcgccccttcccggctcgagggccttgagctggacggcttgcaccgcggccgatgctggaacggtcatggcttctggcccagataaatactctaattagctcccaacttccccgagaatggtggcagcatcgagagcgccggcctcccgcgaggcgtaccccggggaccgcgctggcac

SEQ ID NO: 3385 - DNA, 679 bp, Homo sapiens
  source 1..679: mol_type = other DNA
gcctcaaggaggatccttagggtctgtggccacattttccatcaaaaagtccctgttagaggcagtctaaaaagaaactttcctatcaaaatgtttcaattacggggagcaagcaggtaagtggcggcgccctcccagtgggtgctcttcccaggcgcgagagtccggaggggccgaggagagatctgcacgcccggagctgctcccgcgctctgcaaagtagcctgcgccggcacgagcagcccgcggcgtcggtctcaggtggcggcgccggggaagaaaacgctggggcccgcggcgccgggagaggggccgaggcccgggctcctccagcccgccgcccccgggtcctggcgcccacacccgagcggctgagccctgtagcgcgcgggagagcgaaggaaccggttctccagcacctcgcctcctccctgccactccctccggagcgccgagagcgcgagaagggcgggggcgcccagggcaggcctggagacccacggccccctccgcggccaggactcgggcttgccagccgagtcccggagttagcgcgcgaccggggcggggcggggggggagggcgggggcgcgcggaggtaacccccggctcgcgcagccattgcccggctccctgtcactcagcccgcgcggggcccccgattggcggcctagccccc

SEQ ID NO: 3386 - DNA, 628 bp, Homo sapiens
  source 1..628: mol_type = other DNA
ctaacatgactctactaaataattttatccttcacttaatttatttaaagcaaaacgaaggcttatcattattcaattgtggtgtatactttaaagataactgttttaaattaaaaagagcactattagggcctaatttgttaaaacttggatttccctcagatttttccatagttttaaaatgtggagctttaatgcttaacttcatatatttttacatagaatttcttttggattgaacatttaattatttacatgaaaaagttagtaaagactacatcatttaccatgaattagcctagcaaactttcccagggattctcttgtggtaaaaatcctgttcctatgacaaagcctttcataaggctgtcatttgatgatggaaatgaagcccacttcctctcgattatagaggtgacactgctaagcagaatttcctttttaaatcttgtttaactaacgagactcgctcaaagagttggaggtatctttcaaaaagtttcaaaaatggcaacaaacaaatctgtttttaaaacatctttcaacagctttaattttcataaaggatcaactctcatggtgatgatagctttgcttgcaaatcagaggcactttaactgataatgac

SEQ ID NO: 3387 - DNA, 331 bp, Homo sapiens
  source 1..331: mol_type = other DNA
agaaaaaggggttaggacccaacctttccctcctggcaggaccagaggtgggcaggaacccggggcccacactcaccatcaggtcacctctaccgcggaactgactcggagaggggcgagaaaaggctccgctcccgacgcggcgctctctgggaactgtagtttacgctgccctggttgtggcgcaatctccaaagcagtgttgaactacaagctcttctcactgcgctctgcgccgattgcaaagtacctgcctgatggagcccggcggaggggagaatcaccccttagcgacatcacccccacgcgcgtgaatcttttaaaaaacgat

SEQ ID NO: 3388 - DNA, 421 bp, Homo sapiens
  source 1..421: mol_type = other DNA
ttctggaattcacaatatacagttcaataaagaatatttgcagtagttatttagttagtgatacaaaaaagaacgggttccaaataacattttgagatcgtaatctggagcacctggtaaatactacctttctttcaaggtccctgtgacaaaagccgttataaacactgaggagaaaaaggggttaggacccaacctttccctcctggcaggaccagaggtgggcaggaacccggggcccacactcaccatcaggtcacctctaccgcggaactgactcggagaggggcgagaaaaggctccgctcccgacgcggcgctctctgggaactgtagtttacgctgccctggttgtggcgcaatctccaaagcagtgttgaactacaagctcttctcactgcgctctgcgccgattgcaaagt

SEQ ID NO: 3389 - DNA, 441 bp, Homo sapiens
  source 1..441: mol_type = other DNA
gggtcgggggtgcacctactccagggcaccaccccccttgccctcgggccagggctcacctgtctcgggagtggggaagaagcgcgactcccggccgttcctaggctaggtcctcggacccgagagggagcgacacgctcgcttggtctcttgggtctccaggacgccgccgccgccgccacacagccagggtgtgcgtgcgctcccgcctcgtcgcttagcagcatcgttttttaaaagattcacgcgcgtgggggtgatgtcgctaaggggtgattctcccctccgccgggctccatcaggcaggtactttgcaatcggcgcagagcgcagtgagaagagcttgtagttcaacactgctttggagattgcgccacaaccagggcagcgtaaactacagttcccagagagcgccgcgtcgggagcggagccttttctcgc

SEQ ID NO: 3390 - DNA, 465 bp, Homo sapiens
  source 1..465: mol_type = other DNA
caaaaaatcaaagttcctttgtttagacaatgagtcattaaaaaattctcataattaccgtataagtctgaaatgcactcgctgccaggcacactgagtcttagatgcacaagccgtgggctggccctgtaacagtccccaggctagtgtctctttccttgaggacttcaagaatctaccaaaagaaaagcatctcttgaggagtacccccaaccagatgtgatgaggggagcaagcgtcccctgagaagcgtctgggctccctcggggcagctgcggtggggagctccggctccgggaatatttttactgattggaaaaataatcactgagatatactggcgaggcttccctggccgcaacgccgccgtaagtgctgctcccacgcgcggtatcccgccgccccttgccggccagagcctgcgtccgcctcggctcctgactggcggctgcgcctgtcggtccg

SEQ ID NO: 3391 - DNA, 433 bp, Homo sapiens
  source 1..433: mol_type = other DNA
tccgcctcggctcctgactggcggctgcgcctgtcggtccgtgcggcagggacatttccgcattgcgcctcagaggtgactttcagcctgcgagccttcgaagggtcggtgccctcccttgggactcccgcgccggtgcacgggtctgcctctagccggtgaccccttagtgtccgctgcgggggaggggcagcgtagccttcggcccctaccgagaatcactgctcgaggcgggaaggcggggagctgaggccccgaccggtcggccagccagagcgtggaattgtcctagtccgctggccggcctcgcccgcctccccgacccctgcttgggcgggagccgctgttaaccggggttttcgcggcgcggggagggggcagctaggggcgcggcctgccagtgcctcctgcagtacagccctggagggcgtgg

SEQ ID NO: 3392 - DNA, 743 bp, Homo sapiens
  source 1..743: mol_type = other DNA
aaaactccaacattgtgaaaattttatagtatgacctaaattcatttgaactactatattagttataaagggatcagaatcaaatttggacctcttaagcatttcatgctcaatttctggtgaagtattgggaaatattattaaaataaaaaatatatagattataataatcgttaaactaacttggtttcataactcaatttggtgttacactaactctcatgatttttgtattaaaatttaggatggttttcttgagaataaattccatggaattcataacactttctagattaatggaaacattcattttattcagagccaagctattaagtttgatttttctttgtgaaacacagttatgtttaaaagaggaaacctaattggccagtgaaaatgcctgataaaggtttttttaattaaaggcagattgtggaattaaaatcacatttcttttcaaatggagttagaatgtttacttctattaaagtacttatcaggaagatcctcagtaagttgacttttgttcccactcaaagttaagtaaattgtttcatcattctttttgattaggctgagatataaaaagggaactattttctaagtattggtcctgcttattaaagtgttcagcactttttaagtcttccttttcttttaaaccaaggaagatggtattgaaatgttaaagtttaccttcttttctccttgttcctgcagaatttcaggatcttgttgattct

SEQ ID NO: 3393 - DNA, 381 bp, Homo sapiens
  source 1..381: mol_type = other DNA
ccagatgggttccttggtgaattctaccaaacatttcagtaggaaattataccaattatttataatctatttcaggaaatagaagctaaggacatacttactaatgcatttggcaaaagcattataaggaaagaaaactttagacctcttgtgtgtttttttgttttggagtgcggtggcaggatcacagctcactgcaagtagctgggactttggctattcattatttttaaaaaaagaactcttagcaaactaggaacaggaagaaatttccttaacttgataagaccagcctctgctggctaggcagctgtccacacagagctggctgtgtgggagactagagttttgttattactcaaatcagtctcgcagtgctga

SEQ ID NO: 3394 - DNA, 425 bp, Homo sapiens
  source 1..425: mol_type = other DNA
tagtgtgcacctgtggtcccagctactcaggaggctgaggtgggagctgtgattatgtcactgcactccagcctgggtgacagtgagagcctgtctcaaaaagaagaaataatactatgttataatttaaacagttattattgtagctgtttgtgtgttttatgcatttaaaaacattattctaagaaggaacatttttgaagagactatttcataggtaatgatgtttatttcctattttgtcatttcatgaattacataatatcaggttgtcctcctgttatcagtaatgttaactttaatgacttatgtaaggaatataatgtttttaacaacttttcaccatccattaatttttacttattccatatgttatactctattacttttaaaaaaatatgctcaagttgtcccaaatgtggcca

SEQ ID NO: 3395 - DNA, 517 bp, Homo sapiens
  source 1..517: mol_type = other DNA
agggtcgcgtcccagtcccgggcgcggtgtattccccgccccgagagaactctggctgcgcctgcgacgggcacgccggcctgcgccaaggccgctttccccaggcggcgggcgctccccccggcccgggccgcggccctcccgccccggcggagccgcgcggtggattgtgggctgggggctgcggcggcctccggcgctgtctccccgcacccgaccgggccgagccggctgggccggcggggtgaggctagaggcagtggtcgtggcgcggcggcggcggctcccctggaggccggggatgtgggagaggcggtggcagcagcggcggaggcggcgctgcggacccgggggaaactgctggctgacaggacacccgggagagacgtgagggagccgccgctgccacctctcacccctgagtgaagctgggctcgagagggcggccctgtgctccccgggccgactggccagcgggcgcggggcgggggcgggaacccgggctcgggcccggccg

SEQ ID NO: 3396 - DNA, 235 bp, Homo sapiens
  source 1..235: mol_type = other DNA
tgttgagccaccacaccctgctgtgctaccacacagagaccactggttaataaacctattcagaacagcaaaactctgcatcactgaactctgttattctgtactttcagaattactcttatataagtattctttaatgttttatcctcaaataaacaatcgtgtttgtattctagtgtacaagatagaaataagcaagaaaaagtaaatatatgtatatatacaatatgatagt

SEQ ID NO: 3397 - DNA, 502 bp, Homo sapiens
  source 1..502: mol_type = other DNA
agttctatcatttcagaatatgatgtattatggatagtcattatgcttcgtggacaactaatgtttttaggcagaagcttctatagctgataaagattttaagccaaagacttagaattgaaaactaatatatacatacacattttaccataatacatcaatgtagacctatcctagtatttattaggttagaaaggctttttggattattttattatacagatatatttaactgtaaatattaaaatttcataatgactaatatatgatgattccaaaagttacatttatgtctttgaggacagtaaagcagattaaaacctgatgaagatgtttttaaataatacaatgtaaagattgttggcagcatttatatataagggacaaaattctagttgaagtctataaacagtgaattccacttagccagattccctctgaatatattacacaggcaaagtaaatagtattggtcattgaaagatctggatatgatttcaag

SEQ ID NO: 3398 - DNA, 521 bp, Homo sapiens
  source 1..521: mol_type = other DNA
acgcgttgcctttagctctccggagagccattccacacctgggtgcccaagatgggtgtagccaaactaaagttggccaatacacataaacaattttcaacttgtcttttgaacgtatactttatgaaatttgtatgtcttaaaaattgtaggccttaaaatgaacgaacccggattcttttatagtaatcaagtaaaatataggggtcttaattctgtactttgcctttgctaatcttaaagttagatgtgactaactgagcaaagtaattaattacgggactttgatagtgtattcctaagttttataacctaattgttcaattactggaaacaactacatttcgacaagtcttaggtaaagaaaattgaatttaacagcagcactgaacacgttcgctaagtgtgtcggtgaccatggtaacggtgggagggggcggtccaaacctcgccctcgagcatgctcagtgcagagcgagcctggtatggtgcggcgacaccgccttccgctgtggccctgc

SEQ ID NO: 3399 - DNA, 571 bp, Homo sapiens
  source 1..571: mol_type = other DNA
tattttggtataataagtgcttactatgtccccaatactgttttaaggaaggtatttacttaataacctgagataggcattattatcatcattgtcatctctgagtcacagatgaagaaactaagagaagtttagtaatttttccagtgtcacccttattgtgtcactcagttaatgataaagaactactgcactttaatgcttcttctctataccagactctcagaaattgatacatactaaagtatgctttcaaatgtcaatcatttcctataagtgcctaacattttaaagtaataaagtgtgattttgctgcagtgtgcaggtaattctccctgctcaactgagattaccatcattatccccgggcggcgaaggttgcagtgagctgagatcgcgccactgcactccagcctgacagagggagacgagcctctgaggggccctctgggactgcagtaggtcacaacgccccggtgattcatgcaatggaatgtttcagccaaggatgtcacctaataggtatgttgatttatcctagtgtggaaatgccataaaggaatttctggct

SEQ ID NO: 3400 - DNA, 591 bp, Homo sapiens
  source 1..591: mol_type = other DNA
gagcctctgaggggccctctgggactgcagtaggtcacaacgccccggtgattcatgcaatggaatgtttcagccaaggatgtcacctaataggtatgttgatttatcctagtgtggaaatgccataaaggaatttctggcttcccctgggaagtactccacaaagggtatgaggagttcagtgagtttggaggctctctgaggacagtgactgcgcccagagagagtccagggacccctagacctgcctgtccttctagaaaggtcctctctttctgccctagagagcagaatgaatccttcccccgattttgttggaattctctgaaagaaatcctgctcccatcgccccaccagcgcccaggacgtggcaggaggaaggaggctggagggaggggcgcgggtggcacgagcacctgtcacctgaccggctcgggccctcaccccagccccggccctgcccaccctctggccggtgagagccgacagggcccccgccctcccggacccggacaggcccgtccctcccgccccggcctccgccaccgtccaatggccgaggggcagggcccgctgagcaagccgcggcag

SEQ ID NO: 3401 - DNA, 416 bp, Homo sapiens
  source 1..416: mol_type = other DNA
ggtcatgatttgtaggaccccgggctcatcatcaaatcatattgttacaggaggaaaggtaatatttttattacctttatataaataacagttgattatataaataatcaactgttcaggactgatgatggaaacaaaatcggttacgacctctgttccagaaatgcgttttgttaaatatcattcttcctctgtcggcataaatttaaaaagaggaaggtaaaaatgtggttctatatttccaaacctttacaattttatttggagagcagcacctgtccttcgccaggagcgcagcctcaaccggcgcctgagtgcgggaagacgtctatccccctacagctctatcggtcggcgctctgcacgacagcgcctgcgcagggccgacctagccacctgcgcccggaagtgacgtg

SEQ ID NO: 3402 - DNA, 378 bp, Homo sapiens
  source 1..378: mol_type = other DNA
actgatgatggaaacaaaatcggttacgacctctgttccagaaatgcgttttgttaaatatcattcttcctctgtcggcataaatttaaaaagaggaaggtaaaaatgtggttctatatttccaaacctttacaattttatttggagagcagcacctgtccttcgccaggagcgcagcctcaaccggcgcctgagtgcgggaagacgtctatccccctacagctctatcggtcggcgctctgcacgacagcgcctgcgcagggccgacctagccacctgcgcccggaagtgacgtgtcggcggcagcggttcccccgctgcgcggcagcggtggcgctgacagggctgtgagcagccggccttccgcgtcggaataga

SEQ ID NO: 3403 - DNA, 626 bp, Homo sapiens
  source 1..626: mol_type = other DNA
ataaatttccctggtaaatttaagcctcctgccgggtctgcaccgagccccggccggccccgaaggatgcaactcgttcggtccggctcccaaagtgccgtggacttggtgacccacttctccacgcgggcaagggactttttctgtccccggctcacggctggagcccccatcctgccgttcggaccagtgcgggcctcggaggagtgtcccgcagcggacccccgcccaggaacccctgcaggcagcgagacgggcgcccgggccagctctctgcccctcgccccccgcggggaccctgcccgccccgctgaccggcttgccaaatagctcaaatgcttgtcatatttgcggtcgcgcggctccgcgggctgtgcacgcgctgcactcgccgtcaggggcgcgccggcccggcagggagctgggggcggcgctgccaccaggcgcccactgcgccccgccgccccttcctgctcctcctgcggccgcggccggccgcggccggccccggcctttatcgcgcctcccgggaccgccggggagaggcgggccggggcggggccggcgggggcggggtcgggcggccaggggcggggcctgcggcgccggggcccggagctcgcggg

SEQ ID NO: 3404 - DNA, 379 bp, Homo sapiens
  source 1..379: mol_type = other DNA
caaaacacagtgtgtgtctgtaggaattactctttcttcagtgcacatagagaaatgaactgcattctggaaagccagatataaatatgtgcagctcttcatctagccaatagctggctggctccaagaatttggacagctccttaaagttccttatgaaggcattttgatttgcacaaatatgtcatgacatgttttaagatgactcctttatagcaagaaatctatagtaaattgccttcctccttaattgaggttagccacaattaagcctggcacagtgggtggtgccagctaccaaggaggataaatataataactgtgtctgcgctgttttctcgccagggctcaggcctgggaacggaagacttctagaaga

SEQ ID NO: 3405 - DNA, 853 bp, Homo sapiens
  source 1..853: mol_type = other DNA
cttctagaagagctttgcgtcttaaacgcccataccgcagacagctgcctggcgggcgacccagccccatcctgatggccccaggacacaagcccaggagcgccccggtgcgcgcggttccgcggcccaggggcgccgggtttggtggcacagcgagccccctttctctagcggtatggctgcgttagagccctaatgagcgcgtgcgagtcctttgtctcaaggccggggccttgctgggcaccatggcgtgctttaccgcacaagcccctgaggacccctggaagaagggatcttccgcaggaggggacgcgacggcaggaccgccccgggccccctcaccgcgcccggccccctggcgggagaggccggcgagctctggagaggagcgcgggccgcgcggggcgaaagcgccacccgggagagagggatcctcccctctccagtcctcaggaggaggaacgccgctgcgttctaagttctcccgggccctctggccccgaggactcagatcccggccgcgggagagggcccggcaggtgccaaggagcccgggcggtccttcagcccgcacttccccgcggtcgcccggagccggcctccgttagccgggcgggtaggcggctattggcgccaggattggccggcgccgcccgcgcccccgcggcctcgggtggagcctcccgcccggccgccccctgcggcacccgcgacacgggtggggaccagaggctcccggcggcggctcccggcggcggctcccgggctgtgattggccagcgccacagggggcgtgaagtgagcgggctggggccgctggcgcgccctcctacttccccgtctgcgtccgcgt

SEQ ID NO: 3406 - DNA, 320 bp, Homo sapiens
  source 1..320: mol_type = other DNA
gcaaaatagatagatagatagagatgtatgaaagttactaggtcccatgctggcaggggagagagtgagcaccctggcctcccacaagaggctgctcagagtggctaagtagctaccacccggcctggggagctcccctcagcactggctccccgccccgcctcgcagcacctgttcgggcctcggtcgcgccgccgggtcttgcagacgcggcacggcggctcggagctaagtcccggcttcttcgctgcgcgaaattgccgaaagccctcccgcggagggtcagcgcggccgaagggcgtggttggcgctcggtcctg

SEQ ID NO: 3407 - DNA, 398 bp, Homo sapiens
  source 1..398: mol_type = other DNA
ccatccatgggatgtgtctcagaaagatacatactgcaatagccaacgagaagaaccgctccgtgccgtccagggagccccttgacttcagcgccaccagggtggcgcaagcctcaagctggtcaggtcgcggaggcaggagccgacacgctcgtaccccgtcggccgccggtctccgccccctcccccgtggggcgctgactcgcccggcgtcactgatgacatcactagggcagctcggccttagccaatccgccagggggacgcatgccccagaggcgcggcgcttggcgggaagctgagtcctggccttgcgtcgcatcgcgtagccgcgctcgcgactccctttcccggcatgccaggcggtgcggccgccctctgggccgtgtaaaggcccc

SEQ ID NO: 3408 - DNA, 524 bp, Homo sapiens
  source 1..524: mol_type = other DNA
tctcgtttggtgtatcttcaactatacaggaagaggaaggcctctaggtctttctcctttttacaccccgcattagcgcggagcaggtccctgccgggcggtcagtaggctccatgtccagtgccggtctcgcccgccgcccccacccggaagggtgagggggtggcaggaacggccggctcgctcccacgcccgcggaggtgggaggcaccgccccgcgccccttcgccccgagggcccggaggtgcagccctgggggccgagggcccgtgcgccagctgctcgtccccgccggcgtctgtggccgccaaggcctcctcgcgcggcccttactgccctggctgtccatcgtccgcccagggaagagccgctgcagccgcacaacctacagcgaccggaagccgccgccgggctccgcccgtcatttagctgaatgcctgcacgaaaagggtgggacgggatggaggagcgtcgaggcccctcccgcagctccgcttccggctcggctgtcacggtcgctgccc

SEQ ID NO: 3409 - DNA, 456 bp, Homo sapiens
  source 1..456: mol_type = other DNA
gtcatcagagatgtaacagctgggtctcagagcacagtttcctatggagatagaagttattatccccatgcagagcgccacgtttgaaactggggttgtctgatttcaaagccaaggctctgggttcacagaagtagctctcgctcacttgaccatagagcaacttgggcaaagaacgcatgatttcaaataagcatgtgtgtatccatccaaggcctgcctgtcgaatggtggggtccgccaggacctccaggctactgccgcagcagaaccggtgccgcagcaccggcgatgttggccgccattaacgcccggcaaagcgccgggcagcgaccgtgacagccgagccggaagcggagctgcgggaggggcctcgacgctcctccatcccgtcccacccttttcgtgcaggcattcagctaaatgacgggcggagcccggcggcggcttccggtc

SEQ ID NO: 3410 - DNA, 427 bp, Homo sapiens
  source 1..427: mol_type = other DNA
ggttgggttgggctggagaagccagcccctggcacctgcgccgcccctaccttcccaccccgcggtgggggtagttgtgcctctgaaccccccgatttttaatcttggtgtttggaaggggccagatgtgtacgagtcctccgcgactcggctccgcggctcccccgggagtggaagccaggaggggccgctgggaagacgtcatcgcttccgccagatggggctcggacggggcgccctgcaccgcctcccaggcgcacctcccccggccgccgaccgctccccggaaccgtgattggcccggccccccgggggcgaccccggactgagcccccccacccgcggccggcgctctcctccctcgcagcagtccctgccgctccgaggctcccgagcccccggagcctccgcccgacggcgctgcggc

SEQ ID NO: 3411 - DNA, 487 bp, Homo sapiens
  source 1..487: mol_type = other DNA
aagtttttgcaaaataaaagtgctattgccttaaaaaagcaagtaaaaaatgggcataaatattgacagtagtttactagcaagccccaactgtaataactgtttgctaattgtaaaatccttatccagaatgaggtttgggcaaacaatttgtactactgtaattacattgtaaaagtgtttagttgattgttcagaattaattgtataaaaaactactgagttgattttaagtccgcaaactcaaactatctcattctttaaggaaaatttgtgtgtaggtaatttaaagtacatttttaaggtaatctggcacatcatggttaaagcatgcaaccttcttttctcatctgtgctagaaaacaaaagaaaaaaataaatcctgttgtcaaatatatatatatatatatatactgaccttttccaaatttgaaaacgtggataaatttctctcagttaaattatacttacacaattttttaaggat

SEQ ID NO: 3412 - DNA, 146 bp, Homo sapiens
  source 1..146: mol_type = other DNA
taaaggcgctggtaatgcacctggctgcccacctacacatgtataagcgcttcttgtgtcagcccttcaggcacacagttgggggcaaccaaccccgcgttgactcctaaggacacccccttgagggtgagggttcagtggccacc

SEQ ID NO: 3413 - DNA, 202 bp, Homo sapiens
  source 1..202: mol_type = other DNA
ctgggagccggctgggtctgcagcccttagttagttctgagaattcagtactttgcgccccaataatttcgaggaaagtcatgaagtctatgctaaagctggcggccgcgggctactgcctgcgtttcagtgcggccagagctcgcttcgcgcacccacccagcatcgatcgtggtccttccagtgcagcacttgcaaagag

SEQ ID NO: 3414 - DNA, 250 bp, Homo sapiens
  source 1..250: mol_type = other DNA
ttagttctgagaattcagtactttgcgccccaataatttcgaggaaagtcatgaagtctatgctaaagctggcggccgcgggctactgcctgcgtttcagtgcggccagagctcgcttcgcgcacccacccagcatcgatcgtggtccttccagtgcagcacttgcaaagagacagagcggatgatcattcattcaccacgttgacaacctcgcctgtgattgacggagagaagatctgcttttttttgc

SEQ ID NO: 3415 - DNA, 199 bp, Homo sapiens
  source 1..199: mol_type = other DNA
taaagctggcggccgcgggctactgcctgcgtttcagtgcggccagagctcgcttcgcgcacccacccagcatcgatcgtggtccttccagtgcagcacttgcaaagagacagagcggatgatcattcattcaccacgttgacaacctcgcctgtgattgacggagagaagatctgcttttttttgcaggtcccgaagc

SEQ ID NO: 3416 - DNA, 537 bp, Homo sapiens
  source 1..537: mol_type = other DNA
cccaagtagctgggattacaggcatttgtatgtatgtatgtatgtatgtatttacttatttcaagtgcagcccagtagccgggactacaggcgagccatggcgcccggcctcaaaaatgttttatagttctctttgtaggaaggacaatctttaacttgcactattataaatagtatctctttaaaacttcaattttatatctgttgctaatctattgaaacacattgatctttgaatattgactttgtatccagcaactcttaaattaatttagtaattttttctactttcttttggatttttctatgcacatagcatctatgaaaaattaactgtatttcctcttcttgagaaattcgaagactctcaataatctgaatttgactaacgtgcaattttcgttgtaaattcaataaaaagttgctagtgtattcaatcccccaccagtctggaggattttgagcctagacactcctccagagcaggctcctgtcccggctgcggaagtgcgcgcgccctcggcaccttaacagcgg

SEQ ID NO: 3417 - DNA, 311 bp, Homo sapiens
  source 1..311: mol_type = other DNA
aataggagtaaatatcttctttcttctttcccactctgtaaataaaagaactaaaatgacatctgcatcggcttgccctgaggagcccgtccccacagaggggtgggaagacgggcctcttcgccggcctggcctcctctgtgtccatgcggcccgcggccacttgcgggtgacctgggtcccggaaatcaagggctgaacacgtgcgcagctgcaccacgcagtttcctaaaacgtcacaggccggggacctgcaggatttggggcgatcgcaggagcgcatctggcattatccggggataactacagcc

SEQ ID NO: 3418 - DNA, 406 bp, Homo sapiens
  source 1..406: mol_type = other DNA
agggccatcttctgcgttaaatattacatacatggtgcttgttcaaaatgcttttacatgcatttaatatacggacaactgtttcatgcataactttttatcaaattacagccgtggaatgacaagttacaaatgttatatactacactttcaatgaacagtatgtacagtttctgttaatgctgattgcatacattgaaatgcaattttacatttatttgaaactaataaaaaatttgggcttgtattttgcacatatttttgtattttatagaagtaccttttactgacagattggaaaaatgaacaaagtttcgataactaagatttttttcctggttaaatacactcaacctgtatttggggtgagtgccgccgcacgggaagcgccgctcgtggcgggggc

SEQ ID NO: 3419 - DNA, 280 bp, Homo sapiens
  source 1..280: mol_type = other DNA
attaccattcacatccctgggaatacaaccacactgcaggcatcctggtgcccgctttggcgtctcgcgcggctcaagccatgctttgggggaccacctcccgaagcagcttcaggtccccgtgctggatctcgtacagctgaatgactggtcacatatctgaggcttctcgaaggccgacatggtgcattggggctgtagttatccccggataatgccagatgcgctcctgcgatcgccccaaatcctgcaggtccccggcctgtgacgttttaggaaa

SEQ ID NO: 3420 - DNA, 710 bp, Homo sapiens
  source 1..710: mol_type = other DNA
atttatttttcttcatcttttataacaagaaagtatctatatatacatatgtaaatatttatatatagatatatgtagctttctatatatgtagtaggttggctttaatttaatatacttgattcagaaacaaaacaacatccttacttttatttcacacagttttatatatagatagaagactgtacaatgacaaagcatttgttaacgtcctattatttaccttaattacatttttgtaacaaaggagtctgtaactttatttatacttatgaatatatccaggttctcattgctgagcagcttttaatacacctctgcctgccaagagctagttcttgtgttcatatagtaactgcacaactaggagccattgcatttattaaatgtccctcagtaacgttaatacataaaggcaatcatgattgattgtatgtatcacttactgaagaatacctgaagtgatcatgtaactacttataagggatatccatttgtttgattacatgggtaaataatttgtcattaaacttgtgtttgaatcatgaattcccttgtttcaaaagacttgcagctaatctaaaaaactggtgatatttaatatgcatgtatgtatctaaacacccacatatatttgtggtttaagtgtgagaaatcttgctaatctatatgccacagaagagcaaaattgtatccaaatttatgccact

SEQ ID NO: 3421 - DNA, 605 bp, Homo sapiens
  source 1..605: mol_type = other DNA
ttaacaaatgtttgttcaaattgattgaccttagagaactccaagttcaaataaaaaaaatacagagagaccttgtttgttgaggtttcaaatttggcaattttatttttaaacgttttttttgtgtaaaaaattggaagttctgatttgtgaacatttttaactcttattcagaattcattgagggcgtctctcagttcagaaattgaggtgtaagtatttttcttcactgacttcattctcttatactaccatcatttcatactgtattatagaatgctttttaaaataatgaaaaagatgtcttttattccagatccttagacataactgaaattttacattctggtgaaaatccttttaggacatttccaactactatatttgaataattggatagaaggaaaacagtttctttctgctgaaaacagccatgtaaaactacatatgtaatttagagaagagatttttttagatatccagttttatctgacaactctattttaaggaaggagacatcctcatagtcataattttgatgtttttcttactgaaagcatttacttgtccgtatctatgacatggataaagatggctatatttcc

SEQ ID NO: 3422 - DNA, 539 bp, Homo sapiens
  source 1..539: mol_type = other DNA
ttttaaaagttgttgtatttaatttatttttatttttaatttttgagatggagtctcactctgtcactccttacttgcaacacgttgtatttaatttaaaaaatatatttgtaattatttctataaagtcatgatcaaaattacttatgtgtattagtcagatattttaaaggaatgaaaatgatgtaatttagaagaaaatagcttaaacctgttgtttcaagaatttatataagagacctgacactgaatttttatggattacttacaaactaatgtaaacatttctttttagttattctttctctttaaatttggttgttaagtaaaaactggcttatttgctcaaacttgcaaagtatctctggaagaatatttaggttgcttctttgaattttgaataccctttgaatttttgagtcatgaactattagaaataaagtaaattaaaatttaacaagaaaaatgaaaatgaaagtacttcggtttacagaacagaggttgattgaacctgtctggtacagtcctgaaatatcttg

SEQ ID NO: 3423 - DNA, 457 bp, Homo sapiens
  source 1..457: mol_type = other DNA
gcagaattaatttaccttcagaaatgctattttttccagttaagtctgatataataatttacaaactgatgtgtattttttgttaaatgtaattatgcattaggttcagggatcaataaacacaattactgataaatgtaatactcccaggtagtagcttgggaatctccaaaactcctgtttttactaatgaacaaaattatattgaccatattgacaaaattatctttatattgccatgttttgctttggtttccttttttaaatggaaggtagactatgaagatcatagttctcttaattaaaggactttacttagctttctaaagtccttaggagccattggacctggttttaaaatcctgcttttttaccttcacttataaaacagtaatgatacttatttaaaaaaaaaaaaactcacagtgacagtgcaaattttagtaaataaaatacc

SEQ ID NO: 3424 - DNA, 303 bp, Homo sapiens
  source 1..303: mol_type = other DNA
ctctctgagctgcctcgcaagttggcaaggaaatctgctcttaatctgggttttaagtgcaccagtaagcacttactcatttgccctatattttaaataaaagctgacttacctgaatattctaatttcacgttcttcccttaaaatcgatttcaccaaatcgattttaagtcttctgacaactgttcaaagacttttagagaaagactgtgtatacaactctttcgcgtatgttttcgtgaacaaacagagcaaagcagcagcgaacggaaaccccgcagggctgcgcaccgcagctaaagc

SEQ ID NO: 3425 - DNA, 714 bp, Homo sapiens
  source 1..714: mol_type = other DNA
acgtcaccgacgtccgcgcccccgcccctggcctccccccaccctgcacgcaaggggcggccggctgaggggcgaacgtggtccgcgcgctcagcgttccccaaccagagctcgccagagcgccgcggcactcgccgcccagcggggcgcgcaggttcccggatgtgcggcgctcgcggaagccccgcccccgccccgcgcgctgcagcgcgcgagccgctgcagtgagtccgtcacggctccggcgcgagcgcgaggctgcagcccccgagtttcccgctccctcgcgtgcccaatcgcccggccggcgcgggccccgcggcgccgcctcccctcccccacgcgcgccccctccccgccggcgacccgagggccgcagctgggccgccgccgccgtttcctgcgagcccgagccagcgagccgccgacccgtccctccccctactgccgccgtccgggtcgggtgcgggggcgagccccgacgcccccggtcggctgtcccccgtggaaaattccagagacccgggcccggcgggtcccgcggcggttgcgggcgagccggagagggcggcggggcggctgctgacaggacggcggcggggcccccgcgcccgcccccggcctctgcggggcgcccctctgctgctcggccgccgccccgccgtcgccccacccccgcgccgccggtcccgcccggcatcgacccccgcgggc

SEQ ID NO: 3426 - DNA, 358 bp, Homo sapiens
  source 1..358: mol_type = other DNA
gtgacagcagtctctgtagtggatccaagtcggtacacggatgcacaggcgacgtcaccgacgtccgcgcccccgcccctggcctccccccaccctgcacgcaaggggcggccggctgaggggcgaacgtggtccgcgcgctcagcgttccccaaccagagctcgccagagcgccgcggcactcgccgcccagcggggcgcgcaggttcccggatgtgcggcgctcgcggaagccccgcccccgccccgcgcgctgcagcgcgcgagccgctgcagtgagtccgtcacggctccggcgcgagcgcgaggctgcagcccccgagtttcccgctccctcgcgtgcccaatcgcccggccg

SEQ ID NO: 3427 - DNA, 350 bp, Homo sapiens
  source 1..350: mol_type = other DNA
gtaatttcctattgtaatctgaattttctgggaagataattgccaacattcgagtttttttctttttttaaacaaaaactgatggactccgtgacagcagtctctgtagtggatccaagtcggtacacggatgcacaggcgacgtcaccgacgtccgcgcccccgcccctggcctccccccaccctgcacgcaaggggcggccggctgaggggcgaacgtggtccgcgcgctcagcgttccccaaccagagctcgccagagcgccgcggcactcgccgcccagcggggcgcgcaggttcccggatgtgcggcgctcgcggaagccccgcccccgccccgcgcgctgcagc

SEQ ID NO: 3428 - DNA, 539 bp, Homo sapiens
  source 1..539: mol_type = other DNA
tttacagggttaatagctccttcaaaatctgtgtaaatatatgtgattcattacatatatttatgtatgtgtcatttttgggacgagcatacgtataaagaatgtaggctccatcacgtggaattgcgctttggaaagactcatatttcctgaaatttaaatcaccggtcctcccgcctggctggcgccggatccgcgagcagcagtgtccacctcacgtagctggccgaggcggtcctgcccggggctgttctaggaggagccccgcttccccagctgaaggggattgtggtgcgttccctcgcccccagctgcgcggatctgcgcggcggcctgcgggccagagcgagccttcgggcgcgcggccttggagccgtctcttgggcccgcttcctcgccgagtggggaggggggccacagcctaaggagctgctcctcaaaagcccgggcggacggcggcgacggcgcgggttcctagcggcagcctcgcgctccagccactcggccgcagccggcgctgtcctccgccccccggagcc

SEQ ID NO: 3429 - DNA, 403 bp, Homo sapiens
  source 1..403: mol_type = other DNA
gcaataaacacccatattacatatatattatatgtatagcttattatttcttaaaaaagagcagtctaacttgggtaaacaaaaactggtgctgaagcaggtgctccgggtttacagggttaatagctccttcaaaatctgtgtaaatatatgtgattcattacatatatttatgtatgtgtcatttttgggacgagcatacgtataaagaatgtaggctccatcacgtggaattgcgctttggaaagactcatatttcctgaaatttaaatcaccggtcctcccgcctggctggcgccggatccgcgagcagcagtgtccacctcacgtagctggccgaggcggtcctgcccggggctgttctaggaggagccccgcttccccagctgaaggggattgtggt

SEQ ID NO: 3430 - DNA, 527 bp, Homo sapiens
  source 1..527: mol_type = other DNA
tttacagggttaatagctccttcaaaatctgtgtaaatatatgtgattcattacatatatttatgtatgtgtcatttttgggacgagcatacgtataaagaatgtaggctccatcacgtggaattgcgctttggaaagactcatatttcctgaaatttaaatcaccggtcctcccgcctggctggcgccggatccgcgagcagcagtgtccacctcacgtagctggccgaggcggtcctgcccggggctgttctaggaggagccccgcttccccagctgaaggggattgtggtgcgttccctcgcccccagctgcgcggatctgcgcggcggcctgcgggccagagcgagccttcgggcgcgcggccttggagccgtctcttgggcccgcttcctcgccgagtggggaggggggccacagcctaaggagctgctcctcaaaagcccgggcggacggcggcgacggcgcgggttcctagcggcagcctcgcgctccagccactcggccgcagccggcgctgtcctccg

SEQ ID NO: 3431 - DNA, 388 bp, Homo sapiens
  source 1..388: mol_type = other DNA
ttcattatttgtgtaacgatataagaatttattcagccatttatttattggttaacatttcattagttttatttttatttttgcaaccaatgttgcaataaacacccatattacatatatattatatgtatagcttattatttcttaaaaaagagcagtctaacttgggtaaacaaaaactggtgctgaagcaggtgctccgggtttacagggttaatagctccttcaaaatctgtgtaaatatatgtgattcattacatatatttatgtatgtgtcatttttgggacgagcatacgtataaagaatgtaggctccatcacgtggaattgcgctttggaaagactcatatttcctgaaatttaaatcaccggtcctcccgcctggctg

SEQ ID NO: 3432 - DNA, 477 bp, Homo sapiens
  source 1..477: mol_type = other DNA
gaaggtctttattttgtaaagtttctcaaaaacctgtttgatgatggacttctttttacaggctgactgtgagatcagtctcatgcctgatgtgaggcagtggcaccctgagacttttcttctctgagcctgagtttccttactctaagataaggaaaataatatactttccctataggctggagtgcagtggaccaaagtgattctgctgcctcagcctcccgagtagctgggactcaaagtgctgggagtacaggcgtgagcttgcagactaatttagtttaaaataagtagggttaactttgttatgctaaccaatttttattgggcatttccaggatctcaagaataatccttactcaggacaattttcaccaacaagtttttcttgttcatttttctctttaaaagagggattttctgtatggtagtaagaatttcccttaggtaaatattcaacccaactgtggttttaat

SEQ ID NO: 3433 - DNA, 409 bp, Homo sapiens
  source 1..409: mol_type = other DNA
tctcatgcctgatgtgaggcagtggcaccctgagacttttcttctctgagcctgagtttccttactctaagataaggaaaataatatactttccctataggctggagtgcagtggaccaaagtgattctgctgcctcagcctcccgagtagctgggactcaaagtgctgggagtacaggcgtgagcttgcagactaatttagtttaaaataagtagggttaactttgttatgctaaccaatttttattgggcatttccaggatctcaagaataatccttactcaggacaattttcaccaacaagtttttcttgttcatttttctctttaaaagagggattttctgtatggtagtaagaatttcccttaggtaaatattcaacccaactgtggttttaattctgatcagg

SEQ ID NO: 3434 - DNA, 613 bp, Homo sapiens
  source 1..613: mol_type = other DNA
aaacttttctgtaaagctactgtaaatattttaggctttatgaaaaattagtagattttttgtttacattttacatttcagaatttaagaatcattcttagttcatggggccatacaaacataggctggatttggcccccaggcactagtttgccaatccctggataagataataatggtaatacagtcagtgttttaaaagcaacataaagaaatgtttgtgaattggcttaaccggaccggcggaccagaccggccaggactagggccggtcttcaggagccggcgcggaactccacggctctcggggtccgctaagcccccgccgcagcggcccgcggccgatcaccgtctccccgggcgccagggccacccggggaccgccgtcccgcggctgcagctcgaagcccccggacatggcgggcaaggattaggccccttcgccaggagactggcccctcgcgcggggcaagcccacgccctgaccgagggagggcctcaaaggctccccgcggctgcgccggtcctctcagagcccggccccagcgcagggacgccgggcctttcccgagcggagacgccctgggcgcgcccctctcggcgcctgcgcgag

SEQ ID NO: 3435 - DNA, 434 bp, Homo sapiens
  source 1..434: mol_type = other DNA
taggaaaacgttacagtgcatttaaacgttacagtgtgtttatccttactgggagaataaaatttgtggaattcctgtaacgggattttgaatttcacagcaggggatacctttgcgagtttctaaaatcccactaggttcaactatcattcgcgcagtcggaggggcggggagccccactccgtccaaatccccttgtgtcccgcgcgggttgcagctgctgggacaagtgacaacaaccgtcagcgttgactgtcactgcggctccaggccgcggagggaaggctgagcttgcgtccaggccgcgtccccgggagcgtactaggccgcggtagcttctcctcccgcgatttaaatccgccctgctcagaactcgcgcaggcgccgagaggggcgcgcccagggcgtctccgctcgggaaaggcccggcgtcc

SEQ ID NO: 3436 - DNA, 272 bp, Homo sapiens
  source 1..272: mol_type = other DNA
cttctaaacttttttcaaagttttcaactgctggtgaggaactgtgttcctttggaggaggagaggcagttttccttctaacagacaggaccctcagctgcaggtcgcggtgcctccctcccacttgaggaggcagtctgcccattctcacatctccagctgatttaagtctgcagcggttactgcgtgccctgcccccagaggcggagcctacagaggcaagcaggcctccttgagctgtggtgggctccagctgctttgtttacctaagc

SEQ ID NO: 3437 - DNA, 307 bp, Homo sapiens
  source 1..307: mol_type = other DNA
gttgtggttattatcaaccccattttactgatgaggacattaaggtctgcttgttcaaaagttgtgagtgggtcgacctagcttaagttgcttcattaagccaaatacaagtttcgacattttcttctaattaaaactgtaatcttttataacagaagcaaccattctggttttttttccaaaaaccattttctcaagaaagagtgctcattctttcgaaaaggagctttgcttccatgaccatcctccagtgacagatggatggacctttcatctaagagaactcaagcctaagattgcttgtgaa

SEQ ID NO: 3438 - DNA, 242 bp, Homo sapiens
  source 1..242: mol_type = other DNA
cctaagatggagccttcctccagcaacacttggcaattggcagtgacgatctaactgtaaccaactccctgcaggctggccctgtggccgggggcggcccctcctctagccggccgctgtggaagagtgcccaggcagcttccggcggcctctgcagctgcgtgggactcaccccgagccggtcctctctcttgtcagatactgactcccacgcaggaaaaaggaagcaccttttgtcagat

SEQ ID NO: 3439 - DNA, 266 bp, Homo sapiens
  source 1..266: mol_type = other DNA
caaccatggcagcacatagagatgctgctgtgtccagtggaactttgaatccctgggcactaagggattggggatctatgggctatcactagtgaacctcctgcacttgggagcttcccgctgggccatccgagggcgaacagtgaagccagacagtattctccttctggaatcttctccaactgtagatgagatcctttgaggagcctgcccaggcaggaaacaggctgggaaattcccttcattctgcccaggaggctaattgc

SEQ ID NO: 3440 - DNA, 371 bp, Homo sapiens
  source 1..371: mol_type = other DNA
acttttccaggattattacataggaccctggatgccattccaatgactttgaattttctgtaggctgccagcgaaatttttctggtgaccagagtgatcaattgcatgtatatggtgctatcattaagtgagctcagttgctcacaaaacatgtttagtctaagcaaaaccattgccatgggctcagtaaacattcctacattcctataggagcttgaatctgagcaatgttagcgtgtaaaatactcacgcccacagctttggagaagttatcataaatcatattgagtttgttgagcttcaacaagctaagcatgcagatattctgaaaggttacctagtttgagtcaacctggttaagtacaaatgag

SEQ ID NO: 3441 - DNA, 291 bp, Homo sapiens
  source 1..291: mol_type = other DNA
gtacatgcatatgcactgagggctcccagagagaggctgattctctttagagaggctagcacggaacttccctgccaattccaaatggagatggtggccatctagaaggctcagctgttccatcagcctaccacactctgtggggttgtttgtgatggtttcagaccggaccccaacagtctcttttatgatccaatgtttagtgaccttatcaaaagacgcccccgacgcactcccgcgggtcccacgcgtgctttttgaactttcttccccgtaagaacgcgaaagggg

SEQ ID NO: 3442 - DNA, 476 bp, Homo sapiens
  source 1..476: mol_type = other DNA
agtagagacggggtttcaccatgttgtccaggctggtctacctcagagccactgcgcccagccgtaactagccatttctaattgtcatgttaaaaaaattacacaaattaaactttattctctttctctctcttcaatctaagaatttcttaatactctgcaagataactagaggtctctaacttacagttttgtgcagttttgggcgaagcttaatgtaaaaatttggttaaacttgttcctcattaatttctggaaattgacaccaaagctgttggcccaactcaggccttaaggaagcactcttcctttaggaggagatgttgtccttgtagagctataaaatgtatgcatagaacaagcatcatgcaatatttttaaagggtggaaattaaaatgtcagaccaagtggtgaattttcattactgactaatgaacttcattgatatcaggtatgtggttggatctcaattctg

SEQ ID NO: 3443 - DNA, 308 bp, Homo sapiens
  source 1..308: mol_type = other DNA
tggagatggtggccatctagaaggctcagctgttccatcagcctaccacactctgtggggttgtttgtgatggtttcagaccggaccccaacagtctcttttatgatccaatgtttagtgaccttatcaaaagacgcccccgacgcactcccgcgggtcccacgcgtgctttttgaactttcttccccgtaagaacgcgaaaggggtcgggacggaactccttccattgcaaaagctcggcgcggcctcgggagctgcccggcggccccggaccgaggcagccctcccctttaaaagaagcggaggag

SEQ ID NO: 3444 - DNA, 427 bp, Homo sapiens
  source 1..427: mol_type = other DNA
cactactctagagccattatagagttctgattactccacatttgactaaagatcatggcgcattaattcatagaatgaatcgtatagttgagcccattcctcctctacccctccacaataaactgagggttatgggtgctggcgcctggggcctggggctgcacggggcacgcacccgggcggctcggtccctcccgcggctcgccccggggcgggcgtctccaggaactccaggcggacgcggccacgagccactgccacgtcgccgccgccagcagtccagcgcctgcgtgggctcggggggcggggcagcgctgggaggcgggacttgcgcgtgagcggcgcgtgagcggttcaatggagcctacgggcggcggcgcgctgcgcgccgaggggcggggcccggcggcggttgctggcggagccc

SEQ ID NO: 3445 - DNA, 578 bp, Homo sapiens
  source 1..578: mol_type = other DNA
atatttgcttaatggaagtaattctacgtgatttataaatagaatttatatttgtaaattataaagttcagagagtgtgtgttcactttgtgaaaacttagtgaactgtgcatacatgatttaagcatttttctgtattaatgttgtatttcaatgaaaagtttacctgaaaatgaagccagcatgtgacagtctcccttttccttcactcaaaagaagtgactgagtatattttaggtaatcacaataattattaggaaatttgaaatcttaagtgctgtaaaatattgttttatttaaaaaaaatttctttagagacagggtctcgctgtgtcacccaagctggagtgcactggtgtgataatagctcactgcagaattttggtattttacctgagagtaaaaaaaaaaaatttaattctaaataaaacttagccacagttattattctgtattataaaagtagctctaactttgtgaattttactaatataaaatttaagctctgagctgtattaaattttttcaatgaaaacttgtattttaaagaatatgtcataaatattctttgacctcac

SEQ ID NO: 3446 - DNA, 260 bp, Homo sapiens
  source 1..260: mol_type = other DNA
ccaggcaccgtggctcacacctgtaatccggtgagctatgatcgcactcctgctctccagcctgggcaacagagatagacagattgtgcctcagtaagtataaagtgggaaccgttgtcctagagaaaacggaatactccaggaaggttctagtcgacgcagtagcctgccctcggcgcggggcagcaggaccgcccgcagccggtagggtgggctcttcccagtgcccgcccagctaccggccagcctgcggctgcgca

SEQ ID NO: 3447 - DNA, 195 bp, Homo sapiens
  source 1..195: mol_type = other DNA
cttgaggccagaatactactactactactgctaataaaagccaggcaccgtggctcacacctgtaatccggtgagctatgatcgcactcctgctctccagcctgggcaacagagatagacagattgtgcctcagtaagtataaagtgggaaccgttgtcctagagaaaacggaatactccaggaaggttctagtc

SEQ ID NO: 3448 - DNA, 349 bp, Homo sapiens
  source 1..349: mol_type = other DNA
gccgaaaagcccccgagttttgaggtcaagccaacgggctgggtcctaggatctctgtacatttccagacgagagttctcacagcgcctagctcagagctgaccgcagagccggctctggcgctcggtgcagccggatccaactgccagcacaatgttcccgctaggggctaagcggttaagccgctggaggccgtggaggccacacggctgccgcctcgccctctcctccaggagtatgctgggatttgtagtccagcagccggaacggcggttgcaggagaggccccggtccctcgccgcgccgccccgaggggcacttccggcggcggttcgggcgggagcgcgcg

SEQ ID NO: 3449 - DNA, 574 bp, Homo sapiens
  source 1..574: mol_type = other DNA
tgccattaactattctctgttttttaaaaaaactgaatttgcctatagactcaacggattcattctgcaagcattcactacgtggcacctagcccacagtgtctaaactttagtaaagaggggaatgaaatgtatccttcagatttcactttctagctcggcacgacctgccgttgggagacgaacggtttcccgaggtggggggaagcgcggatttgccgcgggactccggcttggcgcggagctgggcgcggcaggcgcagggaggaactggcgaggtggcccgggctcggccctccgagggtgtggagcgcccgggtgctcccaccctgcgcggccaggagcggggctggcgatactgggtccgggcagggggcgaggccgggggaccgggcgggcctggggagcaggcacgtgtggagggcggacccgccgggggtcgaggcctgcctctccgagagctcctggcgcggccgtcccggcccggggccccaggtgcgcttcccctagagattccggtctcgtgggcatctccaccccacagtggggcggatccgtcccggataagacccgc

SEQ ID NO: 3450 - DNA, 467 bp, Homo sapiens
  source 1..467: mol_type = other DNA
tgatatgtctaaacatgcaaaagaaaatattatttatgggtatgcatataaggacatgcatggacatgatataccatctgcctatatgtattgttctatttaaaaaagaatgaatcattgattacacctcaataaaaaaatttcagtattactctatttgaaatattttcattattttacttaaaaagtaacagaagagcactagtaaattttgctagggcctcctgaagctattcggacatcccactggcgggaacgttcccataacttaacggggcccaggaatccagcatatcgcctcatcctagggccccctctcacaggaggccacggggggactcaaggcacctttgtagtgactggagtccgtctacgccgaagttcgggttgaaaacaccagcctgcactggcgcgccggattgtgcgcaggctccacctgccacgcacgttccggaggctcgccgtac

SEQ ID NO: 3451 - DNA, 168 bp, Homo sapiens
  source 1..168: mol_type = other DNA
tgtcctttgttgcatgttctcacttataaggttgtttcctggtaagcatcagccttggggcaagacagtcgaacattctaaaaacataagctgtttattttgtgcatgtggacaaaactgaattttccaggaatttctataataacgttttctggtctcccggccctc

SEQ ID NO: 3452 - DNA, 575 bp, Homo sapiens
  source 1..575: mol_type = other DNA
ttgctgtatactgcagcccgattccagctcttgaaaaaacgccgagcggcgagcatttaacaacggccggctttcccgcagcagccacgtggcgcctgccctagctcccggctcaccggccactagcgaggctgggccctcgccagcccgagttccgcgaagcccagaacctccagggccgcggccaccagaccgagggctccggccccgaacccaagcggggcagagcgccctgccagccttccattcgatggacgcctggcaggtccccggaagttttccccggggacaggtcttggcaacaggtccgaggcaaggccgggtggagcagagctccgcagcggctggtgaatcagcgccgcccagcgccggaccggccctcccagccaatgccagacccggtgaggagcagccaggctgctgaccatcagccacttagggctcgcctggcctggagaaaggtgatcgtgctgggaggtttccgaaggcttcaccttggccaatactaacaaagcaaaagggttgcggggtggagccctgaagccctctcccaggcattctttggggggcccaat

SEQ ID NO: 3453 - DNA, 806 bp, Homo sapiens
  source 1..806: mol_type = other DNA
tcctaaactagattgattatgtaaggatttcaactgtaaatatattcttctgttaagtataggcatattttattaatccatacatgaaatctcactgaattcttaatgaatgaaaaagtcaagatattttcaaacattgcctttctctctataaaagattaatagtccagttaatttagattatgaatcatgtgattgaaaatgctataagctaaggtactagaatcatcttggacagtcttttgtaaaattaccttcaaataagtgcaattgaatttgctcaattctaaattatatgtttcgtgttacctaaaataaataaggattttcaattgattttttttttaagtctgtaaatcttctcaaataatttcaaaattaaacttcaatactgctatctggagttaaaagaaatctgaaagtctttggtttattttgaaagtaaaataatctctaaatatacattaaattaccttgaatatattataaagatggtttatagttttcatctctgatgcatgtttttttttttataagaggagtataggattaaaaaaaaacaatgaattttctcttctcatcataggcagtacatgaatcgaaaaggtggattcaacagacctttggatttcattgcatgagaattgaagtgttgaatttgtattttgtatttaacttgcattcaaaaaacaggatctcagttctcctttcttgtaaagtaagaaaatcttatttatgatatatgcagttaacttaccttgcctcaacagaagaaaggttaaatattacatttttttcttttagga

SEQ ID NO: 3454 - DNA, 409 bp, Homo sapiens
  source 1..409: mol_type = other DNA
ccttgtgatcgctgggattacagccgtgagccacgacggcgtagttgactaaggtttcccaatagtaaattaacctgctaccactagtaagtagccactgttttccacacagtgtcaatcatgaaccagaactaagatatacaggaagctcttttttatctcattttaagagaaaacgttcaagtgtagttcaaagtgtacttaagttaacttgaaattcgcagctgacatctgctaataatgtagaaaatctcgggcgattttttttttaaaagtctattcagaactctctcaggccagaaccaaggcagagcctgagctttacagcccagcggtctctgaaggagctcaggtgggcggccacttgccgcgcgtgggcggctctgaccaataacgattgtcgttacag

SEQ ID NO: 3455 - DNA, 599 bp, Homo sapiens
  source 1..599: mol_type = other DNA
gcctgtgaagcacaatttgagttctggttattttgcagagtgtcttttaaaattttgcttttatatcttgtagttccaatcaattttatatgaatgctattataaaattcagtgtaaaatctttttttcttcaatgatttaacatttctgaaaatgtcaagttctcaaaatttagacaataaattgatctgaaaaaattaaatagtttaattagtttagggaatatacaactttttctatttttttttaatgattaggtagaatatagtgtcaaataagttataaattgcatggttaaagaaagccattcatctaatgtcctgtgaactttataagtggttaagtagttcatgctttcaccatgcttaatatttaaaagtttaaaaagttttttgaagagagaggcaatttctgtacaatataaatatacatatatacttaagttattgatttgcatgtctataaaattaagcctcatttcctaatacatgataaattttgtagaataaaaggtgaatttgcattaaaggttcactttaatgaaggtgaaactgtgaaattcttatttgatatccagaggatagtttgcaaacctaaac

SEQ ID NO: 3456 - DNA, 496 bp, Homo sapiens
  source 1..496: mol_type = other DNA
ctattttattaaatgctttgattttaattgaggtagtttttttgaaaacattaagttaaatatttttttctcttaaatatatttctgtgtcatattttggtaagacctttaagttttatgattttcaattgagataatgtataatgtttgagttttaggctattcctgcatttaaaggaatcattcagtatcatgatattctctaaaaagtgcaaatatcagtgcttgatttatagatgtgtaataaacagtggtctgtaaaagcatgtagtataaaaaatatggtattttcccttatatacagcctatatcctattccttgagtttagggtagactaaaatgcatgcgtaccatacagataatttattaagtatttttgcatattgaacattgacttacattaatcacttaataaatcactcagattgatctaaaatatgcttatgtatactttaatagaaaattacattgcagcctgtgaagcacaatttgagt

SEQ ID NO: 3457 - DNA, 717 bp, Homo sapiens
  source 1..717: mol_type = other DNA
tgtcaaattgaccattttaaagtgttggtccaacaattttgcatttttaaagtgtttctttttttgataattgtcttttttaaaaacttcagataaaagtgaagggatgccttcagtcttagttcacttgcacatggattcacataaactgaaaactgttggcttttgagaaaactgtcaaatactttaacatcaaactgttgcaatgcaaggtatttctttgattgttcttcacaaaatatggttaaaccaagtatatatcatgtagctagcttcagtaaattgtgttaactgaggcaaatctagtctacataattcacagtaccactattttattttaatttgtaaagccttaatatagtggtaaactgaataaaagtaaataattattattagaatggtaactaagtcattaaatttttttgcagaactgaaacttgtatgttattagtttattttcttagaccagtgtaataattgactgtaaatagaaatataaatgtcactttacagttagatgtatccttgattcattgtttaaaattggtaggatttgtatagatataggatagtgttttatttatactttatcataagccataatcattttaagaatactttattggatagattttagtactttttaaattctaaagttctattttgttggtgatctcagcccagaaattacaactgaagatataaaagctgcttttg

SEQ ID NO: 3458 - DNA, 283 bp, Homo sapiens
  source 1..283: mol_type = other DNA
tggcaaacttttaaaagttactcccaaatattatagtttaaggcaaagatctgcctatttctcaagtttaatttttaatgaacaactttagactaatctttacccagctacttgggaggtactacactctagtctggatagccagactatttctcttaaaaaaaaaaaccgggtctcaaaaaaaaaaaaaggtaaattgtttctctttgtgtttcagatacgtcggtaacctttccagagatgtgacagaagctttagccagattggaccttgtaaaaactgc

SEQ ID NO: 3459 - DNA, 513 bp, Homo sapiens
  source 1..513: mol_type = other DNA
atctcaggtgatcctatttcttaaatgcttttcaatgtgcaatcaatacacggaagaaacgcaaattcttaataaaatccttacttttttaagtaaaactttttttcttttttcttatttcttaagtaaacattttaaattgaaattttttttctgtacagagaaagttgaaacatcggatgagaaaagataaattatttatgttattggaaaacagaagattacagactgtcaataaacttttacttttaaatgaataaataatacatgacaattcttttcacatgaggcatgtcaacagcgccgctggtgtagtggtatcatgcaagattcccattcttgcgacccgggttcgattcccgggcggcgcaacagatatatctttccaaaagaggaaagatttaggctttttaaatcgtgaagtagttaatacttgcgcctgcgcagtctgaggcgtccctcgcgtcgggtggaagattattctgcgcctgcgcggcccgggtaatttgctgg

SEQ ID NO: 3460 - DNA, 269 bp, Homo sapiens
  source 1..269: mol_type = other DNA
tccttaggctaaacagttctcgcaacagggtgatcactcagtaagtactaggaggagagctgaggcgagcctcagcttagtctggctctgtctcccaggctggagtgcagtgggcctcccgagtagctgggactacaggcgcccgccactatgcactgagtggcccggcggggcgaggtcggggcggggctcgcaggacctgggcggggctcgcaggggctgggcggcctgggggcggggctgggcggagcgcgcagccgcgcagcggt

SEQ ID NO: 3461 - DNA, 256 bp, Homo sapiens
  source 1..256: mol_type = other DNA
tggtggcgggcacctgttgtcccagctactcgggaggctggcgccactgcactccagatatatatcattatcatttggtatattggtatatatgaagaaaatatctcaatatctcaattttattttttaaatagagaagggggaactcctgggctcaagagatccaaagttctgaagagcagggataaccccagctattcggcgccactgcactccagcctgatacccaccggtggaatacccgttatctcatcct

SEQ ID NO: 3462 - DNA, 262 bp, Homo sapiens
  source 1..262: mol_type = other DNA
aactcctgggctcaagagatccaaagttctgaagagcagggataaccccagctattcggcgccactgcactccagcctgatacccaccggtggaatacccgttatctcatcctgacgccgggcctacagcgggagcgtgaggaaagccgtgcgttgcgttccaaggcatccgaggtcgccgggatcccggccaggctcccgcgcatgagacgtgaagcccgcgcagagctcgcgcgtcggtgtggttacagccggcagccac

SEQ ID NO: 3463 - DNA, 404 bp, Homo sapiens
  source 1..404: mol_type = other DNA
ttaggctaagtatttttcagcaatatgctacttattggataataacatacatatgacattctagaaagagaaaatgtaatcttgtttagagacagagtctcactctgtcgtccaggctggagtgcaatggcgtgaggctggtctcaaattcctgagctcaggtcatccacctggcgtaagccactgcgcccggcggacagggtttatttatctgtatgtaaattacattaaataattttaaagaatgtaaagccgcagggcaggtgtcccagtgaccggttcccaagcgggaggagggcggtgggctcgcggacaccagcatgcagtggctccgttcggccgccaggggggggcgtgggccctggaaggagggggcgggcccgtacgccgattccatatgggcg

SEQ ID NO: 3464 - DNA, 698 bp, Homo sapiens
  source 1..698: mol_type = other DNA
ccagagatgccccaggagcggcccctcggtgtaggtaacgggtgcccgggcggctccgctccgccgcctagagcctggaagccgccactgcggcccaggacaatccggctacgcggccggcgccgaccccgcacgctggagtccgctgccgcacggcgctggcagtcgggggtcggcccgggtgcccggctcgcgccgccaggctctgggatcccaggtcgccccgcccagcagcccgcgccctgctcggtgcgctcagcgtccccgaccctctgtgccctcaggggggcacccccatcggggcgggaggggggggtcagctgtgccccggtcgccgagtggcgaggaggtgacggtagccgccttcctatttccgcccggcgggcagcgctgcggggcgagtgccagcagagaggcgctcggtcctccctccgccctcccgcgccgggggcaggccctgcctagtctgccccccgcaccgcggcgccgctccgccactcgggcaccgcaggtagggcaggaggctggagagcctgctgcccgcccgcccgtaaacgctctgggtacgtacgccggctgcggcgccccctgcgccgcgcgacaccctgcttccccgttcccctttccgggggtttctgcgcccgcctgggagagactgtccggtcgagcgccgaggcttccccgggaaagtggctgcc

SEQ ID NO: 3465 - DNA, 607 bp, Homo sapiens
  source 1..607: mol_type = other DNA
ggccatataaccggaactgtggcacaggtgggaaacctggtttaacaaattcttcattgattcaggggaccactttccttgagccaagtcttggcaagcggccggcgaaactcacaggtccctttcctggcccagagatgccccaggagcggcccctcggtgtaggtaacgggtgcccgggcggctccgctccgccgcctagagcctggaagccgccactgcggcccaggacaatccggctacgcggccggcgccgaccccgcacgctggagtccgctgccgcacggcgctggcagtcgggggtcggcccgggtgcccggctcgcgccgccaggctctgggatcccaggtcgccccgcccagcagcccgcgccctgctcggtgcgctcagcgtccccgaccctctgtgccctcaggggggcacccccatcggggcgggaggggggggtcagctgtgccccggtcgccgagtggcgaggaggtgacggtagccgccttcctatttccgcccggcgggcagcgctgcggggcgagtgccagcagagaggcgctcggtcctccctccgccctcccgcgccgggggcaggccctgcctagtctgccccccg

SEQ ID NO: 3466 - DNA, 562 bp, Homo sapiens
  source 1..562: mol_type = other DNA
ctccgggtacctggagaacatgaatctcccgggtgtactgtccccatgagggggccatataaccggaactgtggcacaggtgggaaacctggtttaacaaattcttcattgattcaggggaccactttccttgagccaagtcttggcaagcggccggcgaaactcacaggtccctttcctggcccagagatgccccaggagcggcccctcggtgtaggtaacgggtgcccgggcggctccgctccgccgcctagagcctggaagccgccactgcggcccaggacaatccggctacgcggccggcgccgaccccgcacgctggagtccgctgccgcacggcgctggcagtcgggggtcggcccgggtgcccggctcgcgccgccaggctctgggatcccaggtcgccccgcccagcagcccgcgccctgctcggtgcgctcagcgtccccgaccctctgtgccctcaggggggcacccccatcggggcgggaggggggggtcagctgtgccccggtcgccgagtggcgaggaggtgacggtagccgccttcctatttccgccc

SEQ ID NO: 3467 - DNA, 288 bp, Homo sapiens
  source 1..288: mol_type = other DNA
agactctgtctctgtggagtcagggcatgacaccctcctggcatgtgaccccaggccatctcccatacctggaggtctgggagtagggaatgggagtgggtggctgaaagtcccagtcttccaaagtctatttctgggtgtagtcctaaggggcttattatgaataacaaaaaacactcctgtcacccaggaaactctaagcgttttaggagttctgtgtcttgtacaaaatcatgtagtatttttatataatgttctcccttcctactctaggggaggggcccactg

SEQ ID NO: 3468 - DNA, 213 bp, Homo sapiens
  source 1..213: mol_type = other DNA
caagtcttaggtttacactttgaatctccaagttgcatattataaagggatattgtatcagccaccaggatcagagtgattccttgacatgatcagaaggatctgaatgtatattttacattccagcaatattgcaactatttacaatttgccaacctggtagagcatcagtacctagaaggcactcatcttcctgaaagctcagacttcttg

SEQ ID NO: 3469 - DNA, 502 bp, Homo sapiens
  source 1..502: mol_type = other DNA
tttctggaagctgtacattttcacaagcacattttcaaaagcccttggagaggatggagctatctcttaacacccctactctctgagggccaggccttgaaagtattggaccttaggtacactgtcattttacaaagagcagctctgagacggcaaccgaagtattctggtgttccttctggggctgggtccacagcccccggaattcagtcaaacaattgctattaaaatcactaatagaattatcttccgaaggctagctgtcctttccagacgaaaagaaatattccaagtctaagacttttgctttcttccttccagggagaatacattcccccaagggagctctctgcggcggcgcgggcgggggcgctgcgaggccgctgcggggcggtggggggcgctgcgggcgggggcactgcagcaccgcggccctcgggcggccggcgcggcctgctggagggggcgctgtgggcaccgcgcagcggccttttgtcagcgc

SEQ ID NO: 3470 - DNA, 545 bp, Homo sapiens
  source 1..545: mol_type = other DNA
gtgcgggtcccgattgccggggacgggaaacgcggctaggcaggaggcgaggaagcaccccggccgccctgcagagccggggccttttctccccgcggagcgcgggagaaacggggaccgcttcggtcccattcgctgctttggagcagggccgcgggctgtccccttacctcgcaccagtatgcggcggcagtggtctgcctcgccgggcccgggctgcccgtcgctgtcggctccactctccctggagcctgcgggactggaggctgaggtcccggccacctccgttgggctgtggccaccgccatcccgctccgctgcggtctccgcagcgcccaccgccgccaccagactccgcccggcgcgcggggccccggtcgcgctcggcgcccccatcgcccatgctgactacggcggagccagcctacgctggccgggagcgccgctccccgcccctcgcgcccccgctgattgggcgggagtcaggtttccaagactcccagctgcgccggggctccgcgccagggggagagggggaggggagc

SEQ ID NO: 3471 - DNA, 417 bp, Homo sapiens
  source 1..417: mol_type = other DNA
ctttacctctcctcagcctcggagaaggcgggacccgtgcggtcccctgtgacggcctcagacctgcggggaacccaggactttgccgcactctcccccggggatgcgggtgacttgccttgctcttccaggagggccgggggagggggtcctcgggttggcgcactgagcctaggcctgcgcccccgcctgccggagcgcagcggctgcgcttccgttcctcagggccgccccagtctccctctgccgggcttggagcagggctagactaggggtggagcgggaccaccgctcccctccccctctccccctggcgcggagccccggcgcagctgggagtcttggaaacctgactcccgcccaatcagcgggggcgcgaggggcggggagcggcgctcccggccagcgtaggctggc

SEQ ID NO: 3472 - DNA, 383 bp, Homo sapiens
  source 1..383: mol_type = other DNA
ctcttagtttcatgacatgaagagagagttagtttgatttataactccaggtatttagttatacaatacagggcatctttctgacctgggctggaaaggtcagggcaggcctgccattctcacccaggtctgtgggttgagacacaggctcagcttttgggggctcacagcccagtgagagaggcctctcctaaagggaatcttggctgaattctctacagagaagaaggaaaaagccagccctcccctcttcccttcggtgacgggggcccctcccagacctgcacagcttggtgtggggaaagcttgggagccagagccccaggcttccttgtttactgtcaacctagatgcaggggaaggctgagcagctctctccagct

SEQ ID NO: 3473 - DNA, 502 bp, Homo sapiens
  source 1..502: mol_type = other DNA
cccaccaaaggccatgagccagtggtgctcagtgggacaggggtcagctccgactctgcagatctgccgccaggcggggcattaccatgacgacaacttcgccatcgtctttgcagccatgggggtgaggaggctgtgagcaggcagcctgtctccctcagcccctggccctgatctgatgggggccagtcccggccagccgggccatgtgtccctcagggtgtcccaaaggcaatcacatctcagcctctccagggggatctgacaaggccctatgaggactggggcagcaaacccagtgcctgccctttccagccccggggtcaccccatggccttggtgtacccccagcgcggtcagtccacaggctttcctgaggacacctgggaggggccaggccttgccctcaggccacagggccctacctccagcaggtgaacatggagacagccagattcttcaagtctgactttgagcagaatggaaccatggggaacgtctg

SEQ ID NO: 3474 - DNA, 462 bp, Homo sapiens
  source 1..462: mol_type = other DNA
gtccgccagaccagggtccgccagaccacggtccacttggtaaccggcgtcttcccagacgctgtccggacataacagaaggctcgcacttagagcgaggattattacaatattggaataaagagtaattgctacaaactaatgattaacgatattcatatataatcacgtctatgatctagatctagatctagtataactcttgttgttttgtatattagactgctgatgtgcagcgcacccgcttcactgcaggtgaataaccttcctggaaggcagtctgcttcaatggcacatccattatcgtaatataatgctattaaatacaaaaaatagtcatgatatgcatatatattgcaataaaccatgatttctaatttttaatttccacattgaatatttctgttttctacttattagtttgataatcggaaacaaaagccaagtgtctttgttgtttgt

SEQ ID NO: 3475 - DNA, 356 bp, Homo sapiens
  source 1..356: mol_type = other DNA
cgtgttcacacacataagatatactgacccccatgcaggcaggatgtggggggcaggagagtcaggcccctgggcctctatgccagagtcgggaaggcacctcctccttggggggctcagcttggctcagatctgatgcttcaagaggctgtaacctcaggcagagcctgcttagccaggaggccgaggtccctcagtcccttccaaggtgggtcaggaggttctggccccgctggggcaggcagggcagggtggccatggggaggggccatggcttggcatgtccaacagaaatagtttttgctgttgaacggtgatttctgtccaagtgcagatttataggcagcctcactgtc

SEQ ID NO: 3476 - DNA, 373 bp, Homo sapiens
  source 1..373: mol_type = other DNA
ctaaaagagtttttccaaaagatcttgtgggcagccctagagtgtggctaggcatagcagaacttaaactcagttacacaccaaggaggggtggctgtgtgtgtgtgtgtcacaccgggcaggatgaggagggaccccctcccccagaatgtggagtagagcctcttagtgtgggagaaaaacgaggttcatcgtcatgatgctttggattatgtaacatagaagtctcacttttataacatgcaaagagccttcttctaattttactcagaatgccctgtgcagtgggcaggtgctactctgagttgagtgtaaagtcaggcctaagactccatggaggctcccaacttctgagggccttttgaagttaaaa

SEQ ID NO: 3477 - DNA, 583 bp, Homo sapiens
  source 1..583: mol_type = other DNA
gaccattgtgaataatgctatgaatattggtatacaaattagaattgctaaatcagtaattgttttttttaggaatacgtatttttatgcaggaaaaatatgattctgaaataagcctactagactcttgttctagtcaggtgcccctcaggaaccctcccagagccagcgcctagcggacgccctgcgtgcccggcaaggggtgaggcggaggatgaaggtgcatgacccagggcaacttcctttggccccggaattcaataattttgtccctatcacctgcgatagcaagagacagcaacctgccgggaggcagggaggttgctggggcgcggtcgggcggccctgtccggccctggaccacctccaggctggtacgggagtgcacagggagggactggaggctgcactccgagccccagtatgggcggctgcagcggtctgcattcattcccctcagtggagcgggggatcctggcggggcagcggcggttggccctcctctccggcgggcggcgctagcgcgagcctggccccgggcagcgctagggccgggctcctctcggcggcggcgcaccgtcgt

SEQ ID NO: 3478 - DNA, 502 bp, Homo sapiens
  source 1..502: mol_type = other DNA
aattaaggctagataatattccattgtctgaccattgtgaataatgctatgaatattggtatacaaattagaattgctaaatcagtaattgttttttttaggaatacgtatttttatgcaggaaaaatatgattctgaaataagcctactagactcttgttctagtcaggtgcccctcaggaaccctcccagagccagcgcctagcggacgccctgcgtgcccggcaaggggtgaggcggaggatgaaggtgcatgacccagggcaacttcctttggccccggaattcaataattttgtccctatcacctgcgatagcaagagacagcaacctgccgggaggcagggaggttgctggggcgcggtcgggcggccctgtccggccctggaccacctccaggctggtacgggagtgcacagggagggactggaggctgcactccgagccccagtatgggcggctgcagcggtctgcattcattcccctcagtggagcgggggat

SEQ ID NO: 3479 - DNA, 474 bp, Homo sapiens
  source 1..474: mol_type = other DNA
ttctaaaaatgtgtatgttggatattccagctccctctattatattctccatctgatatagaatatatgatatatattctataaatgaatacatgatacagagtctatcatgtagtgatttactttttacttttgtgaattacaacgtggtataggaaatgagaaagcttaaaaagcctaattgcagctaaccgccctcctggcccgcgaagctgctccttgagggcccaaaggaggagccagaggaggccctcaggagccacagctcagggatcccattccctttcccgacgcagcgcaaggaaggggagcggaaggctccctcctcagggctgccgggaccgcctcgaggacgagcgcagggcaacaatctgagcgagtgttcgtgtgtgcccgtgtactcgccatcgcgtgttacaggtccatgggcgcaggtccctgagcccacagcttcgcgggggtctggccgagcat

SEQ ID NO: 3480 - DNA, 474 bp, Homo sapiens
  source 1..474: mol_type = other DNA
gcagctaaccgccctcctggcccgcgaagctgctccttgagggcccaaaggaggagccagaggaggccctcaggagccacagctcagggatcccattccctttcccgacgcagcgcaaggaaggggagcggaaggctccctcctcagggctgccgggaccgcctcgaggacgagcgcagggcaacaatctgagcgagtgttcgtgtgtgcccgtgtactcgccatcgcgtgttacaggtccatgggcgcaggtccctgagcccacagcttcgcgggggtctggccgagcatactgccagcaacttccgggcgtttacaggcaggcaggtcaccagggacgggaggggccgctgcggaccgcagtcgctccacctggaggactgagggacgcagccatccccggctcctaccggcgccccgccccgcgcatgcgcacgcgcacagggagtcagctggctgcgcgggaggtcacgg

SEQ ID NO: 3481 - DNA, 473 bp, Homo sapiens
  source 1..473: mol_type = other DNA
atataaacatggaagttctatttcgtactttcgtatgctaagcgctaagtgctttgagagcacagagtgatttcagtaacactcaactgagagatccatctatacaaattttaacagtttttaaaattttgatagcctaggaaagcataaactctgaaatttggggaaaagcgattttacgtttccccggaggcctgcaacccgcgtccacgtgagaccccggtcgcaccccgagcccgggatctgcgcacttacgtgaggaagcactcgggccgacccgtggcttccccaccgctccagggtccgtcgacgccagacctgcggcgccagcgcccagcgcaacttggatttcagagccgaaagttccgcggcgcacaggttccggactcgccctcagccagagccaatggcagcgcgagcgctttctttctgttttagctaaagtaggcccgttgtagcaggaaagcagcgac

SEQ ID NO: 3482 - DNA, 339 bp, Homo sapiens
  source 1..339: mol_type = other DNA
gaataaacgtgacaattattacagttatttctgtcataactgattctatgtacatattttaaaaaaaatgaattttatctgtgtacgcgataaatatattagtgcacgtggaaagttcccaacagaaagctggtcacccctgacctgccgggcaagttccctcgctggtggcgcttctggaaggcaccctctgcctaagtgacagcagctgctgtggaacgcgcccccgggggaggagtgctttggccacgccgaggcctcctcgctccctgtcccatggcgaaggtcgccggtgcccggtattcacctacggcattcgcggctgcagccttcagcacc

SEQ ID NO: 3483 - DNA, 404 bp, Homo sapiens
  source 1..404: mol_type = other DNA
tgtgtacgcgataaatatattagtgcacgtggaaagttcccaacagaaagctggtcacccctgacctgccgggcaagttccctcgctggtggcgcttctggaaggcaccctctgcctaagtgacagcagctgctgtggaacgcgcccccgggggaggagtgctttggccacgccgaggcctcctcgctccctgtcccatggcgaaggtcgccggtgcccggtattcacctacggcattcgcggctgcagccttcagcaccgtcgctgctttcctgctacaacgggcctactttagctaaaacagaaagaaagcgctcgcgctgccattggctctggctgagggcgagtccggaacctgtgcgccgcggaactttcggctctgaaatccaagttgcgctgggcgc

SEQ ID NO: 3484 - DNA, 403 bp, Homo sapiens
  source 1..403: mol_type = other DNA
ataaagttttattttaatttccagattggagtgcagtggtgcgatcttggctcactgcaacctctttcaagtgattctcctgcctcagcctcccgagtagctgggactggtctagatccgcccgtctcggcctcccagagtggtttaaagcactcaagaagtgtttctagaaacgtggaagcatccgtctgcttcctcaggctgacaggcaaaactcggtggcagtggcttccagctcagccaacaaacccagagtgcggcgccttggtctcctcccccacgagtgggccgggcgcatccttggcccactgaaacttctgagggagtgcattctaggtgaccgaacatcttctttggcccaatagacgaatggggcggtgcccggcaaccaatggcttgggtt

SEQ ID NO: 3485 - DNA, 307 bp, Homo sapiens
  source 1..307: mol_type = other DNA
aactgcacgttctgcacatgtactcctgaacttaaaagttgaagaaaaaaagaaaatgaacgtgcattgttctccattcacaacaaggctttttttttttttaaggcctcacagaccttctatttgaggaatgtgctcccccaatcccagaccgctcctggtggggcgggcgcgagcgcaggaccgcggagcctgctgcgttgctcggctgcaggggaggagctgggccccgcccccggcttcccgcgctccgcgtccattggctggcctcgggggtgggcgggtcccgccgcacggagtcctgcgc

SEQ ID NO: 3486 - DNA, 475 bp, Homo sapiens
  source 1..475: mol_type = other DNA
ttttcatattggtgtaataaaacattgcataacacagttctttaacgtctgtcatcccaaggttttccatgggtaaaatggagattacaaatatctaacacagatagggctttttattgtgaaatgacaaaaggattttcagtagctatgacaaagcattatattaacgtgctaggcgcgaatataacctgttataatataatgttgttattattatttgagatgggctggagtgcagtggtgcaatccagcaccccctagtagctgggactacaggcgctataatgttattattgaaggcacaaatgatcagaaagagtgaagacggcgctggagtttttttttcgccgccaccacgcgggagcgccccttccgggagcccgctccgcccggctcttctcgggcttcgggcgagcgcggtgccagcggtacgcaggcgccgggagcctacgagggctcgcaggagctgggaggc

SEQ ID NO: 3487 - DNA, 598 bp, Homo sapiens
  source 1..598: mol_type = other DNA
gcccatcctgccctgggtgtgtctactgcccccaggggctgctgtgggagttttgctgacagctgcacacccatccaactggccctctttagagggtgagtcaacaggctgccagaacctaaaaaaaagttgagtttatatcttttttattaaaaagaaactccctttctcactattatagtagaatatctagtacattcatatgacagacaattatatagctattgaaaatagtgtttatgaataattgtttaatgatgtaagatgttacatgaaatgcattctacactcagatatataataaatactgcaatttacatgtgtgtatacattccaaatgttaatatactattttttcagaaccagttgttttaaaatggcatgtgttgcttttaaagccagaaaaagtaaggcagcgcttaagaggcctccccaggatcccccgtcctaccccgggcggtcgggttgagttctggactgctccaatccccgaggcggaaggagaggagccgagcctttctcctgtccaagagcgagatctgggctacgccgggcgcccggagccctagtccagcccccggccatcgcggccgccgcc

SEQ ID NO: 3488 - DNA, 582 bp, Homo sapiens
  source 1..582: mol_type = other DNA
tgagtttatatcttttttattaaaaagaaactccctttctcactattatagtagaatatctagtacattcatatgacagacaattatatagctattgaaaatagtgtttatgaataattgtttaatgatgtaagatgttacatgaaatgcattctacactcagatatataataaatactgcaatttacatgtgtgtatacattccaaatgttaatatactattttttcagaaccagttgttttaaaatggcatgtgttgcttttaaagccagaaaaagtaaggcagcgcttaagaggcctccccaggatcccccgtcctaccccgggcggtcgggttgagttctggactgctccaatccccgaggcggaaggagaggagccgagcctttctcctgtccaagagcgagatctgggctacgccgggcgcccggagccctagtccagcccccggccatcgcggccgccgcccagaagcccctgttctcggaacgccggctgacaagcggggtgagcgcagccggggcggggacccagcctagcccactggagcagccgggggtggcccgttcccctttaagagca

SEQ ID NO: 3489 - DNA, 592 bp, Homo sapiens
  source 1..592: mol_type = other DNA
caccgttcatggcttacaccttgaacagctttccactgtggagaggggacagaatgggccgcagctggaccctagttctccgatttgaatacagatctctgcctccagagatgagtgactcgacaccgctgcggagaaggctccgaggagggttggtggggactcgaacctcggagtctctcccgacccgggggtcccgggagaggaccggctccctggcgcagatcaggcggggggctcggggtgcacggcacgctccgcacactccccctcgagcgcacagggcggctgccaagtcggcaccggtgcgcaccgggcccgggatccctggctggtgtggagccttggtcaccggaggcccccgcggagcaggccccacggcgccttgtgcgctctcggaggccgagctgcgcgcccgcgtcagcggcgcctcgttcctggccgggagctgggacccgcggagctagggaccagcacccccacaggcgcccgtctgacccctgtccctccccgcccgccgcgggcagggcggatctgggtaggggccggagggggagggtccgcccagcgggtgtccggtgtcctccctgca

SEQ ID NO: 3490 - DNA, 440 bp, Homo sapiens
  source 1..440: mol_type = other DNA
gagccgagagaccgcgtcccgggacggactgcccctcccgcccgctgccgccgccgccgccgccgccgccgccgccgccgccccatcgcccgcccggggctctgtcgccggctgcgtcccgtcccggccgcggcccgccggctccgcacccgcgctcgggccgcagcgcccgcctcgccgcctcgcccgccgctcctgcctcgggggtgctgcggcggctctggggctcgagcgcgccgccccgggcagcccagggacctcgcccccaaagtttctgggttcgttggaatttttggagcaggggaaggggcttacgagagagaggctccctctggacaaagttttccaaagttcggctggaggtgccaggacccccggccgcagcctcccctcccctcgggccctcccctcccccgccgcggccggcacagccaatcccc

SEQ ID NO: 3491 - DNA, 361 bp, Homo sapiens
  source 1..361: mol_type = other DNA
tttaaaaagagccgagagaccgcgtcccgggacggactgcccctcccgcccgctgccgccgccgccgccgccgccgccgccgccgccgccccatcgcccgcccggggctctgtcgccggctgcgtcccgtcccggccgcggcccgccggctccgcacccgcgctcgggccgcagcgcccgcctcgccgcctcgcccgccgctcctgcctcgggggtgctgcggcggctctggggctcgagcgcgccgccccgggcagcccagggacctcgcccccaaagtttctgggttcgttggaatttttggagcaggggaaggggcttacgagagagaggctccctctggacaaagttttccaaagtt

SEQ ID NO: 3492 - DNA, 546 bp, Homo sapiens
  source 1..546: mol_type = other DNA
gcactaagcgagtgcgcaccgtgtgtgtgcgcgcgcggcgctgggctcagcgagacggctacaagtgggtcccgggcgggctgcgggcggcgggcggcgggcggccggggcggggcgggaggccgggctgcgctctccagctccggccgcgggcccggcctctcaccacgcctccggctttgtgagcgcgcgggttggggcgggggggtgctggcggggcgcccacggcgcagcctcccgcctctttaaaaagagccgagagaccgcgtcccgggacggactgcccctcccgcccgctgccgccgccgccgccgccgccgccgccgccgccgccccatcgcccgcccggggctctgtcgccggctgcgtcccgtcccggccgcggcccgccggctccgcacccgcgctcgggccgcagcgcccgcctcgccgcctcgcccgccgctcctgcctcgggggtgctgcggcggctctggggctcgagcgcgccgccccgggcagcccagggacctcgcccccaaagtttctgggttcgttggaattttt

SEQ ID NO: 3493 - DNA, 431 bp, Homo sapiens
  source 1..431: mol_type = other DNA
acgtcgggccgacgcaaggccacgcgcgcgaacacacaggtgcggccccgggccacacgcacaccgtacacaggcacgcgcgccgggccctctgctgccagcgctgagaaggtggccgtgctcaccggggccgccgcgtttgtccccgcgcaggacacttgccggaccagtatcggggttccccgacgctgcgcagagtcagcagcctgggacgctgctcaggggtccctggagataagagccagcgggatcccgggggttggaagctcgggaccctaaggcacagttcgagggctttgggcgcctgccagtcgagggggcagtccggccaggacctccgctgccggggcttcggcccaggagggactgctcgggcactaagcgagtgcgcaccgtgtgtgtgcgcgcgcggcgctgggctcagcgagacg

SEQ ID NO: 3494 - DNA, 327 bp, Homo sapiens
  source 1..327: mol_type = other DNA
ccactgcactccagcctgttacgtaaaaactcaagcaatgattaataaatccgatttttaaattgtaactgatgagttcatgaaatgcagatgcctggatcagaatctccagatgtatgactgtcagtcagtctgtattaaaaaaaaatggtgcagttggttgttggatcagtggaaccattagaacacaaaagaagagatctctgaactccattatcggaactggcttagacattaagttagtttacgcactgtcgttaactgtttttgcttacagtgggctttttgcggattccatgtatgaatgaatggaatccaacctagcat

SEQ ID NO: 3495 - DNA, 402 bp, Homo sapiens
  source 1..402: mol_type = other DNA
gggcccctgtgtgctctgcttccaggccaaaccgaatggcggatcttggtaagtgacctctcagaggaggcttccctggcatgggaggaggctgtgccccagcttgtctgattcagcctgtgccaaaatgaacagtgttccttttaaaaatcaacaatcttgcaatttctgggatctgtgagatagccttcaagaaaatgcacttcagtcctttgtcactgagtgtaatttgataaactgagcagaaacacacctttcaaaaactgttactgccagatggacgtttaagcacgagcacatgcctgtgtggggccctggccctggggtcctgggacgaatgccctcccagctcctagagttgcaaccgcccagtaggcggtgccagggcaggtttcaaagggc

SEQ ID NO: 3496 - DNA, 458 bp, Homo sapiens
  source 1..458: mol_type = other DNA
tgggctaagttatcagaggttacttaaactctaaagagattcgttttttaaaaactgacacacaatatttggacatatgtatatacacaatggtcctagaaaaaaaaaaatgtggatttttctgaagcacctgcctggaggtacagacagatgattgcgcaaacttgaagtttgccactgtggtagcattcagggtgttcactggccacgaccagggacgcccagcacccagtgcagggcctgccctggaagaggcatgcgtcccagccggaggctgagcttgcggtagggctttccgtgtgggccgcgcctgccggccctcgggaaccagatcccaagggaaccagcacccctgggcgctcgcggcccgaagcctgaggttcccgccccgccccggcagggcggccccgccgacacccgtagcggtcccgccccccgcggccgcaccgcctcctgcc

SEQ ID NO: 3497 - DNA, 552 bp, Homo sapiens
  source 1..552: mol_type = other DNA
ccgcggttccgcggcgtctccgaggccctgacctggtccggcccgccgacacttgagcccccagagcctcagagaaggcgaggggtgccgaggcccgccgtcctggtccaagccggtcgcggcaccgtgtctgggcactggagctgcttccagccccgcgaacagctggagggtggcagtgggaccgctccggcggcttctcccgcgcagtgccccgcctggccccttgtgaagggagtgagcgtcccctttccagagctcttcagaccgcggccgagagctggttttcgggaaaaccaatgtgttggaccccaaacatggatccaagttctctgagaagaggggagggttggagtttagccccaagcccttcggacgccttctcccgcgtgggttgagacggcggcacggccaccagactcaggaggcctggatctccccgcgaaggctccagtcccgccccgccccgccccccaccttggggcaggtgagcggcggccaatgggcgagcgcggggcaggtgcccgctaactcgcgcctcgcagcgctggg

SEQ ID NO: 3498 - DNA, 185 bp, Homo sapiens
  source 1..185: mol_type = other DNA
ttctaagcaaagttttcatggggattgaacatgtcaatttcccagcgtagcatgagcacctactaaatgttgatcctctgttttatagaggatgaaacccattcgatggtggcagcctcagaactggcatgggcccctgctgtgtgtcaggcccgaggaaagtgtctagtgtcccagggctctgt

SEQ ID NO: 3499 - DNA, 298 bp, Homo sapiens
  source 1..298: mol_type = other DNA
atcacactgcttatatgcatttcataaaattttaagcattattccatgtcataaatgtttgaaaacatagttttaaaggctgcatagtattcagtcatatgaatggaccatcatttatttaaccatccatgaatatgtatgtacacctgaccagatctttgaacatcttggattgtttccttagactacattctcagatcctccactgtcagctttgcccagctggcttagtccccagggcagaaggcccagcagccgggttcttttccacggcccctgctctggggcaaggttgggg

SEQ ID NO: 3500 - DNA, 373 bp, Homo sapiens
  source 1..373: mol_type = other DNA
tcctcctgcccaggaattaggcccaggagggatcttccttggttggccagacaaggtgccctgtgaactttacagtaagaaagactgtccagaacagtgctgggtgccacggagcctctgaaagccggcgaagatttagtcttccggtgttcaggggtcgggaggcgggcaggccccagcatgctcccccaggttcccccttgaatgggacccttctgcgctgcctggccccaggagcgacgcccacggcacgtcgtacaggaacacctttcctggactgccgaccttgcaccttgcaacgcggacagcgggcaccgagacctctccggacggccgcaactctccgcagtctacggttgtaagcgccgcgacg

SEQ ID NO: 3501 - DNA, 357 bp, Homo sapiens
  source 1..357: mol_type = other DNA
ctccagtccctggaggggcttctagtattactggggaccacgctgcctgtttgtctgtgagttacgggcaaccagcccgagcaagaagcagccatgtcctgagtctgcttcagtctggacctcgacctttccacgagtgtcacatgggaaacctccaatgtgtaggtccctccaggctggaaaccctggatgtcgacctctcggatggctctctcagggccctgggaatgggaatggacagcactgctgtgggctgttcccctcgctgggcaggcgggcaggcaggcctggggctgccctgctcactctgccatactagaccagtcagcttgcctggaagagggaggtcccactagc

SEQ ID NO: 3502 - DNA, 704 bp, Homo sapiens
  source 1..704: mol_type = other DNA
tcaccccacagagttgctctgaggatgaaattcagcatctataattactaaacatcgttattatcaataataaaccaagtatacgttaatacttaggacacagtaggcacttaataatgggtggaagtagttatttaacccgtgaacacttaaatattgatgtggttactcactcggctctccgccgcagagtctgaggagggtgagccccgctctcgggcctcccgcgccgccgcatggccgcatcccggccccctgcgccgggagagattggaggcggcggcagctcacccgcttccaggtcgccgatgcgggaccgtcacgtggcggggcggcaatcgctctttcactccggcattttcccccgcaggggcggactggaggggggcggcccggggtcaggggagcggcgggggtccccatcaccccaagtccgcatcccaggaactgcgggccgggacccttttacggagagggcgtagggctccccacaagcgaggccgggttgcttcgggcgcccccagccaggggcggggccaccgcgggaactccgcccaccctctgcagaggccgcgcaccgccccttcccgctccgggctggtctgcggctgccggggcgcgagctgcgtgcccgcatccctgtcgcaccgcctcgccggttggggcggcgggcgcggggcggggcagggggcggggcgctgacg

SEQ ID NO: 3503 - DNA, 282 bp, Homo sapiens
  source 1..282: mol_type = other DNA
acagtgtgtgcatatgcacactcacttctgtatccagtttcagaggttctcagatctgaggtcccctcaagtccaccctgacctttggcaggactgttctgtcaggctgagagctagacaggataggagtaagttggccttctgctgtcccactctgggtccaaagagcgctttactcagtgaagacaggccactgtgtggacaggggttgcactgagccgagatcgcgccactgcacaccctcaggggcactctcgccgggggcgggaccagaagggggtg

SEQ ID NO: 3504 - DNA, 374 bp, Homo sapiens
  source 1..374: mol_type = other DNA
catctttttatagaataatttgtgtatgccaaggctggcattttgtcataaactctgctgtgttttcacaggacagttactgaaagaagcctgctgccgctgggaaggaagcctgccctgccacctggtggtgagtgagggcacggcccccagctgctctcgggccctgacaccgggctgcaggcttgaggggacccaggaaggttgcaagcttgaggagaggcagggtcagtttcaagaacctttctctgtccctgccaactatctatctatctataattatttgatagataattgtggcttgatccccgggagctggaggctgccgtgagccgagatcgccacagtgtgtgcatatgcacactcacttctgt

SEQ ID NO: 3505 - DNA, 357 bp, Homo sapiens
  source 1..357: mol_type = other DNA
cattaaagagggcgttggtcctattaaggccagtgtcacagttacatagtcagtgtcaacgggacgagcgtgggaagctgcccccaatgcccagaggctcctcgtggatggcgtgcgccaggccgcggccccagcgcctatccacggtgagcgcgcaagcgttggtggcactgggcggaagaccccctggcgcaagacgagtgccttcccgtgaagaccgcaagggttaacggcctcgactatcgacagctgaagtcctccctggcccgcccaccgccagcgaggacccggagagtatgctggggcggtgagcctcgttcccgtcgtccagcccgcggcgagagcgggtatgtgggc

SEQ ID NO: 3506 - DNA, 286 bp, Homo sapiens
  source 1..286: mol_type = other DNA
gtgtagctccagagccttactctcaactgctgtactatgctgcctctgcacagaagatgaagataatttccttctacacccacgggtatctaagctacaaggagcactttaggtggctccaggactcactagaaaagcctttctaccagggcctggtacattcagtaggcactaaagacgcgtttatttaatgactgagcgaatgagtgaatgagaacatagtgagtccctaggcgggcacaatatgaggtccccaatgtgcccggcactcgtttcacgcaagtcc

SEQ ID NO: 3507 - DNA, 348 bp, Homo sapiens
  source 1..348: mol_type = other DNA
ccgccccagcatactctccgggtcctcgctggcggtgggcgggccagggaggacttcagctgtcgatagtcgaggccgttaacccttgcggtcttcacgggaaggcactcgtcttgcgccagggggtcttccgcccagtgccaccaacgcttgcgcgctcaccgtggataggcgctggggccgcggcctggcgcacgccatccacgaggagcctctgggcattgggggcagcttcccacgctcgtcccgttgacactgactatgtaactgtgacactggccttaataggaccaacgccctctttaatgtcggtggtaacgaaccatagagtagcggaagtggtccgtt

SEQ ID NO: 3508 - DNA, 445 bp, Homo sapiens
  source 1..445: mol_type = other DNA
catggtaccaatagttatgaaaataagcatgcatgttctttccaaggatttttacactcattttaagtatacagcttgatgattgtttaaatatgtacacaactgtataacccagctggggacctctatgctgacttcattgcaacataatattggatggactcatatcatgaatagacagtttaaccgttctacccaggttggaaccattataaataaaagctcgcacaggtgccagagcaggccagcctcctctgggaggtctccccttttcctcatggctgggggatgagggctccgggctgggagccagggtgggagcagcgatgcctcctcgccccaggccgcgggcgccctgagccttcctgaccccgcagggggcctcgcccgcggtcccccatgagcgcgcccggctgaccggcggggcggccgcggtggagcccgc

SEQ ID NO: 3509 - DNA, 532 bp, Homo sapiens
  source 1..532: mol_type = other DNA
ggatgttgactccaacaacattggtataagtaaaaagttgggtcctcccttacaatggagtactatacagccttgaatgacaagatctttatgtcaggacatgacaatctctaagttatttcaagtgaaaaaataataataataataatattgcagaacaatgtgtatggttggatatacataaaattcttctgaaagaatacccaactgttaacaagtattacagtcctttttaatttaaattatttttcctagcacaaatttaaaaaaaaaaaacttaaataatctggtttttctctccacaggaaaggtgggaagcgcatctaccggacggtcggcccggtgaggcgcagcgccccagactggcgcatccgcggccccagcgctccacgcctggggagcgcgcgcgcacgcagcggcgcgagcctggcggcggcggcgacaaccacggcggcagggccggggcctcccaaaatggcagtggcccggggagtcggaagcccggagccagcgccgccgcagctatataagt

SEQ ID NO: 3510 - DNA, 451 bp, Homo sapiens
  source 1..451: mol_type = other DNA
ttctgcagaagacaatttgccagttgtctatcaaaattttacatatactttggcacatttatatatagtcaaggatgttgactccaacaacattggtataagtaaaaagttgggtcctcccttacaatggagtactatacagccttgaatgacaagatctttatgtcaggacatgacaatctctaagttatttcaagtgaaaaaataataataataataatattgcagaacaatgtgtatggttggatatacataaaattcttctgaaagaatacccaactgttaacaagtattacagtcctttttaatttaaattatttttcctagcacaaatttaaaaaaaaaaaacttaaataatctggtttttctctccacaggaaaggtgggaagcgcatctaccggacggtcggcccggtgaggcgcagcgccccagactggcgcatccgcggcc

SEQ ID NO: 3511 - DNA, 598 bp, Homo sapiens
  source 1..598: mol_type = other DNA
atcttaagtgaagcggtcaggaaatctttgtttttaaagcactccaaagtcattgaccaaaacatatgtactatcagtataaatatttgctctgttatggtctaggccagggcaattcctacactaacagaggacctgggatggcatactgagtcagccacttactaggtaagaaactttgggcaaattaatttttttagcctcagattcttcatacatgaaatagtaatacttgtctcacaggtgagcatctaatgagttattgtacaataaccaacctatcactaagacactttaggagatactcaacctttaaaactttataatttgcatgtgtgatctcttctctgtgcaggggcgaaactcgaccccaggtccttgcgcggggccctctgcgccccggaaggcgcccagtcccggttgagcttacagtacagttcgcaaggtcccggccggtgacggcggcgaggcggcaacgtcgcctgtagcaaccgccctaaggcgttcccgccgggcctcgcgcggcgtccctagcaacgcgcgcgcggtcttccggccccgcccaggcgggcggcactgcgcctaagctgggccacaa

SEQ ID NO: 3512 - DNA, 378 bp, Homo sapiens
  source 1..378: mol_type = other DNA
ccagctgctgacactgagaagcctggttgcacaaggtgttatctcagactgaggaaacaaaaaacattctgctgctttgggcctccccaacatctgcagtgcaaaatatttaacaacgggtgtggcacagcctctgacctgtcaagccgaatgtcaaccttgctcatggctgaaatgaccacacaactgttgactgaatcaatgaatgggtcagcgaggagaagcctagctgggaagggccttgttgccaagcaatgtgtacaccttccagaagggcaaggaacccaggcggttccagaccctgatgaccacaaagaggaatgcacactgggctccctgctgtgttacagcccagctctttgaccctagggttgatga

SEQ ID NO: 3513 - DNA, 424 bp, Homo sapiens
  source 1..424: mol_type = other DNA
tgaccagctgctgacactgagaagcctggttgcacaaggtgttatctcagactgaggaaacaaaaaacattctgctgcgtcagctccactcgggtacaagagcttgaaaacatctgcagtgcaaaatatttaacaacgggtgtggcacagcctctgaccacagccatgcctgtcagccgaatgtcaaccttgctcatggctgaaatgacgcacacacctgttgactgaatcaatgaatgggtgatgcttcagcatggagaagcctagctgggaagggccttgttgccaagtccttccagaagggcaaggaacccaggcggttccagacccattccctttgactataaaggggaatgcacactgggctccctgctgtgttacagcccagctctttgaccctagggttgatgaagcaatgaggcag

SEQ ID NO: 3514 - DNA, 253 bp, Homo sapiens
  source 1..253: mol_type = other DNA
gggtgccacacaggcagggacatatattcaatccttttaccttgggaggccaaggcgggtggatcacgaggtcaggtgatccagaccatcctagctacccagctgctcggcctgagtaacagagcaagactctgtcttttccttgtacaggaagaaactgaggtcgccggtgcaagttctccttcgcgtccgttgacgggacccaggttggggaggcgcgggaccatgggcggaagcacccctcctaccagga

SEQ ID NO: 3515 - DNA, 537 bp, Homo sapiens
  source 1..537: mol_type = other DNA
aatggtgtgatctcagctcaccgcatcccaaagtgctgggattatttcttttgtataattatatgagattttctggtcttgcttttgaaacaagttaatttaaatcctaatttttcaaatttgttgcatataccatgcttaaagtttttcacacttcataattaatttatgtatgttcgtttataaagtggaagcagatatctgttctcagtactaactgccagactttgggagagaaagtatttgtagaatagtattgcattttaattgaaatgtatttttttaatttagcttcataacagtattagccccattttataaagaacttagggaaataacaattaagtattttatctgcttaggtcacacaggtaggaaacagtagaatatatattattttgtaaatttataaatttaaaatattttatgaaaatataaatttaaaataaataaaaattattgtattaatcctagtaatggcttattactttttgttttgctttaagaaaattttcagagaatccttccccctggaga

SEQ ID NO: 3516 - DNA, 551 bp, Homo sapiens
  source 1..551: mol_type = other DNA
aaagtctgcaatcataattacttacagtttaatctggaatttagtactctattctattttccagatctaacgggtacacactctcagttattttttgtatttgctaaaacttaaatacattagggtaattaggtagtatctttccaaattttaagtttgtatgtgtttttccagacattctacttctaggaatttagatatagttgtatatatgtataaggatgttcacatttgttgaaaacaactaaaggtccattaatattgaactggctaaatacgttatggtacttttaattatgttactcataagcaagtaaattgcctatagccattaaaaatagaatctatgtatgcataaattgagataatcagtgtttaaggtatactgtagaatatgtacagttactccttttgtataaaaatagaggatatacatatatgtgaaagtaaatatgtatacaaaatatgcaaaagagggacttcccttctggctaaagagggcgctgtagccaccaaagtcctgtttacagggctacgccatcacgaccggc

SEQ ID NO: 3517 - DNA, 519 bp, Homo sapiens
  source 1..519: mol_type = other DNA
gggaggctcccaaattttgggaaagtgtcccccagagacttagacttttaaaccaaagcctaatgtttcacaaagtcttctgagacagaatgataagaggatgtatatggattcgtacagacacacatctacatgcagaacgtgccattctgtatttgatgcaccttgtcccggtagggcaggaacagtgtcgagattaaacgctttttttccaaatattttataggttttttgacattaaaacggtgagctatgatcacaccactgcactcctgtgacagcctgggtgacaccgtgtcttaaaaaaaaaaaaagttagacttatgttcttttctaagcaataaaattagtcttagatattgcctaatatctaagactaccaatttttgtgtagaatgtaatacaagctaaaaaatacattcgaaagacttcagcaatccctccttaaatgcaggagtattgtgagtgtgatgagggacaaatcaaaataattttaaaagcaaaccttagcttgctaat

SEQ ID NO: 3518 - DNA, 331 bp, Homo sapiens
  source 1..331: mol_type = other DNA
aggtcaggagctcgagaccagcctggccaacatagattgcaccaatgcactccagccctgtggaaaatcctacaggccaagagtcttgttaggtgtgcctctgaaagtctgcagatatttagagatggtgtcctgagaccctcagactggctcgtgccagacaaggatgatttggggacagtgcctgggcgtcccaggcagacccaggggccgcatgcagcagggcctgagagctgcatctggtctcagcaatgcaaaatttattgaaaaaaccaccttatatggtaatattgctaacacaccagctggccttttggactttgtttaaaga

SEQ ID NO: 3519 - DNA, 359 bp, Homo sapiens
  source 1..359: mol_type = other DNA
tggaagcaccatttgacaacattttgtaaatcattacttctgaccgaacatttatttacttattcaagacacaaactaagagatggggtgtaactgattatctaatttgttaatttagtcaataatatgccaggaaaaagttaaatttgtgtaaatcatcagattgagtcattttcctactttaaattccattttcttccgatattaaaataaaaaccaaatcccctcttaaaattacaatttctatttttaattttgtcttcagttataaaatttattttaaagttatacaaaaatgaagtggttggattgtggaattacgtcttttaaaatgttatttgtccaatgaacaaaaatgc

SEQ ID NO: 3520 - DNA, 759 bp, Homo sapiens
  source 1..759: mol_type = other DNA
ttagtcgccccacggccccctcgaggctgtccgaggccctcctgaaacgcgcccgttccccctcctctgggaggcagggcgggggtattttcgacgcgaaagaatcgagcgcggcggtggggtccacctggacagggcattcggccgtgacccctgcgagggtgccccttgccggccaggctgactcggcccccattgtcctgcctcggaatgagccagcggcagctgggacaggggggtcagtcgggcccggcgctcaggcctcccgggggcgccggggctgtcccggacagatctggcccgcagggaccgagcgaggctcggccgagggcctaggctggaaggtccgcgtgccccaccccgcctcgccggccccggctgcagccccgccggagggcgagggtggccaacccgaagggggcggccgcctcccgggagggccgaccgcgtgggtgggagccactgcaggtgcagagaagcggcggccgggccggagcctgccccaagccgctcgcaggccgccaccacccccctctcgcccggcccggggcccggccgggccggcggggctcggcggggccgcacgtgtgcgccctcccgggcgggggagtccccgggcgagcacgtgccgcggtgcgcggggggcggggagtcccgcggacgccttcattgctgctgctgctgccgccgcggccgccgctgcctcttcctctgcgccgtcccctcctcggcccgggcggggggctccgcgcgctgagc

SEQ ID NO: 3521 - DNA, 255 bp, Homo sapiens
  source 1..255: mol_type = other DNA
gactggtctgaagactccagaggcgggacgaatccacgcggtagcctcggagcttcctcagcttagaagctagactggggcggggccccgaggtcggcaggcgctgcagtgtcgatggcggggtggggccggagccaggcgaccggaggcctccggggcggggccgggaggctgacggcctccgggcggcagggggcggcctctcccacggcggcggctctcggtcccccgctccgcgtctttcgggcatacagt

SEQ ID NO: 3522 - DNA, 350 bp, Homo sapiens
  source 1..350: mol_type = other DNA
atttcagaaagaaactctctaatattaaagaactaaacatgatcatgctactgaactccagcctgggtgacagagtgaggctcagtctcaacaaaaaactaaaactacaggatttttgaactttgatttagataatttgatacctgtgcctaaggcagtcagaaaaaagtaaaaaatatatacagaggtaggtttgtgtgtatttatgaatcctagcacttcaccactgcctgagtgacaaagtgagaccctgtcacaaataaacaactttctactgttagataaccaaataattgtttcatatgtgtatttaatccaaaaactttatgtctgtggcaaagactattcta

SEQ ID NO: 3523 - DNA, 439 bp, Homo sapiens
  source 1..439: mol_type = other DNA
tggaccacttgaggtcaggagttcaagaccgagaccagcctggccagtgatcccagctactcgggaggctgaggcatgagaatcacttccgagattgcaccactgcattccagcctgggttacaaagtgagactcacacctgtgatcccagcattttgggatcccttgagctcaggagtccaatctctgcaaaaactttgagaacaggcacctgtggtctcagctactcgggaggctgagcacagtccaggctgcagtgaactgtgaactccacagattttatgctatgtgaatatatttcaagtaaaaattaaattaacaattttaaaaattgcaaggtccctgcataaccgccccttccgcaggaccgccatcctcgccacgcctccgggggagggaggtcctggcgcggggcgcgacaagtccctcccggcgcagc

SEQ ID NO: 3524 - DNA, 285 bp, Homo sapiens
  source 1..285: mol_type = other DNA
ttcagaataaagtataaatatgcttctgaatcagggttgcacatgcaacccgcagtggcgcgccttcagctcactgcagcctgtactgattttggaaaatggtgattttctaactccatctcatataattgttcaacgaatgaatgaatgaattgccgaggcttcagcgccttacagccggttggtcggctccacctggctcaacagacagccagtggcatgcggcagggaccaatgggtggcggagggaggcggggcctgccacgaggccgcagtataaccgcg

SEQ ID NO: 3525 - DNA, 225 bp, Homo sapiens
  source 1..225: mol_type = other DNA
gtactcagtcgtgggctctcagaaaacacctgccgagtggtgacacttggcatccagcaaccccactccacctttggggctgtgtggtggagaggaagggccctgctaggttcctctccagccagctctgccaccaaggctcctaaggaggccctggggcctttataaaggggctgcagagaggatcctgggctctcctagagaccacagctgcagacaaaagtg

SEQ ID NO: 3526 - DNA, 292 bp, Homo sapiens
  source 1..292: mol_type = other DNA
aatttcctatctgaaagagaatgctctccccactggactgttgagagttcacatgctgggtgcccagagacgctgcgcctatctttttcacttaaacaaaaatggaattaaaatcaccaagtacgcaaagtttttcttgcaaggtttaggcaaaagtcctgacatctttcctgaggattgtctgatttaaaagagctgattctccccaggcaaatgacttacctttgaaaacagaaaaatgaatgttacttttacagtggctatgaatagacaaagactttttggtttgaaa

SEQ ID NO: 3527 - DNA, 312 bp, Homo sapiens
  source 1..312: mol_type = other DNA
gcatgaaactatggtctgatattctggccccagcctggtctgaccctgggctggggcctgagcaatgcccaaatccaggggctttggcagctgcctggggaaatgtgaaaaagcccagccttgagcagagggcccctgctctcacccatgtggatcagggagctggttccagagcaaaagcagatgtctctgcaaagtgcctagttctttttggaaaccctttagagacaggctttaacctgtctacaaccaaagctctgcgcatgactggttgctaggtgactgaggagcagtggctccacccccatggag

SEQ ID NO: 3528 - DNA, 387 bp, Homo sapiens
  source 1..387: mol_type = other DNA
ggccgcagggaccctggtctctagcccatgatagatcattagaatgcataatctcattaaattaaacaattctaattataaaagtaatacatggttactgaagaatttttgtgaaatatcattgggtctgagatgctgggccttgtgctacaagaagaaagaagggctctctgcttttgactatgtgttttacaacctggccccttataacaaccataaagggtgaagggtgactatggcaacctttgccagcgggcagggcctgcctcctctggctcagtgtgagattgaaatccaggccctactcacatgaatttggaccctgagtccatttgaagtgtcacttgatgcttaagcgttgagttggcccaccaagtctagagcagc

SEQ ID NO: 3529 - DNA, 441 bp, Homo sapiens
  source 1..441: mol_type = other DNA
aatgagataggtaccatcatttacattctcactttaactctagatttcacacggctagtaaattgcagttaaattccagccctttgggaggccgaagcgattggatcgcttgagcccaggggttcgagaccagcccctgcagacccctccagtctagattaaaaacagaaaaaaaagaatttgaacctatgtctaaaattttaaaatgccattatgtaaatttgtattttacattcccatcataagcgcatgagaacgctattgttttaattagcagtttaacacttgcaaatacgccgaaagagggcaggcacagtgcgcgtgcgtcggtgcgcagttttcagtcagggctggacttcgacccagaacgcctctgggcctctgggccgaagggttctgggcggtcgcgagtcgggcagcccacgagggcggggagggcgg

SEQ ID NO: 3530 - DNA, 439 bp, Homo sapiens
  source 1..439: mol_type = other DNA
agcaactttatgaatttttcagtttgttttaaatctgagattaactgaaataaatataacattacaatagttatatttccagctctttattaacttaatccttctaacaacataatgagataggtaccatcatttacattctcactttaactctagatttcacacggctagtaaattgcagttaaattccagccctttgggaggccgaagcgattggatcgcttgagcccaggggttcgagaccagcccctgcagacccctccagtctagattaaaaacagaaaaaaaagaatttgaacctatgtctaaaattttaaaatgccattatgtaaatttgtattttacattcccatcataagcgcatgagaacgctattgttttaattagcagtttaacacttgcaaatacgccgaaagagggcaggcacagtgcgcgtgcg

SEQ ID NO: 3531 - DNA, 452 bp, Homo sapiens
  source 1..452: mol_type = other DNA
tagagcgcagtggcgcgatctcggctcactgagtagctgggatttcttgaactcctgagctcaggcaaagaccggcctctttattttaaaattgattggctcttaaacaatttgactttcaagtgcagtctctgaattatttaatatatttcttcctcttgaaattctcgaaatagatttttcatccatttaaatacatgtaagagacttactaaactcccgcgcggtgggcgggagcaagtaggggcactgggcggcccagagccagcccactggaactgaagctcaccgagccttcgtgcgccatcgccaacgcggtcgcagcaacgctggtgtttctgctgcatccgggccgcgtaagccaccagtcgcctgggcaaccacgggctcggggtcgctcgccccgcccacagttgccccggcaaccgcgccgcccgcggcacgttccggcc

SEQ ID NO: 3532 - DNA, 492 bp, Homo sapiens
  source 1..492: mol_type = other DNA
cttgggcatccccgggccaagggcggtgggcagctaggcgggccccaagcgctcggactcttggcctgggctcccgcttgccccccgactttaggccggggccgctgcagggcttttaactccttgcctaagaggagtccagccctagccacgcgttaacctgttggatccccacctgtaacgccctaagggctagggcgtccaagccttcccttccgggtctggaaagggttaagtgaggtgggccttcggctgggattccaggcctggcccgggccttctctgactcagatggacctggggagagggggcctttgtcgcgtccccttgcccccaagcgactgggcccgaggaacccgcgtggggccagcgcgaggcccgggaccagggggaggggcctgtgagctggggccgcccctgggattagcccggccttcggggacagctcggaggagctggggcggagccgcagggcctggcggccgccgagtg

SEQ ID NO: 3533 - DNA, 482 bp, Homo sapiens
  source 1..482: mol_type = other DNA
ccaccgcgcgcagctgctcgccttgtgccaggcactatgctgggtcttataggtaatcctcatagcaacttgaggagtggagataattacagtattcgctggggtttcacgacgtgtttaagcaccgccccatggccactaggcttaggcgactgggcaaggtcccagggcccgagcgcggcgatccctgagccacggggttttcagcgcccgggaagccaggcttgccaggttggggcggctggcggggcagggcttaggtaggcgctcgcgacccgcgcgggcagggagaacgcgctcccacagtgctcgcgaggtgcagtgcgcccctgggggctccggggccgtcgggccaggtcggcttggcgcccagggactggccggacgggctgggcctttggcgggggtggaagaggaggttgccgcgccctgcccggcccaggtgtcgtctccgggggcggggtttggagccccgcagcggg

SEQ ID NO: 3534 - DNA, 297 bp, Homo sapiens
  source 1..297: mol_type = other DNA
ttgcactccagcctgggtgacagagtgagactctgtcttaaattaaaataaataaataaataaataaataaaaataaaaaattatacatatttgtaatgctttttaagagatgctgggagctggtcaactcctgagctcaagagcgatcagtccccctgtgctaggattacaggcttgagccaccaccgcgcgcagctgctcgccttgtgccaggcactatgctgggtcttataggtaatcctcatagcaacttgaggagtggagataattacagtattcgctggggtttcacgacg

SEQ ID NO: 3535 - DNA, 383 bp, Homo sapiens
  source 1..383: mol_type = other DNA
ggaaatttacttttcttgtatcagcacatacaaacctacctgtttttatgtcttttttaaaatgaggtaaaatatacacgttttatacaaaattttcatcaggacacttagattgtttaaattctgtgtcaatctcattaattacttacaactcaacttttcttagcaattcatttattcatttccctacttatgaaaattgaagtttaaatacctaaactgcatctgctcttagggcacctagtgtatacattcaccaaacttgtgttcaataattgactcatcaggggaaagccctgcccatttgggctgtcccgacctcagagggtcgtttctcagggacgattttggacgcgaagcgtgccgcggggcggaaaaggcgt

SEQ ID NO: 3536 - DNA, 330 bp, Homo sapiens
  source 1..330: mol_type = other DNA
tttattcatttccctacttatgaaaattgaagtttaaatacctaaactgcatctgctcttagggcacctagtgtatacattcaccaaacttgtgttcaataattgactcatcaggggaaagccctgcccatttgggctgtcccgacctcagagggtcgtttctcagggacgattttggacgcgaagcgtgccgcggggcggaaaaggcgtggagcacctctggggctatggaggcccctgagccggtcttcagggcttcccctgtcgacaggctttccttccacaggagaagcccgccgggcccacgcagccgtcccctgccaagcctca

SEQ ID NO: 3537 - DNA, 271 bp, Homo sapiens
  source 1..271: mol_type = other DNA
caggggaaagccctgcccatttgggctgtcccgacctcagagggtcgtttctcagggacgattttggacgcgaagcgtgccgcggggcggaaaaggcgtggagcacctctggggctatggaggcccctgagccggtcttcagggcttcccctgtcgacaggctttccttccacaggagaagcccgccgggcccacgcagccgtcccctgccaagcctcattgttctagaagaccgaatggacactgtgacttcagggtcgctcattttaaa

SEQ ID NO: 3538 - DNA, 335 bp, Homo sapiens
  source 1..335: mol_type = other DNA
cgggcgcggaagcggcggctccaggcggcgcggcgggcagcctcaccaagactgcggcgaccagtgggcggggaggccgggggggcgcacggggcgagcggcggggagggcgggctgcggctccggcccccatggtgcgctactgcagcggagcacagggttcccacggcagtgtctcagcggccatccccctcaggcccgccgccgcgctgctcgctaccgcatcaacctgcagatgcggctgggggggcccgagggtcctggatccccccagaccagtctccggtatacacttgcgtcgatgcctggggcttggaaaccaccgcaaacaggct

SEQ ID NO: 3539 - DNA, 157 bp, Homo sapiens
  source 1..157: mol_type = other DNA
aagatgggccgggcagggaccatggcggtggcagcctggggggcacttcgggcgccgccatcccatggctgcagtggaagcttgcggtggctctccagtgaccagaggcatagtgaggtcccagggaggctccccacaatcgcgccctggatgccat

SEQ ID NO: 3540 - DNA, 251 bp, Homo sapiens
  source 1..251: mol_type = other DNA
cacaatcgcgccctggatgccatcctcctctatcctagggagcctgaggcccaggggtggctgagactgagattatctcagactgtctcctcatatatgcagagctgaaatctccctctctccaagctgaacttggttcacagggtgcctggggagagctgtgccctacctctgtgagagtggtcactgctgcggggagactggctgctgcacctactactggcatttccaggtcagggccccgcatgaaa

SEQ ID NO: 3541 - DNA, 187 bp, Homo sapiens
  source 1..187: mol_type = other DNA
tgtacaataaacatgtgttgaatttataaatatttagcatctgccttatgcctataattgatattgggtttggtcagatgatttcatccagtcagattatagtgaaatataagtgcaggctggtgctggagtgcagtgccatggggtgtcaagccgcaggcagcggttccggactctggacttccgg

SEQ ID NO: 3542 - DNA, 340 bp, Homo sapiens
  source 1..340: mol_type = other DNA
tgccttcctccgcctgggctaggaagcccagagctgcggttcgcaggcctgctaagcagccggcggccggaagtctatccgcaggcgacacttccgcctgcacgagttcttccggggcggaggtcaccatggcagctgccttgcaccgtaggaccttcctgcagacggtgagcagtgagaaggtccgctccactaatctcaactgctcagtgattgcggacgtgaggcatgacggctccgagccctgcgtggggagggaacagcgagcagcccgcgcgcccctaaggagacgggcatcgcctgattatgcgcggcgctcatctcgccttcgcctcccaca

SEQ ID NO: 3543 - DNA, 330 bp, Homo sapiens
  source 1..330: mol_type = other DNA
ccaggtgagggggctcacgcctgctcacgcctgtaatcccagcactttgggaggcctagaggggcggaacgcgcctgtagtcccagctactcaggaggctgaggcatgagaatcgcttgaacccgagattgcagtgagccgagatcgtaagtcctgggagctacatggagaaccacagaggcaaggacagtattaccctgtactgcccttcctattactattttcagtcatttactaatatttgccttcctccgcctgggctaggaagcccagagctgcggttcgcaggcctgctaagcagccggcggccggaagtctatccgcaggcga

SEQ ID NO: 3544 - DNA, 251 bp, Homo sapiens
  source 1..251: mol_type = other DNA
ggctggagtgcagtggcacgatcatggttcactgaaaccttgacctcccgcgggctaaattttttaaaaacatttttgtagagatggggggatcatcctcctgatcagggttcaaagaggcgtgttccttgcaaagtttgggtgcagcagcgacctccagtgggcagctgggccgtagagagggacagatgggctagagtcctccccactctaccaggtggacccaagaggggctgcctctgccctcctag

SEQ ID NO: 3545 - DNA, 527 bp, Homo sapiens
  source 1..527: mol_type = other DNA
cccgctcccccgtcaagaggcgggagggacgtgggactgcggcccctgggacgcgagttgggacgacaggcccgggctggcgggctcccggccgagagcgcgaagctgcatctcgacagcctccaggcactgggcggctagtccgatggggcgcgctagcagcagcggctcgagagtctccccagggccgattcgcagaaccgccccttgggaagggtgcagctgcaggtcgcggcaccactggggcaaggggctagggccgccggatggcgagccaggactcagggggcctggaggagctgctcccgctcgcgatgcagccgcagcaacaccgcccggagacgctgcagcgcgggagggatcgggccgccacctgcgggcccccgcctccaggccgcagcatcactcgtagtcctcgctcacatccgccggcgtcggccaccacggcgtcctccccagtgcccccgggttgcgccctcagcgggggcacgaagacgcctgggccatggagtccgggagtcgcgggg

SEQ ID NO: 3546 - DNA, 430 bp, Homo sapiens
  source 1..430: mol_type = other DNA
gtagccggcctgctgcacctaggtcccacccttgagcgggtgccacagtcggacactgggagacctccgcctctccgcgcggatgaagaggctgcagggtctccaaggttagcaaagcttccaaacgtttccaggcctccagcgggcgagtacctggcggccggggctgttctccaggagtttctgcgcgaaaagtttcctaggaaacgctcccgggggctttgcagggaccgagcagctgcgggagctggggagcagtctgactgggactccctggaaggccctgccattggggctgggctgccgaggccggagaccctgaggaccaagtcacgggacttgcccttggtgactcacgccttgaggccgagcagcgcggaaggcgctcaggccggatctggggtggggcccagccgagccttggtcttgt

SEQ ID NO: 3547 - DNA, 132 bp, Homo sapiens
  source 1..132: mol_type = other DNA
gtgtgattttttaaagaaaaatccaaagaattgcattatagttttataagtacttgggtagccggcctgctgcacctaggtcccacccttgagcgggtgccacagtcggacactgggagacctccgcctctc

SEQ ID NO: 3548 - DNA, 355 bp, Homo sapiens
  source 1..355: mol_type = other DNA
tccgcaggcgccgatgattaaatcatcatcattaaccagggcctgccccccccatccccggcagcaggggggagaatgggggaagccgggagagcccgaagctccgctacgggggcttcttcagcagggtcgtcgtcacagaagaccgacgacccccccccccccactccttaattacggattgagcaggggaggggcagtcccgccctgcaggcggcaccggaagtggccggctgctcaggggggccagattgcgatcgcgatgaggcttcggaagctaaaggacgggcggtggctggccgggcgcccagtgcgcctgcgcagagacagagtgcccagtgcgcctgcgtgaaac

SEQ ID NO: 3549 - DNA, 334 bp, Homo sapiens
  source 1..334: mol_type = other DNA
aaagtcccactttctccagaaagcttgtgtagagctctcgagcgagcaccccgcgtagtccccaagtgcgggactgggcctatgctactacaggcgctcgctgcctaagcctgtccgcaggcgccgatgattaaatcatcatcattaaccagggcctgccccccccatccccggcagcaggggggagaatgggggaagccgggagagcccgaagctccgctacgggggcttcttcagcagggtcgtcgtcacagaagaccgacgacccccccccccccactccttaattacggattgagcaggggaggggcagtcccgccctgcaggcggcacc

SEQ ID NO: 3550 - DNA, 443 bp, Homo sapiens
  source 1..443: mol_type = other DNA
cgcctttgggcggcctccgcctttgggctggcggctggggaacggcgcccggtgagctgcagttcctagaatttcgattttccaaaatccgtgtaaaacggacccccgggccaaatcaggccggcgggttcttggggctggcacttacccccggaccccaagtgcagtcacactcttcctcctcaacggcgggagggcgaaatctcgccacgggggacacgtgggacctcactgaggccttggttggatcctggcccgcttggtgaccttgtgacctctgcgtccttcccggggatgggacccccgcgggcgggcccctgagccttagacccgcccccgccgccgccctgcccggtgcaggccgcggtaatcgggttagctgggcaccttccccggcccgccccggcccccgggggggccctggcgcctctgagccggtgaga

SEQ ID NO: 3551 - DNA, 354 bp, Homo sapiens
  source 1..354: mol_type = other DNA
agtggcgcgatctcggaggcggagccaccgcgcctggcaggttactgaaggctggttcccaggggagatcaccctgccccaggcgccaggctgccagcccatctgctggggagaaaggggcaggtctttcccaggggatcctggagaatcactgagctgctcgttggtgcccacccgccaccgccaccgcagagcccagtctcaccggctcagaggcgccagggcccccccgggggccggggcgggccggggaaggtgcccagctaacccgattaccgcggcctgcaccgggcagggcggcggcgggggcgggtctaaggctcaggggcccgcccgcgggggtcccatccccgg

SEQ ID NO: 3552 - DNA, 349 bp, Homo sapiens
  source 1..349: mol_type = other DNA
aggtcacaaggtcaccaagcgggccaggatccaaccaaggcctcagtgaggtcccacgtgtcccccgtggcgagatttcgccctcccgccgttgaggaggaagagtgtgactgcacttggggtccgggggtaagtgccagccccaagaacccgccggcctgatttggcccgggggtccgttttacacggattttggaaaatcgaaattctaggaactgcagctcaccgggcgccgttccccagccgccagcccaaaggcggaggccgcccaaaggcggaggccaggcgcggtgagcatctccgctgactcagcggcccatgctcgggcccctcccgcgctgagcctggc

SEQ ID NO: 3553 - DNA, 305 bp, Homo sapiens
  source 1..305: mol_type = other DNA
ggaggcatctgacaccgtctgaggaggcctaagccagggccagggatgggaaatttccccttcaagcccccacagagaccaggggtctctgaacttgctcacatcgtaaaaactcaagggcccacaagcttgagaagcgcaggagcccctcccggccattggtggcctcttcctcagggaatagttgagtgactggggacaggggggccttcagctgggccccagggaaccgccccgtggcgctctcaggaccctgacactgtgatcccggagtccggagtcctcctgccgggccacgagcccta

SEQ ID NO: 3554 - DNA, 308 bp, Homo sapiens
  source 1..308: mol_type = other DNA
gtaaaaactcaagggcccacaagcttgagaagcgcaggagcccctcccggccattggtggcctcttcctcagggaatagttgagtgactggggacaggggggccttcagctgggccccagggaaccgccccgtggcgctctcaggaccctgacactgtgatcccggagtccggagtcctcctgccgggccacgagccctagcaccgcacacatggtccgcactacgaatgactgtgtggcctcgggccagacccagctctgacactccccgaacgcccgcgtcggcctgcggacgctgtctggcagcg

SEQ ID NO: 3555 - DNA, 466 bp, Homo sapiens
  source 1..466: mol_type = other DNA
cgggatccacagctgtgaccacggcctcatacgtgtcgatgggcgttggtgacgcccataggaggctctgacccctcctacggcaggtgctgtcttctccaccacatctgcgatgaagttgtactgaccgggctagggacggcggcgaggacggccggaggaccccgacccccgccccccagccacgcgcgcgaacgggttccagagttctctgaggcctcccgggtcctggtatctggggtcaccgcagtcagttgtgcccggggacccggggtcccagacgtcaggcatgctcggggttcagtgaccccaacagacaaccgggcccagagactgggggtcccataagtcactcgggcccgggggtcagaagttcctgacgtcagcagggcccggaggtcaggggtaaggctccagcctgcaccccgccccgccctcggcgcagccatcagctccgccttggctg

SEQ ID NO: 3556 - DNA, 655 bp, Homo sapiens
  source 1..655: mol_type = other DNA
aggaggctctgacccctcctacggcaggtgctgtcttctccaccacatctgcgatgaagttgtactgaccgggctagggacggcggcgaggacggccggaggaccccgacccccgccccccagccacgcgcgcgaacgggttccagagttctctgaggcctcccgggtcctggtatctggggtcaccgcagtcagttgtgcccggggacccggggtcccagacgtcaggcatgctcggggttcagtgaccccaacagacaaccgggcccagagactgggggtcccataagtcactcgggcccgggggtcagaagttcctgacgtcagcagggcccggaggtcaggggtaaggctccagcctgcaccccgccccgccctcggcgcagccatcagctccgccttggctgcctcctcgcccgccctactcagaggcggcacccaggacgcgagcaggggcgtaggacgcggggcacgccggtacctgaagtccttcagaagtgcacgccgggaccaggattccgggaggccgactcctccctgccccacgaatgccgggaattgtggtctccgcacggcccaaggggccgcggggtatgctgggaccgctagcccttccggcgcgcctcaggacttcgggtcccctcaccccgggcgg

SEQ ID NO: 3557 - DNA, 621 bp, Homo sapiens
  source 1..621: mol_type = other DNA
ggggacaggggggccttcagctgggccccagggaaccgccccgtggcgctctcaggaccctgacactgtgatcccggagtccggagtcctcctgccgggccacgagccctagcaccgcacacatggtccgcactacgaatgactgtgtggcctcgggccagacccagctctgacactccccgaacgcccgcgtcggcctgcggacgctgtctggcagcgcggccgagagcacgcggggatcggtctcttcccgccgggtctcttaccggtgcgagtcaaagagccgctccggccccggccctgagggaagctccataactgctgcttcaggagcgcccggccgtcgccgccgccgccattttcgcgcccggccgcaggggctcccgcccggggtgaggggacccgaagtcctgaggcgcgccggaagggctagcggtcccagcataccccgcggccccttgggccgtgcggagaccacaattcccggcattcgtggggcagggaggagtcggcctcccggaatcctggtcccggcgtgcacttctgaaggacttcaggtaccggcgtgccccgcgtcctacgcccctgctcgcgtcctgggtgccgcctctgagtagggcg

SEQ ID NO: 3558 - DNA, 277 bp, Homo sapiens
  source 1..277: mol_type = other DNA
ctacccttcccacactgacctggggcagggattcttggaaggaaggattctcactcaccaggttaaccaggggacctccagagtttcctgtatgaataagtggccacatttttgcagcctaagctctatataggctcatccaccatatatccggatgtgatcgtgttctgcagtgcaaagggacttcccatggcaaccgggatccacagctgtgaccacggcctcatacgtgtcgatgggcgttggtgacgcccataggaggctctgacccctccta

SEQ ID NO: 3559 - DNA, 717 bp, Homo sapiens
  source 1..717: mol_type = other DNA
ctgcttcaggagcgcccggccgtcgccgccgccgccattttcgcgcccggccgcaggggctcccgcccggggtgaggggacccgaagtcctgaggcgcgccggaagggctagcggtcccagcataccccgcggccccttgggccgtgcggagaccacaattcccggcattcgtggggcagggaggagtcggcctcccggaatcctggtcccggcgtgcacttctgaaggacttcaggtaccggcgtgccccgcgtcctacgcccctgctcgcgtcctgggtgccgcctctgagtagggcgggcgaggaggcagccaaggcggagctgatggctgcgccgagggcggggcggggtgcaggctggagccttacccctgacctccgggccctgctgacgtcaggaacttctgacccccgggcccgagtgacttatgggacccccagtctctgggcccggttgtctgttggggtcactgaaccccgagcatgcctgacgtctgggaccccgggtccccgggcacaactgactgcggtgaccccagataccaggacccgggaggcctcagagaactctggaacccgttcgcgcgcgtggctggggggcgggggtcggggtcctccggccgtcctcgccgccgtccctagcccggtcagtacaacttcatcgcagatgtggtggagaagacagcacctgccgtaggaggggtcagagcctcct

SEQ ID NO: 3560 - DNA, 577 bp, Homo sapiens
  source 1..577: mol_type = other DNA
gatgaacagaaggcaaagctgccatgtctgttcagcagaggaggctgaggggaatcaggactcaagataatctcatgggatcatcatggcttttttatggcttctaaattatgtatcaaaacaaatgtaataggtaaacctatgtaatccgagcacgcatttctacagtagctggcggcatcagaccccatctgaagtagtgtgcccgcggtttcagtgcctggctgtcaatggtgatgcgtttccctggaagccggactggaccccagggctccagcgcaggtggagaggttggatcctgggaaacttccaggacttccaggagccccgagggctcgagcgttcacatacgcgccccgccccggggcggcccgggcagagagactggcgcggtctctcctggcgcccttcggccatcgcgcgccgccgtccccgggcccccggaccctgggcgcccagcctgcgcgggacacacccaggcgccgcctcccaggggcggccgcgtccttactggaaatcgctggccggcagcgccagcgctggaatcgcccccgcgcctgggagtggcctcgcgagg

SEQ ID NO: 3561 - DNA, 453 bp, Homo sapiens
  source 1..453: mol_type = other DNA
ggagagaggggggtccagtctcccctggctaggactgatctccaggaccagcactcttcagcccgtcgaggggaagccacccaactcgggtgttagggccgccaggagcgccctaagggagggggctcctccgggaggcgctgcccctgggtccccaacccagaacaaagctgccttgttgttctcagccctaggcagagaaggccttggctgaggagccatagcgcctggcctcccgttgcccggtgacagggatggtggtgttggcaggaggctgggacaaccctaccccatcccccgcccagccttgaggcctggccctcctgggcctgaccctgcagggcgagggcgtgcagcaggttctccaggcgagctgccagccttccctgcctgctctgggctcccattcaggggatctgtgatcccagggccgcctagggccccttacgtgcc

SEQ ID NO: 3562 - DNA, 524 bp, Homo sapiens
  source 1..524: mol_type = other DNA
tccttccgcgcttcctggccctgcggcgggaggcggggcgggaggcggggccgggttccctggaggagtttccgcccctccccggcccccgccggcagccgctgggggggtcgcggtggggtgccggattagccgggagctgcagcaccccaggcccctacccgccgtcgtgggggcgcgccagtggctccaccgaaagtcctcggttttggcgcgagggccctggcctctgggcggtgacgtcagagtcgccccgggcaccggagagacccacacgggcctccggggctttatttaccctggccgggcccgcccccagccccgcccgagccgggctgtttagactccgctggcccgggactcggagggagggctggggttgaaccgcttcccgccaccaccggggccgccccgccgcccggccgccgcttgcatgtcagctccctgaccgcagaggcctggcctccatgccgcgggaagcagtggccagctccacggagagaggggggtccagtctcccctgg

SEQ ID NO: 3563 - DNA, 453 bp, Homo sapiens
  source 1..453: mol_type = other DNA
ggcacgtaaggggccctaggcggccctgggatcacagatcccctgaatgggagcccagagcaggcagggaaggctggcagctcgcctggagaacctgctgcacgccctcgccctgcagggtcaggcccaggagggccaggcctcaaggctgggcgggggatggggtagggttgtcccagcctcctgccaacaccaccatccctgtcaccgggcaacgggaggccaggcgctatggctcctcagccaaggccttctctgcctagggctgagaacaacaaggcagctttgttctgggttggggacccaggggcagcgcctcccggaggagccccctcccttagggcgctcctggcggccctaacacccgagttgggtggcttcccctcgacgggctgaagagtgctggtcctggagatcagtcctagccaggggagactggacccccctctctcc

SEQ ID NO: 3564 - DNA, 557 bp, Homo sapiens
  source 1..557: mol_type = other DNA
gttgggtggcttcccctcgacgggctgaagagtgctggtcctggagatcagtcctagccaggggagactggacccccctctctccgtggagctggccactgcttcccgcggcatggaggccaggcctctgcggtcagggagctgacatgcaagcggcggccgggcggcggggcggccccggtggtggcgggaagcggttcaaccccagccctccctccgagtcccgggccagcggagtctaaacagcccggctcgggcggggctgggggcgggcccggccagggtaaataaagccccggaggcccgtgtgggtctctccggtgcccggggcgactctgacgtcaccgcccagaggccagggccctcgcgccaaaaccgaggactttcggtggagccactggcgcgcccccacgacggcgggtaggggcctggggtgctgcagctcccggctaatccggcaccccaccgcgacccccccagcggctgccggcgggggccggggaggggcggaaactcctccagggaacccggccccgcctcccgccccgcctcccgcc

SEQ ID NO: 3565 - DNA, 349 bp, Homo sapiens
  source 1..349: mol_type = other DNA
ctcctgcctagcagacgtgtgggggccaggtggggaaggcaacttcccctctgccacctccccttccttctgccggtggatggcagtctcaactgcctggaagatgtcatttccctgtgccgtctggaaggtgaaggttccagggcctgaggggcagcggcggccggccgggggatccaaaggtcagagcttcccactttctgcccggccatagcgacgcaacagagtgtagggccaggacaggagtggctccagtatctgactctgggcccccacggtcagggagccatgcaggccacagcgctcggcggcctcagtcctctgcaccccatgggcccctgggtatcca

SEQ ID NO: 3566 - DNA, 305 bp, Homo sapiens
  source 1..305: mol_type = other DNA
tatgaagtaagaattattatccctgttttaaggctggcttcaggccccatacatgaaatttatcagcatattgattgcaggagtgctctgaaatatatttcatggtaggaaataaatatataaataaaattaattttttccaagtctttatgagatcaatctatccattgccaggaaaatatcatttctatagttatgtagctagttcatttcaattacaaagtcatgtctgtgtgaactagaaaaagaaatgaaaataccacctaggtctttcagtttcctactttcagagtctctggagacac

SEQ ID NO: 3567 - DNA, 333 bp, Homo sapiens
  source 1..333: mol_type = other DNA
tttaaactgaaacacaggaactctattgaatatcagattatagtgtttaaaaaaggacataggttaaatagttctgttcttacctgaggaaaaaactgcttgtacatttctagcttggaactagcatcatacaggagtttgaaaagacttaaaagaactttgtgaaggcagctataacttccatgagggcagtgaccattgtctgtacatccactgtactccagcacaatgcgtggcacataacgtgcccaccacagatgtttagtgaacaagcgcaccctgaggcagccaggccccgccttgcccgcagtgagcctcccgcccagccgcgcc

SEQ ID NO: 3568 - DNA, 363 bp, Homo sapiens
  source 1..363: mol_type = other DNA
tgacacggtgaaaccccgtccctgagtcgagatcgcgccactgcgctccagcctgggcgacagagcgtttataggatatccaagtggatatgcccataggcagtcttacctcttctgatgcattgcttcgtattgcaattatctatttgcagttatttgcttcgcgcgcgcgttacactgtgcctgcccagcacataggcagccgtccttaaatgcttgcaaagtattaattttgagaaacttacgtcctcttattagtaagttttccttattaggcaaactcgccactcgaggtccctatgggtctagctccgcctcgccgccttcactcaatcccgattggctggaggaatttctgagggg

SEQ ID NO: 3569 - DNA, 456 bp, Homo sapiens
  source 1..456: mol_type = other DNA
tgagtcgagatcgcgccactgcgctccagcctgggcgacagagcgtttataggatatccaagtggatatgcccataggcagtcttacctcttctgatgcattgcttcgtattgcaattatctatttgcagttatttgcttcgcgcgcgcgttacactgtgcctgcccagcacataggcagccgtccttaaatgcttgcaaagtattaattttgagaaacttacgtcctcttattagtaagttttccttattaggcaaactcgccactcgaggtccctatgggtctagctccgcctcgccgccttcactcaatcccgattggctggaggaatttctgagggggcggagccgggcggtgtttcatccctcagcctcaggctgagccggaccgagccgagaggacccgagtggggccgaggccagtagccccggggccctgagcagaggccgtagcttg

SEQ ID NO: 3570 - DNA, 447 bp, Homo sapiens
  source 1..447: mol_type = other DNA
gacaagggttctcttccctacagggtctccctctgtcacctaggctggagtacagtggtatgatcatagctcactgcagcccctccaaccttggactcccaaagtgctgggattacaggtgtgagccctggccttgcctcaatttcctcatctgtaaaacggggttagtgaaactcacactctagtacaatcagcagctaaggcgtctctccgcacagggcgtgtgctggtcgccgagcctgacgcggcggtggctcatgcgcctttccgcgccccccgcccccggcgcgcctccccaggctgccggctccggtgtctgagcggccgcgcccgcgagccgtgagcgatgattggctgcgccacggcggcgggcggtccgtgggcgcacacaccctccccgcgcagccaatgggcgtgcgcacgtcactgatccggaggcccgcgggc

SEQ ID NO: 3571 - DNA, 540 bp, Homo sapiens
  source 1..540: mol_type = other DNA
aaattattttcttaatactactatgtaaattagagacttttcttactagatttaaaaaaaattacttgtcataaaaatgttgtttgttagctggtaacgcattagtaattttaaatcaatattttaaaactttaattctaatatagtaagtattgatataactgatccctgggctctttaacaatctttaagaccgtaaagggatcttgaggtcaaatttgagaaccaaagcttgaatttcttctttctgccatctataactggttatccttgaatttgacgatgctgggccctccagggccgggcctccctcggacacgtgcccggcacaggcaccaatgggaggtgcctgggctccacaggcccgtcggggccagagggtcgccggtagcgtcaacccgacagcccacgggtggctaggcgcgtgggaagagccggagcccgacccccgcccacccggtttcctggcagcgcactgccgcgtaggggcggagccgcgcgcctacacagggtgtggcctccagcccgcgcgggaaaggg

SEQ ID NO: 3572 - DNA, 640 bp, Homo sapiens
  source 1..640: mol_type = other DNA
ggcagagaaggctggctgacctgtcctccagcccctaccccgagcccggctctggcctgcaggcttggcaggcgcggaggcggaggctgccaggtccccgggaggcaaacgcagcgccgcagtgattgctggcggagagcccagagccgcgcgtctgagcgacaagctgcctatgagtgtggctcctgcgctcaccaagattcgcagggagctcagccctgtccccagtgattgagcagaggctcactgtcacttcccaggtgaatcagctagccaggtaactgagctagatattttgtgggggtgtttcctaaacacagcctcaggaaagttgtcgggacaccctctggcttctcggtagctggagcgcggcccggagcgcggcgctggcacatcgccccccccattgccacaggcaagccgcctctgcagagctgtctcagtgcaacgacgattccagctgcgcacctactgccccctcgcggagtgcgtggggctcccggctcgcagactcccacggcaagtagcagacagttgtcaacagctggcgcagctgccgcgctgcgcaccgggactggcgagtacgcagcccaggtactgccccttcccagtgacgtctctgcagggggttataaaagcc

SEQ ID NO: 3573 - DNA, 476 bp, Homo sapiens
  source 1..476: mol_type = other DNA
aaagtcacataatttttctggatcttgacatacaggggtgataagctacctcgtatcttttgatttcaagatgaatgaaaaacaagcactggttttctgaaagatttattataaaatataaactcaaattctacctttttataacaataaaagtgagttggagattgccatcccaaaatatcaagactttatatctgtctgaaggagaaatgattatttgctctaaataagttaaatatgtttgtcttccgtgcatgtttgaaaattgcagtcacttttcttctacagccaggaagtaaatgatagaagatgtcagctctccagcttcttaaacaggaagtagacctggcaaatttttaaaatcctgacactttgttttttgccaaagaacagtgtctttttcagaaatgctgattttgggatcatggacattctccttaatttctccttagcaagtctgttggaaggaggaaatt

SEQ ID NO: 3574 - DNA, 544 bp, Homo sapiens
  source 1..544: mol_type = other DNA
cggggcccgaggtgcccgagagcgctccctgaactctgggggcgcccggcatccccagcgggctccggcttctccgaagcgccctcttttcggaaacacccagagcacttctgacctgaagcagctgctttggctgggtcccacagggaactctgcttcagcccagcttcggaaagcaggtggctgagcctgactggcttctatcccaagcctgcgcggggcggacctgccagaaatgtacgtgctgcaccgtggcagccaactcgccgcgcgcatttggcgacccccaggaccccgaaaggcgccccctaaagtcccagtgggacgctttgcttttggagaggggcgcgcagacagtccacgctgctctatctgggaggtctgcgtgggggtccccacccctactattgaggggtaagggggccaaccacatcgtgctggcttgccatgttgttcttttctcataacaccctattttacaaactagctaggaaagggcccagccaggatttgggtcctagctggtctaagattcttcttttta

SEQ ID NO: 3575 - DNA, 273 bp, Homo sapiens
  source 1..273: mol_type = other DNA
tctccctgcactcttcccctatgacgattgtataggaacagggtgtcctgttgattttagctgcatttcttcaaaagttgatcaaatttaacaaagtaagtggttatttcctgtctgagttgtctgggctcgtcccagcgggactgccgatggggaacctccccggtcctgcggacagtcggcagcgcggggagcttggcgcggagggaggtgccgcacgccgcagccgttcaggtttcgcgtcttgcgggcgcccacatgggccgctggctt

SEQ ID NO: 3576 - DNA, 362 bp, Homo sapiens
  source 1..362: mol_type = other DNA
cactgcgcccggctgtgttcttagagatacggtctcacaggcatgcctggccacgcccagtcattttccaaatttcttaacaagacccaaattcatttgggttcctcaaagggttattctattctcttttctgtgcattcagcaaagaattagaaaaaaggtgagaggatctcctgacatcaggagttggaggctgcagagccatgatcgcgccactgcactccagccgtgagcaaaaagaagactttatcccttcccttgcctcattatagtataatggcagatttaaatactaatctaataattacacaagacgtgcacttttcctaagacatgccatatggtggcagacagcaacaacc

SEQ ID NO: 3577 - DNA, 518 bp, Homo sapiens
  source 1..518: mol_type = other DNA
cccaaagttaccaaattggccacaaacttgggggttctcatctggcccaagttttgataatttgttagaacaattcacagaactcagaaaaatgctatatttactattgaagttgattataaaggatacaaatttacaagggcataattgattaaattattggccatttgtaatttgactcaatttccacactcccctcccgagaggttcaagagtggaactgtgtagctcaaagtttcaaccctccacttgaaaagagcttgttatgaataacgagacatccctaacacttctaacagtcagaaaattccaagggtataataagcctttttaggattaagtatgtagattcttgggacctattccaactgtatattgaattaaaattcttaggaataagactcagacatctctttttttcctgatgaccagctagctttgaaaattactgatcatgaatcatttgtgaggaatttagattattctaaactagacattactggatttttccacttatg

SEQ ID NO: 3578 - DNA, 563 bp, Homo sapiens
  source 1..563: mol_type = other DNA
catttctatcaaaagcaaagttttatgaagaaatattttctgaatctcttagttctctaactccaagtttacttctatttaaatccgtggaatattttaaatgttaaaaaaagaaaagagttccagctactctggagcctgaggcggaggagaggctgcagtgagctctctgtctttcaaaaagcctataatcatatcaggtttttcctctgaaaactggctttttaaaaaggttgctacatagctctcttttcagaccttaagtcctttaaatttacatgtacttcatataagtttttattcacactattttgatgagtaatgtgctttgtctgccaaaacttccaacctaaaccatagcaaattttttaagttggcttaaaatatggggaacccctacttgaagttctgactcaataaaactgcaaagaagttcaatcacacctgctcgtgcagggggaggtgcagcccccaccttagagccgggacctcgaacgcgaacgcgctcacgcgcgcaccgaccccagttgccggcctagcgccagggcagtgcctcacctgcg

SEQ ID NO: 3579 - DNA, 436 bp, Homo sapiens
  source 1..436: mol_type = other DNA
caatgcaatttggtgccactgccttgattgatgttaaggcaccagaactactttagtataattatgaaaattataacatctaagaacgctactctgagatatcaaactgtctcttggtctcacaagattatttcaagcttcttttacatcttgctgtgaagttgaagtagcaacactgaaccagtgctgctgcttctgttgtctttgccaacacatctaattttaatgcccacccaatttttatttattaatttattttaaatgttactagataaggtataaaggaattcatatgtatgcctataacaaacttttgacatttctcataactatgtaatatcataatattttctaaactatataataccaggctattcccttgcctttgccaggaagagtctcctttgaccatccctgagatctttttataaaaaac

SEQ ID NO: 3580 - DNA, 475 bp, Homo sapiens
  source 1..475: mol_type = other DNA
ggggatgctcgggcagcacaggagcccagggaggctcaggcatggcgggctgcaggtcccgagccctgcaccgcgggaagccggtgggccggcactgctaggggacccagtacaccctctgtagccgctggcccgggtgccaagtccctcactgcccggggctggcagggccggccggctgctccgagtgcaggcccgccaagcccatgcccacccggaactccagagctcaacattatatagtatttctaccatacagatacagatatagaacaaatttgcgtcagacaatagctttttgtttttagatagtttctttaagggtgaaaacatttaaccattggttggagggggcactctctccagaaagtcagtccaggacggaaagcataacgcttgagagttctgctctccgtgggactcagaccttgcaggcgggacgggcgcgcgcactcggcggccaggcgcggcggga

SEQ ID NO: 3581 - DNA, 696 bp, Homo sapiens
  source 1..696: mol_type = other DNA
ctatgtttttcaacgtctgtccaagcttaaagaaagtgtgtaggtccttttaaattatatatatatcaggtgttctaattctgaggatattctgcacattttagagtaataccatgataatgcagaactcaagtgcttttgtttttctggaattgcacattacaataagtgatttgcataagaaatgatttgcattctaaatgtagataagaatgtcaagctagaattctactcttatctcttacacatttggtaatatactatagattataactgctttaagactaaaaatgtaaacttttagaaagtagtgttctagactgttcaataaaatgcacaaaattgtaaaatgcattttatgtcaaaggttgagaatttgaaaatcagacttaaacatgttaaatgtaacctgtttaaaattgattaaaattgcatttttcccttgaataagatttcttccataagcggttagtttaaaacaatataaataaatgtgaataaaacttaaatttcaacaatttctgtcatttgcaaaagatgataaatctcttgaaaaactattaattgcataacatttagagaagcagtattttacttaatatttgctataactgaaaggaacttaaattattggagagaaaaaaatagtgattctgtgcctttaatttccctttctgagcaagggaaggctgcaca

SEQ ID NO: 3582 - DNA, 254 bp, Homo sapiens
  source 1..254: mol_type = other DNA
cccgctagctacttatgctgaaaatttacgtatcctcataatccccatgtgtggattgtagtgagtgcattctcacaagatctgagaggcctacaagtcaattaaactatgagtcaattaaacctctaaggactccttctgaagtaagctaattgggcttaatcatttggacaacatcaacttggacagtttgccaacctgttgtgccaggaataagctattcctgatgccagaatctctcagaccctgatata

SEQ ID NO: 3583 - DNA, 292 bp, Homo sapiens
  source 1..292: mol_type = other DNA
ctcctggataatatcctgcagagtattttccaaagtttagctcagagtaatttgatcattgaggaactgcgttcctttggaggaggagagtagttttccttctaacagacaggaccctcagctgcaggtctgttggaatagtgcccctgctggagggtgcctcccagttaggcaggcagtctgcccgttctcactggtgctcaggacatttaagtctgcagaggttactgccctgcccccagaggtggagcctacagaggcaggcaggcctccttgagctgtggtgggctcc

SEQ ID NO: 3584 - DNA, 531 bp, Homo sapiens
  source 1..531: mol_type = other DNA
taataaataaaatttagtattaatctgtcttttaaaaccatatataaagtttatcaaatagcttataacttcttgctagtccaagttgaaatatagatatctactttattcgatttaaattctgtttagtattttattatattttgttaatccctgaattataaatgactattctatgatgattctggtaaataacagttgacttcaaatggacaatttcaatgaagcctgacttcatatttacaattctcacattgagaatatgtgtattttgttagctcaaaccttgttagacatgttaaatgtttagaaatataaatttaacctactcttttgtaaaagcacattgttctaaattatttggaatcagttaattcttagcctctaaatttacagggaatacaacacatgggagccctcagttgttttctgctgagcaagagcaaagtccaccttggacttagacagcttgccaaatttgccactcccagtgtgtgccgggaaaaggctcgtactggttctcagatcctg

SEQ ID NO: 3585 - DNA, 265 bp, Homo sapiens
  source 1..265: mol_type = other DNA
cagcctgctgagtacttaaattaaaatataaattgtagagtgtcattctccactggggagctcatgtattgacttgtcagacaattctgaagtttcatcaaaattagctatcatgctaacacctaacatttatttaatcttactaggcaaggtaataagaaataggttcttaagaaacccaccatcagataaagcaaacttcacctcttcctagggaaagtgttggcctacatctgggaaaatccccagtctttgccaggaagag

SEQ ID NO: 3586 - DNA, 570 bp, Homo sapiens
  source 1..570: mol_type = other DNA
ctgttagcacctctgtaacagttccagctgccgatggctggcggcgcctcagaggacgaacatttttggatatctcaaaatgcctattcaacaaaggcttgttaaatgagcaaatattccagttgttttactgccacgtgtcggacccctgctggcgggcctcgcgactccggcgattcagctccgggtccccgcccgcagggtaacgcggttgtcatggacacggcacctgcgccctacggcggtgccccttcgccgccgtcccctccccccacctgcggcgccgagcctgccgcgcctccagagctccgccccgccccgccctttcgggcgctccccaggccgcgcgcgcccgcggccccccacccagccacccctcgatgcccggtgcctttccaggcgccgcggagccacggggaccgcgggggcgcgcgagcgagcaagcggccgcgcatgcgcactggctgcctcccctagcggcgatccgggccgctgccgctcgcgcttgggcaggacgcggggcgggcggggggaggggggagcggcttcgcttccagccccgagtgaggc

SEQ ID NO: 3587 - DNA, 555 bp, Homo sapiens
  source 1..555: mol_type = other DNA
tgtggagcctgatgaagccccggagggatctcagtcaagtctccctgcacacagacatacttggatggcttcccaaactaggtgggtttggaaagcatttctttctaaagcaaaggtcccagatacgtatctcttacacgtaagaacatttcagtttcccacttggaatttttttttttttttttttttttgaaatatggacaaaaaagctgaaagtgttttccgtttcatcaaaaaacatatattactttagtggttcggtaaaatgttggtttcgcacaatcgtgagcagcttacgacactcagtgagcagtaggtgcctgtgcaagctcgcgccgcacactgcctggtggagggaaggagcccgggcgccgctcgccgctccccgcgccgccgtccgcacctccccaccgcccgccgcccgccgcccgccgcccgcaaagcatgagtgagcccgctctctgcagctgcccggggcgcgaatggcatggtcgtttccaatgacggacattaaccagactgtcagatcctggggagtcgcgagccccgagtttg

SEQ ID NO: 3588 - DNA, 222 bp, Homo sapiens
  source 1..222: mol_type = other DNA
atatttgacattactactaataacttaggaggttttatgaaggatttaattctgtgtttaaaggggcttacaggtagaattagacacctgaactctatcggtgggacagtttaatataatctttgtcattcaaattaaatattttaacattaagcttttaaaatataaatgtatttgcttcttaagcacaagtaaaggacattttttattttatttgtgcca

SEQ ID NO: 3589 - DNA, 410 bp, Homo sapiens
  source 1..410: mol_type = other DNA
ttgtaaggactcctatctataaatgattatgaatagaaataatgaggcaatcatacttggagtggggtgcactgcagggcccagtaatcactgtggagcctgatgaagccccggagggatctcagtcaagtctccctgcacacagacatacttggatggcttcccaaactaggtgggtttggaaagcatttctttctaaagcaaaggtcccagatacgtatctcttacacgtaagaacatttcagtttcccacttggaatttttttttttttttttttttttgaaatatggacaaaaaagctgaaagtgttttccgtttcatcaaaaaacatatattactttagtggttcggtaaaatgttggtttcgcacaatcgtgagcagcttacgacactcagtgagcagtaggtg

SEQ ID NO: 3590 - DNA, 581 bp, Homo sapiens
  source 1..581: mol_type = other DNA
attaaaaagtgtctttcgaggcagccccggtccgcggccggcggatctggcaggcgcacaatgtctcactttgctgctcggctcggggctgcaagggcggccggcaaggcggggaggcgacttctaggacccgcaacggagcccgcaaactcggggctcgcgactccccaggatctgacagtctggttaatgtccgtcattggaaacgaccatgccattcgcgccccgggcagctgcagagagcgggctcactcatgctttgcgggcggcgggcggcgggcggcgggcggtggggaggtgcggacggcggcgcggggagcggcgagcggcgcccgggctccttccctccaccaggcagtgtgcggcgcgagcttgcacaggcacctactgctcactgagtgtcgtaagctgctcacgattgtgcgaaaccaacattttaccgaaccactaaagtaatatatgttttttgatgaaacggaaaacactttcagcttttttgtccatatttcaaaaaaaaaaaaaaaaaaaaaaattccaagtgggaaactgaaatgttcttacgtgtaagagatacgtatctg

SEQ ID NO: 3591 - DNA, 370 bp, Homo sapiens
  source 1..370: mol_type = other DNA
tcccagccaattataatgactacctaagtaaattaggattgcaattttattgacaattctgatgaggaatctcattccttaagcaaagtcacatttgacctcgaatttcagcccttaggatcctcagggaataaacactcatgcacttagtgctagtcaaagactgcatgattatttaactaaaaaaattcacattccaagaagttaactgtcagtaagatacccttccgggtccaggcacaggtacgcggtgagaaatattattcaatgccacgcgctggccagtctcgcgtgggttataattaatgttaatcaaatttcgtgaagaatcctctgtaaaggtgcctcctccggcctctgcccctgggag

SEQ ID NO: 3592 - DNA, 436 bp, Homo sapiens
  source 1..436: mol_type = other DNA
ccaaccataagcttctagtagtctattgcaggacctttccgtacttttgtcaccgcggggccgagagcaatgcagggctcccggacccgaatcctggcggggtccccgactcgaagccggaatcccaagcggctcccaggcccccgccgaggtccagccctgagggcccagccgcggcctgggccaggaggttgggtccggcggggccaataacccgcgggctgcgcgacaggagacgggcggcggcgaggccgctgctgccggagaccatggtagcgatgtcagcggcagcggcaagggttcccaatgacactcccaggcccccggggacctcccaggggcagaggccggaggaggcacctttacagaggattcttcacgaaatttgattaacattaattataacccacgcgagactggccagcgcgtggcattg

SEQ ID NO: 3593 - DNA, 246 bp, Homo sapiens
  source 1..246: mol_type = other DNA
aaaagaaaatgatgattatgtcattttggcaagacaggtgaaaggatttcttcccctgatcagtaaggtaaggcatcccgagtcaggccctggcctttgacacctaggttaccttccaagtggaaaaggacacacatttcttgagccttaagatttcggataaatttctattaaagtgaacctgtgcggcttctccaacaatcagcgaagtaggaaatgtttcggagacactgaggccagctggtt

SEQ ID NO: 3594 - DNA, 293 bp, Homo sapiens
  source 1..293: mol_type = other DNA
gactaacgattgccgccgggctgacacggggcagtcatctgaaaaaagcgattttacaaaaacatctgaactctaaatgttggtggagttaaatctcgaaagacttggctcttcaaaccgaagttaatggcgcagacgtctggactgaaaaatcttactctatgtgtgattaatattattcctaaaaatccattaagagggctcttaatggagtgccactggattttcagtggatgcacacatgagatttcctttgtttaaatgaactttcctttaatgcgataggttgaatt

SEQ ID NO: 3595 - DNA, 378 bp, Homo sapiens
  source 1..378: mol_type = other DNA
ccgaagttaatggcgcagacgtctggactgaaaaatcttactctatgtgtgattaatattattcctaaaaatccattaagagggctcttaatggagtgccactggattttcagtggatgcacacatgagatttcctttgtttaaatgaactttcctttaatgcgataggttgaattcggtcacacgaggtgggcggcggccccggcagggtttgggcgggagaaacgcggttcgggactccgctgccgcctaggcgcggggctgacctgcgggggtggggtggggggagggaggtcgaggcccggccccacgtggccgctgctgccgggctcaccccagccccgcccggaggcgccccgcggccccggctagccaggg

SEQ ID NO: 3596 - DNA, 431 bp, Homo sapiens
  source 1..431: mol_type = other DNA
acaggctgaaaatacaacttttctaagaaagatgtgaataattgcagtataccactcctacaatcctcaaggttaacttcaaggaggaaaaccgatacagtgtttctaggagctcgacgagaaaaggcaaactgcgagccttctcgggacgcccttcagggcttgctgcagagtgcgcgtgcacgcccgcacatccacaccaaagccgggggcctggcgcccactctggcggcgactacagcccccacgctgggcacactgcgagctgggggtgcccggcgcgggagaagccgcgcccagccgggctggtagcccagcggggggcgcggcagggcgaggagcagcccgcgctgctcccgcccctcgggtgccagcaccgcccctgctgcggcgggtgaggggcggggcggggcgcggcgtatataaggcta

SEQ ID NO: 3597 - DNA, 535 bp, Homo sapiens
  source 1..535: mol_type = other DNA
tcagggcttgctgcagagtgcgcgtgcacgcccgcacatccacaccaaagccgggggcctggcgcccactctggcggcgactacagcccccacgctgggcacactgcgagctgggggtgcccggcgcgggagaagccgcgcccagccgggctggtagcccagcggggggcgcggcagggcgaggagcagcccgcgctgctcccgcccctcgggtgccagcaccgcccctgctgcggcgggtgaggggcggggcggggcgcggcgtatataaggctaggggcgggcgccgctcttttgtttcttgctgcagcaacgcgagtgggagcaccaggatctcgggctcggaacgagactgcacggtgagtgcggcgccggggcggggggcccacccagggtgtggtcggatccggtgcaccgggcgggcgcgccgcaaccgcgacaggcgcccttctcggaccggacgcaggggccggcgaccacgccctgggaccgagaagaggggtgcgggacgcgcccagatcctcggccttggggc

SEQ ID NO: 3598 - DNA, 446 bp, Homo sapiens
  source 1..446: mol_type = other DNA
ttcttttttagaaattctaaaggcgttctgggagatgtgcgctgggcctctccacctgcccacaggtttagggagccgagggagccttccagagcctctaagtcacctctctaggaggctgtctgcctggcccacacacaggcaggccccattcttggcctcccccttaagcatcatgagaggatctgatgactcagggagcaatttcttgagcccatattgtccacctgggaagaaattgtggctgccctagtcatcaattcgcttatgaatacggaggccccggaacttctggtggccagctctcgtgcagtgagcgctggctgcgtgcccagccgcgttgcacaactcccgggcgagcggcgcgacggtcctgcagcagctagcctgggatgtacccacagctcaccggggagtccgggccacacgtcgggcttacgccctgg

SEQ ID NO: 3599 - DNA, 471 bp, Homo sapiens
  source 1..471: mol_type = other DNA
tcagttgacttagcctggtaacagttcaattttacgacacgtggaaagatttgttgaattaataatgcccgctgggacaaagtttgcgcgggtaccgccggactcccgggctgcccggcgcggagtccaaggaatcggcctcggagcccggcagcctcctggcttccctcctgaccaccagtaacccggccgggaaacactggcgaagaccgggggccagtcgccttcgtccccaggcggtccgcggcctctcagtggggctggagctcgctgcccgaggcccgcccggaagccatgcacctgcggacaggagtctctccgagtcgcagctcgccgccgagaagcacccacctcccgcggccggcgcagcccaaggccctggcccctatagcccggcctaggcccgccccaggcggggctaggggcggcgtggcgggcgggcgcccctcgggccgcgccggtgagcagcgg

SEQ ID NO: 3600 - DNA, 663 bp, Homo sapiens
  source 1..663: mol_type = other DNA
agatttgttgaattaataatgcccgctgggacaaagtttgcgcgggtaccgccggactcccgggctgcccggcgcggagtccaaggaatcggcctcggagcccggcagcctcctggcttccctcctgaccaccagtaacccggccgggaaacactggcgaagaccgggggccagtcgccttcgtccccaggcggtccgcggcctctcagtggggctggagctcgctgcccgaggcccgcccggaagccatgcacctgcggacaggagtctctccgagtcgcagctcgccgccgagaagcacccacctcccgcggccggcgcagcccaaggccctggcccctatagcccggcctaggcccgccccaggcggggctaggggcggcgtggcgggcgggcgcccctcgggccgcgccggtgagcagcgggagccggcgccgggcatttcctcttcctccctacgcgcggcgcggcggcggcggcggcggccaggccgaggctgggcacgggcgcccgatcgcggcctgctggctagcgcgggcaagcgccgcgccccgagccgccgtcgccgcgtcgcccccgtcgcgaccgccggccgcggggcctccgggcggctgggcccggcgagggcagcgagaggcggggagcgggatttgcggagcgccg

SEQ ID NO: 3601 - DNA, 558 bp, Homo sapiens
  source 1..558: mol_type = other DNA
tgtaacaggcatttctttattaaaaaaattttttttttggagacaaggtcttgcccaggctggtctcaaactcctgggctccagcgatcctcctgcctaggcctcgggagtagatggaactccaggcgcgggccgtggcgctcgcaccacaggcattacatttttcgatttaggacctagtcccaaacaatgaagaaaaggtgatcttcaagatttcagcacaaggttgaaaacctgaaggcgcggaaagccgccgggcattttccggggttccgtgcatcagctcgcgcactcggagggactctaggcagggggagggccccgcggccagtatgtgcgtccgaggctttcccgcagggggcagtgccgcccgcccgcgcgccgatacggtgggagggggtgggacttccaggactccagggaggccgtggggagcagagacgcagccccgtgtgcgcgcgcaccgcagctctccgggttccgcgaggcgcgcgggtgtcagcttgcagccggggctcctccctccggcccccctgcccagcccggctccctccccgc

SEQ ID NO: 3602 - DNA, 806 bp, Homo sapiens
  source 1..806: mol_type = other DNA
gggtaccgccggactcccgggctgcccggcgcggagtcaaggaatcggcctcggagcccggcagcctcctggcttccctcctgaccaccagtaacccggccgggaaacactggcgaagaccgggggccagtcgccttcgtccccaggcggtccgcggcctctcagtggggctggagctcgctgcccgaggcccgcccggaagccatgcacctgcggacaggagtctctccgagtcgcagctcgccgccgagaagcacccacctcccgcggccggcgcagcccaaggccctggcccctatagcccggcctaggcccgccccaggcggggctaggggcggcgtggcgggcgggcgcccctcgggccgcgccggtgagcagcgggagccggcgccgggcatttcctcttcctccctacgcgcggcgcggcggcggcggcggcggccaggccgaggctgggcacgggcgcccgatcgcggcctgctggctagcgcgggcaagcgccgcgccccgagccgccgtcgccgcgtcgcccccgtcgcgaccgccggccgcggggcctccgggcggctgggcccggcgagggcagcgagaggcggggagcgggatttgcggagcgccgcgccgctgccgggagccggcaggcccgagagtgaccggagtcacggcgggcgccggcggagctgcggcgtcggacccgcctcctggaggagctcagccccgaccaggcccggccccattcccgccccgcgccgcctccccgccgccgccgccgccgccgccgcgggagcgctcccctgcccaccccg

SEQ ID NO: 3603 - DNA, 503 bp, Homo sapiens
  source 1..503: mol_type = other DNA
atcgttgataaagtgatttcaaacatttaatgtataaacataacagtaactgtcccaaatacactaattaagaagggaaagagtcctttttttttttttttaacaaaactaaatggaaacataataaactaaagacttttctaaagtctgtttactttaaaatccggttttcatttctgaaacattataatgtattatctattcaaaaacatcaaatgtttagagggcagacaatacactaaaacattagttttctgcttctgtatcagaaaaaggatgcactttttggaaaagaaggacaccgtctccgtgggtggccaagaggagcctgcccctagtgacctcacttccgcggccagtgcgagaggcgagggagctccagctctgcctgaggctcgcctcccactcgaagcagccgaaggcgagcgccgacatcagcagctgcccttggcggcagcgggagacgcgcgcagcaggggcgggactggagaggggccccgcgc

SEQ ID NO: 3604 - DNA, 267 bp, Homo sapiens
  source 1..267: mol_type = other DNA
gctctgagcctgaggcgccttgttgaacctctgccaatgtttcagaactagggtcccccacacccctgagctcgcatgggagggtaggttccacgagccacggggattacaagtggcagggcgggtgcccccggggcaagcggggctcctccacgtgcaaggaagccctcctagcggaccccagggtgttaccaggggcgcccacatcacgccggcgtcgggtcgggtggctccgcccgggctagttcgctctccagtcaggaggcg

SEQ ID NO: 3605 - DNA, 299 bp, Homo sapiens
  source 1..299: mol_type = other DNA
atccttctacaagtattcattatgcaccctctttaatttgtccccgtcccccaggttccccacggatggggtgtcattagggacccgccatagaggactccgtcccaggcgggcccccaggacttgggccactttgcaggggctgtgagcagcctttggacccaggaccagaactcaggactcctgtctcttggcaagtgttaacgcgttctcaccgttaaaagagctttccaaacgggggcccgccgcctcggctaggccgcctcctgactggagagcgaactagcccgggcggagcc

SEQ ID NO: 3606 - DNA, 266 bp, Homo sapiens
  source 1..266: mol_type = other DNA
ctgggtcaacccaggatgggctgtctctcagagggcccgcctcagccattccctgagaactgagcttagccaggtgcaatgccacggcactccagcttgcgtgacagtacccagcagcggtgggggctgtgccgcgcctgccccaggccctgaatggagaaggtctcagactcagacagcgggctgaggccactcctctgaggagacggcctggcacccctccctgtcgggggacatcgcctccacaccggctggggaaggagccc

SEQ ID NO: 3607 - DNA, 424 bp, Homo sapiens
  source 1..424: mol_type = other DNA
acccagcagcggtgggggctgtgccgcgcctgccccaggccctgaatggagaaggtctcagactcagacagcgggctgaggccactcctctgaggagacggcctggcacccctccctgtcgggggacatcgcctccacaccggctggggaaggagcccgtggcagggtggctgccagcgcggctggctggtaccctcctgggtgggcaggcgagtggccaccacattgtgccagggtggagttcccccagcctgctgtcctgccagccttatgccaggctccaggcacctgatctgatggcagctgtgagttgggtcagggcttgtcccagctgtgccagacctcctgacggaggccaccacactgctcctgaaggccctcagccagactggaggtagtcctagccatttgaattcaaatgcaa

SEQ ID NO: 3608 - DNA, 488 bp, Homo sapiens
  source 1..488: mol_type = other DNA
ctgtgtcacaaggccatggcctgatcatgggttggctatgccacattcaggagcccagaaggcctggcctcctggtgcagatgcttgctggcctgttttcctctgaataaagaagagtgagctgcagtcccagctactcaggaggctgaggctggaggattgcttgagcctgggaggttgaggctgtagtgagctgtgatcacagcaccgcactccaggtgccgtgagaccctgtctcaaaaaaaaaaatcttagttctgctactgaactagcaatgtgacactctagttaccctctctgagcctcccaaagacttcatgtttccagcaggatggaagtgaacactgcaattctctcgcaaagtttacagcacagtaagcttccctttcgggcgccccagcctcccataggggctccccgccagctcagaccggccgggcccctccctctgactcaccgggggcggctcctggccgcgcacctccagg

SEQ ID NO: 3609 - DNA, 509 bp, Homo sapiens
  source 1..509: mol_type = other DNA
aggctcttgaaggcccagacctttttgaggtctgatcctgatgataataacacatgtgcagagccagtcctgggcaggcctgttcattattttgcaccctcgcctgacccagccttgcctgccaggcctgggctgggtctcccagcccgggccgactccggccagagcgcgcccctctttgcccacctagaggtcagtcccgcaggcgtggcgggtactgccaccgggagcccagccggagttgagggcctcgcgccgggcccactgtccagatcacgccaggacgcgtgtaaggccccaacccggccccagcctgggccctagacagcaggcagtgggccgcggggcggggtctcggaagctgcggcctgtggtgcctttgctgagcccaggtccggagggccctcggggacgggagcacacacgcacacacacacacgcgcgcgcgcgcgccttttggccctcccggcaggcagcgggccgttgggcggggccttgggtgcttccgg

SEQ ID NO: 3610 - DNA, 288 bp, Homo sapiens
  source 1..288: mol_type = other DNA
acttgagggcctggaatgcagaagctcacattctgataataagatttctaataataagagaatgggccaaggtgggctgatcacctgaggtcagggagaccagctgaggcaggctgagcagtggcgccactgcactccagcctgggagacagagcgagactctgtctcagagtccagggactgagtcagattgttttaacagaaacacatctgctatcaagagaatctgggcagctaaaccttccctccttccttgatgatccagtatgtccgatacaggtgtaacct

SEQ ID NO: 3611 - DNA, 560 bp, Homo sapiens
  source 1..560: mol_type = other DNA
ctgctcctgaacagaggattgaaacatcgattcccccccccttcaaagggcctcctttctctctggagggaaaggctggagcgctgcctccacttttacgatggcagcacgcccctcagatatcccggggccggcaacgagccgggcagggacgccgaaggaaggccgtgaggagccctcgctggccggccaagatggccaccttcacatggccgaccgccaccggctccctgccacccggcatctagaggcgggacgcgcgattcccgccgcctccgctgggggacgcgacctccgggaaagctatcccggccaacggtcggaagggaggtgccatgtcaccgcacaggggagcgggtccagcaagcctgctctagcggctcaagatagctgaggattgccacggcacctcccgcggccgcgcagtgtggttcagcccggactccgcggggcgagctgcccttcctcccccgacccccgcgcaagtggtgcattggcgcgcggcgccgaggggcggggcccgagccgggcgcgcgcgggcgctgctctataaataccgg

SEQ ID NO: 3612 - DNA, 312 bp, Homo sapiens
  source 1..312: mol_type = other DNA
aagcgattctcctgcctcagcctcccgagtagctgggattacaggcgcaggctggtctcttcaggggtctcactgtgtcccccaggctggagtgcagtggtgcgatcacagctccctgcagccgccttccaaactgttgggattacaagcgagagcagtgcccgcctttgcaggtcctggaaggggtacctttgccccgctccaaggctccttgttccgccccctgccgccaagcaaggaatccggcgccgccggtcgtgggtcgacagtgctggcgctttgcggccggccgcacagccgctgacgcgtcgg

SEQ ID NO: 3613 - DNA, 280 bp, Homo sapiens
  source 1..280: mol_type = other DNA
gctggagtgcaatggcatgatctcagctcactgcaatctgccaggctggtctgtgaaaagtttccctgagttctgaatcagagcccaggatcacagtattccagacttcagggattgaacaagtgttatccagtgatctcagtctctagaaactggagtcagatgaccagccttctctatttaaaactgccctttctagatcgccagccaagttagaagacctttggcttctgagaaccctattactttaagtacctggggaaacctgagttaggtgtgg

SEQ ID NO: 3614 - DNA, 268 bp, Homo sapiens
  source 1..268: mol_type = other DNA
ggcatgatctcagctcactgcaagccaggctggtctgtgaaaagtttccctgagttctgaatcagagcccaggatcacagtattccagacttcagggattgaacaagtgttatccagtgatctcagtctctagaaactggagtcagatgaccagccttctctatttaaaactgccctttctagatcgccagccaagttagaagacctttggcttctgagaaccctattactttaagtacctggggaaacctgagttaggtgtggggag

SEQ ID NO: 3615 - DNA, 374 bp, Homo sapiens
  source 1..374: mol_type = other DNA
ggcagaagaactgcttgaggcagtgagaccctgtaaaaaacgagggaccttattttaagatgtcccccatcctctgactgaggagcaagtgcatggcgggtgagccagagctgcacttaaagtcacacaatgtacagtttgttattttaaagtgtacagatgcactcaccagggtgataaagaccctgcctggcttgttcattgtgcccattccacagatccggccccgaggtgtgcccgtcaggctcctggggcccgggagggtccgactctacggacccaggtcgctgtggccactcgcggaaggcgcgccccccgccctcgctcggcggcccgccccgccccgcccctgctcttcctccggggccgctggc

SEQ ID NO: 3616 - DNA, 193 bp, Homo sapiens
  source 1..193: mol_type = other DNA
agctgggattacaggcgtctgccaccacttacagttcccagcactccagcctgggtgacacagccagacactgacaaggccaggcgtggtggcttacgcctgtaatcccagcactttgggaggccaaggcgaggatcacctgaggtcaggaggaccactagtgggaggagccactgggtcactcactctgcct

SEQ ID NO: 3617 - DNA, 325 bp, Homo sapiens
  source 1..325: mol_type = other DNA
agttctagatgctaaatagtacctatcatccaaatcattgagtgcagtggttaattcatgtgtagccaggaaaaagagatctctctcagttggggagccccaccctttattattatgcctaacacataagaaatgcgtccggcggggatccggacagcgcatccggaagcgccatgggccaacgctcgcaggaacctgaacccctgggccagcgccgcctttgctcgcagaggcctctagcatctgagcttgaaatccccgggaattcaatgagagggggccgaattagtacttccgtggccagcgccgctaggccgctatcgag

SEQ ID NO: 3618 - DNA, 514 bp, Homo sapiens
  source 1..514: mol_type = other DNA
gcactcatagcctgtaagttacacctacatgtgtctatttagcaaataagtgttgatcagtcgggaaacacgtcttggacactgatttctggctagtacattgtgtacttgtatgcaggaaagcaaaatcccaggcgcttggatttcttaagaaacagccaagtctttgttctctggacccaccgcagccctggccagaggcaggcatggggcgccacgtgcttcctagaggactcaccgttgcgcagtggcggagagacgctcctccagccatgtgcatcccaggtagagctggaatgcaggctgcccccacctgctgacgcttccccggcaggaatcggtacaccgcccacgtttcccccgtgacgcgggcgcgggggctcgggagttgtagtctcgggcagggcgcgggcaccgaggccggggctgcgcggactccacgtcccggcgggcggcgcggcgaggcctggggcctccaggggcggggccgctcggccctttaaacctttcaggg

SEQ ID NO: 3619 - DNA, 718 bp, Homo sapiens
  source 1..718: mol_type = other DNA
tatgccagtgatggagaacgctgacaggctgacaggcaggaggatccaggcgttctgccacaaccatcagctgtcctggcctggtggagaagggggtcaacaccttatccagccaaagtttgggctgagcccacggcagaacgtgaacaccctctggcactgggggcctccgcggtcaacccaaatgccaccggcgtgctacgcaggcggaccgtacatctggaagggagttaccctccttctgagggaggtgccggcccagtggagcggtggcgagtcggcggcgcgcaggcaaccacctgaccatcggcgccctgggcgaggggcgggttcacgcggaaagcccagcccggcccggcccccgctcgcctgggcgcggggaccccggctggggccggaccctgcggccggcgaccccccaggacccgggacgcgagagtccccaggtgattcctggaagcccggaggaagggaaggaacgcacctccccggagcgccccgccgccgccgcaccctgctcggccccctcgtggcgccgactctagctgcggccctcggagcagccctgaaaggtttaaagggccgagcggccccgcccctggaggccccaggcctcgccgcgccgcccgccgggacgtggagtccgcgcagccccggcctcggtgcccgcgccctgcccgagactacaactcccgagcccccgcgcccgcgtcacggg

SEQ ID NO: 3620 - DNA, 317 bp, Homo sapiens
  source 1..317: mol_type = other DNA
tcccaacacttcccagctactcgggaggctgaggcaggagaatcgctttgcagtggcggcggcgccgtgagcaggaggcaagccgggccaggagagccttcgcggcgcctgcggcctgggcgccgctgttgccctgccgttcccatttactaatgaggaaactgagaagttccttgtttcctattgatatgttacgaaaaaacaaacaaaaaaaaagtccggggggtggaagtcgcgctgcatcgcttggccaggccggggcctcccagaccggaagtcaggatgcggggccggaagctgagcaaggggcggcgcgg

SEQ ID NO: 3621 - DNA, 353 bp, Homo sapiens
  source 1..353: mol_type = other DNA
tgatcgctctgccagtgggggccctgcctgagagcccctgcagctgcagaggacagtttctttctgctgaaccatcgcagctgccccagcccctaccctggaggggtccccaggggccatgggcagcacctcctgtatagggctgtctgggagccactccaccacagaaatcttgtctctgacatgcaaaccatgtgtccatagaaccagaagatttttccaggggaaagtctgcccttccagggcttgccctgggttaagagccaggggggatgggaggggaacacccaggctgcccccaaccatcaacctccctcccacggcctggagaggtgggaccaggtatggcacaa

SEQ ID NO: 3622 - DNA, 363 bp, Homo sapiens
  source 1..363: mol_type = other DNA
ggccaggctggtctccagtcctgacctcaggtgcctggcctaaattgcacactttaaacatgtagtttgttgtatgtcattatacctcaatggaacggtcatggtaaatctgccttttcatggtaccaagaaccttctccacggtggtggtttcggcacaaatctgggatggcggtagctgacctcaggtgatccacattacaggcgtaagccaccgcgcccggcctgacagcttttatccagaaaactgtcgccagtaaaggttcccgtctcagtaaactgtaaaacagcaccgcccacaaattttctgcagcggagttcggggctcgctaccagcgccgcgcgctcgagcgtgcttggcgc

SEQ ID NO: 3623 - DNA, 295 bp, Homo sapiens
  source 1..295: mol_type = other DNA
ctggccaacatggtgtcaggagactgcccatcccagggaccagtccagagtgcagcggtgcaatcatggctcactgcagccgacaaggttaattttttaattttttttgatcgctctgccagtgggggccctgcctgagagcccctgcagctgcagaggacagtttctttctgctgaaccatcgcagctgccccagcccctaccctggaggggtccccaggggccatgggcagcacctcctgtatagggctgtctgggagccactccaccacagaaatcttgtctctgacatgca

SEQ ID NO: 3624 - DNA, 369 bp, Homo sapiens
  source 1..369: mol_type = other DNA
cgtgcacctgtaatcccagctactcagggggtccctgggaaagatgtttttcctatacaggtaccacctctgagatgctgaggcaccctgtctgaagaaggccctcacatcactcaacttgggtgagcccttggagaggcttcccacggaagaagatctacatttacaaatgtggaaagatgttcgtggtatattgttaaattaaaaagctgtttaaaaatagtttttgggtcaagtgagatgactcacttatacttttagtataagtatgtcccatgcatcctggcagctgctggcctccagcaaccccacattctagttgtgtgggagtggggtgtactgttgtatctgtggtaaacccagtgacac

SEQ ID NO: 3625 - DNA, 359 bp, Homo sapiens
  source 1..359: mol_type = other DNA
gtgtttttcctcagagcaatgctgtgacttaggcgttgttctccgaatttctcatttcacagcgtgccgggcgggtgtgggtcgccgggcaactccggagtctccccttcccctcccgggtcggagctgcgtcaccgagaggccggccgggggcccatagactgtcctagcgcccccgactagagtagggggacaaaggaggcggccggcggcccagctgttttgaaaaatgcttcctgtctttaaaggcgctcgcggctcgggcggcccgggctggggaggcggtggcggcgggagctgcctcctctccgggcggcggcgctgacttctgtgtaaactgaggctaaacaaacacagat

SEQ ID NO: 3626 - DNA, 392 bp, Homo sapiens
  source 1..392: mol_type = other DNA
ccgaatttctcatttcacagcgtgccgggcgggtgtgggtcgccgggcaactccggagtctccccttcccctcccgggtcggagctgcgtcaccgagaggccggccgggggcccatagactgtcctagcgcccccgactagagtagggggacaaaggaggcggccggcggcccagctgttttgaaaaatgcttcctgtctttaaaggcgctcgcggctcgggcggcccgggctggggaggcggtggcggcgggagctgcctcctctccgggcggcggcgctgacttctgtgtaaactgaggctaaacaaacacagatacactctgagcgctccgggaacggacagcccggcggcttcccgaagccggcggcgcagctgcccggggcgagggg

SEQ ID NO: 3627 - DNA, 228 bp, Homo sapiens
  source 1..228: mol_type = other DNA
ccagctgggcactcaggaggcctagggttgaggccgcagtgagctgtgatcacaccactgtacagcaaaagtataattgctattgaaatttatgacacagttattctcaaggtgatcatgactttcagctgataagccctggcttctccaagggatccttactgtaaatcttgcccttaggtcaaaacagtcttgagtatacattccttcagtatggtatttaagacc

SEQ ID NO: 3628 - DNA, 656 bp, Homo sapiens
  source 1..656: mol_type = other DNA
ggacaaaggaggcggccggcggcccagctgttttgaaaaatgcttcctgtctttaaaggcgctcgcggctcgggcggcccgggctggggaggcggtggcggcgggagctgcctcctctccgggcggcggcgctgacttctgtgtaaactgaggctaaacaaacacagatacactctgagcgctccgggaacggacagcccggcggcttcccgaagccggcggcgcagctgcccggggcgagggggactcctcggcgctgagcgcggcggcggcccgggcagccccacgcccctgcctcgcgcgccgcccgcgccatgaagcacatcccggtcctcgaggacgggccgtggaagacggcgcggcgcggcgcccgagccccgcgccgtagccaccaacgggctgcgggacaggacccatcggctgcagccggtcccggtaccggtgccggtgccagtcccagtggcgccggccgttcccccaagagggggcacggacacagccggggagcgcgggggctctcgggcgcccgaggtctccgacgcgcggaaacgctgcttcgccctaggcgcagtggggccaggactccccacgccgccgccgccgccgcctcctgcgccccagagccaggcacctgggggcccagaggcacagccttt

SEQ ID NO: 3629 - DNA, 485 bp, Homo sapiens
  source 1..485: mol_type = other DNA
agatcgggacccttcctgtaacacatgggccttggtgcaagggtcagctgtcgctgaccccagcagctgctctgccttggcggatttaaatcgcccagtgatattttacgttagaacaatccagaaatagtcttatggtaaaactcttttgggaaatgtgaaagtagagtcctcccacaggcacacggccgcggtgctgagttctgcaagtcgaccgacttcactggcttcactgaagtccgggcaggcgcacagtatacgttcagctttttcacgaatatttatgcccaaggggggctcgccccagcctggcccccgccccgggtgcgtccctgcagggggcgccctgctctggcaatgcccaccgcaccgcagggctgactggccgcgcgcccgggggcgggggccgccgcggaggcatcgtgctctccgattggccgtccgcgtcgaccccgcccacgcgcccctcctccgcatctgagcgg

SEQ ID NO: 3630 - DNA, 478 bp, Homo sapiens
  source 1..478: mol_type = other DNA
agtacatataaaaacatattgtaaattacataccccttattaccaactctagtctgcagatgaggaaatctgtctattatcatccaattaagtgaatggcaaacactaaacctaaaattaggcttttagcccactgtttgtactgagtgaaaaaaaaattacacagataggtcatacatgttccaagctataactatcacagatcaaaagggcatagtcagatcttttagacttttctgcttttacgaaaacctgagcaaccaataagtatttctctaatgaataaatgcgccgcgtacctggtcttaagggcacgcgaccgttaagggcgcgcatgagcagctgggaaacataggactaaggtgactccgcggtcttcttcgcggataccctaagcgtcagctgcgtgaaacccgcccgccgacccgtcagcggctggccaagcctgctgcggaggcccagctctctgcaggggccg

SEQ ID NO: 3631 - DNA, 426 bp, Homo sapiens
  source 1..426: mol_type = other DNA
tataactatcacagatcaaaagggcatagtcagatcttttagacttttctgcttttacgaaaacctgagcaaccaataagtatttctctaatgaataaatgcgccgcgtacctggtcttaagggcacgcgaccgttaagggcgcgcatgagcagctgggaaacataggactaaggtgactccgcggtcttcttcgcggataccctaagcgtcagctgcgtgaaacccgcccgccgacccgtcagcggctggccaagcctgctgcggaggcccagctctctgcaggggccggaggttgcaagctcatggtttaaatgattattttgatgtcttatatatctttgattgttttcaaaacaaaagagcgagcagagagtcgtacaactatttgttccccccagtgatctcatccacgtaaatgtcgttc

SEQ ID NO: 3632 - DNA, 303 bp, Homo sapiens
  source 1..303: mol_type = other DNA
ctgaccttgaataattagcctgggaatcgtagtttagggcgccgacctcaagatccaggctgaaggaaatgccctgcagccgccgccagggcatgttcttggagatcaacatagtcaccacgcgattcaacgtgcgcttgcgcgcggaagcggtcgcaggaacgacatttacgtggatgagatcactggggggaacaaatagttgtacgactctctgctcgctcttttgttttgaaaacaatcaaagatatataagacatcaaaataatcatttaaaccatgagcttgcaacctccggcccct

SEQ ID NO: 3633 - DNA, 447 bp, Homo sapiens
  source 1..447: mol_type = other DNA
ccgccttggcctcccaaagtgctgggattacaggcggtatatagagacgagccgcttcggcctccctaaaatgatgttactacagtaacaacttggtggagtccaaaggacccgtgttcctatccttgttgtgccacttgacacgtttagcacaagggtaaactgagacaattccattgtttacgtaaatatccagctcactttaagagtcacagctgtccaggctgaagaatggatttcagagcgctctccctccggcagcccgggcgcgacccggaaagggaatccgcccttttcgcctccttcgcgccatcgcctggagttggcgtttccggccacacagcccaccctctaagagccgcggagtcggggacggtagaaggggccgcgcgtgcgcagtggcgtccgctgtgcttccggtgcgccgggcgcggacgcgggcacgca

SEQ ID NO: 3634 - DNA, 632 bp, Homo sapiens
  source 1..632: mol_type = other DNA
tcagaaatgagccacaaggtcatgactcctgtctttccttgaagaccaggagtttcagctccacaaatgaaaatctttcgcttttgtttggattaagaataactcagaagtgttctcagggcgacccagacgccagcagccaggattggtcctggacgggggcagcgcggccctgattggactacatgcccacgaagcctccctggtggctgcctagctgcccgcccgggcctctcccgacgagggtggccctgaggctcgcctttgtcctggaggctaggcagcgaccaaggctacgcgcctccgggagccccagtgctcacctgggcggcggcggtcacacccgaaactgacaggcccgcagcatctcggtcaagcggacggcgctgctggtggactcgagctgccgcggcggcgcgagttaagtggaggcgtgcttgcgtgtgtgcgtgcccgcgtccgcgcccggcgcaccggaagcacagcggacgccactgcgcacgcgcggccccttctaccgtccccgactccgcggctcttagagggtgggctgtgtggccggaaacgccaactccaggcgatggcgcgaaggaggcgaaaagggcggattccctttccgggtcgcgcccggg

SEQ ID NO: 3635 - DNA, 260 bp, Homo sapiens
  source 1..260: mol_type = other DNA
tgcagtgagctgtgatcgcaccactgcactcaatcaaagagcttttatgaatgtttggactcaaagtggccaccataggtgggagatcaagttggcaacaatagtgttctaccccaggctggagtgcggtggctcaatcttggcttgctgcaacaaccggaactacaggcgcgcgccacccttgtgatccgcccgccgcggcggccccaagaattttttttaataagaaattttgtagaaccttctataagcttttaaac

SEQ ID NO: 3636 - DNA, 277 bp, Homo sapiens
  source 1..277: mol_type = other DNA
gaaaaaaaaatctcattatacattgtatttaaaggtctcttttgctctaaatttaattcgcccagcagcctaagctcggcgaggcgcctgcgcacgagcctccagaggatcgacagcctacgcggttgaagactccgggccccaaagttgatttttttttgcatactgtgaggcaacaaatgtttttttctctggccccgccctcgcccggggggccaatggtgatcgcccagctcctgtgtttcagccaatgagcggcggaagcggctccgagggg

SEQ ID NO: 3637 - DNA, 488 bp, Homo sapiens
  source 1..488: mol_type = other DNA
agtgagccgagatcgcgccaaaaaccaccataatatttaatacggtattttaaaaaatacataaaaacgtttatatagggtggcactggtgagcacttctagtctcctcctagggcccggagcagcccccaaggaaaggccttccctaggaagaagtagcccttcagcccagcctctggatccaggtaaaccctttatgaggctaggttcggacttcagtctggaacgctgagggtggggcagcacccgggtccctgccctgcaaacggggccgctgcagggttcctttggcggggccggtgccccggggagcgcgcaggacgcgcccgccttcagccgggggccagggcgagcgggacggggcgggcccgcgggtgccctgaccagctcaccgcccaatcgctgcgggcccgccgagccccggggggctggggccgccgccgccgccgccagaacgtgccgcggctgcgccaacgcgcgaacgccgg

SEQ ID NO: 3638 - DNA, 575 bp, Homo sapiens
  source 1..575: mol_type = other DNA
gtaggtgggtgtggtggcacacaccttagtcccagctgcttgggagactgaccagatcgcactactgcagtccacaaactaaatgcctaataaaatcatttgtgttatatttattttaatggaatactatatattgtgatagatggtatagaaatatactcgttaacatggaatgatgtttacaacatgtgaataaagcctttttactgaaatacatacttttgtgtaaaaacatgtctatagaagtctggagataaaaatagtaatctccaagtgatggttaatgagtttttaaactttatttttacttctagattttctgagttttatgtttaattaaaaaaatggtggggtttaattactccaagaaaatattttgtgaagatttagaaacaatttagttttattcagaaagaagatttaaagttttcagtagcatttaggaatttagattaggagcttcagaaccgagattcttaaaatccttacaattattatgactttggtatcattacaggtagctatggggccttgggcaaagcacccagtaaagtggaggccatgcagtcccggct

SEQ ID NO: 3639 - DNA, 363 bp, Homo sapiens
  source 1..363: mol_type = other DNA
atagagctgctatgaacatttgtgtacaagtctttgtaagaacatatgcttttttccctcttgggtaaatagctaggaatggaaggctttgtttagcattttaagaaattgtcaaaatgttttcaaagctgccgaaccattttaacctataggcctaatcagggtgctcacgtcagtgtcacctgtgagttgcctactggacacaaaacacgtctgcgtggagatccagacttctggtgcaacatctaggtttaggtgaagtattagaagcagttgtagccaacaaattcgtagcaggcgtatggcgcatgcgcaacatcccctagtgccgccgctccctactctgggggttgggactacctc

SEQ ID NO: 3640 - DNA, 188 bp, Homo sapiens
  source 1..188: mol_type = other DNA
atggtttactaattgattacttgccaataacttagaatggttatcaagtctgtgggactggtacaccagagaatctgaaactgattatattaaaaacttaccaatgatttgaagataagcaaagcgtacttcacaaagtcactgtgctgatattgtcagccggtggccttcttataaaaaaaagcagc

SEQ ID NO: 3641 - DNA, 430 bp, Homo sapiens
  source 1..430: mol_type = other DNA
ataaaagtgatcagtattggttaaaaatatacctatttgcaatgcactaagtataaagtttactggaagagttgagtttatttttgttaatgtagaaaattgggacaacaagagttatatgacagatattggcatatataatatgccatcatacatacttagaactcctgaaggaatttacaggtatgggaattaccataaagcgatttgtggttctcataagcactttagggacatataattctctattaattatcagctaccttacttagatagcttttatgaatatagcttaaaattgttgagatattccaatacaaccacatggtttactaattgattacttgccaataacttagaatggttatcaagtctgtgggactggtacaccagagaatctgaaactgattatattaaaaacttaccaatg

SEQ ID NO: 3642 - DNA, 612 bp, Homo sapiens
  source 1..612: mol_type = other DNA
accgcgacgccccatcctgggccgggccgcagtgcccgcccgcctgagaggcgccgcccgccagccggcccgagcgaacctggagccgccgccgtgcccgccgctcttctcgcggagcctgggcggtcggcggggcctggggcctgggcttcgggcgcggcgttgcggcggccgctcctccccgcgcagaacacgctgggccccgggcctggcccggccgagcgccgcgccctcctgacccgcggccgcgggagtccggcccccacggcccctcgggccccggcctgccgcccggatccccgcctcctgggcggagatcgcggcaccggagggccgaccccgccacctgggtcagtgcccgccccgggggaagcgtccctcggaggcccggcgcgaggctctgcgtctctgcgtccctcgtcgccgcctcgcgcccgcgcggatcccgtcacctgcttccccgccggggatggccggccagtgacggcgccgggtggcccgcgcgtggacacggggccctcgcccaagctgccaccgagccgcggcccccgctcccgtattccgagctctctggaaagagaggaaactccagctgagcttcaagaagctgaa

SEQ ID NO: 3643 - DNA, 692 bp, Homo sapiens
  source 1..692: mol_type = other DNA
tctctaataaataaactctcttggtttagagatgagaagtgtctcaaaagccatcatttttttatggaaaataatttggtcacacatttttttttgggcctaaaaatactggcacattgaatgtactagaagtccacatttaactttaatgactcaaatcacacgttttatggcagaaaaatagcagtttaaaatttaagtgtttattgtttaatatttaaggcgaaagttaaaataatttgattttagtgttttcctttcctttttgtttaatgatacaagctctaaatttataatataaatttgtatatgaatatggagtttgttctgtctaacaggtaaagttctcattctacatcttttaagtaagaagcatataagccatactgtttaaaaatgtatatgaagcctgtatgtgtcattcataaaactaaataattaagaaagttgtgcctttttggagtggtacaaatttggtaagttcctaataattatgtgataaccccactaaaatataagccctgttctataagagatggatttttgaggaagttcttactacatatttattgaatgtatcttctagtagttcttgtctataaaatacaatgaaagtacaatatcatgattcttaacagtgtaaaaaatagaattactgaaattgggaatctaggattcttgcaaccttatta

SEQ ID NO: 3644 - DNA, 679 bp, Homo sapiens
  source 1..679: mol_type = other DNA
catcaaaaaacgtacatttctattttcaccgattttaagagaataattaactgctctatttttacaaaaaatactcggcaccgcgggaaggccccgaccacgctgcggctccggtagtccggtagccccgcggctccccgaattccccgccctcggcccctgcgggcgcaccctgcaggccccgccccggccccgcctcatcgcgtatgtctcggctccggccgcggccgccgctgatacacggttgtggagggtacggccgcggtctccggacgggggtgttggggacgggtgctgcgaccggcactgcccatccgagcgggacgggcgctgagtggccgggaggcagccgggtagccgcctggaccgcgacgccccatcctgggccgggccgcagtgcccgcccgcctgagaggcgccgcccgccagccggcccgagcgaacctggagccgccgccgtgcccgccgctcttctcgcggagcctgggcggtcggcggggcctggggcctgggcttcgggcgcggcgttgcggcggccgctcctccccgcgcagaacacgctgggccccgggcctggcccggccgagcgccgcgccctcctgacccgcggccgcgggagtccggcccccacggcccctcgggccccggcctgccgcccggatccccgcctcctgggcgg

SEQ ID NO: 3645 - DNA, 315 bp, Homo sapiens
  source 1..315: mol_type = other DNA
tggcgcgtagcctcccgagtagctgggactacaggggcaaggcactgtgccaggcccatgtaggcttttaacacccttgagactgaagcagttttggccacatcaaaaaacgtacatttctattttcaccgattttaagagaataattaactgctctatttttacaaaaaatactcggcaccgcgggaaggccccgaccacgctgcggctccggtagtccggtagccccgcggctccccgaattccccgccctcggcccctgcgggcgcaccctgcaggccccgccccggccccgcctcatcgcgtatgtctcgg

SEQ ID NO: 3646 - DNA, 378 bp, Homo sapiens
  source 1..378: mol_type = other DNA
cccgagggggtaaagccgatccgatccgatagcataaggcttcctagggagcaagggccaggctgcccggctctccagcgcgagctgcccggcacatggctctggggcgaggccaccgtcaggaggccaaggggccaaagggccacggtccgcgggggatggggacatgacctcctgggtgtcgcaagcccggggcagcgctgacagccggcgcgggcctttcgcgagcagcaagcggctcccctccgacgcagaaccagcccccgggcggcctggcttggtttttcgagatggatccgtcgccccccggattggctgaaggcttacgcctcggccagggattggcttcttaccactccccgcgcccattggttgggg

SEQ ID NO: 3647 - DNA, 496 bp, Homo sapiens
  source 1..496: mol_type = other DNA
gccgatccgatccgatagcataaggcttcctagggagcaagggccaggctgcccggctctccagcgcgagctgcccggcacatggctctggggcgaggccaccgtcaggaggccaaggggccaaagggccacggtccgcgggggatggggacatgacctcctgggtgtcgcaagcccggggcagcgctgacagccggcgcgggcctttcgcgagcagcaagcggctcccctccgacgcagaaccagcccccgggcggcctggcttggtttttcgagatggatccgtcgccccccggattggctgaaggcttacgcctcggccagggattggcttcttaccactccccgcgcccattggttgggggctctccgagccttccgtgtggtacggcccacaccattagagtggcggcgcgtgtgggcgcccgtcgcgttcctccgcccgttctcgccgggtcgcaccccccaccccgagggtgtacttggtacggcccgc

SEQ ID NO: 3648 - DNA, 312 bp, Homo sapiens
  source 1..312: mol_type = other DNA
caggggttgaatgacttcaagcctgtgaagctgcagctgcaggtctgggaggagccagcacccaagggctggtcaaccaagctgggggttgaatttccatccagcaatgcaggccatgggaggctgcagcagcccctttgtgagaataataatttttataacaacgacccaaagcttcggctgctgccgctctcatcgcctttagtgaaggcaaaggaagggacactcccctcctggccaggctgccccccagcctcctcgccgggctggaaggcgacaaccgcgaaaaggagggtgactctcctcgggctc

SEQ ID NO: 3649 - DNA, 317 bp, Homo sapiens
  source 1..317: mol_type = other DNA
ccagctacttggaggtggaaggatcacttgagccgtggtgccacactgcactccagcccccatgctgatcatgaagtctcggcatggtcctcgcccagcaggcagacacattcccagctacctggagctcaggagtcccaaggccagcctgagcaaaacagcgagactccagtcttttttattttattttattttttaaagaaacaaaaaggaaggggaagagcacccagagctgggggcaggggttgaatgacttcaagcctgtgaagctgcagctgcaggtctgggaggagccagcacccaagggctggtcaacc

SEQ ID NO: 3650 - DNA, 396 bp, Homo sapiens
  source 1..396: mol_type = other DNA
cgccatttcctctccgataaactctaagctcttagggtaacccatggacctgcctggctgggtctgccccagggcactcgccggcagggcgcagccggtgatcgtcacagtccttcgaaattcttaagatctaggtcttgcctttccttcctccctggcaagggagggcaagacttggggcttgctgactccaggcccagcccagcccggggcacccaggagccagcacctcccggggcagggggcgatgacacacatgcagctgcctgggggaggccggcggtgtcccctcctttctggaaagcggagggtcctggtgggctcacgcagcccagaccgatgagggcggagacctcgcggtccccaaaggcgccccgcccgccagccgcgactgtc

SEQ ID NO: 3651 - DNA, 371 bp, Homo sapiens
  source 1..371: mol_type = other DNA
gcaatgctgtcaccgccatttcctctccgataaactctaagctcttagggtaacccatggacctgcctggctgggtctgccccagggcactcgccggcagggcgcagccggtgatcgtcacagtccttcgaaattcttaagatctaggtcttgcctttccttcctccctggcaagggagggcaagacttggggcttgctgactccaggcccagcccagcccggggcacccaggagccagcacctcccggggcagggggcgatgacacacatgcagctgcctgggggaggccggcggtgtcccctcctttctggaaagcggagggtcctggtgggctcacgcagcccagaccgatgagggcggagacctcgc

SEQ ID NO: 3652 - DNA, 413 bp, Homo sapiens
  source 1..413: mol_type = other DNA
ttttgatggcttttctcagttttcataattggcagaactgatttccgaatcctttaagttgatcagttgacaggaatgcatttatctgatgatgtaagcattattatttcttgctaatataaattaatttatggatattcatactattctcactttatttattttaatactgaatagcaattattttgaagagtaggattttctagggtctttaatgattatccaaaaattaatgtatgtattactgcatgatttcattatcaactgatcactgtagtggcacgtctgagctcactgcgattacaggcgcccgccgttggccaggctggtctccaactggaggcgtgagccacggcgcccggcgggcaagacaccctcgcacagggtgacgcagtacacaagtgcgtcacagt

SEQ ID NO: 3653 - DNA, 498 bp, Homo sapiens
  source 1..498: mol_type = other DNA
gccagttaatgaataggcaggaatttcactgcctggaaagaggaacaatgctttctggtccttatttcacatctaaaatagagaggtcaattgatttattgctaaatatctttgaacactaaaatagaagttttacaacatatatactactggttgctctagacttaagccagggaaaagtacagattcaacatttaaaattgagatagacgctttccagaatgagaatataataatatgccatacattgatgtcttataatttataattacagaaaacatgtgagttcactggaataaagaaattttgaagataataagatactttcacttatgtcgtaatttctatgtcattttaggatggagatattaacatttacacctaacttccctgggtagcgacacaaaatgtgagatacttttctgatttcattttctccaaaagaaagggaataaaagataaggaccctttattcaaggatcattaacttaatttgac

SEQ ID NO: 3654 - DNA, 491 bp, Homo sapiens
  source 1..491: mol_type = other DNA
gccagttaatgaataggcaggaatttcactgcctggaaagaggaacaatgctttctggtccttatttcacatctaaaatagagaggtcaattgatttattgctaaatatctttgaacactaaaatagaagttttacaacatatatactactggttgctctagacttaagccagggaaaagtacagattcaacatttaaaattgagatagacgctttccagaatgagaatataataatatgccatacattgatgtcttataatttataattacagaaaacatgtgagttcactggaataaagaaattttgaagataataagatactttcacttatgtcgtaatttctatgtcattttaggatggagatattaacatttacacctaacttccctgggtagcgacacaaaatgtgagatacttttctgatttcattttctccaaaagaaagggaataaaagaaaggaccctttaaatcattaacttaatttgac

SEQ ID NO: 3655 - DNA, 607 bp, Homo sapiens
  source 1..607: mol_type = other DNA
cacagaagattatactgtagcattatttgttacttttctctaaaacagtgggaacaatgaaaaattatgacatatatgaacttaattacataatctcagtcatgaagtgctgaaagaaatcattcaggaatcatttgtaaaccaacaaggtttattttaaccctaaaaatcatagaatatcatcattcattgaagctacatggtagcaaagactaaataaatatatgaaaatattttatattttaaaaattgtaatgaatttacaaaatttacaggagcagatacagtaacagtagctatgttgctacaagtatattttagaatcagatttccatttgaatttcaattatactttacaagtagtatctgagtcacaatgtctttacaaagagaaaataattcttaactgagatatttactgtaaagatataaacaaacctatgtttggaacaagttcagcttatctgaaagcatacaaatgaaaatattatacaggcgtgagccacggcgcccggcgggcaagacaccctgcacagggtgctgcccggccgagtgcagctcgagcgccgacgtcgcgacgcagtacacaagtgcgtcacagtggtcc

SEQ ID NO: 3656 - DNA, 348 bp, Homo sapiens
  source 1..348: mol_type = other DNA
tagtggatcacttgagcccccgggcatgtgtgcatgcctgcggtcccagctacttgggaggctggatcgcttgagctggaggtcgaggctgcagtgagtggtgatcccaccactgcactccagcgacctccttgatggtccagatggggcatcatctaatggaacagctttgatcatgggggatcccatattgtaggttctgttgataaggcaacagatcatgtattgaactgtaaatttccggcggggctcaagaggcttcctgggcgctgggctggccgcgcaagcgcagtagcgcgtctcgccgccatggcgtctgagtggcggcgacttcccctcaggaagccg

SEQ ID NO: 3657 - DNA, 194 bp, Homo sapiens
  source 1..194: mol_type = other DNA
ttattatttatttatttatttatttatttatttattaattttttgttcccactctgtccaggctggagtgcaatggcgcgatctcgtgggggcgagggcccatctctatggcagctgctgcttttgattgacagaggcatctggagttcagcatccccacctccaggaaaagtagcagagggggaggtaatagc

SEQ ID NO: 3658 - DNA, 337 bp, Homo sapiens
  source 1..337: mol_type = other DNA
ctggagcaagtcagcaggtgccactttctcctgccttgtaaaatattttaaaaaataagtttgtgtatttttctgtgtgtgtacacatgcacccacacacttgtgtgtatatgtgtacagacatatataaacacatgcatataatgtgtatatatgcattacatatatgcacattcatacatctttatgtacaaaatacatatatgtatatataaacaccgatgtacaaacacatacgcacacatctatatacatacacatgtgtgtgcacatatacacatacctgcatatacacacatttctgatattcattaatgtttgctgaattacagcaaac

SEQ ID NO: 3659 - DNA, 431 bp, Homo sapiens
  source 1..431: mol_type = other DNA
ttgccatttttttctcttaaaagaatgaatgggggtgacgggcttttatcctagaatagacctacgcttaataaaaagtgtttctcaaaaaatatgaagaattttcataccccccaaaaccactgaaaattttttataaagaatttttggagtggctggtgagttctgaagtcctaacactctctgatgctgcagacaggcaagaatcttaaaggaacgcagggcctttcttcttcacaccttgctgtccattttctaaactgaaaagtgaggttctgtggggctcacaaccctgcagccgtttactaaagcgccttaaggcgggcgccagtagtcccagctactcgggacgccactgcactccaggcgggaggggcacagggcttccccctcgtgaggccccgaccggaagccccaccgcaccgtcaggg

SEQ ID NO: 3660 - DNA, 238 bp, Homo sapiens
  source 1..238: mol_type = other DNA
ctgtggagtgcagtggtgtgatctcggctcactgcaacctctgccagttgaagcaattcttctgcctcagcctcccgagtagctgggtttcaattcttttttatttataactagaagtggaatttctctttattgtagccacacactatgaatgtcaaaaagtgacattttgacaattttgagccaggctttcaggcagcagaggcctgggtgcctctcctaggactaggaagattct

SEQ ID NO: 3661 - DNA, 301 bp, Homo sapiens
  source 1..301: mol_type = other DNA
agttgacttgcagcattaaaagttcaaatgccttggctgaacgacatgaattaaagtcatgattctagtgcactgggccggggctccttcccgttcctaaggaggcggaagagactaggctttagaagagctactaagtgccgcttctcgctttgtggggcgaggccaaccaccgcgatgcgacgaaattacgattgattggtaggtgcgatgttgaccaccagggaaagtccaccttccccaacaaggccatgggcatggagtggcagcggccgcagccaatgagagatgctcaatgggc

SEQ ID NO: 3662 - DNA, 274 bp, Homo sapiens
  source 1..274: mol_type = other DNA
ctttgaatacagcactggtgtctaggtatacccatattgccaacacaccggttttggaccaggtgcggtggctaatgcccgtaaattaattaaaaattggcctctccagaagaccctctctctaaaaaaaaaattttttttaatgttcactggtgccagtctcctcagttgacttgcagcattaaaagttcaaatgccttggctgaacgacatgaattaaagtcatgattctagtgcactgggccggggctccttcccgttcctaaggaggcgg

SEQ ID NO: 3663 - DNA, 306 bp, Homo sapiens
  source 1..306: mol_type = other DNA
gtaacacaaaggtcatgtgtttttagggatataagataaatctgttttccaaatgggcggagcaaggtgcagctccacctgcttcaccactaggtgcagaagaatgtccacgaagtgccactacttggaattcttgtccatggccacgttctcacttgggagaaacaacagggtcaggtcactcctttcgcttcacctagccgtggcctaagtacacttccccagggtaaggagcgaagtgccggagcccgtcgccggcgattgcgcattccgtcgcggagagggcacgcagactgtgtgcgtaac

SEQ ID NO: 3664 - DNA, 549 bp, Homo sapiens
  source 1..549: mol_type = other DNA
gactgatttctccatgtacatgggcacttgtaaaagatgagtgcctctttccaaagtctgggtcaggatgatgtccctgaggtgcgtggcagggacatgctccatgcgatgatcaccctcactaagagacatttagtctctgggtattaaagagacctagagctcttgatgtatctgtaattgctgcatgcattgaggaaacacggtatcaacttagtgtatctgaagtaaattgcttgatcttacagtggtaagaacaatgtaacatttacaaatatatgtagcatcatgtgaataaattttatttttaattttttttttagaaaggaacaatgttaaactcacagaaatgttgcaagtatatgaagagtcttttgaagacctgaaaattgtagggtctaaaattttactatgtgtttcctacaaaaaagaatattctccaggaatatttcaaattgtcaaaaagaaaccataaaatgtttctctctgcagacaaattctggtgctgagttactcagatgcgccagctctgcagctgtgcccagcctg

SEQ ID NO: 3665 - DNA, 732 bp, Homo sapiens
  source 1..732: mol_type = other DNA
cctgccacgcggaccctggggccggtgcctgggcgcccaagtcaggcagtccgcacagcagcggcaccagggtgaaaacctgctgctcagtaccatcccggttaccacgaagagccagccccggcggcccctgcgttcccctcaagtgggagggcgatgcacttgaccctgaggacatcaggtaccaggcccgccagctcacgccggcatcggagccgcagctgcagtctagacgtggtgcaccggcagcaagtggctggacactccatgcccgccccccgtggatcctgaggccagcaaccggccccgccagcagccgctgtttcatccgtgtggattgcccagcgccagggcccggagcggacctttgaggccaggtgggctgtgcgctctgcggccctgaggccatccaatgccagatctgcagttgcaaaccgcgcgtgtggcactggcaggagggcgggtgggggaaggagcagcccctgactctgcctccatgcctgcgaagccactcaggtggccgcggagggcccttgccagcaccctctcttccgaggaggagcggggcgggctgcaaggccagacaggccctcctcctcaggccgggctggctgcgcgcctgcgattctggggccgcccgggcgatcccaggagaaccggagagcccatcggcgcctgcccagagctgcagccctacctgccggcgcgcgccgccagggagcgtcttccggg

SEQ ID NO: 3666 - DNA, 729 bp, Homo sapiens
  source 1..729: mol_type = other DNA
gtcgccctccgctggccgtgtggggaatcgcgcctaggctggggctcccctggccccaggttagggggactccgatgcccatccagcctccgccaggcagcctggccctgaatggctttgagggcagcctccgcagcacaggacctgcctccgccctgtggggcagatttgggcgtctgactctggacacttacccagaggctgaattcaactccccgctgtgcccagcctgaggggaccctggcttggacttgggaggagaaggccagaggccagggcctggctctcaggcactaggtgcaggagaaaatggagcagagttcctgcaggaactgcctcagactgcccccgaggggacctggcctggaaccctccctgtgctaccaggctgctgttggggccaggaggccacagccctctgccctgaggtggctgcaactgagcagagtctcctgtcttgttcaccctgagcgcggagctccgcacaggacaggataggtccccacccacaccctgaaccctaagggtgggactcagaggctggagactggccccaggatcctctaagtgacaggaacccttggccactgttgattgccccgagggctgcctggccctttaagagggcagttctgcccaccacccctcccctagctactggagaagagatcccgtttcttggcaacaggaagcgtgtcacccaagcgactgggagccgcgtctgagccg

SEQ ID NO: 3667 - DNA, 634 bp, Homo sapiens
  source 1..634: mol_type = other DNA
gaatccggactcgggcggatttcaggcttcagctattaatagtaaattaaaataaatgggcaactgctgcatggtaatacttttttttttaaggcaaaaaataaaaaatagtgaagggtgggggtagcagcggtcccaccctcaaaaggcccgggctgcccagaccaagagaaagcgatcagcaccaccaccagcagccttctgctggggccggcacagctgggggcccggtgcaggatcccagcgccgaaccagcgccggctcagtggacgcggaaggggccggcggccgcggccggtcccatcccccactgcagacccccagcctgtggcggtggtccagttccgccaggaaaccgccgcctggagctgtgggtcgcgcacattaacgggtacgagcgcctgaccaaagtggttttgccctgcttcccgcaagaggtggcacccacggctggaacgcaggagtcagacccacagtccccagctctggacgcccgcagcggggcctcgaagaggttcagggcggtgcccgcggcgctcgggccgggtctcccggggcgtggggcggggggcggggttgggcggcggccggggctcctccctcttctgccccgggctcccctgctcttaacccg

SEQ ID NO: 3668 - DNA, 594 bp, Homo sapiens
  source 1..594: mol_type = other DNA
ttcgccaactcaatatataaaaggcctgttgaaaatggtgtaaataagttgtctatttcagcaaagaaaatgggaaaataatagatgaaacaactgtgttcctaaaatttttactttacaagacattgtatctgagcaggctaccctcttacaagacattgtccatggcccagggctgagatatgcatggaaatgcaggtcatttaagtgcttaatctaatgaaactcagagctttgcttctatgaacctcgcaggggtccgcagtgccagctcgggtaagtccgagggtcccccgccagcggaccccttcagagtccacgagcagccaaccacccggccggtcctgccctctctccggcgctgcaggagccagctagccccgcccacgcccggccgccagtccaagccccgccctcgggtcctaacgggaggcgcccgcggggctgtccgcggtcgcgccgggctccgcctgcagtgtggcccgtccggacagtccctcaccccggcctgcgctgctgcgtggactcgggcctcaggaattccgctgcggcccaaggcttgccgtttgaggcggtgggcaaggctgccctggg

SEQ ID NO: 3669 - DNA, 490 bp, Homo sapiens
  source 1..490: mol_type = other DNA
gggtttaattattttcactccacagcaaatgaagtgtggcgtaggtcctgctcatggattcgccaactcaatatataaaaggcctgttgaaaatggtgtaaataagttgtctatttcagcaaagaaaatgggaaaataatagatgaaacaactgtgttcctaaaatttttactttacaagacattgtatctgagcaggctaccctcttacaagacattgtccatggcccagggctgagatatgcatggaaatgcaggtcatttaagtgcttaatctaatgaaactcagagctttgcttctatgaacctcgcaggggtccgcagtgccagctcgggtaagtccgagggtcccccgccagcggaccccttcagagtccacgagcagccaaccacccggccggtcctgccctctctccggcgctgcaggagccagctagccccgcccacgcccggccgccagtccaagccccgccctcgggtcctaacgggag

SEQ ID NO: 3670 - DNA, 475 bp, Homo sapiens
  source 1..475: mol_type = other DNA
cagcacccttcgctgaattcagggggagtccccagtatcccctaggcacgccaggagagcctcctggaaatcctcactcagcagatccaggaatcccagctcccgagagcgcgcccctgcactcccacctgggcgacagagtgaggctgtctccccccaccggcgcgtggccggcgagcacggcccctcccagcggaggtcctacaggcgcccgcgagccccgcctctccagcttcgccgcgccagcaccccgccaccggcgctggctctgaagggccccggcggcggccgcgtctgcgcaagctcgggacggcctcgggaggcggggctggcgcggggcggacgcgggggctggcgcggggcggacgcgggggctggcgcggggcggacgcgggggctggcgcggggtggcgggcgggggctggcgcgggggcgggcgggggctggcgcggggcgggcgggggctggcgcgggt

SEQ ID NO: 3671 - DNA, 412 bp, Homo sapiens
  source 1..412: mol_type = other DNA
ataatattgtatattttaaagtaactaaaagaatataactacacaaaggacaaatatcccaaatatctcaggtgccataaatgttcacacctctggaaaaacgtagctttgttcctgaagtaagattttatcatatgctttagctgcacattagagtcacctgcagctcttttcaaactgtcgctccacagctgggcctcaggcatcaatgtcgaaagctctcccagcttgcagccagggccgttccagcaactccaaggctggctggtgtgcgctgaagctagctggacacgaggcacacattccctgcggacggcgctcccatcggatactggagggacgcgactctcccagctaaggcgacagcgctggtccttgcgaaggccccgcagagcgcagtcgccaggaccct

SEQ ID NO: 3672 - DNA, 466 bp, Homo sapiens
  source 1..466: mol_type = other DNA
gtgaaaggaatcctttctgtactctcatagtatgttgaatgtgacataattatagaacatactgcctctattgtgattttacagaccaagagtcatttggggcagtaacttactcatatttgtaactgtagaataagaaatagtataactagtatttgatagcacatcagagtaattacagccaataatattgtatattttaaagtaactaaaagaatataactacacaaaggacaaatatcccaaatatctcaggtgccataaatgttcacacctctggaaaaacgtagctttgttcctgaagtaagattttatcatatgctttagctgcacattagagtcacctgcagctcttttcaaactgtcgctccacagctgggcctcaggcatcaatgtcgaaagctctcccagcttgcagccagggccgttccagcaactccaaggctggctggtgtgcgctgaagct

SEQ ID NO: 3673 - DNA, 200 bp, Homo sapiens
  source 1..200: mol_type = other DNA
ggtcctcagccaccctggatgcatcctgacttgggagctgggaggggacccagcacagctggagagcatgagcaggtcatgctgatgtgagccccagaccagcacctgctgtcctgggggccccttgggctctggaaaatacctccaggaatgatattcctccttggtgaccaaaaagggcaaggagctctacatgaggc

SEQ ID NO: 3674 - DNA, 488 bp, Homo sapiens
  source 1..488: mol_type = other DNA
acttatgagtgcatgtgaatatttttcagtcacaagagacatttccacggcatgttctttagcaagatatcctccagcagatttccccatgacctgctcagctacaggcgactttctgggcattgggcatacagctgttcacaaaacagagacctgtgcagacacgtttctggtcatatcctatcaggatgaggtatggccaggccaaagggcatacctctgggatttgccctcccaaaggcctgtgggcctggcagtgggcaccgggcatgacctgcagggacgagcaagcctgggtcctggccctgtgtctctgctgttttcccagctcctagactgggacccagctggtggcagccgttgcctgcaaggatctaggtggtggggagcccaggcttccacccgaggccaccaagggcggtcccagcctggccctgcccctgcccttcctatgctccaaggcaggcagggaggcgggcccaaacctg

SEQ ID NO: 3675 - DNA, 729 bp, Homo sapiens
  source 1..729: mol_type = other DNA
aggtctccggcctcgcggctccaaggaccccgggctccgcccggccacgatgcccttgccctgcccgtgcgtggcacccgccgcccgaaggcgggcgtctccccctctctgcggagcaggcggcggcggctgcgagtccgtgactcgaccaaggtcacgcagcaaagtcgccccgagtgcacgcgcgtttccagaacgggagaactttggagacgcattttcaaagggggccagcctgggcccagtttaatctccggcggagggttgcgggaaatgcgccggggagtgagggcttcccggatcccccgccgccgactccgcgcgggccagcggcgcggggcgggccgggatcagcgcctccccgggagagcgcagccgccgccccctcctctcgggaccgccgaccgcgcggcctccaggggctggcggagcagcggtggcgacgcgccagactccgtcctgggctggcccgtgccgggcggggcggggccggctccctccgcccttcccgggcaggcgcgggggggccgcagggacgcctcccggagtggccgccgcgcctaggccaatgagcgcgcggggagcggcgatggaggctggggcggccgggagcgcccgggacccccgccgccgcgccgccgccgccgcgcccccgcgccccggcgcccgcggggctggagagggggcgacagaggcgcagcgcccgcgccgggcatggaggcgccgctg

SEQ ID NO: 3676 - DNA, 389 bp, Homo sapiens
  source 1..389: mol_type = other DNA
catggcacgccgtcgtaaagctcttgatgatctgaagctcggcagctgaagagctgagcagtagctgtctgtggagttcagctgccactccctacacgcctgccctctgcaggggatggacacttccccacctgcgcccagcagtgcaggtgaaggcctggctgcggcgctgcgctttggggtcagctctggccccaggttctccataagtaaaacgggggcatctcctagaccactttccccaacaatgggaaaggcgccgcagggtccctccgagagaggcggctggcgcctggctgaacccgtagcctgaagacccgccggagccgcccgccccacgatgggcccgcccctccgggattggcgccctgctagtggccattgcctgt

SEQ ID NO: 3677 - DNA, 462 bp, Homo sapiens
  source 1..462: mol_type = other DNA
gaagttgcttctcctcatcgagaaatagacgcatcttttgatattgaatattgattatcaccttacttaatgacacatagtttggctcaacagaaaacttcaaataattatatgctgggtgtaatcaagcaatctataaactttctgtcttgcaaggagtcttaatcaaaacctatataaagacttctaatttttccatgtctgattcacctaaatgttaaaacacatttagccatacactatattatgcagattgatttttcactatatttttactctatatactattttatatactattctattgacatctccatgaaaggtttataccaaccttcaaatttgaactagaatacatttatccaataaactagaattaatttggttagcttttgcaattcctattatatcaattatatcaaaataaagataaaacttctgttctgaagaaacttaatcatc

SEQ ID NO: 3678 - DNA, 448 bp, Homo sapiens
  source 1..448: mol_type = other DNA
gatgaagttgcttctcctcatcgagaaatagatgcatcttttgatattgaatattgattatcaccttacttaatgacacatagtttggctcaacagaaaacttcaaataattatatgctgggtgtaatcaagcaatctataaactttctgctcttgcaaggagtcttgaatcaaaacctatataaagacttatgtctgattcgcctaaatattaaaaaacatttagccatacaccatattatgcagattgatttttcctatttttactctatatactattttatatactattctataggtttataccaaccttcaaatttgaactagaatacatatcataccatttatccaataaactagaattaatttggttagcttttgcaattcctattatatcaattatatcaaaataaagataaaacttctgttctgaagaaacttaatcatc

SEQ ID NO: 3679 - DNA, 411 bp, Homo sapiens
  source 1..411: mol_type = other DNA
tcccagttagatatccagttatggcaacctctcattgtataaatgttcgggttattatttaatttcagaagcaatcacaatatgttatcctattggatactagttacaagtttgctttgttttacttaggtttctgaaactgatgaaaaaatgcaagatgaaattgccaggctcattaaaagactttgaaattgtccttgaatgctgctctatgtgatcatgatcaaagtcactcatcaaaaagagaccgataaatgttgtcatttacaggaaaatttgaattctcatgttctactttctaaagctgagagtaagttcagagtcctcgaaactgagcgctttggtttttgaacacgtgcattttgtcaactaaaaaaacaaaatatgttgcttcaacagccttaatattca

SEQ ID NO: 3680 - DNA, 861 bp, Homo sapiens
  source 1..861: mol_type = other DNA
ggacttgggcgacggggtggtgaagtcaggctgtggccccagcggcgccacgaggccgaaaaccggcgctcagcctcatcccggtggctgcagagtgccaagcgccaggtcctgcgctccgggcgcgggtcagaagcagctggcaagggcagcgcagcctgtgggcccttgggcgctggccggccgcagctccgggaagccacgtcagcccacgggcgctgcagctgcagccgccaccagcacatggagcaggggtccccgaggattgggaatccccgaccaggcctgcgcctccagccgcgcggaccccggggccagcctggccgcggcaagtcaggcagtctgcggcaggagcgccgggcatgggcttcggccgggggtgcaggaggcgcgcaccctccggccggatggcggcgcactcagggctcaggaggccatcccacgggagccccgccagcccccgccggagcccgagctgcagtgccgcctgcaagtggtgcgctggctgcagctgtggcaaccccagatcccgtcctcccgcctcgcacccatcagcgcggaccccgggggcgacgcagtggcgatgtcgggctgtgggcccagcggtggcactaggcggagaagcaccactcaaccccatccctgggctgcagagggcccagcgcggggggctccgagcgtcgggagcctgtcgcgcgggcgacagttaaacaggccctggggcagggcgcgcctcgcgctccagggagccccgccctcccgcggcacctccgcagcaaccgccgcctgcactgggcgcgcgagagctgctagggcggtttccctcgggcctgttgggcagggccggctaaggtgcgcgtg

SEQ ID NO: 3681 - DNA, 260 bp, Homo sapiens
  source 1..260: mol_type = other DNA
gaattcttgggccatgtgtgtgctccggcacacgtgtgtcacatgctctggcatgtcaggcgaaggtctttgtttacgcggagcttagggccgatgctcgaagctcaagcacccggggcctcgcggccgcctgcagtactcccctcccaccgcgggccagggccgactggaaaacggagcaggccatccccagagcacgggtcccgtggccacgttgagtgtcgcagagtacgggacgcagggcggaccagcgcgcatcc

SEQ ID NO: 3682 - DNA, 791 bp, Homo sapiens
  source 1..791: mol_type = other DNA
agcaaaaattttgcagttataattactcaacacaagttttaaataaattacttttattttgagcgttcattcttacgtatgttataggaagtaagtaagaagcattccttactccttagaattttgtttataagttagtgatgaattggccctggaattctctgataagcacaggtgatgaggaaaatggagaaatccaagaattcctttgtctttccttgaaagtagtcaactttaagtgcagtgcaggtgtgtaaatgcagcttttctaatcacaataacgaatgttacttgattaatcttagagaccaacttccggagtgcaggcagcagccttgcctcacctgccggacttgggcgacggggtggtgaagtcaggctgtggccccagcggcgccacgaggccgaaaaccggcgctcagcctcatcccggtggctgcagagtgccaagcgccaggtcctgcgctccgggcgcgggtcagaagcagctggcaagggcagcgcagcctgtgggcccttgggcgctggccggccgcagctccgggaagccacgtcagcccacgggcgctgcagctgcagccgccaccagcacatggagcaggggtccccgaggattgggaatccccgaccaggcctgcgcctccagccgcgcggaccccggggccagcctggccgcggcaagtcaggcagtctgcggcaggagcgccgggcatgggcttcggccgggggtgcaggaggcgcgcaccctccggccggatggcggcgcactcagggctcaggaggccatccca

SEQ ID NO: 3683 - DNA, 397 bp, Homo sapiens
  source 1..397: mol_type = other DNA
gactttgctgcccggcggggctggacagggaggcctaggaatccccgcaggcctggggagggccgggagcgtcagcggacttccctccagggcgggcttgtggcagggggaagtacttctctctggggcctgggggctttccctgcacccaggaggaaggaccctcatttcccttcggcccaagcccaggggcctgggccccggggactgtgttctggcctagcttggccaccaaccttggcagcaggcatttgtcaatgtttgtggtgacaaatttcctccgaggtcagcccagactgcgccccacgtgaggggcgggggcgggcgcgggcgccagcgccttcctgctctgcccttgtatggtgccccggaggccggcccacgggtacttaacccg

SEQ ID NO: 3684 - DNA, 656 bp, Homo sapiens
  source 1..656: mol_type = other DNA
ctgatcttaagagcagtttagggcttatggctaacttattagtcctacaaaggcagtctagttcccagataagaagatttgttttggctttattttaaactataaactaagttccgcggttatcactgggagcccccagcccccgcagagacatgcggagccccgcccccaccctgcactctaataaagaagggggccagcgtgccggcctctacacctggcaggattctaacaggaacctggccaggtttctccgcggggcggggctgggacggccggaagatggcggcgacggcggcagccgggtccgagggtcactctcctcgccgccgagccacctaccttgctagcaggcggcctccgcgcatgcatgaaggggcaggagggggcggtgacgagcacttcacggcgccaatgagcacccaggagcccaggtagggtgcgcgcgcgccgcgcgtgtggcagtcgcggaaggcgcgggagctttccgcgcgccctgcatcccggccccgggcgcccgctggaggtcgccgaggagccacagggctgactggtctgctgcccgggcccaggagtgcctggtgtagcagtcgcggagccatcccggcgtctgctgccatgaccgactctcccctcagaggagactcttcctcagc

SEQ ID NO: 3685 - DNA, 501 bp, Homo sapiens
  source 1..501: mol_type = other DNA
tggagtttgtttcaacattactcaatcagtctcccttagcattccgggatctccatctgggtgctgatcttaagagcagtttagggcttatggctaacttattagtcctacaaaggcagtctagttcccagataagaagatttgttttggctttattttaaactataaactaagttccgcggttatcactgggagcccccagcccccgcagagacatgcggagccccgcccccaccctgcactctaataaagaagggggccagcgtgccggcctctacacctggcaggattctaacaggaacctggccaggtttctccgcggggcggggctgggacggccggaagatggcggcgacggcggcagccgggtccgagggtcactctcctcgccgccgagccacctaccttgctagcaggcggcctccgcgcatgcatgaaggggcaggagggggcggtgacgagcacttcacggcgccaatgagcacccaggagcccaggtag

SEQ ID NO: 3686 - DNA, 719 bp, Homo sapiens
  source 1..719: mol_type = other DNA
acgccgccatcaaggcagaggcatggccaggacggccgtgcagccggcgccagaggcggccgaggagaacgcggcgtgagctgagtagaggcggccgtagagctgcgcgatctgctgcgcgcgccgcacgcgcaggcccgtgacgaagcggcactgattggccagaagcgccagcaggcccccgccccgcgtccccgccagccaggcggccagcagcctccgcgggagcatgccgcctcccgcagggcccgccgcgagcttccggggcccaaggaaccagtccggaggggcgcaggcggtggtcgcagcgtccccctaaatggccggccacgaacccgcggtcccgcggccaggagccgccgctcatctgtctctgcagccaccgctgaggaagagtctcctctgaggggagagtcggtcatggcagcagacgccgggatggctccgcgactgctacaccaggcactcctgggcccgggcagcagaccagtcagccctgtggctcctcggcgacctccagcgggcgcccggggccgggatgcagggcgcgcggaaagctcccgcgccttccgcgactgccacacgcgcggcgcgcgcgcaccctacctgggctcctgggtgctcattggcgccgtgaagtgctcgtcaccgccccctcctgccccttcatgcatgcgcggaggccgcctgctagcaaggtaggtggctcggcggcgagg

SEQ ID NO: 3687 - DNA, 369 bp, Homo sapiens
  source 1..369: mol_type = other DNA
cacaatttttactggagacaagaatgggcaggataaactatggggcccataggaccctcccatcgtctgcagccacattccgactgttgtactgcaatccgattaccatagaactctaagatatcttttaaaacctagtcatattaaaagttccttaggatccttagaagaggccagctaactgtgatacctagcaccctggtggctttaagggccagcgcgcagcaccctcacctttcagcagccagctcctggcgcgaacaggtgcctccgtggcaggcgggctcggcgagggcagtgcacagcgccgtgatagacagggcgccaggcagggccgaggccaggctacgctccggctgcttgggcaga

SEQ ID NO: 3688 - DNA, 660 bp, Homo sapiens
  source 1..660: mol_type = other DNA
gattctccggtcgccgccgcacgaggccagcagggtccccgcggggttccaggccaggaaccagcagcgggagtccgggtgcgccgggacacggcccagcagcaccagcgagtccttcatgtcggcccgacgcagggggaggtgggggcgggcagagtccgctgagcagacagcgggtctcaccgcgcgcgtctgcgtaccgcccactccaggcttccgcggccgacagaggctcccgcttccgccggaggacctgggtcgccccggaaacgctgcggccgccataccctctgggagatcgcgggaccgcctcgaactaccagtcccgtgaggccctgcgcagagccggcggcgcgcccaggctgtgacgcgcgcgggggacggggcgcatcggccccgggtctgtccgggcgttgcgggattggggcctgggaacgctcggcccccggcagccgagaagcccgtgactgggctgagcagcaccatcccagccctggggcctgctgacgggagggtcttttctgcgcacaggtcgcaccccaaaccgccggtcccagatcacgggtccccgatccccgcggcccagcccggtcctccgcccctcggggctgagaccctgactccgggtagtctgcccagaccccatctggcccctggccc

SEQ ID NO: 3689 - DNA, 542 bp, Homo sapiens
  source 1..542: mol_type = other DNA
ccaggctggtcttgacctaaaacaaatctgatctaaaattgctattggttccccaggataggttcagcctcccctgcaggctgagcgcctgcactacgcgcaggctgagccctcagcgctgagggccgcgcaaccaggctgggccttaccctccgattctccggtcgccgccgcacgaggccagcagggtccccgcggggttccaggccaggaaccagcagcgggagtccgggtgcgccgggacacggcccagcagcaccagcgagtccttcatgtcggcccgacgcagggggaggtgggggcgggcagagtccgctgagcagacagcgggtctcaccgcgcgcgtctgcgtaccgcccactccaggcttccgcggccgacagaggctcccgcttccgccggaggacctgggtcgccccggaaacgctgcggccgccataccctctgggagatcgcgggaccgcctcgaactaccagtcccgtgaggccctgcgcagagccggcggcgcgcccaggctgtgacgcgcgcgggggacggggcg

SEQ ID NO: 3690 - DNA, 632 bp, Homo sapiens
  source 1..632: mol_type = other DNA
cagggcgccaggcagggccgaggccaggctacgctccggctgcttgggcagagcgctgcctcccgggctcctccgccggcgcccgccgggcagccctgcgcctccgggggcgtacatgcccggggccgcccgccgtcgctccgcagtcgctgctggtcgccgccgacctccgcggggcgcgcagagcctgacagtccgcgctccgggtctagccgggactgggctggggccaggggccagatggggtctgggcagactacccggagtcagggtctcagccccgaggggcggaggaccgggctgggccgcggggatcggggacccgtgatctgggaccggcggtttggggtgcgacctgtgcgcagaaaagaccctcccgtcagcaggccccagggctgggatggtgctgctcagcccagtcacgggcttctcggctgccgggggccgagcgttcccaggccccaatcccgcaacgcccggacagacccggggccgatgcgccccgtcccccgcgcgcgtcacagcctgggcgcgccgccggctctgcgcagggcctcacgggactggtagttcgaggcggtcccgcgatctcccagagggtatggcggccgcagcgtttccggggcgaccca

SEQ ID NO: 3691 - DNA, 633 bp, Homo sapiens
  source 1..633: mol_type = other DNA
gcagcaccctcaccccagctcctggcgcgaacaggtgcctccgtggcaggcgggctcggcgagggcagtgcacagcgccgtgatagacagggcgccaggcagggccgaggccaggctacgctccggctgcttgggcagagcgctgcctcccgggctcctccgccggcgcccgccgggcagccctgcgcctccgggggcgtacatgcccggggccgcccgccgtcgctccgcagtcgctgctggtcgccgccgacctccgcggggcgcgcagagcctgacagtccgcgctccgggtctagccgggactgggctggggccaggggccagatggggtctgggcagactacccggagtcagggtctcagccccgaggggcggaggaccgggctgggccgcggggatcggggacccgtgatctgggaccggcggtttggggtgcgacctgtgcgcagaaaagaccctcccgtcagcaggccccagggctgggatggtgctgctcagcccagtcacgggcttctcggctgccgggggccgagcgttcccaggccccaatcccgcaacgcccggacagacccggggccgatgcgccccgtcccccgcgcgcgtcacagcctgggcgcgccgccggctctg

SEQ ID NO: 3692 - DNA, 337 bp, Homo sapiens
  source 1..337: mol_type = other DNA
acagaacaaatctggtctaggggactgctattgaggggaggtcaccttcagccataaggcgccattctactggaattaagtcatagtccccctgcctaccggtttccctgggcggcagggagggccctgggccccggccctgttcgttcagctgctttctttttcaattgttgaacacagaagagaaaggggagagcacgggccctgggtccttagtgccagcgggcggccagaaccagagtgcgggggtctagggattcggggacccagacgcaccaggcgccccagacacgccccgccccgcacttctggggcgcgacccggaagcggaagggaa

SEQ ID NO: 3693 - DNA, 501 bp, Homo sapiens
  source 1..501: mol_type = other DNA
ggtcccagctactcagtaggctggcagtgagccaagatggtgccactacactccagcctgggtgacagagcgaaactctttctctgacacaagacaggaagactaagggctctttctgatatctgaagatccctttcaggaaacccattcttaaggtgtgataaagcttgtccagcctccacaccgtataagctgccctgtaggtaggattcttactcccacgtggccagtgagtagcaagcaaggccccaagtaaggtctttgggtgctgtgctcagggccagcccgaagtgagaatgggttctccactgaactgagctgagtgcagctgacagcaggcacggcggtgccccatttgccaccccagggaggccgagcagcggagagtgtgtggccacggcccctccactctcccagcaaacccacgggggcctcggtgcggacagagacccggtgtggggaggccgctgcccctgcacgctgggccacgggggtttgggc

SEQ ID NO: 3694 - DNA, 347 bp, Homo sapiens
  source 1..347: mol_type = other DNA
aattcaatccttagggttagatgaaactgaataaaacgatggccttcatcttacactatattaaatgtacattttgtactatatttaatgtatacatagcatttaccacagatcgggctgagcgcggtggctcacgcctgtaatcccagcacttcgggaggccgaggtgggcggatcacctgaggtcaagaccaggcctgaatcccagctactcccactgcactccagtctgggggacatgggttccactcactctgacgccgcccgcggaggcccgaggtggtctgcgcaggcgcgctgctggcccggcccgccggcgacgtcacgcggccgttacggcgctcagg

SEQ ID NO: 3695 - DNA, 282 bp, Homo sapiens
  source 1..282: mol_type = other DNA
cccagctactcaggaggctgaggtgggaggaacacactctagcctgaatgacagtgagagttagagtaagcctaaccgaaataaatattgacgggctaggtggcagttctgggaaagtggaattcccagaaattccagtgagaaaggctggagggaccatcaggtcctgggatacagcaaatgcaattcaatctgcttcagcaacacagattgagttccttgttccaccctaggccagtggaaccttaacacttggaccattacaatgcacagcaaatcccc

SEQ ID NO: 3696 - DNA, 471 bp, Homo sapiens
  source 1..471: mol_type = other DNA
agtattaaaattcatcaacaaagatttttgtgtagcttctatgtgctaaggttcccatcctagcacaggtccatgccacactctgtggcaggcctggccacagagcctaggccaaggatttcaggatccaggatagagtgcagtggtgtgatcaaaacacactgcagcctcctcccaaagcagggattccaggcgtgagccgccgctcccggcctcacctggcactttgctcgctccacagagtcctcagtgctctgctgaaagcaaggaggctttttccaaggctctagttttgcctccagggaaactcctccgctcctctaggtgaggagcctattccaggggctccagtctgaaagcctagaggtccccggactcaagggcggtccccgccccccgccttctccgcgcgacgaagccgggcttaccaatgggagcccggaggggcgggactgcggggaggtggccggc

SEQ ID NO: 3697 - DNA, 649 bp, Homo sapiens
  source 1..649: mol_type = other DNA
aaggaggctttttccaaggctctagttttgcctccagggaaactcctccgctcctctaggtgaggagcctattccaggggctccagtctgaaagcctagaggtccccggactcaagggcggtccccgccccccgccttctccgcgcgacgaagccgggcttaccaatgggagcccggaggggcgggactgcggggaggtggccggcgggccgcgccgcgagccagtatctcagagagcgcggggtccggacagccgcgcgctgagggtctcggggcgggcgccgcgggacctctccgggccatgggtaagcggctctgcggcgcggcccggacaggggctcggcggccctgcagggaggttcaaggtgccggcgccgggtcccctccagccctcgtggcagtcggtgcgggtttcggggcgcgggccaaggggagcgagcccggcccgcggcttcagcgctccccggccggcgcggaaggggtgaggctgggccgagcccggtacggctggtgacagctgtcggcagccgcccctccgccccgtgacatcccgcaggtttcagaaccgcggcgccgccgggcacagactccgggtccagagcgcgcggccctttcctctgcggccgccgtttcctgaaaggggctgcgc

SEQ ID NO: 3698 - DNA, 616 bp, Homo sapiens
  source 1..616: mol_type = other DNA
cgtccaggctggagtgcagtggtgcaaccatggctcattgcagcctggacctcccagcctcccacctcagcctcccgggtagctggacctaatttctaaaattttttgtagatacgggggcaggctcatctcaaactcctgagctcaagaggtcctcccgcctaggcctcccaaagcgctggggtggaccgttgggtgctcgaccgcccagagggcacagaactggggccgtagaagccagcctagtcctccgccctcgctttccctactgaatatgcgcgagggggaaagaggcgcggtgcccgcagcgccggggcgtggaggcgttaacgcgcacgcgcttagggatccggccgtggccgagcgcgcggccgtaagaccgcggggatcgcggccgtggttgggacggccgggggtctcggcgagggcttcagggctcccggggcatgcgggggcccgggctagggccggctgccggtgctggtcgggcggggcgggtcgggccgggggcgggctggcaggggccgcgtctgggcctccgtgacgcggacgccgagccctgccccagggagcgggaggcgggaggcgggggccaggcggctcctcctcgtcgcga

SEQ ID NO: 3699 - DNA, 178 bp, Homo sapiens
  source 1..178: mol_type = other DNA
tgggacaggcacgattaattaattactatcacggcaaaggagtcatttgcatttgaagagaatgtgaaattgggaccagaagaaacgttttatctctttaaatttactctcgtacgcagaaaacaaaatacaggggggctgggcattcggctacgccccttttctgtggctcttcggc

SEQ ID NO: 3700 - DNA, 477 bp, Homo sapiens
  source 1..477: mol_type = other DNA
ggtgagatttatcatcttgaaccatgtctcttatgttgtcagtcagtcaaccaaataaccaattattgatcagtcaacatttgaacaattacctatacaaaacaatctagggtcagtaacaaaattctttttttttttttttcgtccaggctggagtgcagtggtgcaaccatggctcattgcagcctggacctcccagcctcccacctcagcctcccgggtagctggacctaatttctaaaattttttgtagatacgggggcaggctcatctcaaactcctgagctcaagaggtcctcccgcctaggcctcccaaagcgctggggtggaccgttgggtgctcgaccgcccagagggcacagaactggggccgtagaagccagcctagtcctccgccctcgctttccctactgaatatgcgcgagggggaaagaggcgcggtgcccgcagcgccggggcgtggaggcgttaacgcgc

SEQ ID NO: 3701 - DNA, 446 bp, Homo sapiens
  source 1..446: mol_type = other DNA
acccccatttacagatggaaatggaaataattctactggcttgttcactgctctattgtcagagcctagaacaagtgcctggtacgccttccacatcaggcagccactggttgatggaagcatggccgcaatgccagcctttctttttctacatcaggaaaagcacttttctcgccctgcctgcagagcgggccacccctagctgcaggtgagggacgggagaggagcctcccacgtgcggccgtgcgaggccgagctaggagaccaggtcccgggagcactgggcgggtacccgctggcggctctcgcgcggcggcgctgctccaccttaagcgactgtacccccttaagggcgggcgctcaagcagcgagccccgggggcggggcctccaatgcaaatgaggggcgtgggcggcggggcggggcgggcggggcgctgacctgac

SEQ ID NO: 3702 - DNA, 560 bp, Homo sapiens
  source 1..560: mol_type = other DNA
agaatattccatactgttctaaaatcgcttcagcagtgaggatcctctggaatagatcttgttaatcctgaggaattattctccaccagatgtagtaattcctgacagaactgccggtatcaggctggtcgcgccggaacccagcgggtccgcggcgggaacgcaggggctgtgtcccacgtccccagggcctttcctaagaaaaagtctgcaacttcaggcgcgccagcacccgaggttcttccgaccggcgttcccagagaattggctcggcctccgggcgcgggggacagcatcgggaggagtgggactccgggcgccgcgcacgggccgaggacagccgggcttgggaggccctgcccgccgccccgcgtcctcccggccactgccaccccgcgcatccggagccgcagcagactcggcggggcccggagccccacgcccccggcccgcccctggccgccaccccggcgcagcctagtccgaccctggggcccgcccccgcccaccgcctattggccgaggaggcgcgaagagccccggggaggcgcggggcgagc

SEQ ID NO: 3703 - DNA, 333 bp, Homo sapiens
  source 1..333: mol_type = other DNA
tggggcctgtggccatccttggccacagtttcccgggcctgtggctggaggggcacactccgtccctggagagcccagaggcccgaggacaggcgccaggcttggcttcggggctggggcagctgccatgtgctctcagagcactgagggaaaactgcaagttgggagatcacggtttcctcacgtggccaccatgagggctgaggctgtaggctggccgctcctgccccggctgggaggcagccggccctacaacatggaggcccaggctggacgtttcacccgaatctgccagagtcatctggcccaggggcttgcacctgcataaagggc

SEQ ID NO: 3704 - DNA, 338 bp, Homo sapiens
  source 1..338: mol_type = other DNA
gtctctatttttaaaaattcaaaataaattattttttaaaaaaaggttagccacctgcagaattgcagactgcagtgagctataattgcactacagagtgagaccctgtctctaaaatgcaatgataaaaatttaaaaatataagaaaataaataaataaaattcctggtgcctcctgtgcccacagtgcacagcaccctctaggtgatgtgtgcaggatcagaataaagtcactgggatttggtaggaattagaagaaatctactcaaactgtaatggcatgatctcagctcactgcagcacggccaccacaaggcctctttttttctctccacagg

SEQ ID NO: 3705 - DNA, 438 bp, Homo sapiens
  source 1..438: mol_type = other DNA
ctggtcggcagccctgaatggagacctgggccgagggacccaagtcagcccgactcggccggctacactgcgcaactcaggagacacctgctctctgaggagggggacatggttatttctctttttaagcatcatatgaacctggattttttaaattagtgtgagacctttacatcaataatttagctctgttacccaggctggagtgcagtgatgcgatctcagctcactgcaacctcagcctcctgagtagctgagactgtcaccatgttgaccaggctggttttgagataggaatgatcattttccccatttttcaattgaacaaactcaggttagtcacgcagaagcttgcccaggtggggcacctgagatgattccaggcccctcgctgcagggaggcgggcactacgctgtgtgccagttcctgctggaaag

SEQ ID NO: 3706 - DNA, 608 bp, Homo sapiens
  source 1..608: mol_type = other DNA
ctcagcgcccactgtggggccagggggttctgcacaaaccaaggccctgcccctgccctgaggtggagctacaggcaggacaagttgtggccacctgccccttgctggacttgtaaggaagagcagggtacggggaggggcgtctcgaggcctttccagccgtcactttgccgctgccccgggggcggtcggccttggtccggggtggtgccaggggctaaaaaccgtggagcgcgccccggcccgatggctccccagctactcaggagtctgacgcaggagaatcgcttggtgagccgagatcgcgccactgcacacaagtctgggtgacagcgagactccgggagcgcgtggcgcctccctgccctagggactaggggcggtacaccctgcaaggccaggcggcccggcggccctccagcggcgcgcggctcccggaacccagcgcctcagtcctcgcttggccttggacgccctcgcgcggaggcctcggggcacggccgggcgcaacaagccccgccctaccgctaaggcctaggggcgacagccgcggacgccgagcggccagatcagggacgcggggcgggccctgcgtccgcccctcccgc

SEQ ID NO: 3707 - DNA, 608 bp, Homo sapiens; identical to SEQ ID NO: 3706
  source 1..608: mol_type = other DNA

SEQ ID NO: 3708 - DNA, 618 bp, Homo sapiens
  source 1..618: mol_type = other DNA
ctgaggagcacgctgcgaaggtgcgcggtccgcagacggcctcccggtgggttttgatcatgaagaccgattccgtaaactcagcgcccactgtggggccagggggttctgcacaaaccaaggccctgcccctgccctgaggtggagctacaggcaggacaagttgtggccacctgccccttgctggacttgtaaggaagagcagggtacggggaggggcgtctcgaggcctttccagccgtcactttgccgctgccccgggggcggtcggccttggtccggggtggtgccaggggctaaaaaccgtggagcgcgccccggcccgatggctccccagctactcaggagtctgacgcaggagaatcgcttggtgagccgagatcgcgccactgcacacaagtctgggtgacagcgagactccgggagcgcgtggcgcctccctgccctagggactaggggcggtacaccctgcaaggccaggcggcccggcggccctccagcggcgcgcggctcccggaacccagcgcctcagtcctcgcttggccttggacgccctcgcgcggaggcctcggggcacggccgggcgcaacaagccccgccctaccgctaaggcctagg

SEQ ID NO: 3709 - DNA, 680 bp, Homo sapiens
  source 1..680: mol_type = other DNA
agccaggaggtagctccaggtgcccgtgggggtcctccatgaggaccacctcctgcccagctcagaggaccagctggcaggaaagacgctgaggccagagctacaagttgcttctaggaggttctgcagcgtggctccccacagcccctgaacagtagggctcatgccacttgttaatcagccttccagtggcacgaggagtcattttctggggataggcgctttgcccaaagcgtgagaagcacaggccctttctgttgattgaagggtcttcctggctggtgaagccctttccagagggggccaaacggcagacccctctggtccgccccaaaccctggatactcgcctcgacgtggctcgcccgcggtcgtcacggtcgggagtccctctccccagcccagcccgcccggagtcttcgggggacaccctccaggcgctgtggcgcagcccgcgactccgagccccggggctgctggacacccggaggggttgaggtccgggcacccagagaggcggaggtccgagcccccgggcggagagcgggcgggtccacaggtcgctgcgggtcgcagccccctcctgagcgagccttcgcggcccgcccccggcctccgctcgacccccccagcctgacgtcaaggggaagggggcggagagccgcggccgcgctaagagcc

SEQ ID NO: 3710 - DNA, 807 bp, Homo sapiens
  source 1..807: mol_type = other DNA
cctcggcgctcccacccccgatggaaagtttggggcgggcatcggatttccctgccgcggccccccgcccgcccgcccattccgctggggaggcgggttgtcccggaaagccaggcccccgggccgagccgggccgcgccgtccccggctggagcgctcgccctgcagggagggccgcggtccacggctggccgctcggggtgggcgagggtgtggggtgccccgcctggatcccgcacccctccccccaaccggctgcccgtttcctcgccctggggggagctgcgggtgggagcaccgctgccgggcggatcctcggagcacgccacggggtgcggcccgatcctcgggtaaggagccgagatggggggctggtctggggcgcagcccccgctctcccgcgccggggctctgggccgacagggggcgtccgcaggccgggctcgccacgctccccgcgccgccgctttgtccggggggacccgggacggggtcttggcggggaccccccagcttctgcgtctccgcccctggcacgggaaggctggagcaggggaagccaatcccgctggcccgcccaggccagggtccctggggcgcagtccccgagttggggagcgcagcgggtgccggccgtgcgcggcgcgttgccagcggcccgggaggaaccccctcgcgtccccgcccccccgtcgcctgcgcgcgccgccggagtccccgactcgacccgagctcggtccccccaccgcccctccgccagagggctggtgtttcggaggagggaggaacaggatgaggccctggtca

SEQ ID NO: 3711 - DNA, 351 bp, Homo sapiens
  source 1..351: mol_type = other DNA
agatcgcgctattgcactcccgcctgggtgacagagtgagactctgtctcaaaaaaaaaataataataataatttcttttgtagagacaggactttttaaatttttctttttcctagtggaaaagagctgtaccagcaaagacccgattgttactgaaaccaaactacccagaacaaaagctgctgtcggactgatttataaagccaggaggtagctccaggtgcccgtgggggtcctccatgaggaccacctcctgcccagctcagaggaccagctggcaggaaagacgctgaggccagagctacaagttgcttctaggaggttctgcagcgtggctccccacagcccct

SEQ ID NO: 3712 - DNA, 394 bp, Homo sapiens
  source 1..394: mol_type = other DNA
tgcttgcacagctgtgagccctgagtgggcagaactgttctggtttgggtgaagccccagatggtgccccctggccgcctcccagaagctgaggccctgggcctgactcctagcccccagcccagctgctcttgtgggctgtctcagcccataaccggctgatgtgctgagcaggtggccagccaggctaagctcaagaggggggctgggctgcagggctcaagcccctagcccatggccacctgcccccagggctgctgtggcctcacagaggccaagggctgggagcctgcctgcctctgccccagccaaggcagctgggcagtccttgctggggctgggcccaggctacccgaatcaagtgcatgcactgggccaggtgccatagtcagcc

SEQ ID NO: 3713 - DNA, 576 bp, Homo sapiens
  source 1..576: mol_type = other DNA
caaggcccaaacaaccccttatcctggagaggggtttgtggcagcagcttgctgcactgagcacagccaagctgtgagtgctgtcctgtgcgcccctgcccagccccacccaggcctcccgtagcagggagggtcccggctgggcgaggcctgcccaaaggccacgctgggggtgtgggctgcagagcctgaccctatgcttgcacagctgtgagccctgagtgggcagaactgttctggtttgggtgaagccccagatggtgccccctggccgcctcccagaagctgaggccctgggcctgactcctagcccccagcccagctgctcttgtgggctgtctcagcccataaccggctgatgtgctgagcaggtggccagccaggctaagctcaagaggggggctgggctgcagggctcaagcccctagcccatggccacctgcccccagggctgctgtggcctcacagaggccaagggctgggagcctgcctgcctctgccccagccaaggcagctgggcagtccttgctggggctgggcccaggctacccgaatcaagtgcatgcactgggccag

SEQ ID NO: 3714 - DNA, 395 bp, Homo sapiens
  source 1..395: mol_type = other DNA
ggcgaagtcgggccatggcacgccactgaggaccttccagcggtccctgtgcacggcagctgaagagctgagcagtagctgtctgtggagttcagccaccgctccccgcacgcctgccctctgcaggggatggagcacccccacttccccacctgcgcccagcagtgcaggtgaaggcctggggccccaggttctccataagtaaaacagggcctagaccactttccccaacaatgggaaaggcgcccgggcaattgcagggtccctccgagagcgaccgtcgcggccgccgcctgcctatgccctgagcctgaagagcccccggcgccgcccgccccgcactgggcccgccctccgggattggtgccctgctaggggacgcgcccgcttctcgc

SEQ ID NO: 3715 - DNA, 845 bp, Homo sapiens
  source 1..845: mol_type = other DNA
tgtgtaaatgcagcttttctaatcacaatagcgaatgttacttgatttatatttgtattcaacttcctcacggagtggcatgcaggcagcagccttgtcacaggactcgggcgacagggtggtgaagtcaggctgtggccccagcggcgccacgaggccgaaaacaggcgctcagcctcatccccgtggctgcagagtgccaagcgtcaggtcctgcgctctgggcgcgggtcaggagcagctggcaagggcagcgcagcctgtggggcccttgggcgcggccggccgcagctccgggaagccacgtcagcccacgggcgctgcagctgcagccgccaccagcacatggagcaggggtccccgaggattgggaatccccgaccaggcctgcgcctccagccgcgcggaccccggggccagcctggccgcggcaagtcaggcagtctgcggcaggagcgccgggcatgggcttccgccgggggtgcaggaggcgcgcaccctccggccggatgggggcgcactcagggcccaggaggccatcccacgggagccccgccagcccccgccggagcccgagctgcagtgccgcctacaagtggtgcgctggctgcagctgtggcaaccccggatcccgtcctcccgcctcgcacccatcagcgcggaccccgggggcgacgcagtggcgaagtggggctgtgggcccagcggtggcaccaggcggagaagcaccactcaaccccatccctgggctgcagagggcccagcgcgggggactccgagcgtcgggagccgcgcgggcgacagttaaacaggccctggggcagggcgcgcctcgcgctccaggg

SEQ ID NO: 3716 - DNA, 768 bp, Homo sapiens
  source 1..768: mol_type = other DNA
tgagcaaaaattttgcagttataattactcaacacgttttaaataaattacttttattttgagcgttcattcttaaatatgttataggaagtaagtaagaagcattccttactccttagaattttgtttataaattagtgatgaattggaaagccctggaattctctgataagcacaggtgatgaggaaaatggaaaaatccaagaattcctttgtctttcctttgtgtaaatgcagcttttctaatcacaatagcgaatgttacttgatttatatttgtattcaacttcctcacggagtggcatgcaggcagcagccttgtcacaggactcgggcgacagggtggtgaagtcaggctgtggccccagcggcgccacgaggccgaaaacaggcgctcagcctcatccccgtggctgcagagtgccaagcgtcaggtcctgcgctctgggcgcgggtcaggagcagctggcaagggcagcgcagcctgtggggcccttgggcgcggccggccgcagctccgggaagccacgtcagcccacgggcgctgcagctgcagccgccaccagcacatggagcaggggtccccgaggattgggaatccccgaccaggcctgcgcctccagccgcgcggaccccggggccagcctggccgcggcaagtcaggcagtctgcggcaggagcgccgggcatgggcttccgccgggggtgcaggaggcgcgcaccctccggccggatgggggcgcactcagggcccaggaggccatccca

SEQ ID NO: 3717 - DNA, 892 bp, Homo sapiens
  source 1..892: mol_type = other DNA
ttcctcacggagtggcatgcaggcagcagccttgtcacaggactcgggcgacagggtggtgaagtcaggctgtggccccagcggcgccacgaggccgaaaacaggcgctcagcctcatccccgtggctgcagagtgccaagcgtcaggtcctgcgctctgggcgcgggtcaggagcagctggcaagggcagcgcagcctgtggggcccttgggcgcggccggccgcagctccgggaagccacgtcagcccacgggcgctgcagctgcagccgccaccagcacatggagcaggggtccccgaggattgggaatccccgaccaggcctgcgcctccagccgcgcggaccccggggccagcctggccgcggcaagtcaggcagtctgcggcaggagcgccgggcatgggcttccgccgggggtgcaggaggcgcgcaccctccggccggatgggggcgcactcagggcccaggaggccatcccacgggagccccgccagcccccgccggagcccgagctgcagtgccgcctacaagtggtgcgctggctgcagctgtggcaaccccggatcccgtcctcccgcctcgcacccatcagcgcggaccccgggggcgacgcagtggcgaagtggggctgtgggcccagcggtggcaccaggcggagaagcaccactcaaccccatccctgggctgcagagggcccagcgcgggggactccgagcgtcgggagccgcgcgggcgacagttaaacaggccctggggcagggcgcgcctcgcgctccagggagccccgccctcccgcggcacctccgcagcaaccgccgcctgcactgggcgcgcgagagctgctagggcggtttccctcgggcctgttgggcagggccggctaaggtgcg

SEQ ID NO: 3718 - DNA, 596 bp, Homo sapiens
  source 1..596: mol_type = other DNA
ataactaaatgagttcattgatttgtgcacgtaaaagtgcttagtataatgcctagctttatcatttatcaataaatgtcattcttaaaactgaccataacaatattagaaaagtagaatatctatacaatattttagaaaaagggaacttaaagaatttggaaaatgtcattcatctgtccaaatatctggtatagtttagatgttagagtgtaaacccaattttttaatgtggtcatagttattaattctttatgccttgcaatttgttgtaattcagtaaaagcctttttttatcctgaaatttaaaaaaattatctagtggcttcttttttgctttcatagttagatatccagttatggcaacctctcattgtataaatgtacgggttattatttaatttcagaagcaatcacaatatgttatcctattggatactagttacaagtttgctttgttttacttaggtttctgaaactgatgaaaaaatgcaagatgaaattgccaggctcattaaaagactttgaaattggcttgctgctctgacagatgaaaacgatgtgatcatgatcaaagtcactcatcaaaaagagac

SEQ ID NO: 3719 - DNA, 445 bp, Homo sapiens
  source 1..445: mol_type = other DNA
atactctatccaagtagtaaatttactaaaattactggatcctactataagacctctgcaaggcattgaagattcaatgatgagcattaattcccactctaaggggatttttctataagctcaccctaagaaatttgcacatcttagcctatgggcaacgggaagccatggacggaatatgttttccgtttcaaacaaggaactccagtcaacatcaccagggccttggtcctggtagggggtcccgcccccggccctgtcctcctccccaggccgggaccggtcccgtccagcgacgggatctttaggagcccacttctaaattcaaaaatagctgcaggaactccaatgtggttcagccgctgaagaggcagagctgggcatgcgcaatttccgcccccgccacagtcttgggagtgggcgggctccggaagtccctcctgtc

SEQ ID NO: 3720 - DNA, 450 bp, Homo sapiens
  source 1..450: mol_type = other DNA
aggatttaatataacttatgtaatggcagaagtaactgtaatttttataaggaaaaggatcttttcgctttggaaagactaagcgggaggatcgcttaagctcccttctctacaaaaaaaattttttttaattagctagcgaagcgcgattattgctaattgaaaacttttcgcaataccccaccgtgacgacttgcaatatagtcgacatcggcaatttttaacagtctctacggagactatttcagtaaagcttgagcccaagaaatattttggccggcctccttggagagggcgctctcacgaaggagcgtcgccgcgggaaagacgtcttcctggaccggtgaatttccagctccaattggctggccagcctccggaggccccgcccccttcgcgcagccagccccgggcacctgctgtcaatcgggccaggtgggagcgatgatt

SEQ ID NO: 3721 - DNA, 299 bp, Homo sapiens
  source 1..299: mol_type = other DNA
ggtgcaacagcttcccaagtagctgggactatggctagaaaaaagtgtagtacaaggtactataatagatttttcctttgaaaacagtttaatacttataaaatgtaatagagggaaaatatatgctatttttggtgttataattttacctaatataataagcagcaacactcaccatgttggccaggctggtctggaactcctgacctcaggattctagctacttccaattcgcttcagccaatttagttgaagcctgttgccctcaggacatgcacgtcactggtatgtcatagacc

SEQ ID NO: 3722 - DNA, 488 bp, Homo sapiens
  source 1..488: mol_type = other DNA
actcccggaggtggtgggcggggctcccagaggccttgggtggctctgcaggcccctctctgagagagtgctgtggccccaggcccaacagccccaggtgggccgggctagcactggcatccctgacatcctccaggctggcttggggatactctggggacacacagtgcccaggcttccggcctcccagccctggctccctgtggactcagctgccccaacaagcctgcgagccactggagagcaagggcaggctgtccttgccatccagatgcctggcacagaaggggtaaatctgggttgtctagctggtgcaggccccagggcgacgcccctttgaggggaaaatgggggcattccagtttccatgagccctgggaccaggtatgcaggcttcctcctgcagctgggcaggcagtgctgggccccggaaatgccctctgcctccctgtgactttgatgtaaacatcaaacacagccccctttcc

SEQ ID NO: 3723 - DNA, 572 bp, Homo sapiens
  source 1..572: mol_type = other DNA
cacattattcatatgtttaggaaacacctcttaaataccaagaattcaaatttggtggaatccaaacaattatgttttataatacgataaacttaaaaaaagttttgaatctcagccgttaatttatatatagttttagtgttttatttatttaataaatgattatttgggacatgttttgttctagaaactagtaatttcaaactgcaattaaatacatttgtctataaaggaattgaataagaaattatcagagagtaaggataaatagtattatcactattgataatcactattgagtacagtggttgcttggggagaattctaacaatcagccatggtgtaattattcatatcaatttgataagttctaggttaacctagaattgaattaaagtaggtaataccttaagcctcccttaaatccagttatgcttgatttgcattataacagtaacaagtaaatagctttcttacagaagccgggggtgccatgattctgccccccaagtccttattatgacctcatagtcacactaaatttgacatcataaagaaaacatttcctgtga

SEQ ID NO: 3724 - DNA, 578 bp, Homo sapiens
  source 1..578: mol_type = other DNA
ttaactatgttttattagttctttgaaaaacctgcaaatgatctggtcagttctataattttaaaatctaaaatcgtttactataaaaacaatacttactgtggggtcttttattaagactttaaagatacttttcataagcacaattttatttcctggtgactggaaaaataggaaaatatttagagccttttgcttaattgataaggtaatatagaaatattcatgtcaaacaggtaagaatattcttggcaactgcagaattgcgtctttctctgaactgtgcaaggaagagagcatcgcctgacattgaggctgaaaagtatgaaaaattgacagtaggcgcaaggggcaacgccactcgccctgtccctctagcgtgggtggaggtcgtcccggcccgggtggttccggacgccggctttccgcacctggctcggtgacggcctcggcgccccgccctcttggccacggtccgcagccatcgccccagtgagggcgcggtctgtgggcggggccggctccaggagccgcgctgtgattggccgtgtccaggcaaccgcggagacgccgtcgtc

SEQ ID NO: 3725 - DNA, 579 bp, Homo sapiens
  source 1..579: mol_type = other DNA
cagactattaaatgagttcagagaattcttaatttccattcctaactggttaatctcttttgtttttgaagcaaattatatgtttaaatgctgagaagtattctggtttattgaattaaaatcattttaagaatttttttttcggataaaatgtgaagactctttgcccttgctcaaggagaaatgctgttttaaagtcaaagtgaaaattttcttccaaaacttctgattattgtttttgtctatggaaaaatagaaactttagtgcacacttcttttttttgcaagtctgtattttcaaagaattaagattttaattttttgcagtacgtctgcacttcaggaagtgctcttgtccggagggggggcgcatccccgggtcgcggctcctccaggaaactttcccttggggatccgtcagggcctcagatgcctcagtggatgactccagaagttcaagaactccttgcaccggccctctgtctcagagggcggacccagctcgggctggtagtggggcgggggtcgcagggcgcgggccgggccctcagcgcgcatgcgcgacaagggggcggggcc

SEQ ID NO: 3726 - DNA, 326 bp, Homo sapiens
  source 1..326: mol_type = other DNA
gtgttttaaactaggcttattgctcagtctaattatcttaacttgtaaagagcagagtgtgagctctgagctccgtgtgactcagcctgtggcagtgttttacccgagacccagagcagacattgatttaaatatttaaaggttctaagaaaaatctcgaaagccatattttataattatatgaaaaccaggacatcctcaagggatcccatggacaccctgggagcagtggacagtccaccccggttcctcacatgctggggaaccctgacttcccgggtaatcaggcgtggtctgaccgcacagccctcgccatggtgccaggg

SEQ ID NO: 3727 - DNA, 517 bp, Homo sapiens
  source 1..517: mol_type = other DNA
gattggaaatctgactcgaaatgtttcagatccctagtgttttagtcggagtccaatccaaccggtccgagctccggggaacgccggccactgcccggctgcccgtctccaggccccccagacgccggcagggtctggccgagcccagctgctccctccctgcccggggccgcgggtacggctgcgacatgcttatactaacaactctatcgccggccgaggggccggacgccgacatggtcactgccaggccgcagcgacgtcaggccgcaagctgtcgggattaaatggcccccggcgcgagcccgggccgcgggagggcagagtggtcctcaggcctcacctggagtcctgctacagagccgaccccagccgccaccgggcgggcttcccttccctcaacggagccggcccttggggcgcgccgcgtcacgggaaccgacttccgccgcggacgcgccacctctcggcccccgtagtcctcggccctaccgccgcggcccgccggaagttgttg

SEQ ID NO: 3728 - DNA, 638 bp, Homo sapiens
  source 1..638: mol_type = other DNA
cttgtgctttacttgagctctaatccagaactcaggtccactgtgaacctcactagaaaatatggagttgccttatttttacaacttaactactggccagggcagtgtggaatcattaattctacagattatcatttctagctccaaagcctagtagagtgctagcattcaataaaggcttcgtgaactgaaatgggttaacctttacaaaaacccgacagggtgcgtttatcgttaacagctcagtggatctgcgcacgttcagtgagcccgagctgtgacctacgcccgggatggttaactccaaccgccgccgcgggcgacccgctgccctccgccgagccaggcctgcctgggacaggggtcgtcaccaccgggagcgcccggccgcgctacctggaccacacagtccgactgcagcagacacgcgcccaggtcctccttcaggcccgcgcacgcgccgccctgcggcttgccctccgatgcggacgccgcaacacttgcaaccgggtcgggagcgagcgaggccccagtctcaggggaccggaagccagcggcaacaacttccggcgggccgcggcggtagggccgaggactacgggggccgagaggtggcgcgtccgcggcggaagtcggtt

SEQ ID NO: 3729 - DNA, 742 bp, Homo sapiens
  source 1..742: mol_type = other DNA
tactggccagggcagtgtggaatcattaattctacagattatcatttctagctccaaagcctagtagagtgctagcattcaataaaggcttcgtgaactgaaatgggttaacctttacaaaaacccgacagggtgcgtttatcgttaacagctcagtggatctgcgcacgttcagtgagcccgagctgtgacctacgcccgggatggttaactccaaccgccgccgcgggcgacccgctgccctccgccgagccaggcctgcctgggacaggggtcgtcaccaccgggagcgcccggccgcgctacctggaccacacagtccgactgcagcagacacgcgcccaggtcctccttcaggcccgcgcacgcgccgccctgcggcttgccctccgatgcggacgccgcaacacttgcaaccgggtcgggagcgagcgaggccccagtctcaggggaccggaagccagcggcaacaacttccggcgggccgcggcggtagggccgaggactacgggggccgagaggtggcgcgtccgcggcggaagtcggttcccgtgacgcggcgcgccccaagggccggctccgttgagggaagggaagcccgcccggtggcggctggggtcggctctgtagcaggactccaggtgaggcctgaggaccactctgccctcccgcggcccgggctcgcgccgggggccatttaatcccgacagcttgcggcctgacgtcgctgcggcctggcagt

SEQ ID NO: 3730 - DNA, 313 bp, Homo sapiens
  source 1..313: mol_type = other DNA
ctgaactcaattcagctgggtaaaattgcacgtaagctaatgtgaaattcaccagtttttccctaatatgttaatcatgtagaaacaaatttgcattgaaaacaagcattataggaacattgactgtaattttagtctttaaaaatgttgcacaaatagtacacaaagttttctctttttttttttttttgtcacccaggctggagtgcaggggcacccaggctggtgacactttaaagagtgcaagaacaaccacagaactgatgttgtgctcttctcggcatgtcacatgcttgaagtcgagagataagac

SEQ ID NO: 3731 - DNA, 318 bp, Homo sapiens
  source 1..318: mol_type = other DNA
ttcataggaactccagtgagcagtagaaaaatctccctggattcatcaagcccataagattccctttttttaagtgttgattccaaaaataaaaaactaaaaaataataaaaaagaaaagaagagttgattccactttaatttctgctttccacagtttatacttatcatcagtggaaagttttactgtggtgtaggctactctaccacttggaagtctaacctacctttaaatttgaaggatatttttctggagtttagttctttcattggagttttctatttaaaatacttagctctgagaaaatcaccttataag

SEQ ID NO: 3732 - DNA, 584 bp, Homo sapiens
  source 1..584: mol_type = other DNA
ctaaaaagttgctagatctgccacttcctgattcagccctgatcgtgcagagctgaccaaggccgtggtccccaggctcccctgactccaggctgcccacgctcaccgggacaggccggctcgctccctgcaggctgcagcgggagggctggacctacgggccctggctgcagcaggagctgcgcccgaaagcagctccgccgcgaagcagcaggtgtttcaagcgggaaggcggggctgcgagagacagccttgcgcatgcgcgttccatccaggtgcggcagcctcaggacgggacgctcggctcgggcgtctaggcgctgcgtgggcgtgcgcctgcgcggcgcggatgggccaggaaggggtccctcctaggtgccctgtaaggcaggcaggtagacgtacgcgtcgctccgtgcgtaggagcgcgcgcacggctagccaggtacgcgtgcgcaccgggcctgggggcgagcgggaccactccggtacagagcgtgagggcggggccacggcggcactggctggcgctaaccgccccctcctccttcctccgatccgccggggcggggccaggacgcccc

SEQ ID NO: 3733 - DNA, 761 bp, Homo sapiens
  source 1..761: mol_type = other DNA
cggtgacacccgagctgggttgaaggcgtcccctgaggactcgtcgcagcctgggctccctgctgggacgcgactcccgcgcctctcgcctgcctggccctgggcgtgcaccgccggggaagaggccgggacggggtcgccgggctgtgccatccgcagaccaaagccgcggctcgggctccggaggagattcgctgggcgaccacccaaggcagctccctccgtgcgcggtcttgtctttacaagaaaaaggattttagagcgcagctgagacggcatcagctgccttttataaaacaacaacaataacaaacttttacttttattcaaagcgcccacgcccgccgcaggccactgacttagagggcggatccggaggtcacctggagtcccgggtccctctcaccgacgcgcgcgggtgccctgggccagtcccggactgacttgcccacctccgggtctccggtgccccccggccctcccggagccccgacagcgccgctgcgcggacaggccgaggcgggtcgggagcggcgcgggcttgggagggagcgctgggcagccgggcccgcaccccgattgccctccccgcaccccgatcgccctcccgcctcccgcggggcgtccaaggcccaggccggcgcctgcgccccccgccccgaggtctcggccccactccgccgggccagctgcggaggcggcgttgggagctgtgcgccgcgggggaggtgcgcgcggcggccggcgaggggagctgagcg

SEQ ID NO: 3734 - DNA, 472 bp, Homo sapiens
  source 1..472: mol_type = other DNA
aaaaactgtgtataatttttactaaaattatctgagattttcatgcaaatgcctatgtaagtcaggctgaactcccaaatctgtgacttggcaactcgtgctgccgagcttccggccggcagctgtgcccgccgctgcccctcacagccgctcccgctgctagcacctggagctccgggtccctccccgggctcctcggcccgccgtcctgcccagagctcatccccgcgactgtcagctctcggcctcagcgggggcgtcctggccccgccccggcggatcggaggaaggaggagggggcggttagcgccagccagtgccgccgtggccccgccctcacgctctgtaccggagtggtcccgctcgcccccaggcccggtgcgcacgcgtacctggctagccgtgcgcgcgctcctacgcacggagcgacgcgtacgtctacctgcctgccttacagggcacctaggaggga

SEQ ID NO: 3735 - DNA, 606 bp, Homo sapiens
  source 1..606: mol_type = other DNA
tggaaaaacatggcatttatattaaatgtatttttatgactaaatttgttctacacaaaagttgtttatccctgccaatgatatcttgtggggggaaaaatgagtactcacctggttcagagaaacctagtgtctatgtcatctgcaggaaaaggagataaagtcaccattataggtattaagaaaaattaagaagacttttttcccccccattctgggctccaaaaaattggtagaagaatgcagcgctcattctttttcactaaaaagttgctagatctgccacttcctgattcagccctgatcgtgcagagctgaccaaggccgtggtccccaggctcccctgactccaggctgcccacgctcaccgggacaggccggctcgctccctgcaggctgcagcgggagggctggacctacgggccctggctgcagcaggagctgcgcccgaaagcagctccgccgcgaagcagcaggtgtttcaagcgggaaggcggggctgcgagagacagccttgcgcatgcgcgttccatccaggtgcggcagcctcaggacgggacgctcggctcgggcgtctaggcgctgcgtgggcgtgcgcctgcgcgg

SEQ ID NO: 3736 - DNA, 506 bp, Homo sapiens
  source 1..506: mol_type = other DNA
gctgaactcccaaatctgtgacttggcaactcgtgctgccgagcttccggccggcagctgtgcccgccgctgcccctcacagccgctcccgctgctagcacctggagctccgggtccctccccgggctcctcggcccgccgtcctgcccagagctcatccccgcgactgtcagctctcggcctcagcgggggcgtcctggccccgccccggcggatcggaggaaggaggagggggcggttagcgccagccagtgccgccgtggccccgccctcacgctctgtaccggagtggtcccgctcgcccccaggcccggtgcgcacgcgtacctggctagccgtgcgcgcgctcctacgcacggagcgacgcgtacgtctacctgcctgccttacagggcacctaggagggaccccttcctggcccatccgcgccgcgcaggcgcacgcccacgcagcgcctagacgcccgagccgagcgtcccgtcctgaggctgccgcacctggatgga

SEQ ID NO: 3737 - DNA, 280 bp, Homo sapiens
  source 1..280: mol_type = other DNA
ggaagacacttccttaactcaggagagcccctgctcttaagccgggataccctctctcccctagagaaggcgtggaagtagcggatcaaactaattttttgaagtttttcctcggaagacctactcagaatctcattattggctcccagggggcgtgcacacagctagcgtaagcccggtcgtacccacggcctcgtgagggctcgacaaccggcaggccttgcgcgcgatgctgccccgccccctgagggccggccccctgaagcgcaagagaaggagg

SEQ ID NO: 3738 - DNA, 336 bp, Homo sapiens
  source 1..336: mol_type = other DNA
ccctagcagccaggcagcacttatttgaggcagtttgttatgcagcaaaagccaactgcagtgagttggcaaattaccgtttttcctttaaatgcaatgtgtctttcaaagctgacttgaataataaaaagtatttgcttctgggggctccccctaatgcgtccctgcctggaacctggttcccgccctgaaggacgcactcctgcgggctgccgggaccccacggctccgcaggcggagagactaggcgcgatccctgcgcgcccctccttctcttgcgcttcagggggccggccctcagggggcggggcagcatcgcgcgcaaggcctgccggt

SEQ ID NO: 3739 - DNA, 334 bp, Homo sapiens
  source 1..334: mol_type = other DNA
ccctagcagccaggcagcacttatttgaggcagtttgttatgcagcaaaagccaactgcagtgagttggcaaattaccgtttttcctttaaatgcaatgtgtctttcaaagctgacttgaataataaaaagtatttgcttctgggggctccccctaatgcgtccctgcctggaacctggttcccgccctgaaggacgcactcctgcgggctgccgggaccccacggctccgcaggcggagagactaggcgcgatccctgcgcgcccctccttctcttgcgcttcagggggccggccctcagggggcggggcagcatcgcgcgcaaggcctgccg

SEQ ID NO: 3740 - DNA, 352 bp, Homo sapiens
  source 1..352: mol_type = other DNA
ctggtcacgggcacaatgtcgctgggtcactgcctcagggcaagactcctgcaatatcccttattcaaccatgggtcactttcctgagagtcaggtaggaatcaacagccctgccactcttccagggatggaaggctacactcagtggagtactggacacgcttgtggaaggacccagaccagactacataagcctgaagaaagatactctcttcttgaagaagttttcatccctgcttttttcccatatcagcaagtatgggcaaatgagcagtacacttgcacctttttctcagaagtgggacaagttcacctatcatgatcatgtgacatagtggtttgagatcatgtg

SEQ ID NO: 3741 - DNA, 605 bp, Homo sapiens
  source 1..605: mol_type = other DNA
tttactttggcttgctttaaatgcaaatgtttaaacagaaaattaaaaataatcgtataataaacacccttattacccatcaccgaaatttttaaaattagcatttttgctcaaatagagcttcgatttttaagaaatttttgcttaaggaaaattaactaaagacatcatagcattctgcatctctaaaaattaaggaaagttttggaaaaaaaatcatattgcctaagaaaataattttaatgccccaatctatattcaaacttttctaatagatccaaaaatgtcttttaaagttcgtacaaacccaggtcctatcaaagcttatatattacattgcgttatatcttatatctcttaagtcttttaaaatctagactattttctaggtaacatcaatctattaaagatctaaaagaaagcggcccagttgtcctatagaatatgtggaaaaatcatttttaatgcaggagcagacagtggctgcagctgtgctctgcgggtcctgcctcagcccggacttcgatgaagttgagggactttcctgagtgggagggatttcgccggaacaaaaatgcctcagtttggaggtcgcgctcactgcg

SEQ ID NO: 3742 - DNA, 313 bp, Homo sapiens
  source 1..313: mol_type = other DNA
gaagcttccataatagcatatttaaaattgaaatttagaaatcagggcataatattaataaaatagttagcacatattgtgtactttcttcagctcatcagactcagcctgataatatgagatgagtcctgtcattatccacatattagataacaaatctgagacatagaaaagtaatctgccttaggtcattcaactgataaaggataatcattatatcataaaggacgctttaggaggccaaggcaggaggactgcttgagcgtcggggctgcagtgagccgtgatcacaccactgcactcacttggattt

SEQ ID NO: 3743 - DNA, 521 bp, Homo sapiens
  source 1..521: mol_type = other DNA
atgttaaaaatcgatttctttttctaaaccgacaatgtatacaattaactcttgcagagataccagagatctctgaaagctggaataacaagcagtaggcagccctcattactgcctcttggcaaaaagggcagaacaaaatggtaacaaatcacagttttaataaaatggcaaatattctaactgccaactcttggatgtttgcattataaaatgaagcaatacaaagataaaggcaattttctgtcttcattaaaaaaaaaaaaaagcaacatgctgcttcaagctgtccagcctcggcggctccgttcttgagctccaagagtctgggcactggatcttaaacggggggatcctgcaggccaatggccttacgggagccaatgtgcagagggacccttgcgaagaatgcttcagcctgaaattttcctccgaagggaacgcagtgagcgcgacctccaaactgaggcatttttgttccggcgaaatccctcccactcaggaaagtccctcaacttcat

SEQ ID NO: 3744 - DNA, 273 bp, Homo sapiens
  source 1..273: mol_type = other DNA
cacagttcagctgagctgggagggggctccctctttcagtcatgaaatgcaccctttccacaacttgggaaagaatccttcctggaattcatatgtctcaaagtgtgtctaactgacctgtgtagtaaagaaagttttttttttggaacacagtcttatgatcactctcatgctacaatgtcagaggcattatagaaaatgatgtgaataaagaaaattggttaatgtttgcaaaatgccaggacattctcgaataaaaggccctatataagt

SEQ ID NO: 3745 - DNA, 432 bp, Homo sapiens
  source 1..432: mol_type = other DNA
ggtagagcgtctccggttgaccggccgaccaggcagcagcccgagcgccccctgccctacccgcgggttttccacgttctagaacccggaggtggacaatgaagcaacggggaacgcacgcttcggttcaggagtggaaccacacaatagagtcctctgggggttaacatccatgcattatgcattatgtacagtcactgaataaaactaactatgcaaaagttaattgtttatgcctcgactttaggaaaaatgttaacactgagcgagagcacagctgtctcatttccagtctggcgcactggaccgtgactttgcggccttccagttcggccgtgtacccggaggaaagcaagggtcggacaccttgggttccgggctgctgggcgggaggcgcacgcgcagaactgttcgccacccgaccgcccgccc

SEQ ID NO: 3746 - DNA, 487 bp, Homo sapiens
  source 1..487: mol_type = other DNA
ggcggtcgggtggcgaacagttctgcgcgtgcgcctcccgcccagcagcccggaacccaaggtgtccgacccttgctttcctccgggtacacggccgaactggaaggccgcaaagtcacggtccagtgcgccagactggaaatgagacagctgtgctctcgctcagtgttaacatttttcctaaagtcgaggcataaacaattaacttttgcatagttagttttattcagtgactgtacataatgcataatgcatggatgttaacccccagaggactctattgtgtggttccactcctgaaccgaagcgtgcgttccccgttgcttcattgtccacctccgggttctagaacgtggaaaacccgcgggtagggcagggggcgctcgggctgctgcctggtcggccggtcaaccggagacgctctacccgaagcgcagctctcgatgagccgcgccctgcgtcctcacgccgaggcggctgggcgatg

SEQ ID NO: 3747 - DNA, 590 bp, Homo sapiens
  source 1..590: mol_type = other DNA
agctccctcaatattattaactcattaaggagggaacacgcttgttccttgaaagctttgaaaaattgtgtgtgtgtgtgtgtgtgtgtgtatacatacacgtatctattttacttgtttgctaaatagacacagatataggtagttaacaaacatgtaggttgtataaaaataaaactagtttatcttctttgggcaggttaagaagttacaattcttcaggtctgtaaactggtcaggggggttctttaaagaatagaacgtcccccttttactaagtaggcttattagaaaatgctagaagttaatttaagaaatttacttatctattttttttctcaaaaagcgaagggacttgttccggccgcaggtctcggtcagaaagaacgcttttgcagcggcagaaagggagactcgggatccgggcctggggtcccgcggccgcgcccctccccactccccgcgacccgctggaacgcgcacggccggggacggcggcggggacgcgcgcgggcaggcggcgcgcacggccggataggcgcgagggggccgcgtgaggcggtgccggcgttctggcccccaaagccggt

SEQ ID NO: 3748 - DNA, 678 bp, Homo sapiens
  source 1..678: mol_type = other DNA
attacaacaataaagactattatgtaacaatgtgggagggagaaagtggtccttatggacggattgttttctgctagaaggccctcaattagaattgtacttacgcatacataatataggatattatttttatattcatagaaaactgctttctccgggcactcaaaggacagaagatagtgtctgtgccctgcgggagcaggccttcccgaatcaattgcttaatcttcacacagtaccggggtttgaagcccggtcagtgtctgcacttgtgtccttccccactggggagccccaaggcggggcaggcgcggggactcgctgtgcacggagcggcgcgctgtccgaatggcaaccgaagagccgcgacccggtcaacgaagcgcgggggcgggcaggcggcgcagtgcgtgggcgggcccgcgctgcgctcccctccgcccagctagcgagacggtcacgtgccgcccaggcgctgccccttgcgggcggctgcagaacgaacacggaggccgacgccgggcgccgcggtgctacgcccgaggctggggtcgccccgggccggggggagcagagcgcgtgcgccgcgcggctgtgagcgcgagcggggccggggagcgcgcgcggaacgctagggggcgtggctgcggcgcgcgcgctaaccggagggggaggggc

SEQ ID NO: 3749 - DNA, 384 bp, Homo sapiens
  source 1..384: mol_type = other DNA
tagcccacgtgtgcaagatgcttccttccataccaggtaggaatattgctctctgcctgcatacatgggtctcctgatactcaggcacggcaatctgcagagtgcatcatttttatttatttatttatttaagacggagtctcgctctgtaacccaggctggagtgcagtggagagatctcagctcactgcaagctcagtagctgggacctcggcctgggatcacaggcgtgtgccaccgcgcccggccggcagctggaaaaggcacacggccccgggctcttctgtgccagttccttgaagagcaggcgcagactcaaggctgttgcttccgcccttactccccgccgctcgtccctgggcggggcgaaggctgggctggggg

SEQ ID NO: 3750 - DNA, 484 bp, Homo sapiens
  source 1..484: mol_type = other DNA
actgcagaattatttgatgagttactactacaggactgtttcctaaaagaaaatttaatgattgttcaatttaaataatgctttaaaaccggttagaagtacacaatttccatcaaacaaaagtttcttcttttggaaaggggcaagcctgagaataacagctgctcttaggatgctcaaagctccttgcagctgattatttttcaggaggagaattagacagtccggggcgacccccagtccaccgcgggggcctggcgcgcttggggcaaaggccctaggagaccccttacagaaaagggccagcgggggcgctttccttccagggccacttgccggaatgtaggctgccacgctcggagcgctgcgccaggccaggcacctaggccaggggagcggagacctcgtgggagcgggcagggggacctttcccctctcccgggcttccacccaggcgcctccccgctgtgaacgccgccgccca

SEQ ID NO: 3751 - DNA, 573 bp, Homo sapiens
  source 1..573: mol_type = other DNA
tcctgcactggtgcggcagagtggagctccaagtgcccgctcctggccgcagccccacaccccacgtgcccctgccggggaggggggcaattagccgcgctgctgtcctccgccgaccaccgcacccccgccgctcattgagaaatcgcagtggtccgccctgggtcgagacctgcgcgcaaccctgcccctggaggacagtgtggagggggtgacagtcgcgtgctcgtcccccttcatcccctgcgcgggacagcagggtggcggcccgcactgcgagggtctacactaggcgggggcggcattcccccccggctggcagcgaccctgcgccccaggcccgaccccgccgcgcgtccctggcagcccagcagaggctgcggcggcctggggactcgcgggtgtctgcgccgcccagggaagccgggggtctagggggccgggggtccgtctgcctgcggcgcgcgcggggtgcttgtcccaggctgggtcggggccaggagagaccccgcaggcgggggaggaggcagaggcggaggcggctctccccgccggctctgcgtgcggaagagt

SEQ ID NO: 3752 - DNA, 700 bp, Homo sapiens
  source 1..700: mol_type = other DNA
tctgggaaatttccttaaattcaaggtaccatcgtcatgaaatttctgaactttaaagagaagatcctaaaatctttcagagaggcctgccttcaaaatgctggggagaaattcttttcaatctagaattccatacaagccagaatttaaatttgagggttgaataaatactcaggtatttgagggctcataaactttttagctagtgtactcatcttaagaaaccactaaaaatgacatgggtccatagatccaactgtctccgaatctctagactggtgacacgcagttcccagttctctggggacctcctcagatctcccttcgtgtcatctcacatctgtcatctctcaggacgacgcgacagccctgtggctccaccgcacaggacagccacgactggcaatcctgtgccggccctgctcgacgcaagcacctccagcgccgggccctgggaccgccagccaggcaccgcgcccgacgcaggctcagtcagtgttggtcggatgcatgaatgatgggtaggcctaggtcttgggaagacttagagaagggacgcaagttccttcgcggagccagaaggaatccgtcgagaagcgggacctcaagctcgcggcccaaaagcgcggccccgccacgacgcctgctagctggccccacttcggcgcgcgggcgacccggaagttgtacttgcaactgc

SEQ ID NO: 3753 - DNA, 687 bp, Homo sapiens
  source 1..687: mol_type = other DNA
tcagaaatcaatgttctgaacttcctttctgaaagcagtaggcttttgtactcaatagtaattttatatggattctctatcactgggtattgatgtccaaacaataaattttattgacatgaaacgtaagtgctcatttaggtagtgaccttacattgtatgtcatcagtagtaggcatcagactacttaaatgagcacttatgttgtatgcttatgcctatttcaaaattatagattatgcataaaatactataacaaaaagggctgttgtaaatatacttaaattagcatcataatattagtaaaaatcggctcactgcagcctcgacctccggggctcaggtggtcctcccacctcgacctcccgagtgggaactctagttggcttggctaattaactttgaaacgacttagacaaggcctctgccatgtgccttgcacaacaaacatctgttcagcgattttacagatcagggaagcttcccgcaaacttggcccctggccacagggtccgccgtggcgcaagctgtggtacaggctgcgcgccccgcctcggcccacaggcgcctgagatcccgggacggatcgcggtccgaggctccgcggagcttacgcctgcgcacaacgcggccggtcggacgggggcggagccagggccgatcacgcccttcgtccactccgccagg

SEQ ID NO: 3754 - DNA, 480 bp, Homo sapiens
  source 1..480: mol_type = other DNA
tgccacctggtggttctcagcccagactacacctcagactcacctgaagaggtggggtttattaatatctcaatcagcatctcgggtttctaatgcacagtgcccaggataagtgccctttttgtaaatgaatattaactggagacatgttctcgaaatcatgttaagagaatcatagtgcagtatgattccatttctgcaatgagtgtactagaaattaaaaatgtgtggtatatttgcatttactaaattaaaaaaaatgtttctgagacgggctgcaatgcagtggtgatcacagctcactgcagcctgggactcccgggctcaagcgaccttacggatgttatattaagaaaatagttaacatctgaggtgcattctcaccaggaaccgtcctggggaccgccaaagggcggcttaacctcgcagctgcgcagacgcatgcagtccccgggctctcctgccgcgggacctcggcag

SEQ ID NO: 3755 - DNA, 588 bp, Homo sapiens
  source 1..588: mol_type = other DNA
tgagaaaagcatgttaagcttgcctttcgaaactcatccatcagatgagtcacttctcccatgaggccatggccgggcgtggtggttcaggatcacctgagcctgggaagggtgattgcatctgtactgaacatatattggctttttttcttgttctattccctaaacaatacagtaaacaacaatttacatagtgtttacattgtattaggcattttataagcaaatcagatattaaaggaagatgtgcatgggttatatgcaaatgctgcactatttttttataatttggtatccacgggggtcctggaaccaatacccctcggataccaagggactgctgtagagcgtttgctcagaggtagatattatctttgtcagctaatgaaagctgttagagacgcgtgttaagccgggagtgccatcccgaacccatcccgggacctggcgcgcgaggaggactccgcaggatgcgcggcgtgtcgcgcgcggctgcagggattcgccgggactcgcgcgggggaccgcgcccggggatcctgcaggggcgggaagggggctcgggctccttgcttccgccgcagtggg

SEQ ID NO: 3756 - DNA, 490 bp, Homo sapiens
  source 1..490: mol_type = other DNA
tgttgattcactggcattaaataccgactggcttccgaggttgccggaagaaacctgttggttgatccttagtgatctccaggtgcagcgccagttttggatggccgggcagcccagcgatgctcagcgaggagggggcgaggatcgagggaggcccctcctccgctcggcaacaccgggttcgggtccctctagagccgggacgcggccggcgggacacacccttgccctgggagacgcgagggtccatggcgaggtaggggcgtttccccaccccagctcctccccggggactgcagttttcgggagcgccgtgcggggtcgagcgcggaggccgcaccctgggcgccgggcgtcgtgtcgggaccgctgcccgcgctgcccgccggcgcggccattgttcgagccgtattcacgccgcgcgggcgcctcggcccgcgccctacccggcagggctcggggtgttgcctgaggaggaaagggggagctg

SEQ ID NO: 3757 - DNA, 631 bp, Homo sapiens
  source 1..631: mol_type = other DNA
gaggagggggcgaggatcgagggaggcccctcctccgctcggcaacaccgggttcgggtccctctagagccgggacgcggccggcgggacacacccttgccctgggagacgcgagggtccatggcgaggtaggggcgtttccccaccccagctcctccccggggactgcagttttcgggagcgccgtgcggggtcgagcgcggaggccgcaccctgggcgccgggcgtcgtgtcgggaccgctgcccgcgctgcccgccggcgcggccattgttcgagccgtattcacgccgcgcgggcgcctcggcccgcgccctacccggcagggctcggggtgttgcctgaggaggaaagggggagctgactcggcgccgccgcggccccacgctccgggcccgtcctcgaggcgcgcggcgcggggcgcgggcgccggggcctgaggcggcgggcgacgcccgggggcctgacggccggccccgcgccatggtgtgagcgccgccgcccgtgcacgctccgtccgccctccgcgcggcccggccggcagagagccccgagcggcccgagagcgcagccgagcccgccgccgccgcccgcggccccgcgaggagagtaccgggccggctcggctgccg

SEQ ID NO: 3758 - DNA, 707 bp, Homo sapiens
  source 1..707: mol_type = other DNA
tgatgttatgtatataatagatgtagcattgtctattttatgtttatatgtatttcgataaaatatgtaaactgatttggagaatatttctattttgagacatggcagaaaagaaatttgagaaaatgccagtggtaatatttttcctcaatcgaaatagaatttgtagatagatccccaaaaaaatcaatatgatatcactgttaaactcattcactgttaaacatttccttaatgagagaattttggatgcaacaatgtctgcagcattctctttttgtagcaaaatcctaaaaactgctgaaactagatcattgttacagaaaatccacttttatgtaactgattataatatttaaaaggaattttaaaattcgtgcttcacatgatttccggtatacatggaaaaaatagataatattttattgatctcatattacatatgaaatgaactaaatttcctgtatctttacatagggaatgaattaaatttacttatgaaatgaattacatttccccaaatgcttggaaattttttaaaaaaccacaggagctatatgtctgtagattcattaagaattactcatctttatggataaaaaagtaatcatatttaagagcccttttcaactacatttaatatattatctcaagcgttctttgtcgaagaatgagtcagagagacatttattcttttgctcactgct

SEQ ID NO: 3759 - DNA, 518 bp, Homo sapiens
  source 1..518: mol_type = other DNA
aagtgcccactagccacatgtggcttaatggctctcgaagtccgacagagcagattaagagacattttgaccagcacaagagaggccttctctccaagagacctgccagcctcttccctcgcttgaagacaccaggggtgcagaaggcatttttgccaactgttctttgctgatctgttcatcctaagaacaaaattagctagcctatagttccaaacctttaaagcctctgttatttaataaaggctggaaatgagttattctgaatagccagagtttctcagagagcaactctttaagcaccaggagtttagtaactttcatgaaattttaatttcactttgttgatggtgcagcatcacctttttagtatgctgcttcacttactggatgagtagctagtgtagcagatttaaaagtgtatttgcatctttttcaaaggtgaaatagagcatatagattaattttcacaagctttcttctgtaaaatttcatattataaaataaattgaatcaga

SEQ ID NO: 3760 - DNA, 354 bp, Homo sapiens
  source 1..354: mol_type = other DNA
attatgcttagttccagcagtggccggcctggcaggcttcttctgcctaaagagccggagcagccagggcaccagggaagctcatggagctctcagatccccctgtcctggagagcctggtggcttcctccccagtccccagccaagaaagtctggggggtgaaattcttcaccaccatttcctggggctgacttctctgagaccaggcccaggagtgatctggccattcattccccctccctgctgtgaactgaatgtcggtcagccttcatgaatgcctcaccttttcatccagtgaggcagaaatgtgagaaataagttccagattcacagctttgagaagcagataggct

SEQ ID NO: 3761 - DNA, 452 bp, Homo sapiens
  source 1..452: mol_type = other DNA
aagaaaatgaagatctgcataaaccaggcagacagtgttatgaaggttaatgccatgggttttaaagtacattttgaaaagcattcttcctttcccctggagcctggctttccatgttcatatgaaggaaggcccaggaccatgagttctcagatccgcgggctctgagcaaaccgggtgcaccctgacttattcagttctgcaaactccacaatctagaataaggaattagataacctttcttagatcctaaaagcgttccttggatggaactaaagatcaaaagcatctttttctctttaatggggccacagttgggcaaatcgtaatttttagcgagtcacagaaaaatagggaaactccagcactgcagcctgggggtgctccccgtgaggaggaaaggtgtgtccgctgccacccagtgtgagcgggtgacaccacccggttagccc

SEQ ID NO: 3762 - DNA, 284 bp, Homo sapiens
  source 1..284: mol_type = other DNA
attgcaatattaccttcattttgaacaaaatttaaactgttctttgtgattcaaggaaatcattaggattgagggctcaactaggtgattcttctgctctgtctgattgagttcaaacgctgagcatagctaggattgtcaaccaatgccctacctagcaaggtggcagtgctgtcttcgtggtggctgactttccaaggaagccaggcagaagcaagcaccccttggaaaccaggtctagctcaagagttcacacagcatcaagggaggtgagttagactcca

SEQ ID NO: 3763 - DNA, 297 bp, Homo sapiens
  source 1..297: mol_type = other DNA
tcttaataatttagaagcttattttgccgtctgtgcattactgataggtagggaatagtcaattatattcctcttatactcagtaaatctgctcttcacatatgataaggtaaacatagactacctgtggagaatttttaaaatcttttatctgtgcagtggccttagctgaggaagcagcatctctggccactgcgacagcagcttatggggcagagcccctagatatgttcagtgaatatagctgcagagaaacaaatccaaaaattttgagttttgttcttaaacagccaaaag

SEQ ID NO: 3764 - DNA, 399 bp, Homo sapiens
  source 1..399: mol_type = other DNA
gtgtcagcccctgataagcagcctgactgcaggactcatacctcccactggcttctgcgagcccaggtgggtgccaaggttagccacctcccaccacccatggaggaggtgtgattacctcgaatcattctgtcattccagaaatatttgtcaggccaccttgaacatttgtttaatttgtacttaataacattttcaagaggacattacctccttaagtgaaacacagatgtatggctttcaggaagccatacatctgtgtagctctgagttgctggccttgaccaacaataattgtcaattcattaagcccagaagcaaggctcagagcctggagctgctcactgcagccctggcctggcctacttttctcttctcccatatctggaaaatgaaagt

SEQ ID NO: 3765 - DNA, 338 bp, Homo sapiens
  source 1..338: mol_type = other DNA
gcacgtggcgggcatctataatcccagctactcgggctgaggcacgagaatcacttgaacctgggaggttgctgtgagattgtgacattgcactccagcctgggagacagagcaccagctctcctaggtggatctggctgcatttgtggaagccagaggctccagctttcatctccctgagctgaggggtgatcagtggccatcccacctccagggtgtggtgaagggatctcagggcacatggcaggagtggtggccaccatgagatgccaccacaggcctgagactgaccagtcaagactctgatgatatgataatgagctggattcagccagcag

SEQ ID NO: 3766 - DNA, 661 bp, Homo sapiens
  source 1..661: mol_type = other DNA
cttcttggaggatggcccatgaagaccaaagcccgagggagctgcagactcgaccactgcgccctcccctcctctccctgcaaggagcccaaggtgtgatccgtgggttttaagtttaaaaatttaaaaaccctgtctgcccccaagtgtggtatcaagattttatagtatgacacttaaattgcttttttcatccgggcgcgtaacagcaattttatatgtattagctcattttttttaaaaaactgttttcaaccactccatgagatgagtgctcttatgatccctttttcacagaagagggccaggcaccaagctccagaggtcgctctggcgagcgtttgtgccctggagtcgccaactcaattcgcgggtcgcagccaggctctaggtgagttgtctcaactaactctagtggagccgccgcagccctggaggagccgggccgcgactcgagagcgcccggcagctctccaatgctttggaaccggcgggacccctgcgggctacccggggcagggcggtgtccgcaggggtctgtccagccgcgcctgctcctccgggtggagagttgggacacccggccagctcgctcgcagcccgcggactggcccagccgagccgtctccgcccgttccccgcccccgcagcggcggggcta

SEQ ID NO: 3767 - DNA, 632 bp, Homo sapiens
  source 1..632: mol_type = other DNA
ttttcagaagctatatgacatattatatcatgacactgattgcagaagcaatatgacaaagagatctgcatctatgtagaacaatgccgcttttctcaataagcctgttttagaaagtagagttatttttcataaattgtatgatatttgcgttaacatgtaatgggtttattgtcacttaaataagaaagtaaacgtttaaaaattctccctttaacttctaatgtagtaatattgaaagcactttggaatcctcaatactttttaagagtgtagaaatctacaaactattagcacaattattgatctttcaaagaccgttctcagtgccctgtgggcctgatggctagggcaacaggtccctgttgacatcaccttatcgggaagttttagacaggaacagtcttcaggctctgaagtacttgaacaccatgggaaatgagcacgactcaggcagattcataattctccttagaagccatttgggatggcttccactttggggtcattccacataggccaatgcagagcaggatttggaaaggaatgaataattcatttagacgttcaacttgacaggctcaaagactttcaagccacattccttcctacgctccactggggaaggcagg

SEQ ID NO: 3768 - DNA, 498 bp, Homo sapiens
  source 1..498: mol_type = other DNA
aaactaggctgtgctctccctaaatctcatgctctattatattagggaagactgattatttgaaagtcaccaatatttttagaaattgcatagataattaaggttagtttatccagaattctaataattgcagcacatgtatctcgggcaccctctgaagctcctgtcaggtacactgagatgtgtcaaagttttcaaaaacattgccaacgaggcatcagttacaaaatccagcctgggtgacacaggcaacttgctgcagaaatgggttcttgtatgtgactatagggaagttacaactaccaactcgcaagacaaaatgtaactatctatagagataaggtaaaaattggaaatagaacttcattaaagatctttcaaatagtggtgaaaactgcagttaacatttgttaacagtgtgatcatcgggttcagcttatcagtaacctggttcctgtctcttaactgataaagaaaatttagtaaagctataaagct

SEQ ID NO: 3769 - DNA, 413 bp, Homo sapiens
  source 1..413: mol_type = other DNA
ttaatacatgtaaatcacttagactcattctaaagaaaagttagctattatcattatattattatatgggtctggaattagtggttgagtttactcatgatagggtcatcgcaactatgcatagctaaaatcaaattttgcttttcaagtttgttttacctggagccctagcagagaatttctctggcaccaatgctgccaaggctggcggagcttttattaatcatgagaagttgattctaaaataggaggaaatgattcaattatttcctctcaagggataatgttgtttttatgtttaaatatttatttgtcaacatcaagaattcttagtacatgatgcaccagcatttttgaacaagtcatagatttggccacaaatcaaatttgaggagtgtctcccctttaaaata

SEQ ID NO: 3770 - DNA, 592 bp, Homo sapiens
  source 1..592: mol_type = other DNA
agtatttagactctgaatggtctccactgtgggggatccttcctccactgggctcaaagttgtaatcagaactccgaatgctaggttgcagtaggatcaaagttcaatgcagatcttagttccactgggacacaggagtgtaggagactgtcacttcatctctccatttgcatacacacctatgcctcagtgacacatgttagtgagtgtataacctacgtgaagatggagttttaaaaattcaaccctaaatgaagatctcattacaattcaggaatgttttgatgtgaaaacacaatagaatggtaatatttgtagcagtactattgttctgaactttgtttagtagaccaggcctgaaattcttcagactctgttgtatcagagaaataaattattagggatttcttccagaagaaaaacttcattgccttgaaattttattaattttatatggctgaaagttctgagaattggttactatattaaggattataaaaatcttctaggttgtttttttaaaaatctgtgtgccagaagatttttaaaccttcataagataggcacacttttgtttgaaagcaagcaaatt

SEQ ID NO: 3771 - DNA, 476 bp, Homo sapiens
  source 1..476: mol_type = other DNA
gaagcatcacttttgctttcataccaaagtaaatttagttttcatttgtatttcatgttattctctacatatgtgtagaagtagacaaaactcattacaactattgtggtctcagagtttttgaagtattttcagttgctctatcaaaggaacaatggagttttcaattatatgttatattctgagactatctctcaataggaacataaaaactcaagtaactttagactttaaatgtattttcctttatgtattaataaattattgctttataaaattggtgttggagacataatttttctttttcaaaattagaaagttaatcacaaaataggctttagtgtttatctcaaaggtcacacttttagagattagttttacaagaagaaaacattgagttgaaagttaatattctttacaggaaattcctgtaaaactttatctcatcaaggaggttggtcagagaagagtttgag

SEQ ID NO: 3772 - DNA, 349 bp, Homo sapiens
  source 1..349: mol_type = other DNA
tacttttaaaggttgaggttcctcagggaagttcatctgccctcccttatggggcaacagagctgctcccatgactgccttatcaagagaggggactcaagtggacctgctccccctttcatatttgagagttgatagtggtgccaattttcggcctctattctctaatagaatagactagtatatgcaaacattctcaaattttataaataggagctatatctctagctttcctaaccgtgaaaaatctgacagttttattcaacttgggtcattttttcaggaaaagttaaacataactcttttcaaattactcatggaccggtttgggtaggacctgccctttcaa

SEQ ID NO: 3773 - DNA, 492 bp, Homo sapiens
  source 1..492: mol_type = other DNA
attattctcattttttactgagtatcagtaatcattgcaaaagtgttgtatcttatcctaaaagtataagaaatgtaatttaaaataaaaactaacatttaagtgccaacaatgaggcagatattttcctctctgtttcagataaggaatttctgaaaggtaattaacttcaccaagtcataaaaattatctcaaaattctttcatcaacattctatgatgctgcttctttttaacaacaacaaatgttttttaaatggaaaatctggatgtgccatggagttttacaaatccaggtatttagggtattcctgttttttaaaaattatagtgtaaagttcatagagatctggaacttcattccttctatgaatgacttgcaaaagtttcagtgtttgctaccaatagctttgcataattatcattattattcattaccttaacgtttgcccactaggtgtcagcagtgtgaccttctaaatcaactcctagg

SEQ ID NO: 3774 - DNA, 801 bp, Homo sapiens
  source 1..801: mol_type = other DNA
aaataattatatttcttatgctcttggacatgtacacctctaagcctaaaagcggagaaggaacactgagttccgcgcagggagtttccctgttcagagcaccttgtgcgcgagttgataactctcggaaaggaaacaaaatttggctttcctaaactttctgtacgtccagagaatcccatgccttgtcttggcctccgcagcgccaggctggggtgacagccaccggcccgggcttctcctccggaccgcgagcctgtggcgcctccccgcgcgcccagcgcaccggggtgtccccttggaggagcctgcgggggcagggcgcgactcgtgggtcgcgctggttccttcactggatggacgtccgacgctgcctccggggcggagacagctccggccaccatgcgcccgcacccacagttcgctggctctggggtggcgggtcttggcgcgcggtgcctgcgcgaagggagggcagccatcgcccccgcggtcactggggccccgcgttccccgcgggctcgggcaggtgcgcggtgtgccggccaggtccccttgtcctcctgccctgcggcttgggcgccgcgcccgccccgcccccgcccgcgggccgccctgggcagggcctgccgctgcggctggagagcagcgcaccggcatgggcaggcggccggcggcggagggcggctgagggctgctgagggtacgcgcagcggcctctcgtcgccctgcacgtgcctcgccaggcagtgcgcctgctcgcagcgaggacctagccctctggttgcagagacccggtgc

SEQ ID NO: 3775 - DNA, 390 bp, Homo sapiens
  source 1..390: mol_type = other DNA
tgcaatgcacaccctttgtccaaaggtagatgggtacaattcactctgatctgcatttttaaacattcaacgcaatgcgcagtttgtaggtaaaattcactctgatctgcattttttaatatttaagtcaatcccctgcctgagcagccgcacagcagctgggcttttccaagccacagcatttaacacctggtcacacctgaggttggtaccagactcctgcgggttcccactccctgggagctccccggaagctccaagaaccgcctgggtccccagagagcaggaagcggcgggctccgacggcaccggagtcggcagcctccgcctcggttcctgtgtctccgagaccagcctcggggccgagaagctccatacccgcgccggccg

SEQ ID NO: 3776 - DNA, 349 bp, Homo sapiens
  source 1..349: mol_type = other DNA
ggggctagtcactattgttaacatttattacttaccatgtgtcaaaatgcactcacttaattttatattatcaccatattattttacttaccatctatggtttggtgtagaattctcacacctctagaagttggactacattatttcctactgctttttaaataggcaaacgaaagcttggagagccacgttaacgtatcctagtggagttggtcacctcctagcacaaccctaggaggaagtgaaccatcattatcatcacaaactggtgtgtgcttaccgtattcagcaccggccacgcacccgcggagctgccaggtagcacccgccccctctctctgcgcaggcg

SEQ ID NO: 3777 - DNA, 410 bp, Homo sapiens
  source 1..410: mol_type = other DNA
cgcaatgcgcagtttgtaggtaaaattcactctgatctgcattttttaatatttaagtcaatcccctgcctgagcagccgcacagcagctgggcttttccaagccacagcatttaacacctggtcacacctgaggttggtaccagactcctgcgggttcccactccctgggagctccccggaagctccaagaaccgcctgggtccccagagagcaggaagcggcgggctccgacggcaccggagtcggcagcctccgcctcggttcctgtgtctccgagaccagcctcggggccgagaagctccatacccgcgccggccgggggtcggacgcagcagcagccgcggacctaccccgggagcccagccccgccccgagcggaagcaggaggcgcgcgcctgcgcagagaga

SEQ ID NO: 3778 - DNA, 468 bp, Homo sapiens
  source 1..468: mol_type = other DNA
ttaagtatgattcatattttttaaaatgaaggaaaaagaagtcgatcaggttatttcatcttaattcaggaaataatacattttgactcatggctgctgcagaatagtgtatgctgcataaaagctcttctttatactttcaacaattatgttaccatgaacattcttgaccttttaagtatacctctgaatgtttagattataaacgtgaactgtactgtgttatgttagactatttgaccaaaaacgtattttctaccacaaaaaaagtccaaaaggaattaagttaattacaacttcaattgtgttctttatatctgtgatttatatatcttcaaagagagtcttaagtgtctttgggattttctagtttggggccaatgctttcaatgaccttctgtggattacccaacagcaataatgatctatagtcaagaatagccagattctgccaactcaaaaatatta

SEQ ID NO: 3779 - DNA, 506 bp, Homo sapiens
  source 1..506: mol_type = other DNA
tttcttctttgccaggaaggcttcttgagaaaaaaaaatattcttttccttcttatcaagttgtatattttcttaaaatataacttgactaatatttattttagctttttatccttttggaaatgatgaaattggttaagattggtaattatccaactcaaaaatgatcgttagaattcctttttgtttgacctatacttctcattttgaatctaagtgaaaatattaatagaaagaggtaagccttaaatacatctgatttaaattatcagatttgcttggaaagcatagctaaacgaacttcttttatgctgttttctatagagccaacaatctaaatagaagtggatatgctctcagagataatcatggtacaaatatatcttagaagaagagtaaataatgtgaatgcatttacatgtgtttggacattctttagaagcaagaaccttaggtcttcttgcttctaaaatggaaaatcgtgatgggactgtgacaatctgctg

SEQ ID NO: 3780 - DNA, 468 bp, Homo sapiens
  source 1..468: mol_type = other DNA
gtaaatgtattccatttaaaagatttttctttattgtgaaattctgccattctacctttttaatgctaaaaagttctgtttcggacccttcaaatctaagtgtgtgtaaacccttttaaagtgcgttactacatcatttagtatgtgtacctgggagttaactgccagctctattcaacaattaatcagttctgattgggtttcaagtaaggcttagtaccgagaaaggtagtgtttgaccttaccggtttaaggtttatcctgtgcattatacagttaagggcttggagcgcatctggggccccggccgccctgcccaggtggaggaagagccggctcggatccttcttgaggtcgacaccgagcaggggtggagtcggatacgccccgcggacaccatgtcagcgacgagctgtcgcggatcgcgggacacgccccctgatgcacaggacagcctctggcgcctgc

SEQ ID NO: 3781 - DNA, 622 bp, Homo sapiens
  source 1..622: mol_type = other DNA
aaagtctgaaaatccctgggaaaatttgactttttatacaattcttccgtcatgaaagtggactttgtatactaaagaggggttcatggattcatggtaacctacaattcttccttgcggcggtcccggtcaatccctagggccctggggcgccatgggcctcgtgggagggctgcgcatcccaaccatgccttggggcaccggcggtacgtccgatcctccagcccgcgtggtcaggcggccgcgggcccaagcatttccagaaactgggtggcgagcgagccaggcaaagcccggcttccctgaagctccccgcagcggcgggggcggagaagagacctcagccccgcgggctcgcacagctggcgcggaccacgctctcgcccggggccggcggcctcagcgccccccgaatgaacaccttccgcccgctggccgccccgcgaggcgggccgtgtcgtggccccggtgcacggagggggacgccgaggcccggagcagggcccgtctcggcctgtgctcggagccaggcggcagggcccgcgggccggcgggcggcgcggagacggctgcgctcccgccctccgccagcgcctggcggccgccccacgtgacgggaagc

SEQ ID NO: 3782 - DNA, 474 bp, Homo sapiens
  source 1..474: mol_type = other DNA
ttgaaggtccattcactgctgcttgcccttgaagctcaattgctggtcagagctttacactcctgggaagcggaggctgagccggtgacactggttccactgggtcacagctgaagcaccatttgaaacagaagacaaagtctgaaaatccctgggaaaatttgactttttatacaattcttccgtcatgaaagtggactttgtatactaaagaggggttcatggattcatggtaacctacaattcttccttgcggcggtcccggtcaatccctagggccctggggcgccatgggcctcgtgggagggctgcgcatcccaaccatgccttggggcaccggcggtacgtccgatcctccagcccgcgtggtcaggcggccgcgggcccaagcatttccagaaactgggtggcgagcgagccaggcaaagcccggcttccctgaagctccccgcagcggcgggggcggagaagaga

SEQ ID NO: 3783 - DNA, 412 bp, Homo sapiens
  source 1..412: mol_type = other DNA
cccaagtttaagttttaaatgtgcaaaatatttagggatatgtatctctcccatgaatagaaaatatttcttagtaagtgaattactgggaattaagaatttaaaaagttacttcattgtacctattaatacatgcagaaaaaaatgtacttggattttctatgcatcagtttcctcatctgaaaaataggcattctagtaatatatacctcattaggctgttctgaggaatgtgataataacaaacgtttaggattacttcaagaaacaaatacttgaatacctatctgtccaagcagcagggatctggtcttacattatatggagccagaattcgggagcttttgcaagcgggaccaggccccaacagcatgcggcgactcagagtgacgacacacgcgagtctccgccc

SEQ ID NO: 3784 - DNA, 431 bp, Homo sapiens
  source 1..431: mol_type = other DNA
ggacgcctttgtggtccaagtggaccggttacctgctcaggagcatcccagggatgggctcaacctcagcgtcagcgtcacgcagagggcccgggcttggaatgtgggaggcacgctcccagctcactttggttttcccgccctggaggggaatccaagatgtctaactagtcttctggccaggaccttcctttagtcccctccgtagtggaacgaaggaccgctcctgggaccaggcagagatcccggcgtgggcagacccctgccaccgcgcccaggcctcgtccgaaactcgcgcccgagagcccacgccggaggcgtacgggccgggaccgccgcagcccggggcgggggcacggcaaccgcgaggcctgggggcgcccgccccccgcgccccacgcccggtgccagcgagccgaggcgtgcgaggg

SEQ ID NO: 3785 - DNA, 362 bp, Homo sapiens
  source 1..362: mol_type = other DNA
aactttcctcaccgtaaatctggtaaaaatctttaccttaaaggacgcctttgtggtccaagtggaccggttacctgctcaggagcatcccagggatgggctcaacctcagcgtcagcgtcacgcagagggcccgggcttggaatgtgggaggcacgctcccagctcactttggttttcccgccctggaggggaatccaagatgtctaactagtcttctggccaggaccttcctttagtcccctccgtagtggaacgaaggaccgctcctgggaccaggcagagatcccggcgtgggcagacccctgccaccgcgcccaggcctcgtccgaaactcgcgcccgagagcccacgccggaggcg

SEQ ID NO: 3786 - DNA, 349 bp, Homo sapiens
  source 1..349: mol_type = other DNA
aagataaaaagagcttcgagacagctgtcgccaaacagaagaagttggccctcgccatgggtgagtgccttttcagcatactcgtaagtaagacattaaggaagaatatgctctgggaagatttcactgttttaattctatagagaaaacagtgcccttataatcatgcatgagcagggaggatagggagggagagaactttctgcgaatgtattccactccagctcacagaggtgctgtgagctgagcagcctgttggaggctctgcctctgaggcctcgtgtgtccttgaagcaggcaccaggggctgggtttatctcctaggcctggccaatccagacgtgccttc

SEQ ID NO: 3787 - DNA, 313 bp, Homo sapiens
  source 1..313: mol_type = other DNA
tcttaactgaaaataccacatggtcctgttgggttttaagaagatgggcttccagccagcctttccaacctgtgttggcaaagagagcccagcccggctgtcggtgtccggcacagactctggctggagtgcagtggcgcgatctcggctcaccgattctcctgcctcagcctccggagtagctgggactacaggaagcgcctgcctggggctcccaaaggcttaggcttcttcagaagcggataacctttagctagattacgccaatggagctgtcattgagcgccctctgaagcagtctcactgcagtgag

SEQ ID NO: 3788 - DNA, 397 bp, Homo sapiens
  source 1..397: mol_type = other DNA
aaggtcagtctgacaatgtgtgaaaataatttctaacatttgttgataatattgcccccatattacctctggcctagagaggacaggtgatctaatcagtttgtgcataatgcagacttaaaacttcattggtatatcatcaaagtgcagtctgaggactacagcatactaacaagctccttgggattttcagactaagtttgagaaacactggaatgaaaaatcaatttaagcgactagtaagaaaaggacctttaatagtgtctcacatgtagctagcattttataagtgctacagactgaatttttgtgtctcccctaaattcatacattaaatcctaattcctgaagtgaggtgttaatggatccctcatgagtgggatttgcataaaagctc

SEQ ID NO: 3789 - DNA, 336 bp, Homo sapiens
  source 1..336: mol_type = other DNA
ttacttccaaaattgactttactggatatataatacacgcatctatttattgttgttttgataaacttttcattttggaaaaatgttatgttcacttttgatgttgcacattttatagattttaacaaatgtataatgacaggagtttcacagcctcttttccagtatgtcataccgttttaaagaaaaaacttattcatgacatttgttgaagaacagctcctaatcaggcaaaaactgtcagaatcacacagtgtgtagccttgatataccacagtttatgtatctataaactgtgtcctactaaaggacattttgcttgcttccaaatttgag

SEQ ID NO: 3790 - DNA, 528 bp, Homo sapiens
  source 1..528: mol_type = other DNA
aatcagctcagttcagggcagatctgagatgggaagacaggaaaggtaatctcacatctccatccttttgtagcccaggcctggagagaatactctacagttgaacaggccagttacgctgaagtgtgcccagatcagctgcagggcaccaggttcctggtttctcaaaggcttttctattggagaagtgtggaatcttaaggcatccttaagagcagctctgaactaaggaaattccaccccagcgctgggatccggcaagtcctccctctgagtggccagggggcctcgtcccccgctttcgctgcgggcagcgctggccacgcggcccccgccgccggcggttctccgtggccaagcatccttggccttggagcccaggggctgcgttccccttggggccggggcgggagagaggacctcggtggtactcgcccgtgcgctgggcgcagccgcttggccctcagccctctggcgcggcgcccacccgctgggtcccgccccggcagcgacgcagggataacccgc

SEQ ID NO: 3791 - DNA, 527 bp, Homo sapiens
  source 1..527: mol_type = other DNA
gtggcatcacacacatctgtgcaatgacaagcttccgattatctgtggatcttctgtcatcattcagtaaatgctttttaaacacagggcaatcagtacagactcattggtcagggtttttctctaggcagagacacaagtctatcctaaattaatatacttagcactgctttttaaaataataataaaagactattattaaaacaaagggaaaaaaaacgcagccagtttttacttccattttcgctgccgatattctaactaaccaagcaccgcgtgcccccctccgggcggggctcggaaactggctgcccttgggttggggacgcacctcagcgaaacgaatccagccgcacctcccggctggcacccgcgcgctttaacccggaacgcgcatgcgccgcggcgcgccgcaccgcccaccagccctggggtggaggcgcgcctgcgcggtgatcccgccagcaggaagcaggcgcgcgggggcgggggcgcgcggcggcaggaggcggggctctcggggccgc

SEQ ID NO: 3792 - DNA, 394 bp, Homo sapiens
  source 1..394: mol_type = other DNA
ttggaagaatttcttttataatggaaaatggtttccaacttttttagaattctataagcctggtaatagtaccagtaatagaataaatacttagtcttgattgtcagtgttgacaagatattcacttagagatatataaattgaattaaaggaatcaggtcatgcatctgcatgtagatagtaactaagaccatttaaattttttgtttgcatatctgcagttaagcaaataaatgctgttcctgtatttttgaataaataattgcctataggggaaataccactaaatactggcaggctagagtacagtggggcaatctcctggtcttgactcaaaggcgtgagccacggcgcccggcgggcaagacacccgcagctcgagcgccgaagtcgc

SEQ ID NO: 3793 - DNA, 817 bp, Homo sapiens
  source 1..817: mol_type = other DNA
cggccttccgcgctggcggggggaggtgttgctcacttccgccggggcaggcgccgggactccctcctggccgcccacagcctgtgcgcattcctgcattcctgccgccgcccgggacccgagtgccccggaggtgtccaggcgcggtgccaggcgggtactgtgccggggagaaacacgcctttttaggcagccgtgctgccccgcaccgccccacgcagccgcgcgcagccagggagcgccccgcctgcgctcgccggcgggccgagctgccgggccgggggcgcggggagggggcagcccaacttcccagtgcccggctcccgccagctaggtgagcctgggcgagcggagctcgggggcggggcgcggcgcagcctcggtgcgtgggccgggaaccgccgcctctccccggggctcggggccgcggttcctctggccgcgggagccgccgccgcgctgcccgaaacaatgaggcgtgcagcgcggggctgagcgtagcctcccgccggctttgaggccgagccacccgctgtgccccgccgcccgcgcttgcagctgccgccggcgcggagcagcgctggccccggagaggtgatcccgcaggccgcctgggacgggagcgcggggcagctccgagaccccacggtggcaggaggaggactcgagcctgcggcaggacgactcccgccgcgcactcgccttctgcagcccccaagttccgcggcgtgagtcggggaccccggccagggtcccagctctagcgggcgccagcgtgagtgtgggagcgcgtagcgcgcgcacccgagcggctgcc

SEQ ID NO: 3794 - DNA, 641 bp, Homo sapiens
  source 1..641: mol_type = other DNA
acctccccgcggccccgcccgcaggctccagctgcccagctcgcagccgcccactggctccggaggctgctgtgggggtctccagggagcaccgtcacttggcgagctacccttcccaaatgaaaggtggcccgctcccagcgagccggggaggatgctgcgctcccctgcgccccacccagccggctgccaggcgctgccaggcgcgcaggtagcccggccttccgcgctggcggggggaggtgttggctcacttccgccggggcaggcgccgggactccctcctggccgcccacagcctgtgcgcattcctgcattcctgccgccgcccgggacccgagtgccccggaggtgtccaggcgcggtgccaggcgggtactgtgccggggagaaacacgcctttttaggcagccgtgctgccccgcaccgccccacgcagccgcgcgcagccagggagcgccccgcctgcgctcgccggcgggccgagctgccgggccgggggcgcggggagggggcagcccaacttcccagtgcccggctcccgccagctaggtgagcctgggcgagcggagctcgggggcggggcgcggcgcagcctcggtgcgtgggccgggaaccgccgcctctccccggggctcggg

SEQ ID NO: 3795 - DNA, 512 bp, Homo sapiens
  source 1..512: mol_type = other DNA
ctaatgaatgctgaatgaattgggtagccagttaattgctttttccccctaaaaaaaaagtctaaattacttgaataaaagtatttgcggatttttaaataatacatttaatggcagatctctgtctccaaagaggggtgactaaccagtccccctgagcctacacctgaacagctctttgggtccgcgagagaaccagcggggtggggcacccacgcggtttggggtcctaggaccagctgccgccgtctcgagaagcacctccccgcggccccgcccgcaggctccagctgcccagctcgcagccgcccactggctccggaggctgctgtgggggtctccagggagcaccgtcacttggcgagctacccttcccaaatgaaaggtggcccgctcccagcgagccggggaggatgctgcgctcccctgcgccccacccagccggctgccaggcgctgccaggcgcgcaggtagcccggccttccgcgctggcggggggaggtgttggctca

SEQ ID NO: 3796 - DNA, 477 bp, Homo sapiens
  source 1..477: mol_type = other DNA
aaaaatatctgtgtaacacattgttcattcaggcagttccgcagaattccatgtgtcagacataattaatacacagtgctaatgaatgctgaatgaattgggtagccagttaattgctttttccccctaaaaaaaaagtctaaattacttgaataaaagtatttgcggatttttaaataatacatttaatggcagatctctgtctccaaagaggggtgactaaccagtccccctgagcctacacctgaacagctctttgggtccgcgagagaaccagcggggtggggcacccacgcggtttggggtcctaggaccagctgccgccgtctcgagaagcacctccccgcggccccgcccgcaggctccagctgcccagctcgcagccgcccactggctccggaggctgctgtgggggtctccagggagcaccgtcacttggcgagctacccttcccaaatgaaaggtggcccgctccca

SEQ ID NO: 3797 - DNA, 472 bp, Homo sapiens
  source 1..472: mol_type = other DNA
tagtaacataaatttggaagttaatttcaaaatccagtggtatttcactgttaaatacactctttcacacaggtatctgcatctatccatgtacacctagatgtagaaatacatctatagatacatatttatatgtgtaatatataaataatctataaaaataggtaggtatatggatatattgtaaactaacacagcaaatttttgtaagctggaataggatattcagcaggccagctgcccaaagggctctaccaggaaagccatcttgtctgtagccctacttttaagtggcgggtatgaataaaaaggacttctaaaccttcctgaaatgtctccttcagggagccccaggggaggccgcgggagaggaccccttccctctcagagagactgggaagaaaagaacaggacacttctctcctctaggcttccagctgctgcttctgaaaatagagggatgagaagttcg

SEQ ID NO: 3798 - DNA, 336 bp, Homo sapiens
  source 1..336: mol_type = other DNA
ctataagcctggtaaaccagtaatagaataaatacttagtcttgattgtcagtgttgacaagatattcacttagagatatataaattgaattaaaggaatcaggtcatgcatctgcatgtagatagtaactaagaccatttaaattttttgtttgcatatctgcagttaagcaaataaatgctgttcctgtatttttgaataaataattgcctataggggaaataccactaaatactggcaggctagagtacagtggggcaatctcctggtcttgactcaaaggcgtgagccacggcgcccggcgggcaagacaccctcagagcacagggtgctgc

SEQ ID NO: 3799 - DNA, 478 bp, Homo sapiens
  source 1..478: mol_type = other DNA
ttcacacaggtatctgcatctatccatgtacacctagatgtagaaatacatctatagatacatatttatatgtgtaatatataaataatctataaaaataggtaggtatatggatatattgtaaactaacacagcaaatttttgtaagctggaataggatattcagcaggccagctgcccaaagggctctaccaggaaagccatcttgtctgtagccctacttttaagtggcgggtatgaataaaaaggacttctaaaccttcctgaaatgtctccttcagggagccccaggggaggccgcgggagaggaccccttccctctcagagagactgggaagaaaagaacaggacacttctctcctctaggcttccagctgctgcttctgaaaatagagggatgagaagttcgggctggcagcgcggaccagagcccagcctgccccccagcctcgcgagggcagcgtccgtccgctcggag

SEQ ID NO: 3800 - DNA, 292 bp, Homo sapiens
  source 1..292: mol_type = other DNA
gttcaatttattcttttaatttcccaggtaaccaaagacaccagtaaagtgtaccttttgtacaataaggcaaagaaaaaataagtacacacctaagctctagacttttgttctatcctccacttactatttgctctgcaaagtgtattcatcaacattgttgctttcaatcttaaagcatggattggaagcctgatgcatctgccccagcccccacctgtttaagcttcgaggccagtgggaggcatatggtcacatgagtgatcatggtacagtgagaagttctccctcc

SEQ ID NO: 3801 - DNA, 348 bp, Homo sapiens
  source 1..348: mol_type = other DNA
ctcattcattctttcgagaaatagaagaatgccctacttgaatgacatagggcatggccctggggtgcaggccaggccgggggcacctaaggcagccactgtcttctggaggcatacatgttttcatagtttagcattatttattttactcttaaaaaataacaaagctgaccctgtagaatctgtaatttcacaggcaagtcctgcaactttttaattgtttaaaattcccagaaggaataattactgaaattatctatgaagccgcgggacccagccagcagggtttgtgaccgcctctgctgtgacgtcacagcctggtgaggagggggctgcagttcctcagga

SEQ ID NO: 3802 - DNA, 466 bp, Homo sapiens
  source 1..466: mol_type = other DNA
ctacttgaatgacatagggcatggccctggggtgcaggccaggccgggggcacctaaggcagccactgtcttctggaggcatacatgttttcatagtttagcattatttattttactcttaaaaaataacaaagctgaccctgtagaatctgtaatttcacaggcaagtcctgcaactttttaattgtttaaaattcccagaaggaataattactgaaattatctatgaagccgcgggacccagccagcagggtttgtgaccgcctctgctgtgacgtcacagcctggtgaggagggggctgcagttcctcaggaaactgccagagagctccagttccctggaacctgagtcgggagacctgcagctcactttctccctgtttgctggccagcagggtttgtggccgcctctgctgtgacgccacagcctggtgaggagggggctgcagttcctcaggaaactgcc

SEQ ID NO: 3803 - DNA, 490 bp, Homo sapiens
  source 1..490: mol_type = other DNA
tcccagagcactgagattacaggcatggccgagttatcctaaaaatgattcctctataataaaggtttcttgctgtattttcagtgaattcaggcaaggacaccctcccttctattattctccagtggaaacttggcactgaggagtcccaggaggtgactcaacttagcacccctgtgtctgtcagggatatctgggacagaaagaatgctggggcagccagagcctggcgtgcccgtctggcctgcaccttgccaccggaagatgtagtgtagagtagctgctatcataagatgatcagttattcatttttctaaatagtttttgggtgaatttcttaacttcataaagtatataaaacaacttagcaggatatgagttatgtggggttatcgtgtaacacaccatgtcacatgatttgactaaatacaggaaaaaaaaaaaccctgaacttggtttcattggctcaaatatagttcaagacaacaga

SEQ ID NO: 3804 - DNA, 471 bp, Homo sapiens
  source 1..471: mol_type = other DNA
cctctcgagtagctgggaccaaaattaaaggttaacttttcttaactcagctgcaggctccatgcggagctcaggcacccagcggtgaccgatccagaccaggtcctcccggaagcccggcctgcccgacacccctcaggcgtcctcgccaggacggggcggaaccctgtgtagctcccacccccgggacgaaggccgctgccagggccgcgcagccacgcgagtggcctcgaggcaaggagagccgggccccgctccctgcgcccgtcaccgccagggaactcggcccccgagccgccgccgcgctccgtgggctcccaatgagccgcgccagcctcccagactagcctggggtgggggcgggcccgagccacgggttggggcggggtctgatgcgcgccccgccccgcaacgccccgcccccctcggcgcccgccctcccgcgcccccgcgcggccggcccctggcccc

SEQ ID NO: 3805 - DNA, 575 bp, Homo sapiens
  source 1..575: mol_type = other DNA
tcaaagacaaagagtagatgtccacaatagctgttctttctttacctagtaataatcagctaaactacaggaaactaggttatcttcaggttaccttagttaagcagcagctctgggattcgaccacagattctctggcgtgcccttcgggaaagggtggcctcgggccccctactctacaccgggcggctgcagggcagagctgtccagggacctccagggaagcccatccctgacctgtgagtcacggagctcccgggcaccatgctggccacaaatgcctaaggagccccccggaaccagctgtgggtcccgcaggcactcgcaggctagcggacacctttggaggactgagagacctgtcctgcaatccaggcccgaggccccaaggggtaatcggcccgccttcccatgccaataaccggcagtggcgggacacacctactccgtgacctgcaggcccaggggtcgagccccaggtagaacgtctagacggactccgcccttagcgccgtacggggctgccgatggggggcgggccgcccggagagcgcgacctcctgcagtagagccta

SEQ ID NO: 3806 - DNA, 479 bp, Homo sapiens
  source 1..479: mol_type = other DNA
agttatcctaaaaatgattcctctataataaaggtttcttgctgtattttcagtgaattcaggcaaggacaccctcccttctattattctccagtggaaacttggcactgaggagtcccaggaggtgactcaacttagcacccctgtgtctgtcagggatatctgggacagaaagaatgctggggcagccagagcctggcgtgcccgtctggcctgcaccttgccaccggaagatgtagtgtagagtagctgctatcataagatgatcagttattcatttttctaaatagtttttgggtgaatttcttaacttcataaagtatataaaacaacttagcaggatatgagttatgtggggttatcgtgtaacacaccatgtcacatgatttgactaaatacaggaaaaaaaaaaaccctgaacttggtttcattggctcaaatatagttcaagacaacagaccaagccctgataagtaagt

SEQ ID NO: 3807 - DNA, 285 bp, Homo sapiens
  source 1..285: mol_type = other DNA
tgaaagctagatattttacaattcattgctcagcttcagaagctgaaggtcagactttacatttttaaaaattcaccaaggtgggattcttcaccaaggtgaagccagctggattcaccagcaaacacgttagtaagaaaaaatcacaatttgtaaggtacttttacaattttattagcactatcatgtttgtatgaagcttctgaactgaattcaaccattcaagaagcatagcttccactgcctccctgggggagctctggaaggctccaccactttcatgaa

SEQ ID NO: 3808 - DNA, 438 bp, Homo sapiens
  source 1..438: mol_type = other DNA
agatcctagaaccatttagtcaaactactggctaagatcttgctggtacagggtatataggattcacagccagtaattacaatgaatgaaggaagaaaccatcttcctttcagttatgaattcttcagtaatatttaatgaggggtgggtcaaagacacttccttcccttctgaagaggatttagaagggggaggaattggactgcttcccttttttaaggaaaatgtccctaaggagctcactataaccaggcggttctttaaactgacaactgcctgtgaagtgttgatggatttcctggcaaataaaacagcgaattggtgtgattattcataacaattaaattttgcttattaataaacaagtaagtaacctgccttcttggtcaccgcttcccccctccccaaggtgcgaggaggaagctgtgcttcagcagc

SEQ ID NO: 3809 - DNA, 310 bp, Homo sapiens
  source 1..310: mol_type = other DNA
gcagtcttttcaataagtgagcctcaaagggatgactttgtagctatcttatttagcaataaaacaggaggcaagtttgcctgtttcgcattgctaactcaatatgtaacagtttccttagtcatgataaagcttgttataactaaacactggcccttgtctgtttcatggcctcctggggaagggacccatcaggcatagctggcagtcatggccagggcagagtgtgccagcagcctcagcctcagggagagcttgtcaggggatgttttacaaggtctccaaaagcctcttatgcccaaggttattt

SEQ ID NO: 3810 - DNA, 429 bp, Homo sapiens
  source 1..429: mol_type = other DNA
gacctcaggtgatccgcccaaccacagcgcccggcggaatgcgtgttgactgtttaaaaaattgtaattgtccaaaacttaatatttgtggtcttttacggagtctccctctgtcgcccagacggccgattctcctgccttagcctccggagtagctgggacttcatttaataagatatgaatttaaaaatgtatgctttagtattcacacatgtattgcgcacttataatttagaacaagtgaccaaaacgcttaagagcccatcacgcaaattgttatctgccgaaatctgatcccggcttgccaagacaccctcagagcacgcggcgctgccaagagcctggccgagtgcagctcgagcgccgacgtcgccaacgtggcgcacactgctgacgcagtacgcaagttcgtcacagtggtcctccgcc

SEQ ID NO: 3811 - DNA, 541 bp, Homo sapiens
  source 1..541: mol_type = other DNA
ttaaagatagaataaaattcattatttgtacatcttaagtggtactttatggcaaaaagtatggcctaagtaattttcagataataactgctgaagtacagattttataaaacttgggcatttgggaatttagaaagtaaaagattacaccactgtaattttatgaatgagaaaaatgaagtggtttactatggttagcactgttgtaggtattggcaaaagcttttttcttttcaaaaaaaaaaagttttttttccagggtgcttacattctaactattctttttaataccctgttataccccatatggaacacagggtaactttaagaggaccggtctatgtggtgagcgcaacgcacaccaaacttaactggagcggagcgctgcaggcaggtgcggggcctcggtgcccctcaacccgtggcacccaggcagccggggcaggacacaagccgggctgcagtctccgggtcgccccgccccgccctttccctgccgccgtgcgtgcctcgggggggcggggtctggcacgtcgtgacg

SEQ ID NO: 3812 - DNA, 302 bp, Homo sapiens
  source 1..302: mol_type = other DNA
atgttttccccacagtttatgtgttaaaaacttaatcccttaatccccagtgaaaggctctgccctcatgaatgacttaatgtcatcattctgccatattatgacatggtgtagcagcacaggctggagccccacataccccagcagcatcgccaggcactgatggagattggggatcccccgactgggagccgtcagccccccagcgcccagtggtgagaagtgggatccaaaccacaggctgccctgtggcccagcccttctcagttattcagggaagccctccgaattaataattagga

SEQ ID NO: 3813 - DNA, 313 bp, Homo sapiens
  source 1..313: mol_type = other DNA
gtagctatcttatttagcaataaaacaggaggcaagtttgcctgtttcgcattgctaactcaatatgtaacagtttccttagtcatgataaagcttgttataactaaacactggcccttgtctgtttcatggcctcctggggaagggacccatcaggcatagctggcagtcatggccagggcagagtgtgccagcagcctcagcctcagggagagcttgtcaggggatgttttacaaggtctccaaaagcctcttatgcccaaggttattttagaacttccagaatgcctcactggcgggccaggctgacgtg

SEQ ID NO: 3814 - DNA, 564 bp, Homo sapiens
  source 1..564: mol_type = other DNA
gtctaagtaagtctgtgacagtggcacaaagagaagcttcacctgtcttttagttaatcaccctggttacttagtgcttagattattaaaaaataaaaattcttagtgaattgaggcaattcagtttaccttttatcacattttactttttaagtgtatgatgaaattgcaagattttgagagagagaaaatgtgagatttctaaacctaaattcaaatgaaagattaatcttacaagagttctgctttctgaaagcatttgcaccattgcactccagcctgggtttggcatgccttttctgcaaagccggcgtcacaggccctgtggtttatggcagcactcatctctgctgttgtagtgtgaacgcaactgtagacagtacacagttcctgtaaatctttatgtatcaagatcaacagcttgaacagttttgagtgaaaaaacaggattaaaaaaaaaaatcctcagtaagattttgtttttctttattcttaataggtaaacattataccagtgattgccaaagcagatacggtttctaaaactgaattacagaagtttaa

SEQ ID NO: 3815 - DNA, 878 bp, Homo sapiens
  source 1..878: mol_type = other DNA
tcagctgcggggagctgcccatcaccaggtcacggaggttctggcgggccggcctctgtgcggtagcccccacaagggagctgcccctgtccgcctcctcgcagccatgtggcgggagctccaggtcctcgctgggccccggggctggagtccgcggtaggggctgcacgtcgcgccgcgagttcttcctgcgagccccggcgctcaggggcggccagtgcgcgggggcggggggctctccctcgcccagctcgcggccctgtccagggagcgactccggggccgccgcgtcggggagccgatcgcgcgcctcgggcccggcagggccgtcgggggcctcgggctcggcggtcacctggattcgcggcgggtccccggagggctcggacggcccttcacagaacccgtacttggcgccgtcggcgggatcgacgcgcacagtggccacggcgttcaccagctccttgaagtgcgcgcgggcgcgggcgcgctgctccggttcgccgcctagggcgcccctgaagtgctgcaccagctcggcgtgcagggcccggcccccgcgctccgccaggaagcgcagcaccgcctcggggcccagcgccgcctcggggccccactctgccggcgctgctcccccgccagcgggcggctcagcgcggtcccatagcgacgggctcccagcggccggctcccgacggcggcggagtctggcgggctcagcgggctgccagcctacgcgtctgaggccagaggactcggccaccgcctcactgggccgcgcccgggcggacacgccccccgcacccccgccccgcctacctagggcggcctcgcctcaaggcccgcccacttccggcctcgcgagggccgcaatcact

SEQ ID NO: 3816 - DNA, 508 bp, Homo sapiens
  source 1..508: mol_type = other DNA
attagttttgtcaatactttaattctctaagcagtgttatagtagggcatgaaaaattaatgtcatagtgactatataagtgaaattccttagggaaaaacctggttttgttaaaaaaaaaaaaacctcagcaactacttacattcaataaatatctgttgtctgatgcctaagagcggcggcggcggcggcgcagggccgggggcggggccgggggccaggcggggcgggggcggcggcggcggcggcggcggcggcggcgcagggccgggggcggcggcggcggcggcgcggcgagctcgctgctctctcttgagtgtgcctgcgcgcaagccggggagcgggtgagtgcgccggccgctgcagccagcccggccggcccggagtcgggggcggggggcgtcgggagccccgacctgggggcgggcggcggccgctctggcgcggctgggatgcaccttgagcggcgcctttcgtcgcagcgcgcgggcggcccgagcttcggcgg

SEQ ID NO: 3817 - DNA, 558 bp, Homo sapiens
  source 1..558: mol_type = other DNA
aaaaaatcttttaacaacaggatctaacttcagttttaaatctgctttgagtctatctaagtctcctgccaagttgaatcagagtgggacttcagttggcactgataatctgttgttactcaagaagaagagagagatggacagtactttgaacctgttgttcctttacctgatctagttgaagtagttgttataaagattttacagaattatgataataagcaagttcgtatagtgatgagaagggaccaagtattaaaactttgtgccagaaagaaaagtagagcatttagctgttcgttttaaactatttaagaaaatttttgatgaagcaaaggaaaaagattctttgataacacctcatgtttctcggtctcccagagagtcaccatatgtagcagatgcagcttcagaagttgaagtgtcatcaaacaacaacaaaagcagtggtttctcctccaaagtttgtatttgtttcagagtctgttaaaagaatttttagtagtgaaaaatcaaaaccatttgtatttggctagttttaatgcacctttgaaaagt

SEQ ID NO: 3818 - DNA, 360 bp, Homo sapiens
  source 1..360: mol_type = other DNA
atcaatcaatatatgtaagatgtacattggttcaagagacaaaaagttgcattcttttgagtccttgatacaatgtctcaggtgagcctcaaagggatgactttaaggagtagctatcttatttagcaataaaacaggaggcaagtttgcctgtttcgcattgctaactcaatatgtaacagtttccttagtcatgataaagcttgttataactaaacactggcccttgtctgtttggcctcctggggaagggacccatcaggcatagctggcagtcatggccagggcagagtgtgccagcagcctcagcctcagggagagcttgtcagggggatgttttacaaggtctccaaaagcctc

SEQ ID NO: 3819 - DNA, 573 bp, Homo sapiens
  source 1..573: mol_type = other DNA
gtatgcattggtacttcattattttttatgcaaaagtaatattctattgtatggctataccacatttttctttgagacagagatccaggcctgatcacagctcctgcatggatcaaggagcatcactgcagctgcaaactgcagcttcaaatagctgggcctacaggcacgtgtgtctttttaaaaatccatcttcagtagatggaaatttggattgtttccaccttttactaataaaaatagtactgctataaacattcatgtataggtttggcctgtatacaagtttttgtgtagacatgtttacatccaattaatgaacacaggatgtctttccattaagcttacacttttgggttaaatttattcataattattttattatttttgataatattataaatggaattgtttacttaattttacttgaaatctctttgaactcatttattatcactgatagtttcattaaggttttctatagataagatcatgtcaagacaccctcagaccacagggcggcgccacgagcccggccgagtgcagctggagcgccgacgtcgccgaggatac

SEQ ID NO: 3820 - DNA, 314 bp, Homo sapiens
  source 1..314: mol_type = other DNA
aaggagtagctatcttatttagcaataaaacaggaggcaagtttgcctgtttcgcattgctaactcaatatgtaacagtttccttagtcatgataaagcttgttataactaaacactggcccttgtctgtttggcctcctggggaagggacccatcaggcatagctggcagtcatggccagggcagagtgtgccagcagcctcagcctcagggagagcttgtcagggggatgttttacaaggtctccaaaagcctcaaggttattttagaacttccagaatgcctcacagtgaccctggcgggccaggctgacg

SEQ ID NO: 3821 - DNA, 396 bp, Homo sapiens
  source 1..396: mol_type = other DNA
ccttggctctccccagaccaggcaaaggccaagctggctggtctccccacctgtggccctgagggcaggacctggcattcgagataagacatggcctgctctccacaccagggagcagcagggggctcctgatcacagcctgcattcagcctaggagtcaggaagaaacttcttggtctcaagcccagttccagccagccttctctggtgcctgccggtgtcctctcccagagactagggctgctcctcccaggggaggctgggcaagacccagcattgttagtaaccacttgacctcactgattctccacgtgcaggccgtggtgggcacccgggctgtctgcagcgtagccaagcagcttgggcctacactctgggcccaggggagtggctgtc

SEQ ID NO: 3822 - DNA, 384 bp, Homo sapiens
  source 1..384: mol_type = other DNA
cacagcctgcattcagcctaggagtcaggaagaaacttcttggtctcaagcccagttccagccagccttctctggtgcctgccggtgtcctctcccagagactagggctgctcctcccaggggaggctgggcaagacccagcattgttagtaaccacttgacctcactgattctccacgtgcaggccgtggtgggcacccgggctgtctgcagcgtagccaagcagcttgggcctacactctgggcccaggggagtggctgtctaggaggagactcccgctctgctccctcctgcaccagcgctgtgccccccgccggccaggcagagccatccgatgccgctgggccgcccactgaggatctgctggctgcagcgatgacagg

SEQ ID NO: 3823 - DNA, 452 bp, Homo sapiens
  source 1..452: mol_type = other DNA
aatgactttcgtagccactggtcccatatatggctagtgaagaactgagtttataatttttaaaaaattttaatgaatttaaatttaaattggtactccattcggtttttagaacagcttgggtatataaatctactttttcaactgtacattttatgaaatctagacactgataggtatctccattgaaaattcagtgttcaaattgagatgtgcctttcgctgtaaaatacagaccagttttcaaagacttggtatgaaaaaaataaagcatctccttaataatttaaaaacgagttacatgttgaaatgataacatcccctatatgttgggataagtaaatatattattaaaaacaattccatgtttttgtttttattttttaaaaaacaggttaccagaaaatttaaagttacaatgttagctaatgatcgcgcggcgccttttgacc

SEQ ID NO: 3824 - DNA, 515 bp, Homo sapiens
  source 1..515: mol_type = other DNA
tttcagagctgcacacaaagtctgtagacttttctctgtatgtattatacttgaagaaaaaagtacataaataatgttctgaagaacattcatttgtattaatggggtccatcatttggaaggtgagccccaagcatcatcattcttattcaagttcaattttaatgagaactaataatttgctcatagatttgacaatttacagaattcagaattgacaaactgccttttgaagtgacagtatggaacagaaccatatattccataggaaagctatccttggagttaatgaaagagtttaagatactaaaattgtatcttaacattagcttacaaaattggtatcagaaagacgttcccctatccttaggaattgccgaggaaaagtgactcccctggtggcgtgggatgaccaccgcaagagaacatttgacccttcccgggaccggcccgggcggggcggggctgggaggcgggcgcacatcgatggcgtcaccttctggcgccgccggttg

SEQ ID NO: 3825 - DNA, 314 bp, Homo sapiens; identical to SEQ ID NO: 3820
  source 1..314: mol_type = other DNA

SEQ ID NO: 3826 - DNA, 310 bp, Homo sapiens
  source 1..310: mol_type = other DNA
cattcttttacaatgtctcaggtgagcctcaaagggatgactttaaggagtagctatcttatttagcaataaaacaggaggcaagtttgcctgtttcgcattgctaactcaatatgtaacagtttccttagtcatgataaagcttgttataactaaacactggcccttgtctgtttggcctcctggggaagggacccatcaggcatagctggcagtcatggccagggcagagtgtgccagcagcctcagcctcagggagagcttgtcagggggatgttttacaaggtctccaaaagcctcaaggttattt

SEQ ID NO: 3827 - DNA, 575 bp, Homo sapiens
  source 1..575: mol_type = other DNA
tttttatgcaaaagtaatattctattgtatggctataccacatttttctttgagacagagatccaggcctgatcacagctcctgcatggatcaaggagcatcactgcagctgcaaactgcagcttcaaatagctgggcctacaggcacgtgtgtctttttaaaaatccatcttcagtagatggaaatttggattgtttccaccttttactaataaaaatagtactgctataaacattcatgtataggtttggcctgtatacaagtttttgtgtagacatgtttacatccaattaatgaacacaggatgtctttccattaagcttacacttttgggttaaatttattcataattattttattatttttgataatattataaatggaattgtttacttaattttacttgaaatctctttgaactcatttattatcactgatagtttcattaaggttttctatagataagatcatgtcaagacaccctcagaccacagggcggcgccacgagcccggccgagtgcagctggagcgccgacgtcgccgaggatacggttcgtcacagtgggcctccgtg

SEQ ID NO: 3828 - DNA, 547 bp, Homo sapiens
  source 1..547: mol_type = other DNA
gataggagatgcttttctgatccgcttttatgaaaagtgcctgcctttttctttttaaaatgtagtaagcttttgtcaatactttaattctctaagcagtgttatagtagggcatgaaaaattaatgtcatagtgactatataagtgaaattccttagggaaaaacctggttttgttaaaaaaaaaaaaacctcagcaactacttacattcaataaatatctgttgtctgatggaaccctaggagcggcggcggcggcggcgcagggccgggggcggggccgggggccaggcggggcgggggcggcggcggcggcggcggcggcggcggcgcagggccgggggcggtggcggcggcggcgcggcgagctcgctgctctctcttgagtgtgcctgcgcgcaagccggggagcgggtgagtgcgccggccgctgcagccagcccggccggcccggagtcgggggcggggggcgtcgggagccccgacctgggggcgggcggcggccgctctggcgcggctgggatgcaccttgagcggcgcctttcgtc

SEQ ID NO: 3829 - DNA, 188 bp, Homo sapiens
  source 1..188: mol_type = other DNA
ataaaacccaggggtctactatgttttctcacagccgaggagcgggaggggtccccggcagcaggtcccgctcccgggtgctgcggcttccgccacgacagtctccgttccatgaaccaaacataatgattctggtttacagtttcggttcccgccgccgggcaggcgccctgaaacgttcggcgagc

SEQ ID NO: 3830 - DNA, 272 bp, Homo sapiens
  source 1..272: mol_type = other DNA
agcctctgtcctattttggacttctgacttccagaaatgtaagagaataaaaaaaggcagctaccctggactgcagtgctgtagacctggagccaggctggccgggagatctgctgagtgggtcagccggtcagtcctgagcagccgggcctctggtgcccaggtccacgtgactggcacccctagggtcgctggcaaggggaggccaccgtagaagcgcccgctcgcgccggacctcccgcccgggaagccagggcagggcggggccgggg

SEQ ID NO: 3831 - DNA, 624 bp, Homo sapiens
  source 1..624: mol_type = other DNA
agccagtcgagggagctcctacgaggttatctgcgagcccagcaaatcttgggggtcctagccaaacccgccctcacccgggaggcggcgaagacgcccactgggaccgcgcctggccgttttctgggcgcgtcctgcccccacggcctctgtctcttagggcgactgggcgctgcctgagtcccgcgagaggcccgggcgaggaagatgcgcagcctgctgatccgcgtcccgcccggcgccagggaccctcagagggaggagagctcaaagacctcgccccgcgccttcgcgaggacacagtgagagcgcagggcgcctcccgaggcttcacaccgccggccgggccagcggaggctgtgaccggagcgccccctctgtgccgcgcacgccgcggccgccgccgggttggggtaggtgggatgggcgcgcacatggccgccagcacagggacggcggcgcgcgcgggaggcaacccagcggggcaacccccgcctttacctgtccgagcctgcacgcgccggcggccgcggcgccgaggggggcggagcttgccagcccgcgcgccggggcgggacctagcgggggcggggtccgcgcggggccgccagccagagctgggct

SEQ ID NO: 3832 - DNA, 396 bp, Homo sapiens
  source 1..396: mol_type = other DNA
agattgtgccacggcactccagcctgggcgaaagagcgagactctgtctcaaacacaaacaaaagtttaaaatatcaattaggtatatttgtatttaactgtttcatgcaagcagctgggactacaggtgcgcaccacgcctccaggctaattaaaaaaatttttcttttgtggagacaggatcctgtcgcctcgcctcccaaagtgctgggattacaggcgcgagtgacgtttctgtgaggaccttcacacagttcatccactcttcgaagagtatgaccctcagcctgaggtgcctacctccacgtggggtcaggaggcagttcaggtccctagtgacgagtccggcggtcttcccagcgcaggcgccaggactgctaggacgccgcgcacctc

SEQ ID NO: 3833 - DNA, 560 bp, Homo sapiens
  source 1..560: mol_type = other DNA
gttatgttgttaaagggaccacattaaaatacattcattctaaaagtgttacctttaagaaactacgtatataaattaagttactgttgccattattagcgtaagtagttacattggctcgtcacggagccacggcaaagcgtcctttcccaggaacccctccccctggggaggtgagctcctcgccgccagggccgtgtcgcgcacctcgggccgggtacccaggcggcgctcggcggcgagcggaatgtggaggagcgctcggcagggagcgctgccgccctggccttggcctctgggagcggcgcggccagggttttctgtgtcagccaagcccggaatgcgggggcgcctctggaccctcctcttgggtctgggggctgcacccacacgtgtggggccccggacccgcgcagcggccagagccttccgctgtgggccgtctgcccagcggcggccttcggcccgacctgctgggcccgccgggactcgcccccctccagccccggccggcctcggctcggcccccggcccgccccttccagccctcggcacctccc

SEQ ID NO: 3834 - DNA, 641 bp, Homo sapiens
  source 1..641: mol_type = other DNA
ctccggcctggtcccgagccccgccccgcacggccccgccaccacacggccccgcctccacgcggccccgcctccacgctcggcctggcctccggcctggtcccgagccccgccccgcctccacacggccccgcctccacacggccccgcctccacacggccccgcctccacacggccccgcctccacacggccccgcctccacacggccccgcctccacacggccccgcctccacacggccccgcctccacacggccccgcctccacacggccccgcctccacgctcggcctggcgggcctccgcactccgccctggtcccgagccccgccttggccccgaactccggcggcgcctccctacccggccccgcctccgcgctcgggctgccagccctccctaggccctgagcccagccagctgcacgctcgggcccggctcagagccctaagccctgcctcccggtcctggccgggtttcccagaactgcacggcgcctctccgcccaggcacccgagtccgagccccgcgtcccggattcggacccgcctgcctggggcggtgctgcaccaggtgcgggtgtggcaggcgtctcggagcgccaggtgcagcttatggtcgccgcctgccgctcggtagcc

SEQ ID NO: 3835 - DNA, 520 bp, Homo sapiens
  source 1..520: mol_type = other DNA
tgcagtgagctgagatcaggccactgcactccagcctccgttccacctcctttgcatgggaaggttggtcctgggcaaccaatgcccaggaggccagcctaaaccatgtcccctgctttttgggtgttggtgtctcccctaaatttatatgttggaaacctcattagccctcaaaccctcagaaaagaggccccagagagctgcctttcccctgtgaggacacgggaaccagatcccacaggactccccgttccctgagctctgagtgggttgaccagacttgtgtgtcccaggacatctgcagtgactgccttcagaaaaccttccaggaagaacgtcagtcatgccttccgggagctcaggtctgaggcatctggttgtaccacagccctgatggcaggggacttcagactgctcatgccggcctggcacttcctgattcgacttcagcaaggcagtctagaacctgacctccgatttaaactgagtttctccttcccttgagcaaggaggacagtga

SEQ ID NO: 3836 - DNA, 522 bp, Homo sapiens
  source 1..522: mol_type = other DNA
caggactccccgttccctgagctctgagtgggttgaccagacttgtgtgtcccaggacatctgcagtgactgccttcagaaaaccttccaggaagaacgtcagtcatgccttccgggagctcaggtctgaggcatctggttgtaccacagccctgatggcaggggacttcagactgctcatgccggcctggcacttcctgattcgacttcagcaaggcagtctagaacctgacctccgatttaaactgagtttctccttcccttgagcaaggaggacagtgactcactgtatcactgtgtgtgtatctactcactgtgcgtgcgtgcccccttctaggaatgtcgggaggagtgaacccgcccagggtgggcttccagtcacccgcacatatgcggggcactggccgcccatccctgccaggccccgaggatgcccgcgctcgtcctcggcgtcgcgggttgggcgcgctcccgggcgcattcccggccgggcagcccctcctccctcgtccttagcccagg

SEQ ID NO: 3837 - DNA, 709 bp, Homo sapiens
  source 1..709: mol_type = other DNA
ttgaccagacttgtgtgtcccaggacatctgcagtgactgccttcagaaaaccttccaggaagaacgtcagtcatgccttccgggagctcaggtctgaggcatctggttgtaccacagccctgatggcaggggacttcagactgctcatgccggcctggcacttcctgattcgacttcagcaaggcagtctagaacctgacctccgatttaaactgagtttctccttcccttgagcaaggaggacagtgactcactgtatcactgtgtgtgtatctactcactgtgcgtgcgtgcccccttctaggaatgtcgggaggagtgaacccgcccagggtgggcttccagtcacccgcacatatgcggggcactggccgcccatccctgccaggccccgaggatgcccgcgctcgtcctcggcgtcgcgggttgggcgcgctcccgggcgcattcccggccgggcagcccctcctccctcgtccttagcccaggggccggcgcctccccgcctcgcgcggactgtctcgtgcgggcagctgcgggcgcacctggaccctcgcaaggcccgggcggcgccgatccccgcgggacgcgctgcgctcggggcctcccgcctccccccctgccccagccgccccccggccgcgcggcgccccgcaccctgcagggacggctgccgcatcgctgggacaaactcggcagcggaggcaa

SEQ ID NO: 3838 - DNA, 373 bp, Homo sapiens
  source 1..373: mol_type = other DNA
cgacagagtgagactctgtcaaaaagaatgagatcatgtcttttgtgttctcacttataactgggagttaattgataacaacttatgaactaatacctgggtgatgtgtacaataaccccctgtgacacgtgtttatctatgtaacaaaccttcacatgttgaaggtcttcaaacctaaaaatagtggcccatggttttaaactctagtgatcaccgttagaagcgtaggccctggacggaaggggggttctgctcccggcccctacccaaggtcgggcccacggcaggtgcgccagggcccggcactgagcgtgtcttctccccgcagccgcccccgagggcagcgtggccggcgactccgccttcagccgc

SEQ ID NO: 3839 - DNA, 534 bp, Homo sapiens
  source 1..534: mol_type = other DNA
ggaaatattcattttaattcccattcaattgtagagaccctacaagtctacacatctgtttattcatttcaaaactgtgaatggtaatagaacatcttttactatttctaaggatagtagtggaggctcagataaatgttagctgttactaccatcccttagaaatactgtgattttgatggaagagttttcaccaaggtgaaagcagaatcctaacaactaattttaaaaattctgggctggggccgggcgccacgcctgggatcacgagatcaagagatcgagaccatcctctactcttgcttgaatgcagtgagccgagatcacgccactgcagtccagcctggacgacagagcttgactctgtctttaaataaacaaacaaaccacggcggcgcctgcgcagagccgaggcgaaggaggcagggagagacccggcctgcccagagtcgcggagggcggtgcagcgcatgcgcggggcaggtgaggctgcgcggggcggagcctgtggccctggcgcggctctgggtccgt

SEQ ID NO: 3840 - DNA, 521 bp, Homo sapiens
  source 1..521: mol_type = other DNA
gggccaggggccccatctacccccggggcagcgggactgggcgtgagcccggcctgggacacagcccctgcgactgcaccattgttaggggccttctcggagctggcagacctagaaccaggcctagggggtgggtaggaccgggggccctagccatgcgtggggcctccctgctgggattggagaccccctgacagctggggctggtcccagcatagcagctaccgcagggcggtgtgtgcagatggaggcgggggccagcatcgctgccttcttgcccctcccagaggaccccaggtccccagctcgggcgccccaccagactggtaacaacttacacttttgggttaaatttattcataattattttattatttttgataatattataaatggaattgtttacttaattttacttgactttcattaaggttttctatagataagatcatgtcaagacaccctcagaccacagggcggcgccaccagcccggccgagtgcagctggagcgccgacgtcc

SEQ ID NO: 3841 - DNA, 348 bp, Homo sapiens
  source 1..348: mol_type = other DNA
tgagctgagatcacgccattgcactccagcctgggcgacagtgcactgtaatcccaacagttctggatttggaaattcaaaggtcactggtggtcactttcaaggtgatcatagtttttttgggaggttcccgagcaagttgcagctgtggacaaccgcagccgtggcctacagaggaccacacacgcctccccgcagggcacgtgcggagggcgagagggccagtctcgaccaactctatccctcgtggagggagagcagctgggaaggagtgcaagcacccagcactgagcgggctctccacagccagcggttgcctgcaggtggagccggtgcgcaacaggcgag

SEQ ID NO: 3842 - DNA, 505 bp, Homo sapiens
  source 1..505: mol_type = other DNA
ctctccacagccagcggttgcctgcaggtggagccggtgcgcaacaggcgagtgagcgcctggcggccccgacttttaagagccactctcccgctcatcggagcccagggctccagggggtcggtttgggaccgtcatccccttggccgtgcgccaccctgggctcagccgaaggtccgggtctccgtagtcgttaagcaaagaggaagaggaagcgcttcttcattaggttttatccattaaaggtcctttgccgccggcaccgccccccggctgcgacccggggctcggaaagaaccaccccaggcccgggctccggttccaccgcacagtccgcccgctgcggtaaagccgcgcccaccgccgcgggtctccaaccctgcgccgccgccgcccccgggggagggtacggaaagggcgcggcgccgccgcccacgggctcctccagagcgcggcggggccgggccgcgcggaatcacgggacagaggcggggccgcgccggcg

SEQ ID NO: 3843 - DNA, 317 bp, Homo sapiens
  source 1..317: mol_type = other DNA
tacacttcaaaattaaaacgttttgcttctttgcaaatcactagtataggctatatggcgcgcgcggcagcctgtgcaacagactcccggctcgaattttttataaaaagtgatatagtcaaaacttaacgcgtacactttaaatgtgtggtttattgtatgccagttataacgcaatatagctgttaaaccaggcattccctgattaatcagtattgcggggcccgaccactccttggcttcccaggggtgagcctcgccggggcccggctgagaagaccgctctcctccgatcctaattgactgagccaatgaga

SEQ ID NO: 3844 - DNA, 322 bp, Homo sapiens
  source 1..322: mol_type = other DNA
cgaattttttataaaaagtgatatatcaaaacttaacgcgtacactttaaatgtgtggtttattgtatgccagttataacgcaatatagctgttaaaccaggcattccctgattaatcagtattgcggggcccgaccactccttggcttcccaggggtgagcctcgccggggcccggctgagaagaccgctctcctccgatcctaattgactgagccaatgagagccaaagaggagggagggcccgccacgctctggctggacacggccttaatcggcccgttcgtttttggttctacgttgaccccgagaaaccgacaggc

SEQ ID NO: 3845 - DNA, 308 bp, Homo sapiens
  source 1..308: mol_type = other DNA
cggatgtcaactgccaaccagggtatgtcactgtcatcatcattttacagacacactcctccaagtggtcgtcatcgttcatcttcaactctatgattaactgcaaaatgttctgctcattactgatgctcagttctctcctcacagagaggaagtaactagcttgatagtctggcgtccaagcgctcgcatgaacctgggtgccagggggggcgttaggaatcaggccccctatccctgagccatgttgagacgctgcagcaacagcaggcgcttcccacccgtcaggtgccgcgcaactcagcggc

SEQ ID NO: 3846 - DNA, 263 bp, Homo sapiens
  source 1..263: mol_type = other DNA
tcatcgttcatcttcaactctatgattaactgcaaaatgttctgctcattactgatgctcagttctctcctcacagagaggaagtaactagcttgatagtctggcgtccaagcgctcgcatgaacctgggtgccagggggggcgttaggaatcaggccccctatccctgagccatgttgagacgctgcagcaacagcaggcgcttcccacccgtcaggtgccgcgcaactcagcggcgcgccgccatggctgggctgggcgcc

SEQ ID NO: 3847 - DNA, 614 bp, Homo sapiens
  source 1..614: mol_type = other DNA
acagcaaagcggaaatcagcttttcctgaacatgtactgaattctagtcaatttaacattttacaattgtacactgcagcaaggagtcagaatttgaatccgaagcagtgtccttactggggagacgggagcaaagcacccccccgcttcccccaggcgagggacagtgccaggcctggatccggagccccagggcgcaagatctcccgcagcgtcacccggcagagggacgggtgtggccaccgggcgcggcaggtcctgcgtgcgctgaaagtgcggctggaggcgcggacggctttccggagccccgagagtctgtaaccccgcatgacggcctctagggggacagcgaggtccccctcgatctctggctggccggcggggccagacggtgccgagactccagggcgaggccgcagggagggggctgtcccgccccacgtggaccggctccccgctgggggcgtggccgccgaagcgggccgggccaatgagcgccaccgtcgggctcacccggctgggcacgccgggccgaggagggctgcgtcatgccgggggcggggcttcggggccggcgcgaggcgcggcggggtcacgcgggtcgctgcgcgggc

SEQ ID NO: 3848 - DNA, 328 bp, Homo sapiens
  source 1..328: mol_type = other DNA
ccagcctggagtgcagcaatccagcctcccgagaagctgccaacttggccaggctggtcttgataagtgctgggattacaggtgtgcccagccttgtctttctttttaaaagagggcctggcacttagggagtatttagaactctacactaaaatgtcttctctaaatggccttgagctgggaaatttgataaccaaatgtgtcagaattgtgcataaagcaagagtactgagttatttcttttatcatgagtacagtacggatgaggtccatggatgcagagaaaaggatgggataccagagcctgtcctggctgactcctccctca

SEQ ID NO: 3849 - DNA, 350 bp, Homo sapiens
  source 1..350: mol_type = other DNA
caggaattataaaagctgagaaattctttaataataagccactggcttctggctgaggccttacgcatatcctacagaagaccaggcttctctctggtccttggtagggtggagagttctctcctgaagctccataaatcaagacttctttgtgctcaaatgaggtgatttatgccttaatcaagcaaacttccctcttcagaaaagatggctcattttcccactacagctactattagaactattattattaataaattccatgtttgtcatcttataaagcctttcactattttagccaggttgaatgaacatagaaaaatacaaaactgaattcttccctgtaaatt

SEQ ID NO: 3850 - DNA, 453 bp, Homo sapiens
  source 1..453: mol_type = other DNA
catggatgaaccttgaatactttatgctaagtgaaatggcacctacagttgtcaaatcacaatcttaataccactaaactgcacatttttgaaaaatttaacactttaaaatggttaaaatggtatatgtgatgttatgcatattttaccacataatattattttttcacagctcctgtgagtctgagactttgaagcggccccagcatcctgggaggaccgccctgtctctccgcccagggactcccggcgcgccaaccccagctggattcagcccggctgaggcccccacggagggtcccacgcccactcggaggcgcactcacaggcgcactcagaggcgggcggcgccgcgccccgaggaagccgccctcaatgccgaggtgcgctaaagagcctattgcctgcgagtacgcgtggacgcgcggcacgccggtcctggctacaggcgcg

SEQ ID NO: 3851 - DNA, 443 bp, Homo sapiens
  source 1..443: mol_type = other DNA
tggagggctcccctgggcagtaccctggagctcggaagagaataactcttggttggtattaccaagagatagagtctcagatggatattcttacagaaacaatattccacttttcagagttcaccaaaaaatcattttaggcagagctcatctgcgacagaaacatttatccatctgtaagtgggaagattcctaaacttatgaagaaaagtatgtgcatgtataaatctgtgtcacatatactaaatttaaacattcttctaacgtgggaaaatccagtattttaatggtcaggaaaacaatgcatatttgcatggtgatacatttgcaaaatgtgtcatagtttgctaaattatctcagtttattttgattgtgaaatcaggtattcaacagagaaatttctcagcctcctacttctgcttttgaaagccataaaaacagc

SEQ ID NO: 3852 - DNA, 211 bp, Homo sapiens
  source 1..211: mol_type = other DNA
gcagcattttgtctgtaaaacaggtgggctgagcccagacctggcacagtgagagcacagtggttgaagaagctgagcagctgtgtgtggtgttgtaaaacatagccatacacagtgtccttttgcatgtcactgaacaatgagtgatcactgataactgaggatgctatttattggccaaaggaatacttgtgttgtatttgcataacca

SEQ ID NO: 3853 - DNA, 311 bp, Homo sapiens
  source 1..311: mol_type = other DNA
agagtccagagagacagaaaatcaccttttctctgtatgcccccggccagttggatggatcccacctacgttgagggtagatagttctttaagtattccttaaaccagtcaaattgacacttaaaatttactatcacgctacctatactagagatagtgatctagagccttcttccatggagaagctacagaggtcttaagagacctatccctcttaaatcctctggcatcaggaactagaaaatatcctgatgggcagtgccagacttagtgaggcagaacttcccttgcccatgtggataaaaggcctg

SEQ ID NO: 3854 - DNA, 374 bp, Homo sapiens
  source 1..374: mol_type = other DNA
gaagaggggctcatggatgagacttcactctagtagttaacttagatttctggagtccactgcattttgagggtacctgaaactaggattgcccacgaaatgccacagggaccttgcctatgcctttagcctgactgcgcaaggctcccagtcccaggagatggagtccctgacatgagagtgcctggcatttccagttctagctctagaatgacatgacaggagagctgaactctgggaaattcccttagtttcccctttatgagaaacctaggatcaacattatttctcagcgagcccggacaggtgatcctccgagcctcacaggatcttctggtaggaggaggaagctggagcctccttctctgaaatga

SEQ ID NO: 3855 - DNA, 653 bp, Homo sapiens
  source 1..653: mol_type = other DNA
ttgtaatttaataattttgtacaaggcagtttctacattaattttatttttctgaaaagtgtctatcatattagtggcattatgaaaatcgtagattattttctgtgttttgaacaacttttctttaaaatgtacgctttaacatgtacacatatgtaacaaacctgcacattgtacacatgtatcctaaaacttaaagtataataataataataaaagaaaataaaacttaaaaaaaaagtgtatgctttaacaataaattattaataaatagttatctgtgttattcaagatataattaaattgttttttgtgctatttaaactgcattaactgtttcacaattaagtattatcttatcaattaggtattcaagaaagttagcatgagctagattttactttctaaagaaataagatgttaatacaaagatgtttgtcacaacatggttttcaatagcaggtttcaataaataatgttacagtgatacagttaaatactatacagctattgaagcatgtcattattcatatttagtatggaaagatattttgctattttgccacatgaaaaaatgaggttggaaaaagtataggttttgtttctgatgatgcactcagaaaagacaagtattcacattttttcttgtggct

SEQ ID NO: 3856 - DNA, 342 bp, Homo sapiens
  source 1..342: mol_type = other DNA
gatgttaatacaaagatgtttgtcacaacatggttttcaatagcaggtttcaataaataatgttacagtgatacagttaaatactatacagctattgaagcatgtcattattcatatttagtatggaaagatattttgctattttgccacatgaaaaaatgaggttggaaaaagtataggttttgtttctgatgatgcactcagaaaagacaagtattcacattttttcttgtggctctggcgggcactgactcttagggtctgaaagcccctgagatgcaaaagcctcaaggaagttcttcaatatttctggaaggaaactgtctccagaagcttcaaggc

SEQ ID NO: 3857 - DNA, 211 bp, Homo sapiens
  source 1..211: mol_type = other DNA
ctttgcaataaggttgttagtttccggatggatggatggatggatggatggatggatgaatggatggacaagtaatgtcaattagagacctgagtgagtctcagggtgaatctgaggcaagctggtaccaagcagagactcccttggctgtctggccacagcctggattccggcatccattgtgatagagattggtgcaggcctgacccac

SEQ ID NO: 3858 - DNA, 189 bp, Homo sapiens
  source 1..189: mol_type = other DNA
tttcctaagagtaagaagtatacagaatgctttaagtctcaaagtcataccccaaggcctggggacagaaaatggagggcatcttcactgtgccattttccatctggaacagagggagaccccaccagcctcactgctgctggagaccaacccaactgtgagggaggctacagcacactccaccccact

SEQ ID NO: 3859 - DNA, 155 bp, Homo sapiens
  source 1..155: mol_type = other DNA
gctttagctgtggccagaacagctgctggtaaatcttaaacaagttccaggctggagtacagtggtgcaatcatggctcactgcagccttgacctcctgctggtcttgaactcctgggctcaggtgatcttcccacctcagccacccaaagtcca

SEQ ID NO: 3860 - DNA, 367 bp, Homo sapiens
  source 1..367: mol_type = other DNA
tcaggtccattttgcagctgtcaaaatgtgtgcccaccaactggttggctgcagacctggggactagacccgggacttcgtcctgtgagttgtctgctccctgatggcagaatgcagagacatgtctcagagagggcttccctggaaaagcatatcctgctttggattttccctatagcaatatgccctatgaaggcttgttcccaatgcctggaagagtgcctgcagccaacacatatgttttgaatgaatgtgtgcacacatgcatcagataagaaccagtttggtttctgctagcctgagtcaccctcctggatgggccggcccatctcctcatgctggccaaccctctgtgagtgtgtgggag

SEQ ID NO: 3861 - DNA, 388 bp, Homo sapiens
  source 1..388: mol_type = other DNA
gtgagttgtctgctccctgatggcagaatgcagagacatgtctcagagagggcttccctggaaaagcatatcctgctttggattttccctatagcaatatgccctatgaaggcttgttcccaatgcctggaagagtgcctgcagccaacacatatgttttgaatgaatgtgtgcacacatgcatcagataagaaccagtttggtttctgctagcctgagtcaccctcctggatgggccggcccatctcctcatgctggccaaccctctgtgagtgtgtgggaggggaggctgggctcctccttgtactctctgaggtgctctggaaggaggggcagctccaccctgggagggactgtggcccaggtactgcccgggtgctactttatg

SEQ ID NO: 3862 - DNA, 327 bp, Homo sapiens
  source 1..327: mol_type = other DNA
acctcattctgagagtgaagactaatgaaatgatttgttccaaggcaagtggcagaggttgaatttagacccattcctatgctgagtttatgtcatcgtcccgagaccataactttaaagatgtaagatagtgggaaaagagttgatttcaaagcacctctcagaaggattttgcacatgagactgagggagccctatcattttattatgaaaaaacggcctttctgctcaaatctgttttttaaaaagtcaacaaacagactctggacttagtggggttgaaagtgacacatccgcttctcgcagtggggcacagacgcaaaccac

SEQ ID NO: 3863 - DNA, 457 bp, Homo sapiens
  source 1..457: mol_type = other DNA
tctcaactctgggtcagggtggctggtccccactgctgtgtggaggagaatggcatggtgtttgcgctccccaccagcctcacttacacttgtggacactgcggccggtgtcccttggttttccagctgtgcaaccctgggcagagcttgcctccagatccggatctgtatgatggggttattaatgcttcatatgtaactaaaaggcaattgtatcatttgcattattaccagtgacatgagacatagtcacacaaaaattgaaatgtcatttgttttaaaaccagaaattgcccaacttagggccctcctgtctctcactgggtgccctgcaggggaccaagtggggcctgcttaccaaccaggcctttcaatcccaggcccctgcatggcagggagaggccagttccaccatggcacaggcgctgggcctaggaagagaggctcttagtcggaa

SEQ ID NO: 3864 - DNA, 305 bp, Homo sapiens
  source 1..305: mol_type = other DNA
gtaaagaggtgccaggcagctctgctcggtcccagggctcacacagaccaggccagaggtcagctcagtcctgttcctttctagtggtgagaaggtaatagcatcttgcctacaggaagttccctccttccttttacaaaagaaaaggctgcttccagtgacccaggaggacccagagaacctcatcctcaggctcctaggctgctgagttagggctcagctgcctccctcttccctccgctggaaacagaagctcccagcgaatgttggcctacgagcctcgccagacccatctcccagggcct

SEQ ID NO: 3865 - DNA, 662 bp, Homo sapiens
  source 1..662: mol_type = other DNA
aaaaatatagcaagcctcaggagtttatatattatatggataattttatgaagctcaaaaacacccaaaattaaacaacatattctgtaagtacatacgtgggatatgtgaatccaggtacgtgtaacttactgggagttcactataaatttatattagaaagaagcttaggttacctgaaagtgatgcatgaatactaaaaatttggaattacatatataatatgtaataataaaaaaagaaaaaattgtcactggttatccttcaggtataaaaattacaattaaaattgtaatgttataaccttccattctttcccctatgaattaaaactttttcttttaacgagactaaaaaatcaagttgataaaatcgtgggaactggttaggtcaggctacccactccagatttccagcaggctggcctcagctctacctacagccagtagcttattaaggctctaggcgccagtgacaccttcagacaggtggttagtgcgccctaaggactctccgcagcgtcgcaggttccccaggggcgtgtccagctgtcgtcggggagagcccacctccccggggggtgtggctaagggacgaggcgcttctcgtccagagcccaggtaatccgggcgggatcagcgagcgtcgcgatgtgatgacgt

SEQ ID NO: 3866 - DNA, 402 bp, Homo sapiens
  source 1..402: mol_type = other DNA
ggggcccctacatcacatgtcacctcctgaggctgtgtcacgggaactttctaaattgactgagaccgtctcacatattcgaggttcacaagcccatgcatggggacgtcccctggggtagcgcccctcctccatctccacaggcacatgggcggcgtacctgctgggctgtgtggagaggaccgggttcctctcctaacgaatgtcgacaagtcgagaaaattgctcaaatttaccctaggcgggcggcacccgctgaaccagtcccgcactcggccgcatgcgcactccctgcggccctcccgccaggcgccgcgctgggcagccagcgccccggcggggtccttcaggccttcggccgggcagcctccctcggggtccttgcgcggttgcgtagcagct

SEQ ID NO: 3867 - DNA, 429 bp, Homo sapiens
  source 1..429: mol_type = other DNA
ttaattcgcctgtagtcccggctacactggaagctgaggctggagatgccactgcactgcagcctgggtagattgctgacgtctgtgaggttcttattatgtcatgaattgatctacgtccttcacatatgtaaagcctaggatgtaggttgtaactcctagagctgagatcttgtttatatacaaaaggtttcaagaatcaaaagtatttcaggttcgcagtttgtgaaaaggcgggcggaggtttagccactccccgcctcgccgccgcgagccctcgctcggcgaccagagcatacgcgaccgcgcgcagtccgccgtcgcgcccctatgacgtcacccgcgcgccaccgcttccgggctggggactgggggcggggccgcgcggagggcaagccgggggcggggccggggccagagcagatctcc

SEQ ID NO: 3868 - DNA, 443 bp, Homo sapiens
  source 1..443: mol_type = other DNA
aatctgttttaacaaacctttcaggtaattctgatacacactaaagtttgaaaggtttctttaaggctttccagggggtctcccgctcgcctccgtttctaacttaaaaaaattttctttggaggggtattatcctgctagtagaatcttactataatccaaaagccttgaataaaggcctatttgtatagttatgcagaattcctgggaggtttgccttcctaggagcacaggtcggccctcagggccacggtgcaagtaaagcagccctcaaagggctgcaggaggcgcttccacccttccagcttcagaagcagaactggaagctcggatacccgcagtggatttccaggcaggcgaacgtaccttattgcgcatgctcgctagcccctcccgctcggagcggaagggggagcgctgggggcctgggcctggcctggccg

SEQ ID NO: 3869 - DNA, 445 bp, Homo sapiens
  source 1..445: mol_type = other DNA
gctcgcctccgtttctaacttaaaaaaattttctttggaggggtattatcctgctagtagaatcttactataatccaaaagccttgaataaaggcctatttgtatagttatgcagaattcctgggaggtttgccttcctaggagcacaggtcggccctcagggccacggtgcaagtaaagcagccctcaaagggctgcaggaggcgcttccacccttccagcttcagaagcagaactggaagctcggatacccgcagtggatttccaggcaggcgaacgtaccttattgcgcatgctcgctagcccctcccgctcggagcggaagggggagcgctgggggcctgggcctggcctggccggggcgtcggcaccggcggccatcttggcttcccggggaaaaggccgcggcggggcagggcggggactgcctgcctgcctggccgcc

SEQ ID NO: 3870 - DNA, 589 bp, Homo sapiens
  source 1..589: mol_type = other DNA
tactttgtcagaatgtttagatcccttttctgttttacaagagaaaatatgtgtttataattatgtataaattaatttcaccaaacattaatttatttcatttcacattaaagtttatctgtaatattttaggctgttcataaaagcaacctagcatttcattagtaggatacatttctgatgaataaatactgttggttttcaacatcaaacactttgcaacaaaagttggaaaagagtgtcctgcatgatcttatttccaaccaggatatatttattggaaaacttaatttacaaatatttataatttattttgcctaaaatgacattagggcatgagctaactaccagtttgtcaggttgaaaataaaaacattgtctagctttggtgcgatatccaaaaactacaataactattgtatttgaaaactttttaaatataccttaagctttctgccaccttacagaaaggacagtctcttggctggctgttatggctaaattttaaaaatatccatagggaatatcagtccttcaacctatagataaaatttagtaacagaatgaggatgttatgattttttttgca

SEQ ID NO: 3871 - DNA, 473 bp, Homo sapiens
  source 1..473: mol_type = other DNA
gatcttatttccaaccaggatatatttattggaaaacttaatttacaaatatttataatttattttgcctaaaatgacattagggcatgagctaactaccagtttgtcaggttgaaaataaaaacattgtctagctttggtgcgatatccaaaaactacaataactattgtatttgaaaactttttaaatataccttaagctttctgccaccttacagaaaggacagtctcttggctggctgttatggctaaattttaaaaatatccatagggaatatcagtccttcaacctatagataaaatttagtaacagaatgaggatgttatgattttttttgcaccctttaaactgcaggactgcaattggtccctttgaaaggggaatgatggagctgtcacatctccatactgaaaaggtacactgcaagtgattaaaccgtttttgtttgagtttcagcctccggagtgaggaa

SEQ ID NO: 3872 - DNA, 601 bp, Homo sapiens
  source 1..601: mol_type = other DNA
gccacgtgcactagtgcatctggatgaactgtggactttgtctatccgcggtaattcaaaagctccctgcagccaggggatttaccctctctctgagcctcacagtgtgtttggcacgtggtataagatttgaaggttttcctacacgtgtcaatgagtatcagagtcttatcatcattacagttcttatggacccaagcagctggtaggagctgccccgggtcccgacaggtgttgcccgcctcccacggggctccgggaccccggtccccgggctgccccctgccttctggggcgctggagcgcgcgcagtggcggagctggagccacccagtgcttcgcacgggcgcgctccgcttctccgggttttagcggaagcctgcggggggcggggtaaccgcggaagccggcggccgtgggcgcgcgggttgggggctctcgcgccgctccgggctctccccccccccggctgcggttgccgaagagaggccggagcgcggcgcccggctgctccacctggcgcgctgagcaccgcgcggggagcccccgggggcgggcggtggggggcgcggactgcgggcacgaggcgtcgccgcagctc

SEQ ID NO: 3873 - DNA, 813 bp, Homo sapiens
  source 1..813: mol_type = other DNA
cgggtcccgacaggtgttgcccgcctcccacggggctccgggaccccggtccccgggctgccccctgccttctggggcgctggagcgcgcgcagtggcggagctggagccacccagtgcttcgcacgggcgcgctccgcttctccgggttttagcggaagcctgcggggggcggggtaaccgcggaagccggcggccgtgggcgcgcgggttgggggctctcgcgccgctccgggctctccccccccccggctgcggttgccgaagagaggccggagcgcggcgcccggctgctccacctggcgcgctgagcaccgcgcggggagcccccgggggcgggcggtggggggcgcggactgcgggcacgaggcgtcgccgcagctcggtcaggggccggggccccgccgctcgccgctgcactaacttgccgcttggtctcgcctcgccgccgcggctcgctgcgctttgggtggcggggggcggggagggccgagggagggaccctacgacggggagcccgcccggtgccgctcttcttcctcccttccgccgattccgggagcgacgggcgcccgtgacctgcgaacgctgccaagtgacggtccccgagtctgaagcgcccgcgaggaagcgagcgccagcgcgggccgccggcgatgacggccgcgaagcaggagccgcagcccaccccgggggccagggcgagccaggcgcagccggcggaccaggtgagagtcggcagccgcggccaggccctcccgggaggggtggctccagtgcgcgctccgcccgcctcccgcttcccaggctgggc

SEQ ID NO: 3874 - DNA, 490 bp, Homo sapiens
  source 1..490: mol_type = other DNA
tgaagggtccttgggtatacttaaggaatatataaacctctttttcaaactgcagtcaacctattattaatgtagtaaagttaatttaaattcataggaatcagtatttttagtaagctaaaaagaatacaagaatattattttgagaaatgttatatttatgtgtgtatgtgtaccaagtgacacagaaattgtatttctgaggagagtggccaaacaagtttggaaatgcatatatataatttagttctattcagtatgggtaccaatatcttaggatactcaaaacccttatatacaatagtgtaatatttgcatttattttacacacaacatcctgtatactttaaatcatttctaaatgacttataataccttatacaacctaaatgctatgaaagtagttatcacactgtattatttgggggagctcaagttagcttagcacagtgtgaagcagcgtctcgcttcctgttggccgagctgcgca

SEQ ID NO: 3875 - DNA, 353 bp, Homo sapiens
  source 1..353: mol_type = other DNA
acaggcatgcctgcctactcttttaaagacacctttttgatctcaaggaactaaaggtctgagtctgacacttgcaaaagttttcacgaaagtcatctctttcctcattgcttaaaagaaacaaacgcggcggctcaaatgacatcatgccactggccaggacgctggagagggcagcattcagaatcaaagcacaacgccaggacctgcagcccagcccacctctccccgggctgctgtggcgcaggcgcagtggcgccgcgctccggccccagcgcgcatgctctgcccggctgcggcgcttcgggcaggcggcggcggcggcggcggcggcggcagagggagtttccgct

SEQ ID NO: 3876 - DNA, 412 bp, Homo sapiens
  source 1..412: mol_type = other DNA
agtcccagctactgggacttgaacggttgcagtgagccagtgacagagagagactccgtctaactcctccttatgacgaattgatggcaccactttcattcaaaaaaaaaagttttctaaaagtatggttttagattaaatgaaaaataatacttctgaaaaataagcggttataaggtttttaagttttctttatgttggtgtaaacttataaagttacttggtcgtcctcgaggaacgattttgaatcggtcctctgcgggaagtacccggaggcctgccccggaacgcgctcctttcggctacgagatgaggggcacgcagacggacgcgcccctcggtgagtgtgcgtgtatcagacggctgcctggtcagcccgatcgcctgcgcgcggcctcgttggccgcacagg

SEQ ID NO: 3877 - DNA, 297 bp, Homo sapiens
  source 1..297: mol_type = other DNA
ccactgatgggcctgcagggcaaggggctccgcttacctgagctgccaggacttgggggcttgtatggaataggtgtttcggtaaagccaaataattcttgccagctaacacttaagtgataatgacccatgtcctattagctagatgctctaggaaaatataccatgaagaacttgctgttttgtaggattgatgaagaaatgctttaaaatgctcccgtccagcagccagacagtagctagatggtgttttcccaaagaaaacaaaaatcagacgtgtgctcttcctgttttctg

SEQ ID NO: 3878 - DNA, 438 bp, Homo sapiens
  source 1..438: mol_type = other DNA
atgataataacaacaacatgaccatagtgtttattacctaatactcaccttatatgatttaattcatttaaggctcacgaaattcatatcttccttatttatacaaacagaagagctactttccttaaggagctcagatctcacgcctggacaaggacacctgtaacacatgtacacatgtgcacacatgtgtacacacacagagagtatataaatcacctggggatctagttaaactgtagatttggattattgttagaacaagtgaacttgcatttctaacaagttctcaactgctggtccatggaccacactttgtgggcccatggcagggcttggttggccctctctggagccatccagggacctgggagtgacgggtgcattcacatgaatagcccgtgtttgagaaatgtccaatcctgatcatgtcaggaa

SEQ ID NO: 3879 - DNA, 409 bp, Homo sapiens
  source 1..409: mol_type = other DNA
agccattttctggtggaagaaaaggtctgaggcgagctggagtgcaatggccccaaagtgttgggatcacaggcgtgagccactgcgcccggccgcaaatctaggtttgcgaaagatcttccagaagcgagatctattcaattctgaagaaataactcaggaggtctttcagaaactccttgaccccagaggagccctgctgacacctggattccagctgccccggcttgggaccgcgcccgctgcgcccacttgtggctcctgggagccgccagggggaaccgcgccttcaccgcctctgccgaggacgccgccagataggaggctgatgacatgagggctccgtctcccgagtgatggcagcgcgcgctgcttcgccgcctccgccgctcagccccggactccttac

SEQ ID NO: 3880 - DNA, 545 bp, Homo sapiens
  source 1..545: mol_type = other DNA
cttatcagaggctaatagtgtatgtctcccaggaatactctagaaagagtgagcggaaaagcccgacaggtgagaggggcttcggaccagggcgcacacctctagagaggtgcttcgctgcagtgctgtgaagccacccccgccatcccaccggtcttggaaccgggaagggatccggacccaatctggagccctggtcgcaaccgtggctgccacttggaggggggcctagaggtcaccctggcctcggtgccctccgtggccgggttaagaggaggtcccggagttctgctcacttcagccgtgtgccgggcactgctggcgccggctggcgacctcccgcctggggccaggggaggagggtggttggacgctgccaccgctgccggggctgtgcagggctgggcggggagcgaggacccggcggctcctgattgcggccccgggggaggtggccgagccggataagctgcggcgggctggagggcggccacctcccctgcaggtccggccctcccgggcgggtggggcgcgggggaggagga

SEQ ID NO: 3881 - DNA, 436 bp, Homo sapiens
  source 1..436: mol_type = other DNA
ctagggagtggccggggctgcagcgaagccctggcctgaggaccatgagtgccgcggtgtcagcgccggagcccgttggtcccctccctccccctggggcccgcgcgcctctgtcccagtgcccggattggcagaggcaggcccacatagctcggtcggagagaagggaggggcccctgggtcacctctccccgggccgcgattctccgcgacgtgcttcgggatggggactgagtctccccatgggcccatgatctggcagccggctgagcccccaacgggcctcccgcccgctgcaccttcgcagccttcctggccgacttgcaagaactccaggcgccttgggtccactcgccccaaccctgctcgggcgagatgcgctaggggcgtgcccagcccccgccgcggcgctagccccgcccgagcccacgtggga

SEQ ID NO: 3882 - DNA, 295 bp, Homo sapiens
  source 1..295: mol_type = other DNA
aaagtactctatatttaacttattgtataaactacactgctgtctgccaaggtctagaacagtgcgttcaataaacagccattcatttaacaaatatttgctgagcagaagcctcggcttcgcctccgggggtctcctctagaccccaagggaggagcgggtcccgcccgcccttcggctactcccggcgtttgcgcaagcggtcccacgtgggctcgggcggggctagcgccgcggcgggggctgggcacgcccctagcgcatctcgcccgagcagggttggggcgagtggacc

SEQ ID NO: 3883 - DNA, 380 bp, Homo sapiens
  source 1..380: mol_type = other DNA
gtggcacccttcgggcaatgcagcccctccctgccccgagggcaggccaagccttcgcccccagtgggggtcccctctgcgggagaagcagcgcggccaactgcctggccaccaccgggccaggcactagggagtggccggggctgcagcgaagccctggcctgaggaccatgagtgccgcggtgtcagcgccggagcccgttggtcccctccctccccctggggcccgcgcgcctctgtcccagtgcccggattggcagaggcaggcccacatagctcggtcggagagaagggaggggcccctgggtcacctctccccgggccgcgattctccgcgacgtgcttcgggatggggactgagtctccccatgggcccatga

SEQ ID NO: 3884 - DNA, 446 bp, Homo sapiens
  source 1..446: mol_type = other DNA
gagatcggtggatcacctgaggtcaggagtccagctgtgagccgtgatcgcgtcattgcactccagcctgaaaataaccacatttgtttggcatatttgcagaaacagggttttacatccccttttagcagagtgagggcagcagagcctctgcgcctgcctcctcccttcggaccctgccgcgttcccagaggctggactcatcgccgtcccagccctcgaggaatctgcgccccaggcgaagctgtcctcggaggttccccctgggacccgagggatccctccccccaagtgccgggtcctccccgcggctccccaggggctcctccggccgccctcgctgactcagcgtaatccgagccgcggagggcggcggggttggcggagcccgcccggggttaatcgccgagcctccagcagccgccccgcccctgcggagaagtccc

SEQ ID NO: 3885 - DNA, 406 bp, Homo sapiens
  source 1..406: mol_type = other DNA
ctttcctgtctgagcctcaaatggacatcggtgctgggcccagtggctcatgccagaggatctcttgagcccaagagttcaagacgtgagactctcttttttatgtaacagtaaaaaagggccatcgcccaaagagacgccttgtactaagaggacgtcttgtactaagagacgccttgtactaagagtgaggcttaaatagcctcccagggggttcatcctcaggacggtcccctccttggtttcatggaattagcgctaatgacttcaataatgaaaaaatacaactttcagtccgagagtggggcttgcgctttctgtccgtggactccagagacagtgctctttccggacccggggttgggcgggattgccgcgtagaaggctaagccagcgtgccctctcc

SEQ ID NO: 3886 - DNA, 431 bp, Homo sapiens
  source 1..431: mol_type = other DNA
aagcttaagctgtctttgaaaaaaaataatattccataaacagtttcttcaatgaataaattgcaacaatctattccaatttgcaaattgtatttgaattctgattcaaactctaaaaataaatatgagataatttgaagatgttaataaattataatttttaaggtattgtggtttttttaagaatccttatcttttggaggtatattttgaaatatttatggatgaaatatctgggattttcttcaaaataatattgtgtacgtttgaaatttaccgtaacagaaaatgtaaaacaggtgaagccccgcccactggctcgggcggctccgccccggcaggaatcacccgccgcctccggtcgtggcccgcagcagcccggctcccccgccctggggcgtttggtcgcgcccggccgccggccctgggag

SEQ ID NO: 3887 - DNA, 323 bp, Homo sapiens
  source 1..323: mol_type = other DNA
attgacaagttgcctttttcaaatggaaaaactgtcaatagaaatttctgtcttttgtggtttttgaaagatcgtctttataaaggtaaaaaggaagtgtggcggtccccaaatcccttcttcgtattaccaataagtttgtatcaccaataaaatattataatgctggcgtgataacaccaaattcatgttattagaaggaattaaattttaaaaacccgaacgtttgttttataaacgcaccccccaaaaccttcctccaggagcactgaggttggggccgcgacgcggctgcggggcgggggccacagcgctccgcctcc

SEQ ID NO: 3888 - DNA, 549 bp, Homo sapiens
  source 1..549: mol_type = other DNA
ccctcatctacctcacagagcagctgggcacgctgctctgtggactgtacagtgtgaagccagagctccccggttctgatgggggccctgccataggccgcctggtgacccacgcggggctgccgttccttcgggggttcaacggcatgatcaaagacaccgggatgtgtgtgtgtgtgtgtgtggatgatcaaagacaccgtgtgtgtgtgtgtgtgtgtcatgatcaaagacaccaggggtgtgtgtgtgtgtgtgtgtggcatgatcaaagacaccggggtgtgtgtgtgtgtgtgtgtggcatgatcaaagacaccggggtgtgtgtgtgtgtgtggtgacggagtctcgctctgtcgcccagcagctgaaggagcctctgcggcggccggagccccccacggacatccccttgaggcaatcctcgccccgagatctccggccggcgagctccgccccctgaagtccccatcccaagatccggggccggcgagctccgcctcccgaagtccccgcccccagatccccggccggcgtgctttgcgg

SEQ ID NO: 3889 - DNA, 391 bp, Homo sapiens
  source 1..391: mol_type = other DNA
tggtttttgaaagatcgtctttataaaggtaaaaaggaagtgtggcggtccccaaatcccttcttcgtattaccaataagtttgtatcaccaataaaatattataatgctggcgtgataacaccaaattcatgttattagaaggaattaaattttaaaaacccgaacgtttgttttataaacgcaccccccaaaaccttcctccaggagcactgaggttggggccgcgacgcggctgcggggcgggggccacagcgctccgcctcccccctccatagcgagggagacggttgctgccgccgccgctcctggccactgactggcggcgcctgcgcagccgccatgttcggttgctatgctgcggcaggggggtgactgagctcctcttgcac

SEQ ID NO: 3890 - DNA, 474 bp, Homo sapiens
  source 1..474: mol_type = other DNA
tgttgggccaatgtctgacagtatttaatttcactaatttatctcgtttatataaacacagtaagtaggcacttcaatcaattacctgtagaatgaacggactctcctgaccacactctgctaagcagccccagtagagtgaaagtcactttaacagcagagatttaaatgtattttaatccctacaactcaataagtatttgcgaaggatttaatctcttgaggatatctagcagccagctccggtctgtctgcggacgggcgcctcctccgcgggcggagggccgcagcgggaactgggtttcggcagcgcccctttaaaccagccgcggacgcccggctgctggcgctagttccagcccggccgggcccggcctcgccggtttctctccagtcgccgcgccggccaatttccggggcggtgtcatcgcccgtttaagagcggagcgctccgccctgggggcggagctggga

SEQ ID NO: 3891 - DNA, 364 bp, Homo sapiens
  source 1..364: mol_type = other DNA
tggatctggtagatacatagcaatctctaacttacagacgtttaaactgtcagttgccttgtgactctcatgagggcagggagcttgcccgcctgggtccagctaactccattactgctaatgggattggcggcaggtggagtcccgccccaagacccccgggcggcatccccggcgggcagctcctccactgccgcagggttaccagctgcgtgtcccagagggggacggggcaggcgcgctgggcccgcccccccgtgcctggggcagccagcctcggattggctgacagccccccgacgggcgtggcttccgaggagagaagcgagggcgcgctctcgagagggttgcctaggcgacgccg

SEQ ID NO: 3892 - DNA, 847 bp, Homo sapiens
  source 1..847: mol_type = other DNA
gtgccagtacgagcgcgagcgagggcactgcacccggggacgctgcgttttcggcgctcgagccgacctcgccgccgccgcggcaggcagaagagacaggagcgagaagggccctgcctccccctcgccttcctcgcccggcgccccgcgcccggccgggccgcgcaggcaggcggagggaacgggcggagcagaggccccggcgaagcgcgctgcggccgcccgcccgtggatgcggcgcccagggatcctggagccgtgtgacgcgccgggaggactgcagggcccgcggccgagggctcggcgccgcctgtgagcgggcccgcgcggccggctctcccgggcaccaagcttgctccgcgccactgcccgccggcccgcggcgaggacgacctgcccgtctccgccgccggcggcccttcctggcgcgaggcagtgagggcgaggcgctcaggtgcgagcgcggggccccgccgcagcgcccgccgcagcgccgcgccaagccgcgcccggctccgctccggggggctccagcgcctgccgccggccgaaccgccggctgctttcgcttcacccgaaccggggctgcggggcccccgacgcggaagccgaggcgccccgagacgcccgtgcggcagtgacccgcgacctccgccccgcccggcgcgcccctcgggcccccggggccctcggcgccccttccctgccgcgcgggaacccccgaggcccggccggccccctccccctgcgagccggcggcagccctcccggcgggcgggcgggcggaggcccgggcgggcgcgggcgcgggcgggggcggggcggggcggcgcgcccggagcccgga

SEQ ID NO: 3893 - DNA, 625 bp, Homo sapiens
  source 1..625: mol_type = other DNA
gctcgagtggagtctctatctcgccagcgtgtggcgacgagggctagcggcggcgggggacgcctcaggacccccggcacctgcgctcgctgcccgcgggaagagggtccgcgtggacccagcccccgcgtcccttctctggcgtccccggcttccgcgcgggcgtccagagaagcgggcgccctgggaacagcgacccaggcatctccccgaggcagagcagcccttgcccctcagctccggagctcatctgactgtcgtgggtggggagagtccctgtgctccccctttcccctccccccgccccggcggcgttcgggtccccctgcgtcccccggcagggagcgggcgggctggctggcgggttcttggggcccgggtgtgcccgcaccgtgcgcgcgggggcgctgcgcagtccggcggcgctgatggattgcagaagtgccggcgcttgccagccgaggcagcacggctccgcggttcgaggaggagcgggcggcggcggcggctgcgactgcgaacgcggaggaaggcagcttgggccgcgcggcgcgccgcagcctcggggagccgcctgctcgccggcggtaggggctgcgcggcgcccgcccgcctctcggtcccc

SEQ ID NO: 3894 - DNA, 412 bp, Homo sapiens
  source 1..412: mol_type = other DNA
tttttatgtttactcaacaaacatttatgttctaggcagtgcaggtaacgggccctgtcctcttggacttacagtgtaatgctcacctgaggtatcccagctactcaggaggctgaggtaggagaagatcgcgccactgcactccagcctgggtggcagagcgactcggagccgctctggagaccggccctgggcggcggcaagggtcacctgagccccacatcggtttggggagagcacccggccggccctagagccctctggtctggccgccccggaggcgcgctcgctcgccggaaaggcacgcgcgggagtcagccaggtgcggctgccgcggggagccgccctccgggccgcgcttcctggggggcgggtctcaccgctgtcccgcccctgggccgccgataaatgc

SEQ ID NO: 3895 - DNA, 257 bp, Homo sapiens
  source 1..257: mol_type = other DNA
gaaagtaggcgtgaacgtaattgtttcaggcactcttaagcgaagccagccggcgccccgacagccgagggtgcgggagctccccacggcccagccccagccccagaccccgctgccgcgcctcggcacgcccctgcgccccgcctccgcgcctcggcgctacgccccatgtcgcgcctccgcgcgactcatcggcacgacctcgtgccccgccctcgcccctggcgcaacttccgcctcgggggagctgggagccc

SEQ ID NO: 3896 - DNA, 243 bp, Homo sapiens
  source 1..243: mol_type = other DNA
acttctaagttttcctgtgtattttatgctaaaaaccacagaaagtacccgaatgtgttaagtctggggctcccatttttgggggaacggacaggctccaggggaaaccgtggcctgcaagcttaaggcccggtccatcgcccccgctcgcagcctgggccagggtgcctgctcacaggattggcccagcccgcggcgctcccggaaacgtcgggctcccagctcccccgaggcggaagttgc

SEQ ID NO: 3897 - DNA, 423 bp, Homo sapiens
  source 1..423: mol_type = other DNA
agttttttaaaaatgtattcttcatggacatgaaattattctcatataatgagaattaaatatgatccttcatgtaaagagttaagcaagcaataaattatcatttagttgataagaatcattccaatgcaacacacacacacactgtatttgtgtatggaataactgttcaagaacacacacacagtatgtgtgtatgaaatatttaatttaatatttccctccaactgttgttgtgtatgaaataaatacacacatggcccacgtgctccgagggccgccttcgcgtctgaaggcctcagactgaggggacgcgcgcctcggttccgaacgcagcggacggcgcctcaggcagcgcggcggacagcccgtcctccggcgcgccgcgagcctcggaggaccctagcgacggtcgtggcgtaa

SEQ ID NO: 3898 - DNA, 480 bp, Homo sapiens
  source 1..480: mol_type = other DNA
atcattatggtccctcattttgttaaggtttgacagctttctgacagcttccaataaaaacaaaataagttgatttatgataaagcaggagagtttcctctagaaagaaaccaaaatcattctttccctttttcaaaattcaaggaatccagtttcccatttgggaacgagcgcaggggaaattaaatgcgtaattcaagctctgttttcccctcccctccaaaggtgaggtgggggaacgcgtctcttcaatacctctactcgtttcccaaatggggggaagggaagagaaagccggggggtagagagaatttccttcccctttccctcccaggtagccaaagcgcaccgcagcggcttggcttcctggaggaaaagcgcccgagcggggcaaagacccgcccaggctgctcttataggcgagcgcggggcgggcctggctgggggcggtgccgcgcggccccgctcgcctataaggag

SEQ ID NO: 3899 - DNA, 383 bp, Homo sapiens
  source 1..383: mol_type = other DNA
aacatggctgtgctgcacatggcagaggcctggagtttgtgcagcccggctagaggtgagcaaagcctcacattgtacagacagctggcctggctctccggattgtgacagggtgttcccctgggtggggatttaaaacaagggcctcaagttccctgcccttgtctctgggcagatccacgtggagtcactgtgtctggcagctcttgtccagcaattcttcctgttttggaatgatctttgctcgactctctccagggacaaatgccccgcagctgagagaggccgcccagctatccagcggccgcgtctgccctatttggtcaccatccccgacagtgctgggccaggccatcatgattggggagttttccctgcacctc

SEQ ID NO: 3900 - DNA, 632 bp, Homo sapiens
  source 1..632: mol_type = other DNA
ctcaatacgtatttattaacttaaaagaagtgtcattggtctattggcaaagctggttagcaataaccttattctccaggaataatgatcactaatcattccttcctgctgggggcgttcctcgatccctgtcaagtcacttagtacacagtaagcactcagtaatgctaggttgttgttattataataaatttttggctaggctcccggaggcgcctagggtatccgggcgaaaacccgagggccgaaggcggaggcggagcgtcgggcaccgggcaccgggcaccgggcgggaggtgagcccctggaaaaggagggggctccgggcgcgttctcccagcagccgcggctcctctgttcagggccgcgcccgcaggaggaccaagacgccaggccggcggattagtccccgccccggggcggtgcagctggagcgtcaggggagtcccgctcgccgcagccccagcgccgcgcgcgcccctccctcctcgcggacctggcggtgccggcgcccggagtggccctttaaaagggtccggagggggcgggcggggggcgccgaccgcggcctgaggcccggcccctcccctctcccgctcgctggctagctcgctggctcgctcgcccgtccg

SEQ ID NO: 3901 - DNA, 350 bp, Homo sapiens
  source 1..350: mol_type = other DNA
acattgtacagacagctggcctggctctccggattgtgacagggtgttcccctgggtggggatttaaaacaagggcctcaagttccctgcccttgtctctgggcagatccacgtggagtcactgtgtctggcagctcttgtccagcaattcttcctgttttggaatgatctttgctcgactctctccagggacaaatgccccgcagctgagagaggccgcccagctatccagcggccgcgtctgccctatttggtcaccatccccgacagtgctgggccaggccatcatgattggggagttttccctgcacctcggccagagcccctcccctcggcccgcgcgggaggag

SEQ ID NO: 3902 - DNA, 518 bp, Homo sapiens
  source 1..518: mol_type = other DNA
ctgcgggtcctgcaggccatagcccaccagacacgtagaaatttccaggggcagcaaagtgctgtagcccctgactcaatacgtatttattaacttaaaagaagtgtcattggtctattggcaaagctggttagcaataaccttattctccaggaataatgatcactaatcattccttcctgctgggggcgttcctcgatccctgtcaagtcacttagtacacagtaagcactcagtaatgctaggttgttgttattataataaatttttggctaggctcccggaggcgcctagggtatccgggcgaaaacccgagggccgaaggcggaggcggagcgtcgggcaccgggcaccgggcaccgggcgggaggtgagcccctggaaaaggagggggctccgggcgcgttctcccagcagccgcggctcctctgttcagggccgcgcccgcaggaggaccaagacgccaggccggcggattagtccccgccccggggcggtgcagctggagcgtcagggga

SEQ ID NO: 3903 - DNA, 588 bp, Homo sapiens
  source 1..588: mol_type = other DNA
tggccaggctggcctcgcagccaaattttttttaattaaaaaaaagaattcttccttataaaatttaagtcagttgaacagtggaacccccgccgctgggtcgcacgagctaacagatcggcggtcgctggctctccgctcttccagccacccacatcacggcgcctagaggcgggacatcctgtgtggacaacagggagcttccggattgagccggaagtccccccagagcggatgccgcggcgggcctgtgggagcggggtcatcttctctctgctgctgtagctgccatgggcggaccgcggtgagacgttgcgcgggcacgctcagccacgactgcccttgccggccctgccccccgctctgcctcggagctgctccgggcctctgcgccggccgaccctgctggccctcccgcgcgcaccccgttgggacaggcctttgggcgggagagatgctggacctgggcgcagcccagcgaactcggcatgcaggtggctcttagctattgcggcggaaccctgaaggctcctgctgggcttacttctgtgttggtatcttgcagacaagaagaaatcgccccgggga

SEQ ID NO: 3904 - DNA, 393 bp, Homo sapiens
  source 1..393: mol_type = other DNA
agttttgagtccaaaggctggaaactcagtcagaactttctggccttcaactgatttggatgaggcccacccgcattattgagggtaatctgctttgtgagctgaaatcgcgccactgcattccagcctgggcgacagggcgagaaaaaaaaaaaaagaaaaaaattttttttgagaagactacagtggccaggctggcctcgcagccaaattttttttaattaaaaaaaagaattcttccttataaaatttaagtcagttgaacagtggaacccccgccgctgggtcgcacgagctaacagatcggcggtcgctggctctccgctcttccagccacccacatcacggcgcctagaggcgggacatcctgtgtggacaacagggagcttccgg

SEQ ID NO: 3905 - DNA, 496 bp, Homo sapiens
  source 1..496: mol_type = other DNA
tacagttaacatcttataataacatagtttgaggtaatatcaacttaattgcaatggtatacaaacactttttttttcccagactggagtgccatcaacctcccaggctcaagtgatccctcccaagtagctgggagctacaggcatgcactactgcacctcaagcaatccgcctgcctaggcctcccaaagtgctgggattatggcatgagccactgcacttgtgttaatattatgtgaattatattattatatattgtatacccagcaacacagttataattattgcgttatgcagttttttttttaaaccaacatattagtttcctattgctgtttatatagaaaaagagttagttagcctttggctgacacctgagaacttggatttcaggaggataatggtttgtacaaacactatggtttatgctgaataaaacaagcgaaatgtgtaaagtattcatattgtatatttttcattagtattatttaaact

SEQ ID NO: 3906 - DNA, 285 bp, Homo sapiens
  source 1..285: mol_type = other DNA
cacatgccccgtttagtgcagacttggagaaggaacgtgggcaagtctaaaggtgctgagctggacccttaattaaatgaatctgggcgagtaacacaaaacttgagtgtccttagtgcccagcacctatataaatacatgtgtcttataattaatggtattttagatttgacgaaatatggaatattacctgttacctccctccctgctggacggcatccttggtgggcagaggtggcagaacaagccgtgctgagctaggaccaggagtgctagtgccactgt

SEQ ID NO: 3907 - DNA, 378 bp, Homo sapiens
  source 1..378: mol_type = other DNA
actgctccagtggaaaagtaatactttttactgaagtaatttctaaagtccctcaggaaaaaaattctgaaacttgaggggccctgtccacagcccacgtgggcactaccgcaggctcgagaccaggtgcgtatgcgccgcgcacacggaacagcacaggctgccccggggcaggggcgggggcggggccgaggccggggcggagccaggactgggaatccccgcgccgtccggccggtgggggcggtggcctgtgtgtgggcgtggcgggcctctgcgcaggcgccgacccactcccctgggccgggcgcgcgcccgcggcgggttccgctaccgccgggcggaggggtgcgcgcgcacgagcgagcggccgtgacg

SEQ ID NO: 3908 - DNA, 370 bp, Homo sapiens
  source 1..370: mol_type = other DNA
gggtccccagggcccagggccattcacgtggcctatccactggggagggttggccacctggggcaggggttgaatttccaggcctaaaaccacacaggcctggccttgagtcctggctctgcgagtaatgcatggatagacccaggaccttgcctcagtcttccgagtctggtgcctggaggatgggggacagaatctgatcgatccccgatttttaataaaccactgaagtcataatatctcatgtttactgagcatgagcttgtggactaaccccattttacaaatgaggaaactgaggcatggagtcccaatttgcaccgtgcagtctattgtttgaaagacaccatgagtgtccaatcaacgttag

SEQ ID NO: 3909 - DNA, 288 bp, Homo sapiens
  source 1..288: mol_type = other DNA
ttggggggaggagagttctaatctcaactaatcactcgtcttaatcaccgctgttttccaggaacacagggctcaggtaaagttcaacttcaccttcctccggtgtttcatcaggggaacccttctggaagcaaagatggcttcttaacaaggaaattaaatcgttgtgcgccagttagtaacgcaacgcccgctttcttgcctactgcgggcgggaaccaggcgcctctgggccttgcatttttcggaagagtatctcaaaagctcttaactaaagcccgcctgcgc

SEQ ID NO: 3910 - DNA, 440 bp, Homo sapiens
  source 1..440: mol_type = other DNA
gtgtgggaaggtcatggagcttccatgccctctcccgcatgccaccccccagggacctcagatgtgtggaagcactgaccccatgctgaggctaggtagggcccccacatggtcacctcctcagcataacttcaggtgttatcaaacggactcattatgagatgatcgtttgagacggagtctcgctctgtcacccaggctggagtgcagttttggaaattctaagggaccaaatatactgtattttatattatactaccaccctcgcttggggtgcttgggggcagagctcctgccatgcagcacctgggaagatgctgagcccccggatggtcagctgactgtcaccatgggatctggctggtggccagagcaggtgcacagactgaccctggtggcctccgggcagcatgcatcgctgctctgcagaaaataaatta

SEQ ID NO: 3911 - DNA, 467 bp, Homo sapiens
  source 1..467: mol_type = other DNA
acatacagttttcaatgtttaaacaacaaaatgtaaagtcttttgaatgttgctggatgtatcattttcagaaagacagagagaaatgaactttgttcactcagtctcagaggcggccgccggcagcatggcaccccagcccggagccaccccagggaggagccccaggccagcggcttccgtgaaggggagctgcaccggcgagcacccggcctctgagctgagccgcatcctcacggacaggacagcgccccattatgaggctccttgtgtgcccaaatggggcctcattcttcacaggccccctccgccgtctgcgggcgcaggcctgggagcgccgcctgttgccatgacagccggccgctctgagtctctgagacagtcacacactcagactatgtattcacgctccggtggcagcagcagcagcagccagaggagccagcctttcagggccagaggggctg

SEQ ID NO: 3912 - DNA, 146 bp, Homo sapiens
  source 1..146: mol_type = other DNA
agagagccagccatgcacattggggaacatgtacaccacagaaataagcaaatgctgtgaattgggcttggttgataaacatttaccagcacaatgggccacttttataaccacccccaccaggagtggggaggctccacaatcac

SEQ ID NO: 3913 - DNA, 381 bp, Homo sapiens
  source 1..381: mol_type = other DNA
aactttggaattggactacatttacaaattatactgtagaatgccagtgagcccctccaaggctttctcccaccctagtttgggaggatcagtgcctgctgtttagtgacggctgccagctcttgctttcagaaggcagaagaagatactgctcaagctttctgacctttctagaaaggtctttcagggaaatgggatcaatgctaaagatttccatgagtgctcttgccaccatctctaaaataaggacctcttttgtggccagatccagaggatcggcggctccggtcctgggcacaggctttcctcctggcaggtggcagccggagacctcctgggtgtcctgccgccactgtggacctcatgctgtctggggccttt

SEQ ID NO: 3914 - DNA, 508 bp, Homo sapiens
  source 1..508: mol_type = other DNA
ttgaaaatttcctccgaagagattccctaaatgaggcgtgcctggttcccctggaaacctgggcccgcaacgggggatgaaatcggaatttcccggggaaagcagctttgcgactgaagagggacgcctctcggctttagcctccctgggggcgggactgcgtggactcggcggtcccgggtgcctcgggagggagtcagtgcccagatccgcggtgggaactccgggctaggaagcccgggagggaggtggtctcagcatcgcccccacgcctaccatctcctgcacgcgtttgcggttggggcggcccagggactgcagagggggcgccgggcggggcgtcccggcggggcccctttaaaaggaaaggcgagcagagcccgggttgggaaggacttgacccgcgcccgccgctggccgcgctccgtgtccctggagctggggctgtgcgggagcggggcccaccctctaccccccgcccacccctctcgcgggcggagcggctcgc

SEQ ID NO: 3915 - DNA, 402 bp, Homo sapiens
  source 1..402: mol_type = other DNA
ccactgtccagctggaaatatctgttgaaaatttcctccgaagagattccctaaatgaggcgtgcctggttcccctggaaacctgggcccgcaacgggggatgaaatcggaatttcccggggaaagcagctttgcgactgaagagggacgcctctcggctttagcctccctgggggcgggactgcgtggactcggcggtcccgggtgcctcgggagggagtcagtgcccagatccgcggtgggaactccgggctaggaagcccgggagggaggtggtctcagcatcgcccccacgcctaccatctcctgcacgcgtttgcggttggggcggcccagggactgcagagggggcgccgggcggggcgtcccggcggggcccctttaaaaggaaaggcgagcaga

SEQ ID NO: 3916 - DNA, 488 bp, Homo sapiens
  source 1..488: mol_type = other DNA
agatgggatctcgctgttcatactggagaacaacttgctgtgcagttatattttgaacctcatcaaacagtagctgctactcaactgctgtaccagttttttactactacgaataaacgtgctatggacattattcctcttgaagtgaaatttctggggtcacaaggtaagcgtacatttagctttggcagaaactgcagcggttttccaaaatgtgccagggctgccaccagctagctgcacaggtgccacagtggcttcccacagatccactctcggtgggctcggtcaaacggggtgtttttcagagcatacacgttagctcacactgtaaaaaaaagtcagcactgcgaaacgcagtcgcttctttcctccaggaggtagcgcgtcctactcgctccggaacaaaggaagcgctctgcagggtctcgggctcggcacccctcacagaggcccgcggtccaggcgcgcgtgacgtagcgccgtcc

SEQ ID NO: 3917 - DNA, 412 bp, Homo sapiens
  source 1..412: mol_type = other DNA
gcacaattcattttttattaaatcaacagagtttacaatatgaccatctaaacattgttgactaatgagctaagatattgttgactaataagctatgattatttaccttattgtaattctccagtgtcgaaaacagcatcatttggcgcgatctaatgttccaacagacgtgtggtaatccaccacaaatcaataaaattttagaagtttaagtcggtgaaggatggacccggtactttcggagccggctgccctgccctgccccaggacgtctgcgcggcgtgcagggcgcccctcggtggcggggagcctccaggacctcaccaaccggtcccctcgctgcgccccgtccggctcgcactcccggccccgcccacccctcggggcccccgagttccgcggccgttgctcc

SEQ ID NO: 3918 - DNA, 597 bp, Homo sapiens
  source 1..597: mol_type = other DNA
gaagcctttgcactgctagagctgaagaatcaatcggcttgtttggggccctgccgcccctcgaagagtcggatgggcgcgcccgtccccggtgcatcaagaggctggcccggccaggggcgagcggctggcaccgaaccccgcgcacttcgccgcgggcggggctgggccgtagtcagccgctggcaggtgcctggcagcaacccggccgacaacccgacgcggatcccgagctgcgtcgcggacaatgctgcgggcccgtcccggactacgactcccgacgggctctgcgaccgctccggggcggcccagcgtgcactgcgccggccagttttgacagccgggcgccctactcggctagctctgctcccagccagggacgctgcacgtgacagcagtgggccggccctccggctgagccctgatctgtggtccactggaggactccctacatcactgcctccggtggctgctgggataccggaggactcgggtcccggctcgactcagtcctccagccgcccggggaatacctctagttcttcccggccgccgccgccgccgccgccccgccgcttcctcctccgcccgccggcc

SEQ ID NO: 3919 - DNA, 646 bp, Homo sapiens
  source 1..646: mol_type = other DNA
ccgggtcgcctgcggccccgccccggcgcaggacgccgcggctcagaggggcgggcccgtccgctctcccgctcacgaccaccggcgactggctgactcggcagggggcggggcctgcgccagccaatagacggaggctcgttacggcggcggaagcagcggcgcagagtgctagctccccggcggtggctgcgggtccggagcctggggacgtcggccccacagacggagagcgcgcgggagcgagctcaaggcggcgcggcggccactgggcgcagcacccaggtaagggggcggggcggctgagccgggctgcagcgtccgtcccgttgcgcgtccccggggaagggcagaggatcctcgtctcctgcggctcggaccgcggctctttcgcgagctggtcacggcggttgggccggcagagcggccgggggagcgcgggcgggcgggcgggcgggcggccggcccagggaggccctgcgcccgccgctttcagaccctggctgaggcggggcctccccgctccccgcccccttcgccgggggcgcctgggggtttgggctgccccggccaggctcgcgcctgattggctggcagtcggcgggaggtgggcctccactgacgcgtcgggcgtggggccaatggg

SEQ ID NO: 3920 - DNA, 577 bp, Homo sapiens
  source 1..577: mol_type = other DNA
attaaaattcgcacgcctgtaatcccagctactgggagatcgcgccactgcactccaactccaaaaaaatatttttggcttttcattcactttgacttaatatacttaaaaatataccctccaaagaggtattcatttttgggtgggttaaatgctacctattccaaaacaattttaaactggtttatattagttaaaaaaaaaatactaaaaggacaaagtagactaagctgccgtttaaaaatctatcatgcctcctggaaggtagctatcaaaattttagggtttagtataaagtctaagatgctcagaaacattaagacaattgtccttactgtgccaccgggtttaagggagtaagtcccagagtccaaactggatttcaccgactgactgttgaagctttcgggtctcagctgttgagcctacccgccaccctgaaaggcggaagtgaggagagaggcaggactcccccctccccaaccctcggagatgagagggcgaccgcgcgacgctctgggctgctaggtctcgactcggtatccggaagtcctccagcgttcgcctgcaggaagcg

SEQ ID NO: 3921 - DNA, 657 bp, Homo sapiens
  source 1..657: mol_type = other DNA
cgcacgcctgtaatcccagctactgggagatcgcgccactgcactccaactccaaaaaaatatttttggcttttcattcactttgacttaatatacttaaaaatataccctccaaagaggtattcatttttgggtgggttaaatgctacctattccaaaacaattttaaactggtttatattagttaaaaaaaaaatactaaaaggacaaagtagactaagctgccgtttaaaaatctatcatgcctcctggaaggtagctatcaaaattttagggtttagtataaagtctaagatgctcagaaacattaagacaattgtccttactgtgccaccgggtttaagggagtaagtcccagagtccaaactggatttcaccgactgactgttgaagctttcgggtctcagctgttgagcctacccgccaccctgaaaggcggaagtgaggagagaggcaggactcccccctccccaaccctcggagatgagagggcgaccgcgcgacgctctgggctgctaggtctcgactcggtatccggaagtcctccagcgttcgcctgcaggaagcggaagtaaaagggcggccggcagctgggcaattgcccgcgggaaaggcgcgtgtcggcctctcactggcgcagcctgcactgccgctgcc

SEQ ID NO: 3922 - DNA, 161 bp, Homo sapiens
  source 1..161: mol_type = other DNA
gtaccaccagtcgcagcgaggcgagccacggtgtagcggctccagcctccagcgtacggcactgagcaggattcctgtgagaaaaaccctccagctgattggatgagagccagtcttaagacataggcctagaggtttttctctcaacatgtgcgtaacct

SEQ ID NO: 3923 - DNA, 146 bp, Homo sapiens
  source 1..146: mol_type = other DNA
gtaccaccagtcgcagcgaggcgagccacggtgtagcggctccagcctccagcgtacggcactgagcaggattcctgtgagaaaaaccctccagctgattggatgagagccagtcttaagacataggcctagaggtttttctctca

SEQ ID NO: 3924 - DNA, 175 bp, Homo sapiens
  source 1..175: mol_type = other DNA
ggcagtgccgagctgaggcgagccccaggggctcaggctccagcctccagcatggcctggcaggagaagctcccgctactggtaggttacgcacatgttgagagaaaaacctctaggcctatgtcttaagactggctctcatccaatcagctggagggtttttctcacaggaatc

SEQ ID NO: 3925 - DNA, 516 bp, Homo sapiens
  source 1..516: mol_type = other DNA
gattttttttttttttgagggcaggccttgtaaaaaaaaaaaagactttttatttttattatttttaaatttatttatttatttattattttttatcccaccctgtcgcccaggctggagtgcaatggcgccggagtactgggagctcctgcagcctcgacctccggggttccagcaatccgggagagacaggggctcactttccatccaggctggaaaggatgccttttattattattattattattattattattattattattattttagatagagtctccaggttggagtgcagcggtgcgatctcggctcactccggagtagctgggattactggctcccgccactacgcccggctaaactggtcaggaactcctgacctcaagttcggggattacaggcgtgagccccggcgcccagccctggatgcctgcgacaggccccgcccccgccaaacgcctggcgccctccgtcgcccggtttccatggtgacggggcgccaggctagggcgg

SEQ ID NO: 3926 - DNA, 658 bp, Homo sapiens
  source 1..658: mol_type = other DNA
gaagacccgacaaggacgggggcgggggctcctcccgaccagcgggccgggcgtacccggaaagcagaggtcggggggtgtctggctagcatgcggcccccacccgccccgctcacttgaacacgtcggggtcgatagcgccgcccgccgcctgcgccatccgccgcagcgccagcttctgccgggccgcctccagccccgggggcgccgccgaccccggcccaggccctacgccctgcgccgccatccccgcggcccgcggaaaggtgcgctccgccccgccgcgccccctagcggctgcgccaacgtctggcctcccgggctgccctggcgggaggggcgggagcgcggggacggggccgcctccgcggcgtcattgaagcccaacagttattgggcgctcacggtgtgctgagcggcgctctaggagccgggagtggcatggcggaccgcaggggtccgctgcttggcgatctggcgcttaggtggcagcacccagcccagtgccaggcatacattgggcgctcggtaaatgcctcttggtccgcaccggtgcaccactaaacaatactgcttacgcgcacgcggattccttggggcgccggaggccgccccaaagaggtggaagcgcttttcccgcccggccgcggggcgtggc

SEQ ID NO: 3927 - DNA, 401 bp, Homo sapiens
  source 1..401: mol_type = other DNA
atttctaggaaatttccaagaaaggaaatcacttcatggcaattgggcttcgggagcctccaaaaccaaggctcggggaagggtcgagctgggacccacacccggctcttacacaacgaaggttactcaaccggggccctccactccccagcctgccctgcctgggcagagccggctggccggcccgagtcctggggctcgcggaggaacggagatggcctccgcaggggctcggggaagcccccagggcgccggaccgtctcaggcgcgcatcccgcgccactctcgctcgcctcagagatggaagccgccattccgccacggcgccgaaagtcgtcatcaagctgcgcgcagagccacgccccgcggccgggcgggaaaagcgcttccacctctttggg

SEQ ID NO: 3928 - DNA, 411 bp, Homo sapiens
  source 1..411: mol_type = other DNA
caattgggcttcgggagcctccaaaaccaaggctcggggaagggtcgagctgggacccacacccggctcttacacaacgaaggttactcaaccggggccctccactccccagcctgccctgcctgggcagagccggctggccggcccgagtcctggggctcgcggaggaacggagatggcctccgcaggggctcggggaagcccccagggcgccggaccgtctcaggcgcgcatcccgcgccactctcgctcgcctcagagatggaagccgccattccgccacggcgccgaaagtcgtcatcaagctgcgcgcagagccacgccccgcggccgggcgggaaaagcgcttccacctctttggggcggcctccggcgccccaaggaatccgcgtgcgcgtaagcagtattgtt

SEQ ID NO: 3929 - DNA, 601 bp, Homo sapiens
  source 1..601: mol_type = other DNA
actcaaccggggccctccactccccagcctgccctgcctgggcagagccggctggccggcccgagtcctggggctcgcggaggaacggagatggcctccgcaggggctcggggaagcccccagggcgccggaccgtctcaggcgcgcatcccgcgccactctcgctcgcctcagagatggaagccgccattccgccacggcgccgaaagtcgtcatcaagctgcgcgcagagccacgccccgcggccgggcgggaaaagcgcttccacctctttggggcggcctccggcgccccaaggaatccgcgtgcgcgtaagcagtattgtttagtggtgcaccggtgcggaccaagaggcatttaccgagcgcccaatgtatgcctggcactgggctgggtgctgccacctaagcgccagatcgccaagcagcggacccctgcggtccgccatgccactcccggctcctagagcgccgctcagcacaccgtgagcgcccaataactgttgggcttcaatgacgccgcggaggcggccccgtccccgcgctcccgcccctcccgccagggcagcccgggaggccagacgttggcgcagccgctaggg

SEQ ID NO: 3930 - DNA, 848 bp, Homo sapiens
  source 1..848: mol_type = other DNA
gctaagcggaggagccctacccagcctggaccaccctggggtacgcactctgcgtccacctgacctggacgtgcctcctaaggctggcagcgaagcccaggagcagagcccacggatgggccctgcaggtgctgggcctagaccgacagacaggcctggccactcagggccacgccgccgctgtgccgcgcctgccccctccccgcccgccacccccgccactggggcagggacagcgggcccagctctgacctcgggtctcgggcacgctcgacgtgggcagagacacggccgcagggtcctggggctcgctcgctagcctctgcccggcacacatgtgagcatctggaagacggcgaggggggccacgttcagcttcagcaggtccaccaggatcctggcggggacagacgcggggccggtgagccctctccgcccggcgcggccacctccctgaagacccgacaaggacgggggcgggggctcctcccgaccagcgggccgggcgtacccggaaagcagaggtcggggggtgtctggctagcatgcggcccccacccgccccgctcacttgaacacgtcggggtcgatagcgccgcccgccgcctgcgccatccgccgcagcgccagcttctgccgggccgcctccagccccgggggcgccgccgaccccggcccaggccctacgccctgcgccgccatccccgcggcccgcggaaaggtgcgctccgccccgccgcgccccctagcggctgcgccaacgtctggcctcccgggctgccctggcgggaggggcgggagcgcggggacggggccgcctccgcggcgtcattgaagcccaacagtta

SEQ ID NO: 3931 - DNA, 655 bp, Homo sapiens
  source 1..655: mol_type = other DNA
gtcaagctgcgcgcagagccacgccccgcggccgggcgggaaaagcgcttccacctctttggggcggcctccggcgccccaaggaatccgcgtgcgcgtaagcagtattgtttagtggtgcaccggtgcggaccaagaggcatttaccgagcgcccaatgtatgcctggcactgggctgggtgctgccacctaagcgccagatcgccaagcagcggacccctgcggtccgccatgccactcccggctcctagagcgccgctcagcacaccgtgagcgcccaataactgttgggcttcaatgacgccgcggaggcggccccgtccccgcgctcccgcccctcccgccagggcagcccgggaggccagacgttggcgcagccgctagggggcgcggcggggcggagcgcacctttccgcgggccgcggggatggcggcgcagggcgtagggcctgggccggggtcggcggcgcccccggggctggaggcggcccggcagaagctggcgctgcggcggatggcgcaggcggcgggcggcgctatcgaccccgacgtgttcaagtgagcggggcgggtgggggccgcatgctagccagacaccccccgacctctgctttccgggtacgcccggcccgctggtcgggaggagcccccgcc

SEQ ID NO: 3932 - DNA, 417 bp, Homo sapiens
  source 1..417: mol_type = other DNA
ggctctgagtgtgatcactgccctgagagctaggcctggctcccagagccctgagtgagtgctgaccaccctcccttgggtccgagctctgggtggcagtgaggtggacccctgggctctcacaggaccctggctctgagcccccaagtgtggccacggggccagcatatggcatctgtgtggcactgcccaagactctggaagtggggctgtgctctccagcacagcacaccgcactcactcaccacagttcgcctctggggtgtgggggtgttggtcctgtccccagatgccagcccgactgtggggtctagagacctcggctaagcggcagggcagcgatggcctgcatggtcctgcccttggagctcaaagctgcttgggcctcctggggccaggcagtttccatggaaacaa

SEQ ID NO: 3933 - DNA, 241 bp, Homo sapiens
  source 1..241: mol_type = other DNA
tacagctcaaagccaggcgttcaatgtatagatttcctaaattctaggaaagctcccagtgctccacggtaacctggaaggcagcgttcgccctctgtgcgcacacacagccacctgcactcttcacttcaagtgaagcttgttgacgtctatttataaaagacctggcaatccagatgccttttctcagaacctcctggttagttcactgtggcatctaagtgtgccttaatataaaaaa

SEQ ID NO: 3934 - DNA, 330 bp, Homo sapiens
  source 1..330: mol_type = other DNA
catgccaccatgccttgcaaggtgggccgtggcctcccaaagcactggaagagtctctggagtgtgctgtggcccaatctcggctcacccgtgtagctggcaggctggtctcgggaactcttgacctcaagtgatccacccgcctccccgaagtgctgggattgcaggcgttagccatcgcgcccggcccggaatcctgccacttcccgggtgctgggtgggaaccctctcagtggcacactgggagcaaggcaatgttccgccggccctcggcctgcctcccaggaactccgagccaatggcggcctggcaccggcaggccaatcctgt

SEQ ID NO: 3935 - DNA, 333 bp, Homo sapiens
  source 1..333: mol_type = other DNA
gtgccacaggcagtgcagcctctggtggtgagacccaatgggacacccaacccctgcccccagaggcaggcagtgatttctaccactctagctgagctgtagtgtccgacgtcaccaccaaccccagcgaggggagcctcggtggcgcaggcttcagcctccaagctagccagtgccccgggctccagccagtggcaggcagtggcctctagagaaaacccgaaggcctactctaattggacttgttttaagacttgctctcatccaatcagaacatgataataaagtccaatccgagtaagcctggaggttttttctcattgcataactctg

SEQ ID NO: 3936 - DNA, 306 bp, Homo sapiens
  source 1..306: mol_type = other DNA
tgcggtacaggtactcgcggcgcaggcgggcctcgcggcgcagctgtgggaacatcgctcccgagccccggaaccccggagccccggagccgctgagcctccaagtccccacgcttccacgtgggtccgggagaatctgtaggcgattggccattccggcagggcgttctccttgggaactttaaaaccactctcaaccaaaatggttagttcagcaggctgatccacttgggggctgccggcgtggggatccccagatgggaacgccccttgatggagtgcctattggctgtcctgccaaactgc

SEQ ID NO: 3937 - DNA, 545 bp, Homo sapiens
  source 1..545: mol_type = other DNA
gtctcaggatgattaactgggattagaagtttgtccctctgaaactagctagacacacagataaatattttctgttcagctgactgaaatgtatgtgattgtaaatctttccagtgtaaagcaacaaaaacctaatttaaatcatctccataatttgcataggaagagggggctcacctgcttcgcgaggccccacctcctctggggcgtggttctggagtccctcctgggcctcgctgaaggacgagaaggtttggcagcccgggcctagaacgcgcccgcccgcccacccagcccagcatggaagcttcctcacctggcgtggaggcagacctggggctccatgtgggaagcatactgcaggggccctaccgacttggcgcccatcgcgtagcgagccttggcgagcgagtgctcctccaggtccccaagcagctgcaggaccagcgaatccagctccgctcgcaggtcaaggcagtttggcaggacagccaataggcactccatcaaggggcgttcccatctggggatccccacgccggcag

SEQ ID NO: 3938 - DNA, 300 bp, Homo sapiens
  source 1..300: mol_type = other DNA
cgtgccggtggtttaccacgcagacgcccgcggggccgatgcagcgcgcgccgcagccgctcctgggctgagcgctgcgccctcccgggccttgcggtacaggtactcgcggcgcaggcgggcctcgcggcgcagctgtgggaacatcgctcccgagccccggaaccccggagccccggagccgctgagcctccaagtccccacgcttccacgtgggtccgggagaatctgtaggcgattggccattccggcagggcgttctccttgggaactttaaaaccactctcaaccaaaatggtt

SEQ ID NO: 3939 - DNA, 317 bp, Homo sapiens
  source 1..317: mol_type = other DNA
gcgtggattacagcctctaaagagaatttctaataaagtctttaaaacgtgccggtggtttaccacgcagacgcccgcggggccgatgcagcgcgcgccgcagccgctcctgggctgagcgctgcgccctcccgggccttgcggtacaggtactcgcggcgcaggcgggcctcgcggcgcagctgtgggaacatcgctcccgagccccggaaccccggagccccggagccgctgagcctccaagtccccacgcttccacgtgggtccgggagaatctgtaggcgattggccattccggcagggcgttctccttggga

SEQ ID NO: 3940 - DNA, 251 bp, Homo sapiens
  source 1..251: mol_type = other DNA
gcgtagcgagccttggcgagcgatgctcctccaggtccccaagcagctgcaggaccagcgaatccagctccgctcgcaggtcaaggcagtttggcaggacagccaataggcactccatcaaggggcgttcccatctggggatccccacgccggcagcccccaagtggatcagcctgctgaactaaccattttggttgagagtggttttaaagttcccaaggagaacgccctgccggaatggccaatcgcct

SEQ ID NO: 3941 - DNA, 588 bp, Homo sapiens
  source 1..588: mol_type = other DNA
agaagggggctaacctaggcctgtccttgaagagacccaggtctccagcctcccctcggtgatcccggaagcactttctgaagaagatccacggcgtggctgcccctccccggcctcccttgggcccggctggagcgcacagcgcgggacgcccccgacccggggtcctctggcacgaggggcagcctgatctcggcgaccgtctccacccaaggctgctgcccgccccagctcggactccgcgcggcctggctcccaggggacgggcgggagggcccggcgagaccgctcggccgtccacccagagccggcacccggaggtcggcccctgggcgcggatcccgatctgagggcgggtcccaagcggcagggagcgaacctgggaccgtgccacccccccaccagtgggcgcgggccggcgctggactctgctcagggcagcccgcgaggacctagggctccggccacagcggcccgagcgcccggggtggggctacgcgggctcagaacacggtggctggggcgccctgcccgccgctgcgcgcttccattggctgccgaggcaagggcggggactcagtcaccggc

SEQ ID NO: 3942 - DNA, 646 bp, Homo sapiens
  source 1..646: mol_type = other DNA
gatttattttaatgagaaaatcaaagcaggaggggagagtactgtcctgtgactgctcctccaagccccctcttgccggcgtggacacagcggtctgcaccttgaccctattgcatgccagtggagcagagccccccaggccagaagccctatagctgttggccctggcttggacaccgggcagggggcaccggggcaggagctggccgcgatcctgtggccccaaagtgttctgggtgcagagcaaagaggaccaggtgtcaaaggcacctcaggcaggcgctgggctcagtcagctcctccagccccagctccgagctgcagacgctgccacgcacaacagcaccgccaggagtgtcctgggggctttcttcagaggaggctgtcagcatcctagaggtgacattcgtggcgccaagatttaaacggttgcacgcattggccactgtctgtgccacatgcactgacgccactgcacacgctgcacgccgcacgcgcacgccgcacgcgcacgcggcagcggcttggctggcttgtaatggcttgcacgcgcacgccacacgcgcatagcggtggctggcctgtaacggcttgcacgcgcacgccgcacgcgcgtaatggcttggctggcctgtaacggcttgca

SEQ ID NO: 3943 - DNA, 477 bp, Homo sapiens
  source 1..477: mol_type = other DNA
cctggtccttgcagcccacaggacccattgctgggaggccccccagggttaacagcctctttaataaacctcacacgtaaagaattaaatcaccattaaagactatttcagccttggaggaagaatactatttttagaaatgagtttttatattaaaatcacagaacaatttgcaacacttctggtagtctggcgatgggcgggcgccgcagttgcgcctgtttcatgtttctcagagatctaactgccaaaggtagtagggggcagtgcccctcccccacttgctgggcacagagaagaggctccatctgcagagtaagggggcctctcttaaagcaggggtggctgggaccccaggctgttgcctgtgccccacacaggagatctccaccttcctccagtgagaaaatgaccttggataccaatgttttgctgctgtcagcactgaacactgctggggggagtcagcccaagtcc

SEQ ID NO: 3944 - DNA, 304 bp, Homo sapiens
  source 1..304: mol_type = other DNA
tgtagtcccagctacttgggaggatcacttgagcctgggaggtcaaggctgcaagtaaataattaaaagtaaaaataaatagtttggattgcttgaagtgaaatgtggttgtgccactgcactccagcctaaaatcctaatgttcccctcagggtgatgggtgtgcagtgtcccaggccacacacttgacacacagtcccagggcttctcagggccaggcaggcatggtcgagcacctggccccttccaaccagggctcattgcaggctgtccggggaacacctgccggaggctcccctaggtc

SEQ ID NO: 3945 - DNA, 317 bp, Homo sapiens
  source 1..317: mol_type = other DNA
gctcattatatactagttataatacattagcatgctgtgccatgacagttcacggcaaggtcaggaagttaccttacatggtggggaggaactctcagttctgttaattgtccatccctttgtttagaagatccaagaatcctgaatcggcccctttccagtaacaggagctgccactcagggacctgactgagatggcacagccctcttgacgtgatgtaagcccctgcacagtggacttcctggagggaggggccctgtgatgctctgggggtttccagcgacccctgcgcgtcccagcatcctgatggacgcag

SEQ ID NO: 3946 - DNA, 304 bp, Homo sapiens; identical to SEQ ID NO: 3944
  source 1..304: mol_type = other DNA

SEQ ID NO: 3947 - DNA, 472 bp, Homo sapiens
  source 1..472: mol_type = other DNA
cctggtccttgcagcccacaggacccattgctgggaggccccccagggttaacagcctctttaataaacctcacacgtaaagaattaaatcaccattaaagactatttcagccttggaggaagaatactatttttagaaatgagtttttatattaaaatcacagaacaatttgcaacacttctggtagggcgatgggcgggcgccgcagttgcgcctttcatgtttctcagagatctaactgccaaaggtagtagggggcagtgcccctcccccacttgctgggcacagagaagaggctccatctgcagagtaagggggcctctcttaaagcaggggtggctgggaccccaggctgttgcctgtgccccacacaggagatctccaccttcctccagtgagaaaatgaccttggataccaatgttttgctgctgtcagcactgaacactgctggggggagtcagcccaagtcc

SEQ ID NO: 3948 - DNA, 653 bp, Homo sapiens
  source 1..653: mol_type = other DNA
tatatgcatagctggttagatatcagagtgtaaacctaatcttaaaaatgtagtcaaattgttaatcttatatttttgtaactcagaaaaaggcttttttaattctgggattcttaaaaatcctctagtgatttatttttcatcgtctttaaataaatatttaaacttttaggaatttaggagcagattcctaaaagtttaaatatttatttaaagacgatgaaaaataaatcactggaggaatttacactcttattaggtttaatatccactatggggattctttcattatacaaatacatgttatttttgaatttcaaaagaaatcatgttatgtcaatctattgagtgctaactaaaagttctctttgtttacttagctttctcttagttgtaagaaagaaagagacttcttgcatgaaaatagtatgttgcgggaaaaaaaaaagaatgataatcttttaaaggctctacaattggatgatgataccgctgtgctcgtcattgacaacggctctggcatgtgcaaggccggctttgcgggcgacgatgccccccgggctgtcttcccttccatcgtggggtgccccaggcagcagggcatgatggggccacaccttctacaacgagctgcgtgtggcccccgaggagca

SEQ ID NO: 3949 - DNA, 356 bp, Homo sapiens
  source 1..356: mol_type = other DNA
gtgtattgtaaaaataaaatgtaagttcacattagaataatatttaagaaaaatcattcagtggtagtgtaaaagatttttccaggagtccctggggaagaccttggggaaataaaaaatttgaaatatatattttcatgttacccaaaagttaggggtgtttgaaaactgtaaatgagcaattaatctgtaattatcctcacaattacatgattttataagacacattaaaaaatccttactaaggagtcctaccggactctgtgtcctgggttctcagacaaggtgaccgggagagggaaaggcctggcctccgtcaccgtcctgccccgcctgggcacaccacggccgagagg

SEQ ID NO: 3950 - DNA, 542 bp, Homo sapiens
  source 1..542: mol_type = other DNA
tcaaataaaatagttaaaattagagtttacaactgcattcatataaagatgaatatactccaggctagattcattattattttattatactccaggccctgtagcagaaagctgcgctccttaatggttacgggtgaccattcacttggacatacctgtggaggccaagacttcggtcccagatatcctaggtgccggcgcgctgcacagcctccctggtgaactctgaaagttctgggagcttgacaatcagaactctcagcagagaggccgcccctgctctcaggagggcggaggcacctgagtctccagtgcggaggacgcaagaagcgtgctgctttctctctgagaaaacgactgggcgggatgatcccggcggcccctgggccgggtccctgtgcgtgcccagtcccgcgggtgaccaaagcccaggggcgggcagggcaggagcctggacctcacgtgcctccagtggggcggagcgtccgggcgagggcgcgggggcggaccctagggcggggcgcggggtggcgtcggtggag

SEQ ID NO: 3951 - DNA, 398 bp, Homo sapiens
  source 1..398: mol_type = other DNA
tttccactttagaaatcaaactcgtgtttatgtgtttaaagcagatctattttcaagttaatgtctttagaaaaaaagtaaactacacaggtttgaagccacaggacttgcctttccacactgcagaatttctcttatgtgaagtgaagtcaaataacacaacaaaaatgtttgttgaacctgaatccaaaaggtttagattacattttcttgatagtaaaacaaaatagtccactaggaattttatgggaaatatttgacaaagggataaaagtagcctttagcaaatttgttttatctgtcttaaagtatgcattcatttgaatagacagatgcaatttctgggaagtctgcatgtttccagcaatatttaggacttaagctcccgtgaatatagg

SEQ ID NO: 3952 - DNA, 407 bp, Homo sapiens
  source 1..407: mol_type = other DNA
ttaagtcccagcactttgggaggccaacgtgggtggatcacctgaggtcattgtactccagtgaactcttgtctatagaaatgatcccgcacttccctgagcgggcgcccgcagcctccgcacttgagctgagctccgccccgctccgaccccgtagtggcggtcacccggggtgtgctcgactcccgggtgcggcctgaggatccgcgccctggcgtctgggcacacacatcaaaatataaattaaatacttttttcacagacagttaataaaaaaccaactgggaccggcccactccgcgctcgcgctcgcgctcgtccatccgggcgtctcgagggcgccggcgggagcgagcacgctgcgcagtcacgtgcccggcgcgcccccgtcgcggcgcgctcaggcg

SEQ ID NO: 3953 - DNA, 565 bp, Homo sapiens
  source 1..565: mol_type = other DNA
cataaccattatacatttcttataactaaaaactactattacctaaacttaaattttattttaagtttatagcctatttgaggaatatcccacaaacgagatttgtctgatgtttagggcaagtgcagtgactaatcactttgattttccacactcagggtgggtgtggacggattaccacacccctctggatgaggtattattagaattcctctgcaaggaagattatcccttcttatttatttaatcacgtatttatagcagcctgttttatactttaggttataacttaatgcaatgtactttatcccaggcgcggcccccggaagctctctgggtagatccctgcgccctccttcagttttttgagcacctcaagcttctggcctacaaaacgctcccggctcagctggagctttctgcgcccggtatttagaaaccaagattagggtgctaacaatttttttttaaatttttatatttttaagacaggatctcaacaccccgccccaccggccggggcccgccgcgcatgcgcgccgaggcgtgacgtcagaacggcggc

SEQ ID NO: 3954 - DNA, 187 bp, Homo sapiens
  source 1..187: mol_type = other DNA
gtaccaccagtcgcagcgaggcgagccacggtgtagcggctccagcctccagcgtacggcactgagcaggtataccgcggttatatgagaaaaaccctccagctgattggatgagagccagtcttaagacataggcctagaggtttttctctccatgtacatgtgcgtaacctcagtacgtaaagca

SEQ ID NO: 3955 - DNA, 587 bp, Homo sapiens
  source 1..587: mol_type = other DNA
gtaagtcacacgtaactatattattatgattccacttacatgaaatgtccagaataggcaaatccttccagaataggcaaattcttagttttaaggagcataaaaatgttctaaaatcgtggtgattgtttaactagttaatacacttaaaaaactgaattttatactttaaatgagtgaattaaataatatataaattgtatctcaatgaacctgtgaaaaaagttaaaaaatatgtggtatgcataaacaaaaagttcttcattttatttgagattttggtgcacccaacacctgtgcagtatacactgtatacactgcaccggggcaggagctggctgcacctcaggcaggccctgggctttgcagccagctccgtcagcccgagctcccagctgcagctgctgccatgcacaacagcaccgccaggagtgtcctgggggcttttttcaaaggaggctgtcagcatcctcaagtctcagctgactcccacgaagtttgccggaactcaaggctgtcagtgacattcgtggcgccaagacttaagcaggcgcgttgcatgcatcggccagtgtctgtgccacgtg

SEQ ID NO: 3956 - DNA, 646 bp, Homo sapiens
  source 1..646: mol_type = other DNA
aattccaggttttctttggcttaaagtttattgaaaaccaaagtaagaattggtttattttagaaatttgtttttgttccatagttcttttaagaactaaaatttatctaaacctgttataacatattctacttcatgtaagacaccagggattgtgtgatgccccattattttatgcctcaataagagaattatttaaatgccgcaaattatagtaaatcatgaattgtaacaatgttagctgtaatatttaaaacacacctgaaagtgtaggtataattgtatcatctcagttcaaatgttgtctttagtggtattagtaaaaattaaaatatctaacaattattgagctgttatttgtgttataagcattagagtggtttcctgtgagaaagctactattttcattcctattttattgatgaggaaacagcccacgttgaatgtcatccaagctctttatatttatataggctgccctttcattaatactgcttttttcatgggaaagttaaatcagtgtttgcagttacatgaatcattgctatggctgtagctagtgcactataggactgctctacatctggcctctgccaatgggaattcagaagtagtaaaactgtcaacttaatgtccttgacaacaa

SEQ ID NO: 3957 - DNA, 676 bp, Homo sapiens
  source 1..676: mol_type = other DNA
ctccttttaagaatcgcgatcttaaatgagttctgtagtgcttagatttgacagttataaataaatgtaattcttataactgagtatagaaatattagaaatgtagaatatcggtaaaacgttcttcagtaaaagaaacttaaagaactttgagaaattgcttctgtccatcggttagatatcagagtgtaaacctaatcttaaaaatgtagtcaaattattaatcttatattttatgttttttgtaactcagaaaaaggcttttttaattctgggattcttaaaaatcctctagtgatttatttttcatcgtctttaaataaatatttaaacttttaggaatttaggagcagattcctaaaagtttaaatatttatttaaagacgatgaaaaataaatcactggaggaatttacactcttattaggtttaatatccactatggggattctttcattatacaaatacatgttatttttgaatttcagaagaaatcatgatatgtcaatctattgagtgctaactaaaagttctctttgtttacttagctttctcttagttgtaagaaagaaaaagacgtcttgcatgaaaatagtaaaaaaaagaatgataatcttttaaaggctctacaagatgatgataccgccgtgctcgtcattgacaacggctctggcatg

SEQ ID NO: 3958 - DNA, 537 bp, Homo sapiens
  source 1..537: mol_type = other DNA
acatgttatttttgaatttcagaagaaatcatgatatgtcaatctattgagtgctaactaaaagttctctttgtttacttagctttctcttagttgtaagaaagaaaaagacgtcttgcatgaaaatagtaaaaaaaagaatgataatcttttaaaggctctacaagatgatgataccgccgtgctcgtcattgacaacggctctggcatgtgcaaggccggctttgcgggcgacgatgccccccgggctgtcttcccttccatcgtggggcgccccaggcagcagggcatgatggggggccacaccttctacaacgagctgcgtgtggctcccgaggagcaccccgacccagatcatgtttgagaccttcaaccatgtacgtggccatcgtgacggggtcacccacacccatctgaggggaatgccctcccccatgccaccctgcgcctagacctggctgggcgggaactgcctggacatcaaagagaagctgtgctatgttgccctggacttcgagcaggagatggccacggcgg

SEQ ID NO: 3959 - DNA, 497 bp, Homo sapiens
  source 1..497: mol_type = other DNA
ccacaccttctacaacgagctgcgtgtggctcccgaggagcaccccgacccagatcatgtttgagaccttcaaccatgtacgtggccatcgtgacggggtcacccacacccatctgaggggaatgccctcccccatgccaccctgcgcctagacctggctgggcgggaactgcctggacatcaaagagaagctgtgctatgttgccctggacttcgagcaggagatggccacggcggcctccagctcctccctagagaagagctacgagctgcccgatggccaggtcatcaccatcggcaacgagcggttccgcatggaatcctgtgatgtcaactccatcatgaagtctgatgcaacacagtgctgtctggcggcaccaccatgtaccctggcatggccatgagaagatcaggatcattgctcctcccaagcgcaagtacgatcagcaagcaggagtatgatgagtcaggcccctcctaggtggactctgacttag

SEQ ID NO: 3960 - DNA, 329 bp, Homo sapiens
  source 1..329: mol_type = other DNA
aaccaggctggtcttgaacctgccatggcctcccaaagcattggaattacggagtgtgcagtggcccaatctcggctcccgtgtagctgggccaggctggtcttgggaactcttgacctcaggtgatccacccaaagtgctgggattgcgggcgttagccatcgcgcccggcccgcacaaaagtgattgaatcctgccacttcccaggtgctgggtgggaacagcctctcagtggcacactgggagcaaggcaatgttccgatccggccctcagcccgcctcccaggaactccgagccaatggcggcctggcaccggcgggccaatccc

SEQ ID NO: 3961 - DNA, 682 bp, Homo sapiens
  source 1..682: mol_type = other DNA
gcaggaagactcagccggggccctccactccccagcctgcccggcctgggcagagccgccgggccgcccgagtcctggggctcgcggaggaacggagatggcctccgcaggggctcgcggaagcccccagggcgtcggaccgtctcacgcgcgcgtcccgcgccactcacctgtgggacccatagcgtcgcccgcttcagaggtggaagccgccattccgccaccgcgtatcaagctgcgcgcagagccacgccccgcggccgggcgggaaaagcgcttctacctctttgggccgttacctcaaaagggaaggccggccggccggccaggtgtggcggcctctggcgccccaaggtagggctcacgcactttctccctagcaaggaatgcgcgtgcgcgtaagccctagtggtgcaccggtgcggatgagcgcccaatatgcctggcactgggctgggtgctgccacctaagcgacgccctgaccgccaagcagctggcccctgcagtccgccatgccactcccgacgcctagcgcgccgctcagcacaccgtgagcgcccactaactgttgggctccaatgacgccgaggaggcggccccgtccccgcgctcccgccgctcccgccagggcagcccgggaggccagacgctggcgctgcagggagcgcatccgctaggggg

SEQ ID NO: 3962 - DNA, 481 bp, Homo sapiens
  source 1..481: mol_type = other DNA
gaattgggcttcgggagcctccgaaaccaaggctcgaggggaagggtcgagctgggacccacacccggctcttcctcgcaggaagactcagccggggccctccactccccagcctgcccggcctgggcagagccgccgggccgcccgagtcctggggctcgcggaggaacggagatggcctccgcaggggctcgcggaagcccccagggcgtcggaccgtctcacgcgcgcgtcccgcgccactcacctgtgggacccatagcgtcgcccgcttcagaggtggaagccgccattccgccaccgcgtatcaagctgcgcgcagagccacgccccgcggccgggcgggaaaagcgcttctacctctttgggccgttacctcaaaagggaaggccggccggccggccaggtgtggcggcctctggcgccccaaggtagggctcacgcactttctccctagcaaggaatgcgcgtgcgcgtaagc

SEQ ID NO: 3963 - DNA, 392 bp, Homo sapiens
  source 1..392: mol_type = other DNA
taaggggagagcatctctgctcagtaaaagctttctttctaggaactttccagaattgggcttcgggagcctccgaaaccaaggctcgaggggaagggtcgagctgggacccacacccggctcttcctcgcaggaagactcagccggggccctccactccccagcctgcccggcctgggcagagccgccgggccgcccgagtcctggggctcgcggaggaacggagatggcctccgcaggggctcgcggaagcccccagggcgtcggaccgtctcacgcgcgcgtcccgcgccactcacctgtgggacccatagcgtcgcccgcttcagaggtggaagccgccattccgccaccgcgtatcaagctgcgcgcagagccacgccccgcggccg

SEQ ID NO: 3964 - DNA, 376 bp, Homo sapiens
  source 1..376: mol_type = other DNA
ttttttttttttttttgagggcaggccttgtaaaaaaaataagacttctttttatttttattatttttaaatttatttatttatttatttattttttgagacacagtctcaccctgtcacccaggctggagtgcaatggcgtgccatcatagctcactgcagcctcgacctcatacaggcgcaagacaccatgcccgggtactttccattcaggctggaaaggatgcctggatgagagtctctgtcgtccagattggagtgcagcggtgcgatctcgactcactgtcggggattacaggcgtgagccccggcgcccagccctggatgcctttccgtcgcccggtttccatggtgacggggcgccaggctagggcgg

SEQ ID NO: 3965 - DNA, 716 bp, Homo sapiens
  source 1..716: mol_type = other DNA
tgggcccaggcggcgctgaacctgctgctcagccgcatcctggcgactgcacagtgccgggcggggagggcgtgtgccacacggctaccctcaggccgtcgggcccagccctgcagcctctaccgtgggctcagctgcagctggcatttgaaggtggcagcagcggtggcaacccccgaacctgtccagggtcggacaccgccactgcgcctaagtctgggaacctgccgcaaagcctcatctgtacagggcccagtggtggcaagcctgcgctgccagcgcgagccgaggaagagcagagccccgggtggaagggcgatgtactcggcgatgctcagcggtctgggcccaaccctgtagcctctaccatgggctcagctgcagctgccacctgaacatggcacgtggcaggagaggctgcaaccctgaccctgccagcgccaccagccgcgcggatacttgggccagaagcctccaggcgcctaagtcagggatgggtccctggctgcaagaggccgggaaccgacgctcagcgccaccctggaggctgcacgatgcccagcgccagggcccagctcctggatctcaggtttgtcaagcaggccatgtggcagggagccccccacgttccgctccagggagccccgccgcctcagtagcaggtgccacctgcacgccgtgctgggcgaagcgcagccagggcggtttcctgccgc

SEQ ID NO: 3966 - DNA, 587 bp, Homo sapiens
  source 1..587: mol_type = other DNA
tctcctgcctcagactcctgagtagctgggattacaggcatgtgtcaccacactcgaactggccacctcaggtgatctgcccacctcggcctcccaaagtgctgggatgacaggctttttataaattttcaattttaatctatttattattatttttttgactggagtgcagtggcatgatgtcggctcactgcaaagtagcggggactactggcacccgccacggcgcctggatggtctcgtgaccgtcgtgaggattacaggagtttattaactttgagtccagtttatgaaaacagttagtttttgtattttttaaggcctggatcgagggatccaccttccctcgcctcccaaagtgcggggatgacaggcgtgagcctaccacgcccggctcctaggtcgagtggtggtgtgtggttcccacccccagcgccccctcctccggtcaccgccgcgatgtccaccagtgggtcctgagcgaggcggttgagtgagacgcgcccctcccacgcggggaagggtgccgcctgatctggcgagcgcaggtcccgtgctcccctctggcggctgcgcacgggccgtgt

SEQ ID NO: 3967 - DNA, 608 bp, Homo sapiens
  source 1..608: mol_type = other DNA
gaacgcataaggcagccttcctcccttctctgattgtggaattacatgacggccttgagctccctccggagggcatgcttcccacctggggcttgcggcagaagagaccccggggtcttcgcgtccctccgtgggaaggcgaggcagggccctgcgcagaacaccggcaggctctcctgcaagcctgcttggggccgacttcctggagcagcggctgcaagcagcgcagagcccagctgtccttggggaggcgagggcttgctggctcctctgggacgccccggtcaagccaccaccaaacgggccgtgacctcgccttcgaagggggcccccagggcagcggtggacgtgggggcacgggcgagaggaagtttgtctttctcccagctcgggagggtcgccagcttccccggggctgcacctccttgggacgggttggagcgccgcagctgcctctgcggctgccgcctgggtgacggagggtggggcggcgtagctcgagagccacgatctgagtcaaaccccgccgctgggctgggtctgcagccgggccgctgagcacaatccgctgtggttaatgattaatcgctgaccaccccgcctcccgc

SEQ ID NO: 3968 - DNA, 634 bp, Homo sapiens
  source 1..634: mol_type = other DNA
agctccctccggagggcatgcttcccacctggggcttgcggcagaagagaccccggggtcttcgcgtccctccgtgggaaggcgaggcagggccctgcgcagaacaccggcaggctctcctgcaagcctgcttggggccgacttcctggagcagcggctgcaagcagcgcagagcccagctgtccttggggaggcgagggcttgctggctcctctgggacgccccggtcaagccaccaccaaacgggccgtgacctcgccttcgaagggggcccccagggcagcggtggacgtgggggcacgggcgagaggaagtttgtctttctcccagctcgggagggtcgccagcttccccggggctgcacctccttgggacgggttggagcgccgcagctgcctctgcggctgccgcctgggtgacggagggtggggcggcgtagctcgagagccacgatctgagtcaaaccccgccgctgggctgggtctgcagccgggccgctgagcacaatccgctgtggttaatgattaatcgctgaccaccccgcctcccgcagctcgggagagggtgcgccgcggagtgcgccctcggcgaagaggggcagaggcggagcgccaggtgctgcggtctcactccc

SEQ ID NO: 3969 - DNA, 515 bp, Homo sapiens
  source 1..515: mol_type = other DNA
gagtccgaggctgggatggcctttcgaatggaggagaacaaccctcttcctcaccctgatttgctttctggtaggacctcacggcaggtgtccccgggacggcgttctcctaggctaggcgaccagggcggcaatgcaccctccagcggtgcgcgcaggcgggtggccacgccgagctggttcttctacggagcctgcgggcgtggaactttgccaggcgcacgggaacgcgcgcccttcctgtcagcctcccggggcgccaggctcccgcggcccgcagcgggacagcctggacccagtcggggtccgaccagttgtgcgaagggccagccgggcacgcagtcctcagccgcacccggcaggtccccacggcacctgctgccccccggcgcccctttcccaggaacgtgcggaggcgggaggggggtggggatgtgaagcgaccgtcccagccttccccgcccgccacccccaccccaactcggcagccgtcacgtgatgcctggagtgggagg

SEQ ID NO: 3970 - DNA, 545 bp, Homo sapiens
  source 1..545: mol_type = other DNA
cagaaatgaccgaattctattcctgctctttttattaaaatctgggcactctaaaaatgaaaacaaatttctatttgcaatgttcacttttaaaaataaaattaatggtgctacgaagaattctttttaatatccttttttttctacaaagactgtttatatgtaaggataaattctattttaaaggttatgtgtattttttctagatgtgaactatttataattacttatgtacaggagcttgtaaactaggcccaatagaaatatttttaggatctatatggctactttagcacataattgtttctttaaagagtattgtattgtgcaatttgttttattttatcttaaatgaaaattatgtaaaatgtccttgtctttcagactttaaaaaatctttttgtttcctttctgaataaaagttatatcacattgctcaaggacctttattggccctttgaatttagccaatttcaacgatctctgcagaggaattacaaagaaagtcatttaagcccctttacagaccagctctgctgggagga

SEQ ID NO: 3971 - DNA, 519 bp, Homo sapiens
  source 1..519: mol_type = other DNA
aatctcaatttgatggaaatgttcattttagtgtaatttcagtcagaaatgaccgaattctattcctgctctttttattaaaatctgggcactctaaaaatgaaaacaaatttctatttgcaatgttcacttttaaaaataaaattaatggtgctacgaagaattctttttaatatccttttttttctacaaagactgtttatatgtaaggataaattctattttaaaggttatgtgtattttttctagatgtgaactatttataattacttatgtacaggagcttgtaaactaggcccaatagaaatatttttaggatctatatggctactttagcacataattgtttctttaaagagtattgtattgtgcaatttgttttattttatcttaaatgaaaattatgtaaaatgtccttgtctttcagactttaaaaaatctttttgtttcctttctgaataaaagttatatcacattgctcaaggacctttattggccctttgaatttagccaatttca

SEQ ID NO: 3972 - DNA, 317 bp, Homo sapiens
  source 1..317: mol_type = other DNA
atactagtcagtatatagaaagacttggttaaaattttaagaatcagaagaaagtcttctcaggaaaagaaaaattgcatatttgcaaatgcacacaaaatgttgctgtgatttcaaggatcccttccttctactccatgtataatctattcatatattcatgaatcatcaggctcttcagacctgaaagaagccatcctctcaaaaatgtgaatcaatgggattatttacgcatgtataactggaatccactccaaattttgctgcagaactttttgacagtcagttaataaagactcaacaataagcagctgcca

SEQ ID NO: 3973 - DNA, 297 bp, Homo sapiens
  source 1..297: mol_type = other DNA
ctttctatatgtgtatgagtagattaatgccatcctgcagggggtgagtttcagctaatagattcattcgctcaagagaaagttgtttaaaagaatctggcttatatattgatcattcaatggagagaggcactttgctataataggataatagatgttccagttacacaacagagccagttgtgagcctgcctctgctaagcagagctctgacatcttaagttgaactggttaaactggatgaaccactgggccatggcctgagggtggctcctgccctggcaggacccactctgt

SEQ ID NO: 3974 - DNA, 266 bp, Homo sapiens
  source 1..266: mol_type = other DNA
ccagaagtattgacaatatttattgtagcatatggctaatgtaaaaggaaaattacttacattaacttttcaggcaatgtaatgctatacaaaaagcctttcagaagaactgttgtttttgacatttagatgaatgaagaattttctcagcaaattattaattactccttgagttcactgtagtgctgccatgtaaacgactgccaaatggattctttcgacattccagccaattaaaatacatttaaagtaagaggctatcttta

SEQ ID NO: 3975 - DNA, 289 bp, Homo sapiens
  source 1..289: mol_type = other DNA
ttgtggattctaccactagcgaaactataatgctggatttcatttataagtgccacatatccctaagtatttcacatatatttcattgaagcagcatttgttatgctcataaagatgaggcagtatacctactgctttgtgtaatgcgtgagcaaagttgccagtgggcttcgctgctggaaggccccgcgatcagaagctcctttctctccccttgggctgcggaacagagtggctggggaattggctgagcgcgcggccgggggcggggagtttgccaaacgtcccc

SEQ ID NO: 3976 - DNA, 230 bp, Homo sapiens
  source 1..230: mol_type = other DNA
cagatgtctcattacagaaaatctgcctgccaggtgttccacatttcgaaagcaccttgccagaagcacataataatgactttgtaagcttaagggcttcctgttttgaatttggtccaggctggaaagttcctgaatcataagatattgaaccagcaaatttaagagttgacattttacttagaggtattcaagtgaaaaccttctcctccttcacagcagaatggaag

SEQ ID NO: 3977 - DNA, 485 bp, Homo sapiens
  source 1..485: mol_type = other DNA
gggtatacttttctgagcctcaacaaatccaactctctgggcatcaagagagctgcggtggactctcactggtgagatcagccccaccggaggcttccattagcgcccagaccctgtacagcctctgaagcctgtgcagctccagaagagaaaggcgctgtctgctacccacgcgcggccgcgggcttcgcggaccccagaggaatccagtgggaggggtcccctctgggcaccatcccgcggcgcaggtggggcgggtccccgctacgccctagccaagctctgccagggccgcctgtgggtccgcctcggtgcgccggctcccgcgcccgggccttggggcgggtccctgccgcccgcacctgcccccaggggcggagcgcggcggcaacaacgcggccccagcctccgccaccggccgcggagccgagcggctctccgctcgtccccgccccccacgcggccagtccgtccgctcctgcccc

SEQ ID NO: 3978 - DNA, 372 bp, Homo sapiens
  source 1..372: mol_type = other DNA
aacactgcacctggccacttttaaaatgttgctttaaatcaatctattccagaaattgtgcaactgttacaaaaactgcctactataatcaatattcttgtgcaatgcagtaggcaaatagatattactttattttttatcaagtcttgcactatcgcccaagctggggtgcagcagcgagatctagctcacttcagcctcgggagtagctgggactacaggcgcgccaccaaacctgaactcctgacctcaagtgatcggcccactggtaagactttaaacttccacatcaaatcctaaagataaaattttaatagaaattcaatttctcgttgctagttggatagcgtttgccaagtaatttgaaaaaat

SEQ ID NO: 3979 - DNA, 417 bp, Homo sapiens
  source 1..417: mol_type = other DNA
ttcttttccctgttctccataaatgtttgttaaatgcatgaatgatcccagagtggactctttctgtgatttaaaatgtgaaacctccccataacttttcaacacgttaaattttcatgaacaagacaactgttaaatattatttaaagatatgggagaaaaggtgaatccttttggttttatttttaactacaaactatttaattattaactatgtacaactaagttaaaatatttaaaatgaaaaatcagtcaatttttgacctgctgtaagtcaaagcatccatcctgactaccaaactgtgttgacccaaagcttgattaacaaataaagcttggttaaccaaagcttggttaacaaataaacagaactttgaactttaataaagcagttctaaggcctacttgtaaagggac

SEQ ID NO: 3980 - DNA, 340 bp, Homo sapiens
  source 1..340: mol_type = other DNA
gagagagagagagagagtgtgtgtgtgtgtgtgtgtattgcaacattgtggccaggccgcttcaactccataggttaaatgacattaatcatgtcctttataaatgtcagctgttgttattgcgatagaatatcgtaccccattcagtactggactcagacaaaaatgcagtctgtttactgaagcttttgcttcagaatatcacaagcatatctatgcaatcagtttggtggtaatcgattggattctctttgaaaggggcccttctaggggtttggtagttttaaagcacttaagcaacaagagcatacaaaacttgttttgtggatggttgcctagg

SEQ ID NO: 3981 - DNA, 314 bp, Homo sapiens
  source 1..314: mol_type = other DNA
ccacatcaaatcctaaagataaaattttaatagaaattcaatttctcgttgctagttggatagcgtttgccaagtaatttgaaaaaatccagagccgcgcgctaggcggagggtggcggaggccggagtcgcacgcctacgagactgcgcctttttaaagggccgctagacctcccgtctaaaggaagcgcccgacgggcctcccttcggcgcctcccaatgacaagcggcgcggagcattgttagagcgggccccgcgcatgcgcaagggcggagggtggggcggggtcgcgcgccttggcggggagtccgcg

SEQ ID NO: 3982 - DNA, 433 bp, Homo sapiens
  source 1..433: mol_type = other DNA
tgtaatcccagctactcgggaggctgaggcatgagaatcacttgagattgcagtgaatcgcgccactgcactccagcctggcgacagaaccgaggtgggcgcctgtggtcccggctactcgggaggtcgtgccactgcactccagcctgggcgacagagtgttgaacaccatgttgctcttcccagaaaccaggtaactagtatgattttatttgacagcacctagtttattgccttacaatcaataaatagagggtgaatgaaaagatgctaattggtactaactacaaatatgggttgaatgaaaacaaacccaacatgctttaggttttttaatacaatcttatccacatgttcatcacaggaaattttcaagttttatgaaaccagggggcgggggctccgggggcggggacgcgccccgttctctttc

SEQ ID NO: 3983 - DNA, 210 bp, Homo sapiens
  source 1..210: mol_type = other DNA
cggacaccggctccagcggcagccgcggctggcagaattttgcccacttgtaaaagaactgactcgaggtatttaaaagacaaccagatctcctcagtgggtattgcttaaggggttggctcctccccttagcgctaacgagttccaaaataccataggggttttaaattattagtacgtatttaaactcatctactttcacgttgtccc

SEQ ID NO: 3984 - DNA, 192 bp, Homo sapiens
  source 1..192: mol_type = other DNA
ctagggaagggcatctcttacccggcgcggcgcggcggggcgacggccggacaccggctccagcggcagccgcggctggcagaattttgcccacttgtaaaagaactgactcgaggtatttaaaagacaaccagatctcctcagtgggtattgcttaaggggttggctcctccccttagcgctaacgagttc

SEQ ID NO: 3985 - DNA, 480 bp, Homo sapiens
  source 1..480: mol_type = other DNA
tgcggccgtggggcggccgggggagcccggggcaccggcgccagccacacgagagagcagtaccacgctcttggcaggcctgctgtggctggctcccgagtccctggggctgcaagagcagccgcggaggcagcagcagcagccatggcagggactcggaaacctttcccctgcctcctccgctcggcccccgggtgggggcggtgggcacaaggcagtggctgcagctgcagccggagccgcagccgcgggccaggcgagcctggctcactcggaacccgacaacggcgggctggcagcagcgggacgtcagaaggccctggctgaagcgccgacgacccggcggggaaggcctccttctccgttagcgctaccggttggcgggcgggggagggggaagggcatctcttacccggcgcggcgcggcggggcgacggccggacaccggctccagcggcagccgcggctggcagaattttg

SEQ ID NO: 3986 - DNA, 221 bp, Homo sapiens
  source 1..221: mol_type = other DNA
cgccacaggtttgggacgtgtccgcccctaagcggaagtgacgttcaacgggacaacgtgaaagtagatgagtttaaatacgtactaataatttaaaacccctatggtattttggaactcgttagcgctaaggggaggagccaaccccttaagcaatacccactgaggagatctggttgtcttttaaatacctcgagtcagttcttttacaagtgggcaaa

SEQ ID NO: 3987 - DNA, 569 bp, Homo sapiens
  source 1..569: mol_type = other DNA
gtgcaaataattagctatttttagggaaaatatctgtaggaaaggtggtatattcagatgtatcacttcctttatcttgcaaagattgtcagatagatgtacctggaggataaatttaattgatgtagaatttaacataatagtatatgcaactttaaataaaccatgcaagcctttagctaatagttattacagaccatgtgatttcatgaaagtattaaatatggatcagttttcatttaatggcagccaatcacattataggacattctcccagaaaattggaaaataaatcactatctagtctcttttgtattaccatggaaagtagctggaaaagaaataatctattctctgctttgtgttactttaaaaagtagctgtggcaatagcctaacgcgttttgaagttttctaggaaattgctgaaggcctctacgttcagaagaaatcaaagcctcggagttaatccactgagagtctcaacgaggccgagaatagcatatgccagttggagtgacacttatttctccctctcccggaggcgaataagcctaagtggactacaat

SEQ ID NO: 3988 - DNA, 575 bp, Homo sapiens
  source 1..575: mol_type = other DNA
tcttcacatcgtgcaggtaacgtatgagcattgtctgatggatccttacaacattcctgtatgcttttggaaagtatgatctttgtttaacaaaatgggaagaaaacatactcatctggtttagtgtgttgccaataattataattattaaacattgttttttaaattgtcctcggatcatgctcttgccagaataagcaagcttcttttaattttagcaaaaacagattaagaaataaggaattgtgctgttaattcattttctttgtgacaggtaaagttcacaggaagttagctattacagacaaattgcctttttttaaggctttttgttagtaatactaaaagtgtcaaagagagtaatttaaaaatgatatattaaccatacctaaattatttatggcttgttctttaaggaattatagaaaaatatggttgtctcaactttttttcttcaacttgttgtgcaacaataaatctcaaaaatcctgacagtctttgcatattcacagtttcatgggcttttgcatcattgcttctgaattgctaatgaagagctcaatatagcttctgat

SEQ ID NO: 3989 - DNA, 574 bp, Homo sapiens
  source 1..574: mol_type = other DNA
aaccatgcaagcctttagctaatagttattacagaccatgtgatttcatgaaagtattaaatatggatcagttttcatttaatggcagccaatcacattataggacattctcccagaaaattggaaaataaatcactatctagtctcttttgtattaccatggaaagtagctggaaaagaaataatctattctctgctttgtgttactttaaaaagtagctgtggcaatagcctaacgcgttttgaagttttctaggaaattgctgaaggcctctacgttcagaagaaatcaaagcctcggagttaatccactgagagtctcaacgaggccgagaatagcatatgccagttggagtgacacttatttctccctctcccggaggcgaataagcctaagtggactacaattggactgcgcgaccggaggcctagcgggcgcgcgcccgcaccatcgactcgccaatgaggtgttctcgcgcgcgctagcgcgcgtctccgggtgccgctgacgggcgtgcgcgcttgtgcggagccggaggtgggggccgaaccagccaaggttgcgggggccgca

SEQ ID NO: 3990 - DNA, 471 bp, Homo sapiens
  source 1..471: mol_type = other DNA
aagtttttcatagatgtttccatattgtttgaatctcttacaaaatatgttcagcatatttttaaagagaaaatttggggcaaaatacttatttttgtattatgtaaacaaattttaaaataatgtgtggctgtggctcacacctgtaactgaggcaagaggattgcttgaggtcccacctacccaggatgctgagatgggaggatcactaacaaaaaaaacaaaaaaaattggtaatcgttttcttcagacatcagtggcatgatcttggctccctgagtagccgggatagctaggacggtctcgatctcctgacctcgtgatccgcccacaattacaggtgtctttacatttttaaatattgcattagtgaaccgtgtactgattttgtgatcatagataacccagttaaatattaagtcttaattatcacttagtattttacaacctcagttgcagttataaagtaag

SEQ ID NO: 3991 - DNA, 400 bp, Homo sapiens
  source 1..400: mol_type = other DNA
ggcaggagaatcccctggacccgggagctggaggttgcagtgacccgagatcgcgccactgctctcgagcctgagcgaaaaagaaaaaaagattaatcaaagtgtcaaatatttctttctttttctttttagtcacactgtgttgcccaggctggagtgcagtgacacgatctcggcccactgcctcggccacccgagtagctgggattctgacctcaggtgatcctcccaaagtggaaataattatgcaaggtttagacatctctatcgttcaattaatatcagtggaatgatttaaagaacatttgcactgcgcaggcgcaaaggcagatgggctttctccagaagggctttgcatttggcgcgaaatccctttccgtgcggccgtgcgggggcgggg

SEQ ID NO: 3992 - DNA, 526 bp, Homo sapiens
  source 1..526: mol_type = other DNA
caggcaagcaaggaccatggctgtcttctcactactccatgggggagcctccagagagagcctttcacttgcgaaccaaatctccaaattattttcaatttcgattcaaaactcatgaatgatagcttttttaaaaaatcagttttttaaaaaagcctaacttggggatattcgcccaaacagatccaggcaatcaatgcaattgtatgcgtttctggtaacccatgctgccttggcaagccaactgcactcctctgtcccaagcagggcaatggattgcgaagaggcctcctccgtccccaagcagctacgtcgcccagggaggcccgcgcttcaggtctagcgaaactaccgcgaattcccgggaattccctccaactccgggaaaactcccggaggggctgggaggagaccctgcgcgcggccgccagcgctccgggatctcgagatagccgcagctctcgcgatctttctggagccgcacctccacgcggagtccgagcgcgtgtgctgagaccccagggtc

SEQ ID NO: 3993 - DNA, 511 bp, Homo sapiens
  source 1..511: mol_type = other DNA
gatgtttgtaaataatctttgatcaattaaatagggaataaaatttcataccacctgcaatgctacaggcaagcaaggaccatggctgtcttctcactactccatgggggagcctccagagagagcctttcacttgcgaaccaaatctccaaattattttcaatttcgattcaaaactcatgaatgatagcttttttaaaaaatcagttttttaaaaaagcctaacttggggatattcgcccaaacagatccaggcaatcaatgcaattgtatgcgtttctggtaacccatgctgccttggcaagccaactgcactcctctgtcccaagcagggcaatggattgcgaagaggcctcctccgtccccaagcagctacgtcgcccagggaggcccgcgcttcaggtctagcgaaactaccgcgaattcccgggaattccctccaactccgggaaaactcccggaggggctgggaggagaccctgcgcgcggccgccagcgctccgggatctcg

SEQ ID NO: 3994 - DNA, 363 bp, Homo sapiens
  source 1..363: mol_type = other DNA
cctgggttcaagcccggcttggaatccctgccctggcacgcagttcgttaaatgcatctctgtgatggtaatacccacacggtgttgtgagaatgatgttacaaaaagtactggtcgctaaattactcttataataaagcatacttttaggataataaagcactattcgcgaattggttactgagcaatgatcagtcagaagctgtgaatgtgcaagtatagctacatcctccgaaggaaggatcttttggccctacttccagcattcgacagagagacgcgttcctagcccgcgctccggcctgggctctccccgccccagcggcgcatgcgccgcgctcggagcgtgtttttataaaagtc

SEQ ID NO: 3995 - DNA, 513 bp, Homo sapiens
  source 1..513: mol_type = other DNA
gccactaccaggctttgtggaaattctagaccttcagtagataggatctaccgtgtctataaaaatatgaagatccttaagttttattaaagattcgaaaaaagtaaaagtgtttttacggttttattttcatttttatttcttaccgttatcgtttattataaaggatattataaaggatacgggcgtggagcttccgaaacctcttccgagtttctttttttttttttaattctacaaatgtaatattagaattgattttaatcatctttcctgtgtcagtgaaagtgcagtagagaatgaaatgtttcctcttttgatatagaaaagagggatcgtgtgtagagcagtctgctgggggcctctggggtccgtgtcgcgacgcacgcgcctcggtcccagctatctccgcagcggccaccccgcctgcggacgcagctcccccgccccacccagtctccgcgccggagggaagtggcgcgagggggaaagcactgtctgcgcgcccactgc

SEQ ID NO: 3996 - DNA, 410 bp, Homo sapiens
  source 1..410: mol_type = other DNA
gacatatttctaagagacttatatgagttaactcatgctattattaacaacccaatattagataaaggatgaccttcttaaagacctcttcccaggaaaaagactgtggtggggacaccactgggtttccaaaggataatttctgagttacaacaaatcagcatttgaagaaatgcagcagataagttgaattcgaacagtcactttcccacttggaacttacttgtggtgacaaaacaggaagtgatttgaatacagtttgtttttatgacctttcaacctcaggaatttgaaaagttttagcagtgatattgactcagtaatgagcaagccagcctttgtggcatgttaaattcaaaacaagcttagcatttttttttttttttttggggaggggaacttaaaccttg

SEQ ID NO: 3997 - DNA, 431 bp, Homo sapiens
  source 1..431: mol_type = other DNA
tcgaggctgcagtgagctgtgatggcaccactgcactccagcctgggtgacgacgttcatgtctgttctgaaggattttaaagaagtttactcctggtagctcgattaagtatctttgtcccatggccgtggggaataaaaagtggtcccaggaggccgcctggtcgcagttattacagctcgcacaaacggccgccgcctttggcgtctcccgcggattagaccagtttacgcctggccaaataagggtcagactaagcaaggcgcctccgtgcgcctagccagagcggtgccggctgcggaacctgccccgccgggagcctagtgccatgcagcagcggcggcggtggcggcttcccaagcgcggcggcaaatccgggcccgcccggaagtgcccggcgctgtaggagggagcaagggcccaggagccg

SEQ ID NO: 3998 - DNA, 514 bp, Homo sapiens
  source 1..514: mol_type = other DNA
cttcatgcggattttaaagaagtttactcctggtagctcgattaagtatctttgtcccatggccgtggggaataaaaagtggtcccaggaggccgcctggtcgcagttattacagctcgcacaaacggccgccgcctttggcgtctcccgcggattagaccagtttacgcctggccaaataagggtcagactaagcaaggcgcctccgtgcgcctagccagagcggtgccggctgcggaacctgccccgccgggagcctagtgccatgcagcagcggcggcggtggcggcttcccaagcgcggcggcaaatccgggcccgcccggaagtgcccggcgctgtaggagggagcaagggcccaggagccgccgccgccgccgccgcgcgcacgcgccctcgcgggctggagccggggctggagtcgtaactcggaagccggagcccagacgggcccgcggcgggggggtgggggctgcgcgggggcgggagtggcggaggtggccgcccctggcggc

SEQ ID NO: 3999 - DNA, 421 bp, Homo sapiens
  source 1..421: mol_type = other DNA
ctccaatatttctgaagtcccttacccgcggctctgcgagcttggcgctgcggcagagtagggcactctcccagggcgtcctgggctcctccaggcgggcgcactcttcagggcgagcctctcggaccggccttctgctgggcgggggtgggaggaggcacccggcctctcggggctctggggcaccggctggccaggcgtgctcagctcggccaggcatccgcccggcgggatcggatctggagggcagcagccgccgcctccctcccgcccggccaagcgggagagtccaaggcgcgactgaagccccccgccgcgtgccggagctcgagctgccccgcaggctctttgccggccccctccgaggaggggcgcgcggggggccgggagaggcacctccggtccgcccaccctccccctt

SEQ ID NO: 4000 - DNA, 339 bp, Homo sapiens
  source 1..339: mol_type = other DNA
aaaatgttgtaaacttaagtggtcataaaaacaactttactaatattattattccagtgatgcctgtttaaaatggctcgaagtaccctttttgctttattgttctttccctaagagaagctctgttccttggcttgtccttccttcccgggaaggaagcttccgaggaacgaagggagaagactcggctgagggttctcagctggctgtgaactgcggagcattgtaggcgcctggctggctcaggccaatgcagaagtcttactttcccttcaaggggattaaaataacctcttattaagtaatagatgtcagtgaattcttgcgtgatgtaagatc

SEQ ID NO: 4001 - DNA, 528 bp, Homo sapiens
  source 1..528: mol_type = other DNA
atatgtcacttttgacttgagtgtcatggtattaatgctcagggttatacaatgaacacttgatagaaatgattaaatgacactttacttgatttgttgtgggttactaaataaagcataggtgtgcataagtcattcaattattcaagcacattcgaaagtctttgctcttagtttttataactacaaggatattcatcaaaacaattcacagacttaaatgaataatttgcattaatgaagtttgcctattacctaggagtttttgaaaactcacatattaggcaatagagtgtattctggaattgagagcctattttaaacttttgactaaaaagtttacccattaaatgtcatagattcaaccatcagactgaaaatcctcagtgtatttgaaggagggtattgtctcaaaggcaaaatttggaatttagctctaagaccaacttaaaagcaagttgcctcaagtaaagtaaaatatttataaattctccactgggtggagtctgagcagttctttgaatttct

SEQ ID NO: 4002 - DNA, 284 bp, Homo sapiens
  source 1..284: mol_type = other DNA
gggaattgtgaatttctgagaactccaaagaattaaataatgatacatctatagagttagaagtagcagattttggcagggaccataattaagtgataggtcctatttattcagtgaggtcactgtagtgtaaaaatactctagtaactgtagtcccgttgcagtgagtcgagatagagccactgcaccccttcacttataagcaccgttgttttgataaagagtcctactgaatgcagcagaagtgacattgtgtaactttccaaagcttcattttaagaaat

SEQ ID NO: 4003 - DNA, 371 bp, Homo sapiens
  source 1..371: mol_type = other DNA
aactccatttctgagaccccttacaaatatgtcttgggttcagcagcatgccaaaatgatattgtttggatcctttattataatatatattttttttctttttaagtcagaccacacaaagaataaagctcttcagcaggtttcagaactgcttaggaaattgccagtgcctgaacctgttaactggatcaggtttcttcatttttcagcccttgctagaaggcagagaaagaggaagtttcttcagtgcttagcagtctgctcctagttaaaattgataaaatctctatacatgtgtcttgtttgacaattgataataacattgaaaaataacaatattgttgactatacaaggcaatttcttcaaattg

SEQ ID NO: 4004 - DNA, 399 bp, Homo sapiens
  source 1..399: mol_type = other DNA
tactctttctactatgtattctataaataaaagagctaaagtgaaaaaacatccaacatttgtgaattttaattgaaattcaagtggcaatgagaatattattgcataatttaattactcaatgtgaattattgaatactcaaactgcatcagactccgctgcagccaggaacccgcacaggggccctgaggctgaggagccgagcccgcgggctggggcggagcgattcgcgcgggcgggagcgccgctgactcagggacctcgcgccagcggagtccgggcggcgcagagaggcggagcctcgattgcgcgggcgggccgaggggcgggaccagcgcctgacgcgcccggaggccgaggcggccgcgggccgggaggggcggcggcatccgcggcgg

SEQ ID NO: 4005 - DNA, 342 bp, Homo sapiens
  source 1..342: mol_type = other DNA
ttgacagtttcaactgaaaaaatgcagcgcctctctcgatttttaggtacaaaagtttcgaagccagaaaggatatggactttctctttcctttcttaagggaaaaaaaaaattctacttataattatatttatcattgcggcgctcaccccaagttcccgagccgggggctgaggacttttcgaaaatgatctctgatcccctcgcgggtgcaacacagggggcgcggatgggtgctcgccggggccctggcccggctcccctgggcggcccgcgcgcgtttcaatgggcgcgggcgatgcccacgcctgcgtgctgccgaagcagggcgccgagtccatg

SEQ ID NO: 4006 - DNA, 238 bp, Homo sapiens
  source 1..238: mol_type = other DNA
ggaaactgatactcactttccaggttttctgcaaagcttctagctttgacagtttcaactgaaaaaatgcagcgcctctctcgatttttaggtacaaaagtttcgaagccagaaaggatatggactttctctttcctttcttaagggaaaaaaaaaattctacttataattatatttatcattgcggcgctcaccccaagttcccgagccgggggctgaggacttttcgaaaatgatc

SEQ ID NO: 4007 - DNA, 295 bp, Homo sapiens
  source 1..295: mol_type = other DNA
tttctttttaatcttactttaattgtaatatcaaaaaatatatactccaatattttaatttacttagagaccctttattaaaatgccaaactactttttaatattgggatccaagcatttttttttctggctctggtacctaaaaagaaaaaaataaccacaatttgatgtgcatctcaaatctggtcattagagatatcggtggaatttcatttcttccactaatcccagatcctttcccagagagaaacttggcgatcatctctcgtctctctcctacagaaaagaaaaagaa

SEQ ID NO: 4008 - DNA, 282 bp, Homo sapiens
  source 1..282: mol_type = other DNA
gacttccagatgtggaaaatatctttcagcttttgagtgattatttaattaaccatacagtagaaagctgtattctccagcttttctttttaatcttactttaattgtaatatcaaaaaatatatactccaatattttaatttacttagagaccctttattaaaatgccaaactactttttaatattgggatccaagcatttttttttctggctctggtacctaaaaagaaaaaaataaccacaatttgatgtgcatctcaaatctggtcattagagatatc

SEQ ID NO: 4009 - DNA, 628 bp, Homo sapiens
  source 1..628: mol_type = other DNA
tagctaaaattttgacaagtaatcacttgtctgatcatcaaatatgtcgttcgaaatcctcatttttttcttcaaagcgcagtaaacaagtatttgcgcacctattacgtgcaaaacagttttcaacacaatgctttgtgacagcacgcgtgtgcagaagctgcagcggtgggacgcagtgctagtctgggggcgcacacaccagctcgcgcgtcgcgagctcgcctgggcagctcggcgggcgcggcgaaacagctcccacgtcaccgactcctcggtatcagagcggacgaggcgtccccccagaggaaagactgggcgccgcagacgccccttggaggcgctccagacaggcccgtcggacgcgatttggaaacgggtcgtgcccggcctagcccgcatctactcgcccctttgaggcgcccgcgcccctttgtcgcgggcccaagcaggccggacgccgaggcctcgcggtatcgagcctccgtccgcccctcctcgcgctcccggcccggcacgcgcgctgcgcccggccgccgctgccgccgccgccgccgccgccgctgccgccgagcgttcctccgctgcgcctggcttccagcttcgggccggaaccggaagtttgggg

SEQ ID NO: 4010 - DNA, 561 bp, Homo sapiens
  source 1..561: mol_type = other DNA
ggcgctccagacaggcccgtcggacgcgatttggaaacgggtcgtgcccggcctagcccgcatctactcgcccctttgaggcgcccgcgcccctttgtcgcgggcccaagcaggccggacgccgaggcctcgcggtatcgagcctccgtccgcccctcctcgcgctcccggcccggcacgcgcgctgcgcccggccgccgctgccgccgccgccgccgccgccgctgccgccgagcgttcctccgctgcgcctggcttccagcttcgggccggaaccggaagtttggggggcggagcccggcggaggccagcgcggccgagcccggagcccggagctggagccagagcctggaccagaacttggccgccgcctgcaccgccgccgccgctgccgcccgccgccccttccccgcgccgcagccgcctcgccgccaccgccgcgagctcggccgccagtggtccgtctgggttgaaggtcggtccggacatcggacccagtcagttcccagactgtccgggcggcagcggacgccgctgccgccgccgcctcttcgtcgcctc

SEQ ID NO: 4011 - DNA, 375 bp, Homo sapiens
  source 1..375: mol_type = other DNA
tagtgagatgtctccagccagggccaagcagcagcagtagcagcagcagcagtagcagcagcagcagcaacagcagcagcagcagcaacagcagcagcaaagggtctttctctcctcctctcacggccaaagaggaggagggtggattttcgaagaagaagaaactccttctcctctctcaggctcaatccccctctcagggctcagggctggagggtgggggaaggaactcagccgccttccccccacccccctgaattcaaggttgaagtggggtcttcatcatcagctgctgctgctgctggggaggaggaggaagtcgctacgcttttaacacccccagctccctcctccttcctaagggaaagtggagga

SEQ ID NO: 4012 - DNA, 285 bp, Homo sapiens
  source 1..285: mol_type = other DNA
ggagggaagctccactcaagacttccctcactccagaataccagggagggtgtgatgcatctggtcaaaatgcatacagaggacttgtctctgtccctagataaggtagactcaggatccctgcacttgtcaaggattcctcggcaaacaagacggagctcgcctggtcctggccttcccggccggaatcgcttcccgcgtccctgccgctgcggactcctccactttcccttaggaaggaggagggagctgggggtgttaaaagcgtagcgacttcctcctcct

SEQ ID NO: 4013 - DNA, 612 bp, Homo sapiens
  source 1..612: mol_type = other DNA
gtcttttgatgagattaatcaaaaagaatcaagatcatgagaattttggtttttatcttttagaaatgcagatatacaaaaaggacctgtctttatttactgaggaagtttcaacattttatgtacacccacaatgttttcacacaaagtcaacttgtgataatgtactttcgtggagtcaaatttgcaataaatgcataaaatgaattagaactctctaaaagtcttacatattttgtacatccagtattggaaatgatgcaaagacgaaatacatagtgtatcatattgatgctatatgtgaaaatttggcaggggagatcattttgtaagtaaatgctgtcacttgaaactctggttactgctcagacatttcaattaagcaatttttttcacacaccaataataattagctttatactttgtatctgtctttgcaacagaacaatttcacagatctcttccacagtgttgtgaggaatacagtaagaaggaaggatatttggcttcttgataccaaatctatattagacaatatgtatatagatatatctggagatcctgggatgccactggtgtaagtcctggagtccaaagcaacatgtagttctg

SEQ ID NO: 4014 - DNA, 618 bp, Homo sapiens
  source 1..618: mol_type = other DNA
gtttgggtgacagggaacctaagttcacttgttgcaaagcgaggatgaacgcgctgctgcaccttggagccagcagcgcggtccagtcctccgaacggactgatgggactgatgggcaccctcggagatgcgaagcttgcgcacagggcgccttggagggtccgggtcgacattttcccttcgcgctgctcggcgcagccgtctttgcccggcgccttcctccgggacacccagcgagaggggtgaccgggcggcggcgggagaggcgcacgctcccgggcgcgggcgaacttgcgcacctggcacggccagcgagcggaggggcgccgcccccgccccctctccccggagcggaccgagaccgagcacgctcccgcgggccggcagcgccgcggagagagtgggtggagagggcgaggcgcgttcccgcgacgggggcgcgctctcgcgcgggctgccgggatcgctcgccgccgctgtggtaatgtccgccatgttggccatggcgcagggagggcggccgcgggcgcggaggagcgggccggccgcgctgcagaaggaggtggaggaggcggcgggagtcctccccccctccccgcccgccccgccgccgccgcc

SEQ ID NO: 4015 - DNA, 448 bp, Homo sapiens
  source 1..448: mol_type = other DNA
ggcaccgtgctaggtgctttaaaagcatctgtcttttaattcccccagaaatcacaagatgatattaactgagtcttaaggaaattaagacttcttaatttccataagtggctgaggagggtagaatccttattcagtatgctgcactatgtgctagatgcacactcagttgttctgccagcccggcggattcctccataatcttacaaaatccctgattctggttgattggtttagcactagatgccaacctaaactcttttgggatcaggatgatccacctccatccggttccggcttgggcagccagaccggacttgcaggctccttcccccggcaggtagagtgactacaagtcccgggatgcgcagcgctcggagtcgggcgggggccgggcggacctctacggtgacgtcaccgtcccggggcgggccaggggagggcgggg

SEQ ID NO: 4016 - DNA, 333 bp, Homo sapiens
  source 1..333: mol_type = other DNA
cagacatgaatgaacacagctctagaagtcacagtatcttcctgataaatattaaacaagattgtgcaatggtataattttctttaaagagcttttaaagtttctgaggctctgccaaggtgttattagatgggcccttatgatgatatgaggcaacagttggtttgacttagcctgtggcattgccattggaaggcgctccctgcattcccccatgccctcccaggccctggctggggctgtaccagtggaggcttctgctgccacatgtctggagggcaaggccatgtgcactccatcatcactgacatcatgctgattgtccccatgaag

SEQ ID NO: 4017 - DNA, 444 bp, Homo sapiens
  source 1..444: mol_type = other DNA
gaacacctaaaaataccattgtttttgtttttgcggttgtcaatgcttgacctcagaggtctggaaagacagattatctcattctgcagaagttctgtcatggaatcttgggtcagtggcccatactcagctgtgtttccacagtgcaaggctggccggacagtgtatcttcagaagttaatgtagacctcccacatcccagctgcctggctggcagtgggtggggtctggccgaggggaccagtctaacgctggacgcaaaagactggtgccctgagttttcaaagctctggtgtgcctctcctggggcttaccgactatatgaaattatcttatttatagcttaatgtcattatttaaaagtcaaaaaaggtctttcagagttcttccaatccttctaggaagaaaggggttggaccctcccctctttaagctgggtggggt

SEQ ID NO: 4018 - DNA, 505 bp, Homo sapiens
  source 1..505: mol_type = other DNA
tttccacagtgcaaggctggccggacagtgtatcttcagaagttaatgtagacctcccacatcccagctgcctggctggcagtgggtggggtctggccgaggggaccagtctaacgctggacgcaaaagactggtgccctgagttttcaaagctctggtgtgcctctcctggggcttaccgactatatgaaattatcttatttatagcttaatgtcattatttaaaagtcaaaaaaggtctttcagagttcttccaatccttctaggaagaaaggggttggaccctcccctctttaagctgggtggggtccgaatccgccgggctggctgggtgggaacaggctccttgccgcctccccagcgctggtgcggtttcccagcggagccgggcccggggctgctccctcgcgggcgaggctcacctgtcccggcccggccccctcccgcgccccaggtggttcagggcagggaggagccgcgccccgccccgcgcggtagcagccaa

SEQ ID NO: 4019 - DNA, 417 bp, Homo sapiens
  source 1..417: mol_type = other DNA
aaaaaagttaagacttattttctcctaccactttgaagataactactgtcagtttataagtaaataagtacaactgaacttgagaaaactcttcataaaaaagaagataactactatcttctgacttcagtgtggctgctgagaaattagctgtcagtctaattgctgagttgaaaatccatgtatgatagcctactgttggccagaagccttaccaataaacagtcaatgcatacttattttgtatgttatatgtattatatgttgtattcttacaataaatatatttaccattgataaagtgaaaagtacggataaaggtcctcatccttgtcatctttacattgagtcagctgaggaggccacacagttcaatctatcaccagttctagagaaaccctggccattgtgtcacaa

SEQ ID NO: 4020 - DNA, 594 bp, Homo sapiens
  source 1..594: mol_type = other DNA
ccgggcatatccgtggagtccccagaccttcctggggaccttccccggtcaccccggctccccgccggccccccgcgctgctcaggggagagtaggactataccttccactctagctctgcggtccggcggatttcgcggggcccaggggatggcggggagttggccagggtcatttcacactgccgggcctgcagccacgcacgcagctgctggcccggctgaggctggcggctagggagaggcgccacggtgcaccctgagcaaacactgctcgcttccaacgctcactgggaacaggcttcccgggaagtccgctcaccctgcgggcgggagcgcggcgcccgggtgccccacctgcgccgggcggtcggctcccgctggccggagtttgcagacttggcgctcaggccgattctcccggagttgggccgcgcgcgccgggccaatgagcgcgccccgcggagggctccgctccccccgcgcgcgctgattggtcccgcggccctcgaggccgggccggccgcggctgcgggcggcggccagtgcccggcgcgagtgggagtggcgcgcgcgcccctagccgccccccgcc

SEQ ID NO: 4021 - DNA, 311 bp, Homo sapiens
  source 1..311: mol_type = other DNA
gatctttgtagaactataaaacttttctgtatgacactgtaataatggtgataaaggttagcatcaacagtaataagtcatgttgatagtatatacccttgatgtgatgtgatgagaagatcactttaccttacctcttaactcaaagtttccggagcttatgggctttaatcaatttttaaaaaagtattagatacatgaaaatgatacacgatttacaaatcaatcgcctaatatttatcgagcatattgagagcctggcactgtcccaatggcaggaggcctactttgcgcgtgcgcatcatcgtttc

SEQ ID NO: 4022 - DNA, 315 bp, Homo sapiens
  source 1..315: mol_type = other DNA
gaacaaatgtgcgggctattctggtcctgctatagataaagaattaatagtattcccctcactgcaaatgtggggagtacgactgaaactgacaggtttcagaagcccatctggaataaagaggctgatctattggtccatggcctatgtacctgatacagataagcccctattaaactatatttaaagggattgtagttcaaatcattgtctaagagccttggtctaaaatagatcccgaatgggcaccctagagggcgcactgctgaggaggcagatcagtttcctcctctcattgagaaagaagaggattgg

SEQ ID NO: 4023 - DNA, 590 bp, Homo sapiens
  source 1..590: mol_type = other DNA
acactgagagggtatttagggctttaatgtactaacaccaaatgaaataatatttgccttcacattagtcactgctcagtcacttagagatgtaaattgcagaagatatacaacttgtaaaaattatctcattctttctaattggattgtgaaatatctaacaccagctccatttttaagaaacaaatactgccagtgttgccttctatacatagtgagtaaattaaactcgcatttcttttaacgagataaagtttgtcacatacccacagaattcatgaggaagttctgaaaggatcatacactcccaaaatttgcagtgaaaacgatcttagataatgtctttttcatagcactcaattatatgtaaggaaaagaaagactcattgtatctacctcgcacgagaaaataaaaccaggatatttacatttcccatacttctcatatggaagaaatgcttttggttccaagtactgttgtccactgaaatatcagcatacatgtttggaaagttttacttgtgtgaaataattaaaatccatggtttcatgatgcctttggctgtcttatatcctgtgtctaaaataca

SEQ ID NO: 4024 - DNA, 522 bp, Homo sapiens
  source 1..522: mol_type = other DNA
cagggctttttaaaactgatgttagaaaaacttgatttgctgttgtaaaaaaccatcttgaagtagaaattgatatcaataacatgatagagaatacgttctaaaattctggcagaagtttaatatcctagatggttagtttgaggctccatggaaaattttggacagttatctggagaaatattacagtgcgctcaaccaaattgaaatgttttcaaaagtgttgtaaagtttcatgtagtaaaaaggttttagccacatgcccttcaatttcatggcatcgaatataagagcatgcatgcaagatatttaactcccttacatgataatgcatgcgattcaaaactataggaagcggccaccacctactattgctgcttagcaaatcacccagagaattccttctgtcgagcagagtgcttccacaagttgcaaaactacggagggcgtctgggcaggcgctggcaacagcactcctgagtccgagctcccactcagaggccacgaggtcgcagaacagcc

SEQ ID NO: 4025 - DNA, 587 bp, Homo sapiens
  source 1..587: mol_type = other DNA
tcaccactttaaactggttcccatcaacctttttgatacaaagaaattttacttttgttaaactattttagaccactgtatcagttattatatgtgactaggtagcatgataacctataatttatgccttgaaataattttgactttgaaataaaccagatgtttgaattttcaaaggaaaagttcacacctagtgaagtatttatttacaagtgtaaacatttgtcaactagtgttacaatgactaagaaattacacttttccaacataccttataaaatacatgcaaaaaactggttttagaaagcgttccctaaaattagtgtgtacggaaacttcaggtatacttcctttttaaaaatcgaaagtgaaattagtttttttttctgttagtgactaatcattggagacaaccatgtttagtatttgagcattggttaaatgctaaagaaaaatcgccgttaaagcagttttctttttcactggctgttcctgcgagggccacctcctcaggaagaccccgcagctctcccgcggcgcttctgcaggaggcagcgacagtttcgagaacccgggccttcccctcg

SEQ ID NO: 4026 - DNA, 509 bp, Homo sapiens
  source 1..509: mol_type = other DNA
tgaaattttactgtcactttgcttgagcaattaatcacttgaatcatttccttctctgtgttcccatagcacaaaggacatatctctactatgcgtagtgtaaggtgaataaatgttttaagcacttttattctcccaaagtgttgggattacaggcacaacttgccctctagttgatctttgattacttttgtgatgaaacattaaacaatatgatttgtatagtaatgactgtttgtgttttaaactgaccatgttttgagttcagttcaattctattattatgattagtgtacttatcttgcaaaatattgcactgtggtaatatgattaagttatttcatcagaatatagtattaaagctataatatgttcctggaaaattgtagtggaaactactagtaagtccaataaaaatttattccaaatgacgtgtttgctaataaatctggagaaaatttgaaaattccctgggagtcagcagaaaatagtttttttttttttcctga

SEQ ID NO: 4027 - DNA, 447 bp, Homo sapiens
  source 1..447: mol_type = other DNA
gtctgataagcacaaagaagtcgttttttttacttagaaatgccatggccagagctccctgtaatcccagctacttgggtcaccactttaaactggttcccatcaacctttttgatacaaagaaattttacttttgttaaactattttagaccactgtatcagttattatatgtgactaggtagcatgataacctataatttatgccttgaaataattttgactttgaaataaaccagatgtttgaattttcaaaggaaaagttcacacctagtgaagtatttatttacaagtgtaaacatttgtcaactagtgttacaatgactaagaaattacacttttccaacataccttataaaatacatgcaaaaaactggttttagaaagcgttccctaaaattagtgtgtacggaaacttcaggtatacttcctttttaaaaatcgaaag

SEQ ID NO: 4028 - DNA, 511 bp, Homo sapiens
  source 1..511: mol_type = other DNA
cggccaacaaatgtattctttgaaaacactcctgttctggaaaacaaacatagcagttatttcactgaatgtatagaccaatcagcatcagaatggtaatttgtaagaaccatacagcctggtactaggaagaaatttgaattcaggtgaatccctctgagattcccttgtgactttatcgtgcatttctcaaagaagtcctcatcaagtatttaattggattatcataatacagataatgtttttaattttggaaaattagttttgagtacaccacaactggtctggaatatttccatttaaaaaaaggtatcaatggcagtggaattgcaaaccaattggccacgcatgtgcacatgcacacaggctgcctgagtgcctgtgtgcacagaggcacacagttttctgaaacagaaaaacattccaggagacagtgatgcttttaggattttccaagtggaatttccgtcagaaaaaggtgcacagcaggatgtgaagatctctctgctct

SEQ ID NO: 4029 - DNA, 619 bp, Homo sapiens
  source 1..619: mol_type = other DNA
gcaaaaaatgaccaattttgtaaaaaaatcaaaagttgccaataaatggctattacatgatgactttactgtaataattattatctattaccgacaagtttttattaactttgttagtctacacctttctcccaacacttcaagaatttgtggcctgggaaaactgtgttataataggacatcccaaagctgctggaacatcctgacgctctgagcgatacatttatttatggagaaaaattaggattctccaagctgtgcatactttttgttttaaattttttacacaggcttgacaatgtttagaaaagccagtccaacattaccaataaaagattagtgtttaaccccatatcccataattgacactgcaaataagacatttaggatttatcttgaaattcctactgaagttcgattttcttttaagttacacaaactttctaacagaaaagtgtttgtgactaacaataaatgaactccgttcttagtaagttaattttaaaacatagatgatcattctatctccttagttttggttgccaatgcaaatgagtcagaggatttgcttcagacactgagataattgtgtaactcgttgaaaaaaactatttaaaag

SEQ ID NO: 4030 - DNA, 346 bp, Homo sapiens
  source 1..346: mol_type = other DNA
tgcatagtttaataaaatatccccaggccattgttatgtacgcttaacacctattaaaagccctattttatagaggaggaaattgttaactagaccagctggaatctagaccagcagacggagtcttactcttaccagtggcgtgatctcggcccactgcaatgttggccaggctggtctcgaaaggtgtgagtcacgctttttgctaactgatttgttgctaaaacttcaacaagcactggacttggagtttgaacacttagtctgagggcccactatgttcagtctagtgagtctgagcaagaatccaccacctgatgctcaccagaggggcgtgacgggattg

SEQ ID NO: 4031 - DNA, 368 bp, Homo sapiens
  source 1..368: mol_type = other DNA
accagctggaatctagaccagcagacggagtcttactcttaccagtggcgtgatctcggcccactgcaatgttggccaggctggtctcgaaaggtgtgagtcacgctttttgctaactgatttgttgctaaaacttcaacaagcactggacttggagtttgaacacttagtctgagggcccactatgttcagtctagtgagtctgagcaagaatccaccacctgatgctcaccagaggggcgtgacgggattggggcccgcccagccgccatcttggtctaggagggagcgcgccgccgggtgacagtggtaggccgcggggaaccctcagtctgcccaccctccgccccctcgcggcgagatgcctc

SEQ ID NO: 4032 - DNA, 543 bp, Homo sapiens
  source 1..543: mol_type = other DNA
gatttctgtcgctgtgtgtaaggacagacagacagacagatagaattagattttaaattagaaaagttttaagaaaatggttagataatttttatgaaggaaatgtcttacgttcgattgccaaatagggcattatttataagttactgatcgttgcttctgggagccaggagtcatctcactaactcggtttataccctcttggtttagtaacagaaaaatgatggggtctaatctttctaattacacgtcaaatattttactcatcacatttttaaaaattgcttttgtcaacttgatgtttaacttacctgtagctcacctggtgaaccttacccatgcttattttctactaaattcttttgcatgaatatgacattgaatggggtaaatgggaaattcaacctaaaattgaacaagttaggtaaaatttgattccatttgaattgttctaagcaagcaatttgttaccaattgatgaacaggtggttttcagaagatcacttggtaaatttagcttctgaaatttgagcaactcaagat

SEQ ID NO: 4033 - DNA, 291 bp, Homo sapiens
  source 1..291: mol_type = other DNA
tcacaagcccattgcttgtttaagcagggccactggagggacctcaaaaaccctgcagaatttacttgtgatggagttattcaggcacttcttgaaacacttgaggatattgattggtctgaacggttctcaagctttttttgttttaacatcagaatcacttggtgcaaaagtgggtgagggctctcttctcacaggtgtggtcccagaaaaaaaatgcaaatttgtctctttatctagttgcacaaaatgggagtgaatgcaaaggacagtcagtaatatgagactgtg

SEQ ID NO: 4034 - DNA, 616 bp, Homo sapiens
  source 1..616: mol_type = other DNA
taatttatttttttctgtatttttagacaaaaattattttcctattaaaagtactttaatgaacagttttgtatgtatttcttttttgggatacatttctagaagtagaaaaaaggatgcagagtattgatattttaaatatttttgatacgtattgccagatatatttttgacatatgttgcttattgcataattataaagcttttttaaagtgtcagacaaactgaaccaaagatgtattagctgggtgtggtcacacgccaggaggtcacggctgcctgtgccattgcactccagcctgggtgacagagtgagaccctgtctcccaagcactgaatattattgatttttaaatctttgttatttagctaaatgaaaaatgctctcttttagtttagttcagaatttaatcaaatgattttgttttctttatagaacgacttaagattagatgatctctactgacctcttctcataataaatgaagtgctgtttaaagctgcaaaaattaatggtttagatatatttataataaactgatttaaactttttctataagaagaaaaattaagaccacttatttgaaaacaaagatgaagtctcaccttccagttt

SEQ ID NO: 4035 - DNA, 580 bp, Homo sapiens
  source 1..580: mol_type = other DNA
ctgaaaattaacagttttattaaaataccttggaataaaatctatcagtaagctgtcaagtgagaggagaggtaaagtagcagttctctcatacatctgcctttgaagtctgaataattgaaaagatccagaaaatcataataatttatttaaaaattaagatctaggtcccaaaaataaatagttatcataaagtagagctcctgataccagtctcatcatcagtttatgaaggggttagatagagatttattctgttcagattgatattaataaataatatctacctggaagtaataaattcaggatcatattgcatgtttttcttgttgatttgtagtgcaaatagatagatataggtccattagcattagtttagaaaacagacatgcgttatatatattagttagaatgttaatatcatattctcttttctcttaaaaattagtaaatatattaaaatcgatcagactaagattccaatttcttgatattaatagcctgtatgtcaaataaacacattataaattttacagataccaaattgtataatcactaataatttttttgtaattatttt

SEQ ID NO: 4036 - DNA, 275 bp, Homo sapiens
  source 1..275: mol_type = other DNA
ggctcagaaatcacgggagtcgctgccacttaagttccagttagaacctcattgatgtaatccaatgtgaaacatttatactttaagtcatttgtaaattactgagagtaggcttgcctaggaacttctgagaaagtataaagtgccatgcactgaattatgccatagatgggtgagatacagagtatattttttcctataattaatctttttttttccttttttgaaaaaaaatcactggtgttttctctatttcagagcacaaagttatcatt

SEQ ID NO: 4037 - DNA, 437 bp, Homo sapiens
  source 1..437: mol_type = other DNA
tggttatacaaactacattgttcttctaaacagtgtacagaatattaagtaaatccagacatgataatacataaattaatatggattactatgatttctttttaaccataaagccccaaaagaagtcaacgaaattacttttctatattttgaggtaaaatacttctttattttcctttttactaaggttaacgagaacagaaaggaaaggtttttaaacagggtagtgacttgatcaaaatcgttgtaaggccactgacttcagctgagtgtcagagggcagcagacttttccctccttccgcacaaataagcgaggacagggcgggcgccctttcctacgctccgcccctctggccgcgcgcctgcgcactcacgtccccccccgcccgcgtggtcgtcgccaccgcagccgcccgagaggagctgggggaggac

SEQ ID NO: 4038 - DNA, 448 bp, Homo sapiens
  source 1..448: mol_type = other DNA
tgaatttagctggctacttttagagtgggccaaaatggttgaccagaaagttctaagtacctagagaaactcatcaggctgctggtgggacctgtcctagtggctgttgcttaaagttgatttaaaaacattcaactaaagagcattaaacatttcacatctaaaagttgagaagtttttggcttcctttaacttcacatattgaaaacttttactatagaaattcccacaagaaaattgggtgtaaagattttttttataaatgcatctttacatgatattctctgaaaataaaatctcccttctccaattgtgaatttaattaagaagatgagcattgataagtgtttattgtagaactaacaatacagttgctgggtaggatgctccgaggcgccctccactctccggaagcgccaatcagaggccgctttcctagctcagtcac

SEQ ID NO: 4039 - DNA, 536 bp, Homo sapiens
  source 1..536: mol_type = other DNA
atgaccttcaaaactccgtaggacatactggtctttggcggggcagcatctcccgtcagactcaggctggctgggtttctcacagctgcctggatgtgtgtgactcgcagctctttaaactgtgcagactgcgcttgctaggtgggagagcgcttctcccaatccgctcgggtaggcgagtttccgagaagccccctccccgggaccccgccgcgagcgcgggggaagcgcctcggtccctttaaggtgccgcgctctccgaagtgcgggcagggagcctgggcgccggcgcgggtcctggagccgggtggggaagtcctgcgccctccccctccgtccgcagcccagcctcgggggccagccccctccgcccaccgcacacgggctggccatgcggcggcacgatgtcctcctcccgccaagaacgggaccgcggacgggccgcactcccccacccgccgccctagcgcgccccgccttcgtgccgggcgtgcggggccccagtcccgggagtcggcggccccgctccccccacc

SEQ ID NO: 4040 - DNA, 417 bp, Homo sapiens
  source 1..417: mol_type = other DNA
agatagtaagtatattttaatttaaacggagtctctttatttttgaatttaaattaatctcatgaccttcaaaactccgtaggacatactggtctttggcggggcagcatctcccgtcagactcaggctggctgggtttctcacagctgcctggatgtgtgtgactcgcagctctttaaactgtgcagactgcgcttgctaggtgggagagcgcttctcccaatccgctcgggtaggcgagtttccgagaagccccctccccgggaccccgccgcgagcgcgggggaagcgcctcggtccctttaaggtgccgcgctctccgaagtgcgggcagggagcctgggcgccggcgcgggtcctggagccgggtggggaagtcctgcgccctccccctccgtccgcagcccagcctcgggg

SEQ ID NO: 4041 - DNA, 370 bp, Homo sapiens
  source 1..370: mol_type = other DNA
atttgagtttatgactcgtactaccatccgaatcgtcataggcagggagtgtgcctccttcgcctttggagcagtcaggcaggactgtaacgcgtacgcgtcgtgggtcgggtaaccgcgccccctgccgcgccgccgctggcactgcagcttccggggtcgtccagttccaggcgggactacttccggctccgaaggtccccggcttcgtggctagccggggtcctagcgctggaaaggtggccgtagcggccgcctgacccctacaaaagtctgggacaggggcagcgacaaaggccttgggaggacgcccatggtcggagggatctcgccccggggtggactccgagccggcctgtcaggcaagagc

SEQ ID NO: 4042 - DNA, 341 bp, Homo sapiens
  source 1..341: mol_type = other DNA
tctttatactagagtttgtaaaatggttttgattaatctattatttaaaatgttggagtaattctcaacatttaaacatcattgaaaaattgcaaccacatttcaataaatggctgcaatttaccagtagttgacatctttagatacgcactgttcagttagaaagttatttgagtttatgactcgtactaccatccgaatcgtcataggcagggagtgtgcctccttcgcctttggagcagtcaggcaggactgtaacgcgtacgcgtcgtgggtcgggtaaccgcgccccctgccgcgccgccgctggcactgcagcttccggggtcgtccagttccag

SEQ ID NO: 4043 - DNA, 417 bp, Homo sapiens
  source 1..417: mol_type = other DNA
tggctaaagtctcttataaggcttcttatcccatacataataggtgtttgacaggttttttttttaaattgaattgaatccttacctagctcctagggtctgactatatatacccataaattatacatctgtttataaaacatttcaagaagttccttactgaactagatcttttaaaaacagcaacgattttctgaattttaatcagaaggcatgcattccttcattcattgattcgattccgacatgagacaatatgctatctccagagactacggatcgcctttgccaacccggcctggcgctctagagcaggcgtggtttctgcgcgcggacactttgactacgcgtcccggcagtccgcggggcgagtgggcggagccgggccgggggcgggggccgggcgccgggcgagag

SEQ ID NO: 4044 - DNA, 445 bp, Homo sapiens
  source 1..445: mol_type = other DNA
ccgaaggctgtcgagtatccactccctgcggggcttcgtcccggccggagacctccgcgcgacgccgggtcctagcgcccgctcgcgccctcggagacggcgcgcgctctccacctggtgcgtacggagatcaccgcgcgcgcgcacaccctacccctggcggcctcaggtttgtggggcgcgggcggggagggtgaaggtggcagacccccactgccccaccccctacggggtgaggcggtctaagctcgggatcttcccttcccctggggaagttggtagagttttcccgacggaggactcggcgcagaaacttcctccgtcctcctcctcccccccccccatgcaggcgacgccgagtgaggctgaggctgggggcgaatcgccgcagagctgcgtgtcggcggcgcattctgattggacagcggggaagcccgtcagcctg

SEQ ID NO: 4045 - DNA, 436 bp, Homo sapiens
  source 1..436: mol_type = other DNA
ccgagggccgtctcctcaggaagccgtcagcagaagaggcttgagccggacaatctccgctccccgtccccaggaccctgcgagggaggatgtccccggcctcatcgtcgggctcagactgctccgccggcggccacaggctgacgggcttccccgctgtccaatcagaatgcgccgccgacacgcagctctgcggcgattcgcccccagcctcagcctcactcggcgtcgcctgcatgggggggggggaggaggaggacggaggaagtttctgcgccgagtcctccgtcgggaaaactctaccaacttccccaggggaagggaagatcccgagcttagaccgcctcaccccgtagggggtggggcagtgggggtctgccaccttcaccctccccgcccgcgccccacaaacctgaggccgccaggggtagggtgt

SEQ ID NO: 4046 - DNA, 390 bp, Homo sapiens
  source 1..390: mol_type = other DNA
gacaggtaaaattccttctgccaaaaatacattttcaaagactgaggttctgtcactcacggacactaaatgaattcatcctttttaacgcagtttaaaaagacaactacttcattgttctatgttttaaattaaaaccacctagccgctgttaaaccgagggccgtctcctcaggaagccgtcagcagaagaggcttgagccggacaatctccgctccccgtccccaggaccctgcgagggaggatgtccccggcctcatcgtcgggctcagactgctccgccggcggccacaggctgacgggcttccccgctgtccaatcagaatgcgccgccgacacgcagctctgcggcgattcgcccccagcctcagcctcactcggcgtcgcct

SEQ ID NO: 4047 - DNA, 421 bp, Homo sapiens
  source 1..421: mol_type = other DNA
gacctggaccggccaccgccgaggctgggctctgctgcccgcggccgcgggaacagaacgggcgacccgttcccgtccggcgggagcaccgagcgctttctgggctctgaccacgccccagccgagaactccgcccgcaggtcgcgggccacttggtcgcatctggccgagccacagggcccggggtgccgggaccgcggcgccgcagagccgaccgccacccgccccgccccgggtccgcaacagccaatccgcggcagtggccgctaccaccaggcctcagagcccaggggttgcgcttcgaccagagctcgaccccagggccgaaggctgtcgagtatccactccctgcggggcttcgtcccggccggagacctccgcgcgacgccgggtcctagcgcccgctcgcgccctcggagac

SEQ ID NO: 4048 - DNA, 299 bp, Homo sapiens
  source 1..299: mol_type = other DNA
gggcagcatcccaaagccgcctggctgacgttggttagggtagagacgccctccctaaaggctgtccgccggagcctggcacggaagtgtaatcttctccagacggctactgtgcctgaggctgggctccttctcagtcgccctggccgggagccagactcctcaccgccgccccgttcccccctgctggggagcgcagaatgacttaaatgttgcatttattaaggaaatgttaaataagaaaagagcacttttatttatcgcccctcccctccagggcagggggggagcaggagaag

SEQ ID NO: 4049 - DNA, 419 bp, Homo sapiens
  source 1..419: mol_type = other DNA
ggaggaagtttctgcgccgagtcctccgtcgggaaaactctaccaacttccccaggggaagggaagatcccgagcttagaccgcctcaccccgtagggggtggggcagtgggggtctgccaccttcaccctccccgcccgcgccccacaaacctgaggccgccaggggtagggtgtgcgcgcgcgcggtgatctccgtacgcaccaggtggagagcgcgcgccgtctccgagggcgcgagcgggcgctaggacccggcgtcgcgcggaggtctccggccgggacgaagccccgcagggagtggatactcgacagccttcggccctggggtcgagctctggtcgaagcgcaacccctgggctctgaggcctggtggtagcggccactgccgcggattggctgttgcggacccggggcggg

SEQ ID NO: 4050 - DNA, 307 bp, Homo sapiens
  source 1..307: mol_type = other DNA
tttacggcaagttattgagttaaaaagaagcccttttcatgtcagtcttcattgacttctggaacattattatcaagtccagtgatattttatgttacattttaatgtaaacatttggtgtggaacattgaacattaaagcactgaagcataattttttaaggaatttgtgctgtaagaaaaagagatgtgattcctctagtctctttacaaagtttgttgcttggcaaagaatctcaacaaaagcaacaggattattaagattgttgccctttgtcttcagcagaagtctgcaaaattgttacaaa

SEQ ID NO: 4051 - DNA, 462 bp, Homo sapiens
  source 1..462: mol_type = other DNA
gggaccctgtgtactcacacatgctgctccataattgacttaatacagttattaacatagaaatttaaatgatacttgactcacgaaaagatataaagataatatctctggaaattgcctttcatgagtataatcaagaatggcattgacatactagattatgattaatagtatcatatgtttgtcaaacgtggcggcacttgaactcggcaatcccaatttcctagaaaagttcctctcccatggcagtggtctttgagacgctaataatgtccgtcttaggtttgccaggcactgttctaaaatctttacatgtatttaaactcagtacattcatacgtccaggtacttcggagtgggtgtgtgtttaatatcataccataaaaatttgagagccacaaggaagcgctctgtgtttccagtactcttacagtgcgttcggtggcagtagtcaccgccctg

SEQ ID NO: 4052 - DNA, 480 bp, Homo sapiens
  source 1..480: mol_type = other DNA
tcccagcagcttgggaggtggaagttgcagtgacccaggatcatgccactgcactccagtatctgattatctcttattgtgtttaaggcactgcagagctgtgtaatgtacattaccttatttaatgcttgataacaacactcaaaatgggtgctatttgcccttatattacaggttaattaccttgtttgaagtaacataaatagcaagaaaatgaactaaatgcacattctttattctgagtacagagaaaatccaaggactgtgacataataggctttaagaagttagtgaatgaggatgagaagcacattttacaaattggtttttgaaatacttttctgagttagtactatcagaatactcctcctccagttttgcctaaattagatatcacctgaaaaatgaactgtttaaggtcaaatttaaaaattatcttcttatgctttcccaccacaagatctgatggttttataaagg

SEQ ID NO: 4053 - DNA, 609 bp, Homo sapiens
  source 1..609: mol_type = other DNA
cgcttctcgctcgcttttcctgagctgccagacactgcaggctcaactgaggctcgggcggggctagcgcggctctgcagctgatcacacgcacgcctcgcatcttccacccggggccaccgaggcgctgacaaggactagagcggcgctactgtttaacctgaaagtctgaccggcagcgtccagcagcaccgctgtcgcctggaaggcacgagccccgctcgagtcattctgtgctctgtgcgccaaggatctttctggcagggacagcgcggtgccctcagggaggtgcggagcttgggggacctgcattggcgcccatcgtggtacactgcgaggccaggctgccgctaccgcccgctgcgccgcctcctgccctctcccgctgggtgagtgcccaggcttcgcgcactgccgtgtctcagctgagcgcgggggcggcctgcgggcccttgagggtccgccggagggccccggtggcgcccgcggaaactcggcggtcgggggacgccaggcggacaggtctctggagtccggaacccgggaatctgagcccggagggcgtgggttgcaccagtgcccggcagacatgcctttgggcggattttg

SEQ ID NO: 4054 - DNA, 346 bp, Homo sapiens
  source 1..346: mol_type = other DNA
tcagagtacctttctgcagaaggcgcacctgttgcctgctgctacccccactcccattccctttcagatgggagtgtggggggtgggggggcgctgcaaggcacatcccattccgtgcggctccaggtgcgtactacctggccacgccggctccccacatgtgagcggccgagccgctgcgcgggcgcaggggcttcggggaaagtgaagtgtcgcgacgctgcgggctgcgcagacctgggagaggagagcggttcccaccttaaaaaggagtccagggagcgcggcagcgcggcgattgggcggcgggccgctgacgcgcgctgacgcgcgtggcagcggcagc

SEQ ID NO: 4055 - DNA, 446 bp, Homo sapiens
  source 1..446: mol_type = other DNA
gtaagtagctcccagttttgctaaactttataaattttgcttcctccagacttaaactacaaatagatgtagaattttaaatgtagctctgtagttcaatttataccacagaaattgcgagatgctatcttcctgttgttataacgtcaagggatataaattgtaccaggtaattcattttgctgttcagttcctccaaaggaaccatatggcaacatgttgcattccgtatgcgcaattagcgccattaagatcacacgaatgctttattaaagtttaattttgaactcccaattagcgaaagtgcattacaaatcgattgcaatttcctagaaggtgcagcaagttagcttccccagctccgggcagcagaaaggggatggttcagagcgcgccagcccctcctcccgcagggcgggggcgtccacggcgcgaacccgccagag

SEQ ID NO: 4056 - DNA, 373 bp, Homo sapiens
  source 1..373: mol_type = other DNA
ttacataaaaaaacaaactattaattgtctatagattgttcttcgtatcacaaattccaggaacatggggcctgataaattttgcataagagtctgaatcaggtagttttaaaataggacttggggatggaaatctggcattccacccctcagggtgagaatcattgctcctctgtggactatggatggttcccgggatttaataaatatatgcattccaggaattctgggtatttaaggacattaaatgagtgacttaatactttatttaaaaaaataccactgcttttttcctggatattttccaagaagtggggtccatttgagccccaactttgcctcttaacaagtaagctgggcatgctcagtgggc

SEQ ID NO: 4057 - DNA, 689 bp, Homo sapiens
  source 1..689: mol_type = other DNA
agtaagctgggcatgctcagtgggcactgctgttcagctgccgtctccgcctccccccacctgtatgaggctgggtctggggaacctgtgctcagcattccaccccctgcgggtccctgcgctgacattcaggcggggagccaggaggcctggcgcgcctccagagcccgccgggggagccgggcgagggttctgggctctgacggcggggtcgcagggtcgcccgcctcctggacacgtctgtaggcctagggaagcctgccggccgtcaggtaagccagccccgccagcgtgccggcggacgagtgtctcctctcccgcaggcagatggccagggcggcccgcatgggcgagggcacaggaaatgtcttccccagcctggcctagctcaggctttccagtccgccagcccgctggcaaggcggggcggaggtctggagtccggcatcgccgaggcacaaagcaggaactgcagccaggggcgagggcccttgcgtgtggcgctgcgcgaccccacccggcggcaggacccgcgtccccgtcccgcgtttccccgctgggccggaggagcctgggcccgaggtatccgggcaggaggtggcggcctcgccgccctggtcaggcctccgggagggagcaggcgcgggagggaaggcgggggcgcggcccgcccggcgctcgagttacac

SEQ ID NO: 4058 - DNA, 424 bp, Homo sapiens
  source 1..424: mol_type = other DNA
tactagtagatacttttcattgccttggagattaacccaaatgccaagggactgaacatttgggtgactttgagaatagggccttcttttgggagtgacaacaaaatctttggggaaatcccccatttcctcaaaagcacagtacctgttacctagtaaataataaatggtggtgattattattgtaacattcataacaataacaacactcataatgataatcaaagtcagaaactggctgattctcaagcatacattatttttttaaattatggaaaaaggaaaactctttattgattatagttgatattattgctaagaaaatatcttcctttgcaagttttggtctctgacaaatcaaacctctgagaatgaaacattttcattgactgcctttgtgaggtcaacaatgacattatcaaca

SEQ ID NO: 4059 - DNA, 531 bp, Homo sapiens
  source 1..531: mol_type = other DNA
aaaatatatatatatatatatatatatatatatatatatatatatatttaatacaatatcagaattgctggtccaagtcctggtgtggtcctgaaacgtagacgagataagtactgaaactgagagtaagtgtatcttaatctgttcaggctactatagaagaataacatagactaagtgactcataaacaacagaaacttatttctcacagttctagagacagaagtcagatgatcccattcatgagggctctatccttataatgtttatgattaggtttcaacatatgaattttgggtggacataaacattcagaccataacaaagtgtttagaaacttttatagcagtatgacaaattaagtttatttgtaatcaaatgtaataataaaaacagatggcttacaaagaaatacattgaaaccccttgaatgaatgatctaaataattaaacatatacatctcttctttaagctgttatgtcttaaagctgaaatgttaacttcagtgataaattcctgccctccaagt

SEQ ID NO: 4060 - DNA, 494 bp, Homo sapiens
  source 1..494: mol_type = other DNA
ctggtccaagtcctggtgtggtcctgaaacgtagacgagataagtactgaaactgagagtaagtgtatcttaatctgttcaggctactatagaagaataacatagactaagtgactcataaacaacagaaacttatttctcacagttctagagacagaagtcagatgatcccattcatgagggctctatccttataatgtttatgattaggtttcaacatatgaattttgggtggacataaacattcagaccataacaaagtgtttagaaacttttatagcagtatgacaaattaagtttatttgtaatcaaatgtaataataaaaacagatggcttacaaagaaatacattgaaaccccttgaatgaatgatctaaataattaaacatatacatctcttctttaagctgttatgtcttaaagctgaaatgttaacttcagtgataaattcctgccctccaagttcacataacacagaaggtgagagagaaacg

SEQ ID NO: 4061 - DNA, 454 bp, Homo sapiens
  source 1..454: mol_type = other DNA
atatttaagcttaaaaaccattttgtactatgagaaatccaaaaaaagctatagactaagtaaattactctgaaattataaaacttttggtattagcaagttggtagaatttgtttacctgctggagccagaaccatttacagtaaagttgtcctgtttacataagctgttttattttttaataaataagaaacaatgccattgtcctttacaaaatagctgaggttttacttgaacaaaatctgtttggaaatgttaagctggttacacagtcctgttacagacaatgggccattatgaaaagggacaaaaatctctgttcccagagggggactgacaagctgaaagtccctcgcttcagattgtttgtttatgtaaatcaaaaggatgcctttgcaagcaacaaagaaggtggtgattggctggattcttgctcattcctggcagatctgac

SEQ ID NO: 4062 - DNA, 407 bp, Homo sapiens
  source 1..407: mol_type = other DNA
ttcaaatgctagtattgatcttcagagattttaaaaagcacatttgactttttgtgccatataaaaccaggtggcaacattgtgcccttcccattgtactttgtaaagatcatgggtaatttttgtctttttgatgaacattaatgatctacacctgtaattcttgcccatattcacaagaactgagacttctgcattgcattgctaatgttaagtaagagaatggatgggaaacaaatggtagcacttggggacatttttctttcttctctaaagaaaaaaatggcaaaagaattctggctgtttgaggtgaaaaaataagttgatttttctttaaattgtaaaaattagctccaggttctctcaggagctagttcctcaaaccacagaggtcacatgggctcttt

SEQ ID NO: 4063 - DNA, 512 bp, Homo sapiens
  source 1..512: mol_type = other DNA
tcaaaaagccatgcattttttaaaagcactactctaaaatatctggagtccgatgcctaaagaataatttagaaacggcatcctgccattttgtcacatcaaataaaagagagatcattaaaggctgtctgcatcaccaaacatgcttgctcatctaattaatgatttaaaaaatacagattatttatataaactatttggcaccatattgtttatggcttctttgaattgctattccccagttcctaaagtggtaatgagatttataggtaactttaaaagtttttcttgaagaatggagcacattgcacattccattaaacaatttgggcaaaatagctagtgtagccaagtgcttagggcccctaactgggttggcgagcccataggagctcctccacattcaatatagctgaggaataatgaaacaatgaatgcattcttttttttctagcaataaagtaataattgcttcgcaaagtggccctcccccagctctgtgcagggtcaat

SEQ ID NO: 4064 - DNA, 419 bp, Homo sapiens
  source 1..419: mol_type = other DNA
tcccattcactttaatgttcaggctccataggtgaattgaatttaatttctataaataaacaatactcaaacaagtttttcatatactactttaaacaacttcaattgctgaagttgtagacgtgggtcatggccacatcacctggcgcaggtggtccagctttggtcgccattcatagagggaagggttcccaaattgttaaaccaaaggaagcccgcggggctctcacagcgcaacctggttggggggcttttccttgagaagccccattcctgagtacccggaggctctctcactgccgggcacagggccgcctttgcctgcctgccctgcagcagcaggcccgggcggctgcgagagggcgcagggggcggaggcgcggcaggggcgggctctgccgcccgccccaccacccgct

SEQ ID NO: 4065 - DNA, 523 bp, Homo sapiens
  source 1..523: mol_type = other DNA
cttcaattgctgaagttgtagacgtgggtcatggccacatcacctggcgcaggtggtccagctttggtcgccattcatagagggaagggttcccaaattgttaaaccaaaggaagcccgcggggctctcacagcgcaacctggttggggggcttttccttgagaagccccattcctgagtacccggaggctctctcactgccgggcacagggccgcctttgcctgcctgccctgcagcagcaggcccgggcggctgcgagagggcgcagggggcggaggcgcggcaggggcgggctctgccgcccgccccaccacccgctccccgcccggctgcggggccagtggcaggagcgccgcgcaccgccagccgcagggggcgtgggatgggggcggccggggaggggggcgcccacacggtgtcggtgccgcgctcccctcccgcggcccgggaacttcaaagcgggccgtgctgccccggctgcctcgctctgctctggggcctcgcagccccggcgcggccgcc

SEQ ID NO: 4066 - DNA, 751 bp, Homo sapiens
  source 1..751: mol_type = other DNA
ggtggccgcccgcagtcgccgggcccgggatgcccgcccgtccgcccgcctgccccgcgcgccctcgggagctgtccagacggccccgcccgcgcctacctgggcacggccacaggagcccagctcgggcctgccccgccgcctccgaggagccccgctggcggcgcgctcatagcttccacccgggccaagcgaccggccagacagcgccaggcgcgccgggggcggcgcggtcaggctcggcggggctcggcgggctcgccctcggccgggcgcctgcagggggcgcggggacggccccgccccgccgcctcctctctcccctcccggctccctggatccgcgccgggaggaaatgatgctccggctcctgctctttgcagccgccgccgccgccgcagcctccccctcggcgcagggggaacttgtgacggtctcccccgccgcccccgggggcaagcccagctggtccgcccgccccgcccgcggtcgtgctcccagcccgagcctctgctcccccgggtggctgccgctgccgccgctgccgctgccagcctgctcctcggccagccgcgccggccccagggccgggaagctcccggccccacgcaccgctccgctgcagccaccgcagccgccgccgctctgggccggccctcggcccccggctcccggccccgcagagttccgggctccctcgccggctgcaccgccccgccccgccccgcgccgccccgcgccgcgccgacct

SEQ ID NO: 4067 - DNA, 527 bp, Homo sapiens
  source 1..527: mol_type = other DNA
ctgtacattataagcttctagaggggcaggaaccatgcaaaatttgatccttgcatgcactctctgcagcgagctctgtcataaccctagaccttgcaaggaaatggcctggatgagaatgctaaggcttctctctgagaatccagcccaagtcagggctcgagtaggtggccgcccgcagtcgccgggcccgggatgcccgcccgtccgcccgcctgccccgcgcgccctcgggagctgtccagacggccccgcccgcgcctacctgggcacggccacaggagcccagctcgggcctgccccgccgcctccgaggagccccgctggcggcgcgctcatagcttccacccgggccaagcgaccggccagacagcgccaggcgcgccgggggcggcgcggtcaggctcggcggggctcggcgggctcgccctcggccgggcgcctgcagggggcgcggggacggccccgccccgccgcctcctctctcccctcccggctccctggatccgcgccgggaggaaatgatg

SEQ ID NO: 4068 - DNA, 563 bp, Homo sapiens
  source 1..563: mol_type = other DNA
ttctaacatggagaactcagttaggatatgagcacttgattcttgactgtgatgcacattcttggaaagaaatccaagcatatctttcttgaagctctcaccagcatagaacttcagctgattgctagatcaggatttgtctagttttctagatttttctgtcccaaaaagtagtgaattcatgccttgaaaatacgtattattattccatgtggattaacccctggttcaataaattttaccaatggcctacagtttaactaaagaaagaggccctgggaaataagttttgtttaattatcagttcttcaactggaatgagcaaagttcagataaagggacattctggtccagactttggatgcttccctaacttgtgatgacaaaatgtttgagaactgaaagttctcgtatgtactggacacagttttgagaagacctggtagaagcctgtttgcaacatcaaacctgtgttgttaacaagctaaccaaccttgccacaccttcaaagggggcctatcttcttgaggaagtgctgctctgagagcttaaaagtcatgtca

SEQ ID NO: 4069 - DNA, 766 bp, Homo sapiens
  source 1..766: mol_type = other DNA
gacagccggccccgagtgctgaggagggcgggcgcccagtggtgtcgagggcgacttggggcgcgcggcggcaggcagcggggaagccgccgcgagggcgtccagcagggctcagcgcggcgctcaagttcggggctgggagctctgaatccgaacagcccagcgtgggcagaggtcgtgcgctgcgcgtggggcaggaaagccgcggcggccgcgaggcgctggggacgcggcagcgggagggaggcccccggcccccggcgcgcaggtcctggccctggcgcgtgttcggggcgagggccgagggtctcgtgggcaggagtctccgcgccctcccgcgagcccacgcagcggccgtcgtcgctccagggatcagggacatcggcgccgaggggtcgccgctgcggcacccgaaaattaaaaaagtgccgcggcggcgcggctgcccgcccctccctcccccaccggcccccgcccccggagcggctctcccaccacccccggcggcggcggtggccaacttgccatggtgccgcctccgcggccggcgtcgacgcggactcagccccggagccccctctactgcccagaggccgccgccgccgcccgccccgctgccagccctcccgcccggccagccccgggctcccgggaacgtcagcacgccgccgtccccgggccagctcccgccaccccattggcgggaaggagagggctggccctccccattggcccggccctcatattgaacaggccaatgggagct

SEQ ID NO: 4070 - DNA, 416 bp, Homo sapiens
  source 1..416: mol_type = other DNA
ttaacaagcctgtaacctctcaagtgaaagaacatgcacctgtacacacagatgtgtttaataaatatctgtgacgcatatcctcaaaggaaatcctctttgagtctttcagaagagttatgtcgtcaggggtacatctaagggctcagctgttcctacctttgacgccagggacaaaccctaccaggcacagttgggattctgccccagatttcagagccagcgctggggaaagctcccattggcctgttcaatatgagggccgggccaatggggagggccagccctctccttcccgccaatggggtggcgggagctggcccggggacggcggcgtgctgacgttcccgggagcccggggctggccgggcgggagggctggcagcggggcgggcggcggcggcggcctctgggca

SEQ ID NO: 4071 - DNA, 460 bp, Homo sapiens
  source 1..460: mol_type = other DNA
tgacgcatatcctcaaaggaaatcctctttgagtctttcagaagagttatgtcgtcaggggtacatctaagggctcagctgttcctacctttgacgccagggacaaaccctaccaggcacagttgggattctgccccagatttcagagccagcgctggggaaagctcccattggcctgttcaatatgagggccgggccaatggggagggccagccctctccttcccgccaatggggtggcgggagctggcccggggacggcggcgtgctgacgttcccgggagcccggggctggccgggcgggagggctggcagcggggcgggcggcggcggcggcctctgggcagtagagggggctccggggctgagtccgcgtcgacgccggccgcggaggcggcaccatggcaagttggccaccgccgccgccgggggtggtgggagagccgctccgggggcggggg

SEQ ID NO: 4072 - DNA, 625 bp, Homo sapiens
  source 1..625: mol_type = other DNA
gcgccagggccaggacctgcgcgccgggggccgggggcctccctcccgctgccgcgtccccagcgcctcgcggccgccgcggctttcctgccccacgcgcagcgcacgacctctgcccacgctgggctgttcggattcagagctcccagccccgaacttgagcgccgcgctgagccctgctggacgccctcgcggcggcttccccgctgcctgccgccgcgcgccccaagtcgccctcgacaccactgggcgcccgccctcctcagcactcggggccggctgtcccccagcgccgagcctcgccgctgccctcctgcgccgccgcttcctcctctccctgccaggagttgaagcggagctgcggcacctccctggcggatctggtatccccgcccgctgccgaggctgccggccctctcccctggaccgctacccggagagcgagcggcggggcgcgtgttggctgagtgcgacacaccgcgagcgcgggcagtggaggtgccgcggcggccgtggccgctcggggcgcagcggtagtgtacagcgggggacgcgcgctgccggctcctgggctggggaatgcaccaggggcagagtccacacagcccgccgcggctgccctagc

SEQ ID NO: 4073 - DNA, 663 bp, Homo sapiens
  source 1..663: mol_type = other DNA
tattattgagttgtaagaattctttatacattctaaatgtcggtacagaaatgcatttcgaagagcagacaactgctcttcaagttgttttttaactgtactgaagaacaaagaaatttttataaatatctgccacatgctaaacttttattggcgctggaattacaataatggctaagcttaaagttgtatttttcctttttagcaaaattactatcttatcgttaatatttctacatcattaaatattatttgaaaacatgattgtaaggtatactctcacagtttggagatgtttatcttgattcccatcaatattttaaaaagaaaagaagcatatgattcccattctgtatacatttccaattattttcttagtataaatgcttataattgcaaaaactgggacagaggcacaggactttgctctatacctgtctctttagaaagactacagatgaaaaagaattccactgaactccatcctctccctttcctcctgtggaaaaaaaagaaagaaaagaatatatctaccttgccttcccagatgaagggaagaagaaagtcttcttctaagagaaaacttgccaaggagatgcaggtttcccagagagctggatgacaagcccgcaaaggggccctgccccctgcctttataaagcc

SEQ ID NO: 4074 - DNA, 544 bp, Homo sapiens
  source 1..544: mol_type = other DNA
gctgcctgggattcctgggaggatcttggagaacccaggacacccgctggtttttgctctgctggagaataacaaaacattttgggattccgacagaagcacgacgctggcagacagcacgggccagcccggagcggtcgcaggaggctccagacccgcggccccagggacgcccgggaaatcaccggcccctcggctgtggtaaaaaagcagcgaggagggaattgctgtaaaaaagactatggcccatctcattttggtcccagaggggcctaggcgcagccccgggggacccggtgcccagagggatggcttcaggcccggacctggcgccgagaggcgggacaaggggacctcgcgcccaagccccgcggaaagttcgcgctccgcgctccagccggtccctggatccgccgcagcccggggcggggaggggcgcgggaggcgcggccggggcgggcgcgcgagaggaaggtgccttcgggaacacgcgcaagggcgattcgcgctgccaatgaggccccggtgtgggccgagcaaggcg

SEQ ID NO: 4075 - DNA, 320 bp, Homo sapiens
  source 1..320: mol_type = other DNA
ctctagttagtgtcattttgaatgaagcatatatttttagattcacatgaaaatctaaaatagctggctccagtaaatggagaaattttagtggccacagtatttctgacagctattatatcaacaattgaagtggtgcaccactgctgtgaagaagtctgctgcctacttcattggtctgatcacgcatgtgtgcacacacccacctgtggtagcaaaatctcttcagcagtgaaggtttagctgctgcttaggcttctgctgtctctgcaggtgctgtacctggtggagaagcatgtggaccacagcgggatgcggcc

SEQ ID NO: 4076 - DNA, 588 bp, Homo sapiens
  source 1..588: mol_type = other DNA
atatatttttaatgtttcctcatggattaaaaataaaagctctctgtatctttgattttcatctgaacatagtcccacactatgttgtgcatttagttaacaagtggtaatttgctcaggaacttttttttttctggataatttttatctcaaaaagcactggcagggccactgagccatccagtgagctcaggatacccacccaacggcagggctggggcccggggcaggcagcctgcccgggagagacccctattctgcaacgcccctttaaaacgacgtttcaacggaagtccctttccaagcctgaaagtccgggcggaagagcgcgcatgcgccgcctcaggggccggtcccgggggcggggcctgttccctccgccctgggtctccagcggggcggggcctactccctccgctctgggtcacagcgggcgttcggggggcggggcctgttccctccgctctgggtccccgcgggcgttcgggggcggggcctgttgggtctccgccggcgcccgccccgccagcctcacctgcgcggcacgtgacccgcaccgcccgtgggcaccttgaaggcggatcccgc

SEQ ID NO: 4077 - DNA, 507 bp, Homo sapiens
  source 1..507: mol_type = other DNA
aatttcatctttaaatgtgagcattttagatatatttttaatgtttcctcatggattaaaaataaaagctctctgtatctttgattttcatctgaacatagtcccacactatgttgtgcatttagttaacaagtggtaatttgctcaggaacttttttttttctggataatttttatctcaaaaagcactggcagggccactgagccatccagtgagctcaggatacccacccaacggcagggctggggcccggggcaggcagcctgcccgggagagacccctattctgcaacgcccctttaaaacgacgtttcaacggaagtccctttccaagcctgaaagtccgggcggaagagcgcgcatgcgccgcctcaggggccggtcccgggggcggggcctgttccctccgccctgggtctccagcggggcggggcctactccctccgctctgggtcacagcgggcgttcggggggcggggcctgttccctccgctctgggtccccgcg

SEQ ID NO: 4078 - DNA, 333 bp, Homo sapiens
  source 1..333: mol_type = other DNA
agtgaagctgctgaacaaaccttgagaagaatcatctcctgcttcaatctgctgctggatactctctttatacttttcttgcagaaataataatagaaataaatcttaaccttcaaccatctggggaaagcaactctcagttcgagagtaaaggtgaggcgggggactccggagttgctgcgtggaggcgctcgccccgccgccctctcgccctccggggccgtgggttgtgctcccggccgggcaggcgctgccgccgcgagtccgccgcctttgtgccggccgccccaacagttttgcttcttaaaaaacaacctctgtcagccggggtag

SEQ ID NO: 4079 - DNA, 480 bp, Homo sapiens
  source 1..480: mol_type = other DNA
ataaagtgttatcaagattaaggcttttaaaaaaattgtttttaggaatctaagttaagatttttaaaaagtgttcagctttttttctaatctctcagaaacttgaaaaaaagctatcgagattaccttttacagtgtgtgcatataactttaaaacgactattttaacgtcttttatttaaattttattttaacttagtgcataaacattacagccagttttttgagttttaacatccgcaaaatctactctgtagcttttgtttttttaaaaactaagttttaaatcccgttttctgtcctgtcttctttaaaagcaaaacaaaacattttaagtttcttaactttttcctgggacaaggaacggtgcacctttaggagctgataggtcatttattattggaactgaaatggtataaacaattctctctctttttttccctttcatgaagcctagtgaagctgctgaacaaaccttga

SEQ ID NO: 4080 - DNA, 580 bp, Homo sapiens
  source 1..580: mol_type = other DNA
tatcctaaaagttagattggcacttacatgccaacttaaaatacctttaagtctttaaaatttatagtattttagaatttatcatagtgaaacatgtacagtctgttagtccccaagacaataaaataaggagatagtgactgacaaacacgtagaaacactgtgtttcatttattggaattatttggatccaaaggattgcttttaataccttaacaaaataggtcattaaaaaaaatcaagttttcaataactgatcttttccattaaaaaacttttgattcattattccaaatcaacatatcatctaaatatttacacatagttagatgtagctatttacagttctttgaaagtttcatctaatattttaaaggttactatcacgattttaaaagacatgatcaccatcatttaccaagattcttaccacaaggaaatgataggcagtgcttgattcaattcaacatccaaccagctgggcgttatttcgagcacggggccctgcaggtgggcctgtgggcggggacccggcgcccgggagggactatagacgggcggggaccgccccggcccgggc

SEQ ID NO: 4081 - DNA, 437 bp, Homo sapiens
  source 1..437: mol_type = other DNA
ttcccaatatatttactttggtacttgagaaaaagtattcaatacgccttcgactcgaggccgggctggccgagccggagccctgcccgcctttgccccgcgctcaccggcgagctcacgcgcgacacccgcggcccgcagggctccgaagaccccccgccccacggcccaagaggaggccgccccgcgcgagggaccaaaggcccctggcaagggaggcctgcgctgtggccccttggccccggtggccccggaccaagcttctccacctcatcctgagaggaagcggcctccgcgtccgcggcctggtcccgaactagcgcccaagacggctccgcagctcattaccccggctcctgagccggcaccgaccagtgcgcgtcccactcgcagcaacacgcaccggcgcccgcccctctcccggatccggcgcagaa

SEQ ID NO: 4082 - DNA, 602 bp, Homo sapiens
  source 1..602: mol_type = other DNA
ccaaaggattgcttttaataccttaacaaaataggtcattaaaaaaaatcaagttttcaataactgatcttttccattaaaaaacttttgattcattattccaaatcaacatatcatctaaatatttacacatagttagatgtagctatttacagttctttgaaagtttcatctaatattttaaaggttactatcacgattttaaaagacatgatcaccatcatttaccaagattcttaccacaaggaaatgataggcagtgcttgattcaattcaacatccaaccagctgggcgttatttcgagcacggggccctgcaggtgggcctgtgggcggggacccggcgcccgggagggactatagacgggcggggaccgccccggcccgggcctccagcgcccggcgcccgcacactcgccagcccagctgccggcacgccggccagccagccgctgccgcttaccagtggcgcctcgctgactccccgggggcagctcttcaacggttcccgcagtcagagcaccaccccgcggtggggtacctccagcccgcccgcagctctcggtccccgccgcgccgccactctcgcgagaagccaggaa

SEQ ID NO: 4083 - DNA, 735 bp, Homo sapiens
  source 1..735: mol_type = other DNA
gcatttttcagattttacattttattatgggaaaaggagaaaaaaacttcatatttttaattgagtgcagtattgagtattaagtccactaatagtattcactgttaaatttagcattaacaaataaacaaaaatgaagtagaatgcatacttaaaagtaggcatcatccatattttgaaaaatatatttttaaaaaagtattacattatttttcattgatcacaatgtgtttttaacaaatgatcaagaaaaaattttgtcatataatgagaactgtaagtagatatctcatgtgctttggcagaatttttttttgctaaattaatcttactaactcctttattagcgaagtactataaagcaataattcaaatacctcctctcaggtgaaaactttgtaaggggatacttaatacatttatttccttcaaacaaaagaggtatttagcatgacatgataatgcaggttacatttatttgcagatattctcttcataaatcagaaaaatgaaacagaatgttgttctgattttagaaaacaaattttccttaaggtatcaaaatctaaaataaataggcaaataatatctaaattagattagtatgggtgaaaaaaatgtcccataacttgcagatttcttttacatgcagaagttaaaagcagacagttgcagaatgcttcagaaactgtaaagtatctaaataatctgtacaaatctgacttggcacagtgc

SEQ ID NO: 4084 - DNA, 484 bp, Homo sapiens
  source 1..484: mol_type = other DNA
tttgccaatgacatgaggcttaaacaagcacccttgcttgaccctggctagtgttttgcacagtttatgcatacattgtagcaagaaaagttgtctaagagacatagtccactgaaaggggtctttgggaactctttcccaaacgactggccagtactttttaaattgcaatgtatgatcctggattgaatcttggaacaattagctaatcgcattatcccagtgcgagtgccctgtgtttgatcactgcactggcgttatatacaatgtcaatatttaggtttttgcaacattttcgaaagtcctaaattatttcaattcaaatgaaaagtttaaaaaacaaaccgcgcgccagccgctcctgcgggacgggacacccgggttctcctggtgggagcccccagtgccgttcacgttccgcccgggggggggattaaactcgcacgcgagaagcaccgcccccgccgctcctctccggccgcgc

SEQ ID NO: 4085 - DNA, 552 bp, Homo sapiens
  source 1..552: mol_type = other DNA
caactgtgacctaggtctttgcatcctcatgcaacaaggatggaggacattatgtgctcagcaagatttaaaagtataaaacattcacatttgagcaacttaggtcattaagaatttggcctctttataatgatagcagtatgaaatttctggttctgcatgcagacttctacatttctaccagctaattattattatcattaaattattaagcaaagagcttactcgcaaaggtcaactttttataaagcataagtcatccttgcttttaattctttaacaactatgggtagaacacccaagggcaggtgctcacttcctcctccggggtagaagagatcatgggtccctttccagtccaggctggaatggagaagtcgtccctccagggcgtctccccagcttggctgatgaagaggcggggaccgaaccctccagtgcaggagcctgtctggtgcccacacctggcccgctccgccccggggccgaggagacgcacgtctgattggccgagggcggcgggggcggggccggggcgcccccagaggccta

SEQ ID NO: 4086 - DNA, 406 bp, Homo sapiens
  source 1..406: mol_type = other DNA
catggattgcccagttctgaggctctctgaggttcctgcaggatgttaaggccatggccaaggcaaggaaaggtcttatatgagcctgttctcagaacattctagccaggctgtcctacttgctagagagtaacttttgctggattaggaggtggagaccacggcgtggcccctcaggtgtctccctgcgtcgcggagcagctgggttcctgcccgctgcaaatccgcggtgtttaccagaatccaggtggtttgcaaacccggatgtcaggctccttgtcccggagaagcggagagtgtgacccgagcagcctcactccgcctgtccccaccccaaaggcaggaatttctgggatgggcagatggcccacccctcctcctcctccttccccaagccgcagtgggt

SEQ ID NO: 4087 - DNA, 623 bp, Homo sapiens
  source 1..623: mol_type = other DNA
cccaggaatgctccttgaaaagataatctcctcagacataagcctggccacagaaaagtctctctaaggtcagcagtttctagagtgacgaagtgagaattcgattcttatctgttcacagaaaaaacctcatggatttagccatagatcatatatattttgaattgtcactctttcactcaacaaataaatgtgccaaatgggattcagaatcttacttgatttttatatattatgattatttccaatataattttaaaataagaattttatacttatggaaaaatatatttcatctaatttgaaaaaataaggaaacagtgctttgctgtaagataataatttttctttgtttcaattttttgcaaaggatttagcaatgaaacactaaaatctcaggcatttatactttcctcatatatagcctatatgctttatttaatctttattctttacattaaattaaaattatttttaaaatgactatatttctattgctgttgtgacttttcattgatcaatatttcactaaagatattaactttctctaggatgcagagagactgccttccttataaggagaacaaggaagtaaatcatgttgaagttgcttttaaacacag

SEQ ID NO: 4088 - DNA, 445 bp, Homo sapiens
  source 1..445: mol_type = other DNA
gctttcgagtcagactggagtttaaatcctgacttgatcggataagtcaaccaacgtctatgaacctcagggtcatttataaattgtgaatcccacccgcagtgtggtgtgccagggggcctggctgaacttgagaagtatttattattactatcatattacttctgaactttcagtcttagtctggaaaagagagtaagggtcccaatccatttttagagttagtgttatcttgaaaacaccaggatactcctgaaggaatgagcatatggcaatgctttataagagtttgaccattggcttacagttggccagctcaactgtaactcaatactattttggggtattaatatctataagtgtactggcatagttctgccatttgtcagccagaagtctggttacacctattctcatatgagcacttggggtttcatgtaaatca

SEQ ID NO: 4089 - DNA, 391 bp, Homo sapiens
  source 1..391: mol_type = other DNA
ccagtggcttatccagagaccgcaggctctgtcagtccgggctgctgtggaggccttctgcactgcacaggttcggggcttcggaaacaaagggaagtccctcctccctttgtcttgtcctaagaaaacacattttaccaaaccggtggccttaaatgattttcgctccttgatattatcatcttgaaggaaagctggtaaactttctgcaccagagcgggggcgccggctgctccccgggccgcccggccccggctccggccccgatcccgggagggagagcgcgggggccgggcgggcgatggggcggcaggcgccgcgcccagcgggcgggcggggaggcgcgggtgggcctgggcgcggcgcgaggcggtgcgctgccgcctccccg

SEQ ID NO: 4090 - DNA, 411 bp, Homo sapiens
  source 1..411: mol_type = other DNA
cttgtgcaaggggcatgatttcacgtctcataaccctcccaaggtcacctagattagtcttgtggccccaatcattttccttcccttgtgaaaaaaaattacttgcagttcttaagttccgcccgtccaaccgcgagcctgggaggtgaggagtggttaaaactcagccctcacctccagcgggtcccgggctcggcggcgcccaggccccgcccccgcccgcccttccccccagatgccgcctggcaccaagcgcagccgccgctgccgcaagccccgcgcagccggctcgcccgagcggaccgcggccagcgcgccagcccttggcagccccggagcagtcgggctccgggaggaaactccttgggagcgccctgtccggggtgggaggtggagcagcggcagcagcag

SEQ ID NO: 4091 - DNA, 370 bp, Homo sapiens
  source 1..370: mol_type = other DNA
ccaattaattccattaaattatatctagttatgtagtgaactagagattgattttatatgtcactgaagcacactgcaacaatatgccagcgtgactttcaacagactgtctgggcatccccctcttagaaggatccgtctcttgtgcaaggggcatgatttcacgtctcataaccctcccaaggtcacctagattagtcttgtggccccaatcattttccttcccttgtgaaaaaaaattacttgcagttcttaagttccgcccgtccaaccgcgagcctgggaggtgaggagtggttaaaactcagccctcacctccagcgggtcccgggctcggcggcgcccaggccccgcccccgcccgcccttcc

SEQ ID NO: 4092 - DNA, 521 bp, Homo sapiens
  source 1..521: mol_type = other DNA
agcgtcccattgtctccccagctctcagcagagaggagactctggcgtgggcagcttctctctgcaccatggccatgggaaggcctcactcttgtccgcaggactagaagcctggcccccaggcttcaggacctccctcacgggggacctgtccaaggggcgcctgcagaccagttggcatccaaaggtgagcacacctagccaggttgtgacagcacctgggcttgtcttcttttctctgtgatcagagcaggcgctagtagggggaagggaaagctttcccgggcccgggagagtacagttgtgcctgggtccccagcagcaacttggacagctgcagccacgcctgggagggtagggatcctgcctgctcctgccggtggaatgtggcactgccccagacccagctccaccgctgctcccccaccggtgggagactggctcagctcccagggcagtgggtgaggtgcgctcctagggccggccctgcgtgtaccagctgcgctgtcggccaggttcac

SEQ ID NO: 4093 - DNA, 641 bp, Homo sapiens
  source 1..641: mol_type = other DNA
ttctcactgcaggagctgaaaaaggagactgcttaattcagtttttaaaaagaaatgcacttggattcaaaagactcacattttaatctaagcgcttgtttccctcatctgtaataaaaaggaaatggaacagatgttgtctaaggacatttccagctctaaaattttatatcaaagaaaaatgtctgtggtgcacatgtaaaatgtgatgttttgctctaagcaacctaagagaaatacatgtatttgtaaccttaagttctcaaggcagaaaagctgtcttaagagccttgtttgcttagtacctaagctcaggctctgcaattgagcttaaaccttattactatgaaggccataaagacaactataatcaaatttggtttttacctcctgtttataaacatgcttcttaggtcaaaaagcgacttcttaaaggttaaaaagccacttatcaaataaactgaacttttaaattttcttacataaaatgcttaatccaaaagtatttttgtgtttacaaactatacataaagatcttgcttacagaatattttctgatagtcttcatgattggctgttgctagctacaaataaggaagtcttcaagttgggggatttctcagtggaagttcccacttcaa

SEQ ID NO: 4094 - DNA, 540 bp, Homo sapiens
  source 1..540: mol_type = other DNA
aaactgccctcaaaaaaagtttaaataatttttttaaagcagtactgtattgtgatgtttaactcaattacttattacaagaaaactattcaactggtcaaaacgttatatataagaagtttctgtttgttaaaaacattgtttcaaatatatttaggctttgacttttaaaagtatacagcagcaacttggcaggtttttaaatccttggacttactggcctaaggaaagatgtgtaaacatccagacctcatcctcttgccctaaagggaaaagatatctttcttgcggtatctaagatatgaatcttagataatattcatgcatggctaggaattggaataatgggaaagtcttaattcatgggaaattttctaataaagttccactttaacaaatacatttagtgaaaaatactaccagttggggagaaaccaaatgggtatgtgctttaaccacgtttaattacataaatttacgaggatctgttgaattactggttatttatttaccggttatttatcgtttggcaaaaaaatc

SEQ ID NO: 4095 - DNA, 519 bp, Homo sapiens
  source 1..519: mol_type = other DNA
aactcaattacttattacaagaaaactattcaactggtcaaaacgttatatataagaagtttctgtttgttaaaaacattgtttcaaatatatttaggctttgacttttaaaagtatacagcagcaacttggcaggtttttaaatccttggacttactggcctaaggaaagatgtgtaaacatccagacctcatcctcttgccctaaagggaaaagatatctttcttgcggtatctaagatatgaatcttagataatattcatgcatggctaggaattggaataatgggaaagtcttaattcatgggaaattttctaataaagttccactttaacaaatacatttagtgaaaaatactaccagttggggagaaaccaaatgggtatgtgctttaaccacgtttaattacataaatttacgaggatctgttgaattactggttatttatttaccggttatttatcgtttggcaaaaaaatcagggcccggctccgcgcgcaggcactgccctctgaactg

SEQ ID NO: 4096 - DNA, 530 bp, Homo sapiens
  source 1..530: mol_type = other DNA
aaaagatgttatgacagattagagactgaaattttaaagaattttcacaaacatgaaataactcgtataactgatagagaactttgtctagtctgtgacttttagagaattaagagaaaggtctctgctcattataaaaccaaattttgtgctaaaataagaacattttcacacattttaattgctctgtgacatttattatctatttaattttgctctaatttcagtgtagcaagaattcacctcataagtgggagtaagagtccatttaataaaatgaaatctattgtacatttccataataaagaatttaaaatggccttttatattttctcatttttaggttaagtttatagattagtattctcaaagtagtgaacattagaataagaatattttaaaattgtggaacttaaggtttcatacaatttctaataatgtttgtggtaaaccttatagaactatctttaagatgcatttttaaaatgaggtttatgtaacttagtaattatctaaattgatctcattat

SEQ ID NO: 4097 - DNA, 496 bp, Homo sapiens
  source 1..496: mol_type = other DNA
gagtaaaataatctttgtgtttttaaaggtattaatatcttaaagcaattgtgctactcaaatcccattctcgatttaggaatgctttaaagatgcttgttatttggaacatatttgaagtatatcttctgcaactttgctttttgaaagcctagcacaaatttaaaccctgtaagcttaaaataggtggtttgaacatttgggaaaccttagttttccctgaaatccaatccttgcaaagcattttaaaaaaattttcttctcagataaccaagttaaatctagctcaaatgaaccttttagtttttgaggagggcaataatagtagtgaacaccaaaaatgtgccgccgtcccagatctcagcggcggccgcagagcgcagggcgcgagcgaccagggcgctaagtgccgcctctgccagagacaggagacgccgggccgcccgcgccgtctgtcccaagccaattggccgtcggggaaagtgcttcgcggcga

SEQ ID NO: 4098 - DNA, 494 bp, Homo sapiens
  source 1..494: mol_type = other DNA
cgttcttcagataatctgcaaccaagtgcgctgataaaatatttaataatacattatttaaatgtttctgtactcaaccaagaaaccgaaccttcctgaggtgggtggattggtgggtgagttgctgcttttcgccccccctccttgtcgctgtggctctcagcagcagggagctcacaaagcaccagctcaggtgttgtgtgcttttgtatgacagactctggaacttttacagggcgagaagaggccaccgctcgcgcgtacattcaactgaatatttggttccctcctccgcccctccgctctaaaggggggaagggggggaaggtaggaaatgtttagtaaattccacatctttgaatcttcctaaagcagtggtcacagagcttaaagtaattaatgtctatctaattaaattactgtcagcagctagtgagccttttctgattgctgtgtcaattggccaatctcttctcccagggaaaaaaaaaagt

SEQ ID NO: 4099 - DNA, 490 bp, Homo sapiens
  source 1..490: mol_type = other DNA
agaatctggtaaaattattcttatttaagacaaactatgttaataatttttagtcatcagtgatatatgggcttcattacttaaaatactctagatctataatcagttttaggaaatatgtgtagttcttcctacaaaagagcatgtcttttcttctgtggtacccctattttgttgagacttttaggcaaagggatataaaatattttctttctgtcatttttgttgggaaatcatagaaaaacatatactttatttttaataatgtgtgacttacctaagtttttcacttttaaaatactgcaaatatctgtccaatccttactgagtcaacagtgactcactaagacatgctaatattaaagtcatcttatctgttttaaaaaccttatttacatcatcttgctttgggccaacttggacgagcatcttaggtgagatttttaatgcccattagactgtagcattgctccagggatccacctggcca

SEQ ID NO: 4100 - DNA, 534 bp, Homo sapiens
  source 1..534: mol_type = other DNA
ggagcagggtccccgagtcgccggcccagggtctgcgcatccgaggccgcgcgcccttccgggccccgcactctgcgccccggctgccgcccagcgccctacaccgccctcagggggccctcgcgggctccccccggccgggatgccagtgccccgcgccacgcgcgcctgctcccgcgccgcctgccctgcagcctgcccgcggcgccttacccagcgggctcggcgctcactaatgtttaactcggggccgaaacttgccagcggcgagtgactccaccgcccggagcagcggtgcaggacgcgcgtctccgccgcccgcggtgggtgagtgccgcgccacgtacgtccccggggcgagctgtggggacctcttcgccaaactccccaaatgagggactccccttaggcggaagccccaaggccaccctctgacaggtgaagggacgtcccagagctctcgcttagctcggacccccggggagctccaactggtgcctctggagcagccccgaccctcctacggaaactggg

SEQ ID NO: 4101 - DNA, 505 bp, Homo sapiens
  source 1..505: mol_type = other DNA
ttattcttctccaaaacccttgaaaagactatgagaggccgcataggccattaagaccttgaactcttaatttaggatctacaacttcctagctgaatggcttcaagttccacataagtgttactgtcataaattccctagggagggtgaatcgctgtgtgagtttgccaaagtcccctggagcagggtccccgagtcgccggcccagggtctgcgcatccgaggccgcgcgcccttccgggccccgcactctgcgccccggctgccgcccagcgccctacaccgccctcagggggccctcgcgggctccccccggccgggatgccagtgccccgcgccacgcgcgcctgctcccgcgccgcctgccctgcagcctgcccgcggcgccttacccagcgggctcggcgctcactaatgtttaactcggggccgaaacttgccagcggcgagtgactccaccgcccggagcagcggtgcaggacgcgcgtctccgccgcccgcggtg

SEQ ID NO: 4102 - DNA, 306 bp, Homo sapiens
  source 1..306: mol_type = other DNA
ttattcttctccaaaacccttgaaaagactatgagaggccgcataggccattaagaccttgaactcttaatttaggatctacaacttcctagctgaatggcttcaagttccacataagtgttactgtcataaattccctagggagggtgaatcgctgtgtgagtttgccaaagtcccctggagcagggtccccgagtcgccggcccagggtctgcgcatccgaggccgcgcgcccttccgggccccgcactctgcgccccggctgccgcccagcgccctacaccgccctcagggggccctcgcggg

SEQ ID NO: 4103 - DNA, 295 bp, Homo sapiens
  source 1..295: mol_type = other DNA
tggccctcatcttcctcagcagttggaagagggaggaattggaaataaaagatggaaaattgcattaattcataatcatgtggtaatgccccatcgtttcagctgctgtgaacaagctgaagaggccttatcctcttatctgttattcttctccaaaacccttgaaaagactatgagaggccgcataggccattaagaccttgaactcttaatttaggatctacaacttcctagctgaatggcttcaagttccacataagtgttactgtcataaattccctagggagggtgaatc

SEQ ID NO: 4104 - DNA, 447 bp, Homo sapiens
  source 1..447: mol_type = other DNA
acagtgaccagaatcatttctgctaaatgtcacagatcattaaagcctgtgtgtatatgcatctcatctcttatcagtaaaattagattttaaatatatattagaaggaaaaaaataccagataatttcctgttagcatcagctatcttggaattccatttattaaaacagaacacataggggtttaatcaatatccttaaaaataaactgaagagaggatttttaatacatatgtgttgaatgaatgatcattatttagataaatgaatgactgaagtgattgttatattcaggtacttttgtcttcaacgtcaaaattcactttagagaacttaagtgattttctgattgaaagtagaaggtggatttccaagctgctctctgtaacaaaaactcattatttacagatgagaaatttatattgtcagcgtaatatctgtgaggct

SEQ ID NO: 4105 - DNA, 683 bp, Homo sapiens
  source 1..683: mol_type = other DNA
ttacgtgaaatctatccaagtgaattttaaaacagacagaacactccaagaaactgttgtatgtgtattttttttaagtcaaccattttactaatctgtcaagatgaccaatttctttggaattatgtagatttagccaaaatgaaattatacataagatttacttttcttttcagatgcttttttatttatttttaaatctttataattactagatgttctcctctctcagaagatattctgagaggaaagcaaccagatggcattttatttctttaaagtaaagcagccgtgggtttagacagttgaatttttaaacttctgtatttactgaaagtgcatatggtgctatatggacaaagaaattgtgctgaaagaaaaacatttctgtctgcaatacctcataatcttccagaggaaaaaaaagtgcagttatatggcacatttctcacacctctgttaaaaagtagatatatgtttaatgtacagacctgcaagtttcattattttaaattcatcttttagtggcaaataaaaatgttatgcaaaacccaatgagtgaattacctctgtatgtcaacgtaagcagatgttggtagtcactcacagttcatttgaggcccccaaaatctgtttctaattttacagaaatcttttgaaacttggcacggtattcaaaagtc

SEQ ID NO: 4106 - DNA, 641 bp, Homo sapiens
  source 1..641: mol_type = other DNA
ttaatcaggttgggaacattataaacttatttaacaactgtgtttacgtggaaatctatccaagtgaattttaaaacagacagaacactccaagaaactgttgtatgtgtattttttttaagtcaaccattttactaatctgtcaagatgaccaatttctttggaattatgtagatttagccaaaatgaaattatacataagatttacttttcttttcagatgcttttttatttatttttaaatctttataattactagatgttctcctctctcagaagatattctgagaggaaagcaaccagatggcattttatttctttaaagtaaagcagccgtgggtttagacagttgaatttttaaacttctgtatttactgaaagtgcatatggtgctatatggacaaagaaattgtgctgaaagaaaaacatttctgtctgcaatacctcataatcttccagaggaaaaaaaagtgcagttatatggcacatttctcacacctctgttaaaaagtagatatatgtttaatgtacagacctgcaagtttcattattttaaattcatcttttagtggcaaataaaaatgttatgcaaaacccaatgagtgaattacctctgtatgtcaacgtaagcagatgttggt

SEQ ID NO: 4107 - DNA, 374 bp, Homo sapiens
  source 1..374: mol_type = other DNA
actcacatttatgtggcttctgtaccaaaatgaagctgccatttgtgaatatgttttttttctctcatgacatagacaaatgagttggtacattagttgctaattaagttcctagctgctccacttgtatttttttgttttgttttattaaaggaaagttgtatattaaagaatataggatccacatctgttaccaggaatatgaggcagtaaagttaactgtttattgttattattttaggaaggacttcctcctgcaaagatgtctcctgcacattttggcctacaaaggaccttattgttaaggcagaacctgctgggaaaacaaaatatccgccggaggagcttgtctccctgaggaaactccctccccg

SEQ ID NO: 4108 - DNA, 502 bp, Homo sapiens
  source 1..502: mol_type = other DNA
aagcctgctttgcaaaatctgccgacacccggtttctcatcatgagcgttctcaaacgatggagaggggtccgtgagctcagggttcatgtagcgggcggccagagggctgccggttctccggagggcctccacgaattcccgagaggtgctcagcagcagttcaactgcccctctgcaggcagaaaggtcagacctggatgtacattttcaccctctcgtctgtggaatacccattcgacatctttctttctcagagaagggagaggtgtgcgtgccgctgtccgctgcccacttagagaagcccacagggctctcaggccggcgcgcggggctgcactcgcacctgggcaggtgggcaggcgggcaggtgggcagcggggcggcgcgcggggccgcggcaggcaggtgcggccggcaggcgcggcactttggactctgcggtgtgcgcctggggtcccggaccggggcgatcctgctgcacactcgggtaggagtctgtc

SEQ ID NO: 4109 - DNA, 586 bp, Homo sapiens
  source 1..586: mol_type = other DNA
taagaaacatgtctcttgttcttcagagataactcaaaataatatcatttggttttttcatttgttcataagccaaagctacagctgccttgtccttttaaagtcagagctacaaaattcatttgagttccagagataaatcagacttgtccattgctattacttaataagccaaagtaattgaacatttaacaagagtttgcccaaaggctgagtcagattatatacaggacaccgtctatattatcagtgtataaacagcaaataagtttttagtgtatgttcacacactaaaaaagtttatttggaaatcaactttaactagatatcctgtttattttgggttttggcgcagaagcactcctcctggaccacaggtgtggtcctggttgcaaagttttgatgtgacatcaacactacacaaagtaaatgtaactgcaaaattttgaaattcacagatgggtctttgaagtcccagccaaggcttcttcgggcctgagggagccagtaagagtcgagcagggactggagggctccccagctgagttggctccaaagtgtgggactcagccaatcgcggctggcc

SEQ ID NO: 4110 - DNA, 357 bp, Homo sapiens
  source 1..357: mol_type = other DNA
atgctcagcggcacgggcagctttcagtctttcccgaggcgcggctcagcgctgggcagggacctgcgtgccaattcggcacccaccgctgaacccagggatccgagctgcaccctgaggctaaatctgcacccttaggtggttcattgtcaatcttcaacctgaaatattcctcattaagaaactgtttgggtgctttagctactgcggcgtgggagctcagggacggagccctgtggccgcttccgctaaagcacgcttgagtaatccgagctgtggcggcgccggagagggcggggatagaaacgtcaaccccgccgaccccgggaaattggggagaagagaaacagatcgatt

SEQ ID NO: 4111 - DNA, 468 bp, Homo sapiens
  source 1..468: mol_type = other DNA
gccgccgacaccagggccccccgggcgctgctttctccagcccgagccgcctgggggaggtagggagggattttcccggtgaggtccaggctctcgagaccagatcccgtcccgtgcgcagagggggtggggaagggcccagggaagagcccgcgggccggggagcagcgcggctctgtcccgggccctccaacgcaggccggggagcgcaggggccggctggtcacgcgtgggaaagaaagcccccaggctgggccgccagagagtgcgtgcagggagagctgcgagtccccgcgcgcgtaatcatgacctcggggccccctccgggccgcgtgagcgcatcggcgaggctgggcggccgccgcggccccggccgtgtaacatgacccgagcggccggccggccggcgcggcgcggccattgagccctccctgcccgcggcgctctgcgcctgcgcccagcctctgg

SEQ ID NO: 4112 - DNA, 425 bp, Homo sapiens
  source 1..425: mol_type = other DNA
gtgagcataataatgtcattactatttcgaacagccagctactagacctggaattcattaatgtaagcttctctactttactgagaattctcaaaatctcagtagttttctataatgatcaaccccccaatctttggctggtcctggcctcctggcccggtgcagggctgcgcggacccctatcccgcctgcggtcctcccggcaagcccagcgggagcgcccgctcggctgggtccccgcctccagcggcgccggggccgcccagaccctgggctcagcctcgcgccccggtgcccacctgaggaggcagcggtcccggcctcgcgtcccggatgggacggcgcgggagcaatgccagtggccccgagcgccccgggccacgcgcggggccggccagccgctctcgcgccctccccgccccctc

SEQ ID NO: 4113 - DNA, 506 bp, Homo sapiens
  source 1..506: mol_type = other DNA
tggaataacctcagtatatctgtatgcttttaaattaaattcacttaaactcaggcatagaatctgtaattcagacacatgtgtcaataaatgttagttatcaccatgattagtattattattttcttcctgagaaagagaatcaccatttttagcttagccaaagtattgtataaactgcagtgtccccaacctttttggaccggcttcatggaagaaaatttttccacatgaaactgttgcacctcttagattctcataaggagcaggggacagagctcttgcggtaatgctggttcaccagccgctcacccatggtggtccagggcccaggggttggggacccctggtataaaagatcccagagatcacacccgctgtgacccaggtcacttctgggccttaattttgacattaggaaaataaagaacttggattccctgaactgtgactcaaggagggaattagtgacccctgggttctagagttgtgaaacatttggaaat

SEQ ID NO: 4114 - DNA, 624 bp, Homo sapiens
  source 1..624: mol_type = other DNA
tccccgcggatcctggcaaggcaggtaacctcccttcccccgcacctgtccggttcaggcgcaccagccttcccgaagcgcagcctagcggtgggaatggttcggttcggaccccaacctgggggaaggaaattccagctggtccccacttatgtgcggccgtgctgcagaggcggcggcgagctcccggactcgagagcgggctccagcgaggcccccagcgcccagccagcgcccgcaccccgcccgcgggacaggggaggtgctgagtcggccctgcccgcgctgggctgagcctcgcaggggttgccgcttctccattcaagtcctggcttgagtctcctttggctcccaacttctcttcgggaaaagttttcctaggcggccggaggagcctgggagtgcgctgccggcgtggcagcggtgcccgtgcgcccggccccgctcctggatggctacccagtaaaccccacggggcgggggctgcagcgccaccgcctcctccgccgtgctctgggcgcccgctagaccttgtagagacggcggcggcgcccgcgggctgggagccggggcccgcaggtggaagcgcacccgggaggcgggccggccggggctggagcggct

SEQ ID NO: 4115 - DNA, 568 bp, Homo sapiens
  source 1..568: mol_type = other DNA
tcgagggtcggactctagggggggcaagctgcaggccccactctccgcggaggccccaatcctccccgcggatcctggcaaggcaggtaacctcccttcccccgcacctgtccggttcaggcgcaccagccttcccgaagcgcagcctagcggtgggaatggttcggttcggaccccaacctgggggaaggaaattccagctggtccccacttatgtgcggccgtgctgcagaggcggcggcgagctcccggactcgagagcgggctccagcgaggcccccagcgcccagccagcgcccgcaccccgcccgcgggacaggggaggtgctgagtcggccctgcccgcgctgggctgagcctcgcaggggttgccgcttctccattcaagtcctggcttgagtctcctttggctcccaacttctcttcgggaaaagttttcctaggcggccggaggagcctgggagtgcgctgccggcgtggcagcggtgcccgtgcgcccggccccgctcctggatggctacccagtaaaccccacggggcgggggctgcagcgccaccgcctcctccg

SEQ ID NO: 4116 - DNA, 443 bp, Homo sapiens
  source 1..443: mol_type = other DNA
ggatggatgtactgaacacatatggacttttttcttatttcctaaacaatacagtataacaacaagtaaatagcatttacattgtattaggtattataaataatctagagatgatttaaagtatgctgaggttacatgtaaataccatgctgtttactatcaaggacctagggttccagaatgtaagaggactgaatctttttctaaaagttaccaggaagcgtttgaccaaagcatgctcagtagtcaagtttgctaaaaccctaggaaagtttttaataaaaaattttcactcgtcgtctctgccattgaagaggggtagcgaagatggcccatgggcccaagggtgcttctgcgttcttacctgggcttcagaccccagcaagaacaagttgtcctctgcagctccagggaagagtagctctccctgttctctcagggag

SEQ ID NO: 4117 - DNA, 620 bp, Homo sapiens
  source 1..620: mol_type = other DNA
taacacaagtcccctgcaggatgttccttcctgtaagatctctccatcagtttaatccaaatatgtttttaaaactctaattttaaattcatttcttaatgtcacgttgttttctgaaaacacattatgaaaaatataaaatatgtaaatatattagaattgcggttttgtcattactttttaaaaaaaaaaaaaatggcaaaaacacaagcacacagctgtgtctgattcctttacccttgtaaaagttccaataagtgaatacaatctattacttaattcttagtttatagactgtcattagacatactgtcatgtcagagctgttataggcttttacaaaaagaaagcttaaacctgccaccaattagaaagatctgtgtcacaggtgcgcttttaaaagaatggcaatcttaaaggtctcgagggtcggactctagggggggcaagctgcaggccccactctccgcggaggccccaatcctccccgcggatcctggcaaggcaggtaacctcccttcccccgcacctgtccggttcaggcgcaccagccttcccgaagcgcagcctagcggtgggaatggttcggttcggaccccaacctgggggaaggaaattcc

SEQ ID NO: 4118 - DNA, 389 bp, Homo sapiens
  source 1..389: mol_type = other DNA
ttcccaaattgaaatattactatgatttaacaatttcaattattttgaaaataagtagtcaaactcattatgaactatcttatgatacctaggcatattttaatgtgcacatgaatcccctgaagatcatgttgtactggagattctggagtgcagtgacgctatttctgctcactgcaggagtagctgggattacaggtgcgtgccaccacacccattgaactcctgacctcaagtgacgtgggagagatggtgtgatactgaaatagccagttacattattatatatcactagattgatctttcaatccccaggctgcgtaccggtactggtccgtggcctgttagcaggaggtgagccgggtccagctagcttaccgcctgagctc

SEQ ID NO: 4119 - DNA, 690 bp, Homo sapiens
  source 1..690: mol_type = other DNA
tggcccacagctgtggatgcacaatcagattctctgaggcggaatctagctctgcaattgtagttcaaatgtgtagccaggtttgaagaaagatagttgacaaacgcttttcaaaataatttcaaagtgctgttaagtaaatatcttaaggaagcaacaaaaaatacacttgtgtccatttctactggcatttatttatgtgtttaaataattttacatttgaaattgttaatttattatcccaatgatatttgaaagttgattcagactggttatggtatattttgcaagctaaccatacaaacaatgtacacatttggagctgagcatccataactttaagtttgtacaactatacattcactcactgatttatttcttacttacaaattgctatctggagaactaaatcttgaataatcgaataagagtaggtctactgaaagatattctttgaatctccaagttggaagcaaaacactttgatttttaattttttaaaagtgcaatttaggctaaacgaacatattttttaaagccaaaatgcattttaaaagatattttcagaaaatggcatatctgagaaagaagtgaattaatctaatagtggagcgaaattaataattaattgcatttcttaaaaagaatctcattcctaagatgagtcagcttttaaggagacatttcctg

SEQ ID NO: 4120 - DNA, 584 bp, Homo sapiens
  source 1..584: mol_type = other DNA
aacatacatctggattgagaaatatcttaataactgatggattatttttattttctttatgtattgtgtgcttcaatatcctaataaataatattagctaggttcactgatgtatagaatctttttctacatttagatatttcttgcaaatgttttaccagaaagcaacacaaaaatactatcagtgagtatgtgtttacactggagtcaaattcctcaccttgaaaataattcatcccaggagctttcgcaaaactctacacgtaaagggtaatgtaaacttaaaacctatttttcaaacagtaatttatatatcttttaattttagtagtttatgtgtgaaacaatcatgcaaaacaacaaagtgataaaattttttaaaaaaattagtgagatgcaaataactgaatatgtaaaaggtctcatacatatttatatgtagtagataagttacatttttttatttcaggtttactttcctccctgtgacagaggataatggcggtacggaaaggtctctttgttttcttatccacagagaaagaaagaaaaaaaattgtaactaatttgtaaacctctgtggt

SEQ ID NO: 4121 - DNA, 635 bp, Homo sapiens
  source 1..635: mol_type = other DNA
ttcaagtctaatataatacttgacatcatttttgtccatccatacagttggtttgtcaatatgaatgtatttatttaattgatgataaactgtaataaaatcatagttgtttgctctaaagtagatatacatacatctggattgagaaatatcttaataactgatggattatttttattttctttatgtattgtgtgcttcaatatcctaataaataatattagctaggttcactgatgtatagaatctttttctacatttagatatttcttgcaaatgttttaccagaaagcaacacaaaaatactatcagtgagtatgtgtttacactggagtcaaattcctcaccttgaaaataattcatcccaggagctttcgcaaaactctacacgtaaagggtaatgtaaacttaaaacctatttttcaaacagtaatttatatatcttttaattttagtagtttatgtgtgaaacaatcatgcaaaacaacaaagtgataaaattttttaaaaaaattagtgagatgcaaataactgaatatgtaaaaggtctcatacatatttatatgtagtagataagttacatttttttatttcaggtttactttcctccctgtgacagaggataatggcggtac

SEQ ID NO: 4122 - DNA, 606 bp, Homo sapiens
  source 1..606: mol_type = other DNA
caggccatctctttattgaatcaaagattggattatcggctaatatcaaagtttgtagttccttggctacaagcctacatacggtaattgctgtttaatatgaatttttatttttaacccttacatatagtaagggttaattgctatttaatatgagtttttatttctgagaaatgtgtcatgagtgtacgtaaaacctagatggtagagcctattacacaactaggttacatggtatagcctattgttcctaggctacaaacctatactggatgttactgtactgaatactacaggcaattgtaatgcaatggtatttgtgtatctaaacacgtctaaacatagacaaggtacagtaaaaaatatggtattataatcttatgcgaccactgtcatatatgtgatctgtcattgaccaaaaatgccattaagcagtgcactactgtactttctctttctgttaacaaaattaacacttaaaatcaacaaagttttaatgtttcgttcagacatatgccattttgtagtccctgtacaggaaatgcctcttcttacttcagttaccagaatccttttacaggaaaaaaaaaaaaaaaaaaaaaaaaa

SEQ ID NO: 4123 - DNA, 738 bp, Homo sapiens
  source 1..738: mol_type = other DNA
catgagttctaaaattggttctcagcacaagtgggagaaaaaaaatgcctatccttttacttcaaattttaaaaaaatgatcctggccttcacaactgttcataagaagaataattaattaaacaaacatatattgagaacatcatatgctcagtaaaactttgattctataaatggtgtcatttaccaaatggattcttttgacaatttaattttctcttatctctctaagaagatgtaactacacactatagtatactactacaattatcaaatttcatgttgcatgtaacttgtcgtctgtatttttgtagttagattagattaactaaagatttttcaagtttgcctttaagtcatttaatacaagtgttatgtgttaacttctctagtgacaaaaacttatacttctccacaaagagatgtgatgttcattatcaataagcttgacatctaaaattgttttataggagatacatattactttttcagatggtatataaagttaaataaatcttaagttttcaatgatgggaaaagcttccatttagtttaaacataatgtaaagaaatttgaatccccaaaatagaattataattctaaaaattcatactataattcttcttaaatgtttaaattacagttaattaaagtagttgatttcaaatagagtggaattatgggctgtacatcatttaattttatgtgctgtaatttagcatgctgttttctaacag

SEQ ID NO: 4124 - DNA, 766 bp, Homo sapiens
  source 1..766: mol_type = other DNA
agaaatcgatgttttaaaataagttccaataactaaatagttctgtatttggaaatccaaattccattttcagtttttaagaaataattttatatatttaaaaaaatttttagaaaggcaatctgactacacacacatacacacacatatttgtatatatattaatgtaatatttgtgtggtgtagttttccctgaaactacttgttaacattgaaatcagataaggtaaatcatatgttttattgaggtaagctgtctaaaataagttaccgcaattttaaaaattaataaaaaccatatgtcctttagaacttaaattgaaatctgcattgttcggaatgtgtcatcttttgaaaagataaattaatcatctacttcatctatatacattaataaaaaagattcaccttctcatctactttatcaaaagtaattagtatatctatttttattcacatatagtatcttttagtgattgagattttaattgaggatattttgaaggaaacagcaattatctttttacaaaaaacaaccaaatcattcagtagcgcaaggctctttaataacatttgtacaaaagtactttcagaaaatatgagataggaaatggctttttgcaagttctccttccttaaattattattcaacctcttattaaaataaaatctagttaacttcttttggagcttgctcaaacattttctataataaaaaaaaatcttgtgaagggatttccataagttgtgctgcattaatgcttgt

SEQ ID NO: 4125 - DNA, 508 bp, Homo sapiens
  source 1..508: mol_type = other DNA
cagtgtcataaatggaacaaatactgtttaacaatttttttttgtcttaaaaacagcaaaacccaccatcttctgagagcatcccaggaaggggaggtgcgccccaaattggcgaggctctgccaaataccaaaggctcttctttggaagaagactcctcctttggacgtgaggcgcccctaccaagttgctgccctcccgaagtggtcctcggaggcagcgcaccccttcataatctagaacttctggttccccaaggacccagcagactgtgttctggctacaaggctccaatgtagatgggccgacaacttgcgcggagcagcagcctcgccgagagaagccgcgcgacagccaggcttggcccggacggcgcccccaccctgcgcgcgcgatccaaggttctcacctggagcgctcgggcgggaggctggcgcgcaggcgcggaagtggggcctcgcccctgccgacgtcgcaggctggagctcacctgggagactccaagtgg

SEQ ID NO: 4126 - DNA, 434 bp, Homo sapiens
  source 1..434: mol_type = other DNA
ctagtttactaaagtcttaaaccctaactcatagatgtcctagtataaaatagcactataaaaccaatgtcttagagtagtcaaatactaaagatacacttgttgatactatactaaactgtattttaaaccttatttttaggtcacgcatagcacgacaccaaaaagtttttagctagttttctatttatatccctagatatctttgggatagggccaaagaaatgacaaaggccatttttgcagcagcagtgtcataaatggaacaaatactgtttaacaatttttttttgtcttaaaaacagcaaaacccaccatcttctgagagcatcccaggaaggggaggtgcgccccaaattggcgaggctctgccaaataccaaaggctcttctttggaagaagactcctcctttggacgtgaggcgcccctacca

SEQ ID NO: 4127 - DNA, 440 bp, Homo sapiens
  source 1..440: mol_type = other DNA
tgaaagatttcatgattactgtcatgaatcactattattgatgggagaaaaagtttatatcagtagctgacatgtatagtgacatttttgccagattacacacaaaaaaatataactgtagttttttcatgagccaaatttcaataacagctattaaatggtatttaaaatgcatcatttatagaaatgacctttttcagaagaactggaaaattttaactcatatatactagctgaaggaaaaaaaggttcttgcttatatttcaataagccctctagaaaagaacattgttttcttttttttaaatacacaatttttactaatgcaaaacagaatttctggatacctgttctttttctaattttgcagatcatttaacaaagtgtacagctgaaaggtggtgacattttatatatataatatatattttttttcctct

SEQ ID NO: 4128 - DNA, 512 bp, Homo sapiens
  source 1..512: mol_type = other DNA
tcaatgtttataaactccttaagaaacttaaaatctgataattaacactaggatcaaaatttggaatccacgtgaaccttatgcactattttaaatatttatttaagcagaaatagaaaatcttagtctattatatttccatttaatttcctggacttaagaaatctatgtgtgactgaaaacataaaaatttgcattgggattcattttattctcagtttaaaatcagtagtatcattgaaaacaagacactaattttctggaagtttaatttatttgtccctcttattatcggggctggtaaaaaagggcttttttctgcgccaccttgtggccgtaaaacaacttgcccacgtgaaagttcccgcgccggcagagccttgctgagagccgcactgcgggaatccgagtgacaggaaacaagcccggaccctcccgggcggccctcgcagccctcgggcaatcgcggcgcgaccccgcccctcccgctggggcccggggcgctagagcgc

SEQ ID NO: 4129 - DNA, 504 bp, Homo sapiens
  source 1..504: mol_type = other DNA
gtttctctttgagaaagataattcaaccacaaaatgaatttttaaaaaatttattttcacagtcgctgctctgaaattcagaacccatatgactgatggcatattcagacaggtctggaaaagcagccttttccttcgaaagaaaatgtattatttgcttgcctggaactgcaattcaattgattttatatatacatatatataaagaaaacagaaaacctcttcagagcccaaggtcggggaggcgctggcctggcggtgttgtctggctccccagccactgccccagactcattagccgattctgctgagcaccccacccaatgggtggccgtggatggcaggtcgtgcaaccccctcctccgcctcgcatggtgcagaggctacagcgtcgccaccaccgcgcccctagctgggtccccgccctgcgccgcccgcaggagtggagagagggagggcggcgcagctgccctcggggaggcggggctgctacctccacgggcg

SEQ ID NO: 4130 - DNA, 311 bp, Homo sapiens
  source 1..311: mol_type = other DNA
ttatgctctagaaaattcatttgcatcatcaccattgtccattataaagaaatcaagtgaatgtttgatgctacaaaataattattgctaattatagatgtgatcagggtattgagttaaaatcttaagttcttaccattcagagacatatgctgatatatttttagtaaaagccagctccagctgactcttgactccagatttgaatgcactggaggttaaagaaccagagttttctgtcttccctcccttcccggcagctgctggaggagacgccacagctgctgctgttactgcatctgcagcaggtc

SEQ ID NO: 4131 - DNA, 503 bp, Homo sapiens
  source 1..503: mol_type = other DNA
caaataggcattttatatgaaatagagtatataaagggcaatttcctttctttatttgagtttgtcgttaggccacaccacattagattttctatttactgagaatcatttttgagctaaatggcaatgcgccctcatgctgaatgatttaaagccaatattaatgagcatttttttttttttaactaaaccagcacagcctttacttaagccaacactagagtagtgttttgctttatatgtgaagccttaaaaaacaaactaatgttttacatatctaagaacattttgtcaaagaaaagcaatgtctcctcttcccaagaattcatgttaattattgcaccagaataaatggaaactttttcctgctttattttcatattcttgactcttaaaagattgaaagtattaaaacaaatgcaagtaattccggaactttaatccatgcactatgaggcagagtggcctcagagacactcttcttaaaagagtggttgactcgg

SEQ ID NO: 4132 - DNA, 543 bp, Homo sapiens
  source 1..543: mol_type = other DNA
aacattcactgttaaatatgacacctataattaggaaaacctatggttttaccatagcagtttttatttttggggtgttgaaaaaacagcaattaaaagcttccaacacagtttattcatgccccaataaattataagggtgtagaatttgagcaaactttctaaaccttccctgggatccaggcggcttgtaaggaatcaagtttcatttactaagaaatttctaactggcgtcttgcaaagggacaccatgtaggtatccccaacttgtaaatgaacttcaggttctcttcggccgttcaacgaccccgccctcggggtccccagggggcgtcctccggcaagcctgatcgtctggggccaagacacaaagcggcctgactcctttggtgggaacttccccggccgccagcggagcgggagcgggagggggcggcggagagggggggcggcggttcccctcgccgaggcggagaacagcgcgcgctaggctctgggcgcgcggcgagcgcagcggccgccgcctcctcccttccccgcctc

SEQ ID NO: 4133 - DNA, 407 bp, Homo sapiens
  source 1..407: mol_type = other DNA
ctgtttaagccacctagtctaagcagcctggactaagaagaactgacctttgtgtttagcagcatgaagatcacaggtgaccggccattcttcagtttcactttcaagagatagagtggaaaaaaagaaactccctctctctgtgtgtgtgtgtgtgtgatgtatacatgggccatggaatgaattcacacatggctcctgtatcaattaggcctcacaggcctaatgccttaaaggttttagattcaaaaggcaggattgcagttgctatcatcatcatcatcatcatcatcatcgtcatcaagtagcaattaataatcaaatagcaattaagtgcctaattttttgtggcagaggcagaaggctcttgccaaacctccaagcgcgggagtggaggatcctttccc

SEQ ID NO: 4134 - DNA, 508 bp, Homo sapiens
  source 1..508: mol_type = other DNA
taggcctcacaggcctaatgccttaaaggttttagattcaaaaggcaggattgcagttgctatcatcatcatcatcatcatcatcatcgtcatcaagtagcaattaataatcaaatagcaattaagtgcctaattttttgtggcagaggcagaaggctcttgccaaacctccaagcgcgggagtggaggatcctttccccctcctggagcagggctggttctgaagcttggcggcagcccctacctgctgacccaccgcctccgggcgcacgggaagaggactgagagcccgggggtcgactttaggtcgtcgccctaagcgcaaagctgagagcaggggcgggcgacactccccggagcggtgcccctgcgcccagggcgcagcgactgcgccctgccctgcgggtgtgggcctgtttgacgcgaagacgagccaatcagggcgggcggcccgagctgccatgtgacgggcaaggcggcccctttccccagcgcggccagagggagg

SEQ ID NO: 4135 - DNA, 341 bp, Homo sapiens
  source 1..341: mol_type = other DNA
aatggctgtcgtacatcaataggccattcattggaaatctaatgattgaatagaactcaagctgtggttgagttcttgttctgtctatccttttgagtgatgaaaaatgaggccagatcttctatagttatagttctataggccagttgtttgctctctctaggaattagctaaccctcagagaggcagtctgtctccacatgattaatactgcgttcctgcactgtcagacctcaggatcctgcccttgaaagtccagggctgggacttcctccttggccctttgaatcccggaagtccaggacacacccaaccttgattacagtgtccagaatgctgga

SEQ ID NO: 4136 - DNA, 348 bp, Homo sapiens
  source 1..348: mol_type = other DNA
ttagtggtgtttgtattgttgatgaaaatgaaaagaaactagtatagtaaagaccttttggtgtataataagaggctttattttcacaaacatatcatagtctaagattaaaataataactttgacttcattattttagccaacttagaaagcatattccagagtttctggctagtttcttccacttctgcaagatagtaacatagtgttctattaggcctcaaaaacattctattattgaagtcaactttacaaggtaagatacgattaaaggtcaatatctgtatttgttccagaaacctttatttgaagccgataaatgactaaggccagcctgcgcctggaggc

SEQ ID NO: 4137 - DNA, 443 bp, Homo sapiens
  source 1..443: mol_type = other DNA
ctggtccatagtccagggtccagtcgtagtctatagtccaggaccagagtcctggtctatagtctagtcatagtccacagccgtagattatggacctatgacttagatccatctcaacaaacaactgtattctctagttaataaaagatacaatttgatcctaacacatttctattatccaaatgtctgctttcttgtcttatagtcaaaaaacaacacatttccatatatattctatcattctcttggataaagaaaattgaactattcttattttaaatcagtgatcagaacataatctgtcatatcatatatttttcatatcttaaatcatgcaataattatttgcaaagtcttttcaccaaacatagaaattgctaatgtctggtaaaaatttcattgcataagaaattcattgtgtttctatccaatcataaatagat

SEQ ID NO: 4138 - DNA, 198 bp, Homo sapiens
  source 1..198: mol_type = other DNA
ctagttgttacacctatatattggaggagctcctgcactcagacttttcaggagcatctggatcctgtgttatgtttttaagtaacttttcacaactacaggcctgtaaaaacaccctcagagggtttcccaagcacactctgtgtttgggtagggacattgatccttaggcaaatagataatgttcttgaaaaagtt

SEQ ID NO: 4139 - DNA, 380 bp, Homo sapiens
  source 1..380: mol_type = other DNA
attcatctttggatctttttagccaaataggcctcaacttgcatattacacaatcagctgcatctagcatctgctcttaatttcatttgatattttatcatctcagttaagattctgggaaaaagaagttgccttctttttgaaagggattgcattcttaagccaggaaaaaaatttttaatgctcacatgtgaacatgtgatggtcataccagcttgttgggtaagctaaaaggatatgtgctctgtaaataagaaaaatctttattcaaagaatctatcaaacatctctatttgtatatctaaagattgcatagtagagaaaaaccctgcttcatcttacagctgggttggacaggttccctttacagtaaagtacac

SEQ ID NO: 4140 - DNA, 309 bp, Homo sapiens
  source 1..309: mol_type = other DNA
tataaaagggtaccggaaccatggagaagacgttcgctctttttcaattttgcttcaaaatgagcagacttgtaagaagcgatgtggtgctgaataattggatttccccgtgagccgcctcgccggcttctgtgcggggcaaaccctgcggagaggctgtgcgcacaggagtgtgctcttgtatgcacgcgtacacttgtgcatgcacactgagcacgcgtgtgttcgagtgcccactcctccccgcgctgcaaagtgcagggggcgggccgggcggcagggggcctgcccgctggattcccgcatgct

SEQ ID NO: 4141 - DNA, 553 bp, Homo sapiens
  source 1..553: mol_type = other DNA
aaagtgggtttgttgttcttttaaagaaaaaagaccactacttattttaaatgactctacctagacagatatgttcattcatgtgctcattccagttgaaccataataactgcaattgtgaagggtggcaggctagattagcaccatctcctccccttgtggtcccaggatacgccaggtcaactgtgatcaactctgacacagacaaactctgggaggggaggaggcatcctttcctaacataaattaagacccataagtaattccaaaacctcattttattatgttgtttttatctaaacaatctcagagactgatttctcctacttattctcttaggagggaagattatgaagaataatcacaatttgaaaactattaaaaccaggcagtttacaaaatatttatttctttgttatattatttctgctgaatttggtcaagagattgtactaatcataaaatgaatgttattgatcattttaaagtctcttctaaaagtagctaaatttatactgctgacacgttgtgtcacaatgggagtgactcacag

SEQ ID NO: 4142 - DNA, 333 bp, Homo sapiens
  source 1..333: mol_type = other DNA
ggagtgcaatggtgtgatctcggctcactgcaacgttcaagtgattctcctgcctcaggctcccgagtagcgacctcaggtgatccgcgctgggacaggcctcagtctctgagccctgtctggcaagagagccccaggtaaggaatttgaagctttaactctaaatttcttttttcctcattctaaaaccatcccaataaaatttataaaagtgttcccttctattgctctatagagaacaacttgaacattatgaaatactcagttttccctttgagatagtctttcagaggatccactgatgccagctggtctgagggaaactgattcagc

SEQ ID NO: 4143 - DNA, 307 bp, Homo sapiens
  source 1..307: mol_type = other DNA
tattgctctatagagaacaacttgaacattatgaaatactcagttttccctttgagatagtctttcagaggatccactgatgccagctggtctgagggaaactgattcagcccagaactcttgggaagatagattcgaggatctcttcccgagggcagaggcacgatcatagctgtagttgagcctgcaggcgtgcaccaccacccctggaggtcaggcacgctccccttggcggactggcttctcagtgggcgacgcgcgcgcactctcgcggaagcttgagtctcggcgcccgccgtagacgtcg

SEQ ID NO: 4144 - DNA, 593 bp, Homo sapiens
  source 1..593: mol_type = other DNA
gtctggtaacaaatactttgaaacaaaggtgtgaaattagtataaaataattataaactactactgcctcaaactgtatgcatctgctgacacattgatcttctaaaccaaatgtagggaagaaattgtatagcttctaagtcattctttttatctcctttcaagttaacagtgctaatcatacattacaaagcacattttttacaacttaaggtataactcttgtagacattctgctaccagtaacagaatgtgaaatacatttagttataaaatcattctgcatattaagttccttttcgaatattatatgtccagtttgtgaaatagaattttctttgtcttacaggcttattttgctgatggcaataaggtaaggacatttattttacctacagtatatgaaaaaagtttctaaattccaacatttagcattcacaaacttatgtgaaacctgtatgagttgagatggatttctattaaagatatctctagtttaaagatactagtcacatggaatagtttttatatttacagcttttatatttaaaacttgtaagagtttttttaatgattgaggaaaaagtcattta

SEQ ID NO: 4145 - DNA, 549 bp, Homo sapiens
  source 1..549: mol_type = other DNA
ctctttaaaaaaatcacgttttatttaatgaatgataatttttgatatttaaaattacagattatcttttgtgatcttcatttgtgacaaggcaggatatgaataaataattttataatttaattcaatattaattacagtttttccatgtaagaataatttggaatgttttagaaaattagcaattcctctgcatttcttttttcaattatcatggcaacattaaaggttttgtaaaactagtacagaagtaaacatctttaagtttactacttctaaaagaaatatctatatcctagaaagtaaaaatttgtatgttaacaattattggaaatgagatcttgcttatgagtattcaaatgaacacatattcagagagccaaatttagaggagtgactcatttttatgattcatttttctgttaattcaataaacattttcttgtagaaagttccagttgttactttcaatctataacagctgcaagaacaattagagttggtatctatatttagctagtgggattaaattgcaaaggcttcaagctg

SEQ ID NO: 4146 - DNA, 335 bp, Homo sapiens
  source 1..335: mol_type = other DNA
gctgcttcgcagggtcctctgcctaggaaaaccagagacctttagtgattatcagctgaaaattattgtcaagtgtcaaatcttgggactattaaaataccatggtgcagaaactgagagtatgagtttgcatactttcaaagttactcgacagagttatttcgtatatgctaaaaaataataagaaaaatctgtacgtgtcttttccatgtttacatttttaaatttcattttcctaagtatatttttgtgtatattataaaagtagtagaagcttaagcttgcgctagagcctccctcaatgagggcgtgacttccgcagtgcacgctgcgcc

SEQ ID NO: 4147 - DNA, 455 bp, Homo sapiens
  source 1..455: mol_type = other DNA
gggttactgctgtgtaaaactggtcattgataattaatttacctgatgcaagtgagtgaaaaatttaaatgatcataatttacgttgcctttaaacgacagaacaatttaagtcctctagttagctagcttaaaataattaaataatatatgccatattttctctagaaggcactagatttggcatcaaaagacttgctttggcattcaagaacagtgtttatttctttatctgtaaaacaacaaagaacatcaaagctctttgtaatttcttccgttagaacttatatcctagcgttaagtggaagcttaactggaagctccatgaaggtaggccttcctttctgataacctagcgtaagatcaataaatgtttattaaatgaggcactttacttcacaaggcattttaacggttacaagcgttaaactaggaatttaaaaggcaccaaaatcc

SEQ ID NO: 4148 - DNA, 286 bp, Homo sapiens
  source 1..286: mol_type = other DNA
cttttgtatttgtgttcactactgcaaaatgttaaaatcaatgcacaaaatggtgcttttatagcatttccatttgctccttaagactaaatcgaccatcctgtcccagctactcagctcacagctcctccgaaacacgggggaacttcgcgagagtctccacttaactgcacgacagccactgtggacaggacgtcaggaacagtgctgagtcttaggattttgaagctttaaaaatccgcagtcgctgccgccatgttacagcttgtgcggcaaaatgcgtcag

SEQ ID NO: 4149 - DNA, 484 bp, Homo sapiens
  source 1..484: mol_type = other DNA
taaaataattaaataatatatgccatattttctctagaaggcactagatttggcatcaaaagacttgctttggcattcaagaacagtgtttatttctttatctgtaaaacaacaaagaacatcaaagctctttgtaatttcttccgttagaacttatatcctagcgttaagtggaagcttaactggaagctccatgaaggtaggccttcctttctgataacctagcgtaagatcaataaatgtttattaaatgaggcactttacttcacaaggcattttaacggttacaagcgttaaactaggaatttaaaaggcaccaaaatcctctctccatgccaggactgagtgaagcgcttcactgcgtagcggagccggcgcggctgaccgggggcccagaggaagtccctgaggaccgcagcagtgcctttgccgctgttcagtcgagccccggggcctggggacggtccttcctctgccagccccc

SEQ ID NO: 4150 - DNA, 410 bp, Homo sapiens
  source 1..410: mol_type = other DNA
tgaagatacttcaaattgccaaagttctagttgtcaccatgacaacattaattgctaattttaagaaactgttgtagctagaattgatagagttctttagaagtctatttctattccaaaatcaaattgttataacaggtcacctgaattacagtactttatgtcacacgatttttttttaactctctaaaagcatttgacttagagagtatttcctcaactctcagagctgcaactgcgcagttttagggatgcttattgaggatgctttcgacctggtggagtccatttcaaaaggcatccctggataggtcagtttagctcacctgtactggcgccaagcgccgcggacgccagccggtggagtaccacgcggttgcttggcaacgccgccggaagtgacgccagcc

SEQ ID NO: 4151 - DNA, 552 bp, Homo sapiens
  source 1..552: mol_type = other DNA
tgcacaaactaatttctgtcttcaaatattttcttaattattccattatgtgttagaacattcgttattaaaaatctttttgttctttcattttgcagcaacttgttagtaatgaagttatctgtacatcaatgtgttagaaaagcatcttttgaaacctatttaccaagaaatttaaaatatctcaaaggtcctaacgtaaatattctaagcatatcattacgttttaacattcctatttttaaaaaactaaaaacagcgtttatgtcagcgaatccgcgggtttccgcgaggagatctgcggacgcaacgcctaggcctggctccaccccgagggtaggcatcggacccaatcgggggtcgtcccccatggggagcgcgcaggagcaggcagggcgggggcccacgggcttctcactgacccagtcccgccgtcggcagccgccccggcgcccgtgacgctcctgcgggtgcctcgcaagcgcaggcggctggcgtcacttccggcggcgttgccaagcaaccgcgtggtactccaccggctggcgtccg

SEQ ID NO: 4152 - DNA, 343 bp, Homo sapiens
  source 1..343: mol_type = other DNA
tgccagtcgttgactcactactagtgtctatcaggcactagaagcacttaataaaatcttgcgaatgaatgaatgaatgatatacaaaaatatttgatactggctttagagaaaatgaactttgtgtaccacatttcagcttaacccctgatgtgctcaccagcaccaaggcgccctcctgagtgctttgggagtgtacacacatgcacacgcgcgcgcgcgcacacacacacacgttattaataattcaggactcaggaaggggaaggcggcggcgcgcgctgtctcctggggaagcagtcccacctgctgtggggggcgccgctggggaggggccgagccg

SEQ ID NO: 4153 - DNA, 537 bp, Homo sapiens
  source 1..537: mol_type = other DNA
tgtggggacacattcatgttcttcgaatttgtgatacaaagaagaatgtatagccaatcaatagcttgttattgtaatgtaagttatcggtaaacaaaggaactgcctcttcttttttctttaaaagctacttgtaagtgctgctaatcagagcatatattcagggcaatttgaatccctcaaataaactgtctacttatattaattaatattgcatcaagttgatatgaactaggtagtatttattacccagagaagttgaacaacttgtagcaggcagtctgattccagatactgtattgttttcaaaactctaagatttcatggatctttgattttttttttgagaactactacaacacgatgtgtgtgtgtattcacacacatttttggaaaatatctgaaaaaaaaaaaataaatgtttatgagggcgggactccagggtccctgggaggccccggcagccgcgcatgctcagagcacagggaccgctccacctcgtccgtggccctgcccacccaggccgcaagagctgcc

SEQ ID NO: 4154 - DNA, 471 bp, Homo sapiens
  source 1..471: mol_type = other DNA
cagagaagttgaacaacttgtagcaggcagtctgattccagatactgtattgttttcaaaactctaagatttcatggatctttgattttttttttgagaactactacaacacgatgtgtgtgtgtattcacacacatttttggaaaatatctgaaaaaaaaaaaataaatgtttatgagggcgggactccagggtccctgggaggccccggcagccgcgcatgctcagagcacagggaccgctccacctcgtccgtggccctgcccacccaggccgcaagagctgccgggacggtcacaaaaggctcgccttcctcacgttcaggccgagcgccgcgtgggccgcagccggaggcggcggagccgagggggcgcgggcggcggcgaggctgcccccgcgaggaatgcgggatcctggggttccccgcacgtggctggtgcccaggcagagacgggactgtggctgccctca

SEQ ID NO: 4155 - DNA, 199 bp, Homo sapiens
  source 1..199: mol_type = other DNA
catctcggcctcccaaaatgttgggatcacaggggtgagccgagtaactgggaattacaggcgtgagccgccgcgccctgcctctccatgtgagaattgcaagtacaacaaagtgactgtgacttggcaatgaggcccccaggtggccagcggaaccccaacgctgcagctcggcgccgggccgctgggcggcgaacgc

SEQ ID NO: 4156 - DNA, 357 bp, Homo sapiens
  source 1..357: mol_type = other DNA
gacttgcatgcatggcaagccgggtgcacgcaccatttggaaagagaggctcagttcccagcacatgaacgtgaacctcccctttctgggcattattaattattcatctctcctggaacaatggcaggtaaggcccttcctcctctgccaggagcacaggaccctggtacctcaggcggccccagcaggctggcggcagggcctcgggttatcatcctgaagaagaagcttcctttttaagaacattcagctgcggcatcagaagagttaaaattagtaaggtttcagtaaatttgacttaaactatgattgaaggggattaatgcagctcaaggagtggggctggttcccttcccc

SEQ ID NO: 4157 - DNA, 408 bp, Homo sapiens
  source 1..408: mol_type = other DNA
cacatgggcctatgtgtcatgttagctggccagaaaagaagctttctggggacctggagtgcagtggcagaatctctactcactgcaccctggtagctgggctgacctcaggtgatccacgagccttggcctcccaaagtactgggattacgtatatagcccagggcatgctactgaatgaatagtcactgttgaatagtcactgtttccagatcagaaactcatggtgtttcccctgggtttatctgcagttggattattattgtgcagcataatgacatgcaaacatttgattctgctctgtgtcctggtaggagacactaaatagatcaggctcactaccaattagcatcatcttaatcttgcctaatagtgaagcaaagtcaccaaggatttggtggatttatc

SEQ ID NO: 4158 - DNA, 477 bp, Homo sapiens
  source 1..477: mol_type = other DNA
ttcccataactatggggggaaagtagctatcagattcaatgcccgcctccctgggaaaggagtgtgtgccaaggggctccctggcctccgacttgcatccagggaaagccagatcgggttatttgggtcgcaagcagcccacccgtcttgagtacgatattctcattccgcaggcgcgccctgggcgtgggagaaggtgggcccggaggcatcgcatccccgacccttaggctaacctctgacgctgcatcgggagataggtcaccccgtccgtcccggtcgcagtgcggttcccgtgaggaagacgggcgggcgcgaactgattaggggctcccccacggccggcggcctggaggagaggagtaggccgagctccggcggccactccgcagtgcgctctcgcgagccggggccgcgaggcctccaacgcggttccgcacccctaatgccccagggcggtgagcaccccgcggttcc

SEQ ID NO: 4159 - DNA, 529 bp, Homo sapiens
  source 1..529: mol_type = other DNA
gcgctggggctttcggccccccacagcccagcccgggcctcctgggtggcctggggagaagggggcgggacagcacagcttcttcccctcgggtgggcatgacgggtcgcctgtcctgccgagctcagcgcaaaagttggcctgaggaaaactaggaacgtcacaggagagccccggtcgctcgtcaggcgggcggccctggagcgtgcgcgccacccaacgccgcgctgggcggccgcccggccccgccccaggtcacagccctgccctcggccccaccgcggcgggcgggggacacgcggcgggccgggcgctgtcggtcccacgccccaccggggatctcgcttgggtccgctgtgtgcgcgactctaacaaagacactttgtcactttgggccccaagcgggtctccaggcggcaaggccccaaatccaattatttgtgtatatacatttttgtggattcaaaggatttgctttcgcttctgaaagagccgctattctttgatgattgggtagcggcaaacttca

SEQ ID NO: 4160 - DNA, 435 bp, Homo sapiens
  source 1..435: mol_type = other DNA
agagattaaatagggagtacacctgatattatgtgtctaccatgtgaaagtcgaatccagatttgagtccaacaacaaattgatagggacctttagaattctgtaacagaaacagagcagcagctctggcgctagagggaacctgggctgctctagctgggggagagccgtccagggactccccccggagacccataatcttcttggggcgacctcaggttgggggactaaggtaaccggtgcgcgtgcgcacgtcaatccgagggtgtgtgcgcccagtttccggcgccgcgggacacccacaaccgcggggctgtccctcagctcggccgcccgccccgccccgcccccccggacccgcctcccagccccgccccgggccctcctcgccgcgcccgctccgtcccgcgccgggttccccgggctgcccctgcc

SEQ ID NO: 4161 - DNA, 363 bp, Homo sapiens
  source 1..363: mol_type = other DNA
ttaaaattaaaaaagaaaaattgccaagcacgctagtatatacttgtagtcctagctactaggaaggctgttgacagagcactgtctcaaaaagaagtttaaaaatttttgaaaattaaaaataaaaataaataaaaataaaatagattaactgcacttgactagtctaaaaaacactgtaaacttagcacttttaggtgctactcaggaggctaaggcacaagactcgcttgaaccttgcagtgagccgagatcacatcactgaactccagcctggcagagtgagtaaggtaattgcagtttctctcatgctgcaactgtttgtgaagtaaatgagacagttcctgtgacatcacaaaatgt

SEQ ID NO: 4162 - DNA, 348 bp, Homo sapiens
  source 1..348: mol_type = other DNA
ccggcgcgtaaccgtctggccagcagctccaggtgtgggctccgctcgggcgctggcggagagacccgggagcgcagggcctctccgtctctgggctcttggcgggccagggcaaggggggctggtccgccccttccgggcacctctgtgctcgggtgccccatgcgcgtgcagcggcgctcgtgcgagcaaaagggacgcggggtccttttctctagacccaaagcgcgctttcgctcaaggaagcgtccgctcgtctcctacaatatatgggagggggaggcagaattcttcgtaggaattatctttcaaaggaaaaaaaaaaagcgtgttgagtacgttctggat

SEQ ID NO: 4163 - DNA, 300 bp, Homo sapiens
  source 1..300: mol_type = other DNA
gcgggccagggcaaggggggctggtccgccccttccgggcacctctgtgctcgggtgccccatgcgcgtgcagcggcgctcgtgcgagcaaaagggacgcggggtccttttctctagacccaaagcgcgctttcgctcaaggaagcgtccgctcgtctcctacaatatatgggagggggaggcagaattcttcgtaggaattatctttcaaaggaaaaaaaaaaagcgtgttgagtacgttctggatggcacctgcagaggagccccgccgctccgccgactagctgcccccgcgagcga

SEQ ID NO: 4164 - DNA, 423 bp, Homo sapiens
  source 1..423: mol_type = other DNA
attgccaagcagaatgagaacattataattagatctagttcttccatttattctcttgcattaaatgtattaatttgttgaattagctgctagaactggagatttcatttatggatttatggatttattaggcctcctaaaaatctgctattcacttaccgatagcaaagaaaattatttttaaattttaaataatattttcttattacaaaagcacttatcttcatatgcatacatacatattaatctgtattttgaggacatgtttttttgtctttttaaaaaagacaattcagtacatattcaaatttctccaaatgaaccaaaaatgtcctggcataggccctttcataggactctgactcgacaaagagaactggccagctgtcctgaaggaaggcccactaagttaacgatagcacg

SEQ ID NO: 4165 - DNA, 407 bp, Homo sapiens
  source 1..407: mol_type = other DNA
aagttaacgatagcacgagcaggtggtggaatgccagggaaatccaaccgtgcttcccacgtctaatcttattctcacaattagggaggaagctactgttttataaagggagcgtttccttttataaaatttagctgagactattcccctcagctgtacagttctacacacccggagaacagagtcacagggtcaggcgcgccaaagctgggggaagcgcatttctgttctctcgcgagcacgacgcggtgcctcccgccctcccggcccgcgagcgctcgggccccttccagtggctcgcggcaggtggcgctgtctgcggcgtcgcagcggcccgggctgcagcagagacgatctcccggcgggctgtgcggcccggctctccggcggcagcgagtgccacgtcc

SEQ ID NO: 4166 - DNA, 553 bp, Homo sapiens
  source 1..553: mol_type = other DNA
tctgcacagtacagaggggcaagaaagaaggaactctcaacttttcagttccatttaactcccgagaagcggcagctgagcgagagcagcagcataggtggcagcggcgctggagcccgagcggcgcggcgggggcgcgcctccctccggccggcgcggggacgctgcccccgcgcacgcgagtccggcaaccccgggctcccgcgccgcgcggcgatccgcgggtgcggcaggggcgccccggcgctctagtctctcaagcctgctcccgcggccgccgctgccgccgccgccgccgccgccgctaccggaggcgcaggagcctcgcttgcacaggcggcgcgtgacgccgccgccgcctgtaactgatgcagaggttacccctcagccgccacccacagcccgccgccgccgcctcccgggcgacgccgggggccgacgcactgcagaggtgccggcaggttccgcccgcggaagtgtcctcggccggcgcagcccgcgctccgcccgcgctccgaccccggcccggctggcaccccctcgacgcctcgcc

SEQ ID NO: 4167 - DNA, 644 bp, Homo sapiens
  source 1..644: mol_type = other DNA
ccttttatgtacaagaagctgtagaaagctacactctatctataaattttagcaaatgctgttatttactcagcggagacactagaaacaaattataagtttctagaaaccataccttctgcaagatgaacgctgtatagttttcctaaatatgtgattcagtaatcacatttttcatttagattttccacttactgttttaaaacaaagaattgctatacacaaaactggtaattttcaatttcctcattaaagattcttcactcttttttagaaaacacgagaaagttttattctgcacagtacagaggggcaagaaagaaggaactctcaacttttcagttccatttaactcccgagaagcggcagctgagcgagagcagcagcataggtggcagcggcgctggagcccgagcggcgcggcgggggcgcgcctccctccggccggcgcggggacgctgcccccgcgcacgcgagtccggcaaccccgggctcccgcgccgcgcggcgatccgcgggtgcggcaggggcgccccggcgctctagtctctcaagcctgctcccgcggccgccgctgccgccgccgccgccgccgccgctaccggaggcgcaggagcctcgcttgcacaggcggcgcgtgacgc

SEQ ID NO: 4168 - DNA, 570 bp, Homo sapiens
  source 1..570: mol_type = other DNA
agcaatgcaaggctgtgcataactgttatagataagcataaagatgtttgtgtggttaattaaagaaacagctgcctaagtaacagaggctctatttatagtgagagaaactcttactttttttttttccctcttctatatatagatgagtatagataagtatcacgtgattatttaaaggattgaaattccattttgatttgcctttcctgggtaggaaacatttacatcattttaaatttctactcttcagcatacaaaagattttatgaatactattcactgcagaaagagctctaaaaataattttgcaggtagggttttatagaacactgatagcatttgcctccaccaaagaaacaggagcatctgcacttgctgttgaaggtttcatttcttatcactgttaagtcacatttgaatggaaccattacagtcttgttggtcactttttttttccaaaaggaaaatcttgaattttatgtttaaaagtacaaagagctgtttttgacattctgcagttcattttggaattcacagtcttaaacctattcatatatggcattttta

SEQ ID NO: 4169 - DNA, 686 bp, Homo sapiens
  source 1..686: mol_type = other DNA
agaataattgttcgcatccccgcaggaggctcggccgccgcgcgcccgcggccctccgtcccgccccggccggctggcggtcacctggcacaccagcgcccgcaggatgcccaggttggtcctctgcaccacgcctgcgtcgcgcgagaagcagcccagcgcccggcgactcagccggctgcacacgttgggcttccgggtcgggcccatggaggcgcgggccgggccctgggtaggctgggccgccgagtggcgcgccccacactcccgtgctgggcagccgccgctgccttcgaatttcgaggcccagactttcccggcggggcccagggaaagctgagagaagggaagaagcactcccttttcgatctgccccaggctctctggccgctgacagtgcgacgctccggtaccgcgcggccggccggagccgctctctcaccggtagtgcctcgtgaggcagcccggcttctcccaggaactactcccgtcaggcggcggggagcgagggcttgcccggccctgcctctgcctgccgcggccccgcctcctccggcccgcggaggctgcgctgtcttgcgggcgcgcttctctgtgctgcgagtggctagctgggcagagccctgggggcgcggtgctgccgcctccaggtctccgccccgtgtgtgcgccctgcacttagggat

SEQ ID NO: 4170 - DNA, 510 bp, Homo sapiens
  source 1..510: mol_type = other DNA
aaattattattttttctcatcaagttatacaaaatgacactgaacgaaaaaagtgcaagcttgctgaaagtttagtgtgctgggaactttgaataacaaagtatatcttttacttagaataagaatgtaagcatttcatattttattccctataaagaaaaaagaatgagtaactcaatcccagacatgcggctgaagggaaagccgcggggcgtacctttagcacgggacgctgctttggggggatcgccctcgacacagcgcccctcccggcacctggccagaacctcccagggcgaaggtcggggccgagatccctaagtgcagggcgcacacacggggcggagacctggaggcggcagcaccgcgcccccagggctctgcccagctagccactcgcagcacagagaagcgcgcccgcaagacagcgcagcctccgcgggccggaggaggcggggccgcggcaggcagaggcagggccgggcaagccctcgctccccgccgcctgac

SEQ ID NO: 4171 - DNA, 468 bp, Homo sapiens
  source 1..468: mol_type = other DNA
tgtggatgaggctgactgttaaacattttggatctctaaatactaggcttttgtttgaaaaaatttctctaaaaaaaaaaaaaaaattctccaaagcagcatctaattatttgattggcaactggattagactaaacactaaacagtactctgaacaatctgtggtttttaagttggtatttacaaaaatgacacctgcaactttagatttaacaagattttaaaattacatgcattttttacctatacaaattatagttaagatcaacagtgaggtgaattacattgcgccgataattgtcaaaatatattcttcctctctcatagacattcttaaatttagtactttcctaaaagacataaagaatttccgttcaggaaagaactcttaggctttaagttagattttaaattttcaaagcaacataatgtcacctatattattttaaaacttttagaataattgtt

SEQ ID NO: 4172 - DNA, 374 bp, Homo sapiens
  source 1..374: mol_type = other DNA
cactggccagaaccggtccatggtcggtcttcttatcatgaaaaagagctgcagcatcgaaaagaaaacctttgtggcagttagaccatagtttatttctttctattttaaacattaatgctagtcagctgttgagtctaaattccaaaatgggacttcccttccggctgtagctagaaactcagctttaaggttgagtataaaatcctcggaattttctctttgagcatgagcgccctcggcggccgcgtgatcccgggggtggggcccatttctgagttggggccagctccccacccccaagaggccccacattccgggccagcagcccaagtccctccccgcaggcggagacagccccaagaagtcgacgc

SEQ ID NO: 4173 - DNA, 664 bp, Homo sapiens
  source 1..664: mol_type = other DNA
ttttttttcaaattaatacatgaaaactattaggaaagaagtaaaaaaataacatagctataaagctctttgaatgttaggttggaaagccaaggattttctttctcaaatttatttttagaatatttttttctacacaaaagaccagcccaaggacttggaatttgaatcattctagacttgggcaatatctagaacttctagaacaatcagttttctagaacatagaaaagatattaccttggtgttagctttaactcctgccaaataatgctttaaattatttaaactttaaaaaggtgtgtcaatgtatacattgcaggtaaattcatgttccagtaacttttgttttctttgtatgttaaaaatctaactgtggaaaacaataatacaaaatgctttatttcctaaaattgtttgagagaaaaccaacaaaatactaaagaattatttgctatgtcagttgacatatttttatttagattttgcctaagatgccacatgaagcctatataagacattctttccctaaaacttacatatgtatgtacatatatatatataatgttttacatcctaaacagtctacaaatgtgcagcagcgtgattcacatattgggtcaaagatcttacacactttatacagaagcttctacactacatg

SEQ ID NO: 4174 - DNA, 464 bp, Homo sapiens
  source 1..464: mol_type = other DNA
tttaactcctgccaaataatgctttaaattatttaaactttaaaaaggtgtgtcaatgtatacattgcaggtaaattcatgttccagtaacttttgttttctttgtatgttaaaaatctaactgtggaaaacaataatacaaaatgctttatttcctaaaattgtttgagagaaaaccaacaaaatactaaagaattatttgctatgtcagttgacatatttttatttagattttgcctaagatgccacatgaagcctatataagacattctttccctaaaacttacatatgtatgtacatatatatatataatgttttacatcctaaacagtctacaaatgtgcagcagcgtgattcacatattgggtcaaagatcttacacactttatacagaagcttctacactacatgtcctggcctgagaatattaggcgtagttttccagtttttggcacagggcccc

SEQ ID NO: 4175 - DNA, 494 bp, Homo sapiens
  source 1..494: mol_type = other DNA
acacatacacacaatacacatgtgattggggttgtgctgtaagcccctagagggtggtcaggcatataatggatgcccatacatgtttgaatcaatatgtagcctaatacagactgcttcttctacttcttaggtagggctagaaatcgaatctgttcatgtatgggcaagcgattcattgccagccctgtcaaagacacttcattaattcattgttattaatgggaacccactaagaggccttaggaaacctggggctttgtggcaaccacgcggcgcgtcgggatcccatgggtcgcgcttgttttccccgtgggaggcgcgtccccctcctccgcccggccggccggccctggaccagctgcctttctggccgggacgccgggcccctttccgcacgcggcgcgccccgagttcatttgcatagggacgcgcgcggcgccggcgagagggagggcgggcgcggccgggaagacggcgcgcgcgcgccctga

SEQ ID NO: 4176 - DNA, 703 bp, Homo sapiens
  source 1..703: mol_type = other DNA
attgaaaaaataaggatgatcagttttatacttatgtttaagatgtgagccatcataatatattatacattttgatagattaccagcagcgtgtataaacatttagacataattttaaggttcaatgaatgtgactatcctaaaaaacacagacttttaattaaatacttatttctttagttcctatataactaggaacttgccttcttttcagtagactgttaaaagaagggctttcaataaactgtattagtcacttaatatcatacactgaaaaattattttgaaaagatacttcatttatgataaaatttaaccagttttacaaatgtcatagcatgaaatgtgcacgttcagctgttgttatataatgttcttgctgtttattttatatactatgaaaaatgtgtatttttctataagaagatgcatcactttatgttatgcataatgtctagaaggcatgctgttttgcatttttcacccaaattgctggaaactaatgaacattttaaaggagccattcctttagctaaataaatcattttaaacattactttttgaaagaaaaaattattagacaaaagttaatattttaaaataaatcttgagaaactagagattaaataacttaatgaaacatatttcagagttgaattttggcagcaattgtaaataatatttataatctggtgatattaaa

SEQ ID NO: 4177 - DNA, 271 bp, Homo sapiens
  source 1..271: mol_type = other DNA
atgtggcatgcaagactacatcccgagtagctgggattacaggcgcctgttttgcgcgctaaacggttcttagtaaacattttacctaggtaaaatggtaaaattgcgtctccaaatattgatcaaatcaaccccagagaaactttcctcctgcaaagcggctgacggcattcgcagtggctaggcaacggcccgcgcagacttctcggcgttagccccgcctcttgaggcgcttccgccgccgggctcactgtgcggtcacttccggccc

SEQ ID NO: 4178 - DNA, 428 bp, Homo sapiens
  source 1..428: mol_type = other DNA
agaatcatcaatcttgcatttaaagtctggaaacggttacattctctatgcccttttatacttaaactccaaatttaggattaagactccattttacctttcaactgaatccaggggaataatttgcatacaaagtgctatgttgaacactagattgtcatgcaccaaaatgttgatgctataaatattgcccacctgggcgcgggggctcagagcgagcgcgcgagccgcggctggagcccgcctctcgcggctggagaggactcagccggccgcgggttctgctgcttgcccgggtgccctagccgcttcccagccagggctcccgcagtcagccccgcgcgcgcacgcgcgctcccctcgggcggcctcgacgcctcagggcttcggcagggctgcgactggccggctccagcgggcggggcggc

SEQ ID NO: 4179 - DNA, 563 bp, Homo sapiens
  source 1..563: mol_type = other DNA
tttgtcctgtgatcattgcacactccagacaggggaaggtgcagcgatgaaggttcagctcatagtgttaaatatatggctaattatgcgtatgaaaattaaacatcagtgttatgctaatgttcagcatttaatcaaatgaatcagtaactaatacatctgcacgtgtgaactttcacaagatcaatgaaagaaataattatcaacactttctaattacctaacaaagtaatttgggacacgccacaccgcgcaagacagaaggagcagcggcagatcttgcctccactagccctgccccctaggcctggtggcgcgcgctttggccgagcctaccacaggcctgggtttgctgcgggtttcggtgtcccccagggactcctaaactctggaagtcgcgctagacctcaggaggccacctggcgtcggtggctccagcagatctgagcccctaggccccctgggctccacgctgagccgcgctctcggggcgagtgagcccggggctctccgcgcatgggggcggtgcagccgcctttcctgggaggagaagcgcgggttcc

SEQ ID NO: 4180 - DNA, 618 bp, Homo sapiens
  source 1..618: mol_type = other DNA
acctggcgtcggtggctccagcagatctgagcccctaggccccctgggctccacgctgagccgcgctctcggggcgagtgagcccggggctctccgcgcatgggggcggtgcagccgcctttcctgggaggagaagcgcgggttcccgcctcgagctggagtggccagctgggcctggagcaatgcgagcgggccccagggagcgacagcggcgttggcgcagcggccggcccctaagccccgactccagggatgcggcagagcgtaccggggaggcgcggccggataggcgctgcgcctgttggccgcctcgggcgcccccagtgcgcgactccgcgctccagaggcagaggtcagtctcctcctgagccgccctagctctgcgccgaactgagtggcagagcggtcccgggggcggcggcgcggagccgctggggaggcgggaggccgatgagccgcgggccgcaggggccccggcgcagacgccgcagcccattgtgcttcctgcccggcgcgctctgttgcagaggagccccggccgggaagtgtggatgcgtcttacccgaggccgggccgcctcgcccgctctagtccagcggagcccgagcgcctcggaaa

SEQ ID NO: 4181 - DNA, 451 bp, Homo sapiens
  source 1..451: mol_type = other DNA
aaacaggattaaattcaacaaaccagataaaactttttatatttgttgtaaatttacagagaagtgataaatctagtatctacttgataaatctataatctttccacccgaaggaggaagtcctcgtagtggtttcaaatatactattagcaataatacctttaagtttatgtagcttctctttgaagcaacaaggaaaacccgtttcaatattatatgattgataattaaatcaattgattatgtcaagtgaaagtacactggcacttgctcacagaatgggagaggggaccccacttcttcctctgaggcaaaacgccaagtctgtttgcacctggggccgctgcagccgcagccgcagccacagcgcccaccatgtgacgcccgccccttggccgggcgttcccggagctccgcggaggtgacgtcgccagcgctcacgtgacgagtg

SEQ ID NO: 4182 - DNA, 555 bp, Homo sapiens
  source 1..555: mol_type = other DNA
gttggtgaaaattaagacgtaaattttttctcatccaagttcacaggcccctagggccctcatgtcctggaggcaggagccttcatgccacctactcctggtcacctgggcaaaatcctaggtgatctgggaacttcggttttctgatctgcaaaaagaaacacctacctttgtgtacattatacagcactatcggtgtttgaggacccagaacagtctacacagctgtagtccccaagtgttgggcacgccttaagcgctccataaacacctgtagaaatgaatgaatgacgtatgcatctgcacgtgggcccacatctgcaagaacaggctgctcaggccatgaggcccggtgcatcacctgcacttctctttataagtccacagagggcggcgcagtggggctgcttcgccgcgagctcgcctccggggctcccacgtcgtggcttccgggcaggtaccgggcagctggagacgccagagccggcgggtaaggtgcgggcggtgcgccgggccgcgggcgcgcaagggggcggggccggcgtcctcgtcact

SEQ ID NO: 4183 - DNA, 535 bp, Homo sapiens
  source 1..535: mol_type = other DNA
caaaaaccgttttctctcaaacttttggtaaaatgtgcttttctgataaaatcttaataatgaaataattttaaaaagcaataatggtaaaaataaatcccatttattatcttaacacagatacagcaactgaaacagataatatgctcctttttcaggtcccggggccgcccgtcacagaggagcgtttctggaacgcgctcgcagcacgacaccgcggtgtgtgcaagcgggcgggaaggggacgctccataccgcctcgcctccccgacgtgtacggggacggccgacacgctcaccccacacctcgccggctggggcgggatctgggcggcggctgcggcctggcgcgcgctccgcatctccttcctcgggaggctgggcgggactccggcgagggggcgggccccgcaagcgcccgccccttttcccgcctccttcccgctccgcgtcccgcccagcggcgcagggggccgggctccggctaggagggtgggggccgcgccggtgacagccgatccccgcccctgctgcc

SEQ ID NO: 4184 - DNA, 321 bp, Homo sapiens
  source 1..321: mol_type = other DNA
cagaaagcttgatgtctttataaatgaaacttaatatatataggagatacagttcctccttcatacctgtatagtaaaaaagccacaacataaatacctttggttaatctttctatagtatattattttaaatattagcataaacatgatagaaattaacgcttttatatcatggtaataattgttttattaggatcaaagcatgactctcccctgagcagggttggatgaaagcaatgctatgttggtagcaaattcctaaagcgtgtaatatgcaggtgatggaagcccaggcaggcccagggttcaaggccagtgact

SEQ ID NO: 4185 - DNA, 415 bp, Homo sapiens
  source 1..415: mol_type = other DNA
gaaagcaatgctatgttggtagcaaattcctaaagcgtgtaatatgcaggtgatggaagcccaggcaggcccagggttcaaggccagtgactgagaagctggcctctcattcctcactgagagactcgacgggcgtcctcccctccagccttttctgaaggggagacagcaaaggcaagtttcgacagctgctgaggaagactcatgggtttctaaggaaacaggcgcctgccctcccgccccgcctcagaggccccggggtgagggtggggccccagtctccgagggacgcagcggacacctgtcgcaggtggccggccaccggggtcgccacccccagtgtcccccagcagcgggaccgcggggtccccaccccggggcggaatccccacccacgggcgccgcagtgcagcgg

SEQ ID NO: 4186 - DNA, 564 bp, Homo sapiens
  source 1..564: mol_type = other DNA
ttaactgactgaaaatgtatttcatgctttatgagatacaaataagaaagtgcacgtttctgtcttaagaaaagaaagtaattagtaaatagagatattaatcagaataatgaatgctgttgaagaaatatgtttatgaagaatgtttatttttctataagattctaccagatataactggaaagctttttagttacttccatttactgacttttttttagagtaaataggggaaaatcccttttccattaaaatctttcaagccacagtgagaataaggattgtttgaagcaacagcagcttagtctttgctgaggtgctttaaaaacactgttagaataatataccttccagaggcatctgtctatctgtctgtagctgtcagaaaaatgaaagccaaatacttaaaaattaatatctcagaacacagatatcccagaagttctcaggtaaatccatactaacaatttcgcccacctgcagacaaggcagccccttgcctgcctgataataaggggcctgcattctcccaagggagcccagaaacaggaactccagccaacc

SEQ ID NO: 4187 - DNA, 574 bp, Homo sapiens
  source 1..574: mol_type = other DNA
caggtgatggaagcccaggcaggcccagggttcaaggccagtgactgagaagctggcctctcattcctcactgagagactcgacgggcgtcctcccctccagccttttctgaaggggagacagcaaaggcaagtttcgacagctgctgaggaagactcatgggtttctaaggaaacaggcgcctgccctcccgccccgcctcagaggccccggggtgagggtggggccccagtctccgagggacgcagcggacacctgtcgcaggtggccggccaccggggtcgccacccccagtgtcccccagcagcgggaccgcggggtccccaccccggggcggaatccccacccacgggcgccgcagtgcagcggcgggcgggcgggcgactcggccctccccgcacccgcgtcccgccccccgggtcccctccctctccccaccgccccaggccgcgggagcccgcggggagggcgggcctgtcgcagccgcgctggtcgccaggcgtccgggaggagcggggtccgcgcggcggacgaggcgggggcggaggcgcaggcagagcgagcgcgggaggtc

SEQ ID NO: 4188 - DNA, 216 bp, Homo sapiens
  source 1..216: mol_type = other DNA
gtctcactttcatccaggctggagtgcagtggcgcgactgtggttcactttagcctcccgagtagctgggaccacatcaggctaattttctgcttggcctcccaaagtgctgggagtccatggataataaaattcaaattcaaaatcctgaataatgttctgaattctgctctgttaaaattagcaactagagcagctcctcaaaattccagaggt

SEQ ID NO: 4189 - DNA, 360 bp, Homo sapiens
  source 1..360: mol_type = other DNA
cttggcctcccaaagtgctgggagtccatggataataaaattcaaattcaaaatcctgaataatgttctgaattctgctctgttaaaattagcaactagagcagctcctcaaaattccagaggtttcccaactagagaattaactcttgcggggcacaaaacagcctctatttggtgctgggggcgagggggaacacccccacggccctccccccacagcaaggcaggtgtgtctgggggcctcggcgggtgccggggcgcggggcggatggtgccccccgggcgcaggccagggaggcccgagcgccttccccacgccccgctcgcccgcgcgtgtgaggggagggcggcccagccgtt

SEQ ID NO: 4190 - DNA, 490 bp, Homo sapiens
  source 1..490: mol_type = other DNA
ccctgtaattgctggaagactccttccaattgtattcagtacaccaagagaggaacacagtatgtccatgcactctcttactgcaaaggaattaattattccccagagaaaagttttgatgagggggaaatgcgaatgttttcatttcaagcgcttgttttaaatgttaagagtataattagtgtcttctaaagaaactaaatttactttttcttgtagaagcaagttttgctcttcacgcacacaaaaagcctcgcttttttcgttgtaatgccaagtttggttaaaagggcaatgaaaagcaacagataatcgttaaaggttaactatactatagacgtcggcttttcttctactttgaaaaccacaagtaaacaagtcggcttcctgtgctttttggaaagaaagatcaggatttaactcattttattgcttcttctatgattttttaaatcttgtaaaccatggtgcgtgacccgcgccaccctca

SEQ ID NO: 4191 - DNA, 500 bp, Homo sapiens
  source 1..500: mol_type = other DNA
gagggggaaatgcgaatgttttcatttcaagcgcttgttttaaatgttaagagtataattagtgtcttctaaagaaactaaatttactttttcttgtagaagcaagttttgctcttcacgcacacaaaaagcctcgcttttttcgttgtaatgccaagtttggttaaaagggcaatgaaaagcaacagataatcgttaaaggttaactatactatagacgtcggcttttcttctactttgaaaaccacaagtaaacaagtcggcttcctgtgctttttggaaagaaagatcaggatttaactcattttattgcttcttctatgattttttaaatcttgtaaaccatggtgcgtgacccgcgccaccctcatcgcgccactcgctcaggaccgcgcagctgcacaaagcccccctttctcaaaggggattttaggagtgcccaaggctatcctttgaggggaaagacagcccgagccccgcccctccgggcccgggtcggc

SEQ ID NO: 4192 - DNA, 483 bp, Homo sapiens
  source 1..483: mol_type = other DNA
ggcgggggcagcagcaggaggggaggagggagccgccgccgccgccgccgccggggggcgggtgggggaggggaagacgtggatagcggcggcggcggtggcggcggcggcggccacggcgagtatctgcagcagcagcaacagcacggaaacggtgcggtggcggcggcagcggcggcccaggtgaggagcggctgaaccccggcccggctcccccctcgccccccgccccgggagctgcccgcccgaggcgccaacgctccgaccccgcccgcgccgccccgcctcgcgggccccagcgtgccctcccgggggtgggttccgggcggaaggcggaggcccggcgcgcagcccgccgcccgcctgcccgcggaccggggagccggggtgcttggagcgggggacgccaggcgtgggctggagagcgcgggctggcgcttgcccgggcgcagtcggcggggaccgagtcggaaaggcggcccg

SEQ ID NO: 4193 - DNA, 586 bp, Homo sapiens
  source 1..586: mol_type = other DNA
tcaccggttcacgactttaaaaaattgtgcagcaaaatggttatgtgaccgattttttaaaacacacaagtaaaatgaaatatacttttaagtgcccgttaaactctccttccgtatgtgaggtggagaaaaatcctcctccagcctcggagggggtgtctcccctaataccagctccctccccccgggctcgtggggcgggtctggtttgctcagtagcggcagcggccgcagcagcagccccggggctgagcagcggtggcctcctggcagcgcagggaagcggcggctccaagagcgcgaggccctggggagatccggccaagactgctgccgggatggagtcaccggggacgaatttcctccccagctcagctccgcttggctaggcctgctccgagcgcctgcaaggtggaggaggcctgcgcctcgggcctggcagcggcagccggcgagggaggcgggcacagcggggtaaccggcgagccgtagccgctctcgaaaacctacgctctccccttccacccgggggcaaacaggaagcgcgccgcctggcagaccgacggacaggcgcctggaccaaggg

SEQ ID NO: 4194 - DNA, 502 bp, Homo sapiens
  source 1..502: mol_type = other DNA
gggagccccgcctgagggagagagcaacccttgctgctgccgccgccgccgctgccgccgaccacagccagcccggggccgctgccgccggtctcggccccgtgtgtgcgaccgagtgtctgtgagaggcagaaagctgcactcccctgcgcctgcaacgccgtctccccgccaggccccggggcgggcggcccggtccgccgggagcgcatccccctgtgtgcgggcgcgggcgggcgggcgggggcagcagcaggaggggaggagggagccgccgccgccgccgccgccggggggcgggtgggggaggggaagacgtggatagcggcggcggcggtggcggcggcggcggccacggcgagtatctgcagcagcagcaacagcacggaaacggtgcggtggcggcggcagcggcggcccaggtgaggagcggctgaaccccggcccggctcccccctcgccccccgccccgggagctgcccgcccgaggcgccaacgctcc

SEQ ID NO: 4195 - DNA, 494 bp, Homo sapiens
  source 1..494: mol_type = other DNA
tccccttccacccgggggcaaacaggaagcgcgccgcctggcagaccgacggacaggcgcctggaccaaggggcgggagttccgggcgggctgtcaccctcttcccccggaccgctccggccgtgtccgccgccgcttcgccgccgccttcgctcctcaccatgtgtaaggcggcggggagccccgcctgaggtgcgagagagcaacccttgctgctgccgccgccgccgctgccgccgaccacagccagcccggggccgctgccgccggtctcggccccgtgtgtgcgaccgagtgtctgtgagaggcagaaagctgcactcccctgcgcctgcaacgccgtctccccgccaggccccggggcgggcggcccggtccgccgggagcgcatccccctgtgtgcgggcgcgggcgggcgggcgggggcagcagcaggaggggaggagggagccgccgccgccgccgccgccggggggcgggtgggggaggggaag

SEQ ID NO: 4196 - DNA, 392 bp, Homo sapiens
  source 1..392: mol_type = other DNA
cctggaaatttgatctttgtacaattaagagcaaagtaaccatacaatgttctcagtatctcaaaattattaagtataataatcacagtaatgggaaaactgaatcttgagccagatttctaaaaaacaggtattgtggacagtgttggcaactatacttgaaggtaacagggagagatgtctcttagttggcaaaacacattcaccggttcacgactttaaaaaattgtgcagcaaaatggttatgtgaccgattttttaaaacacacaagtaaaatgaaatatacttttaagtgcccgttaaactctccttccgtatgtgaggtggagaaaaatcctcctccagcctcggagggggtgtctcccctaataccagctccctccccccgggc

SEQ ID NO: 4197 - DNA, 440 bp, Homo sapiens
  source 1..440: mol_type = other DNA
tctgtcactagagtgcagtggcactatcatattaatagatcactgcagcctagtagaccaggcaggcactgggacttgcacgcagtcaaattaggatttttgaaatccctgatttaaaccttaagttggttattaataatttaccagtgcactagtgatcttttgacatgttaaaatttctgagaagtcccacaataaggaaatttgtttaactttgtgaaataaacatttcccaaacataggacgttggtataaattttggtgcacagacccaagtgtctaagaagctatttaatttctgattttgactcccttttcttccagattgatgagggaaaaaaaccaggatctgccaggtctgaggactgaggaaagggatcctcatcctctgggtgggggtgcatgcttccctccggctgggcctggggctctcctgagcc

SEQ ID NO: 4198 - DNA, 603 bp, Homo sapiens
  source 1..603: mol_type = other DNA
atatgatgtgggtgtgggactcacaagccttttctgtatgtgctgagtactgttgttatgagctcaacacgcatacgaataacctcataaggtggttttaatagcctcattttataaattgaagtccagagaagttaatttgtctagggtcaatgagtggcgaaatccagattggaaattcccaaatttcaaagggaaattggctcaattaacgaagaaatccctagaccaaagtttcccttagccccttttccttcaagaacttttagttaacagcttctctccgcacagactgagacgcggtcctcggggctggtgttgcctgacttcagacgccccggatctcccggagggaagtcagggcccaaggcactccgcagtccagctgggaagcttggggctggaagactagagctcccgggaacggcctagccagcgccttcccctcttcccgcctccccggccggttaggccaatgggcgggacgcgcgggcaaggcggggaggggcggggcccatggtctgcgcgcaggtgccgctcggcgcccggcccgcccgttccgccgctgtcgccgccgtcgtgcgtgccgctcggcggagggga

SEQ ID NO: 4199 - DNA, 427 bp, Homo sapiens
  source 1..427: mol_type = other DNA
cattttattgacttaatcctcacaattaagtcaatcatccttaatttacagattagaagactgagggtcagatattacaaatattttgtgcaaggtcttaaggctaaaagtgactgctcgaataactagaatccaggtttgactccaatgcttttcattactatgatattcaccaaagtattacaactggtagacctgtaattatgtaaaacactaaacttcaacgagtttagtcatcaaaaagacactagattattaggtaatttttttaaagatctatcttaagtaaaggaattcgctgaggacccgctgcgtcagcgagctgctcgggctttaggcctagagaagcggaggctgtcctagggatctcagagacaccgcctctgggaaggaaagtctttcttgcatttccccataaggtgacagc

SEQ ID NO: 4200 - DNA, 530 bp, Homo sapiens
  source 1..530: mol_type = other DNA
acacaatttctctttttatcaaactgacagcttacggaaaactcaagtttctttctttctttgaattaagatcagggatttctttatgaaaaataacaagtagtaatactcaaatctttctacttcttgtgttttcaaagtcaaaatttgtagaaactggaagtgctactttcttcttcatctttatcattatcatcaagatgtagttgctaggttcataatcatttcatgaaaagtcattgaacttagttatcagcttcatttgttgactgggtaaaataatcaacgattctaaaaactgtttcgtatttgtctctgtggtactaaaatagaaaagtgattaaacaaaatatttgatctctaatttatctttgcatttcaaaacagtagaatgtagagtaaggaaatgtctggagggtttataaaatgattaagtcttccacccaataggaaattgaatgtagaataagagttctctcttttctttaaaaatggccataaatttgattttcagacttgaattcctatgg

SEQ ID NO: 4201 - DNA, 480 bp, Homo sapiens
  source 1..480: mol_type = other DNA
atctgcagctgacttaagctgtatattattaccctgacttgggcaccaaaatcacgtttcaaaactcatttgctgcctgtaatcccagcaatctgggaagctaagatggatatgcctgtagtctcagctactcaggaggctgaggctggaggattgctagactgtcgcctaatgaagcgataaggtaaggtaggtaagagcttttctttcttgagtgactcttttccctattactcaatggaatagtcagtatttacagtgatactttcaaatataattttcctaaaggaatctcaagttccatgaacagttatttttgttcactgagtggaggtgctcatctcctcttgtcactgtaccaaatagctgtgtattacacggaggagaaacatttaattttttttaatttaggttttttttcttgcttgcttcttaagcaaaaccaatctagtttctttttctgcagcaaaggaggaagga

SEQ ID NO: 4202 - DNA, 401 bp, Homo sapiens
  source 1..401: mol_type = other DNA
attcttaaaaagccttacgactcttaacatcagaaagcctagattaatgcttaattatatttttgtccagaattcttataaaccctgtgaggatagtttcaatacctttatttcaagaagctttggaagttgtatactgagtggatcagggctaagggtttacattttaatctattttgacccaggtctgattctaagcccttgctttaaaactccacggcggctaccattttgtgggagcagggaagccggaagtcccgccccggaggatcgcggctgggaggctcccagccggcagggcggggccgggtaccctggggctccgaggcgcctgagctggggcctgaaggcggggcgggggcggggcctcgcggccggcgaggggctgagctgacagggcc

SEQ ID NO: 4203 - DNA, 426 bp, Homo sapiens
  source 1..426: mol_type = other DNA
agcctctctagctgtacagggcagagagggtcacagccgtcttctggtgctcttgtcaggccaccatcagagaggaacccagcaccatcctggaggaagatgatgaaatgctggcatattttggatagggaaatgtctcccagttatttagccctggaaggctggttgctgcaggatccagagtgcagcactgtcgagggcccttcctcagctgccctgagggtggcagtcccaggggctgtcctaatgacagcagagcacccaagccccaggctcctctgtgagcgctcctccagtctcaagataggtgaccctgggggagtcaggagtgcctggagtccaggcatgacttccgtgtcctgggaacagacacagggttacccccatgtgaagcaagcagcaaattgatcttatcacatgcctctg

SEQ ID NO: 4204 - DNA, 556 bp, Homo sapiens
  source 1..556: mol_type = other DNA
ctttaattcaaagggatacaagccttgatattttaacaatatgatccgatggttattacactgagcaagaactttttgttgttattcctttcaaatgcacactcagtagctatagcgtcttagcgagtgaatgctctcagagctggtcagaaccccctgatgagcaccacatagtgggcagcagatgcgtgtggccccgattttaaatccatttttaaaaattaatttgaatttcagatatctgaaagcgttccttccggctcgggggggaaaggccctgggctagactccccttccttgcctcggtcccctcgccgcgcaggggagcgggactgaggaaactgcggactccagccccgaccatcccgccccgccgcgatcctctgcgggccgaagctgcaggcgcagagccccattgctggcggggcaggcgggcgcgcggagggcagggcgcgggccggcggggcctcgcggcgcgtccacatgtggcggggcggcgggggggcggcggcgccggaggggagggcccacatctcggcgaagttcccggatggtc

SEQ ID NO: 4205 - DNA, 342 bp, Homo sapiens
  source 1..342: mol_type = other DNA
ctttctcacctagttccatgtgggaaggaggcctggaaggaacaggcagggtacctttaagtaactgtctccttcatacttctcagactgagaaattactaactgctggtttttaggatgtttttcaagcaagataattgaaaagctgaaccactctgctctttgcttccctgagtgagagtaggcagagcatgacgtgggcaatttgctcgccagttttatggaagaagctgtctttgttaaaaacttaagatctgactactggtgcatttaaaatataatgcagttcatctgggctccagggctgagggcagcccagctgtcgctcccacaaacaggtag

SEQ ID NO: 4206 - DNA, 405 bp, Homo sapiens
  source 1..405: mol_type = other DNA
tttaaatacagtgtaacattggcataattggtttaacttaattattatatcctattagttacgaattaaaaaaaatgttgagactagagaattaaaataatggtttcttctaactgaccactgcaagctgttagcaatgtgatgtgctgaaaatagtatgatacctagttaaacttcttttatctttcatcaaaatactcaccagttttttaataaaattgggttttggttagctaacctcagtccataatgagcaaaggatacatttttaaaaccattttcctctgcttttaataggttaaaaaaattccattttgcaataatgcatgactcattcatttttttttgccttgagccagcaagaaacttacttatttaggaatacagtacttaaatactgttgtt

SEQ ID NO: 4207 - DNA, 505 bp, Homo sapiens
  source 1..505: mol_type = other DNA
aaaaaaatgttgagactagagaattaaaataatggtttcttctaactgaccactgcaagctgttagcaatgtgatgtgctgaaaatagtatgatacctagttaaacttcttttatctttcatcaaaatactcaccagttttttaataaaattgggttttggttagctaacctcagtccataatgagcaaaggatacatttttaaaaccattttcctctgcttttaataggttaaaaaaattccattttgcaataatgcatgactcattcatttttttttgccttgagccagcaagaaacttacttatttaggaatacagtacttaaatactgttgttgctagaaactgattgcaggcagtatgtaggcatctttcattcagaatggacattaatatcttgaatagagaagaaagcttttagaaatgtatcatttgtcaaaattgcatgccttttaaaaaatgataaagaagactcaagtttttagaagctagaatatagatcctt

SEQ ID NO: 4208 - DNA, 359 bp, Homo sapiens
  source 1..359: mol_type = other DNA
attatcagatatgtggcaaataagtgccagtcagtgacacatgctgatttttttttccttgagacaatatcaaagaggtataatgttttaacaaattatcttaggtaatctcagatgctttttaagcgaaactactagcagcctaccagagccctgcagcttcaggtcaccggctccagccacagtgagcctggagggcgccaggtgggcgctgccgctccatcccgctccgggcggccgcctccaggggggcgctggtggctcctcgcagccgcgggaatgagggcgcaccctcttacccccgcgcgcgcccgttgccatgggaacgcactcgaccggggcgggaggcagcggcgcgg

SEQ ID NO: 4209 - DNA, 478 bp, Homo sapiens
  source 1..478: mol_type = other DNA
attatcagatatgtggcaaataagtgccagtcagtgacacatgctgatttttttttccttgagacaatatcaaagaggtataatgttttaacaaattatcttaggtaatctcagatgctttttaagcgaaactactagcagcctaccagagccctgcagcttcaggtcaccggctccagccacagtgagcctggagggcgccaggtgggcgctgccgctccatcccgctccgggcggccgcctccaggggggcgctggtggctcctcgcagccgcgggaatgagggcgcaccctcttacccccgcgcgcgcccgttgccatgggaacgcactcgaccggggcgggaggcagcggcgcggccgagctcgtgggagacgctatcgcaagatggcgtctgcgaggccgcgggatgcggagtgagcgcgccccgccgggggctgtgcgaggctgctgctgctctccccgtcgccgccgccgc

SEQ ID NO: 4210 - DNA, 549 bp, Homo sapiens
  source 1..549: mol_type = other DNA
tacctattgttttatagtcttatacactagacaatattactagtgactgaagatttctttctcttactaatctgagataaccaagaatataccaaagaatatatatattttcactccataactttagagaaacaaattttaagaaaattggcatttaatgtgagatatttaatttaaaaatagcatagaaatcatggttttctatcatgaatttaaataggaagttattaaacgttttgagaaatttataattagttttccagggatttaataatataataaaatctgttaaaatatacttggaaaaatatttctatatatcatttgtattgtattttaaattttttcatatttgtatgtaaatgaaaatattatacataaagaatacatttgctgtgacattgcattagtgagaattgtgttatagcatagctcataacataagtatatggaagttaaaccagggtgattttcctagatacaaatataacaggctttcatctctgtttgcagcttcagtctttagaagaaagctgaagacttgagttc

SEQ ID NO: 4211 - DNA, 457 bp, Homo sapiens
  source 1..457: mol_type = other DNA
acctgttaaaatgtcaatgccattacaatttcacttttatgccagatatcattcttgaacttcctatcccccaaaacctttcaacaattttgagagtgtattttatgttaatatataaactagttcataattttgttccagactagaaatcagtatttaataaatggaaaaaataagacactgaaaatcttttattgaataatgtaaattctcacagaggcctctgatcataatttattgaataaccaacatccttacagttaatattaaaatctttaagttgggggagggatgggcaattaccagcaaactccgcctgaagctccccgcctcaggctcccggggagccaaggggtgggctgaggaacgcagcctacttttacccacctccctacctagtgctgggatcctggggctgggctcggagcatgagcgcccgagtgtcggaggcgctccc

SEQ ID NO: 4212 - DNA, 276 bp, Homo sapiens
  source 1..276: mol_type = other DNA
cagagtgggctggagttcagtccccagcctagccatttgttagaattactaaattaaatttacataattcaaggatctaaaaaagtcagagccatttttctgagatatttctgcatccctctgaagaagataatttgtccaaacttaacaaaaacaggtgttaaaattgagtacgttctgagaatactcagactttttttaagactttttttagtctcaaactggaaccattttccaggttccttgtcatccgggtgctgcggcgcgaataagagc

SEQ ID NO: 4213 - DNA, 342 bp, Homo sapiens
  source 1..342: mol_type = other DNA
aaaaatgtttgcacatggggtaaagcatgtaaaaggggtaaaccacattactgtgtgcactctaagatagaaaactcagcttatgctgttacccgcaggttttaaagcaacatgatacggcgtttgaagcttattttgacgtccaagagtgacagagcctcaagcactcctgggagctgatgggggactcctcaggacggactcccttccagacggcggtctgagaccaccagtattctaagagtcataagcctaagctggctgcggaggccccgcccagggtacggtcacgtgacgggggagcggcgcgcgccgaccgcggcgccaattggcgagcggctg

SEQ ID NO: 4214 - DNA, 319 bp, Homo sapiens
  source 1..319: mol_type = other DNA
gcgggtcgaagaaggacccgcgggagctgagaggcccaggtcggaagcactcccggcggataaaaaaatgggcctgttttcacatcattgccgagacaaggcgcaggccttggcgcccgcctcagtcgcagacagggcctgggatgggccgtcgcgcatggctgcagcgccggagtgggtgggtccagccaggcctgggccgggagccaggctcccccgcgttcctacccccacgtggccgcgcgcagccaatggcacgcccccggcgggggccctcggggcgggaggcggccccccgaccggcccaggccccctccca

SEQ ID NO: 4215 - DNA, 292 bp, Homo sapiens
  source 1..292: mol_type = other DNA
actctgctagccagctgcctccgaacgcccgctgttccccggccaggtggtcctggagaggactcccctatgatcagagttcttagccatggccaagactgagggctcaagtagcgaagggtctttgctgccagatcctcaggcagaggtctctggagaaaccctctcgggacagagctcctggtgccgccggaccgcgccctctccggataagtcgagaggcgcgtcccaggggacacttgggcagagtcaccctcttgcccgatgtccccagctgctgaagccgggcctg

SEQ ID NO: 4216 - DNA, 384 bp, Homo sapiens
  source 1..384: mol_type = other DNA
ttcatggagatcactcctcaaagaaaattaaattattctaaatataaaagcgtattcagaaagacaaatgtgtcctctgaaatgctgcagtccaagcgggcctcttgaccaagaaaacagttttaaaacgcagcttcatctggcattcaatcgttctcccccagggaggcggaggaggcttccggggggatgccccttcccagctgcattcccccctcagtgatagtgggggagggcaaggcgactgccccactgtccttagacttaagaagtccattccgaagagggaaggatttctcttctttcgtttcttaaaagagcataaataattaaagttagcttttacgagagctgccagacagtgtctgttcacgttctccatca

SEQ ID NO: 4217 - DNA, 315 bp, Homo sapiens
  source 1..315: mol_type = other DNA
gaaagctctttctcgcggagcggctggctgcgccccgaaggcctggtgcgctccctgcgtttcgggtggggccgcgcaggcacggggtcttcacggtaggttctcgagcgggacgcgcgggtccggaggcctaaggagccgaaaggggccggccgcccccttcccctatgcaccggcgcgccactgcgctcccgccggagctgccgtcgccacagcaggctccatactgggggcgccgggctgcctgcaccccaccccgtgccgccacagctgccctgggtcctgagctaccgcagggccacctccagtcgtatt

SEQ ID NO: 4218 - DNA, 471 bp, Homo sapiens
  source 1..471: mol_type = other DNA
aaaacttctggatctctcctacagggagcccgagggacgctttcgcggatagtgaacgtctctgggctgaaagctcccagaggtccggccccgcagaggtcagctctgagagccgaagcctcgtgtagccctccggggcgcataggaacccggagcgggatccgggcccggccagctgcttggcctcccggccctcgcagccccaagggatctttcctttggacccctggggtgggatgtctcagggcccgcggaatccgactcaccttcccgctgggctggcgccagggcactctgagtccttccgccggttgggcccaggggccgaagcgggggacgcgagtggggcgggctggccgagcgagccggcggagagcgctgggccggttgtctccagcgcgcactatcgcgggcgcgtagtatccgtgcttacccggccggccggccaggctctggagcacgtgacccgag

SEQ ID NO: 4219 - DNA, 505 bp, Homo sapiens
  source 1..505: mol_type = other DNA
ctggaggtgggccgggagccctccaagggtgccctccgctgccggcgccccggccgcttttgtctgggctcccagccgggctttgtcccaaggacctagccattcggccgaattttttagacattttgaaccgcgcgaagcggccctgcccggggagactcgctgaggcagggctgaggcggcgggcgggagcaagctgctctagacggcctggccgccactgtccgtgctgcgccaactcgcccggccgcccgcccttccgagggcaggcagaagcccctctgtgtcctccaccgccgcgccccggctcgcccctcgggccgcggcgtgtgcccagcctcacgtcggggtgtgtgtggccgcgcgagggggagggggccctccgatctgctccatccgtccttttattagggacacattaatctataatcaaatacacctcataaaatttttattgaaaggcataatatcattacagaggctgttttaaaaggggagaacagct

SEQ ID NO: 4220 - DNA, 646 bp, Homo sapiens
  source 1..646: mol_type = other DNA
aaccgcgcgaagcggccctgcccggggagactcgctgaggcagggctgaggcggcgggcgggagcaagctgctctagacggcctggccgccactgtccgtgctgcgccaactcgcccggccgcccgcccttccgagggcaggcagaagcccctctgtgtcctccaccgccgcgccccggctcgcccctcgggccgcggcgtgtgcccagcctcacgtcggggtgtgtgtggccgcgcgagggggagggggccctccgatctgctccatccgtccttttattagggacacattaatctataatcaaatacacctcataaaatttttattgaaaggcataatatcattacagaggctgttttaaaaggggagaacagctcccctcgggcgctaggggccgccccgagggcccgcctgcctcgggcgacaccggcctggcgcccccgcggccgctccgtgtgccctggactcgccgcccgcggctcggaagctggagagtcagcgacggggcccgacagcgcctcctctggatgcggtcgcgtctgtggtcctggcagccgctgggcgggccaggccaggtcgggccgggccgagccgggcacatggacctgggcctgcgggatcacgtgggccgcgcgaccaatggtg

SEQ ID NO: 4221 - DNA, 549 bp, Homo sapiens
  source 1..549: mol_type = other DNA
ccgcctgcagctgcctggaaccggcgcgccggctgggaggctcctggggggaacttgcggtcgtctgccctccgcactcctccgggaaccgcagccggccctggttcgctgcgcgccggggctgagacccgggagccgcgtcctgcccgaggaaatgtcaccctccccagccctgcgcccagggctgacaaactatattcatgggcatgatttccattaaatatcaattaacctgagagcctcggccaggcttgcggtgcgtcaagggtaaatgtacatctcatttccacagggcccctggaaaagaaaggcttggggccacactcgcggcttttaattaaagggctgcacccgcgtgtccagagctgcaaaagccacgggcaacctctgcttttgcagccaggggctctcctgggagtggcctccttggctcccccaagtctaaggctccgccgcggcccctccctgccggctgcgatccgcattcccgcggccccggggcacacggagcccttggcagtgcgtctttatgggccccctttaaggccg

SEQ ID NO: 4222 - DNA, 339 bp, Homo sapiens
  source 1..339: mol_type = other DNA
aagtgtaaagacactgtctttaaacccatgaggggaatgctggaggccagccaaggacatttactttcagggggagttcaccagagcagttcctgtgacctttgaggaaaaggaattattcttttttcagtcactcttttcctgaacaaatgtcttttcagtattgcgttgaacaaatttttcaattgggaaatacataaccctgtctgtccagaaagatgtttctgtggagaaagaccaggtacctaaaaccatttgaagcctttaagctggttggtttcccaaggtaacctgcctctggggacaggccttttcctgaggggagggggatcgcttccc

SEQ ID NO: 4223 - DNA, 760 bp, Homo sapiens
  source 1..760: mol_type = other DNA
ctgcaaaagccacgggcaacctctgcttttgcagccaggggctctcctgggagtggcctccttggctcccccaagtctaaggctccgccgcggcccctccctgccggctgcgatccgcattcccgcggccccggggcacacggagcccttggcagtgcgtctttatgggccccctttaaggccggcggaggcatctcgggccgggcgcggcgctccgtccgtcggccgtagcgactgaactgcgcgcggatccctccgcggggctcctcaaaatgcctcgccggtgcgcaccgggtcggcagcctcggcggcgggggcgagtttgtaaaccgaggccagagtgtccccgtgggccgagcggcgctcagtcactggtgcctgagaggaaacagatcgcctggggcgtcggcgattatattgcggccgagccggggcgcgccgggaaaggccgggagggcggcggcgcgcgggggctgggcgaggccccgcgacccgcgagggaggcggcgcgaagccgaggcggcgggcgcaagagccgggcatgagcgcccagtagctgagcgcccgcggctgcctggcctcagaagcgacgcgcgagcgcgggcgggcggcagcagcgacgtagcccggcggtcccggcggcgagagcagccgccccacaggcccccgcggcagtgcggccgagtcgaggctcgctctctggctgcttagcgccgcccgcccgcccggggccgccgccgctgacgccccaatttcgtga

SEQ ID NO: 4224 - DNA, 260 bp, Homo sapiens
  source 1..260: mol_type = other DNA
cataaccctgtctgtccagaaagatgtttctgtggagaaagaccaggtacctaaaaccatttgaagcctttaagctggttggtttcccaaggtaacctgcctctggggacaggccttttcctgaggggagggggatcgcttcccttgcgagctgtatgtgcaaaatccgcaaggaattgcagtaaattcctttttgtttgaagaaaatttacaacttggtaatagacctttttatgaggctggtcatgtgcaggcgccgc

SEQ ID NO: 4225 - DNA, 309 bp, Homo sapiens
  source 1..309: mol_type = other DNA
ttcccaaggtaacctgcctctggggacaggccttttcctgaggggagggggatcgcttcccttgcgagctgtatgtgcaaaatccgcaaggaattgcagtaaattcctttttgtttgaagaaaatttacaacttggtaatagacctttttatgaggctggtcatgtgcaggcgccgcgtcaccggctgcgggattgcggagtccgccgcggcctcggctcccgcccggcgcccggcctggccccaccgccgctcactcggtccgcatcgccgccacctccggagctggtggggagcccggcgagggagg

SEQ ID NO: 4226 - DNA, 579 bp, Homo sapiens
  source 1..579: mol_type = other DNA
gtctatatataccctgtagaaccgaatttgtgtggtatccgtatagtcacagattcgattctaggggaataagcagccggcgctggtcagccgcctcgtgactccaggaggatcagctgcgcctggtgacatagagcagcttttcctctccagaagctcctcacctttaaacagagtatcgtacaaggccagcttgcccagtcccccaaatgggggcttgcttgtatttggggcctgtgggaagaaagcaagcttcaaagaagcccagtggggagctctagggtgcattttgacaaggtggaggtgcccttgccaccatcccagcccacccccagctacatgggcaagggcagcgagggccccctgctattttggcagggcccagctttggctgggaacccccgggcctgggcactggtactaatttgattcaagctggccagattctggtaacttttggacaaagccaggacggcggcctttgtatggcagaatccctgctcccgccggctgcaggcagggcgggcaggcaggaaccctcctcgcctggggcactctgcccaactcagaggcgggagg

SEQ ID NO: 4227 - DNA, 485 bp, Homo sapiens
  source 1..485: mol_type = other DNA
agagtatgtacaaggccagcttgcccagtcccccaaatgggggcttgcttgtatttggggcctgtgggaagaaagcaagcttcaaagaagcccagtggggagctctagggtgcattttgacaaggtggaggtgcccttgccaccatcccagcccacccccagctacatgggcaagggcagcgagggccccctgctattttggcagggcccagctttggctgggaacccccgggcctgggcactggtactaatttgattcaagctggccagattctggtaacttttggacaaagccaggacggcggcctttgtatggcagaatccctgctcccgccggctgcaggcagggcgggcaggcaggaaccctcctcgcctggggcactctgcccaactcagaggcgggaggagcaagctacttgattacacgtatgttatttagttaaatttgtgaaaattatgagatgctcactggctggcctggtcac

SEQ ID NO: 4228 - DNA, 263 bp, Homo sapiens
  source 1..263: mol_type = other DNA
aatgccactgggccagacttcccttagacaggccctaagtaggctgcctggactcagctctttttggctccagaaagagcaccagtgctggtggtccaaagcccaaggagccaaagttggacccttaccctgttcctccgcggctggaaaagggggtggcggccccgggtgacctcccacctacttctaaagaactcttttttaaaaataaataaataaaaaataatcaaacgtccgcccacgtgaatgtattatataaagca

SEQ ID NO: 4229 - DNA, 551 bp, Homo sapiens
  source 1..551: mol_type = other DNA
agcaagctacttgattacacgtatgttatttagttaaatttgtgaaaattatgagatgctcactggctggcctggtcacggctgcccacaacacgagaaaaattagtattttctaccttctgaaattaatggtatggtgaactccaacccactccgtgcgaggagttttgcagggcggctacctaggcgagcagggcgccgactactacggcggcggcgcgcagggcgcagacttccagcccccggggctctacccacggcccgacttcggtgagcagcctttcggaggcagcggccccgggcctggctcggcgctgcctgcgcggggtcacggacaagagccaggcggccccggcggtcactacgccgctccaggagagccttgcccagctcccccggcgcctccgccggcgcccctgcctggcgcccgggcctacagtcagtccgaccccaagcagccgccctccgggacggcactcaagcagccggccggctagggtccagtaacctttctggagcttccatgggcgccgcaattactctccccataa

SEQ ID NO: 4230 - DNA, 329 bp, Homo sapiens
  source 1..329: mol_type = other DNA
tgttagagaggataggcaacttgcccaagattctgaaactgcaaagtggtggatttgaatccagtcagtctggctttaggggctaatggggaggtgctcctctaactggaaggggagcccctccagttggggccttctctaggtccacccagggcatgtagaagataggcatggccacaggtatcagctgcaggctcaggccctccctcccaggagaaatccatttgtcttccctgggagggactaaaatacccaggcagtgttttttgggggttggtggggggctttgcccagaggccagctcctaagcaaggcaggctgccccaccc

SEQ ID NO: 4231 - DNA, 245 bp, Homo sapiens
  source 1..245: mol_type = other DNA
caggtatcagctgcaggctcaggccctccctcccaggagaaatccatttgtcttccctgggagggactaaaatacccaggcagtgttttttgggggttggtggggggctttgcccagaggccagctcctaagcaaggcaggctgccccacccctggcagcagaggctgggaggaggtgaattcccccttggaatcacggcccttcccctccccagccaggattggaggtggggggagggaggagc

SEQ ID NO: 4232 - DNA, 428 bp, Homo sapiens
  source 1..428: mol_type = other DNA
ctaaaatacccaggcagtgttttttgggggttggtggggggctttgcccagaggccagctcctaagcaaggcaggctgccccacccctggcagcagaggctgggaggaggtgaattcccccttggaatcacggcccttcccctccccagccaggattggaggtggggggagggaggagctctctccctccctgcccaggagagagctgcgaggccaggcccagcatccaagcgggtacgcacggcatgcagctggtggaattggaaaaggaattccacttcaaccgctacttgccgcgccgcgtggagatggaacgccagatcaagatctggttccagaaccggcgcatgaagtagaaggccaagggcatcctgcactcgccggctagccagtcccctgagcgcagcccaccgctcggcggcgccgct

SEQ ID NO: 4233 - DNA, 661 bp, Homo sapiens
  source 1..661: mol_type = other DNA
ggcccttcccctccccagccaggattggaggtggggggagggaggagctctctccctccctgcccaggagagagctgcgaggccaggcccagcatccaagcgggtacgcacggcatgcagctggtggaattggaaaaggaattccacttcaaccgctacttgccgcgccgcgtggagatggaacgccagatcaagatctggttccagaaccggcgcatgaagtagaaggccaagggcatcctgcactcgccggctagccagtcccctgagcgcagcccaccgctcggcggcgccgctggccacgtggcctactccggccagctgccgccagtgcccggcctggcctacgacgcgccctcgggcctggccgcctacacggcgccactcagcagctgcctgccacaacagaagcgctacgcagcgccggagttcgagccccatcccatggcgagcaacggcggcggcttcgccagcgccaacttgcagggcagcccggtgtacgtgggcggctccatggcgcccgcgtccgggccaacctgggccacctctcgcacccgtcgtcggccagcgtggactacagttgcgccggggacgactgccggaggctcccaaactgacgcatctgtagcggccgccgccaggggtggggcccgcggggcag

SEQ ID NO: 4234 - DNA, 407 bp, Homo sapiens
  source 1..407: mol_type = other DNA
agaagctctaattgcttcgaggtacaagtccatctaaacctctgaccgcaccggtgcctgtgccagtctcccagaaagagcataaggagtgttccaccaccactctggattctttattccaacaacccagccggagagtgaaaattttagtctccaccggccgcgcgtcacgcgggacgcagaagcggctcgccccgctgcatcctgtccgagagcaggcgttctgccctctcgccccgcccttgcccaggcagcccccggtcgcgacggctctcctcggggctcgggggcgctgggcggcggccctgggctgctgcggggcaggcgcgaggagcggcgcgccgaccgggccgagcggagaggccgcccattggccggccagcgccacgtggccgcccccgccggta

SEQ ID NO: 4235 - DNA, 495 bp, Homo sapiens
  source 1..495: mol_type = other DNA
tgatttaaaatgagttacctcacctctctgaacttctcataatgcatatgatttttctttaattgtgtaatttaagaagctattaggttaagacaaagttactcagggaatttagtttcttgagatctgccaagcatgtttgaactgcctgggcaggagagcctatattcttatccgtaaaatggcgataatattattactttaatggggtcaaatagaatatatgtgtatatatatgtatatatgtgtatatatgtacatgtgtacatatatacgtgtatatattatatatgtgtgtatgtgtgtgtgtatatatgtatatatgtgtgtgtagatataggtatataagtgccccagtcccctgggtgggagacgagtcgggtacttccacctgcgggcccccagcgcagagcctggaattggctggacggagctagccgcgccggcgccccgtaggacggcgcgggggcggggccggcggaagcgctcgagtgc

SEQ ID NO: 4236 - DNA, 456 bp, Homo sapiens
  source 1..456: mol_type = other DNA
ttttcatttaaaaaactgaaactaaagctctgtaaaatcaaatgatttaaaatcatctgactgctctttcactaacttgaaagaagcacattagaaaatagtcctgacttgtttcttgagatcagtaactaatgaactgacttgtgagtcccacatgttgggtttttcttgcaacctttaaattacaagcaagaaaaacgtgggttttatttcgagaagaaagggaaaggcctttctctctggtgacgcgcgatcacaaggcgttccctctacgtggacgctcaccattggcggagaccggaacggcggcaaaggccctcttcccctgaaagctggcgaggcgcgcgcgctcccgcggcacgccgcgcctccgccctccgcccgccagactggcggcgcgcggaaaacgcgtcacgtgacgactggccccgcctcttctcccatattgaactcgag

SEQ ID NO: 4237 - DNA, 720 bp, Homo sapiens
  source 1..720: mol_type = other DNA
ggcttcccccacgtctggccagagccaggaccgcggcgctgggtagagccgccgcgcttgcgccggggcagggcggggaggggcagcggggacgcggccgggtgatccgaccgaccacgagcccgagggcgaacgggtgagcccgctcgcgtgggccttgggggagaatccagccgcgtccccgggcccgagagctgggactccggagcccctaagtttgagcggcccggtgggcggcggggcaagagggggcggacgctggccgtctgagccggcgcggcccggcccttccggggctgcgcggctcccccgcctcggtgccggcaaaaagtgcacggggccgctcgggggaactgaggtcgccttcgggctgggacccggagccccttcgccgcgccccaagacctccttgagtgcgggctgcgacgcgctcaccccgctgggccgtctgtgggcgcggcttcccgggcttagtgcccagcgggctcagaagccccgacgtgtggcggctgagccgggccccgcgcactttctcggccggggaggggttcgggctcgggcacccggagttggcccctcgtaacgccgcggagggcagtggactctgaggccggagtcggcggcacccggggcttctagttcggacgcggtgccccctggtggcgctcaccgcgcgcgtggccttggcttccgtgacagcgctcggttggccgtcacagc

SEQ ID NO: 4238 - DNA, 834 bp, Homo sapiens
  source 1..834: mol_type = other DNA
gctcagcccgcgcggccggcgggggaaggaagggcccggactcttgccccgcccttgtggggcgggaggcggagcggggcaggggcccgccggcgtgtagccgattaccgagtgccggggagcccggaggagccgccgacgcagccgccaccgccgccgccgccgccaccagagccgccctgtccgcgccgcgcctcggcagccggaacagggccgccgtcggggagcccctgatggacttggagctgccgccgccgggactcccgtcccagcaggtgctgcctcggccctctgggccctgcggtggtgccgggacgggggcgggggagctagggaaccgcggcccgggagggacagccgcaaccggcttcccccacgtctggccagagccaggaccgcggcgctgggtagagccgccgcgcttgcgccggggcagggcggggaggggcagcggggacgcggccgggtgatccgaccgaccacgagcccgagggcgaacgggtgagcccgctcgcgtgggccttgggggagaatccagccgcgtccccgggcccgagagctgggactccggagcccctaagtttgagcggcccggtgggcggcggggcaagagggggcggacgctggccgtctgagccggcgcggcccggcccttccggggctgcgcggctcccccgcctcggtgccggcaaaaagtgcacggggccgctcgggggaactgaggtcgccttcgggctgggacccggagccccttcgccgcgccccaagacctccttgagtgcgggctgcgacgcgctcaccccgctgggccgtctgtgggcgcggcttcccggg

SEQ ID NO: 4239 - DNA, 585 bp, Homo sapiens
  source 1..585: mol_type = other DNA
aatttttttctaggcacgtttttataaaatgagccaatactatacaaacgtttttgtaactttttttaatttgtactattttgtgagtacgtgaaaaagaaatttgtaaaaacgattacagcatgttgtggtattacacactgttgaatctgggtgggcaatgcgaacacgagctgccggagctgtccacatctcccctaggcagggcccactggccccagcccgggaagggagcaagggctctttagccccccccaccccggctggcgccattcggaggcgcagctcctacatgttccaactgtttaaactgtttcaaagcgtccgaacttatctcgcgggcgagagcgcggcaccggggagctaacggagacctcctctaggtcccccgcctgctgggaccccagctggcagtcccttcccgcccccggaccgcgagcttcttgcgtcagccccggcgcgggtgggggattttcggaagctcagcccgcgcggccggcgggggaaggaagggcccggactcttgccccgcccttgtggggcgggaggcggagcggggcaggggcccgccggcgtgtagccgat

SEQ ID NO: 4240 - DNA, 528 bp, Homo sapiens
  source 1..528: mol_type = other DNA
tgtgtggtttttgaatgaaatagcaaaaccactgccagtattatctacttcacctggttttgaataattccagtctagttaccatttatctatcctctttgaacccttataagagttcacaatattttcaaatacttgaagtcttctctgggcaatgattaatttttaaataattgtttttaatgtaagacataaaacatacgcacacataaaaatcgttgattccacagcatttaatatattggtaaccttcaatttttttctaggcacgtttttataaaatgagccaatactatacaaacgtttttgtaactttttttaatttgtactattttgtgagtacgtgaaaaagaaatttgtaaaaacgattacagcatgttgtggtattacacactgttgaatctgggtgggcaatgcgaacacgagctgccggagctgtccacatctcccctaggcagggcccactggccccagcccgggaagggagcaagggctctttagccccccccaccccggctggcgccattc

SEQ ID NO: 4241 - DNA, 492 bp, Homo sapiens
  source 1..492: mol_type = other DNA
tagaatggcaacacccaagagagcaattggtctaagctaatcttatgcaagaggtgaggagcacttttcacgtgctatcttttcaatctgtaaataactgagatgtcttcacagctcttgggtaattgtagcaataagaaactttatctctattaaagttaggaatgaaatgagaacttaagttgcaactcagtttctgtacttacttgtgatcgagctatttgctctaatgaggaaaaggatgccgctggatccatcaggtccagtagcccacccagggttctaggacacctcgaggctctcggtccagctggaccgggctgggccaaccgggagtcagctcgaactcacctgcttggcaggtgcgcgcttcccgaggcgatgtgaagctccagacgcatggcacccgccgccaagtcgccgcggtggctgccgggatgcgccgcagcgaatggtcgcgccgggcgccgctctgagtgacctttcacccgc

SEQ ID NO: 4242 - DNA, 224 bp, Homo sapiens
  source 1..224: mol_type = other DNA
aacatatttgagatgtgctgtctgatcctttcgatcattctgaatatacaaaggcaaagtggtgtattcccttctgctgatatgcatcagaatatattgtatgacagtttccataaacttgacagttctgtattataaattctgcaatttataggcctgatgacacattgggtgatccaagcagttcacctgggacaacgtgttggttactcagatataaggca

SEQ ID NO: 4243 - DNA, 371 bp, Homo sapiens
  source 1..371: mol_type = other DNA
ttagtattttgaatgtatgtacaatagttcatttaaatactttatatgagtcttataaatttttattgaaaactgaatgttttaaataatgtaatgtgctgttcagtgacttgccagaactaattctttgatgctcagttagcttggttgtcagctaatgggacagagatttccttaaaagcctgaaccaataagtcttccagccttcatatgagggatgccttcaatcctcaaaatctgctagaggtgagagccttctctctttcccagacattcttacagtagtgtgtgtgtgtgtgtatgaatatgtacaagcttttcaaagccttctcattaagctccacaaatatccctgggggtaaaccatggaa

SEQ ID NO: 4244 - DNA, 346 bp, Homo sapiens
  source 1..346: mol_type = other DNA
cccataaattactgtcaggaatcaatgaaatcaccatacaaatgatttccaaagattttttttctctgcctaacatggtgttttgaaaaccttgaatattaattatgttgtgatgtttatatagaatgaagctaaacaagaaaaaacataggcttatgctaaaccttcagatatctctattttagcaacatatttcgagatgtgctgtctgatcctttcgatcattctgaatatacaaaggcaaagtggtgtattcccttctgctgatatgcatcagaatatattgtatgacagtttccataaacttgacagttctgtattataaattctgcaatttataggcctg

SEQ ID NO: 4245 - DNA, 332 bp, Homo sapiens
  source 1..332: mol_type = other DNA
aagaagaaataatacttctaaaatacttttaggcacacaaataataaaattgaaatttagcactgaaacacatttggtgttaatagacttcaaagatgttgaaaaaagcatatgggcatttaattgcaggaaaattcattctgatgtgaccctataattttaaatccaaaatttaaagccaaataagaagcccttattgaatgtatttaaatatcgcatatacttgtagatacaaatgtaaaccttatattgtaaaccataacaatggtgctggttccccatgttctccaagttccacaggtgcaacaggtgggtatgggcatgcacatgca

SEQ ID NO: 4246 - DNA, 521 bp, Homo sapiens
  source 1..521: mol_type = other DNA
agaattccggaatatttttagaagtagatttcaaattttatgaaatctaaataagtgaggtaacactgagaattctgcctgaaatgaaggttaattataactttctcaaataactttatatttgtgtacatttattaggaggatttgattttcctctggagaactaactcaaagctcaatcatgggcatatggctaagagattgggtcaacaatgaccacgtgaatgacctctgggagagacagagcctcgctctttcatccaggctaatcaagtgatccgaactgtgactgtgccactgcactccagccttggaccctgtattttttaaaaaaattaaatgaaaataaataataaattaataaattaaaaatatttaatataaaagtactgcattagaggtatgtacaaagagctataaaagcattagagctataaaagcatataaagtgccatttctaaagtccagaaagattttattgagatatttgaactggtccttggaggtatacaacttagttg

SEQ ID NO: 4247 - DNA, 238 bp, Homo sapiens
  source 1..238: mol_type = other DNA
ctgatagatcactcaagtgaccagagacatagctacattcagtaaagttaataaagtcatctattttcggggaaatgccattccattaatatttacggcgctgggcagtgttagtgagcaagtcccaggaatcctgggaaccaacaatccgcctgtctctgagggtgaacgacactctcgatggccgtccagagactcttccaggaaccgcctggcagcctgggccgtggactttggc

SEQ ID NO: 4248 - DNA, 373 bp, Homo sapiens
  source 1..373: mol_type = other DNA
ctgggatcacagactgctatatagtttgaactctgtcctatattgatcatctattgagcttatgaccaagatggtgccaatttgagcaagaatcctgctgaatcagtgtctgactaccatggatatcaattatcctgtcaagttggtttagccagaatctcccaccaagcttcttggttagaaatttgtccttattagagtcaaaattcagtccagtcatgaataattttttctttaacactggaaagaattgcattaggcagcgctgttctgcctgcaggttgggcctagggggtcagggtcccccgcgtcgccagggggcgctgcaggccgctccccggaaggcctcatcctgcgcggctggacagcgcct

SEQ ID NO: 4249 - DNA, 625 bp, Homo sapiens
  source 1..625: mol_type = other DNA
aaatgtcttgaaatattgacatgtccgcagtcactcgtttacagaatgtctgtacaaatatctgcacagaaggaaccggctcttttgctcccgagcgagtcagggacgggagcaggcacgcatgggtttggcagccccgagcggaggccgccaggcagccgttcctttcggatctcccgcagtgctcccggctgcggcgctcctgggccgagcgctggagccgttctgggcaaccctcccgagcgcggccggctcacctccgccggactgcgcggggcgagggctccgctactgcgcgcaggcccgcggatggcaactcggggtttccactgcgggtgatctcgggacaccacgggttcccacggaggccgggccaggggagagccctggctgtgggaccccgcgtgaccagggcgcagggcgccgggtccttagcccatctggcggcgcagggaggggcgcccggtagggcgggtgcgcagcatgagccccagccgcttgccgctccactccagccgggcggacgggcgggagccgggggcggggaacccggagcgccgccccgccagcgcgccccgcccgtgggagaggaggggctgcagcgcagcggaccactggaggcgca

SEQ ID NO: 4250 - DNA, 695 bp, Homo sapiens
  source 1..695: mol_type = other DNA
tcgtttacagaatgtctgtacaaatatctgcacagaaggaaccggctcttttgctcccgagcgagtcagggacgggagcaggcacgcatgggtttggcagccccgagcggaggccgccaggcagccgttcctttcggatctcccgcagtgctcccggctgcggcgctcctgggccgagcgctggagccgttctgggcaaccctcccgagcgcggccggctcacctccgccggactgcgcggggcgagggctccgctactgcgcgcaggcccgcggatggcaactcggggtttccactgcgggtgatctcgggacaccacgggttcccacggaggccgggccaggggagagccctggctgtgggaccccgcgtgaccagggcgcagggcgccgggtccttagcccatctggcggcgcagggaggggcgcccggtagggcgggtgcgcagcatgagccccagccgcttgccgctccactccagccgggcggacgggcgggagccgggggcggggaacccggagcgccgccccgccagcgcgccccgcccgtgggagaggaggggctgcagcgcagcggaccactggaggcgcagcacggtcgccgccgccgctgtcggtgctggagatcgcggctcggtgcaggcggcgcccatgcctcctctcctccactagcccgcgcgccagtccgcctgccgg

SEQ ID NO: 4251 - DNA, 916 bp, Homo sapiens
  source 1..916: mol_type = other DNA
cggaggccgccaggcagccgttccgtctcccgcagtgctcccggctgcggcgctcctgggccgagcgctggagccgttctgggcaaccctcccgagcgcggccggctcacctccgccggactgcgcggggcgagggctccgctactgcgcgcaggcccgcggatggcaactcggggtttccactgcgggtgatctcgggacaccacgggttcccacggaggccgggccaggggagagccctggctgtgggaccccgcgtgaccagggcgcagggcgccgggtccttagcccatctggcggcgcagggaggggcgcccggtagggcgggtgcgcagcatgagccccagccgcttgccgctccactccagccgggcggacgggcgggagccgggggcggggaacccggagcgccgccccgccagcgcgccccgcccgtgggagaggaggggctgcagcgcagcggaccactggaggcgcagcacggtcgccgccgccgctgtcggtgctggagatcgcggctcggtgcaggcggcgcccatgcctcctctcctccactagcccgcgcgccagtccgcctgccggggccggctctccgcctcctgcctcccgtcgcagccgcgcagccgccgcagagtccgcggcgccaccgctcgccctccaggtacttggggcgggcgccaaggtgcccgcatcgcggcccgggggcattgtgcgcctccggcgggccgaggaccccgagggacgcgtgggtgggcagccgcagcttcgggtccccaggacatcgccgtccccctggaggcgcccccggccgatagcccgggctacagggaagtgggggcggcggtgtcagcccattctcgcggccgggatgggagggggcgtctgtatcgcggtcccggccgccctcccagggaat

SEQ ID NO: 4252 - DNA, 388 bp, Homo sapiens
  source 1..388: mol_type = other DNA
atcatatttcaacatgagacttggtgaaattatatccaaaccatagcatactgtttctttgctttctgagaaattatgtcaagttaaaaactatattcttttatagtatgtatagagtctgttcttcttgctagaggattacatctatgtgcatgtatgatgaaaccgtggctcagcctgtaatcccagaatcccagctactcatgcagtgagccgagatcacaccattgcactcctgcagaaaacaaacaaacaaaaaagccctgttgaggtttatatttaattggagggctaaatgtggtcctggagaatatattttgtccccttttaggaaatatttgctatatcacttgagagatgaacttcctgttcaaaagataaattgggt

SEQ ID NO: 4253 - DNA, 652 bp, Homo sapiens
  source 1..652: mol_type = other DNA
ccggcggggcgggtgtttggacgtccccgcgtgttcctaaacacagggctcggggacccgaagagcgcaccgcagccccctggagcgtatatatccggggtctcaagcttcaggaccaggcccgggagactccctggaacagtactacaggctggtcagggccggcaggggcgggcgcggagaacccccgggagcccaatgcctgtgcccacgcgggagcggggcggagccgggcagcgagggggcgtagccggagctacggcaccaaggctccgcccccaccctgcctgccccctcgctggagcaacgcaagcaggaggcgggggtggcggcgctggagctcctcccggggaccagcgacccggggagcgagcacgtcgctccgcaccgctctgccatgtcccagagcaggcaccgcgccgaggccccgccgctggagcgcgaggacagtgggaccttcaggtcagcgtgcgggcagtcagggccccagggccgggagcgttgggcggcagggccggggcgcggggagccggccctccagagccgtgcccggcgcccacgcctccgcggctgtgggtgctcggccccgccctctcggcggcgagggttggggtctgcggccgggccccgcccctctcgtggtccctggcgg

SEQ ID NO: 4254 - DNA, 522 bp, Homo sapiens
  source 1..522: mol_type = other DNA
cctctaattctaagaagaaccctaggaggatcctagggtcaggatccagccatccggctgggtaactttttagtttctaagcttcctgagatgagaggtctcagtttcagagcctgttcctcacagctgtctggcaaaaagtcatccaggttaactgtgtatacagacaggtgaaagtgggcacgtgtatttgcacatcagatctttcacatgtgctttgcatgccaaattggttttaaccgccaccgacggtgacgagggaggcgccgagttccccggaggccagggccagagctggcgaggctggggcgcacctgtcttccggccccgctgcggcagtcactccgcaggagcaggcggggagcagcgccgcagcctctttcccgggcgcgccgaccgagcgtcacctccgcccgccccgcgcgccgccagggaccacgagaggggcggggcccggccgcagaccccaaccctcgccgccgagagggcggggccgagcacccacagccgcggaggcgtggg

SEQ ID NO: 4255 - DNA, 332 bp, Homo sapiens
  source 1..332: mol_type = other DNA
caggctggttcgtacgatagcccggcgggagaggagcgggtgtttggacgtccccgcgtgttcctaaacacagggctcggggacccgaagagcgcaccgcagccccctggagcgtatatatccggggtctcaagcttcaggaccaggcccgggagactccctggaacagtactacaggctggtcagggccggcaggggcgggcgcggagaacccccgggagcccaatgcctgtgcccacgcgggagcggggcggagccgggcagcgagggggcgtagccggagctacggcaccaaggctccgcccccaccctgcctgccccctcgctggagc

SEQ ID NO: 4256 - DNA, 692 bp, Homo sapiens
  source 1..692: mol_type = other DNA
gtgctttgcatgccaaattggttttaaccgccaccgacggtgacgagggaggcgccgagttccccggaggccagggccagagctggcgaggctggggcgcacctgtcttccggccccgctgcggcagtcactccgcaggagcaggcggggagcagcgccgcagcctctttcccgggcgcgccgaccgagcgtcacctccgcccgccccgcgcgccgccagggaccacgagaggggcggggcccggccgcagaccccaaccctcgccgccgagagggcggggccgagcacccacagccgcggaggcgtgggcgccgggcacggctctggagggccggctccccgcgccccggccctgccgcccaacgctcccggccctggggccctgactgcccgcacgctgacctgaaggtcccactgtcctcgcgctccagcggcggggcctcggcgcggtgcctgctctgggacatggcagagcggtgcggagcgacgtgctcgctccccgggtcgctggtccccgggaggagctccagcgccgccacccccgcctcctgcttgcgttgctccagcgagggggcaggcagggtgggggcggagccttggtgccgtagctccggctacgccccctcgctgcccggctccgccccgctcccgcgtgggcacaggcattgggctcccgggggttctccgcgcc

SEQ ID NO: 4257 - DNA, 405 bp, Homo sapiens
  source 1..405: mol_type = other DNA
gatatgtaataaatataatatagttcaatgatagaattcaactttctgtgtattttaaagttgtcacacagatttgaccaaatccctgctgcgtattagctgtgagattgggacaacatgcccaatactcaagttttcttgtgtggacaattacgtatcccatgggatggtacacagaggccctcgaatcaagggcggccccgagtgggcagccaggcagaggagttgcggtaccgcagggaacctctgaatgcaagattccgaagagtttcattttagaaaatgcgaatgttaaccgcgctgagcccgctgcgggaggcggaggggttggggccatgagagggcggggccgcatctatggccccgccccggccctttgtgacgcaggacaacgcctgccacgcg

SEQ ID NO: 4258 - DNA, 514 bp, Homo sapiens
  source 1..514: mol_type = other DNA
actcggggccgcccttgattcgagggcctctgtgtaccatcccatgggatacgtaattgtccacacaagaaaacttgagtattgggcatgttgtcccaatctcacagctaatacgcagcagggatttggtcaaatctgtgtgacaactttaaaatacacagaaagttgaattctatcattgaactatattatatttattacatatcagcaaaggccttctgcaggtgctattctacctcggtgatgcgaagaaaagccgcagcactgagcctgattgatgtgctttgcttaaagtttgcaaaattccataaacctgaagaagtccccatttctagactaaaattccgaagtcgagttccatgttttatattctaaataaaattgtggctaggaaggcttttatgtatttttgaagaaaaaacaggattttatgtaaaataaaaacaggatttcatgaagaaacaggatattatgtatttctgaagaaagtgcccgcgggatgagtgtgcgggca

SEQ ID NO: 4259 - DNA, 606 bp, Homo sapiens
  source 1..606: mol_type = other DNA
attatatttagcaaaggccttctgcaggtgctattctacctcggtgatgcgaagaaaagccgcagcactgagcctgattgatgtgctttgcttaaagtttgcaaaattccataaacctgaagaagtccccatttctagactaaaattccgaagtcgagttccatgttttatattctaaataaaattgtggctaggaaggcttttatgtatttttgaagaaaaaacaggattttatgtaaaataaaaacaggatttcatgaagaaacaggatattatgtatttctgaagaaagtgcccgcgggatgagtgtgcgggcagctcctccttaggtaggcaccggggctgcgcgcgcagcggagctcgaaggtcttgtcccccgggggcggtcagcctgggccttggcggccaaggggaaactagcctcgggactgttggccaccggcccgtggcggccctggctggcaggccgagggtgtgacgcgccggcccgccctcctcgcgcagcctccggctaggcggcgaggccgcaggccgcgcccgctccttcagccccgccgccggggaggggtttcccgggacgatccggcccctttcatccaggaagtg

SEQ ID NO: 4260 - DNA, 337 bp, Homo sapiens
  source 1..337: mol_type = other DNA
agcaatttgcaaagtgcactgcacaacctgtacccagcaacatgctgcagaaagcttcctgaggatgtgtcccttaagctgcttagggcacaagcattttgattacagaaacctttcttctcatattaaagaagtagctacaaaatctccagcttatttggaattaattctctaagaataggtttattgagatttaaaacaaattacttccaagtacattatttacattttaaatgcgtaagaggcatccaccgtggccccttggaagcaagagggctacgtggcctcctcatctgaggctgagatgagagagacaaccaacctctactcagatcag

SEQ ID NO: 4261 - DNA, 374 bp, Homo sapiens
  source 1..374: mol_type = other DNA
attcacaaatctctcagctgagtcattataaagatcttttttatttgaaatatctcttgcttgaaattaaattcagtcctaaaatagaccttatggatgatttcagtacacacatatttgtaaatattaatgccagacaaaaatgaacattgtacttttgcttcaacattatatcttgcagggttggagctctcttcaacgttaaggtttatagcaactgattcttcagagaacatgaagccttatgcttgagataaggactggggcctgactcagggcacagtcctcaggttattttcggattttaacatcagccctttgaggtactaaatttagaacaggtggtatgtgacactaccaaataggtccagggc

SEQ ID NO: 4262 - DNA, 631 bp, Homo sapiens
  source 1..631: mol_type = other DNA
aactctgatatgtttgcatctgacttctgacctaaactttatcagctgttctttgacagggaatccaacagctgctgtttaataccacagacaacttgtgacacaggctgagtttctagtaaaaagcctgaagcacagtactttcctttttgtttttgtttttaattgcagcaaaatatatgtcttaataacttttaaccacacagaaaacattttcttgctgcaattaaaaggtaacagcaaagtattttgctttctcatggtattaataattgaaaaccatgataggcacctatttataaatgctggttgaaatattttttaaaaattcctaagaaatctgaggctctgagaaaatctaaacttcatttagcaaagaacagtaagttttagaaaagcagattaatctaaaaatgtgttttaagcaatttgtgacttaaccccaagacaaataccaaaacttttttaaagtacactttggtagttctctttgcatcagagagatttcaaaaatcttgaaaagattgataaccaggtcaaagacttgcaaaactaattttttttttttccatttgttatcaaacatcagctgataaggaaagagcttgaagctgtcctccttagtgtcacc

SEQ ID NO: 4263 - DNA, 140 bp, Homo sapiens
  source 1..140: mol_type = other DNA
cacagctgatatactcttgaagtaaataaataatctttaggcactctctaatcagatgtcctaggtcctatgaatttcgttttatttttcttattaatataagaaaggaatgtcaggcctcaaataaacagctttattgc

SEQ ID NO: 4264 - DNA, 267 bp, Homo sapiens
  source 1..267: mol_type = other DNA
gttgtcactgggtccttattcagggtgggcccactcccacactgtattctttgttcaaaatgccaaggacctggacaactcacacttgtggaggaacactgagtattttgagtgcaagtcactatttgccattccagttggcaaagtacactatgacagtttacagtatctgaggacaattagctaaaaactagttgtgatcagttcgttttggtggaccaactaaggtgtcagacctctgagcctaagctaagctaactgatggca

SEQ ID NO: 4265 - DNA, 466 bp, Homo sapiens
  source 1..466: mol_type = other DNA
cctcttttgaactgaattcaggaaatgacatacaaatgatttgttaagtcagtatacttggtttggactgtccagtggaaactgccagggtgtcaagtaaccaagactgcctcccgcctggggagcctgggcctcggctaggggtggggacggcagggtccgtccggagcgccagagtcccactcgcgcccagccctcagccccaggcccggttggacgccccgccccgccccgcctccttcctccttcccgcgccgggcgggttgctgtaccgccgtcacccgggcgcgcgcggggtcgcgcggacgcggctcgggccgcgggtgccgagaggtcgccgggccacccgcacccccgctccccgcctgacgcacggaggggccgggacgcgatttgccgcgagtgactggagccgcagccgtcgccgctgctgccgccgccgcccgggcccgctccgcccccagcc

SEQ ID NO: 4266 - DNA, 424 bp, Homo sapiens
  source 1..424: mol_type = other DNA
ttgcaaggtaaaaacacagcctgctcccttagaaagctcgaagcccaccctgggagataaccaaagaaaaatattttaagatcatctggttaaaaaaaaatccctgctatataacacaactctcttgtcatttataaagaagtaatctcagaaaactgctcttttaaaattatttcaccttggccttttcagaagatgccctctactaaccgatgacaggttttagttttgaaaacttaaacacggaacccggctccgcccagctgctagctgtgctctgctagcccagggggtttcattgggacctctgccattgccaaggatctcttcggggacccgagcccccgggctgaggaccgcgggggaccccaggtcgggacggagcctcctctggctcgctgtgcgcgcacgcctggaaaggcgg

SEQ ID NO: 4267 - DNA, 553 bp, Homo sapiens
  source 1..553: mol_type = other DNA
agaaaaatattttaagatcatctggttaaaaaaaaatccctgctatataacacaactctcttgtcatttataaagaagtaatctcagaaaactgctcttttaaaattatttcaccttggccttttcagaagatgccctctactaaccgatgacaggttttagttttgaaaacttaaacacggaacccggctccgcccagctgctagctgtgctctgctagcccagggggtttcattgggacctctgccattgccaaggatctcttcggggacccgagcccccgggctgaggaccgcgggggaccccaggtcgggacggagcctcctctggctcgctgtgcgcgcacgcctggaaaggcggacagcttcggcgcgcgagagtggcgttggcacgtccaaaccccggggtcctcggccaggccaggggggcgggcgtgcggcggggccgggccgggccgggcgcgcccagcgggctccgggcacacgcccctcacctgggcgaggcccggtgcgcaggcgctcagcgcgggggcagcggccgggcgcttaagccc

SEQ ID NO: 4268 - DNA, 311 bp, Homo sapiens
  source 1..311: mol_type = other DNA
ttgaacctgattcaaccaggtggagttaatccacgggattttaagtcagaaacctcttttgaactgaattcaggaaatgacatacaaatgatttgttaagtcagtatacttggtttggactgtccagtggaaactgccagggtgtcaagtaaccaagactgcctcccgcctggggagcctgggcctcggctaggggtggggacggcagggtccgtccggagcgccagagtcccactcgcgcccagccctcagccccaggcccggttggacgccccgccccgccccgcctccttcctccttcccgcgccggg

SEQ ID NO: 4269 - DNA, 473 bp, Homo sapiens
  source 1..473: mol_type = other DNA
tcagggacttgtgaaagacgtgttttcaacataacctttattgatgacaagagaccttaagatcataattttgtgaaagataatttaagcaattatcatagctcatgttcttgtagcaacttcaaataaggtacagttttaagaataagcacaccaataaacgtttgttcttagtatgaagatatttggattctaaaaatacaaaaactgtaagtcagatttttgcaaggtaaaaacacagcctgctcccttagaaagctcgaagcccaccctgggagataaccaaagaaaaatattttaagatcatctggttaaaaaaaaatccctgctatataacacaactctcttgtcatttataaagaagtaatctcagaaaactgctcttttaaaattatttcaccttggccttttcagaagatgccctctactaaccgatgacaggttttagttttgaaaacttaaacacggaaccc

SEQ ID NO: 4270 - DNA, 550 bp, Homo sapiens
  source 1..550: mol_type = other DNA
aagattcaaaataagtagtccaactgcagtgtttttattcttaatcagtgtgtgaaaccagtcctggtttatgaaagatttgataacataaagatattcttggtttaggaagagagtttccaaaatagcaagtagttgaacttttaggttttgttactagtgaaaagtgaagtttaaagaaaagaggcaacacagtctctatagaattagtttttcctcattatttcactctatttatgatttaatattttcttatggatatcttggaatttattaggcacttaactgttggtcaaactcttataaagtctcaggaaaatctctctcttaagatttttcaaggaaagtgacaactgactgcttttttaaaaaaaatttccccaaaatgcagtgaaatagttttaaagtaaattcggcgaacactactaggctgccagtgagcagcgtggatgttaactcgcattttggcaacagatatggtatttgaaataaattaaattgagcgtcaagtttttaaatatttcactttcgccttcttcctaccgtcggt

SEQ ID NO: 4271 - DNA, 581 bp, Homo sapiens
  source 1..581: mol_type = other DNA
tattggtgcaccaaaatgcacccaaatatcttaaatatgaaataaaatagataacactattgtatactagcaattatcttaaatgcatcttgtgtatcaactaattcaattcttaaaactaaagattcaaaataagtagtccaactgcagtgtttttattcttaatcagtgtgtgaaaccagtcctggtttatgaaagatttgataacataaagatattcttggtttaggaagagagtttccaaaatagcaagtagttgaacttttaggttttgttactagtgaaaagtgaagtttaaagaaaagaggcaacacagtctctatagaattagtttttcctcattatttcactctatttatgatttaatattttcttatggatatcttggaatttattaggcacttaactgttggtcaaactcttataaagtctcaggaaaatctctctcttaagatttttcaaggaaagtgacaactgactgcttttttaaaaaaaatttccccaaaatgcagtgaaatagttttaaagtaaattcggcgaacactactaggctgccagtgagcagcgtggatgttaactcg

SEQ ID NO: 4272 - DNA, 616 bp, Homo sapiens
  source 1..616: mol_type = other DNA
cctaaagcttttctgggtggacattctgatcctcatgtgcaagacagaagagcttcacttttaagaatgttgagcgggacattttaaacactgttttggatttttaaggtttcaaataatcccctttggcagcgaccctccagcttacgcgaggggcaagtggcagctccgtctcccggggcggcgggggactcccaaccacgcgcccagggcccttgcccaggtactggggccccgggagccacgacggcccccgcgcaggcggatgggatggaaccagccctggggacgcgggtagcccaatgggcagcctcgccccggaggcgggcccaggccggaagccaccccgcggcacagcggccccgcgatacggtgcccgcgcccccgccttctctggcacaggctccgcggccaagggcggcaggggccagcccgccgggtccccgccgcgctctttgtcctggccgcgcgcgggcggacgcgtgcacccccagggtgagggggtggagagcgcgcacgggagcgcgcgggaacagctcgcgcccgccgggcgtcggcggcgcgcgcccctccgccaggcaagcagcgagcacgcgcgtcgccgccgcgcccgccc

SEQ ID NO: 4273 - DNA, 686 bp, Homo sapiens
  source 1..686: mol_type = other DNA
cctccagcttacgcgaggggcaagtggcagctccgtctcccggggcggcgggggactcccaaccacgcgcccagggcccttgcccaggtactggggccccgggagccacgacggcccccgcgcaggcggatgggatggaaccagccctggggacgcgggtagcccaatgggcagcctcgccccggaggcgggcccaggccggaagccaccccgcggcacagcggccccgcgatacggtgcccgcgcccccgccttctctggcacaggctccgcggccaagggcggcaggggccagcccgccgggtccccgccgcgctctttgtcctggccgcgcgcgggcggacgcgtgcacccccagggtgagggggtggagagcgcgcacgggagcgcgcgggaacagctcgcgcccgccgggcgtcggcggcgcgcgcccctccgccaggcaagcagcgagcacgcgcgtcgccgccgcgcccgcccctcccccccgcgctcgcctcggaacttgctgactgcgcggccgggaggagccgagccgggcggcggcggcgggaggctacagcgcgcgggggtctcccgcgtcccctccgcctcgccgggagctcgcgccctcgcccagccgagctcccacccccgctttccgaaggcgctgggcggcgccaccctccggccggagcccggcactg

SEQ ID NO: 4274 - DNA, 835 bp, Homo sapiens
  source 1..835: mol_type = other DNA
gtctcccggggcggcgggggactcccaaccacgcgcccagggcccttgcccaggtactggggccccgggagccacgacggcccccgcgcaggcggatgggatggaaccagccctggggacgcgggtagcccaatgggcagcctcgccccggaggcgggcccaggccggaagccaccccgcggcacagcggccccgcgatacggtgcccgcgcccccgccttctctggcacaggctccgcggccaagggcggcaggggccagcccgccgggtccccgccgcgctctttgtcctggccgcgcgcgggcggacgcgtgcacccccagggtgagggggtggagagcgcgcacgggagcgcgcgggaacagctcgcgcccgccgggcgtcggcggcgcgcgcccctccgccaggcaagcagcgagcacgcgcgtcgccgccgcgcccgcccctcccccccgcgctcgcctcggaacttgctgactgcgcggccgggaggagccgagccgggcggcggcggcgggaggctacagcgcgcgggggtctcccgcgtcccctccgcctcgccgggagctcgcgccctcgcccagccgagctcccacccccgctttccgaaggcgctgggcggcgccaccctccggccggagcccggcactgtctccctcccccacaccgtagcggcgcgcgagcgggccgggcgggcggccgaggtaaggcggcggggccggggggccgcgtggggggcggccggggcggcggcggcggtgggggggggcgggggcgggcagctttgttcgcgccgggcgcccgcgtcgccggtgtccgcgagccgcggcgggg

SEQ ID NO: 4275 - DNA, 430 bp, Homo sapiens
  source 1..430: mol_type = other DNA
gctgaataaatgaataagcattttaattgtgtatctgtcattacttttcttttctttttacatatagcaacaataaaaaactagactttcatctcctgaaaatatcagtctaatgctcattaggaccctgaccccacactggggtttacacccctaaaagatcggttaaagtgaatcaagtcacagttaacccaatctgttggggtcagccacagcctaaaccgcctgccgttcagcctgagaggctgctgctagcctgctcacgcatgcagcccgggctgcagagataacgtctttgtcactaaaatgttccccaggggccttcggtttatctagtggcgcagtcccactccccgagtttgtggctggcatgggccacgccgggctgggcggtcacagcgaggggcgcgcagtttggggtcacacagct

SEQ ID NO: 4276 - DNA, 507 bp, Homo sapiens
  source 1..507: mol_type = other DNA
actttcatctcctgaaaatatcagtctaatgctcattaggaccctgaccccacactggggtttacacccctaaaagatcggttaaagtgaatcaagtcacagttaacccaatctgttggggtcagccacagcctaaaccgcctgccgttcagcctgagaggctgctgctagcctgctcacgcatgcagcccgggctgcagagataacgtctttgtcactaaaatgttccccaggggccttcggtttatctagtggcgcagtcccactccccgagtttgtggctggcatgggccacgccgggctgggcggtcacagcgaggggcgcgcagtttggggtcacacagctccgctcttgctgagcccagagccatcccgcgctctgcgggctgggaggcccgggccaggacgcgagtcctgcgcagccgaggttccccagcgccccctgcagccgcgcgtaggcagagacggagcccggccctgcgcctccgcaccacgcccgggacccca

SEQ ID NO: 4277 - DNA, 602 bp, Homo sapiens
  source 1..602: mol_type = other DNA
gctcattaggaccctgaccccacactggggtttacacccctaaaagatcggttaaagtgaatcaagtcacagttaacccaatctgttggggtcagccacagcctaaaccgcctgccgttcagcctgagaggctgctgctagcctgctcacgcatgcagcccgggctgcagagataacgtctttgtcactaaaatgttccccaggggccttcggtttatctagtggcgcagtcccactccccgagtttgtggctggcatgggccacgccgggctgggcggtcacagcgaggggcgcgcagtttggggtcacacagctccgctcttgctgagcccagagccatcccgcgctctgcgggctgggaggcccgggccaggacgcgagtcctgcgcagccgaggttccccagcgccccctgcagccgcgcgtaggcagagacggagcccggccctgcgcctccgcaccacgcccgggaccccacccagcggcccgtacccggaggcgagcacccgaagctcccggctggcggcagaaaccgggagtggggccgggcgagtgcgcggcatcccaggccggcccgaacgctccgcccgcggtgggccgac

SEQ ID NO: 4278 - DNA, 594 bp, Homo sapiens
  source 1..594: mol_type = other DNA
ccgctcttgctgagcccagagccatcccgcgctctgcgggctgggaggcccgggccaggacgcgagtcctgcgcagccgaggttccccagcgccccctgcagccgcgcgtaggcagagacggagcccggccctgcgcctccgcaccacgcccgggaccccacccagcggcccgtacccggaggcgagcacccgaagctcccggctggcggcagaaaccgggagtggggccgggcgagtgcgcggcatcccaggccggcccgaacgctccgcccgcggtgggccgaccccaccgagagcgcatggcttgggaagcgaggcgcgaacccggcccccgaagggccgccgtccgggagacggtgatgctgttgctgtgcctgggggtcccgaccggccgcccctacaacgtggacactgagagcgcgctgctttaccagggcccaacacgctgttcggctactcggtcgtgctgcacagccacggggcgcgccctcagcagctcagagcggcgctttcctccctcccaaggaggcaggagggaaacttggggcggcagcgccccgggtgcgttggaagctgccctgctgcggactgca

SEQ ID NO: 4279 - DNA, 734 bp, Homo sapiens
  source 1..734: mol_type = other DNA
gaacatgtcaagaattacataaattctttaaactatcacttatgaattattgcctctttgcatggcaaagaactcatttagattcatgaaatggttctcaaatttggagatcttcatgagcagatgaatatttactatttcagatttgaaataaaccctgccaaactgctagaatatttattgagagaattttttaaaaattgcacaaattaaaagatgacatttttaagaaaaccgtatatatagatttgacttaatcatgtgttcacttcatgtataaaaaaaagccttcatctaaaatataaaaaagtcatatataaaattagtcatataaccaattattccaagtgacatttggtctatacttccttagtcaatgttctgagaaaaaaaggaatatgaaacatgcaagacttttattagcaacaatttttatatttttgaaatttttatataaagattaagcaaataactaaagattttaatgttgttaatagaaacctagaggaaagttcataaatctttataaaagcaatttttaaaatttgtatttttaattgttccctctttctttcaggttagtctttaaaaagctgtttaataaagagaattccagatattatttccagtagtccatataactttaactattatcacttcaaaaataacaatagatgtatttcagtaattagattaattgcaattctctatatttttgcagttttgttttataa

SEQ ID NO: 4280 - DNA, 408 bp, Homo sapiens
  source 1..408: mol_type = other DNA
tcagccttggctgaacattggaattacctgggaacttttaaaaatccggaagtttcgcctccagagattccatttcaaaagttccctatgtaactttaatgtgcaattgagaaccagactctctgtgttatcaaaattaatgagcagctgattttagaaatctcaaggagaaaagggtgaacccccccagggctcttctcctttttgcggaaaatctccctccctaaataactgaatttgtcagatgcaaatttgtctatgcgcgtcacctgtgctctccagggaaccctctggaaaggaggtggaaatccacctgtggtatctgggggccagtcccacacctatcgaggctggcaggccagggtgctggactgggtcaggcgcggccccgcctccctcctgggtccc

SEQ ID NO: 4281 - DNA, 150 bp, Homo sapiens
  source 1..150: mol_type = other DNA
actaatctcaacgctgcgtttacagatgaagccgccgcctgaaagggtttcttctggccacaaaggggccgtcttggcgcacagcctggacgcgtgcgcaggcgtcaggcgcatagacctgctagcccctcagctagcggccccgcccgc

SEQ ID NO: 4282 - DNA, 638 bp, Homo sapiens
  source 1..638: mol_type = other DNA
aagataaaaatcatctaatttggttttgattataaccgtaatagatagttaaagctttaccatttgcaattgttaagtttaattaatagcaaaaataatctaggtataatatatttgcaattgttaagtttgattaatagcaaaaattgtctaggtataatatagcaaaaattatctatgtataatatctaggcaagtcaaggagacttgcctccttgagcagagattcttaaacaagggtccacataagaacccctattgatatatgaaatttcaagtatgtatgtgagaaaaaagattgtccaaattcattaaattctcatgtggatgtaaatcttttaaaactgtcaagatagcatagaatagagaataataaatatcacatacaactgttttgaattttgtatcctacatttaagctgatattttagaaagcaaaatatgatatcaaaatactcaagataatatgtgtttctgcagcaacagatgcaactcagcagtctattaattaaaaatactttccaaaatgaacaaactgatctgactttcttgatgagttaaacatttgctttactctgtttaacaacaaatgtgggccaattgctgtgagttaattgaaaaggattgttttctagttg

SEQ ID NO: 4283 - DNA, 610 bp, Homo sapiens
  source 1..610: mol_type = other DNA
ctctggattttaatttcaaatgaaaaataattccttccttaaaatattttgtctacgcaaaatattcttttcaatcacgttaagattttaaaaagtgttctaacttgttcttcagagcaaagtacaataaaatattggaagccttacttatatgtatagttcagatgtaacatttatgagtatttttgctaatgagaatttaaacataacaaaaaagctggctttaaaaagttttgaaccagtccaacttcaatgtgaaatttccagattaaatatcctttcacaattcattttcattcataacataaacacgataaataactttaagtatgaaagtaaagcttagtcttttgcagtttttaaagagtctatgcccaagcagacacgattattaacaaactaatcttgcccattccgcgggcagtagtcgggggctggcctgctccgcgtcgcgccgggcgcgccccgccctaccgcgccccgcgcggccccggccggaagggggcgtgggccgccgccgagggaaggcgcgcagacgcgcagcggccggcctgctccgggcgcgtcaggcagggggtggggagcaggggccgggcgggcgctcggctcc

SEQ ID NO: 4284 - DNA, 509 bp, Homo sapiens
  source 1..509: mol_type = other DNA
tcccagctactcaggtggctgaggcatgaggattgcggaagtgagctgtgatcgcaccactgtactcctgggtgacagggtgagaggctctcttctattcttgtaacttcaacaataaaaataaggatcacagatttactagcaaagtttatccaggaaacaaatttcatttattcttataagtctgactgtcccagacaaagttactgtatgtacaaaaatctgtgtatttcttttggtgtgattcagatgcaagcagaaatgaattttattcatattgttatctttaagtcaaacaaaacaacttagtggttttgtaattttagtagaagagacagctcttttccctcttcattggggcaacaccaatagacttttttattagaaccagataactttctggtgtttctcaaatgagagaaaggcacctccatggaatgtctttcatgtatgtgtgatctacagctgtggtttacaagaattcaggtggccaggcagggacccctccc

SEQ ID NO: 4285 - DNA, 542 bp, Homo sapiens
  source 1..542: mol_type = other DNA
ccttacttatatgtatagttcagatgtaacatttatgagtatttttgctaatgagaatttaaacataacaaaaaagctggctttaaaaagttttgaaccagtccaacttcaatgtgaaatttccagattaaatatcctttcacaattcattttcattcataacataaacacgataaataactttaagtatgaaagtaaagcttagtcttttgcagtttttaaagagtctatgcccaagcagacacgattattaacaaactaatcttgcccattccgcgggcagtagtcgggggctggcctgctccgcgtcgcgccgggcgcgccccgccctaccgcgccccgcgcggccccggccggaagggggcgtgggccgccgccgagggaaggcgcgcagacgcgcagcggccggcctgctccgggcgcgtcaggcagggggtggggagcaggggccgggcgggcgctcggctcccagccgcgctccctcgggccactagcgctcccgcgcgcgcccggccgccttcatgtgaagcgccggccctccg

SEQ ID NO: 4286 - DNA, 401 bp, Homo sapiens
  source 1..401: mol_type = other DNA
cttcataaaagtattcgaatgcatgaaggccatgtcaatcaggctagtgtcccatactgttgacaacaagccataatgttgactaccattaggttccaagtcagagaatgtacattgaagcagcagtgacttccaagctgtttgctttccaaaaagactttaaaggtcattgagtccaatcccctcatttttctgagaagtgtggaggcctagacgtagccagtcctcagccctgcagtaatgctgccctcactacaccacagatgctctgcctcctaggatgagtttaaactaaccagatcttatagcataaacatagctgatattattggtatgttcatcaataatgaatggcccatccctactcatgggtccttcaaggctagcattgcattttcaat

SEQ ID NO: 4287 - DNA, 358 bp, Homo sapiens
  source 1..358: mol_type = other DNA
ccaagtcagagaatgtacattgaagcagcagtgacttccaagctgtttgctttccaaaaagactttaaaggtcattgagtccaatcccctcatttttctgagaagtgtggaggcctagacgtagccagtcctcagccctgcagtaatgctgccctcactacaccacagatgctctgcctcctaggatgagtttaaactaaccagatcttatagcataaacatagctgatattattggtatgttcatcaataatgaatggcccatccctactcatgggtccttcaaggctagcattgcattttcaatacacaattagcggatgttgaagaagggggttactcaaatggagtgtgtctga

SEQ ID NO: 4288 - DNA, 567 bp, Homo sapiens
  source 1..567: mol_type = other DNA
agtatttggagagtgccaataactacagatagtatcctcctttgtgaatttgatctttatttttatggatcattcaactaaaggcacatttttccctttttattacatgtatatattaaaaacattctaatcatgctttgaaatgatttagtttattacaaattattgactgaatagttgttagtgattcttcctctggagctagaataagagttcccgcatgtaaatctgtcttctaaaagaaaacaatttttaatatcatttattttcagctgttcacaaatcttttacttttataaatccaaatttcatcacataatatataaactttggaggggctttttgttaaaaaaaagcaagagatgtttcctcttagttggaaaccacatttgggtacagacatctgggtataatgtcaccagtagaaattagcaatttttgtttttctaactcaagcaagattgtaaaataattataatacagttcttattttaagagaacaaactaaccagctgtacaacttttattttgaagaaaaaaagttgagcctcagaacagtctgtttta

SEQ ID NO: 4289 - DNA, 213 bp, Homo sapiens
  source 1..213: mol_type = other DNA
cacaagtgcatttacactagtttcattttatttaggcagttaccgcatgcttacagcatcagttgatgtacatattcttgcaataacaatgttaatacatttttaagtgttagtttcagatcaatttagagaaaaaaaccttggcatttaaacaggcacttttttttcttaggaattctgatgtgcttcagtgcacagaacagtaacagatga

SEQ ID NO: 4290 - DNA, 433 bp, Homo sapiens
  source 1..433: mol_type = other DNA
caatttactttaagattttgttacagtgtgtaacaaaatggttacacactgtgtcataatgcttaacatcatagtctctgaagccaggttgcttagatgtgaatcctagctctcaaatatttgcctcatcaaatgggaaatagatataggagccactatcttgtaagattatttgactaaatgagttactacatgtgtgcttagaagacatattaactaagtttttaaatcacaacttatttcatgttagggttgatgtcggttttctcttttaaatatagaaaatgtagtaaatataaccacttcaattgttatattgctgtggtcagaatccagaaaatattgtacgcttacacaaaattgtaaatgttttaatttcccctgatactgcaatcagtgttctgggtttccccgtcaccctggcaacggaagc

SEQ ID NO: 4291 - DNA, 354 bp, Homo sapiens
  source 1..354: mol_type = other DNA
ggtaatatgtaataggtactgagaacattgtctgaaacatcagaaatattcaacaaatattggatgttattaccaatctttgaatgtcacaggcaagttttcttgcaagaagaaataaaactacatctgggttttcaaacaaacaagaagaaatattgtttataagtatattttctatagcagctcacaagtgcatttacactagtttcattttatttaggcagttaccgcatgcttacagcatcagttgatgtacatattcttgcaataacaatgttaatacatttttaagtgttagtttcagatcaatttagagaaaaaaaccttggcatttaaacaggcacttttttttct

SEQ ID NO: 4292 - DNA, 445 bp, Homo sapiens
  source 1..445: mol_type = other DNA
atgagttactacatgtgtgcttagaagacatattaactaagtttttaaatcacaacttatttcatgttagggttgatgtcggttttctcttttaaatatagaaaatgtagtaaatataaccacttcaattgttatattgctgtggtcagaatccagaaaatattgtacgcttacacaaaattgtaaatgttttaatttcccctgatactgcaatcagtgttctgggtttccccgtcaccctggcaacggaagcaggaagaggcgggcttcgccatccaccctccccgcccgcggcaggcgccggccgcattggtgagggggcgcgggctgcttggccagggcagttccctcagctccgggttggagccggagccggagccggatcccgcgcacaccgcccccaccgccgcagcgcccgctgggcccgcagcgggtctccccaggc

SEQ ID NO: 4293 - DNA, 471 bp, Homo sapiens
  source 1..471: mol_type = other DNA
aaaatttttaaatatacatttaggattaaatgaaaaacattcaaagcattacgatctctttggaactaaaatatagtggttgatgtgttttgtttctacttacaccaaacatgaactttgcaataaaattacactggtaacttacaattgtttttctactatttttaaaaaatggcctctacttaaattcagtataagcaccttgtctattataacaatatatttcactgtcatttctggtagggttatatgagaagtaaaaaacccttcaagctacttactcagtgatttcacaaatctagctacatggatgtagaaagtgatttgccatttaatggagattgtattgctgaccatgttctgtgataaataaattgtgctattattgtttagttcaaaatgtattttgtaatgtagacagaagttctcaaatttgcatattacatcaactggaaccatgaatcttaatgt

SEQ ID NO: 4294 - DNA, 428 bp, Homo sapiens
  source 1..428: mol_type = other DNA
ccaggtctgactttctgcagagccagtgacttaaaggaaatacctccatcccaagtggggctcgtttctggggccaaagcgcgctcgaccggcgctgtcttggggtctcgcactcgcacggcttcgcaccccaccgcctgcgactcccaggccgggcgccccattctcgggaagagcagccggcactggagggcagagactgccccaggggcggagctccctctcaggcgggaggtcagagccgcccgggcagaggcacagacgtccctgcggggctcctcctgagcgtccctcctgccagccagggtcgcagccgcagcggcggccgcagctcttagcagacaccccagagctccaactagctctcagctgagcgaagtctgatgcttctgccagagggagaggaatattccgaaggaccccattgg

SEQ ID NO: 4295 - DNA, 421 bp, Homo sapiens
  source 1..421: mol_type = other DNA
catggatggaaaggttttgattgttgttataatcatcattattacctaattgttgctgagaataacaaataatatctgccatgttatattagagctgttagtttccacgttaacccttaaggagcaaagctcatagaaggaaaaaaccccttttccttgcttctggagacctctgtagtcactaccaggtctgactttctgcagagccagtgacttaaaggaaatacctccatcccaagtggggctcgtttctggggccaaagcgcgctcgaccggcgctgtcttggggtctcgcactcgcacggcttcgcaccccaccgcctgcgactcccaggccgggcgccccattctcgggaagagcagccggcactggagggcagagactgccccaggggcggagctccctctcaggcgggaggtc

SEQ ID NO: 4296 - DNA, 622 bp, Homo sapiens
  source 1..622: mol_type = other DNA
agttgaatttttttatgtcagaaagtttcaacaacaacacaaattttaatatgtggtattggaagaaaagttttcataagtgcaacttcttcattttatatatgtgtttatacattgtgttgaaattcatttaaaattacatttactttaataggggtttgaaaaatttctctttaaaggaatcttgtgatttcttttgcaaaacttttttttggtaatcagaatcatcgttctataatttatttatctgttttacaaatttggatgcttacacaattgatttttgcaattcttatttaggatgtatatttactgtatgaaatgaaaatgtaggctgaaagtcagaaaataaataaattttaagctcttgtcaatctacatatatgagcataaattttaaaaaatatatcttttttcccagtttatttaaattgaaacgttcctcttgcattaacagcaaaagcagaaggagaaataacttttaacgtctgctctagccctcctggactagcctaaacgtccatggtcactgccgtaagtgacactaatatattttaccattctgcgtgtattagaaagctaaactttcgggaaaatgcaggtttctggctgacaggaagaa

SEQ ID NO: 4297 - DNA, 510 bp, Homo sapiens
  source 1..510: mol_type = other DNA
cattttgttactgacttaaaattaatgaatataatataaaaaattaacataatattagaggcctgagtcctcttggctgaagtttctcacctcaattacgtaagtcttcactggaatcatgtctaatacatttgacaacctttaggcattgaacaaacatttattttttggattgtgattatctcaaggacttgactggggaggctggcagaggcgatccccacctcgcggagcacaacatctgctgtgttctgcggcgagcgccaaaaagcgcttccagcagagtttctgcccccactcagcgcttgggactcccatcccggcatcaggcgtagtgggcggtccgggccagggccagggccagagcggcggcggcgaggccatgccgagggcccgtcggccgcagttccccgtccggcctcgcgggggcgccggcgctgccgatcaggtgaccgagggcccgtccggggctgcgggaagcggcctcgttctcagccgccggagacgccg

SEQ ID NO: 4298 - DNA, 520 bp, Homo sapiens
  source 1..520: mol_type = other DNA
taaaatccatagcattttttattcaaagttgtcaattttgcctgctatttttaaacatctgatcaaactacctgatagttcaaatagaaataaaattacacctgaaagttatgtaagttttaaagttagttttttcacttcctgcaggtgaaaggaatcatttaattgatttaacgacaacaggtgaatgaagtaaactgatgttgtttactatagtaaaatgatcagaaaaacttcatgcattttcacatgtaatattttatttttaaatgtataaagacatggctttggtcaataatgcaaataacaagagtaaatttgtattttttttttttgagagcaggttcaagcgattctcttgcctcagcctcccgagtagctggcattacaggtgcctgcccaggctggtctcgatttctgggttttttaaagatgatgtctgatttttttaaagacgagggtaaacatcacaaagggtctttggagatcactttccttggtatccaggatgacatcatta

SEQ ID NO: 4299 - DNA, 399 bp, Homo sapiens
  source 1..399: mol_type = other DNA
atttaattctggaattcctcattccaaagacaaaattcttcctccatttgagattttaggaagtcctagaaggatattttggatacatatgtagcacattattttataaagttagtatttgagcaaaactaaacaatatatttttacacacacatatgcagaatatgtgtatgtgatttacgtatgactatgcgcacgcaagattccgcggtgtttttgtatgttttaatatgcaacaaaacggcgtatgagttacgctttaatgtaaaattgtctacataacacaaaatttaaaagtgcttatgaaaccgtgagtaaaataatctgtgcttctatgtaacttaagtacccacaaaaaccctttcctcggaaattctcagcgcaaagactttgccctat

SEQ ID NO: 4300 - DNA, 323 bp, Homo sapiens
  source 1..323: mol_type = other DNA
cgtatatatatctgatgggccaccgcacagccgggctgatggctgccttggacccaccagaaagtctgtctccagggaatgctgcagacccggttcagcttgaggcagcagcgcctttgccgcaaagcatcccttacatataaatcaggagtccctgcttttaagccgctgctggcaccggcctggattcgctgcagtcggaagcgggtggctttcggtattgaattattaatttatttatccccaagaaatcgcaggagtctcccacttggcggtggccgtcgcgtccccggccctctgcggcagcggcgccgcgcggggcg

SEQ ID NO: 4301 - DNA, 410 bp, Homo sapiens
  source 1..410: mol_type = other DNA
accagaaagtctgtctccagggaatgctgcagacccggttcagcttgaggcagcagcgcctttgccgcaaagcatcccttacatataaatcaggagtccctgcttttaagccgctgctggcaccggcctggattcgctgcagtcggaagcgggtggctttcggtattgaattattaatttatttatccccaagaaatcgcaggagtctcccacttggcggtggccgtcgcgtccccggccctctgcggcagcggcgccgcgcggggcgctcccactcgcgctcgggctggcgcggccgcgggtcccggcggcggggtgggcgggggaggcagcgggtgacagatgtactcctctgacagctctcacagcccagtggctccctgccattggctcagtgcaatggaccggca

SEQ ID NO: 4302 - DNA, 533 bp, Homo sapiens
  source 1..533: mol_type = other DNA
ctgagattgccagcatgagcacctggacctggtccaataaatattacaaattcgaattaggcatttcactttcatttatatacatatcctttcacaggattatttgatagttattaatgtatattatgattgagttttaatagttactttgggaaaacagaaattactgttccagtacttacttgtaagttgtaagtccacacaatgcacttaaacttcaccttgttcaacagattctgtagcacatgaaacacttgaaatgattcattcactgattggacgttgtcaaggcttgagtggcagcacggccttatttcaccgattattactaagttaagctttacatacctcacttgcactttctggaaatccgtaattaagttcagtgtttgtggaatggagtgtaattaacgaccattaattaacagggtttcgttcctgccaacacgagaaactgataaaaagctttcctcattgttcccggcgggacaagggaacgtgggtgcccttgctactcccgtggacgcgggtag

SEQ ID NO: 4303 - DNA, 622 bp, Homo sapiens
  source 1..622: mol_type = other DNA
gtattttcgtttgtacaaacaagtaccttttcaaacaggatctaagtttgtaatgttaggtaataggcatataggctgaagccggactgccaagttcctttctctgcttcatctataaaacgaaaacagtaatgtcgttgtgataactaagctaccaagcacttaaactaagttctaactaagtttggttactttcacgtgaatttttaggaatcacctaggcactctcctaaagtctcaaaataacttaatacagtacttctaaggagttcaagtgcctccttatctgggacgccatctcagatgctcttcaaatgaaagggaccctgcaaatgaaagttaactttttccattttttaaataatccgcattcagctcgtggtcacggagcaaccccgagtcgctgcggctgcttagtagtcactaggggaccattaactggcccggcaggaaaagtttcccggtgaggtgacggccttttgccatctgaaaagggcctatcggatgcgcgacatcacgagtgacgcgtagcccgtccctgccccctcctagtgggacgcagtgggcgcgcacgcgcagctccgcttccgggagccgctcctccgacctgtcgcaaaggccg

SEQ ID NO: 4304 - DNA, 446 bp, Homo sapiens
  source 1..446: mol_type = other DNA
ttcattcactgattggacgttgtcaaggcttgagtggcagcacggccttatttcaccgattattactaagttaagctttacatacctcacttgcactttctggaaatccgtaattaagttcagtgtttgtggaatggagtgtaattaacgaccattaattaacagggtttcgttcctgccaacacgagaaactgataaaaagctttcctcattgttcccggcgggacaagggaacgtgggtgcccttgctactcccgtggacgcgggtagattgggacgctggaccgtatctccccgcccccctcaggtgctcagcctgaggccttcgtccaggagcgctgccgctgacccaggctcaggagctgggggcccctgcacagacgcccaggtctcgggacaggcggcgactgcactcacggcagtgccgccgcggctctcaggcctga

SEQ ID NO: 4305 - DNA, 432 bp, Homo sapiens
  source 1..432: mol_type = other DNA
caagcccactgtgcttacacacatggaatgcaggtccaagcacctgaagaaatgctggcacatggtaagcaactagtatttagtaagatttttttgaacaaattagaattagataaaatgtaattaagaatatttaatgatatggaaagaaaaatctggcgcgctgcagtttaacttctagcttgcagcaagggctcaggtggaaggaattttattccactctctgcaaaccgcctcagtgggaagtggacgctgtgagggtctaccagctcccagaaggcctccgggccctccacccgggctgcagccccagcatcgcgtcctctcggagcagcctggccccaggtggctgcggggcgcgggaccgcgggccccggctcgcccctccccgcgcgtcacatgcgcgaggatgcgaactccctcttcctcctg

SEQ ID NO: 4306 - DNA, 435 bp, Homo sapiens
  source 1..435: mol_type = other DNA
cttttttcagtaattatgactcaaaatgttgacccatactttattacagttttccccctaaaatgtggtaaataaattattggaggtacaaacattgcataccttgaaactcttattccttagtatacagatttgtaagtttccaatggacacacacacacacacacagagagagagagagagagttcctcccaagtagctgggactacagccggcgccactaccggtcagtcaatctatgcatatataaagatgatgaatcatcacaggataatttcagcatccagagcccagactgcaatcggaaacactcctcagtcaagggcgtcgcttcgaaacgcagtgaggcggggagagttgcagaatccatgccatcccttcttcggcgcagggcacaccgggacaccaaggcaaccagcctgcacgccgtcgtct

SEQ ID NO: 4307 - DNA, 526 bp, Homo sapiens
  source 1..526: mol_type = other DNA
atatccaatgatgtattaaacatattcaggaaaaactatgctttgagatgaaattttgtctaagaaataaagtatcctttgtatttatattattttataatattatgtttacaacatctatattttctttaagattatattgacttacaaatattgtggtataaattattttatattataaataacataattataccaaatatttttaaatgtgtgcaataattttaaaattatgaattattcaaaaggctattttgtcaaatatatatacttatatattataaaagaaacactctatacatacactcatgttcttatgaagattaaaaactgcaggataaagtttcttgatctaattaactgattcacaaaaccagttatgatgaatacagttaatttttttttctgtgttatgagcagaatactatattcagatttccaaaggtgaaagctttttgtctcacaataagaaaggagtgctgctttcctggggtatgcttaacctaacactactgcagtcagagtg

SEQ ID NO: 4308 - DNA, 309 bp, Homo sapiens
  source 1..309: mol_type = other DNA
ttttagttaagagcctgacatttactgttatcaacctaaaataaagagagtttattctcttgtccacaaagtttgaggagttcggagcttaacaaaatttcagcatctttcttcataagccttaatttgggaaaggtatatttaacattccacactgtctgctagtcatttttagaacaagaacaggcagaattgcaaatatgctacgtgagagtctccagggcttaatttttttccttgacatactaaatttagatagtcctgaaattttattttatttctacactatgtactttagccaagaagtcc

SEQ ID NO: 4309 - DNA, 498 bp, Homo sapiens
  source 1..498: mol_type = other DNA
gttaccttttaaagaaactcctacattttctgaccaaatgtcttcaatctctagtgatcttagtctgatatgaccataattcacagcagagactctggttgacatctgtaaatatttacatattttgtagaataataataatagaaatacagaaaacagcgataatgatagccaacaattattggaggtttgctacatgctgggcctgccttaagtactttttatgtattaagccatttagtacttacatcaagcccagaaacttttattatgtagccaagttagcaagtagctaaggtagggctcaaagccacctgcaatagataatgcattacattgtctcactaagtttcaaaaaagcttattaacagtgtaataataaatatgtaattttttaaaccctaactctagggggaaaaaagcattctttttcaactgattacaaaaacaattttccttcatctgtttcctccactaaaaaaaagaaagaaagaatga

SEQ ID NO: 4310 - DNA, 321 bp, Homo sapiens
  source 1..321: mol_type = other DNA
ttctagcaccaccctctctcctaattacagtaaaacatggtgggatataagaaccaaatatttattgagtattttctattatagaattcctgttgacagtacactcaaactaaaatttagtaaactaaattctgagcagcagaaaaaattttagtaaaggtcctctcatccttgaagaacttcttatataaggatacttaaacatttaaggcataatgaggtgcggccagagcagcagcaactgtggctgctttcttgacccctctatgaagcctcagaggtgttttaaaattgtgttaggaaacacgtagggcccctcct

SEQ ID NO: 4311 - DNA, 343 bp, Homo sapiens
  source 1..343: mol_type = other DNA
acactcaaactaaaatttagtaaactaaattctgagcagcagaaaaaattttagtaaaggtcctctcatccttgaagaacttcttatataaggatacttaaacatttaaggcataatgaggtgcggccagagcagcagcaactgtggctgctttcttgacccctctatgaagcctcagaggtgttttaaaattgtgttaggaaacacgtagggcccctcctttccgcgtgcacgcgcgagattgaacacaggcgtcccgtgtggaaatgtccaaggatttccttctcaccgagagggggagcccggcgttcccggccgggagcgacccggagtccccagcccc

SEQ ID NO: 4312 - DNA, 321 bp, Homo sapiens
  source 1..321: mol_type = other DNA
tttagtaaaggtcctctcatccttgaagaacttcttatataaggatacttaaacatttaaggcataatgaggtgcggccagagcagcagcaactgtggctgctttcttgacccctctatgaagcctcagaggtgttttaaaattgtgttaggaaacacgtagggcccctcctttccgcgtgcacgcgcgagattgaacacaggcgtcccgtgtggaaatgtccaaggatttccttctcaccgagagggggagcccggcgttcccggccgggagcgacccggagtccccagccccgcgtcccagctgccgccagcgccagtt

SEQ ID NO: 4313 - DNA, 459 bp, Homo sapiens
  source 1..459: mol_type = other DNA
ccttctcaccgagagggggagcccggcgttcccggccgggagcgacccggagtccccagccccgcgtcccagctgccgccagcgccagttcgccagagaaactttccctctcggcctcggagacggcgccccggccgtgccggagtggagatcgccaggctcggaggaaccggcagctgcctctctcagtgaggtacggagatttacctggctgcgaacccaggctcgaggggcggtgggggtggacagctccggccaccagtgcccgggaaggagggcgcggggctgcgcgtagccgctggccagcaagcactaattgagcctgcagcgaggtcggggacgcagcggtctccgggctccagaaacctccttaccgatcagactgggctgagcaggcaagtcatcgtcgggtcacagcgaggcgacccaggagcgaggccgcccatggttacccttctg

SEQ ID NO: 4314 - DNA, 604 bp, Homo sapiens
  source 1..604: mol_type = other DNA
attgtattttccaatgcatgtttaaatatcttacattcagccatcattgactattgttgaagttgatttttaatcatttgttgcctgaacttcagaaatcctcttaagattaatcatcttcatcacttcttgaactgtcacaaactatagtattacgaaaagtggaccagtttggcacacatgtaaaattttacacagatgtgttaattcctctaaacattttaatttattccacaatagattttctcttaaaacaatgtttttagtatcatggagaaaataattatgtaaactaaatttcaacagcattgattgattcaatgtattttccactgagttcaacctgtatctcaagaattttcaaatttcatcagaatttatgatcactttcagctcttaagtcctgctaatcatttagggataatctaaatgtccaatatgtattattatgttttgcattatattgttttagatgtggatcactatactttttcttagttatgccaaactacttatagaaactcttatatgtgtaaagatgtaatattctatgttagatcaaatcttgggcttcagattccgatcatgtaggttaaatcatcta

SEQ ID NO: 4315 - DNA, 645 bp, Homo sapiens
  source 1..645: mol_type = other DNA
aaagacctataaatggtatttgcccctctttcaaatatgatccagaaatacattggaaagttttgtggatgaggatctggaaagtatacacataaaagtctaaattagaaatatttatactaatctttagagtaatgcagaaaaaatgaccactttctctggtactcttttaacttctccagtttcctaaaaagttatgtcatgaaaaggctgaatttttctctagaaaaatctgctctgtctttcccaagaaagcactctggcttgctaaagaaatttgtgagaaatggaaacagctatagataagtatctaacttttaggaagccattcaaacattgctatttaaattgagttaggattacttctggcaaaatcccaacataaaaatcttctaggaagatcagttctgtaaattagacatactagatattttcaaaattatgcagttgttaacttcataaggggaaataaaaatgtatgcatttacattgtatgtattaaaacaaggcagagcatttctatacgttcctaagttatacaaacatatatgtaagagtgaaatatgtaaaaaaacttttacataagcagatgcatacaaacttcttctataagggaaaaagaaatatttatcatttcttttactg

SEQ ID NO: 4316 - DNA, 489 bp, Homo sapiens
  source 1..489: mol_type = other DNA
taataataccaccatctgcttttatgtagctttggagcttcattaataatacattactcattttagtgtcactaaaccctgtacactggtcagggtaaagcccttttctcaaatgagaaaattggagtgctcatttagaagcattttcataaaggtagagtacttcccattcctctgagtagactatttttcaacatggtaaaaaattaggaaaggacatgctttcttaattcaaattacaatgtatcacaaattcatttatccaaaatggttaataatctccttccagagtatggggaatactccctattcagtcaaaagaaagggttaaaatgtgattgtttaaagattttatctagaacccttttcttctaacagcctttcttaaaaaataaaagaaaagagaaacaaatgtttgtttctgttattaagccccatctatgcttaaaagttaaagtttaccatcaatcagaccgttgcttggcagac

SEQ ID NO: 4317 - DNA, 663 bp, Homo sapiens
  source 1..663: mol_type = other DNA
ttttatctgtagtagagaaaatagctaggagatgtagacataatgacagatactatttattaagcacttttattgcatccggacataactgaagtgtttatgtgatgatatttaatattcataaaagcattgtaggcatattgcctttgttttccaattttgtaaaggtgaaaactagtgcacagaaataataatatgtaactttctcaaagtcataatttaaatcactggttgttctacaagtgaaaaaaattctgtgttcaacttagaacatatatatgaaatggtagttcttatttttcatagctggaaaatatctctttttgctgaaaaactatttttctccaaaatactgattatattctctgtgttataaatgggaaaatgaacaccagatttttcatttagcaaaactgtacaaagagaagaaatctgttgtttggccaaatttgaatacagatttccctgagagtctgactgagagttttttaggttaagataatactaaacactatattgaagatgggattgccatttttcaactagtccatctgggtcagtttgatatgaatatttatttttacctcattaggaactaactcctgttgtatcaaaggtcttgagcccaatagcagccttattaggcttttggatcctagagtt

SEQ ID NO: 4318 - DNA, 681 bp, Homo sapiens
  source 1..681: mol_type = other DNA
ttgttagttttgagatcactattaacaacaaatcactcaaaataattttaattactttcacttatcatacttaaagagatgaatttcattaaaaaaactgaaaagccacatttacaaaatgtgtgttgcatgaatgcattgcttaaaaaattatcaaagatctactttttactcagtattatatatggggcacaaaatcttcaaagattttctacaaagaattttttatgtcatgacttaaaagtgaaagcatctccatctaaaattcttttcaggtgaatatactgttgcatcttactgtaacatgtattctctaacttgaaagtatgccttcaggttaaaggatttatgcaaataaatataaatggatagaaatcatcactctataattgtttacatattttcctatggatctctttaaaaatactttctaaacaaagaagaatgaagcacctttatcttcaacaaagttaacaggaaatatgaccatataggagatttagttgtcaaaatatgccctcataatgtaaatctgaacaaaatgttaaatcgaatatttatatttttatatcttttttttttttgtctcgctctgtcacccaggctgaagtgccatggcaccaagtggtctcgagctcctgacctcgtgatctttatttctaaaccaatgtaatttaccaa

SEQ ID NO: 4319 - DNA, 388 bp, Homo sapiens
  source 1..388: mol_type = other DNA
aagagaccaagtcttagcgtatttttatctcataaagaatctaacatctgttttcatgtaaagttccaaaagactgcactatgcttcatgcactatgcttggaatagttttaggttttagtcactccaaaacatgattccctggaccattttccagccgccttccagatcctcgacacggagaccggctccagggcctttatctacctgcaggggtaacgggacctcccaggtaccctggggatcccccacaggcgcgtccgccaggcgggcgagttctttgcgcagtaagccgggtaataaggctgttcccagaggcctgagaagagatttagagacaatcagtttttattatatacctatacacaattatttaatacagacatatt

SEQ ID NO: 4320 - DNA, 270 bp, Homo sapiens
  source 1..270: mol_type = other DNA
taaaaacacagtattataatcttacggaatcaccatgttatatgcattgattgaaagatccttatgtgacatgtggtaattttgtggtaaatccacaaatcaaaatatgatacatgttgagattttaggggtgtcaaggccctaggacacgcgagaggctcgcgtcatcctaatatgtctgtattaaataattgtgtataggtatataataaaaactgattgtctctaaatctcttctcaggcctctgggaacagccttattacccggct

SEQ ID NO: 4321 - DNA, 510 bp, Homo sapiens
  source 1..510: mol_type = other DNA
cacaactgggataaccggtattcctggtaagcctgtcgggtttgctggggctgcagcatcctcattctgtctccaggacggatttggaggcccaagatgaattatatttatttagatacctgtattaaaaattattttcgttaaaaaagctcgcgctggagctttgcactgcgaccgtccggcggccgccctttccctgaactgcggggtagccggtgcgcagcgccacggccgccccccgaggttgccctcgcggcttcccggagagcaggaaaacccggggagcgtcgaggcgaaggtccccgcaagccgcgcagggtgtctgcggccggttggacgcttgcgcccggggtgggcgactcctccgggcaagggcgcggggacggcccggcgcgcaaggttgacgggagctcgtctcgcgccgcggggacgcccgggcggccctgaaggggacggggcggccccagtcggaggtcgcagggagctccgcccccgactcggtataagagc

SEQ ID NO: 4322 - DNA, 340 bp, Homo sapiens
  source 1..340: mol_type = other DNA
aaagccaaaagaattctgtcattttgcactttctgaatagtttgaactattctcattaattaggatggactccttggtgacaatggagaacagagactccatatcacattttgaggtatatgctgacttagccactctttccacaaatacttcttaaacagtgtctacgggaagtaattttttttaaccgaacttttaaaaacttcttataatatgtaataattaatgtaaagcacaagtggaggggtttatttaccagttcactccttcactttagttcactcatctgagtatactttggtttattctcaaggatgcatgtataaatgtactcatgcgt

SEQ ID NO: 4323 - DNA, 483 bp, Homo sapiens
  source 1..483: mol_type = other DNA
taagagactgaaatatttattaaatagaattttatgtattttctggctgtatatggagaaaactaaacagttaacttagttccatgttttagtggacaatttggcctacatttatctcaatcaataccattattgaaaaatggcaaactttccttttaagaatatatatatatttaatcaagctaaaatttgcataacataaaattcaccacttgagccattttggtgacttttattatttcacattgtggcaaaaccattgccactatctagactgaattctgtatttaatttttccaactagaaactgtagactatcgcaaggtcaaatctatttgaaatgttcaaacaaaatgaatttatctttcatgtctgtaatttaaagtagatgttgaacttaaacttctcaagagccattcattcatattatagaaatataaaaccgttcttgaaatttgcctgtaacactgagaaagatttttg

SEQ ID NO: 4324 - DNA, 347 bp, Homo sapiens
  source 1..347: mol_type = other DNA
tctctgtggaaacttaagatttccaataatatagtataattatcaaaaacctaaaatcatgtctctaatgtgaacataaaatatatacatgtcaaacttttattcaactcattctaatgtgttgcagaacaataaatcataacctgtgttggtatctggtacaacaaaaaattatttgcatctctatattgcaaatatagatgcactaaaaaactattaattcatctgaagttcatactgtattgtctgtacatagataataaatatcatattaagcatgcgcaggcgcgaaactcctccccaggccagacccggcctgcgcatgcgttcaagtgagcgcgagcgcg

SEQ ID NO: 4325 - DNA, 467 bp, Homo sapiens
  source 1..467: mol_type = other DNA
tcattgcagtaatatttccaatgtgccacctacaagagagatacttcaagtctttcttactgatgtacacatgaaggaagtaattcagcagttcattgatgtcctgagtgtagcagtcaagaaacgtgtcttgtgttttgaaaacgtgtgagaaagcaaatgttttagatgaaccaattgatcttcttaatgtagctttcatagctgaagtgaaataccttcagaagaattctctaaagatgttgctgctgctgctgctgctacaagctgtttttctatggaagaactgcagaaattaagaagaactaaggagtgaaatcctatcagagcaatgcaaaggtatgacacagtgtttcttctttgacccttaaagcttttagcattttgattgtaagaatatagcatattttaggtgcatttatcttattttctttgataacatttttatagatgagcaacttgcaggt

SEQ ID NO: 4326 - DNA, 643 bp, Homo sapiens
  source 1..643: mol_type = other DNA
tgaagagaatgacactcaaattttgtttaattatctttcctcctgtaagaatgaatctgagattttgtcactcttctcagaagtacaaggtccctggtcatttatatattatcaagcatctagtcatttggcaaatcagtggcaagaagttccagcatctggacttttcagaattgatcttaagtctactgtcatttccggatgcattattttacaactgtatccttggaaatatatttctagggagaatattattgaagaaaatgttaatagcctgagtcaaatttcagcagacttaccagcatttgtatcagtggtagcaaatgaagccaaactgtatcttgaaaaacctgttgttcctttaaatatgatgcattggagactcattgcagtaatatttccaatgtgccacctacaagagagatacttcaagtctttcttactgatgtacacatgaaggaagtaattcagcagttcattgatgtcctgagtgtagcagtcaagaaacgtgtcttgtgttttgaaaacgtgtgagaaagcaaatgttttagatgaaccaattgatcttcttaatgtagctttcatagctgaagtgaaataccttcagaagaattctctaaagatgttgctgctgctgctgctg

SEQ ID NO: 4327 - DNA, 413 bp, Homo sapiens
  source 1..413: mol_type = other DNA
acgtgcaaagtgcaggtatatatgccagccctgtacaacagtggattctaaggtcttgatttcatgtacaacagagtctcgctctgtagcaggctggagtgcagtggcgcgatctcggctcactgctacctcccgattttttttttttttaattgtaaaaataagccagcccctttcttcctagtgaagtgggagaaacggttttatcaggtacctcacccctaagtttagatttgatgatagttcccttaaaaatgaatgaccagccaagggcaaaaaaaaaatttctttttaatgtagcttagtgtttacagatcatcacctgcaaatcttgcgcagttttgggcaaagacggcctttaagccgctcgctagcggaacagcagccagctctggacgggaccttgcacagtt

SEQ ID NO: 4328 - DNA, 396 bp, Homo sapiens
  source 1..396: mol_type = other DNA
ctagagaaaatgtgagttattttctcttctagcagttaagaaaacagactccagtgccagatgtcctggtacatagtgccactttatcattattgttacacataaatgaaatttttgaaaaacataagttccaaataaaaaacctcaaccatattctggtaattatttacttatttattgttgagcttcacaacgtgcaaagtgcaggtatatatgccagccctgtacaacagtggattctaaggtcttgatttcatgtacaacagagtctcgctctgtagcaggctggagtgcagtggcgcgatctcggctcactgctacctcccgattttttttttttttaattgtaaaaataagccagcccctttcttcctagtgaagtgggagaaacggttt

SEQ ID NO: 4329 - DNA, 495 bp, Homo sapiens
  source 1..495: mol_type = other DNA
aatttacatggtcaagggataatgtttgtttctcaattttgtgattaaactaggtgaaaataaggagtcttctgaatatttctctagtcaaatcaaaaacttcagttttctttcttctttttaaaaaagcttctcctttccattgaagatggactccaaaggaagaattgataatagttctcagttcttttaatgatggtgtttacttgagactaagaattgcttaaaataaaactgttggaacagctgtgattttaaaatacacaaacgccgctctagagttacactaagtttatatgtgtaaatctttcgtctaaacaccatgatttatcatacattaaactattatgtcatacttaaatttacatctcagtgaagaggctgttggctctgccctcgccggtgcctccgaagacggcgacccgcagcggcccctcaggggagtcccccctgctagaccgacagcccgagcgctctgggccgtcacgtcaggac

SEQ ID NO: 4330 - DNA, 548 bp, Homo sapiens
  source 1..548: mol_type = other DNA
gaaatcatttatttaaagattctcttaagtcaatttcaaaatgttgaaagctatttcggcaataaaaatcacaaaaaattacatttcaaaggcttccaaaaaaacctaatcaagactttcctcaggatcaattgtcttcggcgttgattaactttaaagagtttaacttgcaccccttgtagctgcctggaaaacaaattttaagtcctccacccagcgttccacgtgtgcgcgcccgcaagcccggcttcgcttcccgccccgcggggagcgcccttagctgccctatagcgttcgcgcccggaccaggacgagtagaggggacggggccctcgagccatctgctagcgcgaggcaggcaattaccatccactagccgcaagcagccagcggcacccgcacccgcacccagcacgcacgcgcgcggcagagcgggtgcagagagcgcggcactgagtcccgcctcgcccgggggcaacgtgagattggcgctgctcgcagccaatccgctggcagcgagtctgtccgggaaagcttccgcaagctgc

SEQ ID NO: 4331 - DNA, 458 bp, Homo sapiens
  source 1..458: mol_type = other DNA
agtttgcaagaaaagtcagaatataattagtcacacaaatcctggaagaaattagaaaaaaagcaatttcttcctctaatgttattgtatttttattcataggcatttatatgtattcatatattaggtatcaatagaggaagcctcttaataactggatgaccttggacaagttttctaatttctttatgccttagtagttttataaaattgaggtgataatggcacctattttcatagcagcctgaccaacctggtgggcacctgtaatcccagctactctggcgagatcacgccactgcactccagccgaaatagaagacttaatattgtatgtgcagtaagtctcagtgaagatgatctattttcatctgtcattattgtcaggaatgcttaacaattcttacaagttgcatttttatcttctagctgctctgttaaaagcgaaaatgaaacaa

SEQ ID NO: 4332 - DNA, 552 bp, Homo sapiens
  source 1..552: mol_type = other DNA
cgctctagagttacactaagtttatatgtgtaaatctttcgtctaaacaccatgatttatcatacattaaactattatgtcatacttaaatttacatctcagtgaagaggctgttggctctgccctcgccggtgcctccgaagacggcgacccgcagcggcccctcaggggagtcccccctgctagaccgacagcccgagcgctctgggccgtcacgtcaggacgggcgagcctctgaggccacttggctcttacggccacgcagggcgccgcagatgcagccggagcccgctcgacgaaggcgactgtacagcgtccaccgcgtttacccgccgccccactccgggccgccggctcgcagcaggaccagcccggctgctacggccgcggatacacgccctcaggcccggcgctgcgcagcttgcggaagctttcccggacagactcgctgccagcggattggctgcgagcagcgccaatctcacgttgcccccgggcgaggcgggactcagtgccgcgctctctgcacccgctctgccgcgcgcgtgcgtg

SEQ ID NO: 4333 - DNA, 758 bp, Homo sapiens
  source 1..758: mol_type = other DNA
aaaaggtcacccctttatcatgatgctctttctcttttatgtgctcataatattctgatataatttatagagaatagatactgcactttttactctctggatatttactgctggactgccacagttataaaattcattatcttagtctatgttcagagatttttctactaattaccctcttgaataaaaacacatcttctgagttatgttaatctgcatctttagaataggaaataatagtcaaaagttcagtataattttcatattaataaaagacatgaaactatgtaaaaataattccatgcacaatatgttataataacaatgacttccaatatttactaagaatttagtcagaaaacaagtttctcaaattatagatgaaaattctcaactagtatcataatcttaacttttaattcaggtcttcctaatttttattttcctaattacttggcactaaaaataatttaatacaacaaataaaaatattttctacttcaaatacttgcctaaacaatataaaatcattttagtttttgaggaagtaatatttcatattttaaatatgtagtataaattaaaattgacttatttaaattacaataagagttggtttatattattgccaacatagacttttgtttttcaaatgtcacaaatatcttttattatttgtagatttatttcttttatgaagtagtcaaatgaatcagctcaccctgtaacaaaatcatctaagttggaatataaaaagc

SEQ ID NO: 4334 - DNA, 615 bp, Homo sapiens
  source 1..615: mol_type = other DNA
tcaatgctttaaactttgtttgaaagagaaaatggaaaagtataaaatggatatgtcctttaaatgtttaagtacttccaacacttttgctctgccaaagcaggtctggcagctctgcccggcccaagcgcagaacccttagctgggaaggccgcggccaggctgcggggccccctgcaggcgggctcagtgccccggcccagcacctgttgtcccaaggcaggccccgcgggggagaggccttggagggcagcgccccctctcaccagggcggagctcaggagagttcgcagcccagggggccgagaccaggggcagggccagcgaaatgcctcgccccgctgcggcgccggcagctgcttggtagttgcggggggcgtgagggcggtggcccagaccaaccggctggcagcccagctccgctccgcccgcccctgcctcggaccctgcgcctgaggagttcgtgggtcgctcccagagggcgcgccctggagccgagcgcccttgggcggccatctggaggccaggtgcgggccgcgaacccgcgaggagcgcgcggcgggcgcggcggcgacggcaggaggaggggccgggagcccgggcgccgccgaagga

SEQ ID NO: 4335 - DNA, 492 bp, Homo sapiens
  source 1..492: mol_type = other DNA
gaactaagttcaaaaataaccgtgtgtgttataacagttcatttgtggaaactctagattaatcacaataagcaaacatttcactgttggcacattctattacaagacttgtgaaaagcatttaatcaaatactcaatacgtatgaagggatttgaaagttaaaattgtttttaagttccaaatatatttaaaatgtctctacagtgttaactaaatgacacaccttatatcaagaaggaaattacttaacaaattcataagacagtataatcagcatatgagaaatcttttttaccagaatgatttggtggacattttaaagaaggctcttaaggctcaatttttaatgcttaagaaattaaatgacttttaaatgcactattccctatgaaattaaatacatactcaaaagtatgcaataaaatcattttacaaactaaaatgtgaataagttgattttagagtggtctgtggaaaactaaaataaacac

SEQ ID NO: 4336 - DNA, 423 bp, Homo sapiens
  source 1..423: mol_type = other DNA
tccttgacctaggttagcaacgtaatttttgatcaatttaaatatcaagggatcctagtagttgagttaaatgttggtttcatttaagagtaagctactttctgaatgtaattatgcttccactgataagaagacatatctattatgtcttaatcagacaactcttgtgtgtctttgaggaagagtgggagatctgtaacttttcccaagaaaaatgaaaatgtctcaatcctaatattaaaggaattcggctgtattactacatcgatgtcttgagtctcaaagaatactaagtttacgttttaataaaaaattactaaaattccagaaaagtggcaggccaagcctagacaacaggttgcgctttgggctttccccgtcgcgtagcggaaacggtcttcctggaggactgtcatctgtgcc

SEQ ID NO: 4337 - DNA, 195 bp, Homo sapiens
  source 1..195: mol_type = other DNA
gtgcaagggcttctgcaggaagccttctgcaggagcagccctacctgtgccaagaagtgaaaaggtgtgtgaagcgccgctttagaaggcccagtacacaggtggcccgaggcccactccttaagaggcaaggcccagagacactgctgtgtcttgaggaacatccacccgcagtcccctatgaagaaacgtggc

SEQ ID NO: 4338 - DNA, 432 bp, Homo sapiens
  source 1..432: mol_type = other DNA
ggtcaaggctgcaatgagctgtgttcacaccactgcactccagcctgggtgacagagtgagaccctgtctcaaaaaccaaggtgctagctggtctggtacccacctactcgagatcgcacagctgcactctagcctgggtgacacagtgagactccgtctcttctcccttcttcccacagggtgaaagaaagcactacttcaatattgctgctaagcatatgatcattctaaggtcattacaagaatttggattttcattcaaagatttttctgtcactgagaatttaattcttggtatatttttgagagtgtaaattttttttcaagatttaaaacaataagcttcaaatgttagattgtatctagagtcttccacactgaggatgatatagactagctgttcaccaggctgaccaggttgactgccaaat

SEQ ID NO: 4339 - DNA, 683 bp, Homo sapiens
  source 1..683: mol_type = other DNA
gggcgaggcagagatgctctcccagccgccggttcgcggtcgctgcagccttcccgccggacgcctcgcccccccgggcaggggcgcacctggaccacctgcctccccgcctctgccccgagcctgcgggggccaggggagcccggcgcgcggtgtgctctttgaaatactatatcgggaacctcacacataccgcagctggagagcaggccggaggcggcgttccccacccgtctccctctttgtcgtcccctccccgcgcccggagcgggactcgcgggagccgcccactcccggcgcccacttgcccagcggatgggccgtcctccggattccgcggagggggcggcgggaaggggccgagccccgggcccagcggccgcccccgcccccgcccggcggcggcccacgccgggatctgcgtcactcggccgcgcgtgggcgggagccggagcggcccaatgtgacggagggcaaggcgcggcgggggaggcgctgccgccgccgccgccgcccgcgcgccgcagcctggaggagccgccgccgccgccgcggccaagcgagcgccgtcggggcgggtgggcgggaggtgggggggagcagagagagcgcgcccaccaccttcccttcccccctcgatgggagcgggggcgtcccggctcctgcagccgccagaggaggga

SEQ ID NO: 4340 - DNA, 501 bp, Homo sapiens
  source 1..501: mol_type = other DNA
gtttttccacaggtccaaaaggataaatggataaacgcttctattttaaaacagtgaagcagtttttaaaatagaaaagtatctacagttttgctttcaagcaaatagcgttaacggaatcattgctattcaaaactatttttgaagtatcggtgtacatttaaaaaaaataatttttaaaaaagaaagctgtcgtatttttttccaaaacactccaatcatggaaagtttcaagcaaatgttacatggagtcgccagacgccctgacctgggggccagatgcgagctgggatcggctgagttccgacagctcggccagactcagccctgccaaacctctcggctgcgggggattagtacccaactaggctagcctcggagttggcacggcgtgcagaaagtggctactgagcagccgggcctggctcacctctccgcgcacccagagccgagagagggcgaaaggggcgggccgtcggcgagcgctgaaggtctctagcc

SEQ ID NO: 4341 - DNA, 297 bp, Homo sapiens
  source 1..297: mol_type = other DNA
gaatcctaggtatctgtcatgtgccatttctagaaaaagagcatttggttctgaacatagtttgcaggaccctgacaaccttaacatataatggtttgatagtgggtttagcaacacgtcgtcagttcccagcgtggcaacacgggactgggctgcagctcacccagccggcggcccccgccggaagccggcggaaataccccagcgcgtgggcggagcagcggcccgcagagggaggcggtggcgcccacggaacagccgcgtccggggggcggaagggggccgggcgccagcgct

SEQ ID NO: 4342 - DNA, 248 bp, Homo sapiens
  source 1..248: mol_type = other DNA
tgtgatacagtcactggaagaagcaatcaatgagggtttataaaatttgtttcttcatttaagtgaacatcgaacaacttccacagggcaggcactcagaagggctccacgcttggcttcaattcttcattaattttgagtaagacgggccctccctgcaaattacatagctggtcctgtgttgttctaacaggggaaaataaacgtctatttgcatagactttcgaaatcattgtccagtgactaag

SEQ ID NO: 4343 - DNA, 258 bp, Homo sapiens
  source 1..258: mol_type = other DNA
gctcaaggagtccttccacttcagcctcccaaagtgctaggattacaggtgtgagccacacgccttcctccaactctagggcaagcactggtggcctacccaggacttggcccaaccctctgggtcaggtcaccctcgtcggagtgagcggaccccgctggaattgtcccaggggtggttcaccaagaactgggctccaggtaagtaactctgcagaggatctcagattgtctaatgagccacctgcagttgcgagag

SEQ ID NO: 4344 - DNA, 265 bp, Homo sapiens
  source 1..265: mol_type = other DNA
aaagtttcctggataggttgggaccaaactgtacagaacttaaactgccaagaatttggatttttttcctataggcagtgacagcttctccagaagaaaatcagactttgcttacctgctcaacaagcaaggccttaagcatgtgtataaccaaattgagtgacactttcttaaacatttttattgatgctcaaggagtccttccacttcagcctcccaaagtgctaggattacaggtgtgagccacacgccttcctccaactct

SEQ ID NO: 4345 - DNA, 469 bp, Homo sapiens
  source 1..469: mol_type = other DNA
aacaaactaatgtccatcatttttattttatttactcctagtaaattaccttacaaaaataaggcatttgatatgtatttggtgaatgagtgaatgaatgaataaagaatgaagaaatgatactgtcactgagtgacagttctttgaatgatgcctggaaattcaattttttaaggaacagaaaatggcacaaaatcctagatgatatattttttttttctgtagtgcagtggcatgagtagctggaacacaccaggctaatttttaaaaaattttttttggtagacacggggttccaggctggtctcgaaccccgctgcaagtgatccacctgcccagataatacaatttacctatcctttgtcaatagattaaattgttagattagtctgacgggaaatgacaatttttttcccttgctataaaagttgagcttagaggtctttaattttcagaactaaacctttta

SEQ ID NO: 4346 - DNA, 627 bp, Homo sapiens
  source 1..627: mol_type = other DNA
tggcaatttatttcattataggataaagtagttagaaccatgagtaataattactgtgtctacagtgcttttaacattcaaatacgtatgggtatttgaaatttcttttaaactacctctcatgtatttataacacaaagaattggccagtgtctatttcccacaatgtgagattaagtaatttaaaagatactaaaagtcttgtttttctgtgaaactaatattttctgatattctcggcatccaaaaattttcatcttggggaggaggaaaaattgagacttactcccactgatgtgaccccaggctggcttctcattttatgtcactggaagcaaaaaaggtagaaagactgccttccgtgggggccgcgacgatcgccccttcgtcccatccaggctcgccccgggtgcggagggtcgggccgcaaacccgcaaggcgcggaggccgccgcgacgctcaccggggggcgctgtgaagccggcaccgggcggacagaggtgagtcggctcggaggcggtggctcccgttcctgcccgcgcgccgaggggcgaatcccaggcagcgaggtcgccgcccccgcccctcggccggcccctccgccagcgggcgagaggggagtggcc

SEQ ID NO: 4347 - DNA, 197 bp, Homo sapiens
  source 1..197: mol_type = other DNA
atgcagtacacaaactgaacaactgcacagagcagtcctcctctcttgatgtgtgacataagtaatgactgattctcctgctgtatgatagtagctgtacctctaaacagaaatgttcatctctatattatgaacatattatactggagcatgtatccatgatggactctcgatcaactttatatgattaactcacc

SEQ ID NO: 4348 - DNA, 586 bp, Homo sapiens
  source 1..586: mol_type = other DNA
ccactacttaatgaaccattagttaaatgttattattatcaatactttggagaatcaaacaaaaccattttcccacatgttcatatcagagatttataactggaagatgggtaataatggtgattatattccagagacttctgtcctctcctcatgaagattttatcctggaaagaatatgacaaaatttatcagaacgatgtgtaaaagactggtcacccttagaagaaatgagagagtctgacatcatacaaatgactgaaatttagaatcatgaaaaagatttctagattaaatctgcaaatgaatcaactttagaattgtgaaaaagaatcatgaaaagagtgcttttaaagctgttaagcacatagtgaatgctcaataaatgttagtgttttaattataatgttatcattatgggtcccactacaatggagcattcatgttcagagcacattggcttctgccctggactggtaactagaaaagaatgcatttagctttcctgacccttgagtattacaattttaagaactcagacagaaaatttttacaaaactttggatgtatacaagtttccctggag

SEQ ID NO: 4349 - DNA, 351 bp, Homo sapiens
  source 1..351: mol_type = other DNA
acatgctcttttcactacgcgacataaaaaaaactttattaatctttttttccagattatgttgaataattaattccttttagatgtacaaaagcaaaatttaagtatgcctgaaatgaggcccgttcctcgtgaccgagggactaaagggcccgggccgaacagaactgctgctgcgcggcgacagctggagggggcggagcccgcgctgacagcccccggggaggagcgagggaagctctgcgggctgcggcggccgggtcccgcccctttgcttcccctccccagcaccaggcgggcgtggcagcaggcgtgccgacgcagcgggaggggcgggccgagggtcctgcc

SEQ ID NO: 4350 - DNA, 318 bp, Homo sapiens
  source 1..318: mol_type = other DNA
aatttaagtatgcctgaaatgaggcccgttcctcgtgaccgagggactaaagggcccgggccgaacagaactgctgctgcgcggcgacagctggagggggcggagcccgcgctgacagcccccggggaggagcgagggaagctctgcgggctgcggcggccgggtcccgcccctttgcttcccctccccagcaccaggcgggcgtggcagcaggcgtgccgacgcagcgggaggggcgggccgagggtcctgccggcgcgcgggcgtgttccagcccgttccttcccggagcccgggacaggctgggcgcgcgcccgt

SEQ ID NO: 4351 - DNA, 527 bp, Homo sapiens
  source 1..527: mol_type = other DNA
tcagctgaggagggccacatttgagaacaggtgtgccacttcactgagaattttaaaatgtcaaacatttctgggcacgtgtcaataaatgccttgcagagatgggcatttgagaaagtctctcctcaccaactcagttagttaaaacaaatcatcacggtaggttcttaaaaagaccacattttatttttcctcagtctcacttcttgaaaaaaacaatcatttttttaaatgtggtcattcaaaaagtttccatatattacataacagtcataacagcagtattactttttttaaatatccctgaagttcaatctcttttaacttattttgtatctgcaactgcaagagtaataagaactgagctgttttccttatcattacctttgcaaatgagatactttccgttacaataacttgtatccaggaaaaagaaacaggcaccctgttgcatctgcagtgtgcatacgtctgaaccctataaacttctcctcccactgggtggagtagggcctttaagagcagct

SEQ ID NO: 4352 - DNA, 574 bp, Homo sapiens
  source 1..574: mol_type = other DNA
cgaatggcattgttccattatcaatccctgaaaaattgttcatagaaggcctattacaaacttcctgctgaaagcactttcaaaggctggatacgtttaaaatcaactcaagcattcagctgaggagggccacatttgagaacaggtgtgccacttcactgagaattttaaaatgtcaaacatttctgggcacgtgtcaataaatgccttgcagagatgggcatttgagaaagtctctcctcaccaactcagttagttaaaacaaatcatcacggtaggttcttaaaaagaccacattttatttttcctcagtctcacttcttgaaaaaaacaatcatttttttaaatgtggtcattcaaaaagtttccatatattacataacagtcataacagcagtattactttttttaaatatccctgaagttcaatctcttttaacttattttgtatctgcaactgcaagagtaataagaactgagctgttttccttatcattacctttgcaaatgagatactttccgttacaataacttgtatccaggaaaaagaaacaggcaccctgttgcatctgca

SEQ ID NO: 4353 - DNA, 509 bp, Homo sapiens
  source 1..509: mol_type = other DNA
gttgcttccaggtcggcaagagcgccctacagcctaggcggcgcgctcccgcacgctggagcgccggtcgccagcaggacgccctctcccgcgccacgccacccagccgcggcccgcactcgcggcccggggtcacgcgcggaagaggggcgctagtccggaccccgccttcggtagggggcgtcctggagagcccaccctgaacgcctagccccactcgggccagcgcctggcgagcgagcccatctgtggcttccgcggccgtgaccccgggcgggctgaggacctgctgcttcccaaacgccagagggatgcgggcggcagagctcgagaggcggctgccgggctgcggggcgccttgactctccctctctccggcgcagcttctcagcggacgaccctctcgctccggggctgagcccagtccctggatgttgctgaaactgatcatcgcgggttggctgctgcttccccgccgggtgccactgccaccgccgccgcctctgctg

SEQ ID NO: 4354 - DNA, 382 bp, Homo sapiens
  source 1..382: mol_type = other DNA
ccggacgccgctgcccggccgatgctcccggcaacccacccgcggcgtaggatggctgagctgcctcggcgagcagccttgttgcttccaggtcggcaagagcgccctacagcctaggcggcgcgctcccgcacgctggagcgccggtcgccagcaggacgccctctcccgcgccacgccacccagccgcggcccgcactcgcggcccggggtcacgcgcggaagaggggcgctagtccggaccccgccttcggtagggggcgtcctggagagcccaccctgaacgcctagccccactcgggccagcgcctggcgagcgagcccatctgtggcttccgcggccgtgaccccgggcgggctgaggacctgctgcttcccaaac

SEQ ID NO: 4355 - DNA, 136 bp, Homo sapiens
  source 1..136: mol_type = other DNA
cagcagacggaaggcgggtcccgctatgccgtttgcccttccgacacgcagggtcactgcctgggccaggagcccgctctccccttcccggacgccgctgcccggccgatgctcccggcaacccacccgcggcgta

SEQ ID NO: 4356 - DNA, 533 bp, Homo sapiens
  source 1..533: mol_type = other DNA
acatagagaaaatgtttttcaaaaaatgttatttgacctatggctaattctgattttaaaagcagttaaacaaacgagatgctttagctttgatttgtggaaataatggttatgcaatttccacatattgtgctgatatttttctaaggcaactgaaatattcctgctgagtttcagacagatatatgtaaaagcagcaaagtgtctgattttcttaaatgtatctatggcagcaacactagttaatttagttgtgaaaaaataaccaaccacagttactgttggtatttctctttctctttaaatatatatataaatatatctataaatatatataaatatctataaatatatctataaatatatatattaaatatatatatgccatctgtttacaaaagatgagaaatgttggagaaaattatttcccttagggtataatgttatggccatttctcattggctgcaaaaaacaaagatgatttcctttaacttccaagtttaatggcacagattgttttaagaatcaactt

SEQ ID NO: 4357 - DNA, 291 bp, Homo sapiens
  source 1..291: mol_type = other DNA
gttcagtgttctgaactagttgttttggatgttttttgtagagatacaaaacaaaaaataaccttctttcatgaaggtataatatgctccatactgaatgggtttggaaatcccaactcttttctctacctgctctgtgataccaggcaagttttatggtgattaaattaatatatatgtggagtacttgacacacagtcaactactagacagaaagttgccaaaagcctcgagaatttctctacatgtgtgacatgggttactttacttaacgtagatgtttaactcgta

SEQ ID NO: 4358 - DNA, 347 bp, Homo sapiens
  source 1..347: mol_type = other DNA
gaaagttgccaaaagcctcgagaatttctctacatgtgtgacatgggttactttacttaacgtagatgtttaactcgtatacagatgaacattccagttgatcactctgaagctttttggctaaagcgtttgggtttagaccttgcccaaggcctcagcaaccgactcccccgcggcgttctttcttggaacaaaactagcgcggagccacggaactccgcagtttgcttcctattcctcggacgatccatgtggaatccgtgagtgcacccataggcggacggctgctacgccgcaagcgtagcagggtgtcagacgcgccggtttctgcgacgcagttagcgcag

SEQ ID NO: 4359 - DNA, 291 bp, Homo sapiens
  source 1..291: mol_type = other DNA
caattaagttgtaatatagtcaatgttaacttttaaaaaaacaatattgatgtttcttaaaatgtgattttaaataacatctctactattcttggtcaaggccaagggcccattgctatgtcgaggtaaaaatgcaagtttatacttattagattgcattccctggatctaattagtaatatacataaggcctgggcaaatccctcttaacagggacaagggctcatcctatcctcaatcctgaggagcacccaccttgcagtgggtcgtgggacttccctgttctggttg

SEQ ID NO: 4360 - DNA, 360 bp, Homo sapiens
  source 1..360: mol_type = other DNA
tcaggatggaattctgccatttcttagcataggcttggacaccccccagcctgtggcgaatggatgtcttggtcacagtgcttagcacaccacttttcatgtagtaaaccatctgtgaatgttggtttcaagaattgttggaaggttcctttactggtattcttccaaaggcaatgaaatctgtaatcatttcattccagtgtttctccgagacctctgaggggttaaggcagcagtcctgggcatccggcttatttatattggaggagacccacccagtgtctttgctcctcttgcgggaccgcgcgccagcttccgggtccagccccagaagaacctgcgcgggcccgttgcttagca

SEQ ID NO: 4361 - DNA, 457 bp, Homo sapiens
  source 1..457: mol_type = other DNA
caggaggcaatcctggcattgtcacctctattgaatgcaaatatgctattcatagaaagaaaattatggtgttttaaatacaaaaaatacctgtttctgcatttttgagtctactccatatcatgaaagtgaatttataatattataaaggttgtcttccattctatattttgtgaaaatgtatgctaaaattataacagttaacatttagtacgtgctgtatgccaagcattgttctaagtgcttgccatagattaactcattgaatacacacaattactctgtgaggtaggtatactgttatcccaacttcacagttacaggaactgaaacacggagacagtatctttcctagtcaaagcactatattattctgccaatatatccttgggatacattatatcctagtgatatggttcagctgtgtccccagccaaatcttcacacgagatctgat

SEQ ID NO: 4362 - DNA, 516 bp, Homo sapiens
  source 1..516: mol_type = other DNA
tttatatgctaactgaacattaagtccacggaagggttttctgcaattatctctgaaagcaatcctagattacataactaatcccatatatgtatgagtatgtgtgtatcctatacatataaactaggattatatatctatgtaaaacatttgtgtcttgcacagaactttgaaaatttccactgtcttcaaaggatacatcttttttagcactataaatgcaaaatcggctattcagcctattggtcgcgacagcggacgttagcagtggggtctaggaggcagctgggacgaattttgcggcagtgcgcgccccctctgcagcgccgcccccctccctcgcggcagcccgagtgcgccccacctgcgccgccacgccgccgcgcctccccgccccgcctcgggccagccaggcgccgcaccctctcaccgccgggccccgccccgcacacgcgcccccggccggtgccccgcccctcccgccgattggctctcccgacctagggggagggatct

SEQ ID NO: 4363 - DNA, 451 bp, Homo sapiens
  source 1..451: mol_type = other DNA
caaagctctgtggcccttcgaagcttctgtagtgtgaagcttaaatctagtttgcatcttttcacagcaaatgtacctgacatgtaagaccatttcatctatttgattacattaaacttcagaaagcccctttctccattaaagaatggtggatctggactggggatttcctagattgatgattctatctgttttcacattaaaagtcaggtttgaaaataacttctgattgaaccgcatgtttgaattttcattaaagctatattacgtttgaaaaagctttagtcctttttcacagtttgaaatcacaagtccacaaatttctctctggattagttaaaatactgtaagcccatttcagtaacctaaatgaatgctatgtctgatttattctttggaattctcccatggaaaagccctttacaggggtgtggccacgatcacttatgat

SEQ ID NO: 4364 - DNA, 875 bp, Homo sapiens
  source 1..875: mol_type = other DNA
aggtcccgctggccaaggtctggctgtcccgacgtgccgccagctcccagcccagcgtcccgcagggcggtgcgggcagatgccgccgaagcgtctagcgggaagggcgccggcgcggctggaggtgaggaggccggactcttcgctctccgcggaccggggcaccgcggctggagcggacgcccggcacccgggcgggaggaaggtggtggcgacgcaggcgggtcggcgcctggagagcgagcggcggggagccgggcgctgcggggccgctcggggccgcgccgcgctcggccacaaacctcccggaggcgcaggacccccggcgccctcccgagcgcgggcgggagccatggcttcgcgcgtccccgctgccgctgctgactcgacacaatcggcgggtcgcgcgggggccgtggcgtaacccgggggtgggtggcggcgcggagccgcctcgagagctctgggtgtcgctgggagctaggaagatgccagcacaggcgagccgagacccagcccgctgcggagggcggcgggaagagccgctgaggggcgcgccgagcgcgctctgcccctgcgccgcgtctctccgggcgcttctcgcggtctcggggtcggggactgcagcgcagagactctcggctccgtggcagcggccgcagcagccgtgagctgcatgcaacgcgcggcggcgcccccggccgcctgctttctcctcggcgcgcacggaccggccgcagggcgccggggccgcgggtccgggcgactttgggggcgccctcccgccccgcggccgggtccccacccgcagcttgtggcgacgggcgcaaagcccaggtgagcgcgcggccctcgccgcaggtagcggacggcgg

SEQ ID NO: 4365 - DNA, 338 bp, Homo sapiens
  source 1..338: mol_type = other DNA
ctcctctgagacatgtgacaaaacgacacatctacctcctgaggttcctgagagggtgggacatcaccctctcacgttatcctagtttaaagagcttatttttctgcagtaatacactaggccgagttcctggagccacaaagactcattgaagggcagttccccaaaggaatggctatccattatttggggacttactccatatggatatagttaaattgtaaaattgaataaatcttccctaaatctggccgaaagtattaatacagtaattttaaattttagtgcttcaataatcattttttcatcgtgaccacaccctgtgtgtgtcagagggc

SEQ ID NO: 4366 - DNA, 673 bp, Homo sapiens
  source 1..673: mol_type = other DNA
tccagcttacagaatgatcatctacgcaagatgaataagtatttacagactaaatatgctcaggtgtgattaatatctacaaaagcggattgctgctatatttcgttttactcagtttaacaaactttttttcaagcacctagtacatacaaggttctgctaaagcctcagaaattgaaagatacctgaagcaggattgagacattcaacttgcttattatagttaggaaatgtactccataaactttattagagaatagaaagttatgcttttcagaaaaatagattgtattactgaacattcatagggagcatagaaatgctttcataaaggcagtgctttttaaaattttgagtatctttgttttttgaattaaaggcaaactcagaactcacctgcagcaggcagatgctaagtgcttacttgtcagcatggtggctcttgaagctaaaaacctttcatagttcacataatattttaacgaatgaatagaaatcagaagaaagtgactcatttcaattatttacaaatttagcactcatatcattaggttattttttaaatcattaactcttaataaaagcatatgtaacttctactaaaatatgttttcaaatggaatactcatagagttctaaccacttgactctgctgatgagtgatgaggtcaca

SEQ ID NO: 4367 - DNA, 558 bp, Homo sapiens
  source 1..558: mol_type = other DNA
gatttgtctatgtttattcacacagatatttttgttgtagtttcctttaaaggaataagcagctaataaagatgggttctatttatagtagtgaataaatatatttaaacatttaaaatttggtttctaaatttctatgtcttattctattttttcctacttaggtgaaatctattcttgaaagaagtaaagaggaatcagtcccttctgaccgtctgtcactagaagaagcacttatgaaatctttcatgagccatgaggatttctttttctggagaaaagataattttagaatagtttaaaatttttcccttaaaaatacattatatgtatctaactcccaatgttttttttttaactttctgtcttaaatactcaaaagagaaagttctaattttttcttttgaaacacatctgatcttggtaataataacctttatagttatgttttattaataattctaatgcgtttcagatgtattattctcatctgaccccgtcagaagacagctgagaggccagcctggcgccacctctggacgcaggttgtgctgagtc

SEQ ID NO: 4368 - DNA, 237 bp, Homo sapiens
  source 1..237: mol_type = other DNA
ttctttctgaaagtttgaccatcagcttctattacctaggttaaagaaaatatatttaaagcacttttttttttgagctatctgctgaaagacgcggcctagggagtcagcatgggtcgcgcctcccgtcccggtctggcgcgcacgcggaacctgagtgctgcagctgcggcgcagaccgggcgagagaaggacgccggttccttgctcttgctggccccggcgaggtagcttctg

SEQ ID NO: 4369 - DNA, 326 bp, Homo sapiens
  source 1..326: mol_type = other DNA
gaattaaatggaagctggacgaaattgcctcctccagttaacgtggatcaatagatattttggtaacataccaagagcagaatctactgggcccggcggtagaagagggaaaataaagccatttgttccctcttcaagctaactgctccagagagctgtgagtgtgctccgaaattttcaaacagctgatgacccctgggctcctccctcggctctgggagtcgccaggccagaggcgccgcggacctggtgcgcgcaggcgcactgcgcggctggcgaacgggcaggccgggcatcagcgcaggcgcgcgcggctggggctcggc

SEQ ID NO: 4370 - DNA, 516 bp, Homo sapiens
  source 1..516: mol_type = other DNA
cccgtgcctagccagtgcctgacaaggtagggactcagtacatagctgttcaatgaataagtgtttgacacccaaaagacccatcaactcggccaaacccagggtgtttgaatttaatgtgtgtccgctgcctgcattaaacaaagggagcacctgggagggcgctgccaccacctgattctgggttaggggaagggggcgtaaccccatctccccctcggggtgtgtccccgcgggcttccccacccatatgtgtgagacccgtcagggaggcccgcgatccgcccagggcccggggccggcccggccgggcgccgcgtgcaggtgcggaaggcaggcggcggcccggtgcgggcgcgggggcagcgccgggggccgggctgcgcggctcggctgcgggcggcaggaggcagcgtcggcccaggcggcgggcggcgagcgagccagcgcgcggtgatgtcagtggcggcccggctggcagcagccggtacttcctgtggaaaggcgggcgggctc

SEQ ID NO: 4371 - DNA, 516 bp, Homo sapiens; identical to SEQ ID NO: 4370
  source 1..516: mol_type = other DNA

SEQ ID NO: 4372 - DNA, 470 bp, Homo sapiens
  source 1..470: mol_type = other DNA
cccgtgcctagccagtgcctgacaaggtagggactcagtacatagctgttcaatgaataagtgtttgacacccaaaagacccatcaactcggccaaacccagggtgtttgaatttaatgtgtgtccgctgcctgcattaaacaaagggagcacctgggagggcgctgccaccacctgattctgggttaggggaagggggcgtaaccccatctccccctcggggtgtgtccccgcgggcttccccacccatatgtgtgagacccgtcagggaggcccgcgatccgcccagggcccggggccggcccggccgggcgccgcgtgcaggtgcggaaggcaggcggcggcccggtgcgggcgcgggggcagcgccgggggccgggctgcgcggctcggctgcgggcggcaggaggcagcgtcggcccaggcggcgggcggcgagcgagccagcgcgcggtgatgtcagtggcggc

SEQ ID NO: 4373 - DNA, 246 bp, Homo sapiens
  source 1..246: mol_type = other DNA
aaaaaaagtaaaaaagttctaggacctttagctcttattaaatactcaaatctagattattctatttctttttataaaaattttgattggaatcataatatttctgagttaagatacagaacaaagtgtgataaattcaaatctcatttatatttaaattattcttccttacaatactcacttacttgcttgtaccactagagggaaaaaaggaaatggcttaagatctgttctcgtgagatctga

SEQ ID NO: 4374 - DNA, 374 bp, Homo sapiens
  source 1..374: mol_type = other DNA
tcatcgtcgaagtcaaagagactgccgtattctgatctattaaaattcctgatttaaacatctaatgaatgttaataatgacgatgagtggttttttaaaagggtggcaagattgtcactgtgcaactcagcaacgatttgtgaattatttgcaattattaaacagagtcttaaagttttcctcgagctcttccagtgaactcctgggctcaagcgatgctgccagttactcttaaggagatttcctgggtcaccacgcaggcgcggttccctctaggtggcagttctgtcacgtgtcacccgacggagcgcgctcccgtttggcgcacgcgcagagtgcaccagctatttttctccgtggcggcggcgacgag

SEQ ID NO: 4375 - DNA, 526 bp, Homo sapiens
  source 1..526: mol_type = other DNA
agtgtccagcaaatctcatttacacccaaactatattaaataggtagtattgtcatcctactttacagtttgcaggaaaactattggtgcacaaacctttgatgacaatgttgccctcacagcaggcattgtagctgacagccaggcttcgcagccaggagtggtggcctgtctggctccgcactcacgggttcggacagttacaacactcaagccctggggcttcccgcagcccccgggggggtggggctcactgactagcctcccggaagcggaccccaggagaaccaggcagttggttaatccaggaacagctcctgcgcggggcgtggactgagcagtcactgagtattacgcaaattgcgcgagcgcgtcctggcgggcccgcagctccgattggccgacaggctgacgggaacgtttacggtcagcgtggctgcgcaggcggccagtccattggctggaagagaccggagccgggctccgggcccgaccagaggagggcggtgctgcagggctggtccgg

SEQ ID NO: 4376 - DNA, 547 bp, Homo sapiens
  source 1..547: mol_type = other DNA
ggtttttccagaaattttcaggaaacgctgggtcaagctccctgcctggcaccgaagcaggtgagacgctgcgcgtgcgcccgggttctcgcccccctgggtcgggcgggccttgccgctccaaggtgccatcgggcgctggtcactgagtggccaccaatcccttcagggatccccgtacgcctcagacaggcccgggcctgcaggcctcggggccacgcgggactcatagtgtagcgccgcacccagcgcgcaggcgcgctcgccccagcggtcgccgctagccccctcgcccctcccagggagggagggcggtcgccccgacgcgcaccgcgattcgccccaagggccctgcgcaggacgctgtttctaggcgcccagccgaggtgaaagtcgtcccctcccggaaatgacgttctggaaagttctggaaccgagcgaccggccggagagggctgagcgcgctagcacaccctgcgcgggtagggaggggcggggctcgcgcgcgcctgcacacgcggtgccgcggggcgacgggctcattgcg

SEQ ID NO: 4377 - DNA, 506 bp, Homo sapiens
  source 1..506: mol_type = other DNA
tggaagaaactttctaaacgcttgtcctgcctgtaggaagagaaatgttttgaaacaagttttggctttgaaagttaacaccaaagctcctccggtgagcaaccagaaacctggtttttccagaaattttcaggaaacgctgggtcaagctccctgcctggcaccgaagcaggtgagacgctgcgcgtgcgcccgggttctcgcccccctgggtcgggcgggccttgccgctccaaggtgccatcgggcgctggtcactgagtggccaccaatcccttcagggatccccgtacgcctcagacaggcccgggcctgcaggcctcggggccacgcgggactcatagtgtagcgccgcacccagcgcgcaggcgcgctcgccccagcggtcgccgctagccccctcgcccctcccagggagggagggcggtcgccccgacgcgcaccgcgattcgccccaagggccctgcgcaggacgctgtttctaggcgcccagccgaggtgaaagt

SEQ ID NO: 4378 - DNA, 472 bp, Homo sapiens
  source 1..472: mol_type = other DNA
ccatggatcagcaaggccgcgatgctgggggcggcggcccggcccactcggcgcgagcccacgtgtcctgcgggggagtcggccaggcgcaggttgagccgaggtccaggatccgcgtcgcacgtgatggaacccgcatggacccgcgaggcctggacccgcaggcctgggcctgcggtgcggcgcggtgcggaactccaggttgtcgccgcccgcaccctccagctggaccgcagaggaggaaggcccactcgggcgggaaggccgcgtacctgcggggcggcggcaaggcgtgcgctcggcgagacaggtcgtcggcgacagagtgcagggcgcacaccgcaatgagcccgtcgccccgcggcaccgcgtgtgcaggcgcgcgcgagccccgcccctccctacccgcgcagggtgtgctagcgcgctcagccctctccggccggtcgctcggttccagaactttccagaa

SEQ ID NO: 4379 - DNA, 578 bp, Homo sapiens
  source 1..578: mol_type = other DNA
ctgcgggggagtcggccaggcgcaggttgagccgaggtccaggatccgcgtcgcacgtgatggaacccgcatggacccgcgaggcctggacccgcaggcctgggcctgcggtgcggcgcggtgcggaactccaggttgtcgccgcccgcaccctccagctggaccgcagaggaggaaggcccactcgggcgggaaggccgcgtacctgcggggcggcggcaaggcgtgcgctcggcgagacaggtcgtcggcgacagagtgcagggcgcacaccgcaatgagcccgtcgccccgcggcaccgcgtgtgcaggcgcgcgcgagccccgcccctccctacccgcgcagggtgtgctagcgcgctcagccctctccggccggtcgctcggttccagaactttccagaacgtcatttccgggaggggacgactttcacctcggctgggcgcctagaaacagcgtcctgcgcagggcccttggggcgaatcgcggtgcgcgtcggggcgaccgccctccctccctgggaggggcgagggggctagcggcgaccgctggggcgagcgcgcctgcgcgctgggtg

SEQ ID NO: 4380 - DNA, 508 bp, Homo sapiens
  source 1..508: mol_type = other DNA
aaccagttggtatacctggttgtatacctaccagaggaacaggttggtcagtcttgtccaatctgcagccttgcaattttttttaagcttaccagtaggcctcgggcttctaaagaggaaagctctactgaggcccaattttggagggaacaaaacaatcacaagagtatgttctaaatccaaaaaaactttaaatttttgtatgttgaaagaaggaaaatatgaccatttgttttcatatagttgataagttatgttaatatttaacagttataaagttagctttagttaactaaagttagcttttccagaatattttcttgaacttttatttagtttaagccactgtgtattatttcaaagtgtaactacagtggtattctgtaattctagtatgagtcgtatcacttagccacgaaatatatttttaatataattggatttgagtgtagtgatttaaaagttaactgtttatgttgggtgaactagatatctttgctaataaaca

SEQ ID NO: 4381 - DNA, 332 bp, Homo sapiens
  source 1..332: mol_type = other DNA
tgtataggaaacaaatgcatttcacatttaaacttaggttccatatctcattatgtatatgcaaatattctaaaatccaaaataatcagaaatctgaaagtgttttggtcccaaactttaagatgaggggtacttaacctgtataagctgttgaacgaataatcttttcatattcttgaagagttaccagttctaagtcactgacaattactcagaaaatgctgtggtttcttaagagagaacacttaaaatttgcaacaaaggaaatgtaattgacatctgcgtcttttatctacgtaaacaaacttgtcattgaaaaagtccttgaataa

SEQ ID NO: 4382 - DNA, 399 bp, Homo sapiens
  source 1..399: mol_type = other DNA
aaaatgctgtggtttcttaagagagaacacttaaaatttgcaacaaaggaaatgtaattgacatctgcgtcttttatctacgtaaacaaacttgtcattgaaaaagtccttgaataacactgacactcaaatcccccgtctgatttcagattggtatagaatttgccaagactgaacgcagccgtgcacactgccgcagcggtcgctgcgatcaagccctcgcaaagaggctcgtggcgcccgccttccggtgcctcagtccctgccagtagccacccgacgccgtccggcctacccggacggctcccggcgcaggctgcagctgttccgtcagctgccgctcctcctcccagacgcagagcgccgctctgccccgccccccgcgcaggctgccgtccc

SEQ ID NO: 4383 - DNA, 517 bp, Homo sapiens
  source 1..517: mol_type = other DNA
agttttgttttattttttaattaaggatactttgagacctatagaagtattagttgctatcataagccttctaatagtagagtgttttaaactatttaagtaattacacacataactgtctctcctttgcaattaagtaaagtcttttttataaaaatattttaatataaattttttatactttgctgttttaattagcatatgattttttccaacagaaagaaacttcatatggaaagaaaaaaagtactaactaaagacttaaagggctgtttttttaaactttactcataaagctgacttcctttctggaaatgatttttgtttctaaatatgttgagaatccacttctttcttggtagtagttgagaggactatgtctgaatatatcttctacttgtagataattacatccatggaaattctccgctaagacaagcctcctggagctgtagcttaatcatgggttcaatgactttacagaaaaatggatagaaaaattcttcaactcctttct

SEQ ID NO: 4384 - DNA, 597 bp, Homo sapiens
  source 1..597: mol_type = other DNA
attcttaaacagtttataagactgcagtgactcgggaagccgatccagaaggatcactttttgggtgacatagccagatgtggttgcatgtgattctgccactgcttccattatttacaaaataaacccttatcacagttgagattctagagaatacaagcctgaaaaattttttcaatcacattgaagccactgcactctagcctaggtgacaggcaaaaaaaaaaaaattaaatgaatcaagttgtcagttttgttttattttttaattaaggatactttgagacctatagaagtattagttgctatcataagccttctaatagtagagtgttttaaactatttaagtaattacacacataactgtctctcctttgcaattaagtaaagtcttttttataaaaatattttaatataaattttttatactttgctgttttaattagcatatgattttttccaacagaaagaaacttcatatggaaagaaaaaaagtactaactaaagacttaaagggctgtttttttaaactttactcataaagctgacttcctttctggaaatgatttttgtttctaaatatgttgagaatccac

SEQ ID NO: 4385 - DNA, 717 bp, Homo sapiens
  source 1..717: mol_type = other DNA
cgccccggctcggagtcccagggccaccagcgcccgcccgcaccgccacctgccacccgaggcgacgcagtccgcttctccccacccgccaggtggcaggttcagggccggggtccgagcctgcttccctgcagctgccacagccaccctcgccgccagggggcgagagtcccaggcaggacaagcagcgctgctgccttggcgtttccctaccccgcgtctctgaagagcagagaggaacggcgatcagggccccagggcgcgggatagcctgtccctgagggcttggccgaccgctgccaggagccacccgcccgcagacctcgtctggctgtgtcgccgccacggggccgaggcggcgggctgccaggcacccagcgaaggcaggtaaaccgctttcccgccgaaattgggctaggcagcgtctttgacgctccctgcggcgaactcgacccagccgcccaaggcgaggagttgccagggcggtcgacgcctccactccccgactggtcagcgaggaccggaaggtctgagagacctggcagggcccgcctgtggcccaggcgggacccggacactctagccctggctgtgcacccaagccagtcagggtggacttggggaagtgaaggaggactgcccgcacaggcccgaggcgcagcggcaacgtgccatcccgccccgccccgtcccgccgccagcagccaatcagggagc

SEQ ID NO: 4386 - DNA, 346 bp, Homo sapiens
  source 1..346: mol_type = other DNA
tctcaaattattaaattattaataagataaaatgtaatgttataagtgaggtttaatatagattctaatatcaaaggagtttaaaattaaaatgccaagtcttttgtctcagtgacttaactcatcagttcttggttgctagcttactggaaatgagcaaaatatgtttttatataggattatatagagaattgtttggcagaagaaggtttctcggagcgcctccgggtttgcacacgcgcgcgcgcgggtacaccctggctcgagtacattggcacacccctccgcagtgaggattggtcgggccgagccccctcggcgaggcgaggctcctaagaggcccaga

SEQ ID NO: 4387 - DNA, 372 bp, Homo sapiens
  source 1..372: mol_type = other DNA
ccacccccccaatccaggggtgtcgagacctgcggcttccgtgggtgcactaagaattcaaatgctttttgcttttgtgttttatattgaagagctttaaaaaagaataataacgattgtagcgattcacagcgcatttaccgggtggttaattcggttatggacttgcgcacacccccaactccccccgggacgggctaggctgtctaggcgcccctgggtgccaaccccggccgcgaccccgagggctgacttctggggagctgcgactgggcagagtcgccgaaccgaggcgctgggcttcctgggggccgcccagtgttcccggctcgggcccctcgggcagggtgcagcgctctgccactggcctga

SEQ ID NO: 4388 - DNA, 388 bp, Homo sapiens
  source 1..388: mol_type = other DNA
gaggaggaccagaccctgggccccggtgcccgcctgcgcccagacgcacccacccgctggccgcggccaccgcctcgcgccgcactcggcgcagccccgccgccgttgggtcgccgtgctcacagcgatcctgccaggcggggcccccctccccctggcttgggtttagatccatccgagtccggctctggctgctggcagaggcggccgagaggggagggctggaggtgacagcttgggcggccgccgcgtttcctcccgcgcgcggtcccgggtctcgcgagctagccgccctgcgaaccagcagccccggctcgccgccgccgccgccgcctccgggttctcagaacgggtctccttcccgaaggtgtgaaaaggctctttcagc

SEQ ID NO: 4389 - DNA, 624 bp, Homo sapiens
  source 1..624: mol_type = other DNA
cctcagggccggcgggatccgccgacgccccgggtatctcgcgggggctgcggcccctgcccacgtgcttttccttaaggaggcagcgcgcggccagaggccagcctgctcggctagtgcccgcgagcaccgcggccggagtcgggctgccggcggccgcggccgcgggagtcggcaaaaacctgctggggacgctcctgtgcggcctccccccgggcggggaggccgggtcctcagggcacagctctgttggcgccagcagccctgggctcgagcagcttggggtccccaggagccccagtcctgtagcccgaggacaggcagccccaccgccctcgccgccaccgcgtcacgggctccaggcggcccggtttgcaccgctcgcgatgtcgccggagcggcgagcgctccagcgatgccatccagggatgcaccccgcgtgccacccacagcccggcgggcagtggccgtgctcctggcattcgggacaccggactcgcggccgtgccagctttgaaggagaagcggccttccctgcgcgcgcggcggcacgaagcgcggcgggccgggacgttcggctcggcgcggagggggaggtgggggaggcgatcgccctcctatctc

SEQ ID NO: 4390 - DNA, 428 bp, Homo sapiens
  source 1..428: mol_type = other DNA
aacataataatcacaatgataatgagtgctctggaggagagtctctggccgttcagcacaggtgtacggccacgcaggttcacagtctaactgttatatcagtcataccttaaaatgaaagcccttacttaagtctatagagtcagaaagagagagactcttttgctgacattactgcagcaaaactggcaagtctcatctgagctcctatgctcagctcggtattaggtcacctaaaatattaaaagggctcaaaatttgtggaactgagactaattctaatatacacatacatacacactcgtacatatttacatatggcatacgtatatatatgggcaaacacatgtaatggatatattatatatggatatggatctcacctacaaatttttcaacaatatttagacctagagtccttatctgga

SEQ ID NO: 4391 - DNA, 473 bp, Homo sapiens
  source 1..473: mol_type = other DNA
caattaaaattatgggatgaattttggctggccacataatactgttgtgacatctaagtacaatgatgatgatgtgagaagcatcatgaacctgattttttttaacactcattatgttacttatttttatgccacattaggctagaaaccaaatgtccacataaatgttaatttcctcaaatctgtgtttaaaaattataattagaaaataaaaaatagatttaaaaattaatttattccgtcaaagtagttatttagtgattatttcactacaggaacaaaattggatcaaaatggtgacatttaatctacacgaaaaaaaaaaaagcaggtcctgattttttggaagcgacatattcttccaaggatcattcacaatgcccctttaaagtcattaattgactagagaattgtggagcagagccagcccggtcggtgtgcggctggggtggggcgcgctccgggcgtccggg

SEQ ID NO: 4392 - DNA, 253 bp, Homo sapiens
  source 1..253: mol_type = other DNA
ggctggagtgcagtggtgggatcacaactcattgcagcatacgtgctgggagtacagcctacactgtttagtttttgaaaacctccaaatagcaaaacacccagagatcaaattctccatgagcacagagatcttcgtatatctataataattgtactggagacttcccacggaatcttctttgggaatgtctcagactgcggccgcccctgctgctgcgcatgctccataactgccgcacgctgcgcgcgga

SEQ ID NO: 4393 - DNA, 287 bp, Homo sapiens
  source 1..287: mol_type = other DNA
gcagtggtgggatcacaactcattgcagcatacgtgctgggagtacagcctacactgtttagtttttgaaaacctccaaatagcaaaacacccagagatcaaattctccatgagcacagagatcttcgtatatctataataattgtactggagacttcccacggaatcttctttgggaatgtctcagactgcggccgcccctgctgctgcgcatgctccataactgccgcacgctgcgcgcggacgtcggcctctgacgtcgtcgcctcagcgccggctcccggccg

SEQ ID NO: 4394 - DNA, 353 bp, Homo sapiens
  source 1..353: mol_type = other DNA
acactcagaaagtggcgcgatctcggctcactgcagccgagtagctggcagaccgcgcccggccccagaactgtaattctatgaccacccttataaatgtaaatatcaggtaagaaaattgctgggtatttttcctaccataaactggactcccttgaaaagcactgcaagtaaaagcactttttgtttccctaatatttcttttcttttaaagacctaaggttctaactacaggtatagaacctaggagttttccgggggaatcccattgctttcccagtggagtgaaaagttgtgccttcaaatccattaattcgggagtttctccggaaatttcaatagaggagccagtc

SEQ ID NO: 4395 - DNA, 458 bp, Homo sapiens
  source 1..458: mol_type = other DNA
aagcttactttaagtcaagcaatcacttgtatcccagtgaatgtaagcacttgtataaggaaggccttaattcgctaacccagttgatggggttggagaatcccaggacgatcatcttggtttcctccgtgctgtagctgcgctgagggcaggcagggaaaggctgcggggagtcccgggctgctgagcactggccaccgggagccctgggcaggtagcgccgaggctgccaaggccctagcgcttcgcgccgctcccaagccgaggcgtgtggccgacggcagcctcacctcggccacagcaggagtccggagtcggacggccccgcagggcgagcggccagcgccatttttatgaccctccgtttgctgcagcctctggtgagtcggccccgtccccgctctccagcacgcagcccaggccgaggcccttcggcaacccgccccgcgctcggaccc

SEQ ID NO: 4396 - DNA, 491 bp, Homo sapiens
  source 1..491: mol_type = other DNA
catttattaatgtattcagcaaacattcatggagtgcctactattgcccactttgtaaatttgaaaattatgttcagactctttctgagacagggcctggctctgtatcccaggctggagtgcaataagcttactttaagtcaagcaatcacttgtatcccagtgaatgtaagcacttgtataaggaaggccttaattcgctaacccagttgatggggttggagaatcccaggacgatcatcttggtttcctccgtgctgtagctgcgctgagggcaggcagggaaaggctgcggggagtcccgggctgctgagcactggccaccgggagccctgggcaggtagcgccgaggctgccaaggccctagcgcttcgcgccgctcccaagccgaggcgtgtggccgacggcagcctcacctcggccacagcaggagtccggagtcggacggccccgcagggcgagcggccagcgccatttttatgaccctccgt

SEQ ID NO: 4397 - DNA, 379 bp, Homo sapiens
  source 1..379: mol_type = other DNA
ctggactcccttgaaaagcactgcaagtaaaagcactttttgtttccctaatatttcttttcttttaaagacctaaggttctaactacaggtatagaacctaggagttttccgggggaatcccattgctttcccagtggagtgaaaagttgtgccttcaaatccattaattcgggagtttctccggaaatttcaatagaggagccagtccgaggttctgccccgcgcgagggcctcacctgtgggtagaggctccagccggggtaccgggaggtgctgcccggccagggtccgagcgcggggcgggttgccgaagggcctcggcctgggctgcgtgctggagagcggggacggggccgactcaccagaggctgcagcaa

SEQ ID NO: 4398 - DNA, 382 bp, Homo sapiens
  source 1..382: mol_type = other DNA
cagaccgcgcccggccccagaactgtaattctatgaccacccttataaatgtaaatatcaggtaagaaaattgctgggtatttttcctaccataaactggactcccttgaaaagcactgcaagtaaaagcactttttgtttccctaatatttcttttcttttaaagacctaaggttctaactacaggtatagaacctaggagttttccgggggaatcccattgctttcccagtggagtgaaaagttgtgccttcaaatccattaattcgggagtttctccggaaatttcaatagaggagccagtccgaggttctgccccgcgcgagggcctcacctgtgggtagaggctccagccggggtaccgggaggtgctgcccggcca

SEQ ID NO: 4399 - DNA, 301 bp, Homo sapiens
  source 1..301: mol_type = other DNA
ttgtattttatttcaaattatgaattcctgaatagagtctggagctcgagaagcataacaaactctggtctgatatttgtaaggagctttctaaataaataaataaataaataaataaataaaagcatttcactaaagtgcttccatcatgaataatgattgagaaacccatgtgtaacttggttattacacacagcggaacaccccgggttgactaccttctaaaaggaaaaaaagttcattttctcgggtaggagaagatgattctcttgcaacacgtgcggattgtgacaaaatcttt

SEQ ID NO: 4400 - DNA, 252 bp, Homo sapiens
  source 1..252: mol_type = other DNA
taacaaactctggtctgatatttgtaaggttctaaataaataaataaataaataaataaataaaagcatttcactaaagtgcttccatcatgaataatgattgagaaacccatgtgtaacttggttattacacacagcggaacaccccgggttgactaccttctaaaaggaaaaaaagttcattttctcgggtaggagaagatgattctcttgcaacacgtgcggattgtgacaaaatctttggcagcctgc

SEQ ID NO: 4401 - DNA, 263 bp, Homo sapiens
  source 1..263: mol_type = other DNA
gcttgttttcggtcataagaacataaggaagaatctgtattgcagaaaataggcagtgtttactctgcgaatgtatgtgttagatttctaaaactcaaaccagtgcaaaactgaataaagatcaggcaagaacttcactataaaatgtatacccctagacatggtttttacattttccatttaatgcaaaattagctaacagatgttttcttctcagcctcaggggcagtgagtgtaaaggttgtagagcctgttgggtgacc

SEQ ID NO: 4402 - DNA, 491 bp, Homo sapiens
  source 1..491: mol_type = other DNA
ttaacttattctcttctaagagccagtcagggaaatttggaaccaaatatttttgaacaggactgttatatttctcttgaaatatctagcacagtaccttgcacaaggtaagatggtgctagaaagcacttagtgtcaggtgtacaaaagtgttgattgctataatgggaaataaatatcaccctttatatcactgtcacacagactaaacaagaatgctgtgtgtgaaaaagctttgtaagcgcactgagcagccctgttagggatgggaacacttaacatcctaattcttgccacttattaattcccttacctccgggatggaagacccacccgactccgaggcggcccactggggcgagacgaatctgggggcggggcgtggcgtggcgtggcgtgcccgggacgtggcctccctccctccctgagccgctgcctcagagccgggccgcacgggggcgccgctggggccgctctgctcccgagttgcc

SEQ ID NO: 4403 - DNA, 617 bp, Homo sapiens
  source 1..617: mol_type = other DNA
tggacaatcagtaaatacttttctacttacacaagattcatgtaaccagatctgtttggagactgatcgtgatttatattagactaaaagatcttaactcaaaagcatgttttgcatcatttgtctagattctttaaagtaaaaatgcattactgtatcatcaattattggaaccttgatttaacaagctattttcattttcagtccaatggcatacaaagaggaaattttattctttgtagtttctccaaattctttgtaaaaattatgaaagtaatttgcgaaaaataagcatataaggtgaataatacatttttaaaatgtagttgtgtataatggaaaacgtcattcttgtatattcaaagacctaaatattaatgagatccggggtttgcaacgaaatcaacataaaccttctaacagacttgaggtggctgtcaagcctttcagacatgtgattgataatgaatgtcagaggagagtttccttttcgcggaagagcacccctgtcacgcagactgtgccgcccccggctcgcctgggcacgccccttcctgccctagcagcacccgattggctgatggggcaaccgccaacggctgtggcgtttaaaccca

SEQ ID NO: 4404 - DNA, 581 bp, Homo sapiens
  source 1..581: mol_type = other DNA
tttaaatactacaaaaaatggagtatgccaaaacgttgaccattgttaaagattgcactcttcacttttatgtgcaaagtttggaaaatttcacaataaaatttttgtgtttacataaatgaaataacatgggaaaatgttcttggaaaataactagtttgtcccacttaagtttttaaaggtgttaaaagtacatgtttcaaaatttaccagataaactttgtggttagttactggataaactgtaaatagtgataaaatttttaagtttatatcaagatagcacttcattttaaaaccagtaattattaggttggtgcaaaattaattgcagttgttgccattggaagtgatggtaaaaaccgcaattacttttgcaccaaccttatatttctaaaagatcaagttgtaaacctatttgttttcctgtttacacttaagagtccaggacacacagacgctccactggcgaggagatgaaggggtcgtcttcatcttcgccggatgatttccgcccacatagagggcgccagtgacgcccacacacgtgctggtgtcccgggaagagttcctggcaaaga

SEQ ID NO: 4405 - DNA, 586 bp, Homo sapiens
  source 1..586: mol_type = other DNA
cacttttatgtgcaaagtttggaaaatttcacaataaaatttttgtgtttacataaatgaaataacatgggaaaatgttcttggaaaataactagtttgtcccacttaagtttttaaaggtgttaaaagtacatgtttcaaaatttaccagataaactttgtggttagttactggataaactgtaaatagtgataaaatttttaagtttatatcaagatagcacttcattttaaaaccagtaattattaggttggtgcaaaattaattgcagttgttgccattggaagtgatggtaaaaaccgcaattacttttgcaccaaccttatatttctaaaagatcaagttgtaaacctatttgttttcctgtttacacttaagagtccaggacacacagacgctccactggcgaggagatgaaggggtcgtcttcatcttcgccggatgatttccgcccacatagagggcgccagtgacgcccacacacgtgctggtgtcccgggaagagttcctggcaaagagctcaggaatggatgggttggactttaggctccagcaagccccgccccactcggcgggtcggtgccg

SEQ ID NO: 4406 - DNA, 473 bp, Homo sapiens
  source 1..473: mol_type = other DNA
tttcaaaaaaaaaaaaagatagttttatggtttaaatggtatgaagagtaagtatttaacaatgcagatgatagaaaactagtccatattttttaacgaaaaaaaaaatttaggaccaattagaacttcctaataattttcaagcaagttggaagattgtggacttagttttaataacaaaaatcaagtaaataaatatagaatgaggcccaatcatttttcacctgaaaaagacctgtatgtttccatcaatgataaaactagttcaaagtcattttcaagactggatttacagccaggatgggattcagatctgaatctggatgcctaaagacttttaaaaataatgagttattttcatttatgtaatcataaaaaagcaagtgctaaaataaggattaagcaagttggagaactattttttttgtctgttccaaaagaatgaaaatgtcatgattcatcagggggatgca

SEQ ID NO: 4407 - DNA, 449 bp, Homo sapiens
  source 1..449: mol_type = other DNA
tttactgaagaacttcttctgtctgcaatatcagagaaatgtaacaactattcaatgaagtataacacagtctttgctctttaaaaccacagtttctactcctgtagaggaaattgggtccctgaaatctaactcttgacaatggcatatattagctgtcagatcttaagttactcaactctcagtttcttcatctgtgaaatggggctattaatatctcacagatttaaggagattatctaaagcattcaacataatactcaatagagtgagtgttcaaagaattcagccttcattagatcgcactgtgttatttacaactggtctcagcctagcccaggtgagacacagatgtaccatgctctcctgaagcatttgggaactctggctgggtcccagatcaggtgcatccccctgatgaatcatgacattttcattcttttggaaca

SEQ ID NO: 4408 - DNA, 217 bp, Homo sapiens
  source 1..217: mol_type = other DNA
aagaagtcaacaaactattttatcaaaaggtttagggaagagaagccactctcctcctaccaactgatgatatagcctctaactgaggggttctcaaggtgcgggtggggcccagccgcgggactcagctggagcgaactccgcccatcccggccagggcggaggcgaggtgcggattccttccccaccgcacgacccgagggccccccgccctcgg

SEQ ID NO: 4409 - DNA, 321 bp, Homo sapiens
  source 1..321: mol_type = other DNA
actgatgatatagcctctaactgaggggttctcaaggtgcgggtggggcccagccgcgggactcagctggagcgaactccgcccatcccggccagggcggaggcgaggtgcggattccttccccaccgcacgacccgagggccccccgccctcgggcttcgacttccggtgctggaggagggggccggcggcgagggactccaggaggacgcgtccaacttcgagaccggcgggggccggctccgctcttccaacccctccatgtgtgaagagggcggaagtgtccagactggaagagagcggtccgggcgggggtggcac

SEQ ID NO: 4410 - DNA, 445 bp, Homo sapiens
  source 1..445: mol_type = other DNA
tgcctccagcctgggcgacagatcttaacatcctgcagggcagcaagttaccccactggtgggcactggctgctgtagacaaaacttatcaaggagcttatttttagaatgtgtgctggctgcccacgttgggcctgatgcaggcaccatgaggatcaaggtgcagaacattgattttgttggctcacactgatcccatttgcccaggctggtctcgaaatcctgggctcagctgctcgcattagttttaaagcaattgttttagcaaaaactatcagtgagtggggacaacacgccgacggctctggttccctccctggcgcctgcgcccacgatggtcgcgcgcgcgacacgcccgccctttccgcctgctcgccccgtgcatgacccgccccgcggcggagacgcgctcgctgcgtcatcagtgttttcgagacgagtctcg

SEQ ID NO: 4411 - DNA, 123 bp, Homo sapiens
  source 1..123: mol_type = other DNA
cacaatatcgcgagatttgtttactcggcagcgtcacttccggtcccgcgtcggcgctccggatgctgtggcacttggctccccgtagcgggagagcggcagccgagtgtaaagcattgcttg

SEQ ID NO: 4412 - DNA, 123 bp, Homo sapiens; identical to SEQ ID NO: 4411
  source 1..123: mol_type = other DNA

SEQ ID NO: 4413 - DNA, 129 bp, Homo sapiens
  source 1..129: mol_type = other DNA
tcctgagcagctgatggggattcgccatccaggctggcacaatatcgcgagatttgtttactcggcagcgtcacttccggtcccgcgtcggcgctccggatgctgtggcacttggctccccgtagcggg

SEQ ID NO: 4414 - DNA, 234 bp, Homo sapiens
  source 1..234: mol_type = other DNA
gtcgccaggctggagtgcagtgcggcaggatctcggctcaccgagtaggtgggactacaactgacttcaggtgatccgcccgcctcggcctcccgaagtgctgggaggccgccgtgcaggaataagtgaatgaaagaattaatgacgttactccatacttgcaagcaatgctttacactcggctgccgctctcccgctacggggagccaagtgccacagcatccggagcgccga

SEQ ID NO: 4415 - DNA, 363 bp, Homo sapiens
  source 1..363: mol_type = other DNA
tttgttttgagtaagtgaatccaaatgaaacaatacccttcttaatactgtatggatcgaaaatctttaaaaaagaaatgcgaatcaatttccattacctttttcttcaaaaggggaaaccaatgaacactttttttttttgtcggtcagactggtctcgagctcccgacctcaggtgattcgcccgcctcggcctcccaaggtgctgggattagaggcgtgaacttccttttcccttccccggaaacggaaagaagaaaggaaactggtttcctgatgggcggggccgaatggccggcgccgactggacggcagagccgtcgctcttgggcaccgccccctgaacagggcgggagattcggt

SEQ ID NO: 4416 - DNA, 394 bp, Homo sapiens
  source 1..394: mol_type = other DNA
aaaattttaaaagctatctatgtctgaagtgaaagtctcatgaagatcaacctccactaaaggaagctggctctaagaaagtgctggtatcctttccctaagaaagaaataagaagataataattttagtttaccgaagactatcaagtatatatcttaacttcctcgtattaaaaactgtgattatatgaatattagaacataaaaaacaaatgaactgttattacttttagtgatgctgttcttctgcctttgcgatccaaaggcaaacaaagacaaagagaaacggaggttgtcacctcgagtttctcacggcaggaaagcggagaagcctggttagagattcctgaatcaggtagagactacactcaatcctggagagcgtctcacccaa

SEQ ID NO: 4417 - DNA, 265 bp, Homo sapiens
  source 1..265: mol_type = other DNA
tttttaaaggattccccacttttctgaagatctttaaaaaatgttgtcagaagtgttctaacacattaataggttgcaagaccttaatgtacagcaataatgagtgttcagaatctggcatggcgccaccgcagcccccacgccctaggtgggcccccacgtcgccccacaaggcctgtagtttccgcggccgaaggagaagtccggcttcctaccgccgccgcctcccgcagcagcctgccaactgcttgggtgagacgctctc

SEQ ID NO: 4418 - DNA, 302 bp, Homo sapiens
  source 1..302: mol_type = other DNA
tgttctaacacattaataggttgcaagaccttaatgtacagcaataatgagtgttcagaatctggcatggcgccaccgcagcccccacgccctaggtgggcccccacgtcgccccacaaggcctgtagtttccgcggccgaaggagaagtccggcttcctaccgccgccgcctcccgcagcagcctgccaactgcttgggtgagacgctctccaggattgagtgtagtctctacctgattcaggaatctctaaccaggcttctccgctttcctgccgtgagaaactcgaggtgacaacctcc

SEQ ID NO: 4419 - DNA, 317 bp, Homo sapiens
  source 1..317: mol_type = other DNA
ccttcagcatcaggtagctaggggcaagatgagattctgatcccatagattttttggaacacttaggaccatttcaaaggctttaaatggttaacctttcctgtgagtttaaaattatctcaagaaaagttaaagctctttaagaatcacaataaagtagttattaggaataaataactgtgatcccgagaccagccttgccacaggctggcgccactgccttctagcctgggcgacagcgcgaaaaccacaaagtgtgttcacgtttgctatgactcgacaacaattgtaaacactcgcgccgggcgtggtggctc

SEQ ID NO: 4420 - DNA, 319 bp, Homo sapiens
  source 1..319: mol_type = other DNA
cctttcctgtgagtttaaaattatctcaagaaaagttaaagctctttaagaatcacaataaagtagttattaggaataaataactgtgatcccgagaccagccttgccacaggctggcgccactgccttctagcctgggcgacagcgcgaaaaccacaaagtgtgttcacgtttgctatgactcgacaacaattgtaaacactcgcgccgggcgtggtggctcgctggcgcgtgcctgtagtcccagctactcgggaggctgaggcaagagaaaattgcgccactgcactccagcctgggccacagagcgagactctgg

SEQ ID NO: 4421 - DNA, 313 bp, Homo sapiens
  source 1..313: mol_type = other DNA
ctttaagaatcacaataaagtagttattaggaataaataactgtgatcccgagaccagccttgccacaggctggcgccactgccttctagcctgggcgacagcgcgaaaaccacaaagtgtgttcacgtttgctatgactcgacaacaattgtaaacactcgcgccgggcgtggtggctcgctggcgcgtgcctgtagtcccagctactcgggaggctgaggcaagagaaaattgcgccactgcactccagcctgggccacagagcgagactctggtcccgggtggggactcggcctcacacagtgagtgccg

SEQ ID NO: 4422 - DNA, 317 bp, Homo sapiens
  source 1..317: mol_type = other DNA
acaaaaaacctggctggagctccaagatctttttttttttcgtgcctcagcctctcaagtagctgagcccgaccttaggtgatccgcccgcctcggcatcccaaagtgctgggatttgaaagggagtttttaatgtttattccccctccccccgaaagtcttgcgcgacccggggtgggccgaaattgcctaggcccctggggcattggaggtcctaccgcagctcctagtaggtggtgggggcgcagcggctgtccccactcagtcctggcccagagacacgcgagtggccctgtgcaagtttcaactgcgcgggg

SEQ ID NO: 4423 - DNA, 447 bp, Homo sapiens
  source 1..447: mol_type = other DNA
gactgatactgtatgtatataaataaatggattcagtgcttctttcactaaatacagctagataaatatataaatatacttgaacacaaatacaaagcaaccattggcaatttagagttgggttgtgtttccacttattttttgttaataaatttgattttaacctgaaatattgtcttgtaggaacataagttttagctgtgaaacttagagtagataggttagcaacttaaattttgaaagaactgtaacttccagatgttccactgagaacatcagaagcactaatggcaattgctgggcctccatggggctcagggtctgaagacgtgatccaaacctgacaacttggtggcaggtaaaaagacagggacagaaacttcttttcggtttaactctgtgacataagtttccctgatttagtcaattctgatgaattctgaaaaa

SEQ ID NO: 4424 - DNA, 365 bp, Homo sapiens
  source 1..365: mol_type = other DNA
ttttagctgtgaaacttagagtagataggttagcaacttaaattttgaaagaactgtaacttccagatgttccactgagaacatcagaagcactaatggcaattgctgggcctccatggggctcagggtctgaagacgtgatccaaacctgacaacttggtggcaggtaaaaagacagggacagaaacttcttttcggtttaactctgtgacataagtttccctgatttagtcaattctgatgaattctgaaaaacctttctttagacttctatagatccctttctatagaacttaatctacttaagtcagggagtactttcaatcttaggcataagttagcttgataagattttcagaaaaatt

SEQ ID NO: 4425 - DNA, 368 bp, Homo sapiens
  source 1..368: mol_type = other DNA
ccccatgtgatagtctgaaatatggcctcatgggaagggaaagacctgaccgtcccccagcccgacacaagaggaaggcatctgtctcctgccagtccctgggtgagatgtttatgtgtatgcatatgaggccggcgggatcctccgtatgctgaacgccggtcccctggcacaggtgtggaggggcaacccaccccttcagcgcagtgaacccgtcctcgaccacgtagccggtgctgctgcttaggtgcgacccgacataaacgctgcagctgctgcgacgcggaggcgcgccgctgccacgctgcagccaggcgccgggtgggctgggtgggctgggggcgggggctgcggcagcggcggggcgg

SEQ ID NO: 4426 - DNA, 375 bp, Homo sapiens
  source 1..375: mol_type = other DNA
catagtaatagtatttatcttaaaatgccctggcacatggtagttgcaatattagtgtgcagtattgtttttatgattagaaataatgtcttcaaatgctgtgagaacacatactgtcagtttttgcaggtacctcttaatttctcccacaaagactgaaagtgaatccttttatcttttaaaaatttcctccatgcctgtaatcccagcacttggaccagccacataagaacaactatttcatggttaggaaaacagatgcttccctttttgacttaccaaggaatccaaaggaaagcctgaagcgtggcttctttacctggggaaaccccaagattagcctttaggagacgctgtttgtcaaagttatcttaa

SEQ ID NO: 4427 - DNA, 442 bp, Homo sapiens
  source 1..442: mol_type = other DNA
acatttgctaatcaaagcatcataaatcttgctttttttccccatagataaaacatctttctaagactctgtacctctttccagagtgctgcacatttgagttagcttaattatagtgtagtgactttgatccaaacttgctggtttgggcaaattaattaacccttagtttaaagcagcagtcatagtaatagtatttatcttacaaaatgccctggcacatggtagttgcaatattagtgtgcagtattgtttttatgattagaaataatgtcttcaaatgctgtgagaacacatactgtcagtttttgcaggtacctcttaatttctcccacaaagactgaaagtgaatccttttatcttttaaaaatttcctccatgcctgtaatcccagcacttggaccagccacataagaacaactatttcatggttaggaaaaca

SEQ ID NO: 4428 - DNA, 397 bp, Homo sapiens
  source 1..397: mol_type = other DNA
acttggagctcagatgttgatactggcacagtatacttaccctgcttttgtaaacaaaatgggtatataaaacaatatttgtttctacttattatgtatttaacgttaagtaacttgcccaaggttggcagagcaagaattactatggctttataagcctaggaaaaagttttcactttgttaaaaaatcagtccttcaaataaattctttataaattatccagtcttaggtatttctttataacagtgctaggatgagctgatacattaggcaatgctttgcacaaaggggattgcttagtaattagcatatccattcatgaattggggggctgctttgtgtgcatagataaggtatattttttaaaaaaattatttttccaagaagaaaataaac

SEQ ID NO: 4429 - DNA, 252 bp, Homo sapiens
  source 1..252: mol_type = other DNA
ggcaccgtggcctgtaatcccagtcccagctactcggcaccactgtactgttgcctgggcaacgcactcagagctttggacctccagcctgagcagggctgagccgagcagggctaagccaagtagggctgagcccagtccggccaaggcaaagggaaacttcctattcccagaccctttattacttgccaccgacaggggttattattactaaatggagtcagtataaatgctttatgttcctttaaacag

SEQ ID NO: 4430 - DNA, 251 bp, Homo sapiens
  source 1..251: mol_type = other DNA
agctagcaccactgtactgttgcctgggcaacgcactcagagctttggacctccagcctgagcagggctgagccgagcagggctaagccaagtagggctgagcccagtccggccaaggcaaagggaaacttcctattcccagaccctttattacttgccaccgacaggggttattattactaaatggagtcagtataaatgctttatgttcctttaaacaggaaacatttcttgttcgaaagtcttccctg

SEQ ID NO: 4431 - DNA, 467 bp, Homo sapiens
  source 1..467: mol_type = other DNA
aatttgattttcttttcctacttttaatatcagaaaacatttcatctaactctcagtatgaaggcaatattttgctagagcccaacatggtgagggccccaggatttgcttctttgataagatggtaaacccagctttcactttggtaagatggacttaccatgccacagagatgctccttggctaaaccaggggctttagctctgaaagttgagagggctctgcagtgtccaatctcaagacctctctaagattcattgaatgaaaaaattaaagtcttaatgatgaacccagaaaaatctttaaatcctaaatatgaaatgaaagtgttcttagttacaatccagtccaacgtccttgtggggccagtgctcaggtggccaggtgccctgcgtgcggtctcctggaccaccaggccagctttagaagcagaacaagtggtaagcgctctttcccctctagtgtta

SEQ ID NO: 4432 - DNA, 489 bp, Homo sapiens
  source 1..489: mol_type = other DNA
ctgcagtgagctatgcatgcagcctgcactgccactgccactgcaccgcagcctgggtaacagagtgagctgtctcaaaggaaaaaaaaattaattatgcttttattgagcttttttattgtttataacaatattttgtaccaggatcatgaaatcaatctagtggattataatcagctttaatttaaagaaatagcaaataataagagtattatttcatgaaatttttttattacaaaatttgtaaaatgtatttcttataatgagtggcagtaaaactaaaatgaaagccactgggttgtaataagcaagtacttttttctatagtaagaaaaagcagctttatttaaaaaaaaaaatcatttttactttcacagatttcaaagccttaaactcgagggaaatttagatcacagaggaattagttgaattctatttcctctgaagatatatcttaaacttttttgtcccatgactgctcttgaagaa

SEQ ID NO: 4433 - DNA, 662 bp, Homo sapiens
  source 1..662: mol_type = other DNA
ttttcttttcgactaagcatagaataagaattttctcatttgattattataaaagtaggcaatggggctatatacccggagacttctgtatattcagtagtattactgaatactgaagtaatactgaagaagtattactgaatagttgtcgaagctattagttatttttaatttcctaaaaacacatgtttcagtaaggttgagaaaaaattcatcctatggatatttttataccattattgtttgaaattaacatttcttgagaaaatgaaatttaacaattagaagtttttatttctcaatgaaataaaattaaaagattaaaaagaaagaaacttctcccagaagagttttcatgtttaattgtgaaagattgtatttttttaaaagttggtaaactgtttaccctttatggaatggatatatgaataaacattctaaattactttccttaatcttcaaattttatcataaaatttaactgtatttctacagatgtacattttagagttaaaatttaagagtaaagttatctaagagtacagcaatacctttcatatcccactgaaaagaaatatcttttaataagttaattactaagttatgaattacaaataattaatcattgaagtatcatgtcaaaattttatatttaccaagga

SEQ ID NO: 4434 - DNA, 683 bp, Homo sapiens
  source 1..683: mol_type = other DNA
aaaacgacactcgagtatttaattttgagtcctgctatgggggactttgcagcgaacatatggcaactccccaagcccgagagaggggtgcggggagagggcgcccgggcggcctgggccccgcgcacctggcacggccggcacggccaacccggcaggcaccactgggcgggctgcgaacccgcggcccgggccccgctgagcccgagctgcactggcgcagtggctgctcgccacctcgggccgcattcttgccacggctcccgccagccgccggtgctcgggctggaggtgggctagcgcgggcctctggcttcccgggcgtgcgcggaccaaggctccggccagcgtctcttcaggctgccagcggtgcggacaggggcgggcgccagagccctgctcgcggaggggcgaggcgagcgctctaggcccgctcccggcgcggggcgcgggagggcggcgaggccgcgaccggggccgtgggcttggaactctgcaccagtcccaggctacccgctgggaacgcattcgccccacccgcgccggggtcgcggccccgcctccctccccggggctgggcagcgagaaggcggggccttcggccgctgggagacctcttggcttccccaattgtgtggggctgccattgacccggtgtcgccgcacgcccgcctgtccctgcc

SEQ ID NO: 4435 - DNA, 265 bp, Homo sapiens
  source 1..265: mol_type = other DNA
tttaacttttagggtgtacagattatttcatcacccaggtaataagctcgcatttataagtgagcccatgagtaaatcattgcaattgattcagatatttagggtcagaattttaaaatgtgtctgaatgtttaagatctgacactgtgttgggccccatgaggttctaaaggagactgaaatggcctggcaagtgcttgcagcaggctcgctaagcacgcatgcttccaccactcccagcatgggcccggcctgagtgggtcag

SEQ ID NO: 4436 - DNA, 555 bp, Homo sapiens
  source 1..555: mol_type = other DNA
ttttttaagttgaaattcaatttttgggctgctactaaaaaggacatgtgcgaatatctattatttacgcttcaaaagtcagccgtttttctttttcaagatatgtggcatctggctcaaaatcaattgcaaggcgactgaagcttaaggtttaatgcccgaccctagaagctgccaagcctcagatgtgcagctgggctgaatgggacccggacccagcctccggctccgacgtccgcgcgtgacctccgggtaccggaggaccttgggacgaggaggtccctccgctttccgggcgcttcctcaggaagcccctaatgcagcggcagcctgaaagcagcagccgaagctgctgccgctgctcccactgccagcaaccgcccgggcgtggcagggacaggcgggcgtgcggcgacaccgggtcaatggcagccccacacaattggggaagccaagaggtctcccagcggccgaaggccccgccttctcgctgcccagccccggggagggaggcggggccgcgaccccggcgcgggtggggcgaatgcgttccca

SEQ ID NO: 4437 - DNA, 626 bp, Homo sapiens
  source 1..626: mol_type = other DNA
tcctggtcctcccaaacccagcagcgcctggcaggacagaggcgggcggggacctggctcagggggcggctgcctcgccaggcgccacgaagccccggcgtcccacaggtcccggaggccgctgcgtcgcggggagctgggctcgggccgccggcggttgcgccggggcagccccgcggggagagcaccatgaggactgactcgggggctcggctggaggagggccacctggtgagcggcgaggggcgcgtcggcctcgggagggccttgctcgtggggtgcgcgcatccgcccctccagtgttcacaggccgggaccgaactcccggagtgacctgagcccgcgttgccacgacgacgcctcactcatctgaggcccggggcccggcgggtgccggggcttccagccaggcctctcctagactcctccgaggagaggtctgtagctgcccagaagagatctgttcgcctgcggagtcctttaggaaagctgtgatttttttggcagggctagtctggactggccaatccaggtccctcaccgcaacatccccgcagggcgctgcgcgcggggtactagccaggcggcgcggcccgatgacgcattgcgcctgcgcgcgcgaccga

SEQ ID NO: 4438 - DNA, 550 bp, Homo sapiens
  source 1..550: mol_type = other DNA
gtcttcagttgttttctcaccataacatgagagatttaataaggttacattaaaataatcaacaaaaatactatgtttttctgccgttaactattttgagagaaaatactagaatgtaggtttgtttttggcagctaacaggccactagtatcctactaaagcttttgtctggataagcaacatgcatgtttaatcctcagttaccagaagatgtatccataactgcctagcttgcctgtcagtttttaatagctaaagatataaatctgggtaatctaactcaaatggcttagtttcattttaactcaaatgatatggggaattttatgatcttgaaagagcaggttttgcttcgagaagccatttcttcagtatggaataatatgggcatttgccctggtcctaatcaacagcatttggacccatagggtttgtctagtaaaaagcactattttgaaaaacatttaatagtacgttttaaaaagctaatggaaatacttttaaaacaagatttaggacaaattccttaggcatcagtcacactaatgc

SEQ ID NO: 4439 - DNA, 334 bp, Homo sapiens
  source 1..334: mol_type = other DNA
atgtcatttcatagctggttatgtattgaaagttcttaaaagtgagttaaaaatgaaaatcttattgaaatcaagtgcttttcacaaaatatgtgtcaaaacacccaacttgtgttttcatctatgatggatgcagtattaagttttcagataaagaagtagctcctatctgagacagaaagcactatttggctgaacagtcttcagttgttttctcaccataacatgagagatttaataaggttacattaaaataatcaacaaaaatactatgtttttctgccgttaactattttgagagaaaatactagaatgtaggtttgtttttggcagc

SEQ ID NO: 4440 - DNA, 391 bp, Homo sapiens
  source 1..391: mol_type = other DNA
gacattatctattgtcttgtttttaaacattcagctattcacttaatatacatcttgaacttaaaaataaattttatcctaccagaatcttatctcagaaccagggatcatttctgatacctgcccaagtactagttgttctggaacccaggcttccttcctccattggagtatttgcaggcaggatattccttgcaaaaattcattttttcaccataaaattggtttaaaacttttgaaacaaatgtaaatcgtcattgaaataaattaatcccagcactttgggagtccaaggtgcaggatttcaagaccagtctgggcaacatagtgaaacccttcccagctactctgagctgagatcatgccattgcactctagcccaggcgacagt

SEQ ID NO: 4441 - DNA, 127 bp, Homo sapiens
  source 1..127: mol_type = other DNA
ttttgcacccactgtgcgagtgtggggttgcaactaacagtttaatttgaaaatatttcagcggtggtaacaaacgactgctgctcccatccgccctaaactaagggagatccggaggctccatgaa

SEQ ID NO: 4442 - DNA, 227 bp, Homo sapiens
  source 1..227: mol_type = other DNA
gagtcaaacatttcctcagttttaatttttgcaactttgagacagagtctcactctgtcacccaggctggagtacagtggcacgatcttgggaagccatctctgcacagttcatatattattaaactttggaataccttttaggcagtcaagtagaaatgtcaaattgacagttggtgattcatatctagaagcaaagtacagataaggcccagactgaacactggg

SEQ ID NO: 4443 - DNA, 636 bp, Homo sapiens
  source 1..636: mol_type = other DNA
aaatgaaaaaatacatgctcataattaaattacctgaacattttaaaaaaccatcatgaggttcaaatatcaaatattcataaatattgttgtgataatagacataactcttattttttcccttaataatgattgtttatatattcactttatgattagtatattatagtggcaataatcttaggaatctaacagaaaagtgttgcatttgaagactacagactgcaaaccaatttttgacattgtgctgttaatatagtactttacatatagtaaacattaattacatatatgtggaggaagaaagtatttcattcaaactcgttaagaacaacataggtgctcaccacatagtttttgaataaatgaatgaatggcaacccttctaagactattggatacactatgtttgaaggcaaagagatgcagtagatattttcaacttttttcctgtctttgactactaaaagttagctaggtagcaaatttgttttaaagtctgaaaaccaaaatgctttatcaccatcaatgatatcatataaatatcattgcatagataagcaatgtcaatccctcttaactgtgccaaattttattctattcaattcacatctgaatgcaaatggagtagtcata

SEQ ID NO: 4444 - DNA, 518 bp, Homo sapiens
  source 1..518: mol_type = other DNA
tcactttatgattagtatattatagtggcaataatcttaggaatctaacagaaaagtgttgcatttgaagactacagactgcaaaccaatttttgacattgtgctgttaatatagtactttacatatagtaaacattaattacatatatgtggaggaagaaagtatttcattcaaactcgttaagaacaacataggtgctcaccacatagtttttgaataaatgaatgaatggcaacccttctaagactattggatacactatgtttgaaggcaaagagatgcagtagatattttcaacttttttcctgtctttgactactaaaagttagctaggtagcaaatttgttttaaagtctgaaaaccaaaatgctttatcaccatcaatgatatcatataaatatcattgcatagataagcaatgtcaatccctcttaactgtgccaaattttattctattcaattcacatctgaatgcaaatggagtagtcatattctccttgaacctacaagagactgt

SEQ ID NO: 4445 - DNA, 350 bp, Homo sapiens
  source 1..350: mol_type = other DNA
aaagggctgctgcagctctgcaggccggtcagagcctgcttccccatgcgaggggagcggaatcgccccccccggctgcagtgcaatggcgcgcctccctagtagctgggatttgatctcaggtgatccgcccgcctgctgggacaaagcaaccaattcaagggttggaattactcactccccatttaaatgttggttctagagctagaagtactggcattcaaagtatctcggctcagtcgtcagaggagacatggagccaggacctttgctcctgggggatggccctagtactgatgcgcaggacctggttctctccctcctccctgcgcgaagcggaagtgacgcga

SEQ ID NO: 4446 - DNA, 211 bp, Homo sapiens
  source 1..211: mol_type = other DNA
gcctgtagtcccagcagtgagccgtgatagtgccactgcactccagcagccagactgggccggagtgcagtgcaggacgagtagctgggactacaggcggcccggctaggagaatttcttgaacccgggcactccagcctgggttacagagcgagactccgtcggcccgccccagcccgctgtggcgggaacattctggaagtgacggcaa

SEQ ID NO: 4447 - DNA, 556 bp, Homo sapiens
  source 1..556: mol_type = other DNA
ggcccccagccttggtgaatccaggccctctctcggggtgggcaccgcgctgtacggacagacgcgcgcacgcagcggcgatttatagaattaaaagtcttttttttttttctggcttcaaaacgtgaaacaacagagggcagttctgcccctcgaggctttcctccgagagtactgagacggagacgcctcagtcgggagaaatcccggaactcggaggagtctgcccaagccatgcacatttggaaggcatgtgtatgtgtccgcagccccctcggccattcaccggagagacgcgctgcggtggggcctcggagccctcagccagccccgaacgaggggcggggccgggcggggccgtgagcgcgcaggcgcagtgcgggcttcatcccgccgccggcgccgccgccgccgccgcccgctctgcaccacaggcggaggcggggcgactccggtgaccgggagcgccgcagactggcagctgcggcgactccccctcggagccactggaagtgcctcccggagggacgcagggtgtctcgccgcctccctgccc

SEQ ID NO: 4448 - DNA, 654 bp, Homo sapiens
  source 1..654: mol_type = other DNA
tctgcccctcgaggctttcctccgagagtactgagacggagacgcctcagtcgggagaaatcccggaactcggaggagtctgcccaagccatgcacatttggaaggcatgtgtatgtgtccgcagccccctcggccattcaccggagagacgcgctgcggtggggcctcggagccctcagccagccccgaacgaggggcggggccgggcggggccgtgagcgcgcaggcgcagtgcgggcttcatcccgccgccggcgccgccgccgccgccgcccgctctgcaccacaggcggaggcggggcgactccggtgaccgggagcgccgcagactggcagctgcggcgactccccctcggagccactggaagtgcctcccggagggacgcagggtgtctcgccgcctccctgcccccccgccctcggtccgcgacgcccgagttccgtcaggagcccagagctgcgggagaacgaggcggcggcggcggcggcggcggcggcggcggcggcagcagcagcggcttcctcggggggggtggaatttacctcaggcaagatcgaggaggactagaaggggcagcctctcacacccactccgcctgccgtctcggggagcccggaccggggccgcgaccgcgacccctcccctcccccgc

SEQ ID NO: 4449 - DNA, 261 bp, Homo sapiens
  source 1..261: mol_type = other DNA
atgaagcttagaagatttaaagcttataagattttctcaaaagagcaaatatcctagttataatttccaaatcatcagattcaacctgaacttgaatgatggagataaaagctttctctgaggtgagtaacacaaaaacatctaaaagtataaaactcattggtacaattacacaaatttagaataatagtataatggtgggtctttaatatgaatgttaaaaaacaaaactattaaaaataatgataggcccagccttga

SEQ ID NO: 4450 - DNA, 567 bp, Homo sapiens
  source 1..567: mol_type = other DNA
agtgagccgagatcgcgccactgtactccggcctgggcgagcgagactccgtattcatacagattttaattatcacctcgagtgttaactattcttttaagttttggagtcacctttaaaaagaatgaagtttgaatttattaaattatctcctactagtagtaaatatttactcttgaagattcatcataaacattatggatatggatattatttaaacctttaactttccgcctaaggagcactggtgctaaggggccgccccagaaggcccggcaggtccgggggtgggggtgctcggagggagccgggagggccccgggccaatgccttccacttcttgtcatttcactttattaagtaaagaggaaatcatgctccgatcccgagtcgggccggtggcggggtcaggccggcgcccgaggggggcgaacgcggacgccaggtcgcgcggtttaaatctcccgcctcccgcagcgggagcctgacacctccacgcactggtgcggaggggcactggctgccggagggccgggagtcggcgcggggctcgcgggcggtggccgg

SEQ ID NO: 4451 - DNA, 450 bp, Homo sapiens
  source 1..450: mol_type = other DNA
ttttccccttctaaacgtaaggtataaaggacggcgtgagggaccacacattgggcgctccgcccaaggggtccggctccttctccgcggcgatggcgcgtccttgggccctgcccctctggggcctgcgagccccgtcccgggccgggggtcggaagccgtgccatgtgggaccccccccaagcttggcgcggaaggcgccgccagtgaccggctgcggctgggggcggaggccggcagttgctcggagctccgggtaggtctgcgcagacagcgctgccagacctctgactccgccgccccacaaggcgagagtctactcaacctcgtcttggctccgaggccccgccatggagaccggcgcgccccaccgggagcgcgcagaagttaggaccactatcggccacctctctctaaaagccgcagttagaggcgagattttagaagcga

SEQ ID NO: 4452 - DNA, 469 bp, Homo sapiens
  source 1..469: mol_type = other DNA
cataccggattttggacattgggatcaggatagttatctccatactatattagagtaattcattttccccttctaaacgtaaggtataaaggacggcgtgagggaccacacattgggcgctccgcccaaggggtccggctccttctccgcggcgatggcgcgtccttgggccctgcccctctggggcctgcgagccccgtcccgggccgggggtcggaagccgtgccatgtgggaccccccccaagcttggcgcggaaggcgccgccagtgaccggctgcggctgggggcggaggccggcagttgctcggagctccgggtaggtctgcgcagacagcgctgccagacctctgactccgccgccccacaaggcgagagtctactcaacctcgtcttggctccgaggccccgccatggagaccggcgcgccccaccgggagcgcgcagaagttaggaccactatcggccac

SEQ ID NO: 4453 - DNA, 288 bp, Homo sapiens
  source 1..288: mol_type = other DNA
cttttaagacgcgaggaactgcagtctaagcctggactctgccttctgcccctctgcagaaatacctactcctagatttaggagtcatcgattatcgtaaaggttccctttaatcattgttcttcccatacgtgtgggcccgtaatcgattaggaaaaagatcccactcaaatccgctttattaataaaaaattttttttcaagaggctgtcctgagccttcgcttctaaaatctcgcctctaactgcggcttttagagagaggtggccgatagtggtcctaacttct

SEQ ID NO: 4454 - DNA, 404 bp, Homo sapiens
  source 1..404: mol_type = other DNA
gcgaggaactgcagtctaagcctggactctgccttctgcccctctgcagaaatacctactcctagatttaggagtcatcgattatcgtaaaggttccctttaatcattgttcttcccatacgtgtgggcccgtaatcgattaggaaaaagatcccactcaaatccgctttattaataaaaaattttttttcaagaggctgtcctgagccttcgcttctaaaatctcgcctctaactgcggcttttagagagaggtggccgatagtggtcctaacttctgcgcgctcccggtggggcgcgccggtctccatggcggggcctcggagccaagacgaggttgagtagactctcgccttgtggggcggcggagtcagaggtctggcagcgctgtctgcgcagacctac

SEQ ID NO: 4455 - DNA, 546 bp, Homo sapiens
  source 1..546: mol_type = other DNA
ttccactaaaattttaggacactgaaacttgaatttgaatttcgtctaattttcacatctcaaaatattgttcttttgattttcgttaagcaagttgcaaataacatttacagtgtctcgctctgtcgcccaggctggagtacagtggccaccttagcttctaagtagctggaaccgccaagctaattaaaatttcttttgcagagacagggtctcattctgttgcccaggctgatctcctgggttcaagggattcgcccgcctagacctcccaaaattctggaattacaggcgatagccactgtgttacaaatgaaacaagatgggacattagttgtatactagtttactttagaatatacttgaaatctttcacaataaaaagttgtggaaatgtttaacaaaggtgagttatcttacgcgtttttctttccttatacaaaaaccaaatctctctgaaagttgtctatagttagtaaagccttttgcttcttttctgaaaaagaaaaaccctttttacattactctaaattcccagacggggcg

SEQ ID NO: 4456 - DNA, 571 bp, Homo sapiens
  source 1..571: mol_type = other DNA
cgccaagctaattaaaatttcttttgcagagacagggtctcattctgttgcccaggctgatctcctgggttcaagggattcgcccgcctagacctcccaaaattctggaattacaggcgatagccactgtgttacaaatgaaacaagatgggacattagttgtatactagtttactttagaatatacttgaaatctttcacaataaaaagttgtggaaatgtttaacaaaggtgagttatcttacgcgtttttctttccttatacaaaaaccaaatctctctgaaagttgtctatagttagtaaagccttttgcttcttttctgaaaaagaaaaaccctttttacattactctaaattcccagacggggcgggcgtagacgtcagcacgtcagccctcctccatgtcgtttcagtgccgcggccggcgcccgccaagggatgggcagccagagcctgtcgactgcggctgcgcaggtatgctggggcggggcttcaggtcaccccgcccatcccccaacggctgggtaaatcgaaatgattagcccagggggcagccccgccccctgctcc

SEQ ID NO: 4457 - DNA, 461 bp, Homo sapiens
  source 1..461: mol_type = other DNA
actcaaatttaagtgtgtaacacccgggagggctctgttcaaacagattgttgtgccctgtcgcccaggctggagtgcagtcgtgccatctcggctgatcctccagcctcagcctccggagcagctggggccacagggggattacaggtggagccaccgcgcccggcatcgataatctgaatctctaacgagctcccgggcgacgttgaggttttaattctgaactcctaacttttctcagaaagctgggctctgctttcgccagcaacccggtccgaagtcgcgggcatattctgccatccccgccttgcggtggaggctggcgctaggcggcctcagcctcggcctgctgcgctcaggaacccgcgccccggctcctctggcgccggccgcaggcctcggtcacgcccccagcggcccgttggtttccgggtcccgcggggtgcccccgcccacacgct

SEQ ID NO: 4458 - DNA, 602 bp, Homo sapiens
  source 1..602: mol_type = other DNA
tataactctgcaagaggaaaattatctgccttgaattttgttttttcaaggtattttcacaataaacgttgattttatctatgtaacagccctgtgaagaaggcaattactactagcaaaatcgttttcaaaattttaaatactgaatccatgaaaggtggcattgaaagctgcgtggaagttggagggtcccaagagtggaggctgtgccctccttcggcctcccgtcagcagcagagggagaaaagcctcgagaagttccctaggccgatgacctccatggggtcccggagggagccggcaggaagccagctgagcagggtggtgtgttcccgccgggctaacaaaggccgccgggaggtgggggcttctccagccgctccagcggcgggcgggcggcggaagggttaactgcaccaccaactcccgcgcgccccggcccctacccccgccgtcgctaggagacgccggaagtgggggaggggccggcggcgcggtttttcgggctcccgggggcggagggaagggagcgcgcgtgcgcgcgcccggccggccgtcgccgcggtgaccgtcctcggagtccgtcggctcgcgccccgccc

SEQ ID NO: 4459 - DNA, 583 bp, Homo sapiens
  source 1..583: mol_type = other DNA
gctttgcatgtagccaagcaaacataacttagttccatttgttcctttctttgatcaactttaggtgaaggtcaaaataaggacatacttaaaatctaaatacattccatgaaactgcagagactttttggccaaaatgggatttgcgtttctggagtctctgaatacacggacagcgtagactgctggaggctgctgtgcctcccagggcgctaggacagaggctgctgggccggcttcctatgaaaggcgagcagggggtggacgagcggagccgcggttgagtgcggccgggcgcggccgggcgcctgaagggagggcggagggccggcgcggggcgcgggctagggaagggcggcgggcgcggcggcctgcgccggaagtgagtggttggcggcgggcgggggcggcgcgcggtcccgcgcgagtcggccctacagtcggcagtccggccctcaaccccgccttctgcgtctcggctggacgcgagcacactcggctccgccgccgccgccgccgccgcggggcgctgcggccgccccgcccccgctcccgccgccgcccgccagtcagtcagtcagtc

SEQ ID NO: 4460 - DNA, 467 bp, Homo sapiens
  source 1..467: mol_type = other DNA
cactctcattcttagagagggcaatgctttgtgaaaatttaaataaattcttagcaaaatgttcattgcaacaacaaacttgctttgcatgtagccaagcaaacataacttagttccatttgttcctttctttgatcaactttaggtgaaggtcaaaataaggacatacttaaaatctaaatacattccatgaaactgcagagactttttggccaaaatgggatttgcgtttctggagtctctgaatacacggacagcgtagactgctggaggctgctgtgcctcccagggcgctaggacagaggctgctgggccggcttcctatgaaaggcgagcagggggtggacgagcggagccgcggttgagtgcggccgggcgcggccgggcgcctgaagggagggcggagggccggcgcggggcgcgggctagggaagggcggcgggcgcggcggcctgcgccggaagtga

SEQ ID NO: 4461 - DNA, 141 bp, Homo sapiens
  source 1..141: mol_type = other DNA
gtggcatgatctcggctcatagcagcctagtagctgggaggtaccctggccatttggcctcccaaattgctgaccgactatttttcagtgacaaaaaaaaagtctttaaaaagatgacggagactctcaggccttggcagg

SEQ ID NO: 4462 - DNA, 391 bp, Homo sapiens
  source 1..391: mol_type = other DNA
ttgcacgaatgtttctttctttattaaaatgtatgaaaactctccagatttaaggaaggtcctcaatgcaaatttaatatttaatcttcacttttgaattttctgcttgaaaaatttgtattagaaaaaaaagtctatccttttatgcttttaagaacacctgaattctttccttctgcaaaattttttctcttaaccaaatgctaaatggatttaggagaaataaacttatttgtaaagcgtttttattaatgagatcctcaaagtgaacatgaagcttcagtttcaaattgaatacattttccaaaaacaaaaaggctttctattcaagtgccttctgtgtgtgcacatgtgtaatacatatctgggatcaaagctatctatataaagt

SEQ ID NO: 4463 - DNA, 595 bp, Homo sapiens
  source 1..595: mol_type = other DNA
aagattaaatgagttaatgtatgtataaactatagttataatgtaaatatatatacaaacagtaaccatttacatgcatataaaacataatataaatgtaatattagctatattcatatataaaaataggtatattttatatataaaatatattacatttaattttttacattttgcattaagatatattatttcatataaaacatttaagtacatatacatataattatctatgtaattattattgttattgttgttattgctccctgcagggatggggagaccactacagactgaggagcagggtttaagttagtttaaaactgaccccatcatttgaaacattgcaatctacaatgaatgccacataaatatcatttctcagttcttatctctggagcacctagcataagatagaaatgtgtcaaaatatatgttttattcatcatgtgagtttctgaaaaatacaggcataatctctttaacttgttttataggaaccagaataagggtaatgtcttcaaaatcatcaataatccatgcattgtttaactcatgtcataagcaataatgcctttcatatagccattggcat

SEQ ID NO: 4464 - DNA, 460 bp, Homo sapiens
  source 1..460: mol_type = other DNA
actttctaagaatgagattttaactaaatcatttaacttcccctcatctctaaaaagaggataaagtgtctcctttgaagagatcaattctgtctttggtttatttaaatgtaaattagtttgtattggatttacaaccaaattacaatggacttgactttctatacatagaagacaaccaatatatacttactgaatgtatgaatgagctaaaatttatttttttaaaaaacctcttgaaacccatgaaaagtgtgtccacataggagcacatccttctgtagagaaacacatagctcagaagacctgagttcttttcaacagaactaacataccgggtagttgttagctcatttacatgagagctaagaatgaaactaacgtaatttgttggtttcccccacatattcccatttcaattggtggtgttaacttttttttttcctaataaaatgcacaa

SEQ ID NO: 4465 - DNA, 457 bp, Homo sapiens
  source 1..457: mol_type = other DNA
agctcagaagacctgagttcttttcaacagaactaacataccgggtagttgttagctcatttacatgagagctaagaatgaaactaacgtaatttgttggtttcccccacatattcccatttcaattggtggtgttaacttttttttttcctaataaaatgcacaaatcccagggctcctgatggcagcggcacgggctgtgcttaaggcgagttcctaacaggccctcggggcacgactagaagcacctgctcctgggcctgtgaagggcgcagctctgccccaggtgacgagacgaggctcccgggctccagttactggcccgcagggccggggcacgtcgtcgcccagcgtgcggcggggcccgggagcgccgcggcccctttaagagccgggcccaggccgtcgccgggaccgcaggagcccagagcgcgggcgccgcagaggagttgggagc

SEQ ID NO: 4466 - DNA, 570 bp, Homo sapiens
  source 1..570: mol_type = other DNA
acttttttttttcctaataaaatgcacaaatcccagggctcctgatggcagcggcacgggctgtgcttaaggcgagttcctaacaggccctcggggcacgactagaagcacctgctcctgggcctgtgaagggcgcagctctgccccaggtgacgagacgaggctcccgggctccagttactggcccgcagggccggggcacgtcgtcgcccagcgtgcggcggggcccgggagcgccgcggcccctttaagagccgggcccaggccgtcgccgggaccgcaggagcccagagcgcgggcgccgcagaggagttgggagccggcgcaaaagtttcctcccaactctggccccgtgcgccgccgccgccgccgcccactccagcccccggcttggggccggccctgccaacgccgccagggccagggccagggccaggaccagcgacagggcagggccggcagtttcgctttggtgggcgcggagcagccgcctgggccgggcagggaggaggagccggtgccgcggagctgccgcgtcccgggccgccgggcacctgggaggtaacccct

SEQ ID NO: 4467 - DNA, 721 bp, Homo sapiens
  source 1..721: mol_type = other DNA
tcccagggctcctggcacggcacgggctgtgcttaaggcgagttcctaacaggccctcggggcacgactagaagcacctgctcctgggcctgtgaagggcgcagctctgccccaggtgacgagacgaggctcccgggctccagttactggcccgcagggccggggcacgtcgtcgcccagcgtgcggcggggcccgggagcgccgcggcccctttaagagccgggcccaggccgtcgccgggaccgcaggagcccagagcgcgggcgccgcagaggagttgggagccggcgcaaaagtttcctcccaactctggccccgtgcgccgccgccgccgccgcccactccagcccccggcttggggccggccctgccaacgccgccagggccagggccagggccaggaccagcgacagggcagggccggcagtttcgctttggtgggcgcggagcagccgcctgggccgggcagggaggaggagccggtgccgcggagctgccgcgtcccgggccgccgggcacctgggaggtaacccctttccgcggccgcccctccccgattcccgccacctgccgcctggccaggtggaaggggcgctgccgcgagcctccgggcctcagggtgttccggggagcggcgccccgggtctctgggcccacccgccccgggcgtcctccgagagtgggggctgcgcccgcggggtcagacacctgttcggcccg

SEQ ID NO: 4468 - DNA, 506 bp, Homo sapiens
  source 1..506: mol_type = other DNA
aactgttagctaaacagttttcacgcctccatttaaaaatagttggcataatgataacttgatggaatccaatttaattacctgaagaaattatttgctgaagaaagtctttcctctttttagctgacggtgtgtgtcgccgccacgcaccgctgcctgttcgggctgagctgcttagggggaacaaggcttttccccccgtccccccggggtctcccttgggtgggggcgacacggccaaggcggcgcgccctgggggtgcccgggggcgcttcttccccagggcgttacgcaccggcggcccggcgcggaggtgcgcgggggcgatcgggcgccgccttaacttcgatcctgcggcggcccgagagaagccgtcgccgccccgcccgagctgggtgccgcggcactctgctctgcgccgcgcgtctccgcggctgcctctttaatcaggaacacagaaggggcgggccctgagccggcgcgtaatcggatagctctgccgcggc

SEQ ID NO: 4469 - DNA, 429 bp, Homo sapiens
  source 1..429: mol_type = other DNA
aatcacatgagtctcatttcgaagcctcacggaagtcagcactgaaagtcgtgggtgacccatcgcccacactggggactggcagtggggggtggcaaagcagaaaatcgagatttggaaatttatgtttatcactttttttttttttaacgttcagagctcagggcaccaaaatatagctaaaattgaatccatttaaacagaaaacatacgtgtgtgtgtatgaatatatatgtgtttatatatgcatataaaatatatacatacacatatatttttttttcgtttaaatgttatacatacacacacaccaaagtagttttgctaggttccgagggctcttccacagacccttctgagttgtagcaataacaagtttaggtttccttaaaatctccattatcagaataaatgaactactgatcctta

SEQ ID NO: 4470 - DNA, 595 bp, Homo sapiens
  source 1..595: mol_type = other DNA
tgcaatgtctggcgttgctctatctacagcttaacatgtattaagctgaattaagtgtaaataaagcacattttaacctttccttgctcgtgaaccgctccccggaggccgggctcgccccacacgagggccttgggagacggcaacggggcgctttcccctccctctcgaaagggccccgggcccggcctccctccctcccgcggcagccgacacgctgcgccacgtggccccggccccgggcggagaaacctccccggagcacctggaggccggcagggcttttcaggtctccgaaacccatggtgtcggctgtatccgagagctggggagcagcagaaagagagcgcgcaaattgtgggcgccccgtttccctccagaccgaaggttaaaggtcaaagtacttttgcattcgaattgggggccctgaattaaatggcccacaaattgtccatggaccttgtaaattaataaaataggcatgtcaccgaagacgcccggcctcgaggctggggccacttccggcggctccgggctgggccgacctcagctccgccctctggtcggctgacgtccgttctccaggcccggctga

SEQ ID NO: 4471 - DNA, 483 bp, Homo sapiens
  source 1..483: mol_type = other DNA
aaacaaaaataacttgtttattcatcaaaaacagttaacgttacacttaacagagttgtgtctgatccaagaccttacagttcaagcactggatcccaataaacaacgttttgttatttgcaatgcacttttcaaaagtcgtttttctcaatttcccgttagttaaaggaataaaaggcttagtcttaaggcctaagtcatctcccggggaataaaacggcctcctcctctgagagggaaatgtcctgaattttccctgcagagggaaggtcacctgaaagccccccatctgccggctctcaggggcttccgaggcggcggggcgggaggcggcgcccagccccggagccgcggaggctgttctgctactaggaggccgggtcgcttattcaatatggcggcctcggctaactctgtcagccgggcctggagaacggacgtcagccgaccagagggcggagctgaggtcggcccagcccggag

SEQ ID NO: 4472 - DNA, 468 bp, Homo sapiens
  source 1..468: mol_type = other DNA
ggcttagtcttaaggcctaagtcatctcccggggaataaaacggcctcctcctctgagagggaaatgtcctgaattttccctgcagagggaaggtcacctgaaagccccccatctgccggctctcaggggcttccgaggcggcggggcgggaggcggcgcccagccccggagccgcggaggctgttctgctactaggaggccgggtcgcttattcaatatggcggcctcggctaactctgtcagccgggcctggagaacggacgtcagccgaccagagggcggagctgaggtcggcccagcccggagccgccggaagtggccccagcctcgaggccgggcgtcttcggtgacatgcctattttattaatttacaaggtccatggacaatttgtgggccatttaattcagggcccccaattcgaatgcaaaagtactttgacctttaaccttcggtctggagggaaacg

SEQ ID NO: 4473 - DNA, 310 bp, Homo sapiens
  source 1..310: mol_type = other DNA
ttgcagtgaaccgtgatcacaccactgcactcaggcgtggtttggatcacctgaggtcaggaattcgcctgtagtctcagctactccagaggctgaggcaggagaatcaattgcactccagcctaaacgttaaaattcacacttaaccaatatgtgatcttgccttttcataagcaaactgggtgaccctccaaagctagtagcagtggtttcttacacaaacataggctggtcgaaagaattaatttgtacagtactacactgtcatttcaaaagccagataaaagtggaatgaggaatgcagccgttc

SEQ ID NO: 4474 - DNA, 407 bp, Homo sapiens
  source 1..407: mol_type = other DNA
gacgcaaaagcaataggcaagtttttttgttgttgttctttaaagggacaaaatcacaagaagtagctcattttaagattatttttacattagacataagctttgaaaccttcttatcgcagattataatttcatattcagttgctcacaactatattcgtaatggggtagcgcagtgaatataattgcatgaccttagatctttgttttctcaatttgtcaaagggggacaataataggattcattcagagttactctgaaaacggtgcctagcacagagcaagcgctcattgaacagcagcttttgtgagatgcagccccggagaggggaggaaggggctcctccgcccgggtgggtgggcgggcagggggcggtcccgccgctcctgcgtctgacgtcaaacct

SEQ ID NO: 4475 - DNA, 426 bp, Homo sapiens
  source 1..426: mol_type = other DNA
agagaaaacttcccctttcctctgcagaagtcaggactgcccatccccgtggttgacaaacaacggaatgcccagtcatactttctgaacttttgagcaaaccggcttgtgctttcctcaaggcaccggcagggaggacacaggccggggcagagcgcccctgcgcgggggattcctgccactccgcgccagcctgcggcgcaaaccttctcagccgcagtcccacccgctgctggcaatctgaatcctttatatttacatgcaggaagcaaatataatgctgcttgggctgctgcatcacacccgaagccccgctcgggcgcgctctcggggggcggggcgcacgcccgctccgcgcgtccccgcgccgctcgctcccgcgcgtccccgcgccgctcgctcccgcgcgccgcctcagcatcctca

SEQ ID NO: 4476 - DNA, 574 bp, Homo sapiens
  source 1..574: mol_type = other DNA
actatattcgtaatggggtagcgcagtgaatataattgcatgaccttagatctttgttttctcaatttgtcaaagggggacaataataggattcattcagagttactctgaaaacggtgcctagcacagagcaagcgctcattgaacagcagcttttgtgagatgcagccccggagaggggaggaaggggctcctccgcccgggtgggtgggcgggcagggggcggtcccgccgctcctgcgtctgacgtcaaacctccatcagggttgcaacgccacgttgccttggagcctgcgtgagtggagtcgcgactcggggcccgcgtcctgagagacgcgctcccgcgccgcttctcgcctccggaccgcaggggccgaagtcgcctatttctggctccgcgggcagcggggccgtggcgctcggacggtctgggattcgggcgccgccgcggaaccggaataagaagggagagcgcccggctcggtcctcggtctccaccgcggcccggaaggaatccgggcagcctccgcggaggtgagtgccgcggcgggggcggggcgcggccggggcgacg

SEQ ID NO: 4477 - DNA, 148 bp, Homo sapiens
  source 1..148: mol_type = other DNA
gtagctggggctgatagatcattttcaacatgacgatttagcactcttctcctcgaagtaaaaagtctaggatgtgatacgggctgccgctaagcccaagctcgtcccagccatgacagcttccccgagaagctgcgcttctcacgag

SEQ ID NO: 4478 - DNA, 257 bp, Homo sapiens
  source 1..257: mol_type = other DNA
actttggtgacagcagtttctgtcaggaagcagaagtagaagccttcttccaagactgattggaaggtctactcttttaagagttgtaataaaagtttgcttgacctacatgaaatgcaaggacctggctcctgctcctgttgccagaggcctgtgcaggtcctcactcacccgcgatgacgaatttggccatggtcgagagagactcagaggcagggaccgcggcttcgcggtttcctggcaaccacgcagccaag

SEQ ID NO: 4479 - DNA, 167 bp, Homo sapiens
  source 1..167: mol_type = other DNA
tttgcttgacctacatgaaatgcaaggacctggctcctgctcctgttgccagaggcctgtgcaggtcctcactcacccgcgatgacgaatttggccatggtcgagagagactcagaggcagggaccgcggcttcgcggtttcctggcaaccacgcagccaagctcgt

SEQ ID NO: 4480 - DNA, 547 bp, Homo sapiens
  source 1..547: mol_type = other DNA
tttttcatcttttagatgacatgaagaatgcttacaagctctatctgagggacatagccttgtcactcccacagctgccgcgggagctgccatcggagcagccttctgggaggtgaaggacacttctcaaaggatgtgcacttgccacaatcatattggtatgggacattatatgatttccttttattttcctttttttctgaccaaaaaaataggtatttgtggccataaaattcttgtgaccaataaatgaaattctacacatttttatgtgtctaaaatcccaagactagtatctgacacatggttagcttcaatatattttagctactgctattatcattattggtagtactattaaacattttgaaacacctactcaacagggtggggtaaaaggatgttgctgcagtgagctgagatcacactactgcactccagaggaatgtttgaaaaattaatatcaattctttcctttcagattttgaaatcagaatggacactaacaggaatcaagtgctaccactttctgatgtggatacaactt

SEQ ID NO: 4481 - DNA, 179 bp, Homo sapiens
  source 1..179: mol_type = other DNA
tgcggcagtacagcctaggtaattgctgcaaaacaatttggttggctttaaaaataacaggctttaatctttttaaagcatgcttttagaagcctggccatcaatacccacaccgtattggaggggactggcttaccttccactgtgagagttaccggaagctcagcatccgtgatggt

SEQ ID NO: 4482 - DNA, 501 bp, Homo sapiens
  source 1..501: mol_type = other DNA
ccgaccgtcagcctcagggccgccgcggcgacgcgcgaccccttccctctgaggggcgcgggctccggacgcgccgggctctgccaggcatctagtggagggtcggaggtcggcgaccagcccgagcccagccgtcccgggagctggcgcgagtgtcgccacgaccctccctgtcccttgcgctcgcgctgcccggccgccgggcggccgcctcagccccaccgccttgtaaggcagcagggagatccgcagcgtgccaatccgcgcccgccgccagggccaagccccgccccaggctctgctccgggctccgccccctccacgagctggagtgatgccctggaagggaattgttactcccgtggagaagtccccttttcctggcagtcgtctgcactgtacagatttttttttttcctttttagttgactgaaacaaaacaaaacaaaagggggatgtctgccttcttggggggtgagccagacagactgacaaacaaac

SEQ ID NO: 4483 - DNA, 367 bp, Homo sapiens
  source 1..367: mol_type = other DNA
atgtgagttccataaaagaagggactctgagatttttgtagaatgaatacatgaatacaggatttaaactgggtccctaaatgccaaggactccatttttagactattttactggtcaatgagattcaagcataacttggctatgtctgaaaacatggcggagtatctgacagagtcctgctcagatttgaagagagtggagattctgaataatgaccatgtccattttgaccagagcagagtgttctttctggtctcatgaacaggctcatgattcctactattcccagtgaggggaagagcaggaatgattgctcctgagcacgaggaagaaatgaaatatcaaatggtacagcatttcccacac

SEQ ID NO: 4484 - DNA, 562 bp, Homo sapiens
  source 1..562: mol_type = other DNA
cccgcggggcggggcggggactgtgcgcaagcggggggcgggcgcaggccgcggtctcgctccgctccccgcaccctggcagcccgtggggagaggacctccccggcaccgcctcgcgcgggtccctgccccgtgcccaggcggaggcggggtggccactgtccttccttcccgctccgcgccctcggcggcttccccgcggccccctgcgccgcgccccctccaggaggcgtcctgacccctcccgaccgtcagcctcagggccgccgcggcgacgcgcgaccccttccctctgaggggcgcgggctccggacgcgccgggctctgccaggcatctagtggagggtcggaggtcggcgaccagcccgagcccagccgtcccgggagctggcgcgagtgtcgccacgaccctccctgtcccttgcgctcgcgctgcccggccgccgggcggccgcctcagccccaccgccttgtaaggcagcagggagatccgcagcgtgccaatccgcgcccgccgccagggccaagccccgccccaggctctgctccgggctccgccccc

SEQ ID NO: 4485 - DNA, 655 bp, Homo sapiens
  source 1..655: mol_type = other DNA
gcaagctgccggctccagcttgcgcccggactcccgaccaggtctctcgctcggggtcagaaggaggcgcgggagggagggcggcggcggcggcgcccgcggggcggggcggggactgtgcgcaagcggggggcgggcgcaggccgcggtctcgctccgctccccgcaccctggcagcccgtggggagaggacctccccggcaccgcctcgcgcgggtccctgccccgtgcccaggcggaggcggggtggccactgtccttccttcccgctccgcgccctcggcggcttccccgcggccccctgcgccgcgccccctccaggaggcgtcctgacccctcccgaccgtcagcctcagggccgccgcggcgacgcgcgaccccttccctctgaggggcgcgggctccggacgcgccgggctctgccaggcatctagtggagggtcggaggtcggcgaccagcccgagcccagccgtcccgggagctggcgcgagtgtcgccacgaccctccctgtcccttgcgctcgcgctgcccggccgccgggcggccgcctcagccccaccgccttgtaaggcagcagggagatccgcagcgtgccaatccgcgcccgccgccagggccaagccccgccccaggctctgctccgggctccgccc

SEQ ID NO: 4486 - DNA, 464 bp, Homo sapiens
  source 1..464: mol_type = other DNA
caactagacaacgcggatcccactatttctgtttctgagatgggtagatacaagttctgacccagtaattcgctcaaagtcgtgcagctagttagctggcagcgtccttgcacatctaattgcagatgcatctgcatctacattagagtaaatgttccaattatactcatacaatgaatgctatgaatctggccaacagaattcatgtttaatattccttggcaaatactgaatttcaatctgtgcttaagagtagaatctttctgcaatcattccaaaagtggaagctcgaaaacgagaaatcgagcaagctgccggctccagcttgcgcccggactcccgaccaggtctctcgctcggggtcagaaggaggcgcgggagggagggcggcggcggcggcgcccgcggggcggggcggggactgtgcgcaagcggggggcgggcgcaggccgcggtctcgctcc

SEQ ID NO: 4487 - DNA, 508 bp, Homo sapiens
  source 1..508: mol_type = other DNA
tgttataatgtaacacacacaaaataagttcacttgagtctcaagtaccaaattatatggttggccatccccccagttgaaatagcatgggggtcaagattctattaatagtatattctcctaaaggtcctattagagacaatgatagctaatatttagtattcacctaatagtgtcagatactatgctaggtgagttaccaaagatattttgactctcaactagacaacgcggatcccactatttctgtttctgagatgggtagatacaagttctgacccagtaattcgctcaaagtcgtgcagctagttagctggcagcgtccttgcacatctaattgcagatgcatctgcatctacattagagtaaatgttccaattatactcatacaatgaatgctatgaatctggccaacagaattcatgtttaatattccttggcaaatactgaatttcaatctgtgcttaagagtagaatctttctgcaatcattccaaaagtggaagctc

SEQ ID NO: 4488 - DNA, 256 bp, Homo sapiens
  source 1..256: mol_type = other DNA
ctgcatttacagtcatgaagcttgtctgtggacaattcagagccaagaaatctttttaaagaattgaaagacttaagcatgtttaaataaaggacaactctttctttacaagagaagtgagtcatgagacacgtctcctttaaaggctgtaacccggcgggtggattacctgaggttcaggtgcctgtaatcccagctactatgccactgcactccagcctgtcggtttccagccacggccccctgctgggtttgc

SEQ ID NO: 4489 - DNA, 672 bp, Homo sapiens
  source 1..672: mol_type = other DNA
tcggtttccagccacggccccctgctgggtttgcgcttggaggcctccgagggccgtcgacgtcagccatggtccgggcagagccccgcaaggtgccacagtatcggggccagcgccccccggaaaagcatgctccgctggcggccgccaggtttctccgcggagtctcgaggaaaacccgtccccacgggggtcccacgacgcccccgggtcccaggccccgggacgttggcagaggcgcagcagaccttcttccccagcccgcacggctccagcggtccggccgcgtcccagcccgggctgcccgtcccccgtctcccggcggcgtcggaaagttcccggggctggcggcggtcaagagcagagccagggcagccgcagccgccttctagcccgccgctcaccgccgcaggggcaggcctgagcgggggtttccaccaagtcgccgacacccctcgggaattcccccaggctttaccgatgcgaaagccgcggtggagtttagaccactcctcccggcgccgggctcagcccgcctcccgaagaaacccgaaggtcttcggcaagttccgtccccagcgcgggggcggggccgctcgagctgctccgggcctagctcggctgtttccgtgcgcggccgctgcgcactcggcactgggcggcgctggctgg

SEQ ID NO: 4490 - DNA, 701 bp, Homo sapiens
  source 1..701: mol_type = other DNA
gcttggaggcctccgagggccgtcgacgtcagccatggtccgggcagagccccgcaaggtgccacagtatcggggccagcgccccccggaaaagcatgctccgctggcggccgccaggtttctccgcggagtctcgaggaaaacccgtccccacgggggtcccacgacgcccccgggtcccaggccccgggacgttggcagaggcgcagcagaccttcttccccagcccgcacggctccagcggtccggccgcgtcccagcccgggctgcccgtcccccgtctcccggcggcgtcggaaagttcccggggctggcggcggtcaagagcagagccagggcagccgcagccgccttctagcccgccgctcaccgccgcaggggcaggcctgagcgggggtttccaccaagtcgccgacacccctcgggaattcccccaggctttaccgatgcgaaagccgcggtggagtttagaccactcctcccggcgccgggctcagcccgcctcccgaagaaacccgaaggtcttcggcaagttccgtccccagcgcgggggcggggccgctcgagctgctccgggcctagctcggctgtttccgtgcgcggccgctgcgcactcggcactgggcggcgctggctggctccctggctgcggctcctcagtcggcggcggctgctgctgcctgtggcccgggcggctggga

SEQ ID NO: 4491 - DNA, 659 bp, Homo sapiens
  source 1..659: mol_type = other DNA
ttgccgccaagcgggctattacgccgcttctgaccccaccgtggagacgcggggactagcttttctctcccgctaggagagcccagggcaccccatgctctccctgtgcacccgcgggctcccgcccccacagcgcctccctcggcggcgggggaaacggattaagtcgtccgtgtaccctggggacgcacgagggaaagccccggtcccccctccaccgcgccacggcccggccccgccctcgccgtgagctccgggggcacctgccggaggctgggtgccgggagaccggaaatgcgtggctccgggccggggccgcccgcccccgcgtcgcgggctctttaaggccggcggttttcgcagccagcccggggcggggaaagcggagcgcgcgctccacgcgggaccgcctcccgggccgtaagtaccggcgtggcggcgcctcagcccggcctgggcgagccctgggtgctccgccgggcagctcacggcgccccgtatggcctggggatcctaagaggccctgtgacccccctcgccctcacccctggagggttgccgcagctccggggcccccgggcaggaagggcgcactggtcgtcccgggaggggggagttcggggaggcctccgagtccccgctgtccccgcgagccgctt

SEQ ID NO: 4492 - DNA, 642 bp, Homo sapiens
  source 1..642: mol_type = other DNA
gcctgccccgggaggatgccggtccccgcacggtcccactggacccactccagccgcgcgctctgccagggcctgcggccagggtaccaggccctcggcaccttccacgtccggggcactggagtctgcagcgccgcctggggccggggctggagccgagcgcacgcccagagctccgcgcttccgactgcagcccgacccccgccccactttaaaaacttggactcgggcgccacgtgttgccgccaagcgggctattacgccgcttctgaccccaccgtggagacgcggggactagcttttctctcccgctaggagagcccagggcaccccatgctctccctgtgcacccgcgggctcccgcccccacagcgcctccctcggcggcgggggaaacggattaagtcgtccgtgtaccctggggacgcacgagggaaagccccggtcccccctccaccgcgccacggcccggccccgccctcgccgtgagctccgggggcacctgccggaggctgggtgccgggagaccggaaatgcgtggctccgggccggggccgcccgcccccgcgtcgcgggctctttaaggccggcggttttcgcagccagcccggggcggggaaagcggagcgcgcgctccacgcg

SEQ ID NO: 4493 - DNA, 593 bp, Homo sapiens
  source 1..593: mol_type = other DNA
ggccccctcccatggccagctcttggggcgggggactggtacagctggttctaacgtgcagccgcgctgagagcgcagcgggcggcctgccccgggaggatgccggtccccgcacggtcccactggacccactccagccgcgcgctctgccagggcctgcggccagggtaccaggccctcggcaccttccacgtccggggcactggagtctgcagcgccgcctggggccggggctggagccgagcgcacgcccagagctccgcgcttccgactgcagcccgacccccgccccactttaaaaacttggactcgggcgccacgtgttgccgccaagcgggctattacgccgcttctgaccccaccgtggagacgcggggactagcttttctctcccgctaggagagcccagggcaccccatgctctccctgtgcacccgcgggctcccgcccccacagcgcctccctcggcggcgggggaaacggattaagtcgtccgtgtaccctggggacgcacgagggaaagccccggtcccccctccaccgcgccacggcccggccccgccctcgccgtgagctccgggggcacctgccgg

SEQ ID NO: 4494 - DNA, 467 bp, Homo sapiens
  source 1..467: mol_type = other DNA
ctgagatgagcggatcaccggagatcaggagttcaaggccagcctggccaacctgcagtgagccgagatcgcgccactgcactccagcctggcgacaggcggagactgcagtgagccgagttcgcgcccttgcactccagcctgggcgacagagagagactggccccctcccatggccagctcttggggcgggggactggtacagctggttctaacgtgcagccgcgctgagagcgcagcgggcggcctgccccgggaggatgccggtccccgcacggtcccactggacccactccagccgcgcgctctgccagggcctgcggccagggtaccaggccctcggcaccttccacgtccggggcactggagtctgcagcgccgcctggggccggggctggagccgagcgcacgcccagagctccgcgcttccgactgcagcccgacccccgccccactttaaaaacttg

SEQ ID NO: 4495 - DNA, 377 bp, Homo sapiens
  source 1..377: mol_type = other DNA
ggatggtctggatctcctgacctggtgatccgcccgcctcgcccgcgcccggccgggattgtttttaagggttaaataaatataccacagttggaacactgtctggcacatagtgcttgccaaatggtgctgtttttagtacaagaagagaagacccacagccacaactctttggagagtggaccagggttacaaaaacagttaacaatttgggtgtaaccaagtttaactctttactaataacggctttctacagaggcgcttccagtaggaccggctgggcagctgccaggcgggggcggggcagcaggtcacgtgcctggcttcgaggcgggcgccgcaggtgaccgcaggtcgcgttccggttggcaggcacc

SEQ ID NO: 4496 - DNA, 447 bp, Homo sapiens
  source 1..447: mol_type = other DNA
ccgcgcccggccgggattgtttttaagggttaaataaatataccacagttggaacactgtctggcacatagtgcttgccaaatggtgctgtttttagtacaagaagagaagacccacagccacaactctttggagagtggaccagggttacaaaaacagttaacaatttgggtgtaaccaagtttaactctttactaataacggctttctacagaggcgcttccagtaggaccggctgggcagctgccaggcgggggcggggcagcaggtcacgtgcctggcttcgaggcgggcgccgcaggtgaccgcaggtcgcgttccggttggcaggcaccggccagggccagcggccttcagtcggtaggcggcggcggaaggaggaggagctccagccgcgctctctcccggcagtggctgtgcttgggttccccaccccttttaaataag

SEQ ID NO: 4497 - DNA, 361 bp, Homo sapiens
  source 1..361: mol_type = other DNA
aacatggtggcgggcgccagtaatcccagaggttgcagtgagccgagatcgcgtaaccgattaacactttgttgggcacacagtacttgagcagttctttcaaagaagcactgaagcgagtcctgcacccagggcgcgggcagagaactccggagggacttctggcaagggcttcccgcccgggtgcccagagcggcatgcagcgctccttggctgcccgctcctggcggggccagagggcgccgggggaaaggccgagcccgcggggcagtgggcggggacgcgcggagagcttggcgaggcggcccaccaaccgcgcccgggcctgagggggcggagccggggcggggcttcccggcgg

SEQ ID NO: 4498 - DNA, 699 bp, Homo sapiens
  source 1..699: mol_type = other DNA
gtaaccgattaacactttgttgggcacacagtacttgagcagttctttcaaagaagcactgaagcgagtcctgcacccagggcgcgggcagagaactccggagggacttctggcaagggcttcccgcccgggtgcccagagcggcatgcagcgctccttggctgcccgctcctggcggggccagagggcgccgggggaaaggccgagcccgcggggcagtgggcggggacgcgcggagagcttggcgaggcggcccaccaaccgcgcccgggcctgagggggcggagccggggcggggcttcccggcggacccgggcggggcgggagagggcagccagcctgcggccgtgagtccgctgtggtcgccgccgcgcgcggttccgtgctcgccagaggtggggaggagccgagcagggcacgtcccgagagcgtcgccaccgcccccaggagtccactggagcgcggagccccctgcaggggaggaggcgagcggcgggcgggacgcggcggccggcgctcaccatgcagtcccggcctggccagcgccggctgctcgcggtgctgtgaggcggcggggtcccacggcccccgcctcccgccttccttgctgccaggcgcgctcgccctccgtccggctcccggccccggggagaacgcacggcctgcccctgcccggctccgtctggatcatgcgggggg

SEQ ID NO: 4499 - DNA, 481 bp, Homo sapiens
  source 1..481: mol_type = other DNA
aaggaaattttttcttaactcaaagcttaaagatttgcttataggaatcagagttttagatttctgttatatatatacccctcaggaccacagtcactgcaggtgggatgtgggcggtcttaccaggcagtcctgcccgcgtgcacacaccaagtgggggtgaattttcaacctgcgtaggaaaggacagtgaaaacggattttcaatctccagaatagtcccacttttggaaagaacttatttgagtaattaattcccttagacaagggagctgttctaagtgacattttccaatcgcaaacacccattttggcgttgggtggagcagtgaggagactccacgacacacgccagcctggcgggtgcggtcaggccttgcctagctgccgggtccctcgggcaggaaagactcgtcctcgcggcctggaactgtgtgtccggctctggctgcccgggccgccggcggaagcatttcagagt

SEQ ID NO: 4500 - DNA, 422 bp, Homo sapiens
  source 1..422: mol_type = other DNA
caaaggcctagaaataagtttcttaggaatttggttttattttataacaagctaagagatcatgtttttgtgtttcaaacatattactttttctaatttcctcaaacttagattttagctaagagaaaaatcagacccaatattgaattttttttaataaaagttcgaaattctgtgaactctcttaataaaatgttccaatttcttacaccctttcatgatgacgttctcttaaaggactaacttgaaattttcaacattcagttaagcatcagtattcaatattgtggcacgtaagtaatactgtagttctgacagattaatttatatttatctatacgaataaaaactatatgtgaaatagctgaagctccacttccattataaatagacaatgtcacgttttacaaacattctcgccc

SEQ ID NO: 4501 - DNA, 389 bp, Homo sapiens
  source 1..389: mol_type = other DNA
tctcattaatcagactatagtccatgagataactcctgctctgagtggttatataatatcagtgggccttctgagtacaggcggcctgaatggcctcaagggaaagcaatctataaagtagtatacggtacttcgaaacctttcccttgcttgttatcgtaagttcactaccagggactgattaaaagctgtcttaaagcattgggttaaagccaagataagaatctagatttgtgtccggccctggactggaaaattgtgtgcctggagcaattctataatggcatagatctttcccagaaaattcacagggaataattccagtgaatgcaggatgttaaagagatgcataaaatccccttacagcagccatcctgctatatagactg

SEQ ID NO: 4502 - DNA, 371 bp, Homo sapiens
  source 1..371: mol_type = other DNA
tgattagttatctcaagaaatgtctgcgcttaggcaaagttaagaagtggatctcattaatcagactatagtccatgagataactcctgctctgagtggttatataatatcagtgggccttctgagtacaggcggcctgaatggcctcaagggaaagcaatctataaagtagtatacggtacttcgaaacctttcccttgcttgttatcgtaagttcactaccagggactgattaaaagctgtcttaaagcattgggttaaagccaagataagaatctagatttgtgtccggccctggactggaaaattgtgtgcctggagcaattctataatggcatagatctttcccagaaaattcacagggaataatt

SEQ ID NO: 4503 - DNA, 443 bp, Homo sapiens
  source 1..443: mol_type = other DNA
gtccaaaatctgagccagctgccagcagactcgagttgcagtttgaatccaaaggctgcctactatagagggcaatctgctttcaaagtccactgatttaaatgataatctcattaaaaaaaacaactatttgatcatagagataaaataaatttaaaaataaataaaacatcacaaatagagttgataccctatttaattgaagacatatttcccataaccatattttctttcaaggatctcctggcaataggagagttagatgactcactgggagttgtcagatctagatggatcacatccatctagtttggatggttctgttacacaaaccattttggttttacttgctagattattgcaaggaagagtaaattaagtaaatagcttttgtaggactccatgactggtatttggagtgatagcatccctaactcctctct

SEQ ID NO: 4504 - DNA, 304 bp, Homo sapiens
  source 1..304: mol_type = other DNA
cagggattgtcaggcctctgagcccaagccaagccatctagtcttaagtgatgacattccaccattgtgacctgtttgtagcttgaaccggcaccctaactatgtaggagccagagcttccccagcacaaaaaactctggggaaggtaaactcctcccatcctcttggtttttcaattaatcatttagatgggaaacatccaccctccctcaacccttaatgggggtgggcgtaggggagtgtatttttaaaacaaatgattttaattcattcactgtttcctagcaaccaggaaaaagcatgt

SEQ ID NO: 4505 - DNA, 252 bp, Homo sapiens
  source 1..252: mol_type = other DNA
tttagaaaattctatatctagggttttgttagtgtctttcataatatgacctcaggtaatcaagtgacttacttggcctgcccctagtctagtggtgcagggattgtcaggcctctgagcccaagccaagccatctagtcttaagtgatgacattccaccattgtgacctgtttgtagcttgaaccggcaccctaactatgtaggagccagagcttccccagcacaaaaaactctggggaaggtaaactcct

SEQ ID NO: 4506 - DNA, 376 bp, Homo sapiens
  source 1..376: mol_type = other DNA
ctccgcccatcccacgggaattggcgtgtggcgagctcggacctaccctgtggtcccgggtttctgcagagtctacttcagaagcggaggcactgggagtcctgagcttgtgagcggctgtggcgccccaactctaacctcaggctccaaggggcggccccggtccctggctgtggagggggtaagccgcagacgggcgtctgcaggcccttgaagccgatccctcgcgtccgccagggggcgtggaggggcggagctccagcggccttcagaggggtcgctaggccacacggggcgagagggggctgggggaaacacccccgccagttccgggtgcctggagttgtcccagcagtaccgatccagccttgattgc

SEQ ID NO: 4507 - DNA, 419 bp, Homo sapiens
  source 1..419: mol_type = other DNA
gagggtccaggagttcgagaccagcctgggctgctcacctgtaatcccagctactcggaaggctgaggtgggaggatctcgtcaaggctgcagtgagcggtgatcgctccactgcactccagccagggcaacagagcaaggaaaagaaaataataagaatcccattcattatcttctaatgcaaacctaggcgaccccgcgctggccgggttccattaccgcccctcgggggcgcgctaggcagcgggccggccaagctgccgccgcccagggcgccctgtcccgagattgtcaaagttcggggtggtgcagccccagcgcgccccgctccccggcctgcaggtcgggattcgggactgaatctctgccgggcggcaacccactccgcccatcccacgggaattggcgtgtggcgagct

SEQ ID NO: 4508 - DNA, 382 bp, Homo sapiens
  source 1..382: mol_type = other DNA
agggctgcaatcaaggctggatcggtactgctgggacaactccaggcacccggaactggcgggggtgtttcccccagccccctctcgccccgtgtggcctagcgacccctctgaaggccgctggagctccgcccctccacgccccctggcggacgcgagggatcggcttcaagggcctgcagacgcccgtctgcggcttaccccctccacagccagggaccggggccgccccttggagcctgaggttagagttggggcgccacagccgctcacaagctcaggactcccagtgcctccgcttctgaagtagactctgcagaaacccgggaccacagggtaggtccgagctcgccacacgccaattcccgtgggatgggcggag

SEQ ID NO: 4509 - DNA, 370 bp, Homo sapiens
  source 1..370: mol_type = other DNA
ctttccaactccaggaaaactgggctgggatttgacagaatttaaaactgcatttccctgttttctgcagttaactgcactgcgctctcatttaagtgcatttacttaatctcaaaaaagtattaagaagtgagtccttttattaatccgactttctaaggcctaaataaatgagcaatttgcttaagatcatgctaactccggttcagtgttgaccccgcatgcgtgacgctcacgcgcgcagtccccctggcttcttccaggaaggctgaagcggcaaaagatcaggacgactcgatctgggctggactccttctgcctgagcatctgatccgagcgtcggccgggctgggaggagccggcccccggg

SEQ ID NO: 4510 - DNA, 646 bp, Homo sapiens
  source 1..646: mol_type = other DNA
caaaagcatttaagaggcaatttatttgtatcattcttcaaagatccttcatattcattatctttttaagcataagagaattgggctgtcatttttagttctcatatgacacatgaatacactgagagttagattaagtgaactgtctctaactataatctgtcactgatgtttctaatgcttagagtgcctgacacatagtaggtgtcaataaacattcgttgactcaataaatgaatgaatctaattcgtgacagagctgggtctagaattctctagctttcctggtgaggtgccactggcaaccccgcctcatagcgacacaccagtgaggaaggcccgcctgtcccgccgcccgggcactggcctcactttgtcgcgggaggggaccagggctctggagaaggcccgggccagcggctgggcggggctctccgaggctcccacctcgcggtccccgcctggcggccggcggctgcggcagaaggcgaagcggtcgtgctccccctcccggacactgcggcggtggcagcgccagccccgccgcggccgcccacgggctcgcggagtctggcgggacctgcgcggggcgggacctgcgcggggcggggaggaggggccgaggcggagctgctgcgctgggagc

SEQ ID NO: 4511 - DNA, 594 bp, Homo sapiens
  source 1..594: mol_type = other DNA
atgcaaatttatcttaattcaaaatacagtataaaaaaaaaaaagaaacatatcatctgtctctcaatttcccattcactggttcaggttgctaacaatgctgtaaaaattaacttatttattgacatttttctccttcccttttccccaggaaataaatgcaggaaattattccacacttaacctcgggcactgtaaaatagggatattcaactgctaatttcaagattatgccaaagattgaattctctgcctgggccctcagggactgaaaagccccaggaccaagctggttgccacctcctttttctttttctcttgtaaggaaaacatggccaagtgcataattataactgttaaaagggtattgaattttctgtaggaaaatatacataaatatatgcatttctttaatgaagatatttattttggaatataaataagcaatatgcgatagttaaaaatattgtaattatctgccaatgacaaaacatcaacaaatctctgatgtccttaatgcagataataaaaattcccataaactagtatttagtcatgtccagttgtgtgtgtgtgtctggcattaacacaaag

SEQ ID NO: 4512 - DNA, 563 bp, Homo sapiens
  source 1..563: mol_type = other DNA
aacaatgctgtaaaaattaacttatttattgacatttttctccttcccttttccccaggaaataaatgcaggaaattattccacacttaacctcgggcactgtaaaatagggatattcaactgctaatttcaagattatgccaaagattgaattctctgcctgggccctcagggactgaaaagccccaggaccaagctggttgccacctcctttttctttttctcttgtaaggaaaacatggccaagtgcataattataactgttaaaagggtattgaattttctgtaggaaaatatacataaatatatgcatttctttaatgaagatatttattttggaatataaataagcaatatgcgatagttaaaaatattgtaattatctgccaatgacaaaacatcaacaaatctctgatgtccttaatgcagataataaaaattcccataaactagtatttagtcatgtccagttgtgtgtgtgtgtctggcattaacacaaaggagggatggaggcaattaaaatgcctgtcaggcatttggtacatcattctcgaaaattctga

SEQ ID NO: 4513 - DNA, 443 bp, Homo sapiens
  source 1..443: mol_type = other DNA
gataatatatctaacagcaatccaactataaaatattaatatatgtaacatataagcatttgactcatttaatggactgtaataaaccacattttgcaattaacctttgtattcctgctttaggaaaacaaacaaggtttatttcttgtggttatcatataaaaataacttctcatatctaagatcactcctgagtgcagctcggaggccgcgcaggggacgagcgcctgcgatgcggagcgtggacttcttgggccgtacccctgcggctcaagctgccccggattcgcttctccggccgtgcagcccggcgcgggccgctgtccacagtgggaggtagcgggtgcgggggcggcgaggcggaccgctgctccgagcgcccccctcctcgctcctcccctcctcccgcagccatgttccacgcgcggggaggggtgggggga

SEQ ID NO: 4514 - DNA, 350 bp, Homo sapiens
  source 1..350: mol_type = other DNA
ggatatgggatagaaccttctctagaagaggagttttataaccttaatttttctatgacctgcctccttcattttctgagcctcaacagagaagagggtaatataataataactaccattttgtactgagcaccaggcatcctgctgggcgcatttaatacaaccctaaagctttgccaggtcacccagctagtatctggcagagccagggttgaggcccgtgtgccccgccccgccccaggcggacggctgacagcgccccaccccaggaggaggcgggacttcctcaccgcagagtggctgcttccggtagaatccggaacaaaactgcgcgcccaatcggggtgacg

SEQ ID NO: 4515 - DNA, 326 bp, Homo sapiens
  source 1..326: mol_type = other DNA
caacagtatataaataatgtggtggtgaagttaatttgaatcacatttggttagcatacaaatatgtttatgaatgtagagttagctgtgctaaaattaaatgaaaagtcaagcaaactacccagatagtttatttcatgagtaattgttcaacggatgtacttgaacttgatcggattaattcgttctacttgctattaccaataaatagcatgggctcccagagctatgcctggctaaagggtttgctcaaactattcagcctactttaagtaaatcaatttccaaggttacaaaataaacttcacgtacatttttatggttag

SEQ ID NO: 4516 - DNA, 498 bp, Homo sapiens
  source 1..498: mol_type = other DNA
aatggctattatccttgctatagagttcagttttaaaaaaatcgagttctttgggtgtcgctggccaactatctccacataaactccgaaaactgctttgtctgtttttttttttttaatcataaaaccacccagttggcctacttcagggcccctctgagggtcagaaaacaattgtgagaaatctcttactcgcctgtggagcggcgggcgaaagccgcggacgccagcagtagtcgaggccccggcgcggacgggttttgtttttctgtcacggaggtacaaaaatagcaaagcaggggtgggaagtctcctggccgtgtttttttttttccccctcgccagggatggcactgggatcccggggagccgaggtaaaccctgcaccagagttaagggagcgcttctgcaggccccgccccctgccggggtttcccgcgctgcccctcccccgttgccattggctagcgccgggccccgcccactgctcccagaccg

SEQ ID NO: 4517 - DNA, 363 bp, Homo sapiens
  source 1..363: mol_type = other DNA
agagcaagctcaaaaataataaaataaaataaagtacaattttgtattccacaaacttatgatcagctttcctgcctagaaaattcaaaactattcctggcttagattatgcttgcaaaaggtgatctcagaatgtgcatttttcaagtcctctgaactttaccataaaggacagtacacttcagcagttgccaaacttgctgactagaagtttgtaaagtccactgtcatcaagagaagggtctggcccaagaccttaaagaaattgaagcttcttaaaggaagatgctccaagtcagggtacagatccatctttccctttgccctaagaaagctaaagaagctgtgaggtcaaagcttgcc

SEQ ID NO: 4518 - DNA, 493 bp, Homo sapiens
  source 1..493: mol_type = other DNA
caaagttataaagtgcccattggtgtcttaaactttcaagttaccacaacttgcacagtgttgataattaaagttctaatgtattttgtctctctagtatggacaaaagatttatgtgataaataattagactttacaccatttagaaaataaatatctataagtatctacttttcttggaagctactttactattagaaaagttgttttgcaagaaggtaatccatttgatatgcttcattaaattatacaaagaaaattaaattataggaagtcatgttgaagttttttggcatagaattcactacaattaaaggatctgtgctccctagaagggaagccactttaagacataaattccaagttgaaatggaatctcttcagcagaactgtaattctgccctgaccctttagattccatttatgcatagagaactgtccaatccagccgcatgtgtcaagattctattaggcactaagtgaaatatatatg

SEQ ID NO: 4519 - DNA, 352 bp, Homo sapiens
  source 1..352: mol_type = other DNA
ccagttggaggtctgaggctgactttttaacttgtaccaggtgggatttaattttaaatgaaagaaaaatgtttcagatagcagggactgttaaaacattgaatattatagtccaatttaggctaaggaacagaataaatttcctaagagctgtaattgcttttttgtttgtttgttttaagaaatgaaaagaaaagattggagatctaaaagcagtctgtttcttctccaggttaaaaaaatatatacttcttatgactctggacttaaatttgactttttaaaaataagaaaaattaaagaagaaattacacgcctgtgtctttaacaaactgtaagagggcggtaatag

SEQ ID NO: 4520 - DNA, 361 bp, Homo sapiens
  source 1..361: mol_type = other DNA
agtaaagggctattaccgccctcttacagtttgttaaagacacaggcgtgtaatttcttctttaatttttcttatttttaaaaagtcaaatttaagtccagagtcataagaagtatatatttttttaacctggagaagaaacagactgcttttagatctccaatcttttcttttcatttcttaaaacaaacaaacaaaaaagcaattacagctcttaggaaatttattctgttccttagcctaaattggactataatattcaatgttttaacagtccctgctatctgaaacatttttctttcatttaaaattaaatcccacctggtacaagttaaaaagtcagcctcagacctccaactgg

SEQ ID NO: 4521 - DNA, 352 bp, Homo sapiens
  source 1..352: mol_type = other DNA
gaaaatgctgactttcttgtttaaaaaaaaaaaaaatttccgtaggccagctgtcccaggcctctgccagggagggaagacgagtgcaactccggaggcccaggattttggttgcgcggctgagcagagccggcctggttgcgtggagggttgttttctgcagctggagaccgcggagctcggagctttagatccggggagaagcgagaagctccccccgccccgctcccctcccgatttggactggagtccttttttattgttgaccaaccagtgagagagcgccccctcctcgggccccggccctggacccgcgggcgcggactcggtcgcccgccctgggagtcgccac

SEQ ID NO: 4522 - DNA, 629 bp, Homo sapiens
  source 1..629: mol_type = other DNA
tattccttggccttctttgcaagggtatcaaagaacactgctgcagtgagagcctggttaaacatgggactgaagggttaagtgaatcactttttattcatgttgaaatatgaatgctgaagtttggaaaattttatatataacattttaataactaaaaaaacttgacttaggaatagtgcttatattaaaatcagtgtttgtcattgtttcatgaagtttttacaaatctaagaggcttaagagggatataatagtccactttgctttaactttgaaacacagaacaatgctatagtaagaatgtagtatactactctattaacccaaaacataatatagataggtttattgtatatttgtggagaaaagtttattctaacgttctttttacaaatagtaaaaatgctatttgtaggatgctctgatttttactttttgtaaaaagaacattgtctttttaccccaacagaaaatggcaagcgtttttgggaatccaaaatctcttatgaggcatattaggtatcacatgtgacataagcaaaagcctgtgatccttagcatgttggaaagttgctactctgataaattgatggatggctggttttctacaaccccagcattctctg

SEQ ID NO: 4523 - DNA, 329 bp, Homo sapiens
  source 1..329: mol_type = other DNA
ttaaagtactttctaattgaaagcaacattgacttttatttctaggggaaaatgctgactttcttgtttaaaaaaaaaaaaaatttccgtaggccagctgtcccaggcctctgccagggagggaagacgagtgcaactccggaggcccaggattttggttgcgcggctgagcagagccggcctggttgcgtggagggttgttttctgcagctggagaccgcggagctcggagctttagatccggggagaagcgagaagctccccccgccccgctcccctcccgatttggactggagtccttttttattgttgaccaaccagtgagagag

SEQ ID NO: 4524 - DNA, 354 bp, Homo sapiens
  source 1..354: mol_type = other DNA
agaatattttagattcagaaaaggtcagagacttactgtagaataaacagaatcatttaaggttaattatgtattcttgcaatttctagccctttaagatcactagaaatctaaaaatcaaaggatatgcctttataaatgtgaaagtttttaaagtactttctaattgaaagcaacattgacttttatttctaggggaaaatgctgactttcttgtttaaaaaaaaaaaaaatttccgtaggccagctgtcccaggcctctgccagggagggaagacgagtgcaactccggaggcccaggattttggttgcgcggctgagcagagccggcctggttgcgtggagggttgtttt

SEQ ID NO: 4525 - DNA, 263 bp, Homo sapiens
  source 1..263: mol_type = other DNA
ccgggctaactctgattcatagattatatataaatatgtgtatgattttaagtgtaattatatagcatctcgttttgcactgtgatgtgatcaaatgacttgttgctgttaaccagtaataataataataatataggtatttttctcgttaatcgattaatcagttgctttgttttaacttgaattccaagaagaaagcgaaagagatggaattaagatttatttattttttttcttttttgccaagggccaaaaacagtcct

SEQ ID NO: 4526 - DNA, 277 bp, Homo sapiens
  source 1..277: mol_type = other DNA
tctgattcatagattatatataaatatgtgtatgattttaagtgtaattatatagcatctcgttttgcactgtgatgtgatcaaatgacttgttgctgttaaccagtaataataataataatataggtatttttctcgttaatcgattaatcagttgctttgttttaacttgaattccaagaagaaagcgaaagagatggaattaagatttatttattttttttcttttttgccaagggccaaaaacagtcctctactagaccatccctaagggacg

SEQ ID NO: 4527 - DNA, 481 bp, Homo sapiens
  source 1..481: mol_type = other DNA
tgggtactacacttagtacctgggtgacgaaataagttagtacccctgaacctaaaataaaagttaagttgaatttgcttctgatacaaagtgtcaactgcatacatttgtcaggaccaaatttgtagctcataatttttatgcaactgtttttacctgaatcaatgctacaaatactattccaagtcttagtatatggactgaacaccatagttcttcattgctaagcttctagaactttattttttcattttttaaaaaattccaggtgttgagaactcaccttttctagtagttttcccttggggatctacagcaagcagagctgcgcccgagctctcgcgttaactaggcaacatcgttgccacggtaactgggaggcgcgggagggcgacagctccctggactcccggtaacccttacgtgcccggggctgagatgccggaatctcgcgagagctcccgggggccgttgggtatgg

SEQ ID NO: 4528 - DNA, 653 bp, Homo sapiens
  source 1..653: mol_type = other DNA
tgccccgggggagaaaaagcaagtcaacactttagtttttaaacttgcactgttaaagcactttcaaaatagtaatagttgagcttcatctcagacatgaatgtgtgcgctttccgaaatggggccgcagtaggtgggaggctccacgcacactccccgactcggccgggacgcggctcccggactccgcgcagggcgccaagatcgccgccccgctcccctccagccggcagagtggcacactcggaagcgggttacctggcccccgtcgggggcggggtccgcagtccggggaccaacgggctgggggcgacgcggccgggcgcgcgggtgggcgcgagggagtgcgcgcgtcgcggagcctccggggcagcactttgccgagcgcgccgagcggcttagcgcgcagacacgcgcacacgcgcccgccagcccgcgcgcgcgcgcacacgcgctctcatacacacacgcacaggcgctcgggccccgcacacacgcacgcgcgcgcacgcacgtccgctcgcccgcgcccggggctccgctgcccgccgccagccgcccgccgccgccgccgccgcagccgccgccagcccgccctccgcccgcgggcgtctgcgcgagcccggccggcgggggagatgtgctcgggctcc

SEQ ID NO: 4529 - DNA, 528 bp, Homo sapiens
  source 1..528: mol_type = other DNA
tataaactgtgaacacttgaaataaaactttgattcaggcaagtggcaatggtgttatccatttgctagatcttaaatctggggagattcacaaattgatggcacacacggttggaacgtggtcttgaccgtcagcctgcagagggcattccctttaaggcttgaaaatgcctcctgttaaatgtgccagcaggtaacatttacagtctgctttaaaacatgctttggacatatattttagtgctcatactgttactaataaaaaaataactttatgctcacccttttttctctctcattttgataagaatttagagacattgcaggaagacctgaagtttaatcatgcacaagcatacgttttcacagattgtttgacaatgattatgctttatctattaataataattggggactgcagatggcttaaatctaaatgcaagcctcttctggtatacaattttatacaaaaaaaattaattgcaatttcaatgcaaataaatatctcgcatccgctgtataaagtgc

SEQ ID NO: 4530 - DNA, 674 bp, Homo sapiens
  source 1..674: mol_type = other DNA
aaaaaaccctttttgaaattttataccaatattttaaaagtaaaccagatcttttcagacatgtttgatatttgttaactagttagaattagaaactttccttatttttactcaggttgctttcttaggaacaaaaaagcttttcaaacagcgctttttataaataacactcagctaaaagttccctggagtcgtagctcccgggaaacgtcgactggctttccacctggacttcatccgtccaggcagcccagaggggcttcaggccccgcccgcttgcgctcagccttcaggccccgccccttcggtcaagcggcgtgctctcactgcacggcgcctgggccccgcgcgccgggacctcggtttcagccgtcctgtcctgccccgaggcccctaggccccgcccctgggccccgcgcgccaggacttcggtttcgaccgtcctgtcccgccccgaggctcctaggccccggtccccggcgtgttctcgcggctccgcccctaggacccgcgcgccgggactttggcaagtttcagccgtccggccccgacgccgggactttggcaagttttaggtcccgcccactcggccagcggctggctctcgcggccccgcccctgtgcccgggagcattgcggccgccgtgccccgcccctccccgcgcgccccgccc

SEQ ID NO: 4531 - DNA, 219 bp, Homo sapiens
  source 1..219: mol_type = other DNA
cattggtccttggttttattttttaagcctattaaaaaggaggactactgctctccagtctgggagacagagatcacctgaggtcaggagtttgagaccagcttggccaacatggcgaaaccggcgcctgcctataattccagctactcggggatgtggaggttgcaggttgcacataactgtccagatactttccagctttgccagccccagaggccg

SEQ ID NO: 4532 - DNA, 465 bp, Homo sapiens
  source 1..465: mol_type = other DNA
agtttattcaattacattcagcagcaagtattgaacactaatgatatgtaaagtactgtgatataaaatagtccatgtcctcaaataatttataatcttgtaggaaaaaaactttaaaaaggcaagagaatctatcctatgggatatatccaaaaaggcttcattgaagatgtcaatagacacgtgaatctccactcacgaattgagggactccagtttgtaacccaaaatcgaaacattcaactttaggttaaaggtggacactttccctgaggctcagagctttgcagctaagctctggccttattgacttaaatcattttaatgacactttaatattaaagagtcactgggcccagtgtctgtgaaatgctctctgtgccctgcctctgctagagcagacactgtgtgggacaagtcctactggccttgcaaaggttagtccctgtgacgcatccagtgcag

SEQ ID NO: 4533 - DNA, 253 bp, Homo sapiens
  source 1..253: mol_type = other DNA
ctactgctctccagtctgggagacagagatcacctgaggtcaggagtttgagaccagcttggccaacatggcgaaaccggcgcctgcctataattccagctactcggggatgtggaggttgcaggttgcacataactgtccagatactttccagctttgccagccccagaggccgggatcgcaggcaggatcccttccagcgcgggggcgagagcagggcgccgggcagggccggcgggccacgtgataagcc

SEQ ID NO: 4534 - DNA, 455 bp, Homo sapiens
  source 1..455: mol_type = other DNA
tgggaaaggacacgaagacctttttcacagtgatttcactttcagtggaaacgggcgtcccatccccaggaaaggaaggctttcctgcatgtgtaaaaaagtaaactgttactttgtccttgcaaaagaaaacttcattctctgaacttccccgggatctgcaaagcgccccgcggaactcccggtactggccctttctcagagccagacaggcacagcgctaccctttattttatgggttttcttcctcacaaaatacacgaagggggagcgtcttgcaaccccttccccgtgacgtcacccggagcccgggccaatcggcgcgcggtcggctgcggcggccggcgggcgggcgggcgggtggggtggggcggggcggggacagcccggcgggtctctcctcccccgcgccccgggcctccagaggggcgggaggggaccgtcccatataagcc

SEQ ID NO: 4535 - DNA, 400 bp, Homo sapiens
  source 1..400: mol_type = other DNA
taatctcactctgaataataaatcactgttactgggcaccataacactgcatcttgcaggaagcgtgcacccttcaaggaaagacagctcagctgaaatggatcaggtctcaaacctggtaaagatgatggagcgccgacgtccgaccccggcaggcgggcgcagcgagggcgccgagcagcagccttccagctgcactggagatttaattttaattaatcgtgagagcttcagccctgaggattgaatttttcacctgcccagggaccgacgctggcggaggttgcggacagccggcggggagcggttctgctccgggaggatgcggctttgccgcggccggcgggcggggcggggccgggccggggagggtgcggggttctggtggtcacgtgggctc

SEQ ID NO: 4536 - DNA, 442 bp, Homo sapiens
  source 1..442: mol_type = other DNA
accaacaaacaatttatcttatgttgcaaatatttttcttcatatgcctttaaactttatatatttttttaattcaatgaggatttacactttcatttcacccaagttaaggtaaatattcagcatatttccttgattaagcatatagaatggattaattttaaatctgaatataaaactaattgcacgagtggctccacaattccttaggaagagccctggccccagctccaggagcttggccatgagcaaaccaggcgccaggtagctcctgcccttagcccaggaggccatccctgcagcggggtgccagagcagctgagcgcaggcccttctgggtctcaggggcgggcgggcggacagggcggtgctcgagcccacgtgaccaccagaaccccgcaccctccccggcccggccccgccccgcccgccggccgcggca

SEQ ID NO: 4537 - DNA, 462 bp, Homo sapiens
  source 1..462: mol_type = other DNA
aagcagtcatttctatgcaaggtactggtagtcattatcactttttagaagaaactgagtcttttagagaagttaagtgactttctgcattcatactcatactgaaaaaagattttttaaaaaagtaactctgacacaaaatgccttaggtgttattctcaatgagagaaaagggacgtgaatctttaagtgattaagtgaatctttaagtaaacacacgctcccgactacggcggaatggagagaatgtgcgcatgctcggcgggaatctgcgcatgctcggcgggaatctgcgcatgctcggagagaatctgcgcatgctcggccggaatctgcgcgagctcggcgggaatctgcgcaagctcggcgggaatctgcgcatgctcagagttccggggcacggtttccccgcccctttcaggcctagcaggaaacgaagcggctctttccgctatctgccgc

SEQ ID NO: 4538 - DNA, 490 bp, Homo sapiens
  source 1..490: mol_type = other DNA
cctggcagcagcctggaatctgatttgctatatatttcgcgaggaccaagctggagccaagtgccggctgcctcacctcgttgcatctgcgaggagaggtaggggccgaggccgccctagcgggggcagagctgccgagcagacccggcagccgccctcctccgcgaattattccactagtattatttcaccacgccggcctcgcctctggttgcatggcagcgctgcccgggcgcgggggctcagggctggcccccagggaccggagtcgcgaccgcgccggacggcgggcagcagccagaggacgagccggagcagcccccgccccggagacacccggacgccgagcagcagtcgcctccgccgccgcagcagcagctgcgggcgcgggccgacccggagccggaggaggaaggaggagaaggcgaggccactcgcccgcccggacctgcccttcccctcgaccgaagggacctttgatggaaccgag

SEQ ID NO: 4539 - DNA, 334 bp, Homo sapiens
  source 1..334: mol_type = other DNA
aaattatctctgtcaattggagcttaaattctaggcgaagaagctaatcctccctgtttgaaaatttgaagcatttagcatttccttagtcatgaggaatttaatctccatcaagctgagatctactttaaatgtttatgtgaacagagaaacggtctctagcggcgtctgcgtcaggcccccacgagcgtgacgcgcggggtctgggtgggagctgtccactcgcccggggtgctgaatgcagcagcggcggccgcggcgccggcggcggagatagccgagagcctccctcgctgccctggcagcagcctggaatctgatttgctatatattt

SEQ ID NO: 4540 - DNA, 393 bp, Homo sapiens
  source 1..393: mol_type = other DNA
aggagaggaaattaaaatccatttcaaattacctcttgtcagcggctcagtgaatgactcacaattgaaagagcactgtgacttatagtaatgatgactgtggtgatggtggccacaagccattcaacaaatatgcattgaacatttactagatgcaatgaattaaaaaaattatctctgtcaattggagcttaaattctaggcgaagaagctaatcctccctgtttgaaaatttgaagcatttagcatttccttagtcatgaggaatttaatctccatcaagctgagatctactttaaatgtttatgtgaacagagaaacggtctctagcggcgtctgcgtcaggcccccacgagcgtgacgcgcggggtctgggtgggagctgtccactcg

SEQ ID NO: 4541 - DNA, 414 bp, Homo sapiens
  source 1..414: mol_type = other DNA
attgtaggaatgaatcatttcaatgatattttgctgcagaaattttgcatgtatttgtaaaggcattaccgtgtgtgtgtgtgtgtgagagagagagagagagtttgcaaacactgaggttttatttgctgctcaagaaggagaggaaattaaaatccatttcaaattacctcttgtcagcggctcagtgaatgactcacaattgaaagagcactgtgacttatagtaatgatgactgtggtgatggtggccacaagccattcaacaaatatgcattgaacatttactagatgcaatgaattaaaaaaattatctctgtcaattggagcttaaattctaggcgaagaagctaatcctccctgtttgaaaatttgaagcatttagcatttccttagtcatgaggaatttaatctc

SEQ ID NO: 4542 - DNA, 438 bp, Homo sapiens
  source 1..438: mol_type = other DNA
tagagaaatgttatatttatcaccaatggtgctgactctttaagtctcatgactaatcttctctcaagtaataaagccttgagaaatattatcaaatagctgtcttagtttccccctctgtaaaagggggacaagaattgtagtgcggttaaatgaggtaactcatatttatgctaaacacaattggcaagtatagcaataccaggaatggatgccccggggagatacttctgtctgggatgtcctctggagacagccgactccgggtttggaaacctcaacgtcctaggctttcaggacctagtgtggtggcctagcccttcaggcctggccgctacaataaggctgcggaagaccggtcccgctcgggaggctctgcagtcgcgcctggggtcagggccgggggcgaatgtggctcgcgttctaggcctccctggg

SEQ ID NO: 4543 - DNA, 166 bp, Homo sapiens
  source 1..166: mol_type = other DNA
cgtgaagaaagaagatcatgtgtctagttccttcaggcctggaccaggaagctgtcttaacgactctgaccagtttgaaactgtctaacttcttaatgctggccaggctggtctcgaagcacttctccaagccaagtgctgtgcatcgaatggaggtatgtgaaat

SEQ ID NO: 4544 - DNA, 305 bp, Homo sapiens
  source 1..305: mol_type = other DNA
ttattgaagacagccatctgtcacacctggagagctgatctgacctctccaatagtcactaagaccattcggggctgtttgggtctagcttggtctagacgggtctgaaactccgccggttagcccagtgccggccacaggggccagagcccgcagccaacgcggaggtgggcgagcgggcgtgcgcgcactcacttgccggcgcgagggagtgtcggggagaagccggccctttaggacccggctgcggcggcgaagaagcggaggaggcggctcccgcgctcgcagggccgtgccacctgccc

SEQ ID NO: 4545 - DNA, 288 bp, Homo sapiens
  source 1..288: mol_type = other DNA
gtgacagagagggaagtgtcactccaatccaccttccatgcaaggttttcagacttagcatttcgtatgaatgtccattcctgcagatataaatcctttaggggagaaattcaattttttctttatcctgtgccttgactacttaaaggataggagggaaggggagacgaagttactctcctgttcagggagcgaaggggagcccccttgtgtctagaaggcctctccccaagctcaaattgcagctacaaactggctggcagccaggggccggctatttaaaagcgc

SEQ ID NO: 4546 - DNA, 407 bp, Homo sapiens
  source 1..407: mol_type = other DNA
tcttaacatttttaaaggcttcccatgactccgtaagtacttactcactgatttatgtagacataatggctttctccccagtgggctgagagttccataaatgtatggcatatgctatgtgatcaatatctgtgactgaattttaaaaaatgattaggttaattgttctgaaccagagcacctagatgaaaaagaaggaatatttctattttgatcatattgaattgggttctgtagagtcaagtccttacagaaataaatttattatctctggatgctgactgttacatttcctacaggcaggagaagcatatctatccaatgcctggcacagggctgggattcagggcagcccttgagctgcacaccttatttcagcccacctgcgagggccaaggccttcccag

SEQ ID NO: 4547 - DNA, 143 bp, Homo sapiens
  source 1..143: mol_type = other DNA
tttttttgttctgaaaataggagatgagttgaaggctcattcaatcattcgattcaacatatacataggatatgtcagataggtgatacgctgctattgatctgggcaaacatgacttttggacacattaagtttgaccatga

SEQ ID NO: 4548 - DNA, 369 bp, Homo sapiens
  source 1..369: mol_type = other DNA
tttctctgtctgcagggagaaggagcctcccggcctctctctagaaggagaggctgccttacaggctgggcctcagcctttggtgctgcctccatctaagcgagatccagagctctgcgccaggcctcggtgctcagggcggaaggagccctgactctctgggagatgggtccacgggtccccatgggctcctcctgcctcccattttggggagaggggaaggggcggagaaggatcccacagaagggctcggggtctcttccaggacgtgctttgagccccccgtcttcacccgccctgggctgcagaggaacagggaggccctatcatctgacagctgcctgacccacggtggggagggccctggag

SEQ ID NO: 4549 - DNA, 376 bp, Homo sapiens
  source 1..376: mol_type = other DNA
cattatttttatcatggaaaacttcatgcatgtacaaaagttgaaatgattatatggtaaactcctacaatgaacactttgatatatttgctttatcacatttctatattccatttcaaatcagcttaaatgacttttgaatgtacagtcacaaatgttctcagctgagagttgctatattattattattatcatcatcaccatctctcctgtccccagggaagctgctgggccagtggctgaaggaggggcagccacattgtgtctgtgccctgacacggccctggctggcggagggggcccactgctggctggctccgggaaggaggcggtgcactgttggcccgccccctgggctggcctgggagggaacccg

SEQ ID NO: 4550 - DNA, 222 bp, Homo sapiens
  source 1..222: mol_type = other DNA
cccccaacaattgtccctgggcagaggtgggcactctcgcgggagcctggagcggggctccctttcacacagcctgggggcagggccattcttccccaagagtcttcgcaccctcccccaggctggcgggggtctgcagtgaggagggaggactccaggcctaccggggcacggcctgggggggccctgcctcgggttcctgaccctcaaggccaccggtgg

SEQ ID NO: 4551 - DNA, 398 bp, Homo sapiens
  source 1..398: mol_type = other DNA
ccttctcgccaccagggggcacagggaggccatggagctccgcagcctccagagtggggaggggaggtcgagggccccaccacgctcctccttcctgtcacctcagtcagctgaggcggtccccctgagtgctggtcatcagtgccgaccccccaggctgtgcgcagcaatgggccgggcgggtttccccggtgggctggggtcccccaccctggctgtgctccagactgtctctgtattgcagacccttatcaggccccacagtgggggctcctgtcgggactctgtcggggccaggctggggtcgttgctgctcgcctgccaatgtcgcaggcgctctgggctgagctgtcgcaagggctgggggcgggccggcttctggggctcccgcgtctccg

SEQ ID NO: 4552 - DNA, 236 bp, Homo sapiens
  source 1..236: mol_type = other DNA
ggtacctggagctacctcaggtcccccactaggccagctggaaagctatccacctcccagttttcatctgggagtgctcctcccgtggggatgcaatcaccctgatcctgcctattgggtagaggtgcaaactttcccccactctaactctaggaatgggacttcctggaagccaggccacccagtgggcctactgtcttcaagactcccagcctctgacagtggttataattata

SEQ ID NO: 4553 - DNA, 245 bp, Homo sapiens
  source 1..245: mol_type = other DNA
cctgcctattgggtagaggtgcaaactttcccccactctaactctaggaatgggacttcctggaagccaggccacccagtgggcctactgtcttcaagactcccagcctctgacagtggttataattatacagagtaggctgcagcctgccacttcaaaaaaaaattatagtgtgaatctctacacgctattctggggagaggcatgctaatgctgcctccaagaaagaaagcaatttgtttttg

SEQ ID NO: 4554 - DNA, 207 bp, Homo sapiens
  source 1..207: mol_type = other DNA
tgtcttcaagactcccagcctctgacagtggttataattatacagagtaggctgcagcctgccacttcaaaaaaaaattatagtgtgaatctctacacgctattctggggagaggcatgctaatgctgcctccaagaaagaaagcaatttgtttttggagggacgcttctcactctgaccccctgcatcttccttgttaaaaaagga

SEQ ID NO: 4555 - DNA, 227 bp, Homo sapiens
  source 1..227: mol_type = other DNA
gcaggcaatttaagtgcgtctgccggattaattcattcatttgtaatcaatagcaaattgataaaatacattcttagggtcacttaacattgtttttaaaaatgcatttggacttggaatcttcccttttaccaaaaggctttctttccaaattaggcactgctccctttgacatgtgaaagacattgaattcagtttccccatctgtaaaatggaaagacttaatt

SEQ ID NO: 4556 - DNA, 202 bp, Homo sapiens
  source 1..202: mol_type = other DNA
ctctgccagaggtgtgttccgttaattgtccttttaacaatatggggaatttcacagaattttattgtggggtcgctggacagctatacctgtacgcaagcgcagcctccgtttcctccggcgcgcctgcgctcgcgttcacgagtggatggcgccgcggggccgcgcgtccaggcggcgagcgggccggctagagccgggg

SEQ ID NO: 4557 - DNA, 243 bp, Homo sapiens
  source 1..243: mol_type = other DNA
cagccattagctgctggaggcagctaaggtgggttcccagagaagccattctccgttacgagatgggggctgcagtaccacagctcagactctggggtcagccaaggatatcccagtaactgctctcacatccttgatgagagagattgagtgcctgctgttcaaacaccccaagtccctcctatgggggactccttctggaagttgcaagcttccaaatgatcatccatagagtggagaatt

SEQ ID NO: 4558 - DNA, 250 bp, Homo sapiens
  source 1..250: mol_type = other DNA
ttaattgtccttttaacaatatggggaatttcacagaattttattgtggggtcgctggacagctatacctgtacgcaagcgcagcctccgtttcctccggcgcgcctgcgctcgcgttcacgagtggatggcgccgcggggccgcgcgtccaggcggcgagcgggccggctagagccgggggctgggcggggaccgggcttgtcggtgaagcggcagtggcggcggcggcggcggctcggcaggcgggtt

SEQ ID NO: 4559 - DNA, 583 bp, Homo sapiens
  source 1..583: mol_type = other DNA
tctcagcagatctgtcttagaggggccaggtgcagcgatcgagtcctcatcacacgggacttcatttagtctcacgataggtgagtatgggcccgatgaggaaactaaggcaagggaactttagtcatttgcccaagttcactggcttttttaaaaaaggatccagagctcatgcctcttcatcatgggggaggaaagagagtggggcaaacccccacccatcaagggccatgcactggggtatatgccgccatatggtggtttttcttgttcccattttaacacaggcaaaaaccagaacttgactcagaaaggccttagaaactgaaaggcccatcaggtgatgggatgggggagtgaagatcctcaggccccaaacacctgccaccatcacacacggaagtgtggagggagcctggtgtgctgtcagctggctggccagtccagaagtcaatcattattattcattaactggaatgcatttctcagattgggagggggaggcaggcctcccagttgctgcagtttggaatatgtcaggtcccaccctcccagaggcggggccagggctgagtcctgccag

SEQ ID NO: 4560 - DNA, 395 bp, Homo sapiens
  source 1..395: mol_type = other DNA
tagcactggaagtactccatcccttgcaactgctttgcccaaggtcagcccggggctctttcctctgcactgcggtgagtgtgaaacacgagctccctcttgcagcaagaccccggaggtgtcgagcaacctgcacccccagactctaagatcttgcagaaaagtgtgggaggacctgccctccccggggtcccccggaggacgcgggtatccccgccgggaagcggacccaggagaactactcttcccaggagaccccggaggcgcgcgcgctcgcttgtttccctccaggagtcaggtggggcggagtttgggttctctccgccacgccccggcccgaggcctgctggggagtcgcctacgcctacttcctgccgggaggaggggctcgagtt

SEQ ID NO: 4561 - DNA, 339 bp, Homo sapiens
  source 1..339: mol_type = other DNA
tgatttgaggtggatcgcccacaccggggtccgcgggggcgcgcgggacacaggacggcagaggaggcgtcagggaacccccaccccagccaggcctgagaactaagtgtgagggtgccaggggtgagcgtctcctgtcccatggcctgaggagcggcagttctcacctgggtccggcggaccgggatcaagccccgcgattcggactccatgcggcgcaagcggcggatccacttctctgggcccaaacgctcccagagtcagctctgcgcgacgacgcggaactcgagcccctcctcccggcaggaagtaggcgtaggcgactccccagcaggcctc

SEQ ID NO: 4562 - DNA, 444 bp, Homo sapiens
  source 1..444: mol_type = other DNA
cacaccggggtccgcgggggcgcgcgggacacaggacggcagaggaggcgtcagggaacccccaccccagccaggcctgagaactaagtgtgagggtgccaggggtgagcgtctcctgtcccatggcctgaggagcggcagttctcacctgggtccggcggaccgggatcaagccccgcgattcggactccatgcggcgcaagcggcggatccacttctctgggcccaaacgctcccagagtcagctctgcgcgacgacgcggaactcgagcccctcctcccggcaggaagtaggcgtaggcgactccccagcaggcctcgggccggggcgtggcggagagaacccaaactccgccccacctgactcctggagggaaacaagcgagcgcgcgcgcctccggggtctcctgggaagagtagttctcctgggtccgcttcccggcg

SEQ ID NO: 4563 - DNA, 381 bp, Homo sapiens
  source 1..381: mol_type = other DNA
ggtccgatcagtgctgggattacaggcgtgagccgccatgcctggccccctcctaatcttgaagttcaatgaaaagacagatcagcctgctaccaggccatcctgacttgggtggggtaacccgagattaccattctgatcacaggattctgtccgggcggagctgcggtgcctgggtcctctcgtgatccccaggacagcctctccctcctgggagcttggagccacccctcggtctccatgggtccagagagaggccaccctggctagagaggggggcctcgagttgggggccagaagtcatcccccttcagcctcccgagtagctgggacatgttggccacgatggtcttgatctcctgacctgagctgagaggtcaa

SEQ ID NO: 4564 - DNA, 577 bp, Homo sapiens
  source 1..577: mol_type = other DNA
gtttctctttttaaattgagacaaggtctctcttggcctcccaataggatcaatatttcagaacttcctcaaaacctgagatgagggttaagacctacctaacagtagtctacatctcaatgtaggacttctgaattctgacttgaggaaataattataaacagagattctaggtttgcatgtttgcagttttaaactcgaaaagtgcatttatctcaaaaacacagaattatcaaggattttaattactgatttatttgtaatgtaaaaatgggaaacaaactaggaaattaatttaatccgcatagccatgcaatggaatacttcacggcattaagattgtgcttttgaagactatttagtgagaagaaaaatgttcatcataaaatccccctgggaactaggaggggtggagagaaattactttcttccctgcagtgaggcgtcgtcggggctctgagaggcgcgcgcgcccgggacagacccctgcgccccctggcggcgccctgaggccccgccccacgaggccggcgcgacggggcggggcgcggagccccagccgagcctagccctgccc

SEQ ID NO: 4565 - DNA, 421 bp, Homo sapiens
  source 1..421: mol_type = other DNA
ttcctgtcctgggccagagctagggctggagccaaaacaagcccagccctggctcccctgggtttgggagtgggaatgccccagccctaggcccctcgtccgctggggaggccctcccccacacgcgcatatgtatgtgtatgcataaacagatataattttgtttgctcggattccggactgtgggctccaggaatgcagacagtgtcccttgcatcctcctcagagcctggcagagtgccaagatgatccagaggcgggcggggcgaactgcgagctcctgccccttcccagggctcaggcgactgtggaccccgatcagcgcaggctcgcggcccgctgtggccccgcctcctggccgccagccgggcggagccaggccgccccccaagccgggtggccttcggggtgcttgcccggc

SEQ ID NO: 4566 - DNA, 250 bp, Homo sapiens
  source 1..250: mol_type = other DNA
agtgagccaagatggcgccacattgttgttatcattattgttacatgtattagaactgtaacttgcagagatattcatgtagcagctatctgtctgactacaggcatgtgccaccactccctggtcctgggactcccaaagtgctgggattacaggacccagctactgcactccagcgacaacacctcaagcttgtgctgagccccaaacctgcagtatggccctttaagaggcactgtccagctctggt

SEQ ID NO: 4567 - DNA, 154 bp, Homo sapiens
  source 1..154: mol_type = other DNA
gaccagcctattgcactcagcaaagtaaataaatacatacatacatacatacatacatggcagctacctgagattatgccactgcactccagtctgggcaacagagtaagactctgtgaaccagttcctctgtggccctcaaagggaaactgaa

SEQ ID NO: 4568 - DNA, 182 bp, Homo sapiens
  source 1..182: mol_type = other DNA
aaagtaaataaatacatacatacatacatacatacatggcagctacctgagattatgccactgcactccagtctgggcaacagagtaagactctgtgaaccagttcctctgtggccctcaaagggaaactgaaccgccagggctggccacttctgcctttggaaaatgtttcacaacgcccc

SEQ ID NO: 4569 - DNA, 451 bp, Homo sapiens
  source 1..451: mol_type = other DNA
atgaatgttaaattatctatctatctatttatttatttatttgagacagggaaagggtctccctctgttgccaaggctggagtgcagcccgggagtggcgcgcgccaccacgatgctggccaggctggtctagttcccttctcgtccaaaggagcagggattccagacagtaaaacggcggcgcacccaagagtctgtgcctctgaggcccaaatttcctcaggggagccggcggccgcgactcccacgccgcgccgttaccgctccctcctgactgctccccctaggggcagagacggtcccgacgcccgccatcccgccccggcctcacccctccccgccaggcggaacgacgcggggaggcgggcgctcggggctcgcgccaggggccccagaatccttcggggtgggcggggagccccctctgccttagggagcggctgggcaccca

SEQ ID NO: 4570 - DNA, 405 bp, Homo sapiens
  source 1..405: mol_type = other DNA
ctccaggaagaggggtgcagagttgctcttctggaagctccctttaggcctcccagggagggcgtggtcgcacttggcactccccaagagcctgctgaatgcatgggcttttaccagccctgttcaggtgccagacagcaccttgctgttttatttttcctggggtgcgaatgataaaatgtagagacagaggggtaactacccgccccaggcgtggggagataagtccagggctccaggcagaaggcgcggctacctctgccgctttgggagcctgggagggtcctgaggaatcctgtgagctcagtgtggggacagccggccaggtaccagccccctcatgagggccccgcatccagccgaggccccacccagggggccggaccgcaggggagacagatgtcc

SEQ ID NO: 4571 - DNA, 683 bp, Homo sapiens
  source 1..683: mol_type = other DNA
attaatttttaaatggtgaacttacaaaatagcacggcgcgcaccacggaggggcttgcagccgttcccaagtgcccagcactgcgccacaggccgggtggaacgggccttgagggcctctggaggtcccccacggtcgggctttgggcccaccgcgtgcggcgccgtgctgggctcctaggatcggcagcgagtccagtgactcccaccgcacccccagtaatcacagggcggccgtcgaccgcgggcaggggaggggatttcctccaggcgggaacgcgcggtggcccgtgcgcggcgggtagacgtgcggggccccgggtggggccgtagaccgggggcacctcgccctggggctgcggggggcggcgaccgtcccattcaagctgtttcgggccagcagagccttcgctggctcttgacgtccttgcgaggtgatctctgcgaccacctatctccaatcctagcctctagtcccgggtcttcagaaaacgcagaggtggagccgcgccgcactcgggcactccccggcgtgggcgctcccggcgggcgggccttggccgagggcgctcggcggcctggaacggtgagccgggtgccgggcctgccacgcagccgcagagactcagccccgccggcgggcggcaggaagggaggcgacgccccctggagcgcggcaggaa

SEQ ID NO: 4572 - DNA, 419 bp, Homo sapiens
  source 1..419: mol_type = other DNA
tgcagtgagatgagatcacgccactgcactccagggggcccttgctagagggcatgctgagaagagacctctaggagacctctaagagacctcccatctgttctggaggggcccctgggtttggggcttctgcaaccctagagaaggttcaggcgccgctgaccctacctggacagtgctgtctgcctgtggtgagggcctgggccctgggcagaaaagcaccccatcccttgctcactcagaagccaagggaggggctgggcgccgggcctcacacctgtctgtctctgctaaatatacaaaaattagccaggcatgggtcccagttacttggaggttgcagtgagtcgaattcataccactgcactccagcctgaagtggagggctctgggctcccagggacctggcagcacctgcc

SEQ ID NO: 4573 - DNA, 736 bp, Homo sapiens
  source 1..736: mol_type = other DNA
cccaagtgcccagcactgcgccacaggccgggtggaacgggccttgagggcctctggaggtcccccacggtcgggctttgggcccaccgcgtgcggcgccgtgctgggctcctaggatcggcagcgagtccagtgactcccaccgcacccccagtaatcacagggcggccgtcgaccgcgggcaggggaggggatttcctccaggcgggaacgcgcggtggcccgtgcgcggcgggtagacgtgcggggccccgggtggggccgtagaccgggggcacctcgccctggggctgcggggggcggcgaccgtcccattcaagctgtttcgggccagcagagccttcgctggctcttgacgtccttgcgaggtgatctctgcgaccacctatctccaatcctagcctctagtcccgggtcttcagaaaacgcagaggtggagccgcgccgcactcgggcactccccggcgtgggcgctcccggcgggcgggccttggccgagggcgctcggcggcctggaacggtgagccgggtgccgggcctgccacgcagccgcagagactcagccccgccggcgggcggcaggaagggaggcgacgccccctggagcgcggcaggaacccggcccggcccgcctcccagtccgcctagccgcgccggtcccagaagtggcgaaagccgcagccgagtccaggtcacgccgaagccgttgcccttttaagggggagccttgaaacgg

SEQ ID NO: 4574 - DNA, 249 bp, Homo sapiens
  source 1..249: mol_type = other DNA
ctgggcactagtggctgtctgccctagttcatatcagaatcactggggagttttaaaagcacccacagaatcaccagagcctggagcatcagcacgttccgaagctccccagctgaggctgatgagcagcaggagggttgcagtgagctccctagagagtgggagggttcactctggagcaaagtcactgtgctagacactgcggattgggcagcatccgaactcagggtgcccctgctagctgagcgc

SEQ ID NO: 4575 - DNA, 330 bp, Homo sapiens
  source 1..330: mol_type = other DNA
ttttatcatcaatcatcatttcctttcatggatcatgacttaaaatagttacatctaacaacctgatctggcggccaaaaatacaattcatgttttgcagtgcaattgagaagctaccccggcccgccttacctgcgccgagggtccggagcccccggacagacccgcggctagctacccctagtcagggagagcggctgatggcgggaactgtgacccacgcacactcgacgcgaccagacaggcgcgtgcgcgtcagtcgaaaacgccctcccgccagtacctagagcggcctagcccgggcagccccgcccctgccgtgactgtaga

SEQ ID NO: 4576 - DNA, 355 bp, Homo sapiens
  source 1..355: mol_type = other DNA
ctgctacgggcgtgggaccaggccccggcgcccgcaaagaacgcgatgggtcgcgctgaaggccgcgagaggcgtccgttccaagcctgggggcccagccactcaccgcagccgtcgccaggctgtgcatgttgtgagcggccgccgctctcttccacagccggacgcgtccgaccccagagccgccgtagccgccatccgactccggctcgcctccccgtctggctattgcgcatgcccgactctacagtcacggcaggggcggggctgcccgggctaggccgctctaggtactggcgggagggcgttttcgactgacgcgcacgcgcctgtctggtcgcgtcgagtgtgcgtg

SEQ ID NO: 4577 - DNA, 258 bp, Homo sapiens
  source 1..258: mol_type = other DNA
caattgagaagctaccccggcccgccttacctgcgccgagggtccggagcccccggacagacccgcggctagctacccctagtcagggagagcggctgatggcgggaactgtgacccacgcacactcgacgcgaccagacaggcgcgtgcgcgtcagtcgaaaacgccctcccgccagtacctagagcggcctagcccgggcagccccgcccctgccgtgactgtagagtcgggcatgcgcaatagccagacggggag

SEQ ID NO: 4578 - DNA, 338 bp, Homo sapiens
  source 1..338: mol_type = other DNA
tatgacttttatagtaatcacttaggaggattttattttaatgggactaaaaaatgtagctataatcactaatggtaaaatatctctgcacacatctttataaacatgcatgtatgtcctgaaggtgctacctccattctgagggctatgacttataacccaatggatgtttaaaaaaaaatgagctgtttcacacgttcatctatgcattctttcaatatttaatgagtgcctaaaatatacatagattctaacctataagcagtgattcacagagcactgcaactgaggcagccaggctcctcgggctggactggagagagctcacacctctcccc

SEQ ID NO: 4579 - DNA, 184 bp, Homo sapiens
  source 1..184: mol_type = other DNA
tttaaaatcgtagttcttgaaatggcattttaataggcctgtttagcaaatatgcaaatacgcaacaaatatgttcagtttcccggccactttgccctgcgcctggcatgcagggaggtgagctgacagcagtgacctcggctgagtgggccgcgcctgcaccttggggaagctgcgttcggcc

SEQ ID NO: 4580 - DNA, 333 bp, Homo sapiens
  source 1..333: mol_type = other DNA
atggcctccggggggagccaagagaaccttcacctgcgggagctggctctgactcaccgcgtggtcttggacagacactgacacaggtacccgggcggggtccagaaccgtgacgcgactgcagcgccggggcccagctcgtctgggtgcttcccagcgcccaggcccaccctgatcccggggctctccagacccagagccggcgggagccgcatctctatggtcggccgcggctggaacggcccccggggcccgctttgtgcgaccgcctccggctcagcgggatgtggaagccccctgaagggaggccgaacgcagcttccccaaggtgca

SEQ ID NO: 4581 - DNA, 267 bp, Homo sapiens
  source 1..267: mol_type = other DNA
tgcagtgagccgtaatcgcaccaccgcactccagcgtgggcgagagtgagactctgtcctaatgcttgagagaaggactttatatgaagtgtaaagctttattcatacaatagtcctcgggcaggcatcccccaaagccccgatgcggcgaggcctgaactggcctggcgggcgccgacccgttctcctctcagtacggaccgtaggcctctggactagatccaggctgtcagtcctcccctgcagctgcagacgcagacgccgcca

SEQ ID NO: 4582 - DNA, 285 bp, Homo sapiens
  source 1..285: mol_type = other DNA
aatgcttgagagaaggactttatatgaagtgtaaagctttattcatacaatagtcctcgggcaggcatcccccaaagccccgatgcggcgaggcctgaactggcctggcgggcgccgacccgttctcctctcagtacggaccgtaggcctctggactagatccaggctgtcagtcctcccctgcagctgcagacgcagacgccgccaccgggtccttagccgggcctgatggccctgaggcagttcggatgtacttctcaccagttctagcgagtaaaattgtaa

SEQ ID NO: 4583 - DNA, 410 bp, Homo sapiens
  source 1..410: mol_type = other DNA
gtcccatgtttcgtgatctaagattgattagtacatgtaggttatcttcagtgtacatccttcagtgtaaaattctcccataaattatctaatacttttagcatccatcaacgactgttgactaaataagttatttattgagcctaggaaagatcttagatctccaaatctctcaggtctacggacatctgaggtctggcttgcctggggagctaacgagataaggaattgagtcagtatttcctaagaggcagagtgaatcgggcaatctcccctttcctttttctagaaatccttcaactgagcctgggccctttgattttcaatcccagctactcgctgcactccagcctgggcgacagagcgagattctgtctctggatgctccgaatggagcctttcagagcttt

SEQ ID NO: 4584 - DNA, 322 bp, Homo sapiens
  source 1..322: mol_type = other DNA
actaaataagttatttattcctaggaaagatcttagatctccaaatctctcaggtctacggacatctgaggtctggcttgcctggggagctaacgagataaggaattgagtcagtatttcctaagaggcagagtgaatcgggcaatctcccctttcctttttctagaaatccttcaactgagcctgggccctttgattttcaatcccagctactcgctgcactccagcctgggcgacagagcgagattctgtctctggatgctccgaatggagcctttcagagcttttcgccggagaagggactgcgcgtgcgcgagtcagt

SEQ ID NO: 4585 - DNA, 382 bp, Homo sapiens
  source 1..382: mol_type = other DNA
gatctccaaatctctcaggtctacggacatctgaggtctggcttgcctggggagctaacgagataaggaattgagtcagtatttcctaagaggcagagtgaatcgggcaatctcccctttcctttttctagaaatccttcaactgagcctgggccctttgattttcaatcccagctactcgctgcactccagcctgggcgacagagcgagattctgtctctggatgctccgaatggagcctttcagagcttttcgccggagaagggactgcgcgtgcgcgagtcagtccgctgggggcgcgcgcggtgtgtggcaggcggcagcggcgctggcggccgagtgcgcttgtcacgtaggggcgcctgaggctgccgggtagccc

SEQ ID NO: 4586 - DNA, 276 bp, Homo sapiens
  source 1..276: mol_type = other DNA
gcacctctaattccagctactctgttgcagcgagccaggattgcaccactgcactccagcctggacgacagggtgataatatctcaatttttcaaatgctgttagaaccagctgtaatgtttttaaactttttgacaactatactttgaatatacatgaaacataggattcataagacaatactttttttttcttttttattaaaaatcctgccttggcaaaaaaaacaacaaaacacgaatatttagatttctttgttcaaactgactccgggat

SEQ ID NO: 4587 - DNA, 495 bp, Homo sapiens
  source 1..495: mol_type = other DNA
caatttttcaaatgctgttagaaccagctgtaatgtttttaaactttttgacaactatactttgaatatacatgaaacataggattcataagacaatactttttttttcttttttattaaaaatcctgccttggcaaaaaaaacaacaaaacacgaatatttagatttctttgttcaaactgactccgggatcaatccggaaggccattgggagaagccgagggcagcttagccacggccggttcccgttccctccaggacgcgagggtcgccttgggtggggaaccgcgaccgggcgaggacctatcccggtgtggggcttcccgatttcgaaccttggtcggggcgccgtggatatccccgagtcaccgcgtccctctcctgcagctcccgcgtcgctgggaggagcgagggagcgagcgggaaggggtctagctggcctttgctcggccctccccagcgcccggctttgaacccgccctgcactgctgtctg

SEQ ID NO: 4588 - DNA, 440 bp, Homo sapiens
  source 1..440: mol_type = other DNA
ctgttgttgagtgtccactccagggccagggctgggaagcagctgggtcagcattcccaatccggacattgactcaggctccgggatactggagccaggctgggatcctgttggcaccagggggttgggggctgggacacctgcacacccaggcatatctcccaaccacaggtggaaacagatgtctcttcccctgcggggagctctgagtgctccccacgccttcgaggtgagagggatagaacaaggaagaaagttatgctgatctgcctccatgttcccgggctcaggactctgagagccccctcagtgacccaggaggcagctgaggaccaaggggctgtagcagctgagcaaatgggggcccctccctctcattgcctgacacccaagaccgatcctggcagggcagggtgcccggggccgggcccagaatagtg

SEQ ID NO: 4589 - DNA, 485 bp, Homo sapiens
  source 1..485: mol_type = other DNA
ctttgatctccccctcgtggggagggggccaggggcatcaaagacatttttgtggcattagaaatctctcccaccccttctacccgggccaggttgggggaggaactcccgctcgcttacaagtgccagcgcttgcgcgcacgccctggagcggctactccccacctccccgccctagaacgcgggcttgagaggtgggatggctgggggagcgagagcggaggcccagggcttcctcccttcttcaaggagaggccgcctgtcgggcggtccagttgttttctctctttacagtcaacaaatccttgcccccgactccaggcggccgcgagcggcggggggctccaagaagcgggcgggtcccacagcccgaagcgcgctggggccccgccccggcaccccgctcccgccctccgctgcgctccgcgccagccgccccggggcgcacggctcgctcccgagagtcccgctgcctgactgtcgca

SEQ ID NO: 4590 - DNA, 388 bp, Homo sapiens
  source 1..388: mol_type = other DNA
ggctctcttcagagagaggggcatgtttgtgtaaaggctagacggcagagctgcctttgggcccagcacacggacctcctagaggaccacactcagtgttggcagctgctgcgctgggagtcaggagcctcgatattttcttgtgaaataaaggggagcctgacactgctgcctccccgggctcactgaggagacaaggtggtccccatgagccgcggcacctgtttacacacctgcctcacaccaggcaggcctgggggaagtccctcctctggcggaggaggcgaaacacagaggccagcccctcccctccagcccctgcaggtgtgtgtgttggggtgggatgggggcgctccccagcagctgcgtctctgccaggcacacacac

SEQ ID NO: 4591 - DNA, 427 bp, Homo sapiens
  source 1..427: mol_type = other DNA
ggacctcctagaggaccacactcagtgttggcagctgctgcgctgggagtcaggagcctcgatattttcttgtgaaataaaggggagcctgacactgctgcctccccgggctcactgaggagacaaggtggtccccatgagccgcggcacctgtttacacacctgcctcacaccaggcaggcctgggggaagtccctcctctggcggaggaggcgaaacacagaggccagcccctcccctccagcccctgcaggtgtgtgtgttggggtgggatgggggcgctccccagcagctgcgtctctgccaggcacacacactcttcctgtgcacgcgcgcacagcacccccagtccccagcggacgcagtggcctcgggactcgtacacgcctccacgccccgccgcgtgacgtcacgtggggtagagccc

SEQ ID NO: 4592 - DNA, 333 bp, Homo sapiens
  source 1..333: mol_type = other DNA
ctcaacatctttagaggccttcggggccacccatcatgtggcccagcaccaggcctgaggcttgggggccccagggccgggcgcgcaggtccgaggtggggccgggtacaccagccccatcactgtttgctcccatcagggcacatggcccgggcccatcccccgcgcgtctccccggctgcggggcgcggggggctgccgggtgcgcttggcctgggggccgaggcggcagcgctttacggaaattgcggccccgggccgcgcgggggccggagggttccaagcggccccccgccacgcccgggctgccccctcccgccaggccctgccgga

SEQ ID NO: 4593 - DNA, 199 bp, Homo sapiens
  source 1..199: mol_type = other DNA
ggctgcagaaggtgggcttctgggctggagcctcatcttcagccccccataggtacccagagagactccaggcttccagtgtacgttcagggatgattctcaacatctttagaggccttcggggccacccatcatgtggcccagcaccaggcctgaggcttgggggccccagggccgggcgcgcaggtccgaggtgggg

SEQ ID NO: 4594 - DNA, 277 bp, Homo sapiens
  source 1..277: mol_type = other DNA
gcacttagcaggagacctgcccattcccaggcctcctccacccctgggctcaagcagtgagagaggactttgagaatgccagtacagtacccgttccatactgcaaggctgcagaaggtgggcttctgggctggagcctcatcttcagccccccataggtacccagagagactccaggcttccagtgtacgttcagggatgattctcaacatctttagaggccttcggggccacccatcatgtggcccagcaccaggcctgaggcttgggggcccca

SEQ ID NO: 4595 - DNA, 552 bp, Homo sapiens
  source 1..552: mol_type = other DNA
gaaatgcaggacaataacacttcatcctcagctgctaactctcaggcagacgtcgaggctggaacccttagagcctggagctttgtgggagacccgcagcggccgcgcggccctcgggcggtcgtttccagcgcccggcgccgccgcgtggcgagtcctgaccaccgcctcctctccttcccgggcccgaggacaccccgggggcgcggcgcaggatctgggaagcgaatcctttgggcagagccctttccgctcagcgagtcagcagcgcggtcttagcccgaggcccaggggaggccaggtcccttcgtccccgagggccgggacagggagggcgcgttctgccccgaggcctggcgtgccctgcctggctcaggctggtcagcctgggctgcggcgggcgcggggtgcgcgcctcttcccgcgggctggggccacagcggcggctgcgggagaggcctcggctccccagcggagaccagagccgaccgcagcctgcctgctgactcagcgaccccacccccgagggaaagggtgcggaggtataaagct

SEQ ID NO: 4596 - DNA, 304 bp, Homo sapiens
  source 1..304: mol_type = other DNA
ttcagattctgagaatagctcactgagttagcttattttctgttagttacccaagagtaagtctacattatgtataataattcctttatacattaagagttatttttcttgttgctgaccaagaatctatttgcaaagcaatattcaaataagaaataactgcgggctgcttttaagttaacaattgcaatcacagagaatgagcttctgtctctatgcatgtcagagtgccaagcccacaggtcgtcttaaagtcatgatcaactaggaggctctacattaccatgtcgcgacaggtagaagc

SEQ ID NO: 4597 - DNA, 391 bp, Homo sapiens
  source 1..391: mol_type = other DNA
gacctttgtaattactaacgaaaaaaatttctcagtagtgcttacaactctagtgctggtggaggacctgagagatcatctgaagttcaatcccttattttgttaaaaagatttgccactggggcgctcctctcatcagtgtcccaggcccccacgccaggcataggccccgcccctgcaagaccctgcctcctcttgcggtggggggagcgtgcggctaagagagtgggcgctctcgcggccgctgacggtaggggtcgcgttcgagtccgggcaggagcaagccagcgaggggctgctcagacgctgcgggttggccctggcgctggccttttctccctggagggagcgcgcgctgccggggtccagggcaggcctccgggggaggggt

SEQ ID NO: 4598 - DNA, 274 bp, Homo sapiens
  source 1..274: mol_type = other DNA
taatgagtgcaaggtcctggaactacagggataagacagggtccatgccgtctcaaggcatttacggtttaaaaagacctttgtaattactaacgaaaatgcaaatttctcagtagtgcttacaactctagtgctggtggaggacctgagagatcatctgaagttcaatcccttattttgttaaaaagatttgccactggggcgctcctctcatcagtgtcccaggcccccacgccaggcataggccccgcccctgcaagaccctgcctcctct

SEQ ID NO: 4599 - DNA, 301 bp, Homo sapiens
  source 1..301: mol_type = other DNA
atgtcctgagagcagtaaattgcttaatttgtctcacccagttctcaactgggtgattttgcccccatggggacatttggcaatgtctggagacagatgctgctaaacatcctacactgtaaacacagggtgttgacaattcagaaagatctgtccttagtccaaggcttaggtttaggtctgggaggattcctggtagaggctaggccctagcagactggggagtggccaggaagccatccctccctgggatggagcgaggcctaggtcaagggctacgaagctgcctctgcccactgcc

SEQ ID NO: 4600 - DNA, 253 bp, Homo sapiens
  source 1..253: mol_type = other DNA
aatatcagctggcattgcagctattgcaaccacagcaattccacgtaatgaaatacatgttattataaattttattctttacatgggtgcagtgtgtgcctcagcctcccgagtaggtgggattacagggatgtgccaccacatccagtggtgtaataaagtctgcaaaatttccccatattattttgaattctacagcctggtctaggggcaggggaagattctcgggccccagaactcagctcccctgggc

SEQ ID NO: 4601 - DNA, 551 bp, Homo sapiens
  source 1..551: mol_type = other DNA
ctactcagaaaagttgtcccacctcggcctactcaagcatgagatcggaggcgggaggttaggtttaaaagttcaaattacagtaaaaaaaaaaaacaccctgagtttctcttccttttcatatatgcattgctgagtatgtataatatctctcctaaaaagcaactgggaacaacttcctgttgtggaattgtccccatttctcagaggcgcctggggcttggccagaccaggagttcgagtccggttcctgcccgcgggtcggggcgggaggctgggccagatgggcggcaggaagtgccaggcgctgacttgcaggcggcacccccgcggcttgtaaacgccgggcggacgcggcacaggcggagtacgcgcctcgcagccgtccgcgaggtgagcgtcgcacggacgcttgacacctcccttcccgggcctagggcccccgcgcgccgcgccaagcccggggcggaacaggaagaggcgcccagttcagcccgggccccgccttccgccgccggggggagggagctgcgagggcgagggcgaggacg

SEQ ID NO: 4602 - DNA, 586 bp, Homo sapiens
  source 1..586: mol_type = other DNA
gggatgggtcatgcccccaggccgccccctcctccgcggccgttaccagaagaggccgttgagcgcggccgccgtgaccaggctgtgcagcggcttctcccaaccgctgcgccgccgccagcaccgcctcccagccgcggagccgcagccacagcgtcgtggccaggcgtcccaccgcctcggccgtggccgcctcctcctctgcctcactggtggcctcactcatgcctaggctcagacccagacccaggcccaggctcaggcccatccccggccccccacccgcgccagtgccaccgccgctcgccatagccccgccgcagccgccgcccgagcccgcgaggagccagggctgcgcggccgccgccgggggcgcgtcaggcggaagggggcgccgcggaagcgtcacgtgactgcggagcgctgagcccgtcacgtgacgcggcctaacccccccccccccggatagggcgggccgcgcatgcgccccggcggctgccgctgacactgcgcgtaccccgggttccgagtccgggtctaggtccaggcagtcgagccgcttccagagaagggcggtggccgtccc

SEQ ID NO: 4603 - DNA, 404 bp, Homo sapiens
  source 1..404: mol_type = other DNA
ccccaggcgcctctgagaaatggggacaattccacaacaggaagttgttcccagttgctttttaggagagatattatacatactcagcaatgcatatatgaaaaggaagagaaactcagggtgttttttttttttactgtaatttgaacttttaaacctaacctcccgcctccgatctcatgcttgagtaggccgaggtgggacaacttttctgagtaggggacggccaccgcccttctctggaagcggctcgactgcctggacctagacccggactcggaacccggggtacgcgcagtgtcagcggcagccgccggggcgcatgcgcggcccgccctatccgggggggggggggttaggccgcgtcacgtgacgggctcagcgctccgcagtcacgtgacgct

SEQ ID NO: 4604 - DNA, 567 bp, Homo sapiens
  source 1..567: mol_type = other DNA
ggcaccaagcaagtacccaatgggtgcttactgaatgtgagacaggctcatgcatccatctcagaaggtggaaaggcgcctactatcgcgactcgggatgggtcatgcccccaggccgccccctcctccgcggccgttaccagaagaggccgttgagcgcggccgccgtgaccaggctgtgcagcggcttctcccaaccgctgcgccgccgccagcaccgcctcccagccgcggagccgcagccacagcgtcgtggccaggcgtcccaccgcctcggccgtggccgcctcctcctctgcctcactggtggcctcactcatgcctaggctcagacccagacccaggcccaggctcaggcccatccccggccccccacccgcgccagtgccaccgccgctcgccatagccccgccgcagccgccgcccgagcccgcgaggagccagggctgcgcggccgccgccgggggcgcgtcaggcggaagggggcgccgcggaagcgtcacgtgactgcggagcgctgagcccgtcacgtgacgcggcctaacccccccccccccggatagggcg

SEQ ID NO: 4605 - DNA, 455 bp, Homo sapiens
  source 1..455: mol_type = other DNA
tgcactccagccagtgacactgtgtctcaaaaaattatattgtggctacattcaataattactaagaatattctaggctagggtttctgtgtcagaattccttcaggtgcttcctactgaattagaagctccagggcccggaaatccgtgactgaggaccacactgttctaggcactgttaggtgctgggacctaacacgaaacaaggtagacgtggttcctgcacatagcaggcgcctagttcagactgaggagggatctgcagctctagagacgtctgtacttcagagaaatacagggtcagctcctctgcggagctacgcccgcgcccagggtggcggagccgcgcatcaacaccctctcgcctcgggacagtcttccgactcagcaaggcgaggcggggcggggctcaaccgaggccctccccggctgcccggagactgcgccggacgcgc

SEQ ID NO: 4606 - DNA, 512 bp, Homo sapiens
  source 1..512: mol_type = other DNA
tggctacattcaataattactaagaatattctaggctagggtttctgtgtcagaattccttcaggtgcttcctactgaattagaagctccagggcccggaaatccgtgactgaggaccacactgttctaggcactgttaggtgctgggacctaacacgaaacaaggtagacgtggttcctgcacatagcaggcgcctagttcagactgaggagggatctgcagctctagagacgtctgtacttcagagaaatacagggtcagctcctctgcggagctacgcccgcgcccagggtggcggagccgcgcatcaacaccctctcgcctcgggacagtcttccgactcagcaaggcgaggcggggcggggctcaaccgaggccctccccggctgcccggagactgcgccggacgcgccagccctgcgggatgacgtcagcgcgccgcgcgcgccgagggaggagcgggcgccgggggccggctggcgcgggggctccggtaacccgggctgggcgg

SEQ ID NO: 4607 - DNA, 371 bp, Homo sapiens
  source 1..371: mol_type = other DNA
cgccactgcactccagcctgggcaagagtgcaagctatgatcatgccactgcactccagcctgggtgacagagcaaggccctcagaccagcctgggcacctgtggtctcagctactcaactgcagtccagcctgggtagggcagtgatggtgggattattaccacagcctcttctgcctcccaggccttgggggtatctcggtccctaggtgacccaggcctctctccggtctcacattggagttgtgccccaagacactgtcctctttaatgacaccatcgccgacaatatccgttacggccgtgtcacagtcaggctgcaggcatccatgatgccattatggcgaaggtgagagattcctttgcagaga

SEQ ID NO: 4608 - DNA, 664 bp, Homo sapiens
  source 1..664: mol_type = other DNA
ataaaaagggagtttgaccagacttcttgttgtctcgcgcggctagaagccgtcgctcagatacgctgagcaaggcggctggcggaagggcagcttccgacccacagttccgtggaggtctgtgtcctgccccgagccaggattccgtcagctcggcctggtcgtcagatttcccgccctgggcacgtgaccaagccctcccccctcggagacatttggccaatgggagccgtggggcggggctacagccgtggagcgcggtgcgagtccaacaccgagcctgcagttggcaggagggtcccgggcccagagccagcggggccgtgctgagacggcgtacgtgccctgcgtgagtgcgtggcggcggcgcgtgcgctaggggagtgggcggtgaggcctggtccacgtgcgtcccttcccgggacccccgcagcttggcgcccagcggctacgtgagccaaggcacccggatgtccgcgcccctctccgagtgaccagtcccggcctccggtcccgcagtgcccgcagcctcggccggcgtccacgcattgccatggctactgcgaggccgaagggcccgtgggtccggcctggatgcaggatggcctgagtccctgcttcccctgcagacgccgggagcggcccgctggtgctggggccggcc

SEQ ID NO: 4609 - DNA, 547 bp, Homo sapiens
  source 1..547: mol_type = other DNA
tttgctgccgggcccccaggagactgaggtcttcctgggcctgcacatgggacagacggtgctgctcgcatgaagggcgatgcctcgcccgaggctggggtgcactgcatctgtcccacccctcacccagctgtggtccggctttgggaggcccgaactcggagcggagcagggtagggaccgtgtactaataaaaagggagtttgaccagacttcttgttgtctcgcgcggctagaagccgtcgctcagatacgctgagcaaggcggctggcggaagggcagcttccgacccacagttccgtggaggtctgtgtcctgccccgagccaggattccgtcagctcggcctggtcgtcagatttcccgccctgggcacgtgaccaagccctcccccctcggagacatttggccaatgggagccgtggggcggggctacagccgtggagcgcggtgcgagtccaacaccgagcctgcagttggcaggagggtcccgggcccagagccagcggggccgtgctgagacggcgtacgtgccctgcgtgagtgc

SEQ ID NO: 4610 - DNA, 469 bp, Homo sapiens
  source 1..469: mol_type = other DNA
aagaccctagcgtccagcttttgctgccgggcccccaggagactgaggtcttcctgggcctgcacatgggacagacggtgctgctcgcatgaagggcgatgcctcgcccgaggctggggtgcactgcatctgtcccacccctcacccagctgtggtccggctttgggaggcccgaactcggagcggagcagggtagggaccgtgtactaataaaaagggagtttgaccagacttcttgttgtctcgcgcggctagaagccgtcgctcagatacgctgagcaaggcggctggcggaagggcagcttccgacccacagttccgtggaggtctgtgtcctgccccgagccaggattccgtcagctcggcctggtcgtcagatttcccgccctgggcacgtgaccaagccctcccccctcggagacatttggccaatgggagccgtggggcggggctacagccgtggagcgcg

SEQ ID NO: 4611 - DNA, 343 bp, Homo sapiens
  source 1..343: mol_type = other DNA
tgtggcccaggatggaggccaccgctgccctgccatcccgtctgcctgccatgggacggctgcctggccaagggaggtgccaacactgggcttgccacagccccagtggggcctaggaaccgagggcacacgggactctagcctcatccccaggacccccttggctcagagtgtggtgctagaaactggcccccagcccgcggagtggggaggttgggcctggaccctcaacccctgagatgagcaggtcaggctgtggcccttacctcacccgcaaagaccctagcgtccagcttttgctgccgggcccccaggagactgaggtcttcctgggcctgcacat

SEQ ID NO: 4612 - DNA, 330 bp, Homo sapiens
  source 1..330: mol_type = other DNA
ttgattaagtgaatttaatcaagcagaaagcctgaacgggatacgctgtaaggagccctgtcacgtttcacacgaaaccttccaggatacctgaacgcggagcccgggccagagcctccccaggcgcgtggctcaccaggctcaggccctgaaagaccggagcatccgcgctcgcaggagccggggctgcatctggagccgagcagcagctccaacgtcccgggagctgagcggctcgcaagtcctcaggtcgattgccggatttctggtattgggccgctgactgtccaagacccgcctcgagactttagtcccgtcccccagcctggc

SEQ ID NO: 4613 - DNA, 635 bp, Homo sapiens
  source 1..635: mol_type = other DNA
aggagcccctgggggccgtggatcttggcccagcctggccccggtgggattccctgggctagtgagagccctgcccctcagggaagtcaccactcacagggtcagtgtggaccagggcccgtggagccccggccggctgggcctgggctcaggggttcagcccgggtgggttggcttgcctccccacacccagccgcggcgaccgtggaccggagtccacctcgccccagggtcgcccggccccaggccaagggctggcagctcccaacagcggacaacctcgcgcgcggccccggcgcccgcgcgcgcccccgtctgcgcgcgccagcaatcacattccggctgcgcgcccccgccccgccggcggcgccccttcctccgttacccgccgcgagctcacttagggctccgcaggcacccctgggcaaggccagacacggggcctgggattccaataaccggtctacagcgacccgggtgattccagaggctccgccggctccgctcggctcggctcggctcggcgcgacccgcggcgctaggccgggtgtctgccactcactgtcacccgcagccaggctgggggacgggactaaagtctcgaggcgggtcttggacagtcagcggcccaatac

SEQ ID NO: 4614 - DNA, 603 bp, Homo sapiens
  source 1..603: mol_type = other DNA
aaataaataatagccaacacttatcaagtacttgtcaatgggtgagacattttatacacattatctcatttaatcctcacaactccatcagtgagggataataatcatctccattaagctgatgaaaaaaacatggtttatcaagaggtggatttagcaggcctggctccagaatccaccttcttgatactgtgtagctaggttctgtcaggttagggataaaacccttgtgccccaagcatatgcatcaatgatcataaacttgaggcccagtttctggatgaagaggtagcgcttattgtcaatgatgatgtctcagtcgagctcgtccagggtgagtggctcttccaggagatgcgctgggggccccccaggtctctggaacctacactatagtgtagagaaaacaggccctgctccgggtggggtcaggcgccttacggcctcaggacacgacgtgcgaggctcaggcccactcctggcagggcccaccccggtctaggagcccagagcccgggatgggccatctgcactgccggactgacctggctcgggccagagagaagcgccaccgaccggaagcagtgctgacatcatcagtcc

SEQ ID NO: 4615 - DNA, 300 bp, Homo sapiens
  source 1..300: mol_type = other DNA
tttgctgaaacaggactctccaggaaagaggtccttcttgtgacctggtcagggcactccctgtcctcagggagccttttgaaggtgcctaggatcacctgggaatcttgttaaaatacaaattctgattctataggtctgaggtaggatctgagattttcgctcctggagtgcagtggcaggatctcggttcactgcagctggtcttgaactcctgaccgttgggtcgatgaagctggttcgtgaactgcactttaacatgatgtagaaattttacaaactaggcggaatccgacacgt

SEQ ID NO: 4616 - DNA, 510 bp, Homo sapiens
  source 1..510: mol_type = other DNA
aatttccgttccttttgcctttacagtctcaagaatgggatgtgaaggggtaataataattacggtttattgacacgtactgaaggctatgtgtcagatattgtattaaacactgtacatctcatttaatcttcaactccatgaggtagataattatttccatactacgttaacggaagtggcctcacagttaagctacttaaccttatgtactattatacctattttacagctgttaagtaacttgcccgaggttacacagctagcatgctaaagcctgagctcttaaccactgagacggctgcagtctttctgccccagagcgccagaggtatgaagcctcctacctccaacattgggagatggaggtcctgggggcctcgggccgagcccggctttgctcccaaggccaacccaccagggtcctgggctccgcgtccccacatcctccggatgcccagcggttgctgagataccgcgggccgttacgccggcgcggactgatgatgt

SEQ ID NO: 4617 - DNA, 756 bp, Homo sapiens
  source 1..756: mol_type = other DNA
tccaagatatgagaatctcgattttcttcttttctcttcagaggcaacagacattttgatagcttacaacaatgtttatgtcaaggactcagtgaggttaagtcacttgctcaaggtcacacagggtagcctggaggagaatccaggtcctgaggtcccccggtcagcgctcccgcagttctggcagcaggggagtgggcaggtgccctcagcgagggcatcatagtgactgcgctgatgacagcgccactgacccgcgggcggccggcgagccgcggcagattccggggtcggccccggcagacaggctgcggggctcgactctgcgggagcgcctaaggcattggcaatctggggctcaggctgtgcagggtcctcggccgcccacaggcgtcggcgaaaggctgccgccccggccggggaccaggaagcgtcaggcagctggcaagggctccccggggacgcgccacagcctcacagccggcccgagtctcctgggaggcagggctggagaccggtgcctccaggacgcaggtgcaggtgagactcgccctgccacagcaccctgcatctccgcggaggccctcgggagcccagcgtgtgagggacccccgcgcagcttggggagggtaccaggccaggctccgcccctcgggggggccgcttaccctcccgggaggcgtggcctgcgggccgcccagcctctagtgggcgagcggggaacgcgggccccgccccccccccgcctataagggc

SEQ ID NO: 4618 - DNA, 399 bp, Homo sapiens
  source 1..399: mol_type = other DNA
caagttcaagctctgcaaaggcagggcttggacattcttctttatacggcctggcagcatcttgaatgcagaaaaatgctgggagccagttctggaaggtttcctaactctccaatgaggcctgaacccagggagcattttgaagtggaataggcctactcaggatccaaaccaataaatgctaatttgtggctcaaggcagttctgacctactcaggaaagccagggcagcctgctgggggacctgggatcatcgctcatgtttataaggacaggccccagcctccgtgcgagcgcttctcgcttggatggaggcggggccgcagtctcccaggtcccagctggggctgacgtccggcagcccctgcaggcccccacccccccaggggacaggcggag

SEQ ID NO: 4619 - DNA, 290 bp, Homo sapiens
  source 1..290: mol_type = other DNA
atatgtatggagtggtagtaactattaacacctccactttgcagaaacccttagtagatgccctgctagaactggaatctaggcatgcctaaccattttttcttaaggaagagaacagtatcttcaatgacaatgagtaagagtacttattctacccttttcacccaccctggggcggggagacgctccgacagggctcttacgccatatgtgacgcaaattagcttacgagccgggggtggaggtgtcgtcagcacccgcctgcggttggcctcgtagggaggtgggga

SEQ ID NO: 4620 - DNA, 373 bp, Homo sapiens
  source 1..373: mol_type = other DNA
acaaaggtggctgtggcgagaacgcctcgaggcccggggcacggggaggcgggccgtccgcggctgtcctagcacctccgcggcagcagagggccctggcggcggctgcgggtcgcgcggcgtgggtgacgggggtgcagggcggggcctaacgagcagcccccgcaggggcggagacgagggcgggccggaggcggaggcgccgcctgggcggggtgggcggcacggggggcgggcggtgcagccctgcgaggggcagggcgggcggtgcttcctggcgagggggacagggtaagcccgccgaggggcggggctgaccgcggcgcggcgggcacgcgggggacctgcgggcggggcaggcggcgcggtgggg

SEQ ID NO: 4621 - DNA, 478 bp, Homo sapiens
  source 1..478: mol_type = other DNA
cctgacaaaacacaaacccctggtgtgtgtgggcgacaaagtctgtgccccaccctcgacagtaccggggaggaagagggcctgcactagtccagagggaaactgaggctcagggctagctcgcccggcaggcaggctttggccaggatccctccgcctgccaggcgtctcccaccctcaagcctggctggtctttgcctgagaaacctcttcgacctttcctgggaacaggccttgaccctttaagacaaagtctcaaggggaccctcaaactaaagggaagcctctctagaggcccgcctgggggctgcagacatgcttgctgcctgccctggcgaaggattggcaggcttgcccgtcacaggacccccgctggctgactcaggggcgcaggcctcttgcgggggagctggcctccccgcccccacggccacgggccgccctttcctggcaggacagcgggatcttgcagctggtg

SEQ ID NO: 4622 - DNA, 386 bp, Homo sapiens
  source 1..386: mol_type = other DNA
tcatgcataaactggggaccaatctttatcataaagctaaagctcaccgtgagcgccattagcgtcacaaaggtggctgtggcgagaacgcctcgaggcccggggcacggggaggcgggccgtccgcggctgtcctagcacctccgcggcagcagagggccctggcggcggctgcgggtcgcgcggcgtgggtgacgggggtgcagggcggggcctaacgagcagcccccgcaggggcggagacgagggcgggccggaggcggaggcgccgcctgggcggggtgggcggcacggggggcgggcggtgcagccctgcgaggggcagggcgggcggtgcttcctggcgagggggacagggtaagcccgccgaggggcggggctgaccg

SEQ ID NO: 4623 - DNA, 481 bp, Homo sapiens
  source 1..481: mol_type = other DNA
gtccctattggcacagcgcagtgccacccctcccctgtcttgctcggggacggaggccccacaccttgagtcaaggcaccgcagagcgggctttgctcttgtcagggagcagagtggctaaatccagacggccgcgctaccagggcccaggctgcctgtggtctcggcaggcaccaccttcctagccagctgcctgccggcctgcggccttctccgtgcagggcctcagctgggtcagccgagtgagtggggctgggcaggctggacaggctgggctcctgctccctggggagccacgctggggtgggcagtggggcaggagggcctggtgccagggcagagccttcaggacaggcacaggctggggtctgtgtgcagagcctagactgggaccctggccagttgcaggggagggcgtcagggccctggggacacccctcccccaaggctgacagctgtagggctgtggccaacaggtgcc

SEQ ID NO: 4624 - DNA, 339 bp, Homo sapiens
  source 1..339: mol_type = other DNA
agctggctaaggagccccgcccagtgcgcccgtgtactgaccacgcgcagggtgttcttcgagatcggcagccacgacgctgaccggaccagagcttcgctcgcgtcgacgtggcctgaacggcacccccggaccttccgccctggcgccgagcccgggggtggtgggacccacagccctccaccagcttgcttgagcgcgttgccctcgccgtccaaggcgccctcacttcccagcggtaccgccggctgggcctgggaggctgtcctggccccgccccttccagggctggcccccggcagaccctgcgaatgagttctcgcgacttgcgagaagaca

SEQ ID NO: 4625 - DNA, 270 bp, Homo sapiens
  source 1..270: mol_type = other DNA
gggccagccctcccccgaagcctggttgtggcaagggctgtctgtcccagacatatgaatgactcagcctccggaagctgagaatcttgaagtcacagttgtccctgggcacggcacccttccctgggtggccaggaagtggggagggatagccccagtcttgggatctctgtcctgggctggggactgccccctcccctggcctggctcctgacagggctccggagcacatgctgagcggagcggctggggctgcgcggcgtggcggag

SEQ ID NO: 4626 - DNA, 353 bp, Homo sapiens
  source 1..353: mol_type = other DNA
agcctctgcctgatgcccagctccgtgctgatgtagcgcagcacagaccctggcataaaccatgaggatttaaacttgcatttgggagatggcaataccctaacctgagccatctgtaaaatgggactgatttatctactcatttctatataaatatgccattatgccacaaatgcctcacataaatgtgaacccaatgttacttagaagttatttcaactcattgcccagccagggagctagtaggatctctggggcgcccaggccgggatagggcccagagaaagtctcggactggccccacggctctcgggaaggcagggccatcggaagttatcggggcccaaagactt

SEQ ID NO: 4627 - DNA, 576 bp, Homo sapiens
  source 1..576: mol_type = other DNA
atgccacaaatgctctgaacccaatgttacttagaagttatttcaactcattgcccagccagggagctagtaggatctctggggcgcccaggccgggatagggcccagagaaagtctcggactggccccacggctctcgggaaggcagggccatcggaagttatcggggcccaaagacttcctggctcgccatccggagcctgacccgggcccgggcgacctccccgcgcgcttcccggccgctgcccagggggtagagcgggcgcagccggcggcctggccgggctgtgggcaagacgcgcggctcccaattctccccggcgccttcgccggccccgggcttctcgcgctccgctccgggctgcaccgagttgggccggcgcgccgcgttggtgttgccgcgcggcggcagctcagagtctccaggttggggcgggcctgggccgcacggctcctccacccaggtgacgctgagcaggctcagggtgaagcccagggagatgcccacggccacgggccctgcgggccgcagcaccgacagcagcagcgatgcccgcatggcgcccggaccgcggg

SEQ ID NO: 4628 - DNA, 565 bp, Homo sapiens
  source 1..565: mol_type = other DNA
atcatctggctcagggggcagcagctggaaccgcagtgttgccacagtccccggcagtgctagtcaccctcccaagttaacctgacaggaaagttggggtcacggaggagtcctgggtccccaccaggatggtgggcggctcaatggcccgaggggccggggttgcggggcgccagaggctccgaatggtgtcggcgcggtggcggcgccgctccacgtccaacaccggctggcactccagtcccgcggcgtccgggaactcgggctgggcctgaggaaggggaaggcgcaggagccggggctcgggccgccccagaaccgcggccccatgccctgagcccgcccgcggcctttggtgctgatggacagctccggcctctgcgacgtcactcagggcgcaccatccaggcaggggcgggctgcttctgacgtcacatgggacgcaccaaccacgccgcgggaggcaggggactccgcccccggcgtctccctctcccgcactgaggagggggcacttccgggggtccttccccttctctccggtagcgagagcccgagaccccac

SEQ ID NO: 4629 - DNA, 896 bp, Homo sapiens
  source 1..896: mol_type = other DNA
agtctcggactggccccacggctctcgggaaggcagggccatcggaagttatcggggcccaaagacttcctggctcgccatccggagcctgacccgggcccgggcgacctccccgcgcgcttcccggccgctgcccagggggtagagcgggcgcagccggcggcctggccgggctgtgggcaagacgcgcggctcccaattctccccggcgccttcgccggccccgggcttctcgcgctccgctccgggctgcaccgagttgggccggcgcgccgcgttggtgttgccgcgcggcggcagctcagagtctccaggttggggcgggcctgggccgcacggctcctccacccaggtgacgctgagcaggctcagggtgaagcccagggagatgcccacggccacgggccctgcgggccgcagcaccgacagcagcagcgatgcccgcatggcgcccggaccgcgggtccccggccccggcgaacccccagagcagccagaggagtctccgagggggcgggaccggggagggggcggatccggagggctcgggccccgcgggcgggcccgctccctccccgcagagcagagccagcggcccgagccgaatccccggagccgcgcctcgattcccctccagcagctgctctgggctgcgcagggttcttgcgctcggcactggagcctcagccgcggccgcagctgtccgacgtgtcactgcaagggccccgcccccggggtggggtctcgggctctcgctaccggagagaaggggaaggacccccggaagtgccccctcctcagtgcgggagagggagacgccgggggcggagtcccctgcctcccgcggcgtggttggtgcgtcccatgtgacgtcagaagcagcccgcccctgcctg

SEQ ID NO: 4630 - DNA, 484 bp, Homo sapiens
  source 1..484: mol_type = other DNA
gcagagccttatctcccactcccgccagggatgtgggggaggggctgtaagcagctgctggccggccagcccttgggggcagggctggaaccggggctagaaccggggctagggccgggggcaggtggtcctgcctgctctatacttagaccagtggagccagtctggttgggattggcagctgcaggcgcctctgccactcaggcccaagcctggcgggcggctggggacctggcggcttgcggggccactcgctgaacaggaaggactgccccctgagcgccaggcttcgggcccgggaatcgccgccgccgccgccgcagagctgcagctcggggccgagggtcgggagcgggaggcccgggagagctccgcgggtccccgcgcccagtccccagccgcgccccgaccccgccgccccgggcctcggctcgctgcccccccaccgttcgccgctgcaggcggtcggccgccgcgatgaagg

SEQ ID NO: 4631 - DNA, 409 bp, Homo sapiens
  source 1..409: mol_type = other DNA
cgcggctggggactgggcgcggggacccgcggagctctcccgggcctcccgctcccgaccctcggccccgagctgcagctctgcggcggcggcggcggcgattcccgggcccgaagcctggcgctcagggggcagtccttcctgttcagcgagtggccccgcaagccgccaggtccccagccgcccgccaggcttgggcctgagtggcagaggcgcctgcagctgccaatcccaaccagactggctccactggtctaagtatagagcaggcaggaccacctgcccccggccctagccccggttctagccccggttccagccctgcccccaagggctggccggccagcagctgcttacagcccctcccccacatccctggcgggagtgggagataaggctctgctgccac

SEQ ID NO: 4632 - DNA, 463 bp, Homo sapiens
  source 1..463: mol_type = other DNA
attgtgtggttcaaatattcaaaatatttgaaatatttgccatttcaaatattttgtcttgagaaaataaaatctttcaaatctggcaacttgggataaagatgactatgatcctatccctcggcgcttcatgaaagaaactctctctgaaaaccaggaattctgttaaaagacctttttgctaatcgaaagcttctcattttcaaacgcggttgaataactacttttcaactaggaaaggaccccggaggttatatcctcggtggcctcagcttctttcactggaaaatgactgtttgcgttgaaaaaatttttatctaacaaagctccaaactttgcttccccgcccagtttgcaaacgagtcagggtttcctcaccggcgcggtaggctcgccgaaagccaagcgggagccccaggctgcgcagggcgggggaataatgggtgcccagctccgggccagg

SEQ ID NO: 4633 - DNA, 308 bp, Homo sapiens
  source 1..308: mol_type = other DNA
cctgtcggcagcctgctttccagctgtgaccatggcaggtaacgagcctgggaatcataacagctcctcttattattatgacagaaaatctttccttgggttgccagtggctccttcgaaagaccttttgccctagagttgcatagaactttggaacagcgacagaagccaggcctctcctatcgggccgcgccccagcccccagcgatgcgtggggcgcctggagaaggggcgcacgggcaggtggggtgctgcggggcccgcgcgtgggggccgcgccggccggggcggggtgagtcacggcccgc

SEQ ID NO: 4634 - DNA, 360 bp, Homo sapiens
  source 1..360: mol_type = other DNA
gggaatcataacagctcctcttattattatgacagaaaatctttccttgggttgccagtggctccttcgaaagaccttttgccctagagttgcatagaactttggaacagcgacagaagccaggcctctcctatcgggccgcgccccagcccccagcgatgcgtggggcgcctggagaaggggcgcacgggcaggtggggtgctgcggggcccgcgcgtgggggccgcgccggccggggcggggtgagtcacggcccgcccgctcccattgtgcggcccggcggcggcggcggcggcggcggcggcggcggaggtgcggagcggagcgcgaggaggtggagccgcgggctgcgggctccg

SEQ ID NO: 4635 - DNA, 670 bp, Homo sapiens
  source 1..670: mol_type = other DNA
gccccggctaggtcggagcggagagtcgcagcagccgctccgggcagcttcccagtcccggtcgtctgtgcggctgcaccagacgggctaggcccggttccagggactgcccccaaccctgcccccgcctgcccaaggccatctcggggcgtcctgggccctgggcgaggtccacggcgtgtgcagggggtgctagaaagtcattcgttcagtctctggagacagtgacggagccgaccaagtaggtccccgctctccaggcatctggggagccagggcaggcgcgagtctgcagctcagcccgggcgcgctggacgaagcaaccgcaggtcagcttagacttcttttatttcaataaaagagcgttttccgcccgtggtgggagaaaaggtttccaacctcttcagtccctccgccgtccaggggctcgaccttcgaggtaacgtgggggatcccgctggctccctccggcaggcgggggcggggaccggccgtgctcgccccctagagccccgggagaccgcgcgccccgtggagcccggagggggcggaaccctggggcgggccctgctcggtgaaggcggggctcggccgccctgtctgcgccgccattggccgcgggccccggactggcgggctcacgtcaccggccgggcccgcccccttggca

SEQ ID NO: 4636 - DNA, 353 bp, Homo sapiens
  source 1..353: mol_type = other DNA
gactcctcccaggaggagccccatcgggaggaccccttgcctaggccaagggggcccctctcctgggcaaggggcgcagcgcgggtccccctcggggccagcagaggcctcggcgccgccacgaccaagcttgagcccggatccccgcactcggtgtcaccacaggaggagactcaggcaggccgcgctccagcctcaccaggctccccggctcgccgtggctctctgagcccccttttcagggaccccagtcgctggaacatttgcccacgccctgggctcgggatcctggactccggggcctccccgtccttcccgggttccagctccggcctctggactaggatttgggg

SEQ ID NO: 4637 - DNA, 205 bp, Homo sapiens
  source 1..205: mol_type = other DNA
gtttagtctgaatgccataataaatctctgtcgacgcatcggggatctatatgtagagatttagaaccgcagggactcctcccaggaggagccccatcgggaggaccccttgcctaggccaagggggcccctctcctgggcaaggggcgcagcgcgggtccccctcggggccagcagaggcctcggcgccgccacgaccaagctt

SEQ ID NO: 4638 - DNA, 246 bp, Homo sapiens
  source 1..246: mol_type = other DNA
cacagggttttgcctcacacctgtaagaggaaaatggtttcccttaagttgactttgctctccagacaggactgagaagcaagaataaataaggcattgacaggtgttcattaatcatttgtgcaaccaaattcttagtaggctttgcatggacaatcaggaaacagcttctgcaaccaaggccggcctgcaggatgtttcctttgactagggcccactttgaacctcctgggtacttgagcaagc

SEQ ID NO: 4639 - DNA, 380 bp, Homo sapiens
  source 1..380: mol_type = other DNA
aaccaaggccggcctgcaggatgtttcctttgactagggcccactttgaacctcctgggtacttgagcaagctcaagggtgttaatccgacttcaccttgggctcagagggtcactgggatcagcctgagcccaaaaggatgggctaatgggagcggccgcaggtgcacgcgcgctcggccgctcccataagagaggcgcagttcggagatcggcactcctccgtccacaggcggtcctgcccccgtggccgcccggggccgcccaagccctccgggacggagagcacctgggcgggcgctaggacccgggcggcgcacctgttggctgggcccggggccccgcccgcccggcctccgcccggagtgcgggatcggcggg

SEQ ID NO: 4640 - DNA, 254 bp, Homo sapiens
  source 1..254: mol_type = other DNA
tgtggctgccaactgtttccatataaagttacatttggctgagcacagcccactgacagcagagagcatctcttacaatgcctcccttatagggctgtggcccgcccacctggtgggcgtccccggccgttagcgccctggaagcatccgggacttcagggtcagtacattacaatatctttcttacaggcttttaagctattagtctcataaagatacatttaaggtcctacgcgcttcgctagggaagcccg

SEQ ID NO: 4641 - DNA, 553 bp, Homo sapiens
  source 1..553: mol_type = other DNA
ctcagtgttttcttctataaaacagggaaatgctcagattaaaaaaaaattatacatataacactgattcaataaatgagtacttctactaattccaggagataaaacagaaagacaataaaggagtactattttcccatcttagcattttgatgaatagagaagagagaaattcagtcagattatctgtctgaaagaaaacactgctttatgtttctctcagaaacctgagcttgcatgacctagtgcaggaagaaaaggaagctctagaaatatgattcctgctttacatacaggaactagcataatgtcttgctaaatgtttgttcagtaaagtaagagtcaatgaatttccttttaacattctttcattttcctgtttgtatatatcaggaagtttgagttatgaatgacctcaaactagcttaagtaaatagtatactgaatcatgttacgggaaagaggtgttgacctcaagaagtactagatttggggatccacataccccaaacttgaagcttggatattccaaataccaatacctgtggtaagg

SEQ ID NO: 4642 - DNA, 574 bp, Homo sapiens
  source 1..574: mol_type = other DNA
tgaggcctgctttagcctgaggctggctcaggaaggcaacctttcacctacttaaggaaaagttcctactagtactgggtgagtgaaaatcttctctcttacagtacatgtagttctacttatccttgtttagtgtctaaaacgagaaacaattgtgttaagaacgttcaaaaacaataatttggagtaaactttattttttgaaaagaaatagcaaatttggtttttgacaggcagttccaaaagcggcaggatttgacagcaatttctgcaagaacgggataacagttaaaaacgaaaaagaatatgcatactatttcataatttatattgaaatttatacattacagcaataattgtgcgactgtaattttacggagctcctgcagccgcccccgccccgcgcagactgcagccaggtccggtccgcggcggctccgcggaatgacccgtagtaacctcgccccgccccgggccgccagcgccgcgctccccggcccgaattggcccagccccgcacgcgccaccgctcgcgggccaatgggtggcagcctcgccggccgggggtgagcgt

SEQ ID NO: 4643 - DNA, 774 bp, Homo sapiens
  source 1..774: mol_type = other DNA
tgattatgaattataaatctgagaggttccctggattgttcacattcatggaaggtattcaactcatctgattcaacaggagaagggaaatatttatagtacaacttcctttcgattgcaaatgaattctagttacgtatgtgtcacatttttcccaaacagtgaaaagactttttttttaagtagatgaaagtattttcatcagcactcaacttctgagcttccctttctgagatcagatattgtgaaagacagtaataaagaattattagctactaagcttgaagtctgataaatacccatttaaaaaactatataagctattaaagttggctctcatataaaagagagagaactctctgttttattcaaataaatatgattttaaaagaatgatggctgtggtcatgataagaaatatggcctttcatatttataataatgtaatttctttgtgggcaaagatgaaaaaataatccttgtctgtaaaactttcttacaacgcaagaaactattataacaagttgctagaacatagatgagattgtcttgcaattagccatgtctgtctgacacacatttctttctttgtaagagaaatcgtattccgtctcaaagattttgataaaagaaaaagaaaactgcaatttttgccacaaaaagacaggtggcgtaagcatgcaacttttttttctttttttttttttttaaatataaagtgattattttctcttggttctttgaaaaatcaggcgcagcggctccctataagca

SEQ ID NO: 4644 - DNA, 442 bp, Homo sapiens
  source 1..442: mol_type = other DNA
ttacagcttgggggtttagagactctcaacgccctagatagaacgaactttctacaccacaacttcttaggagagacttcttaaaaggggagatcgccccactgcactccagacggggcgacagagcgacactccgtctctaaataaataaataaataaataaataaataaataaataaataaataaatggcttactttttaaaaacagaaggataagaaaacgcttctagttctttctcttcctcgcgaaaagtccccggtgttctccgcgcagggagttccccgcgcagggagttcctagcgggccacgcgctctcgcctgaccacccgcgccgagctgcgggctgtcggggtacagacgcccgcgcgcgcaggtgcattcgctccaggtgcggccggctcggggcgggaacagctgcagccgaggcgggggccgcgctg

SEQ ID NO: 4645 - DNA, 421 bp, Homo sapiens
  source 1..421: mol_type = other DNA
ttttcagactgagtctcactctgttagggcctcccaaagtgttgggattacaggcatgaaccatcacgcctggcccaggaaatgattcttaacttttgcagggtctagtttgataaaaccagtggactgcttacatctagtctatctggtaaatataattaaaagaaaaaagaaaaattacagcttgggggtttagagactctcaacgccctagatagaacgaactttctacaccacaacttcttaggagagacttcttaaaaggggagatcgccccactgcactccagacggggcgacagagcgacactccgtctctaaataaataaataaataaataaataaataaataaataaataaataaatggcttactttttaaaaacagaaggataagaaaacgcttctagttctttctcttcc

SEQ ID NO: 4646 - DNA, 451 bp, Homo sapiens
  source 1..451: mol_type = other DNA
aagagaggctctcctgaggttgcatatcttaataaatcttatctaaatgacattataattaataaagaaataagagtcactcatattttatgttccacaggaagcaaacacttctcagctgatagtaccaggcagctcctggagatcaggtagtgaggttgttttctcatctctaaaatgggaatacaagagcatctatttcatctcttaaaattatcagtattaaatgagatgcaaagacactgagttaatgcctggtatatgttgtagttcaaagattctaagatgcactatattttttcacattttaacatttctgaaagtgtgtgcctttcaaacaatggcttcttcaaatggatgaccaggcaatacgggcggtgcggcggcagcactcgggggcttacggcggcgcggcgcccaagaggccccagcagccgaagggaaaccggcg

SEQ ID NO: 4647 - DNA, 471 bp, Homo sapiens
  source 1..471: mol_type = other DNA
ccctttgagggtctagatgttcagcattaatatgttcttttaaaaattgtactgtattaacagtttggtaggaaagcaatagaattacattgttaaagaacataaagaaggaagaaactgtaattcccctattaccgttttatgtttcggatgtttaaaaatatgtactattagattgcttttaaagaaaaattttaattttggataagccaacatttctgagtctagggtttccaaaactaaggcttggcctagaacactaaatataaattaaaaatgttttctttttttgaggatttaaatgtttccttaacctgaaagcgaaacagatttttgtttgttttgctgtaacgaggaagcaacttctcccagaaacttttgggcgcaaacgcccgcctcaaggcggccgcaatcaccccgccccggggctgtctccgcccctcccgccccgggggctgtctccggggacac

SEQ ID NO: 4648 - DNA, 515 bp, Homo sapiens
  source 1..515: mol_type = other DNA
ctgctagcgacgattctacactaacggctacataaattactgtcattaaagttgggtccttgggtccccagaaacctagttgcaggcccctggggctgggttcccaggacgctgcgggtacccgaatccctaggcagggagcctgcaaaacgcctcgaggggttatctgccccttcccggccgcgtcctggcggaggactgagcgctgtctcagggcgccctctgtctcttccagggggcggacatgccctgcgtctcagggacgcggtacgcgggagacccacgtgcagctgggcccgggctggcgccgcacctcggggtctgcgcgtctccccggcgcgttccgggcgcagccccacgacacggacccctggcggggcggcatccgagaagtcgcaggcagagggggcgtcctggaggccgggcgcggggacgctgcggcccgcggccacacaaagggggcgggggcggcaggaaggggcgggggcccgcgcggcgccgccgataaagccccc

SEQ ID NO: 4649 - DNA, 456 bp, Homo sapiens
  source 1..456: mol_type = other DNA
ggcaagtcaagattaaattaatttacattgatcacctgaggtcaggagttcgagaccagtctggccaaatcccaggtacttgcactccagcctgggcaaaactaattactttaagaattagaacagttgatcctcattagacactaaaaattataattacaattgttaattataattatttattattataattatatgagcaattataggaaagctctcactctttctaaagaatttgcgtgaataaaggaagactaattttctcaatgtctttttagtacactcagaattttcggtacagcaaataattttcagtgaagtcaaaattatttagataaagtcttctcttcgtgccctagcagaaaatgttgggtcaggttttgagaattgttttcaacgttgtaagttgataaaatggatgtcttttcaactaaacagattgctatcagcctagac

SEQ ID NO: 4650 - DNA, 486 bp, Homo sapiens
  source 1..486: mol_type = other DNA
ttttatcattataatcttggagaattttactcttgttgtatctgactcttaaagaggattatagtagatcggcatgtctgtctaaacacattcttttataacttccatttcagttgaaactttataagatttgtatacataactatggataaagttaactttgaacaagagttatttggtgatttttattttaaaaaggaaaccctcccaatatagttacattatttgtctaatcaagtatggtttacggaataaaaatttcacatgcatgttccaacctacatgtataacctaactaaagaggttctggagttacaaaagttagaatcatttctgtagttaataaaacccaattaatatgggtattatacattcttcatttatttattcatcaagctttcaaaaacctagtatgtgtcaggaggcctacaggctaggcaatttacatgtgaaaatgcagcttgttggggaagctgcaagcaattg

SEQ ID NO: 4651 - DNA, 286 bp, Homo sapiens
  source 1..286: mol_type = other DNA
ttatccggtaggttaaagataggtttctatcattccacttaacattatttaccaaatgctgcatttcattaatggagctgtcgtttagatggtaatgaaaaacaggttttaacatgaaattaaatttccaccttccagtgtggtgtgcacacccaccctctcccgggcttcgccccgcccaccaggggggcagcgcgctcgccctcttctcgcgagatctgagcgtcccccgcggcggccgccgggctccccctcccccggatctcgtctcgctcaggcggaggag

SEQ ID NO: 4652 - DNA, 319 bp, Homo sapiens
  source 1..319: mol_type = other DNA
cgataagtcaaattagacattttgactatcggtaattttggctttaaaaatctacaatactcttggtaatggtagaaatgatttatccggtaggttaaagataggtttctatcattccacttaacattatttaccaaatgctgcatttcattaatggagctgtcgtttagatggtaatgaaaaacaggttttaacatgaaattaaatttccaccttccagtgtggtgtgcacacccaccctctcccgggcttcgccccgcccaccaggggggcagcgcgctcgccctcttctcgcgagatctgagcgtcccccgcggcg

SEQ ID NO: 4653 - DNA, 569 bp, Homo sapiens
  source 1..569: mol_type = other DNA
gtttatcaattatatggcttttatcaatagctaatatttcaaagcacaatatatatatgagacaaggttcattgttaagcataataaatgtaaatccctaatttattctttattaaacatatatttaactaatatatactgaaagaggacccagtgaatgaaatgaaattgcatgctcatggaacataaaccgtacagttgtgttacgtgtcagtgcacttttaaattaaatagccccaaagatctaaagataactctgtagctctttgtaactatttgacatacagattcaaggagtccatgtctgtgtgcattctattaaataatagtcaagcataatttctttatttagatagccaatatacaaaaaattctaatatcttcttcttgttagcaattgctttaaacacaattctcagacctcagccatattattacagttgacttttggagtctaaccagaattataaagtttgggtggctgtcaattaactgttcaattcaatcttgatttgggaacagctggtagttagttactcacaggaagtggtaacttgacagctttcctt

SEQ ID NO: 4654 - DNA, 377 bp, Homo sapiens
  source 1..377: mol_type = other DNA
aataaatactcattgaaggagccctgaatggacttcgcaagggagccttccaaacgctggcttggctgaccccttcccgagggtggaagggcgaaccgagcttggcccccatgaggctgacggccttggacaggcgacggccttggacaggccccgcccggagcccctcggcggccgccccccgccctcccccgcagcctgcagttcccccgggcggcgtggacagccccggccggccagctgagcccgtgtgggcggcgcgggcaggagccgccccacacgcgtcccgcgacgcccgctccagatgcgccgctgcagggcccggccgccagccgagttggccgcgcgcgcccgggggagcgcagagttgaagaggg

SEQ ID NO: 4655 - DNA, 347 bp, Homo sapiens
  source 1..347: mol_type = other DNA
gggccagaacttctctgcccctgggggaagagacttcttagaaggctttcatcagatacctatctaataaatactcattgaaggagccctgaatggacttcgcaagggagccttccaaacgctggcttggctgaccccttcccgagggtggaagggcgaaccgagcttggcccccatgaggctgacggccttggacaggcgacggccttggacaggccccgcccggagcccctcggcggccgccccccgccctcccccgcagcctgcagttcccccgggcggcgtggacagccccggccggccagctgagcccgtgtgggcggcgcgggcaggagccgccccacacg

SEQ ID NO: 4656 - DNA, 514 bp, Homo sapiens
  source 1..514: mol_type = other DNA
cctgagaatgtaagtgcattctccctgaggaagcaacaaggttaaaagcagttttgtcttctgactttgtctaggcgcctcacttgagcggcgggtggagctgctctcaccgctgcccaggggtgccagcagccccacacagtttggctggctccttgggggctcccccaagctccccaggcaaaggaagcagagctgtggcgtttcacatcctcgctgctgctgctcaaagggcactgtgttgcccacccgggtggcactgggttcacccgggtgaaggcgctcatgcccccaggtccttgtgggccccccagcagggacgagtgggcagccagctctgctgccccttgaggcccagtcggggaagcagaggctgcggcagcagccatggtggccctgggcaggctcacctcctctgcagcaatgcctgttcgcatgtcagcatagcttacaggggcagctggcgaggtgtccacgtagctctgacggggacaactcatctgcatggtcccgg

SEQ ID NO: 4657 - DNA, 663 bp, Homo sapiens
  source 1..663: mol_type = other DNA
cggggctctgtagccgcagtgcccccccgtggcccagccacccaaacacccccgcctgcgcccgccgcggggattcctgcgggccgggggcgccccggttggcgcgcgtgtagggaggcgctgcgccggagctggcggccgcgcaggggcgctgtcctagcgctgcgccggggtcggcgcgggcgccgctgcagcacggctggggggcggagaggggcgggcgcggggcgggctcggcccggaatgtagagacccgggcgggagcctcccggcggcggctgcccggctgccgagcgcggaggctccgagtgagacggcggcgcggtcggagggggccggcgcgcagagccagacgccgccgcttagtaactgcagcggcagcgcctcccgaggaaccctcccctcctccccagccgcctggagcgaggggcagggatgagtctgtccctccggccggtccccagctgcagtggctgccaaagccactttctccacccgccgagatgggcccggatgggggctgcagaggacgcgcccgcgggcggcggcagcagcagcagcagcagcagcagcaacagcaacagccgcagcgccgcggtctctgcgactgagctggttgggacttggcaacccgcctccccctgcccaaggatatttaatttg

SEQ ID NO: 4658 - DNA, 569 bp, Homo sapiens
  source 1..569: mol_type = other DNA
gggagctgtgtgtgaaacaaacatttcagccaatatttgccttatgaaccctctgaaggtccctaacagctttttaaagtcactagacttcggaatatgataagggacctctcatttccggtgtgagtccccccgtcacacggatgggagcaggagaaaaggtgatatttacattttctccctacgttcctcaggtacctcacggcagcaaatctggggatcccaaggtggaaggctggcggtcagtcttacctgataggtaagaggcagcccagctccggcgcccccgcctccccccggcctcccactcggggctctgtagccgcagtgcccccccgtggcccagccacccaaacacccccgcctgcgcccgccgcggggattcctgcgggccgggggcgccccggttggcgcgcgtgtagggaggcgctgcgccggagctggcggccgcgcaggggcgctgtcctagcgctgcgccggggtcggcgcgggcgccgctgcagcacggctggggggcggagaggggcgggcgcggggcgggctcggcccggaatgtagagacccgggcg

SEQ ID NO: 4659 - DNA, 514 bp, Homo sapiens
  source 1..514: mol_type = other DNA
caagatagttttttcatatcctattaaatatatatagcattgcaacatttaactcgagtagcaaacaattaaaatggtatcaaattatgtattaatcgaaattctattaactgaaatattgcgtggtgcagtcccagacccaagcttctgggagtgaaaggtgcacccgcgaccagcaggagccaggcagcagctccccagcctccggctgcgctggggcccggaaggacgaagcttcccggcagagaacctgggcagaggcgtccgttgggtaggcggccgcgacccgctcgctggagggtccacactcgctgtgccctcgcggcccccttagagccactgccggcgcacgcggtctgcagacagcagagcgcgggcgcgcacaactaagcatgcgccgcggccgagccgtccgctttaaggccctcccctcccgcacccggccccaggaacccggggcgccccggatcgggaacgtgcgtgatgacgcacgtgcgcgcgaagacgtggggac

SEQ ID NO: 4660 - DNA, 334 bp, Homo sapiens
  source 1..334: mol_type = other DNA
gaacaactcgaggtttttgagaatcgccagtaatttcttaaataaatcttacaagtaattgctggttttagatgcaactcatctttcaagtttgaaatttaaatgtatgtttctttgttctgagtgactgaaacatacacatgaatcactcatccatggtgtagaaaactgcagcagtcttaatgccaaacagagaaaactgattttatttatgttttgtgataagaggtacagaaaaaaaacggaaatgacttgtcttgaccaaatgcttccactgctctggaggagacaacccacttcccctggttaaggaggggtgttgcgtgcttagcat

SEQ ID NO: 4661 - DNA, 589 bp, Homo sapiens
  source 1..589: mol_type = other DNA
ttaatcggcctgctgttaaatcaagctatttaatgcaataatgatgatgatgtgttagttactatatcagacttccataattgcattccaataaaactgattctgatttaattgtattttatgcatttcacaacattcttctgagaaacagttcggctggaggaccgtgccctggcacatctgaaaagcagttcaactcagcggagaataagatgggctttttggagtgccccgactgccaggccggtaactcggacgcgctctcctctggtgacccccgggccacaacccctccactgcccctcccaggcaggtgccggggccccgggacagcggttgccccacctatgggcgccttacctgtggggacgcccgcagcgccaggagctgccgccttgccacgccccgctgcctcttcgcggcgctctcgcagccaagcccggcggccgcaagttggaggcgggctggaggcggggaacgcggaccgccgcgggcgcggggaacaagcggggcctcccgagtgcagacgcccggcgcgcctcccgcttaatctgggcagggccgctggccactccctccaccctgcgca

SEQ ID NO: 4662 - DNA, 534 bp, Homo sapiens
  source 1..534: mol_type = other DNA
ctgaaaagcagttcaactcagcggagaataagatgggctttttggagtgccccgactgccaggccggtaactcggacgcgctctcctctggtgacccccgggccacaacccctccactgcccctcccaggcaggtgccggggccccgggacagcggttgccccacctatgggcgccttacctgtggggacgcccgcagcgccaggagctgccgccttgccacgccccgctgcctcttcgcggcgctctcgcagccaagcccggcggccgcaagttggaggcgggctggaggcggggaacgcggaccgccgcgggcgcggggaacaagcggggcctcccgagtgcagacgcccggcgcgcctcccgcttaatctgggcagggccgctggccactccctccaccctgcgcactcaggcgcccagccctttctcgcctcctgggcacgatgcccgggtaggtatgagggcgggacctgagccacgtcttccctcggtggggagggacgaaccgcgcgaccgagccctacaaaacccg

SEQ ID NO: 4663 - DNA, 418 bp, Homo sapiens
  source 1..418: mol_type = other DNA
gattctctggcctcagcctcccaagtagctgggatcacaggtagccagaacttttgtgctcaccagctagtggagactgcacatggaacagccaaagctcataatatgacataaacattttcttttgtctaatatttgcagcagaggaaatacctttctccacgtgttcattttcttgttgaacaatttcaaaataagaaacttccatagctggtaataatatcgatagaacaggaaaatatagtttagctggatatttttgtttttactttttagaagccatactaataaaggagtatattaaaggagcttatcgtaagcctatcttcttacataaatttatctcatagatttttttatgaataattattcattttttattagcgttaaattttaaccagaagattgggataaaagg

SEQ ID NO: 4664 - DNA, 409 bp, Homo sapiens
  source 1..409: mol_type = other DNA
aaatttatttgattgatgtctcatgcctccctaaaatacatgaataaatctcttcaaatattttagagtttgagaggggagaggaaatattttcactttccctacaccaccaaatcattttgaagtctagaatatttaggggagtacataagtcatgtgtacacctttagaaaaccaaggcatataaaatatcacattatttggccccgctctaagcaagggcttcctggggggagagagtgtgagaattcctaagcctcacagcatagaaattttcatgccagatgttgcaaaaagttcttaaagattacaaaatctaataaagccgaaaaacttaaccgcaagaggagtcacctgcggtcacctcgtttcgcccatgcggagccgttccagtgcgtgggccacgcgt

SEQ ID NO: 4665 - DNA, 589 bp, Homo sapiens
  source 1..589: mol_type = other DNA
actggacctcaggtcctgtggcccaatggagcaagaggccaccctctctggctttatgcaggggatggacagagcctgctccaagacctggcctaaaacctcagctctaagtcaccactggggatgaggaaagcattcaaactctttgagtatcagaatcttcatcttcaagaaggaatatctttattatccaaggatcattggtacaggttttaaaaaaatttgattaaataatttaggagtgttttggttacaatcctagctttagaaatgaaactcaaaattataaataaaaattattttgtttcatagttgagaaaaacataggttatcattacaacaatgtgctgatttttagaacaaagaaaaactcagattttttcatatgcaaagaattctctttccatgatgtggcatcctcgtgtcaatacatttcatgcaagaacagatagggaatgaacaaatataattgttttcaattttaatttacttttaattttacataggttttaaaaatttatagaaatcatttttattcctggagatatggtagactagatatcttagatgctgcagctgccttgggccg

SEQ ID NO: 4666 - DNA, 335 bp, Homo sapiens
  source 1..335: mol_type = other DNA
gattacatgaacgatttcatgtattcattccgtcaaccgggggaggtgacatctgagccccacctgacttagagctgagccaggccctaaagttccctccacttttggcaatggacaggagtcagaaaggagcttgctgtgttcagaaaactcatcaaagcagtggaaagcccttgaagagttttatgtgaaacgctttgcatataaatactgtctattattaatattattatcaccattgtcagcgaggccgcagtgactcctcctggccagcagagggcgccagcggacacttggctaccggccgcccagggcgggcctcctcttgccgtccc

SEQ ID NO: 4667 - DNA, 589 bp, Homo sapiens
  source 1..589: mol_type = other DNA
acataaaaatagttaacatttttcatttggttcattttgtaaatagattcacattacaaatgttttagctaaattgcatggaagaactttaactatatatgtcagtcttgactgactaaatttaacatcccagtacaattatttaaaatgaattaattaccagattgaatgaactatgaaaggaaataatttgtggattttgcagagaaatattcactgattagactctgaaattgctaactcaataaataatccagtgattaaatctttaaataagtaaaaaattcttcatgctgacctgttttcacttatgctggagtgcagtgacacgatctcagctcactgctcaccatgttgaccaagacatctgattttaaaagtgacttgctaagccatatttatctcaaataatgttgaatgttttctagttgcagagtattttgaaaatttggtttaattttagaattgtttaactagttttaaattcttagcgtaccacggaatgttaaaatacattgcaccatcccttcagtctatctctgctaaaagagctttcagaaagaaaccaaagatttgtccttttaaaact

SEQ ID NO: 4668 - DNA, 353 bp, Homo sapiens
  source 1..353: mol_type = other DNA
gagatgaaaaaattaactgggcgttaattttgagggttgtagtgagccgagatcgcgccactgcactccatcccagagggagactctgaagaaaagaaaaaattgtttgtatcagattttcaactctacctcctttaaaaaaagtgcagagtgattataaccactggctctggagccaggagctgtgtagagtgggggtgacagccagccagccctctctcctaagcttaataaatggattcataagaaaggacatatttgtaataactgcccagaaaaccggccctgggccaggacgcccggattcgcatatgcaaagcgtgggggcgtggccccgggctccgggccaggca

SEQ ID NO: 4669 - DNA, 288 bp, Homo sapiens
  source 1..288: mol_type = other DNA
tctctcatgatagtgaataagtctcatgaaatctagtggttttataaaggtgaggcctccctagctacgtggaactgtcgtatgtctttattagcagtatgagagcagacaaatacacagctgtagtgtacagtttccagtgagctcagatgaactgaggggatgttgggcctctcccctcctctaagcacatgtgagccagctgatgaataatctctcttctccttcaagtggaggagtaactcacaaataaattatctgcatctgaggctctttagtgaagtcagt

SEQ ID NO: 4670 - DNA, 393 bp, Homo sapiens
  source 1..393: mol_type = other DNA
ttatttccggtaacattaaaaaaaaatctattttgtctgatatatcatattacattatcatcattagtactgttatttgacattctgaggctctatattgagttatattagtacatcatcatggagagttaaataatgaatgtataagattcttagattaaatcaaggtgaagctgaggtttgagccttacttaaaggctgatattcggacagtactgtagcactgttatagccatgtgatggtaaatgtgtagcagagaatcctctattttcagacacaaaaatgattaagttaaaactggatgaaagtcttttctgcttttgctctttgcaaatacaaagaatttaacaatatgaggaaaaagcaggaagttttccttcaatggggaaaac

SEQ ID NO: 4671 - DNA, 434 bp, Homo sapiens
  source 1..434: mol_type = other DNA
tcaatgtcaattaatagtaactttgtatagaaaggcagatgggagccatgaggtgctcatccatcacaaggccatcacagtccccatggggggcgacaggctcctcctggggctgaataacaagcaattcaacgcctttaaaaaattgcctttacttttacagttactggctgtttactgaaaatttcatataattttaaatttagaaataaaaacttcacagatggaattaaatttcatataattttcagtaaacagccagtaactgtaaaagtaaaggtaatttttaagattacattttactaagtgaagtaaaataagtgagtcaatctagagacattttaagaacttaaaacttaggttaacacaggaatgactcaagtttgagaaattccagttgaggccaaattccttaaaggaaattgacaagctgg

SEQ ID NO: 4672 - DNA, 555 bp, Homo sapiens
  source 1..555: mol_type = other DNA
aattttaaatttagaaataaaaacttcacagatggaattaaatttcatataattttcagtaaacagccagtaactgtaaaagtaaaggtaatttttaagattacattttactaagtgaagtaaaataagtgagtcaatctagagacattttaagaacttaaaacttaggttaacacaggaatgactcaagtttgagaaattccagttgaggccaaattccttaaaggaaattgacaagctggaattctgagttacttcatccttaagaagtggtgcataactcacaccttgttaggattgtatgagtatgtgtgcatacaccgtttaaccagccttccttttgggaaacgcagtgtgctaaaaaagtgcatgcagcccaggctgtggcctaggccgtcggttcccggccatgcccctctgaggtcgcccttagtgaggacacgaggtgccctcacctctcgccccccgcgcgccggagccccgggtcgccaccaaccgcccgcggagccagacctcccagctctgcgccccaggaccgcgcggtgcaacctgcgc

SEQ ID NO: 4673 - DNA, 373 bp, Homo sapiens
  source 1..373: mol_type = other DNA
tcgttgtacttactaggaggaatagctaaaagtacaagtcccaaattttatttttaatttgttttttaattggaaaaagaagcagattcaattttagcagatatttgctactatcagtgtctttcttcttaagaaaactgtcctttttgctcaggccctcccaggttctgagtgctgtcctcgggttttgagatttctatgtgcgcacacggttctaacagattctgagtgatcgaccataacatggactggggcccgcctgcaggaggcaggagcctggccacgcgctcctgagcgggcggtcgcagcgcatggccagggaggagctagtctccgtgggcgccgccgccgccccagcctgcgcgcctctctc

SEQ ID NO: 4674 - DNA, 307 bp, Homo sapiens
  source 1..307: mol_type = other DNA
ttggctagaaagaggagtcctttgtcaaggtcgttgtacttactaggaggaatagctaaaagtacaagtcccaaattttatttttaatttgttttttaattggaaaaagaagcagattcaattttagcagatatttgctactatcagtgtctttcttcttaagaaaactgtcctttttgctcaggccctcccaggttctgagtgctgtcctcgggttttgagatttctatgtgcgcacacggttctaacagattctgagtgatcgaccataacatggactggggcccgcctgcaggaggcaggagcc

SEQ ID NO: 4675 - DNA, 443 bp, Homo sapiens
  source 1..443: mol_type = other DNA
attaatagttatttaggacaggtcatctcatggtggccggcactagccggggagcctccaggcctgcgagcccagagcagagcctcctgctgcacctggcagatctcaggatgcccctgtataggttaggagtcgagtcctctccccatcatgaagcatggccttccagagagaaggaacattctcagaacccagcataaggcagcacttcagagatgcctgttatatggaaacccgggacccccggggctacggtttccttattcccaacccaatgggggcttcctgcagggaagggccggctgttctagcccggccgcgctgcactcccgccccgcgcggcccctgggcgcccgccccgggcatgctcagagcgcgcaggtccgggcggcggcggcgggggaggagggagcggccgcccccgccgccgccgcgcgctcgcc

SEQ ID NO: 4676 - DNA, 577 bp, Homo sapiens
  source 1..577: mol_type = other DNA
tgcgattcctgccgctagcagcgcctctgccagggagtcaattgacccactggattcgaatccagggggcgcggccagacgttccttaggtgcggcaaggccccgcgctctggaggacaagggccccgggtccgcctggcggaggcgaggtcacttccaggcgaacccggctgctgagcaagcgtcgggcgcagggttccgtggccccgggggatgaggcaaggccgggccccgcggcggtctcgcagattctgaaggtggctgctgcgagcgcgccgcccctcccttgaggcgccctgccgcctcccgcgccctgccctgcccgggccttggggcgcactcggtgctcccggctctggaagcccctcaaagcctgtaccagggccctgggggatggggtcccgcatcggaaagaggccccactccccgatgctccagagccggggccgccaggcgccccgccccccgctcgccccgccccgccccgccccgcaggccccgcccgccgttgcccggggaaccgcggatcccgcagctgcaggaggcgcccggcccggcggagcagccctagccgcca

SEQ ID NO: 4677 - DNA, 549 bp, Homo sapiens
  source 1..549: mol_type = other DNA
aaaatctcccggcgcggagccgggactgggcgcttccggcgggctacggttgctcttggcctagcacagcctgcgtcccgggccccaaccgggccaggtagggagttaggagagagggtaaaccgcggctcgcacttgcctgagaccgggtgaccagtaactggtaatagtcggcagccacgacgccatcttgggacgccaccgccgtcgctagtttaaattgaaccggaaccctgatccgtgaaatttccagctccaggtcccgggtgacccgagggggaatcccggcggagggataccaagtagatctccacagtccccttcctggtccctcgaagggatcgggcggataggcagcggtgccggtcccgcggacgagcccgtaaccggagcccggaggcggcacgggcggaggcgcacgccgggcgcggtgctgcggctcagctggaacccggagccgccgccgccgcgccgctggggggggtggggggagctagtggaagttactgccgcgccaccgagtccggaccggagactttggggcctaac

SEQ ID NO: 4678 - DNA, 534 bp, Homo sapiens
  source 1..534: mol_type = other DNA
aggtgaggccgcacgcaagccggagacgcccgttttcctcttcgcgcggtgccagggactagccgggctcggggagagcagggacacgcgggccgtcggaccgaggagaaaatctcccggcgcggagccgggactgggcgcttccggcgggctacggttgctcttggcctagcacagcctgcgtcccgggccccaaccgggccaggtagggagttaggagagagggtaaaccgcggctcgcacttgcctgagaccgggtgaccagtaactggtaatagtcggcagccacgacgccatcttgggacgccaccgccgtcgctagtttaaattgaaccggaaccctgatccgtgaaatttccagctccaggtcccgggtgacccgagggggaatcccggcggagggataccaagtagatctccacagtccccttcctggtccctcgaagggatcgggcggataggcagcggtgccggtcccgcggacgagcccgtaaccggagcccggaggcggcacgggcggaggcgcacgccggg

SEQ ID NO: 4679 - DNA, 546 bp, Homo sapiens
  source 1..546: mol_type = other DNA
ggttctgtgaagggccctcctcattgcgggaagccggaggagggacccagcgacccctacctcccgccaggccccggtccctccggccgcggccgccctcgagcgtccccgtccacccccggcccggtccttccgcggccccgccgccgccggcgccgggagcaggccaagcgggggccgaatcgcggcgatgacacaaccgggcttgttaggccccaaagtctccggtccggactcggtggcgcggcagtaacttccactagctccccccaccccccccagcggcgcggcggcggcggctccgggttccagctgagccgcagcaccgcgcccggcgtgcgcctccgcccgtgccgcctccgggctccggttacgggctcgtccgcgggaccggcaccgctgcctatccgcccgatcccttcgagggaccaggaaggggactgtggagatctacttggtatccctccgccgggattccccctcgggtcacccgggacctggagctggaaatttcacggatcagggttccggttcaatttaaactag

SEQ ID NO: 4680 - DNA, 384 bp, Homo sapiens
  source 1..384: mol_type = other DNA
aatggaaaaatcaataatccgtttaaaatgcagtgagccgagatcgcgccactgcactccagcctgcctttcagtatttcattttaattaaaaatttttagccctgctccgcaaggagcagtactgttttaaaaaaaattttttttggacaggctgattttacatttgtaatatttctaaatcttaaattaaaaaatatatattaacatttatattttaaaagatgctttcaaaaatataaaaaaattaactcattacctattttgtttaagggctaacaaatatatacaaacttctaaatttcattttataggaatagtatctattgaagagaaaaagtaggcataaaaataggccgatggttactttggagataatataatc

SEQ ID NO: 4681 - DNA, 446 bp, Homo sapiens
  source 1..446: mol_type = other DNA
gggcccatgctactttagcaggatctcattttaactaatttcatctgcaatgaccttgtttctaaataaggtcacagtctgtgaactatctttttggggggagacataattcggcccctaacatatatgtacaaggttaaacaaaatccgtgtttaaaagtcatatttaggaataattatttcacttatataaaaacatcctttactaattgggaacaattagtttgacacagtaggcagaatgtaaaagcattaaaaatgttgccaatggcttcttagcctttttactccagcggagcaggctgcaatgcagtggcgcagtcccggtacactgtaccctggactcccgtggtttcaccatgttgatcaggctggtcttccgcccacccttgggattacaggcgtgagccacggcgcccggcggttcttagctcctatagggtctc

SEQ ID NO: 4682 - DNA, 341 bp, Homo sapiens
  source 1..341: mol_type = other DNA
cttaaaatagagagattatctggattatctcattggactcaatgtaattgtgggcggcctgcagaagctggtggctctcccctacatcaaggtggccaacaccatgatctcagccagaactgtaaaatattcctctgctattactgtggcagtttatcacaacagcagcagaagaaaactgtccaaggcaaagcactatgttgtgtgatcccagcactttggaggccaaggccagaggaccaaacccgtgtctctaattgagtcctctttggccaaaaatattcttctctcccatctcagagaaatggaggctactgctagtctcacttgcatcctggatt

SEQ ID NO: 4683 - DNA, 268 bp, Homo sapiens
  source 1..268: mol_type = other DNA
cttgaactcctgggctcaagcaagtcgcctgcccacatgtcaatgtacattagggatctttaaaaaataatcttatacaaggttgttagagtttgataacacactggataaattccagtgaattcattcagttatgtaaacatcaccacaatccagtttgagaacattttcatcaacctaaaatgtacagaagacgtcctgggagcctcacaagtgcccatgaggaggtggagagaggctgcaggcaccgacctgccttcagcttccg

SEQ ID NO: 4684 - DNA, 264 bp, Homo sapiens
  source 1..264: mol_type = other DNA
aggatggtctcaaactcctgaccttgtgatccacccatctagtgcagtggtgcaatcatagctcaccgcagccttgaactcctgggctcaagcaagtcgcctgcccacatgtcaatgtacattagggatctttaaaaaataatcttatacaaggttgttagagtttgataacacactggataaattccagtgaattcattcagttatgtaaacatcaccacaatccagtttgagaacattttcatcaacctaaaatgtacagaa

SEQ ID NO: 4685 - DNA, 224 bp, Homo sapiens
  source 1..224: mol_type = other DNA
ttgtaaattgtttcaaatcctttacagaaacataaatgtaatacatatcctcctgtatcatattaaggctgtcactctcaagatttcagtgaaatgcatgaggaggagttgagagagttgtcttttacctctgtcactgggcctaagccatccagcccaggctcactaaggtgcatggccagccctggagcctgactgaagatttgaaggggtggggacaaata

SEQ ID NO: 4686 - DNA, 329 bp, Homo sapiens
  source 1..329: mol_type = other DNA
tgttgaatcagaatctaaatggaagatagaacctcccgcgggagccaccctccagcctctggtcccagggttataatgctgaggccccatgtcaggacctaccttagtccagtccatgctctcccatgggcctgagagaagatttgaagtttctggctttctcagcaaggggaaggggcaaacatggagttttccccccaactcccctcttaagagggcagagcagccacaagcaagtggactccggaagttaaataaatactttcacttttcttttccccatttgggcagaaatctgtgagggtgagtcagtctgtcggccgacttcc

SEQ ID NO: 4687 - DNA, 284 bp, Homo sapiens
  source 1..284: mol_type = other DNA
ttctaaatttttttcaaagttttcaaaggaactgtgttcctttggatagttttccttctaacagagaggaccctcagctgcaggtctgttggcctgctggggggtgcctcccacagtctgcccgttctcagtgtgctcaggacatttaagtctgcagaggttacgccctgcccccagaggtggagcctagagagacaggcaggcctcctggctgctttgtttacctaagcaagcctgggcaatggcgggcgcccctcccccagcgtcactgccgccttgcagtt

SEQ ID NO: 4688 - DNA, 305 bp, Homo sapiens
  source 1..305: mol_type = other DNA
gaatgatgaatcagaatccctcccgcgggagccaccctttctccctccagcctctggtcccagggtgggtcccaatgtcaggacctaccttagtccagtccatgctctcccatgggcctgagagaagatttgaggttcaaggggaaggggcaaacatggagtttcccccccaactccccccctcttagagggcaacattttttttggctgtgtattgcacaaacaagtggacacccgggagctggccctgctcgtcccctgggccgttaaatactttcactgagtcagtctgtcggccgacttcc

SEQ ID NO: 4689 - DNA, 393 bp, Homo sapiens
  source 1..393: mol_type = other DNA
taagtacctgggaatggctggtcttgaaccagtattatacatacctgtaggtttattagtcaattatttgtcaactgtttgtgccacacatatggcatttgtatgtgccaggctccgttgtcagagctttgcaatgcactgtattattacacacttttttttttaatgtgtgaggaattaaatccaggttgctgatttaaataggaatattcccattaatctggaaggcctctcgcagaattaaagcgctcaggcggaggagaaagggctgagccccgccttggaagctgcggcggaggaagaggagggcctcgcgcctacttgcggcgccctgagtccgccggccgctcgggggcgcccgaggcggaagggggcgttgcggcaccgcccgac

SEQ ID NO: 4690 - DNA, 409 bp, Homo sapiens
  source 1..409: mol_type = other DNA
gcggaccactcagcacaacctgtgtgtgttgctgggcgctgtccctggcccagtctggaccaggcctgcttcccagtacccgtgatccgagcctctgacaccccgtcctcctggatgagagggagcaggggcggccttcccttctccactccaggcggctccagcgtgcaccccaggaccccccgacggaggcagcagtttggcgcctgtctcaaagcctcctccccgcgccaaggacaggtcggaggaggggggcatttgcctggcaaacactgggttaacactccgacccgccccaggtgcggagcggcgcgcccggcaggggtcactgcgggccccgcgggcgggaagggggcgcaggcgcggcgggcgccggggccctcccgcggggacggggcggggagggctg

SEQ ID NO: 4691 - DNA, 394 bp, Homo sapiens
  source 1..394: mol_type = other DNA
gacccatgtgttggatgaatcatccaaaaaacccaggtttcctcccagcacctccagggcatgagagctgcatctgccggggtagtttcagcccagactttcctgatgggctggaatctatgagggctcccagctaagagccacccaggcccacgggtgagtctcagccctcccagccctgaaggtgggagatgccagggaaatctctgcttgcagggccctaggaagccacaggcccaaggctgccccaaatctctgtgcaggcctgggacatgtggggccccaccccttggcaggtgctgagaatggctgcccctgcgtaggaggcttcctcctccagaggagagtgtagaccctcctcctggggtgacactggagcggctcaaagagcaga

SEQ ID NO: 4692 - DNA, 433 bp, Homo sapiens
  source 1..433: mol_type = other DNA
gtgaccgaagccctttttgctggggcaggagctcctgcgcttgccagtggtgaacacattttatgttgcagtcacagtatgagcttcagattgtcttttaaaaatacttttaaaaatcacatttaatgagcacattaaattaattaatctagagaaagattcagtcacctgtttaacccaaccaattgacaaatgtagttttctgaacagctgttatgttctcagggaaaattatccaaactcccctcccacagtgcgggagggcaggctttgggggaatcttcagcagagaggtgtctgaaggcagcgctcaggtggctgtcaccagccccgtagccagggctgtgaggaccagggcagccgctgtcccctgcctagcctggcagcctgggatgaaggaggacaccaggctggtgtctgcagagaagacccc

SEQ ID NO: 4693 - DNA, 738 bp, Homo sapiens
  source 1..738: mol_type = other DNA
aagtattttttctaatatagtaaattttgagtttttaaaaaagcagcaaatactgaataaaatctgaagtgctcagcagagctaaaatatgtcatcactgatttataagtaattaattttaaaatatgcatctataatgatcttttaaaaggaaaccttgagaatgctgaggttctaatactaagctagtcttatggttacagaaaacttaaatagcataactattaagatttaaacaccaattttctgaaataaggcaaaaacgtattttcattacttgtattttctccaacgtaaagtctatggggaaaaaatgtttaaaaataagcagtaaaaaagtttctgctaaaacctatgtatacatgtagaattcagcctttctgtgctcttctatataaggttgcaaccagacaaaagctagataagaatcttgtttcactgctagaaatcagaactgtagaaatcactataggcttttaaaacggcagaatcttcaaagaatgaaacctctaaaatagctagattatatcttattttttctcaaatgtgaaaaacgaagctaaaatgatcaagtttattacagtccccccaaatattaaagagagctcttaaaaatataacttgaataagggccatgaactggttcaacatgcttaacagtggttttatgaattacaatgaataacctccttggcatgcttgcagctatacaacgtatttgtttcactgctttcaacc

SEQ ID NO: 4694 - DNA, 624 bp, Homo sapiens
  source 1..624: mol_type = other DNA
aaaatgtgttatcaagcacatttaattcactggcaaccacaagacattgattgtctcagtactgactcttgaaataaattgacttcttgaagctagcataagactgcaaatggccattgcaactgccatttcaaatttctgaagataagaatggaagacattttttctccctacattttaatatattgacaacactggacatttttccaaaagtaagtaaaaaccttcattgttcaactttataataagccaatgattacttgtggattcattatgataataaagcacttctatgggattttcttttttttatgataggttttgctttagaaaacaattgaaagcttgtgggagatgtgttgcagcgagacctcccaccagtaggtggcactgcgcgcaatgctcgcacctcccctcaacaccctttctctcagcaatggcgggtgatggtggtggccattctgacctcagaccagtgttccgttgcgggactcggaggtttagagaaaacaatggtgttctctgtgtacccttccgcgagggctggggagtataccgccgcgcagaagacgcaggccaggggagaattcgcgccgggcggcaggcggggtggcgggcagcccc

SEQ ID NO: 4695 - DNA, 577 bp, Homo sapiens
  source 1..577: mol_type = other DNA
tattatggccatggattgaagatttattttcaatccatattacctggacagaagatagggctctcttctactaaatacagctttttttcttttggaagccacaggcctcctccttcttggaagcatggaggtggaaacactgaggggagggattttctatccatggccatctcttcaccctcattcagtgctgatgaacttcagttcaaaagcatcaggtctgatttatttttaatagcccacatttgacatggaaaacaaaaagtttctctgaaatccttggaaaccgctgcagtggggcgggaccctggtccccggataaggtggccccaggtccctcctttgtggggacaccacactgtcctagtttgtgttctctacgcgaccacgagctccttgagacaaggggttgagcctgctccggctcatcccgagagccggcgcagcgactggccactgctgggctgtggaccctcacttccgccgccaggaagtttcggggtcgcccaccttccctcccaggctgctccgcgtcggcggcgccccgcgcgattggctgcgccgcccccacgtgacg

SEQ ID NO: 4696 - DNA, 486 bp, Homo sapiens
  source 1..486: mol_type = other DNA
gtcctgctggatgctaaggaccagcgatggctctccctgctggaggagggctgggccaacaggccttcccttggtggtggggagccctcagaggtgggagaggcctgggggctttgctcctggccctaggtagcccaacagctgggcaagggggagaaaaggacaccctgtctgcctctggccccaaactgggccttggggtgccccagggtctgtacaggagggaccggcgaccgccctccccccgccccgggaggctccgccagggacaggcgtccccgggattggaggtgacccccgtgggttccgaagccccgcctcggcctgtctactaggcgcgcttggggagcctaggggccgtctcggagaaatggggtggtccccgccaggcggcggcggggcgggccctgggcgccgaaggggttaaggcacctgggccaccgcccctgccggcccctcctcccgcggccgggaagaggaaagtcg

SEQ ID NO: 4697 - DNA, 514 bp, Homo sapiens
  source 1..514: mol_type = other DNA
gtcactggcggcctccttcgccctgccgccggggaaccctgccggtggctctcgacctgctcccgggccatctggggcggtcaaaggcccggctctgcggtcggccctcccaggcccctctccctgccctgtagaaatatcttgcatttctcacagaaaactctcaggagactgcctgcagccggggggtgcctccggccccatgctcgcgggcaagcagggataacgggaactccgcggtccctgaacttccggtgctggcggactcctcgctccagggccaccaggagccgcggcgtgagtgcgtgccgggaccgagcgcggggtctctgaggccaaggacgcaggccgggacccgcgcgcccacggcccaatcagcgcggaccttgcacaaagcgagccccgcccccacggcggcctcggcccgcctactccccgccccgcgccgttcacggttagaggctcgcgattggctgcggagtcacgagggcgccgtcgtcgcctttccacaggc

SEQ ID NO: 4698 - DNA, 363 bp, Homo sapiens
  source 1..363: mol_type = other DNA
catacccccacccttggtacagtgatggggggagtggggaggtccacccccaggctagactttgcccagtcctgcagggccgagcgcctggactcagggactggaggccccgtgaaccgcaccggggcatgtcgacttcaaggggctggtgggccgtcacaccgtgacggcgttaagctaaaggaatcacatgtgagccccaggtctctcgggctcctccgaggtgtcgcctccacgctgcttgtggaggtgtcgcctccaacggccgcgtcctccgccagtgcgggagggggcgccgcccgggctgcggggactgcactgccccctggcggcgttcccggccggacaggcggggcgtcgggg

SEQ ID NO: 4699 - DNA, 264 bp, Homo sapiens
  source 1..264: mol_type = other DNA
tgcaagtcagccgacttagggctgaattctaacgatattctgagacgatttgaagaagtcattttgttcatgtaaacagaagttaacttcgggattccgaaacgaccaactcagcgggcgggtttgtgaatttgcgcacactgcgcggcaccgcgtcgcacagtgcaactcagctgccgtctcagacggctagtgtgctcagtggctggagcaggtgtcctatgggacttcccggggagggcccttcccattgacgttaacggc

SEQ ID NO: 4700 - DNA, 740 bp, Homo sapiens
  source 1..740: mol_type = other DNA
tcctggcccggcaggcccctggaggaggctgccctgaggctgtcgcgacggcagtgaccgctcgggaccgctatgccgtgcggggcccgcgggctgtcccactcgagggctggagccggcatcgcgcatcgagtccgcttgatacatgaatcgacttggccgacggacgccggacctgatggtgggcaatcgaggtcgcctgcccacaggactaggggtgccctgccctgggagggcgcgagggcatggcagagggacggggcggcccaggtgcccgggtctcggcctcgtgacctcactgggacaatccttggtccaaggcgcccaggcgcggggggcgggcacctccgcgggcactgcgctgggcaccgcccggggcgagcgcggcccagcaccccgccttcccctcccccgcgctggcagccgtcgtgtgccctcttccctccccctccttccgagcagccgcggggagggcgggagagggagggacgcgctttggctttctgcgtcagcagccccagcaaaacagctgcgggagcgcgcgtccggaacgcgctcgcgcacccctcccccgcgccctcgcgatcggcgactgcgcagcgcgggacgcgccggggcactgccgctttaagcacgcccacggaatcgagccaatgagcgagcgcccgctccctgcgctcagccaatagcggccgggcatgggaagccgagcgccgcccactaatctatattaaagcttc

SEQ ID NO: 4701 - DNA, 458 bp, Homo sapiens
  source 1..458: mol_type = other DNA
cggggatcggaacccagccggcttctgcgctcaggacgccccttggggcgcctctcgcgccgggtcccgccgggtgctcggcactgtggggcccacctggcgcggcccccgcccccggccagtctcctcagtgagcggccgcctcccaagtcctcccggccccgccccgctcccggacggatacagtagcccctcaggatcgacatgatgcggcggtcgccgcccgcggctttctcactctggtcggcggagcctcgcagacggtgcccaggagccgaggagccgcagcccggcttggagacctcgggctagcagccgcagcggccagaccaggaccggcctctcgccgttaacgtcaatgggaagggccctccccgggaagtcccataggacacctgctccagccactgagcacactagccgtctgagacggcagctgagttgcactgtgcgacgcg

SEQ ID NO: 4702 - DNA, 327 bp, Homo sapiens
  source 1..327: mol_type = other DNA
tttatcttcatataacttttcaggacataataggtgctaaagaaatgttttacgcacgataggcaaatagggctgtttttctctctcattttcaagacctgaaagactatcaatgacattttggtcatagaaccattgttggcttaacccatctcttgcttattttaaaacattttctgaatagaggtcaagaattgacaaagatagcaagctttgtcactttctgacttttggacttagttaactcacctgaaaatagcgcagtagccatggggagctcgggctgcagtaccgtctagcccaccggaggtcgaaggctgtaaacgc

SEQ ID NO: 4703 - DNA, 396 bp, Homo sapiens
  source 1..396: mol_type = other DNA
tttctatggtcaccaatggacacttgatctccatagcttgagaatggcggccatcccctgggtgggccccttgggcagcctgagggcagggaccatgcggggggggccggcggcgtctgccgtgcaagacctggcccagtggagcagagcctggaggttcaggagccgggtctggaaggctccttccggtggaagaggggcccggagccagccggcgcctggcacaaggcgtctcagaggccgcccactgggagccaaccgttgcagccagttgtccccgcgagcgaggccggagaaggcgcggcggcccctggcctggccatttcgcccttgccgccgactacgagctctgcaccgcgcggcctcgcccggccaccgtcgctctctagaacgccg

SEQ ID NO: 4704 - DNA, 553 bp, Homo sapiens
  source 1..553: mol_type = other DNA
ggcagaggctggactgggccgctggctaggaagctctctccccagcctgtgaaagtgcacaggatactggagcgggcttcccccagcagcggatcctcgcgtgggtggagtcagaccccggggcatgagcacgacacccctgcactctccagtgtggaagacttgcgctcccccctgcggcccaggcgaacctgcgctcccgccctgaccggcaggtgaaaggcggagctgcaatgccatcccgcggctgtgctgcgtggatttcgggcagcgccatgcacctgcaaagagggctacgtatcccttccaggtaggacctagtgggtgcacagggcaccaggcgcaccgatgctcggcaggccagggcgcgcgctcgctgcaaatggagttcccctgtgcgctcagctctgcagctccaagtgcagcctggagcgagcccgccgagccgcgggatccctccggggtgggataagggaggggagcccccgcggccccctcccggccctcggcgcggccgcgtgcgtggtgtcattggcccgggcggcccggtggg

SEQ ID NO: 4705 - DNA, 497 bp, Homo sapiens
  source 1..497: mol_type = other DNA
gatttgtctctaaagtacagatataatttgtatttgtattggacctaattcctttccttatattcttaagagtttgggaaatagttctgatttgtgacctatttctttcaaatagtcttagtacaaatctatatgacatttttcctgtttgacatctaaaatagtgaagttactagtgttaggtttatatgaaacaccacagtttaagtagttactgtttcattagtcttgtaccaaaaacaactgttacttagcaaccagtaggtatgaaggccagagcaatttatgtagacatctgaatcaaagatacatttgtgaagatgatcaaacttttaagtcctcttaaaagatgttttcttatagacttagtgttcatttattcacttaatcatcaaatataatatttgagtgcttacttggtaccaggcacgagagtgaatgcacatatgatctctgtcctcagcatgacaagtgttttagagaaatcactgaaatga

SEQ ID NO: 4706 - DNA, 483 bp, Homo sapiens
  source 1..483: mol_type = other DNA
gtccccatgagggtgacatcttccctgagagccccaggacgaccagcaggaagccaggcggggggcaggcaggaggactgtgaggtcccctgggttttgggggccaagcctggggctcgctggggtggactccccacctgcgtcgtccaacattagtgtgagtgcacccacacaaaatgggcaggactggtccggccccactcagtgctgtcaccattggccccacagctgcccacagccctagagctctgggcccagattccacctgtccaggcgggtgccagggcagcaaagccccccacgtgcccctttcccacagggcccaggctcctggcatcaggaggctgaacccaggccctggcccagactgtgtgcgacagggtgtcttgttccgggaggggctcctggctgcgggaggcacaccacactcattcagccagtgtggcttcaggccgggacacagttctccctgatttaaacccg

SEQ ID NO: 4707 - DNA, 414 bp, Homo sapiens
  source 1..414: mol_type = other DNA
cagaaatactttttaactcagcctgaggctatcaaaattctgggcatgctcagggcccgtccgcccaggcaccctctgcctgtgcaagggaacaggtgaagacccagcccaggcctgtctggccgagggcactggactctcccccacgggcaggactggcccggccccactcagtgttgtcaccattggccccacagatgcccacagccctggagctctgggcctagattcctagccccacctgtccaggccaagaagggggtgccagagcggcaaagccccccatgtgcccctttcccaccgggcccaggctcctggcatcagaaagctgaacccagtatcttgtctagtcccctggcggcaggatgcacttcagccagtgtggcttcaggtcatttccctgatttaaaccca

SEQ ID NO: 4708 - DNA, 382 bp, Homo sapiens
  source 1..382: mol_type = other DNA
ggtatatttcactgagcataatgtcctatgagggtgttccccggggcccatggaaaacatacctgtgcaagggaacaggggtcaagtgcacaggctgctctggaagacccagcccaggtctggctgacccagagcactggcctgcgtcctcaggacataggtgtgggcacccatatacaccaagtgggttctagggcagccaggccacccagtgtgcctgggctcgtgacattacgagccctaacccgggccctggcctaggctgtgtgctctcttcacaccttgaatgaggtgaatgaaggagtggcaacgcgtctcccacaagacactgtgagccacacccagttacagccaggggcaaagtcctcccctgatttaaacc

SEQ ID NO: 4709 - DNA, 662 bp, Homo sapiens
  source 1..662: mol_type = other DNA
gccaggctgtctggccaaggcaggcaggcaggtggctttgcctccaggcagtggggaggccccacaggcggtgagtaaattcagagtccctgcacccaagggtcttgaggctcagggcctgtctgaggcctagggctgctggccagagggggcaggctccagccttccctggctccagcagggcctgggccagggactccctgagccgtggtgccagggccacccaaggctggggaggaggggaagggggcggcaagccctcttcttgcaggagtccccgctgagctcccttcaccaggggctaggtgaagagccctagtggagagcccatccagggcaggggtgcgccagggactgtgccggcagacacaggcactactgacaccgcccccagcccttcggaggagtcctcgccagcccctttccagccggctggtgggcggctgggaggggacccttcacgggagtactcgctctcggaacgcggctggacccggagtccccgaccgcagcccgcgcacgacccccgggagcctgtctccgcggccgccgacccacgtccgcgctgccgccccactgccaggtggcccgcgcgcggggcgggcggaggagggtggagccgccggcgcgccccctccctcgggccggcaggcgggcggcgc

SEQ ID NO: 4710 - DNA, 618 bp, Homo sapiens
  source 1..618: mol_type = other DNA
gacactgaccgggcttttcagagcctgggtgcgggcaggcttggggggccggcatgtggccttcagcggcctggtgggcctggagccggccacactggctcgcagcctcccccggctgctggtgcaggccctgcaggccttccgcgtggctgccctggcagaaggggagcccgagggggcccgggctggagaggaaggggcaccacccactcccaggcaaccctgagccatgtctgggcccccagcccctggggaggacctactgctcccaggggctgagaggacaaactgtcgctgccccagtggctgggtgtggtgggggtcctgggccccccgtgtcttctcacagctgctttaataaatgttatttataatacacggctgcctctggaagcagttgtaacagatgctggaaaggggctgtaaggcccctatctgagcctatctcctgcctcctgagaagcagcagcagctggcctgcctgttgccccgcccccgtgcatggctgcccagcgctggccccagtgcccagcgtctccgcccccaccccccgcctccgagctgcggggagtcccagcctgggctcctgccctggctggcccgtcccccaccgccatg

SEQ ID NO: 4711 - DNA, 414 bp, Homo sapiens
  source 1..414: mol_type = other DNA
tgccgcaggaggcctagccttcggcttctagtttttgatttaaagtgagagatgtgggtcagaacacacacaacattaagttccacgtcttataaaagacgcttcactgatcacagaaatcatgaaaaagttttaaatattttgagaattaccaaaatgtagcaccagagcccgcgccgtcaacgacgcggtgctgccttttttccgagccgctgcgggagggggccaggacacgctcccttaggagagcgggcggggcagaactgaggccagcagccagctccgccgctgagtccagccctctgcgcagccgccctgagctggcgtcccgagatagccgctcaaccgggcctgcgcgccgacgttccgctgcgccccgcgcaaaaccggaagtacccgggcccaaggctgagg

SEQ ID NO: 4712 - DNA, 264 bp, Homo sapiens
  source 1..264: mol_type = other DNA
ggatgcccagtgagggggatgcccagtggttccaagactggcctggcctgactccctggagggagtaggaggcagtctcggcgacacacccagctggccctggctgtccttgccccccatgtggaacatggattggggcagacggggcccctgtctcccctctccagcccagacaacgctgtggtcagacagctggtggggctgggccaggctggccgggctggctgggctggctggggtgggagtgtaggctgttatatgaca

SEQ ID NO: 4713 - DNA, 182 bp, Homo sapiens
  source 1..182: mol_type = other DNA
tcacctgaggtcagggccagctactcgggaagctgaggcaggagaatctcagccaagattgcgctacggcactccagcctggaaccaagtgatcagacagtttgctctgtggccccccagcttcctctcgccgtaaggacgcagaaaaacattctgaatggcgccactgcactccagcctgg

SEQ ID NO: 4714 - DNA, 557 bp, Homo sapiens
  source 1..557: mol_type = other DNA
aggaatgttaaagatttttatacttttctttaaaaaacgtattttcctttataactttttaaaaataacattttaacccaggtcccccgcatgccctgcactcgcatgccaaaggcggtccctgggtctcagaccactgaccctcaagtggggacagacccgtgtttacaagattctcaacgcaacagcggcatcagccttccttggggagaatgacgactgttaaaaatgctgatgccagggtctcactctgtcgcccaggctggagtgcagtggcctgaccatggctcgttgcagcctcgacctcccgggctcaaattttttaaaagtttttgtagagacagtctaacaccaacttttcttgtgcgtttcacgcaaaaaaacccgagtccctgaagctacgctgctttcctgcctttttggaaacatttcgttccaatgagtgtttgaaaagcagctcccccgccccacgctccgggcgggcgcctcccactccctgaccccggggagggtgggcaccactcccagacgcgggggacgcgtgggtgtcgctcggg

SEQ ID NO: 4715 - DNA, 638 bp, Homo sapiens
  source 1..638: mol_type = other DNA
gccagggtctcactctgtcgcccaggctggagtgcagtggcctgaccatggctcgttgcagcctcgacctcccgggctcaaattttttaaaagtttttgtagagacagtctaacaccaacttttcttgtgcgtttcacgcaaaaaaacccgagtccctgaagctacgctgctttcctgcctttttggaaacatttcgttccaatgagtgtttgaaaagcagctcccccgccccacgctccgggcgggcgcctcccactccctgaccccggggagggtgggcaccactcccagacgcgggggacgcgtgggtgtcgctcgggggcgctcgcctcccccacccagcctgtcccgggccgcgagcgcttccagtcgggttagaaaggcaccgtctgattcccgctacggttttccccggagctgacaggggcagcaaggtcggagttgatccgagggtccctgcctggtcccggggggacggtcagcctcccgcccggagccgcggggagaggaagcaggtcggggtctccgggacgcgcagacacccagacaccggcggcctcctcccaccaggctggcagtcgctgagccctggcgcctccttaaagccgcagctccgccccgacaccctcccaaccgc

SEQ ID NO: 4716 - DNA, 334 bp, Homo sapiens
  source 1..334: mol_type = other DNA
aggcatgagccaccacgcctggctggaggctgggccaggaggggacaggcccagtcccacctggtgaagcggctggggggccagtcagcagaggggtggccctgttagaggaagagtcatgattccgcacacaggggtgggaagcaacttccctagaagtgaccaggaggaggctcctggaattgccagcccttccctgtgaacgtgctgggcgtcaggggccagctcctgcaacccctccagtttctcaccctccagaaattatggtttagttgctttgagtcatacaaagccctgttcctctgaggtgacccacattggcctgagtcatttt

SEQ ID NO: 4717 - DNA, 290 bp, Homo sapiens
  source 1..290: mol_type = other DNA
ggatggtctggtctcgatctcctgacctcgtgatctgagaattggagtttttaacattccattttaagatgggagacacttaaatttgaatttcagaaaaacaacgaacaatttttcagtaggaacagagctctcaagtccttttcctaccagaactgttaacaataggatggcaagtcacacggtgcctggtccgggcccaaccctggcaggtacccggctgctgccaaggggtcagcgggagcctgcgcactgccacggccccgccctgggagcgcggtcacgtgacg

SEQ ID NO: 4718 - DNA, 532 bp, Homo sapiens
  source 1..532: mol_type = other DNA
aagattttactttgaacaatcacagtctttgtacatgtgacatttggtcaaagttttaaaatcagagtactgttcactaaggcatggacagctaaacactatttcaatgttgtgttacattttctgtacactgtacactatgttttattaacactatacttcatcacactgatcaggaaaacatcttctaaacatcattaaaataagccttaagaaaattcttcttaaagtatcaggtacagaacaattaattttattcctattcaaggtctttgtatacagcctttaaaaaaaaaaagtttgtttcctaaccaaaaaaataaaagatttcacgtaattatctatattactagttctggaactaatggtagccattaactaagaaaatcaatgcattaatttatgcctataagtccttatccaaataatcggctgaaaaatcttgcagggaattttatccctttgaactttcaaaaaaactcttaagtaagattatgcaaacttactaagggtaaagaaagacctcctgcag

SEQ ID NO: 4719 - DNA, 421 bp, Homo sapiens
  source 1..421: mol_type = other DNA
taatggttaacagacattggccaataacaaaacaccccactgtgactcgagtatccaacaggcagtcagagctctcccggtctgaaagttgcattgccactgctaactttgggattgcgcctgggagagagactattcttaatttttctttcttacaaaaactgatttttcccataaatatttttacttcagaccatatgtatgaatttgtataatttcatttttggatagggataaacttttgcttctgataaaagcctcaagttgtttgccttttctgaaaagagaacatacagaaccatggaatagcaggaagcctggcctggcttctggtcatggcctcctaaaaccttaaacttcaagtagaaatgtccactcacactgggttggaaggtgctgtggtctgggcagccccgaaaag

SEQ ID NO: 4720 - DNA, 301 bp, Homo sapiens
  source 1..301: mol_type = other DNA
acagaactctgagggctcagtaagttctgagccaggcccagcctggaaatggttggatcaaaactgctttaaaagtccttcttcaacaagcacactccgggccaggcatggagaacccagaggtgagcagagtccgtcctgcactcagtgctgcctgcttcaggcctgggacacagtgtcttttgcacaagaaagcttgaaaacctttcattttcagtggaaagagagagagcacaggcaatttcctctttccctctccaagagcggggctgctcccaggttcaggaaagatgaaaaccct

SEQ ID NO: 4721 - DNA, 299 bp, Homo sapiens
  source 1..299: mol_type = other DNA
cttgtctctgaaatggggataaaagccatccccaagctcatccagggaaccggcttgagggtcgagtgtcgggtgtcctgaggtgggtgtagtggcaggtgcctgtagtcccagctactccgcaggctgaggcaggagaatcgagtgagccgagattgtaccacttcactccagcctggagactctgtttcaaaaagagagcatgggcaggcctgccctgctaacactgtgatgtcagatggtctggctgggctggagaggccgcacccaccggccctgcccaatgggaggcagcaacg

SEQ ID NO: 4722 - DNA, 434 bp, Homo sapiens
  source 1..434: mol_type = other DNA
ctgagatgacaaatgagtgttatttcaagccacacactttgagttttacagatagctaaaacaaacgctgatttgagttttatataaagatatcctggatccccaacgagcaagatgatcaatttcttgactctggtcatagtgacaacacaaggattacatagattatgtaatgtacttagcccagtgcctgtcatgtagtaagcacttattagagggaataataataataataataataataataataataataataatggagcgcctctcccaaatctcagatttgagggccgggttggtgggccagctgagccacgggccccgggcggcgggtattccagccatgcccagcgtggctgccaccctggctcaacccatggggcccaggaaggtaaacagggctcgtggccagctatgggccaagaagcttt

SEQ ID NO: 4723 - DNA, 344 bp, Homo sapiens
  source 1..344: mol_type = other DNA
ccagtctggtcttgaactcctgacctctcttaaggctgatgaaacagactttttgtagcaataagacaccaaattccaaactaactctagtataggaaattaaagtattttacccccaaatgttctcttgtgaggaaacatctgcattctgtagagaatccccttaggtctgcgaagagctctgaagcctgccacctggcggcggagtctccctcccaggctggagtgcagtgcgagtagctgggattagataaactcttttgaccaactgccaatcagaaaatttttggaatctacctatgacaatgtacatcctacatgtattgatttatgtcttaagtcat

SEQ ID NO: 4724 - DNA, 803 bp, Homo sapiens
  source 1..803: mol_type = other DNA
gcccggctgcaggcgcaggccgcggtcacccaagggcccacccaggtgagccggctggcctccggaaaaggacaccgggcagcgcgccaggggccttcgcgagggtaggcggggggcatcttgctagatatcctcgccacacctgagcagacagcatgatccctgagcagagggcggcttggctcggcccgtaggcacctccaggcctcgtcccagacccgccagggtcgtgcgtagctgagcgtggctcgtcctgcgaccagactcgcccgggaaagacctccgcgccggccccctccccaccgcgaggctcaggagcgggcttgcaaggagcccctgagaccccagtctccgcctggagcagagacaagacggagaccccctccagcggggacacattccccgaggccgggctcggagcttcagagcgggtcgccgagctgcgaccctgcgggagaccgcagggggtgcccagcgtgggcaaggcggaggtctgcgggcactggggagccgagggtggcctcgcccgccccttccaggcttcccccgccgtgaggagtgggcggggcaggcaaaggcgcagctccagggcctccgcagctctgcccctctccgggtcggggcacggcggcgcgggggaggaaggcgcgagcccgcggcaggccccagcccgcagtcggcgctcgcggggcccgggtcgcgcccagcccgggcgcccccgccccgccgccgcccggcctcgcccccgccgcgcgcgcccctcccgcctccctcgttgccgtggcaaccccgggagcctccag

SEQ ID NO: 4725 - DNA, 454 bp, Homo sapiens
  source 1..454: mol_type = other DNA
cacgcctggctcccagcctggccagaggtgacacagcgggtcaacacgtgccccttcggccttggtgggccggacccaaggacgggggggctgggatgggtgtccaccgcagagccctcagaaatgcggatggcggtccgagaggcatgtggccatgcccagtcttggaggcggtgcagtccgaccggccaccccgactgctgagacgcaggactcagcacccagtgttgtccttggccaggcggccagcctgccctggagcttgtttccccagcatcctggagaagcccagggagctggactgcagggatcagagctgtgctgcccgtgcagcacccaccgaccttggcgccctcggctggtggcagccaaggtctcccagcacccaggccgctgggagctctaaaggggaggggtggggctcgactgtcccctccccctcaagtctgtcctg

SEQ ID NO: 4726 - DNA, 529 bp, Homo sapiens
  source 1..529: mol_type = other DNA
agaggcatgtggccatgcccagtcttggaggcggtgcagtccgaccggccaccccgactgctgagacgcaggactcagcacccagtgttgtccttggccaggcggccagcctgccctggagcttgtttccccagcatcctggagaagcccagggagctggactgcagggatcagagctgtgctgcccgtgcagcacccaccgaccttggcgccctcggctggtggcagccaaggtctcccagcacccaggccgctgggagctctaaaggggaggggtggggctcgactgtcccctccccctcaagtctgtcctgggcaggctgcttcttcagaagtggccacaactctcctgacgtctccagagccggtccacccagggggacttcagctgccactggacacttcaattgtacgctgcgaccagttggctggcaagagagccgcggcagccgtggcagggtgtaggggacggtggacggccagggcccccccctctctctcagctcagtttcctttccctcactgagcg

SEQ ID NO: 4727 - DNA, 380 bp, Homo sapiens
  source 1..380: mol_type = other DNA
aaagacaggtttattttggagaataaacctgaacacactaagggtggaagacaccaggtgtctgtaaacttaggtttcccctgtaccaagcacagtgctgaaggtatcattactgcaactgaggcttaggtcatccacagatttgttcctaaactgcgattaaaaataaaagagcagtcaggcggaaacggcccctttcctgcctccttcccgcccggcgctgggccttgcgcagggcccggacgcccccaagcggccacctctctgcagctgacgcttccggctacaggctggcgtcactagcgagcgccctgcgtaggcaccggctcctgagcccgtgcttcgggtgagggggcgggtcttccggccctctcgaaaat

SEQ ID NO: 4728 - DNA, 284 bp, Homo sapiens
  source 1..284: mol_type = other DNA
cattcctggaatcccagcacttcacctgaggcccagctactctggaggctgaggcaagagaatcacttagaagtttcagcaagctgagactgcaccactgcacttcagcctgggaggcagaagtttcagcaagctgagactgcaccactgcacttcagcctgggagactcctgaagcctcctgtcctggcaatgcccgggaatgaagagataatcagtctatttcccaagtcagctgggtgactcatacatctgtgagaccctccgccagttctgctgggcatc

SEQ ID NO: 4729 - DNA, 409 bp, Homo sapiens
  source 1..409: mol_type = other DNA
ctgaattctaactaattgaaatttaagtagccacatgtggctagtggctatagtaccctggggcaccatggggccttcggcctgtcccggatcctggccgtgagcccatgcccctggccgtgtcccagccccaggtcactgcccagggcggcgcggccagcgaatgcctattggcaggcgaggtctctagcggcagccctttgacagggagagggcacacctgggcagtcccttactgatttgcccctcagagcagctgggtggcaccaacctcttctgcccagagcagcgctggaccccagcgtggtgacccagccccgcccagggttaaatccctggtctctgcctagagttttctccaggaagccttcccagatggagcggtgcatcccagctctggcgtcccgag

SEQ ID NO: 4730 - DNA, 404 bp, Homo sapiens
  source 1..404: mol_type = other DNA
ctcttctgcccagagcagcgctggaccccagcgtggtgacccagccccgcccagggttaaatccctggtctctgcctagagttttctccaggaagccttcccagatggagcggtgcatcccagctctggcgtcccgaggcccgtcccagtaccggggtctctttccagcacgcgcgcgcgcattcgagctcgccccaaaggctgggcaggacagacacagccccagcctgcctgaggggcggggggcccgggacgcttcaggtgggggcggggaggggccgcgcggcgccgtctgcagctgcgcgcatggccggcagggggcgcggcggggagaggcgggaggccgcccccaccgcccccggcccggcccgccctcggccccgcccctcccgccggccccgccc

SEQ ID NO: 4731 - DNA, 357 bp, Homo sapiens
  source 1..357: mol_type = other DNA
gtgtttgtggatacttaagaactttgtacatgcactgtttgaaacatttacgtaaagtgcagagctagttaagcaaaagcttctctgaaccaatgtgcttgtctttgaacagaatttttaggaagcctccctccatttccatgcttcaaaacatctcatgaccaagtagttagttacgcatttgatgcccttcgcagatgcacacgccaggcctgtgagtgggcgcgggcctggagcttctgagccccagagccgctgacgtgtggccctgtgagcctcacagtgcgtccagggcacaccctgggccgaggtgcaaccccccatgcccccggcagcgtgctgggcctgtgcataggt

SEQ ID NO: 4732 - DNA, 349 bp, Homo sapiens
  source 1..349: mol_type = other DNA
cccatgttggggcaccagcagttgaacataactcaagcttaatgaagtactgttgaaatagtgaataggtaagtaacacaatatttctgtcacgtttcatttttaagtagaattgcttcattttactttatgggtttctaaaaaaataaataaattaaaacaacctatcttctggtaggttacatgtgctgagttcctggggaggcaggaggcacctgtcagttgtcatgctggggaccccctccttccccccaaagctgctctgaggctgcaggtgagatgcagcccaggagaggaagtgcatgacagctgggcggggtctgacacagtgctgtgcggagctcacccg

SEQ ID NO: 4733 - DNA, 432 bp, Homo sapiens
  source 1..432: mol_type = other DNA
gggattatatttgaccatgatatatggagagtcattaaaataggtgatggtcactttccatctttcagacgcattgcagagacccaatttcttgccagctgggataggataccaatttctttctggacagagagtggttggctaaagttaaaatctaaattttgctttgggatgaattccaaaaatattagctttattcaaatttactttcactttatctttctgaatcttcaaggtcctaaagcattgcttagtaattttgttgatctgtccaaggcagagactataagctactcttatagtactcttatgagatacatacaagtaggtatctcaaaaaatgatactcatgtattcctgttcttatgagtaaatcattggcagtgagtgtgattttttttttttttatgacaggataaatacacgccctct

SEQ ID NO: 4734 - DNA, 909 bp, Homo sapiens
  source 1..909: mol_type = other DNA
ggttatataactataatcttatataaggttatataactataatcttatataaggttatataactataatcttatataaggttatatagctataatcttatataaggttatatagctataatcttatataaggttatatagctataatcttatataaggttatatagctataatcttatataaggttatatagctataatcttatataaggttatatagctataatcttatataaggttatatagctataatcttatataaggttatatagctataatcttatataaggttatatagctataatcttatataaggttatatagctataatcttatataaggttatatagctataatcttatataaggttatatagctataatcttatataaggttatatagctataatcttatataaggttatatagctataatcttatataaggttatatagctataatatagctatactcttatataagatcatatagctatactcttatataagatcatatagctatactcttatataagatcatatagctataatcttatataagatcatatagctataatcttatataagatcatatagctataatcttatataagatcatatagctataatcttatataagatcatatagctataatcttatataagatcatatagctataatcttatataaggatcatatagctataatcttatataagatcatatagctataatcttatataagatcatatagctataatcttatataagatcatatagctataatcttataaatgtagtggtccgctggccgagtggacccgcgaactcaccagcggacttgtaagcgagctttcccaaactcttggagcagaaccccgtgcgaggggccggcgctccagcggggcatcct

SEQ ID NO: 4735 - DNA, 381 bp, Homo sapiens
  source 1..381: mol_type = other DNA
ggagggcagtgcgattatatttgaccatgatatattgacttccaggagtcctcagcagactgagggagacaagtacatattttcttaaaataggtgatggtcactttccatccagttgctctttctggacagagagggttggctaaagtcaaaatctaaattttgctttgggataaattccaaaaatattagcattattcaaatttactttcactttatctttccgaatcttcaaggtccaaaagcattgctgaataagaagaccataatctactcttgtctggaaatcatacaagtaggtatctcagcaaatgatacgtaaatcattggcagtgagtgtgatttttttttttttatgaaaggataaatacacgccctcta

SEQ ID NO: 4736 - DNA, 381 bp, Homo sapiens
  source 1..381: mol_type = other DNA
tgacttccaggagtcctcagcagactgagggagacaagtacatattttcttaaaataggtgatggtcactttccatccagttgctctttctggacagagagggttggctaaagtcaaaatctaaattttgctttgggataaattccaaaaatattagcattattcaaatttactttcactttatctttccgaatcttcaaggtccaaaagcattgctgaataagaagaccataatctactcttgtctggaaatcatacaagtaggtatctcagcaaatgatacgtaaatcattggcagtgagtgtgatttttttttttttatgaaaggataaatacacgccctctagaatcccagctgctggctcggcagggtggaccagc

SEQ ID NO: 4737 - DNA, 359 bp, Homo sapiens
  source 1..359: mol_type = other DNA
ttaaaataggtgatggtcactttccatccagttgctctttctggacagagagggttggctaaagtcaaaatctaaattttgctttgggataaattccaaaaatattagcattattcaaatttactttcactttatctttccgaatcttcaaggtccaaaagcattgctgaataagaagaccataatctactcttgtctggaaatcatacaagtaggtatctcagcaaatgatacgtaaatcattggcagtgagtgtgatttttttttttttatgaaaggataaatacacgccctctagaatcccagctgctggctcggcagggtggaccagcaggcagggaagctgctgagaaactcct

SEQ ID NO: 4738 - DNA, 342 bp, Homo sapiens
  source 1..342: mol_type = other DNA
cttaagcctcctcagcagcggtcactgagaggcagctcagcagagtgctctcgcaaggattgggcgggcaacttcccacatgcatgccatcttctctggacagagtaaaggtaaaatctaaattttgctctgggacaaattccaaaaaaaattagctttaatcaaatttacttttactttatctttctgaaccttcaaggtccaaaagcattggttaataattctgctgatgttttctgaaaacatacaaatagatatctcagcaaaagctactcatatattaaatcattgtcagtgactgattttttttttatgaaaggataaaaacacgccctctattgg

SEQ ID NO: 4739 - DNA, 370 bp, Homo sapiens
  source 1..370: mol_type = other DNA
tcatgtattattatgagtaaatcattggcagtgaatgtgaatttttttttaaatgaatgaataagtacacgccttctttataggagcttagaatcccagctgctgtgccaaggcaggctgctggtagtgcccatggatgggagccactggttcaccaggtggagaaactcatcctcagggggcatgaggtggtcgtagaactgaagttcatctttgacttatttttttcaaattgcaggagtttgtttaatgaccgaaaattagtaattttatcttgaagaaggtgcacagtgccctgttattttgcccctattttttcaaaaatgtcttagaaatagcctctgaaatcaatttggttgtggcaaacccg

SEQ ID NO: 4740 - DNA, 506 bp, Homo sapiens
  source 1..506: mol_type = other DNA
tttaaaataggtgacagtcacattccatcaaatttcagcatttcagaggcctcagaagatttggcagcacttgtggctcacctgtgtcacaattgtggctcacctgtgtctctgcaatgcgcaagtgagctgtgtattgcagaaatttcctcccagttaggaggtcaacgctaagacaatttctttctgggcagaggacaaaataaaaattgtctataaactttggccaatccactgcactccagcctggaaaaaaaaaaaaaaaaaaaaaaaattgcaaatttttctttgtgacaaattccaaaattattagcttcgttcaaaaggccaaaagcattgcttaataattttgtttctaaactcatatctgtcccaaggcaaagatgatgagttactcttttcttgaaaacatataagcacaaaggctactcatgtattattatgagtaaatcattggcagtgaatgtgaatttttttttaaatgaatgaataagtacacgccttct

SEQ ID NO: 4741 - DNA, 391 bp, Homo sapiens
  source 1..391: mol_type = other DNA
tctggctagtgacaggagaaagaaaaatgttttctaataccttcttaatttgcaagaaggtttactgtggttgccattcttcctctagatgaactgttctttgaaggaaaggtggacctgagctgatcattgtaagctgccaatcctcttgggaggctgctcccagcttggactgagctgagtcttcgctgggggccagccctgtccttggagtggcccccctgggccccagaacacctccggtgccaaacttgtgggtgggaacaggaactcgcgtgccagccacatgactagctctgggcaagtctgttctagtaattcaaggtacccctctcactgggacaggcagggccagtgtgaccctccctttctgggcctcagttgagaaacc

SEQ ID NO: 4742 - DNA, 479 bp, Homo sapiens
  source 1..479: mol_type = other DNA
gaacaaagaatcttttgttattcaaaacagatccctttcgatcacacctaagtttatgtaaaggagatagttgccagggaacaaaacatttgatcaccgatggcaacaatctaatcaatcatgcctactatgtatggaagcctacataaaaactcagaggcagatggggctccatggccatacctttgcaatatcctttgtaataaaccaaacctagtaaataaactgttttcttcagttctgtgaattctagcaaatgattgactccaagaaaacctctgatttttgccaagtcagacagaagttgtgggtaaccttgtaggactgagcccttaacctgtggggtccgtgctaactcagaattcagttcagaatggaattgaattgtaaaagtgttgctataacttttcagaggttggttcatattaaccatgtgattaaaatggttaaatattaatttgggttcttacatatcaaag

SEQ ID NO: 4743 - DNA, 356 bp, Homo sapiens
  source 1..356: mol_type = other DNA
ttgtaggactgagcccttaacctgtggggtccgtgctaactcagaattcagttcagaatggaattgaattgtaaaagtgttgctataacttttcagaggttggttcatattaaccatgtgattaaaatggttaaatattaatttgggttcttacatatcaaaggaggtgacaagctgctggttaatttgcttttgaaagaatccaaatactacacaagataccaatcatttggaaacaatcactttgctgagcgatcattcctacagacagagtacaggaataacatgattgttattggcctgtacttcatcaggcctcctgcaggacagggacaccctgaacttctttaaggaga

SEQ ID NO: 4744 - DNA, 277 bp, Homo sapiens
  source 1..277: mol_type = other DNA
gtcctgaccataatcttcaggatttcagtctctaagcagacttgcagaagactggagccttcagcattcagaagaggaattcagactgtgcaagatctgaggccaggctccagctcccccggtcccttggtgagcaggagctctagatggagaatcctcaacaaagcctttccaagaatctgatcatcacatcttgagagagagttgactcctcagacctcagctgcagccgatcggtctttcccagggtggggcccataatgcaagtctcagtgac

SEQ ID NO: 4745 - DNA, 342 bp, Homo sapiens
  source 1..342: mol_type = other DNA
tggagaaaagcctggccataatcttcaggatgaaataaggccggatacttcagtctctatgcagacttgcagaagactggagcctttggcattcagaacagactgtgcaagatctgaggccaggctccagctccccaggtcctttggtgagcaggagctccctgaacccaccgtgggtcagtggtgtagatggagaatcctcaataaagccttcccaagaatatgatcatcacatcttgagctcagcctagagagagtcctctttgaacactctctgtttagattattcacatatgagggtgactcctcagacctcagctgcagcctatgggtgcacagcct

SEQ ID NO: 4746 - DNA, 324 bp, Homo sapiens
  source 1..324: mol_type = other DNA
aaagtgttgctataacttttcagaggttggttcatattaaccatgtgattaaaatggttaaatattaatttgggttcttacatatcaaaggaggtgacaagctgctggttaatttgcttttgaaagaatccaaatactacacaagataccaatcatttggaaacaatcactttgctgagcgatcattcctacagacagagtacaggaataacatgattgttattggcctgtacttcatcaggcctcctgcaggacagggacaccctgaacttctttaaggagagcaagtttgatgctcttttcacagacccagccttaccctgt

SEQ ID NO: 4747 - DNA, 354 bp, Homo sapiens
  source 1..354: mol_type = other DNA
tttaattctccatcttgaaatttggactagggcccccacaaattgtgcagcccattctgttctggagcctgaccataatcttcaggatgaactggagccttcggcattcagaagaggaattcagactgtgcaagatctgaggccaggctccagctcccccagtcccttggtgagcaggagcctcaacaaagtcttcccaagaatctgatcatcacatcgagagtgactcctcagacctcagctgctgcctgatacacagccttgttcttttccagggtggggcccacagtgaaaaacagtgatagattaatggttaataattaactagaggagggcactctgtcttccaattac

SEQ ID NO: 4748 - DNA, 397 bp, Homo sapiens
  source 1..397: mol_type = other DNA
tgtgatattacacatcacccatgtagcttctggaaaactccactgtgcattattatggaaatagttttaactttgcaaaattctcctgaaaaattcttggggatccctaggatttcctggctttgagaatcgctagtctagcagagtagttaagctccttttataaaatgacacagtatttgtatataacctaccaattctcttgattacttttacctaataaatgtaaatgctatgtaaatagttgttttacagtactgaatctgcagatgtgaaggggtcaaatgtgcatggcactatttactgtatcgtgattaaccaaagaacattctaagatttcctatagggtatgtcaccagaacaaacttctaagtttatatagcctctagtgacataa

SEQ ID NO: 4749 - DNA, 413 bp, Homo sapiens
  source 1..413: mol_type = other DNA
tcaggtgagcgctgaaaatctcaactataaaaagacaggttttcaggatactcagagtaaccgtgtgccaaagggccagttggctctattttaaatccaggcccagttagccactcaagatctatcttacaggactggctctttcaggttcacactaataaaggcctgtccttggggaagactcacctcagcgtgctcgtgtggtgggctctgctgcagcctcaagaccccacttctaaaaggctttctaaaaagccttctgtttaatttctggaaaagaagcctaacttgttcactacataggaatgtgatttgagtatgaaattccactattaagaaacctaataaagctccaccacgtgacacagtcaaacattaacatcgattggtttttgccatatatatatatataa

SEQ ID NO: 4750 - DNA, 362 bp, Homo sapiens
  source 1..362: mol_type = other DNA
agaatttatttaaaaataaaataaatgggatattgtttcttcatattaaatagaagtatttctccaaaaagctgttggttagaacactgaatttatcattaagcaaactttcccttaaagtgcaggaaagtgaaagcttgataaattatcacaaattagaagccttcacagttacgttagtatagcagatttgttttctaaaggtcctgtggcggtacactggacttgcccaaaacgataagaaaatggcttaagcacagctattctaaaggattgttgagcttgaaaatattatggccaacatatcctacaccagctgtgaaactcagagatgtaactgctaagcatatgcaaaatgactt

SEQ ID NO: 4751 - DNA, 310 bp, Homo sapiens
  source 1..310: mol_type = other DNA
aaattaaaaaaaaaattaggttcaggtttaagaagcaagctatttaaattcttcaaatttgatagggatggattataaatgatttttttttaatgctaggaattttccctcaggtacttgcatgcacacatgtacacacatgtacacacatgcatgcacccacacgcataccagtgttagtaattctcctgaaagtgaaattcatgctgaaaaaataaatgacgaatttatatatatacgtaacacttatctaggaggcaggtactagcatcacccgcttgagaggaaacggaggctctcagagcccctc

SEQ ID NO: 4752 - DNA, 423 bp, Homo sapiens
  source 1..423: mol_type = other DNA
cgcaacacgttttgtggacacacctaaatttccgcaggacatcatgatagaatcacatactatggtaatcatatcagcacaagcacacaaatgtggttaagtgatgaagctgaatgaaactttcctaagatgtcaatcataaattccatcaaccatactaaagactgatttatcttgctcttctctctggagaaaatattacaagattaatatcaatgagaaaaagctgggttaatagaagtattttcctggacccctgccctggaaactgcgccgggatcccaggcggaggggtgaggaaggcggacctcgcccagcggcgatctccggtgcacagcgcgggagatgacataagcacacagctgtttgtacaactaccaccggccgtggcggccggagaccctccctcccttccgccggaca

SEQ ID NO: 4753 - DNA, 485 bp, Homo sapiens
  source 1..485: mol_type = other DNA
tgaattgaacatgctttctgcaggaatcagttcctgaaatacactatcctatttgtatttctctatgacatatgcttcatatgaaaataaaatagaaataaaaacagaggaacattagttataatataactgttatgtttgtggcacatttaagtaaaatgaccgaaagcaattgttacttatcgaggagagctcttaatgaagctggatttaaaatctgcaaaaaagcaatgttggttaaatttcctctatttaataatttttttcctaatcttaattaagagcttttaatttattaattaatcttgtcatcactttctataatgagcatttcccattttatttgtggtttttaaaatgtgccattaattgcagaaattaagtattagtatgatttcatactatggtgttattgtcaagtatcatttctttattagcatttaaaataccatgtttttttgttcctctgcttaaaagaaaagctt

SEQ ID NO: 4754 - DNA, 383 bp, Homo sapiens
  source 1..383: mol_type = other DNA
tgaatttccagcttaaaaagaatattgaaaagaatgcccccatgtggccgggttatttataattttatgacttgagtatatgtatctctctaaacaatacattgtttagttttgttctgttacattcatgaattgtactatgaaacggtgagacgtgtaaccattgttttgctatgaacaacaataccacttgtaacattcttatctctgtgaacttcattccaggagaagggacatccccctttgcagtgcatggcggctctggtgccagtggccttgtctgagaactccagctgccagtatctgggattgctggggagaggaagttcctagcagccccacctccccagggaaaggcagccctctgaggctgaatatttatc

SEQ ID NO: 4755 - DNA, 427 bp, Homo sapiens
  source 1..427: mol_type = other DNA
ggttgatgggtgcagcaaacaaccatggcacatgtatacctatgtaacaaacctgaaggttctgcacatgtgccccagaacttaaagtatatatttaaaaaatctctctttttctggagtttatgcctattttatagatgagaaaatttgtacttccaattaagtagttctcctttttaatcatatcatcaatatgtaaataccttattatcttaatagaggtgtgtcccagctatataaaattatcttctccaaagtcataatttccaagaagatcttatacacaacaatttaagattaaccattttgttgaatgtaagattatatcccctccaatctcttgtgagttgtaaacttcaaaagtgtccctttccatcaattgtttctctgcagtcaaaataagcagccagtgtttgataaagacagc

SEQ ID NO: 4756 - DNA, 645 bp, Homo sapiens
  source 1..645: mol_type = other DNA
cgggttcccggggtgggggtgggcgcagtcccgagggccccaggcagtggcgcagtggttagaccccagcctctggagttagtttactaagccaaaatttggccacatagttaagtggtgcgttcactcactgggcattgatggagcgcctactacgtgccaggcctgttttacgcgccgggggcccagaggcgcccaggtcagacaaggtagtaaagcgtctccgaacgcggcgcgaccctcgcccacgcccgctcgcggggggaccgcaccgccccaggggtcctcgctaggggtgtgcgggggggcacaggagcgcgggccagcacccagacctgctcggtaccggggacccagacccgaggatgccgggcggccaaggccccgctaccctggccggctccgggcggaggaagaagaggaggcgcccagactggatacccgcctggacccggagccgcggcaccacgcccgccccacgctcgccagcctcagacggccgcgccccgccccgcccctctcccgaagccccgccccggcgcgggaccaccccctccgcggcctcagctccggtcctggccccgccccccgcgcccccgcccccgcccccgcccccgcccccgcccaggcgcgggaccaccctcc

SEQ ID NO: 4757 - DNA, 907 bp, Homo sapiens
  source 1..907: mol_type = other DNA
cgcccggctggatccagagcgcaggctggcagctcaccgaggccagcccttctggggtttggaggccccagcctcgccgccctcactccccagagcggcgctctcccagtcaccctgggggccgccctgccccgcctcgcgcccacagagctgggaccccgggacccactccctcaggcaggctgcgtcgcccacggctgcggcccggaggggcagggggcgggctagtcagccgctggggaggaagagccggctccgcgcccattgtgtctgcgcggcgcggcgcgggaggggccggggggcggcggggggcggcggggacgcagcgaagcgcgcgaaaacggccggctgggcggggaggaccgcgcctgacccccggcggcgggcggggcggggcccggggcgggtccgggggcgggtccggggcggggcgcgagggggcgggtccgggagctctccggccgctgcaggctggcggctgctgcggcggcgcggggactgtgaggctgccgagcggacagcgactcccggggaagcccgcgctccgggagcgggagcgggagcaggagcaggagcagcgccgtcccaggccagaggcgagcgccgggcgccgggagagcggagagcccgggcagctgccggagcgcgggggcgcggcccgaggaaaccagagcgagcccaggcctggggagggcgccgaacatctgaggcggcttcgcgggagacaaagccgcgcgtagagacgcgatgcccgccgatcgcgagcccggccggcgagggcgcggggactgcggcgtctgagcgcgccaagccgtgcgcccgcggggacgccgagccccggggccggtgcgggcggcggcgggcggggcccaggtgcgcccggccgcgtcgggcccgtgactgctcg

SEQ ID NO: 4758 - DNA, 326 bp, Homo sapiens
  source 1..326: mol_type = other DNA
acgcatatgcacacacatgggcacacacacacatgcgtgcacacacacgcactgagaccctgcacttgagtgctggagtgcagtggcgccatcttcccgagtagctgggattacaggcatgcgccaccatgccggccatgctggcagagaagagcttcattcattaattcatccattcattcattcattcaacaagtacctgacagcctgctcctcactgcagtctgcgggaccatccgtccagcactctgtgctcgctgactggatgattgaatcagtgccagagccaaacaggatgtggttctgggcgactcggttgttttcag

SEQ ID NO: 4759 - DNA, 443 bp, Homo sapiens
  source 1..443: mol_type = other DNA
cagctcccccaggaagaggcagcccgcccgagccccaggcagcatgttcctcctgtgccctgggtgcgacagtgctccaggagcattaggaaaggttctgctgatcaggcttctgtaacaagtcgtagccttgcattccctgccaagccacgcccagaagcatcctgggagggacaccagtcgggtgttgactctacttgggctgttgcccagaccagtcggatcactggggtgttaaccccgtggtctcctcgtggtcccatcaagtgactctgtgaaagccaggaggccgtcagtaacaggaggaccgacctgctggggctttccatcgacagagctgacagaaattacagagagcaggtggaatctcccgctcaacatgatactccagaaattatcatcaaacatggagaatgagtcatgcaagggcagcatttatgcct

SEQ ID NO: 4760 - DNA, 696 bp, Homo sapiens
  source 1..696: mol_type = other DNA
agccttccaagcgctgctgcagtgcggtcccagctccgcggggggtccccggggatgacctaaatcggggattgcggtgggaggagcaggcagcggcgctcaggaggcagcagcttttttaaaaatgtccactcgtggagtgtggacccccacgccgcatgggctcaggaggcgcttcgccaggccgtgggacactggcgagtcgcagaggctcctggagccagccgccgcggcgggcgaactcccgggcagcctcccccgtgccggggcgcgggggccgccgcgagaacccgggcaggagctggcaggcgcggggcctggccggcgggagggtcccgcaccccggcccagtgtgaacaccccgcgcacccccctggcccggcccgccgggggcgcggactacaagtcccaggaagcccagaggcaggcgcggggcggggcctggcgcaattccccgggatccggcgcgctgggaagcgccgaggaggacgcagcgccggcggccggagggcggcaagcgcgcgggcaggcggggcgcgggcgcgggcgcgggcgagggcgaaggcgggggcggggccgacgtgggccggagccctgcgtgccagggagggggccggccgggcaggcggcgggcggcgctcggagcgggctccgcggcttgcaaggcgcctgcgactcggtcccaggtcggcgggc

SEQ ID NO: 4761 - DNA, 891 bp, Homo sapiens
  source 1..891: mol_type = other DNA
gcccgcgggaggcgacggacggcgggacggacggacggacggcagcttccgccgagggccaaacccgcgaagcgcgcgggctccgacgggcaagcggcggacgggggctccggcgagccctcggggcccgggcgccctctccactccggggcgcacggcctcaccccgcacaccccctgcacccgcccggcatgcagcgggcccaggactgaggggcggaggcgtctgctctccgggtcccgctcggcccctgcccggcgctcccggcggtgctcccggcgtccggcgggcttcccggcggcggcgcggcgcggggacttttcgcctctcgctggcctctaccgagcgcgtctatgagcgcagcgttcccgccgtcgctgatgatgatgcagcgcccgctggggagtagcacctgatcggcagcccgccgcagcccagccatgttcatgccctaccggccggtagtgctgccgccgccgccgccgccgccgcccgcgctgccccaggccgcgctgcagccagcgctgccgcccgcacacctgcccacaggcttctgctccagcctggcgcagggcatggcgctcacctctacgctcatggccacgctccccggcggcttctccgcgtcgccccagcaccaggaggcggcagcggcccgcaagttcgcgccgcagccgctgcccggcggcggtaacttcgacaaggcggaggcgctgcaggcgacggcaaaggcttcctggccaaagagggctcgctgctcgccttctccgcggccgagacggtgcaggcttcgctcggtgagtcggcggcgcgcgcagccgggacgagggggcgggaggaggcgggggcgggccagcgccgggttcccgcgggagaccaagggggcgaggc

SEQ ID NO: 4762 - DNA, 867 bp, Homo sapiens
  source 1..867: mol_type = other DNA
agcccgggatgggggaagcagcagcctccccgccccacccggtgcgcggacctacagcgagcaacccggcgggtttctggcggcgggcaggcgctgccagctcccagccttcgccccgggggtggctccggaggggcaggaccctgcccccaactccaggaccctcgcccggaccccaggcgcagccggagcacccagcgctggagtgagcgcccccggcccagccgtgggggtgcgggccccggaggctacccttcgaggtggcctcgacaaggctgcagggccccaaggtccgagccttggaggtgccatccgcccgtctcaagtttgcgcggcacgggctaggcatgcaggctccggctccccggcccgcgcgctccgacggtggcgcccgcagcccgctcgaggccagcttgggtggaaagggcggggccccgctttcgccccacccccgccccgctcagccaatggccagaggcgcccagccccacgtgaggcgagccgggccaggcggccgccggaggtacgccggcttcgcgcgctccccagcggcccgcgggaggcgacggacggcgggacggacggacggacggcagcttccgccgagggccaaacccgcgaagcgcgcgggctccgacgggcaagcggcggacgggggctccggcgagccctcggggcccgggcgccctctccactccggggcgcacggcctcaccccgcacaccccctgcacccgcccggcatgcagcgggcccaggactgaggggcggaggcgtctgctctccgggtcccgctcggcccctgcccggcgctcccggcggtgctcccggcgtccggcgggcttcccggcggcggcgcggcgcgggg

SEQ ID NO: 4763 - DNA, 755 bp, Homo sapiens
  source 1..755: mol_type = other DNA
ggctccgaggaaccgcgcgccctcgagtcctcgcgctggaaaccgggcggcggcgccagggtgagcactccttgcgttcgcaacgtgcttaattagcgcctatttacaaaacgcagcttttatttgagcaaacatcataaagctttcatcaggataatctcacgttttcctccccgaggatggagcagataaaggactctctttattatcataattatcgtggttgttcacgggagggcccagcccgggatgggggaagcagcagcctccccgccccacccggtgcgcggacctacagcgagcaacccggcgggtttctggcggcgggcaggcgctgccagctcccagccttcgccccgggggtggctccggaggggcaggaccctgcccccaactccaggaccctcgcccggaccccaggcgcagccggagcacccagcgctggagtgagcgcccccggcccagccgtgggggtgcgggccccggaggctacccttcgaggtggcctcgacaaggctgcagggccccaaggtccgagccttggaggtgccatccgcccgtctcaagtttgcgcggcacgggctaggcatgcaggctccggctccccggcccgcgcgctccgacggtggcgcccgcagcccgctcgaggccagcttgggtggaaagggcggggccccgctttcgccccacccccgccccgctcagccaatggccagaggcgcccagccccacgtgaggcgagccgggccaggcgg

SEQ ID NO: 4764 - DNA, 246 bp, Homo sapiens
  source 1..246: mol_type = other DNA
gaggccctgtaagctccacggcccgccctgggccctcagagaccaccacagctgtgcttatgcacacaagtcatggaattataggctttgagcaaagtagcctcacttttgataaaagaagatattattcaacaatacccatgaaagctgtctttgaaaatattcctttgctgaggcctctggaaacacacctccctgctggcaggtggccctccgggggccagggtgctgctatttatagcagcc

SEQ ID NO: 4765 - DNA, 415 bp, Homo sapiens
  source 1..415: mol_type = other DNA
cccctgaagggtgggagggtggagatgaggctggacaccattctcctgtactcaatttctcgtctgagaaataatttgctactgttaatagcattttacaagtcgcctaagtcttgggtgcccagaatctaagtctgcacttggcccagaatagatagtttacagatgggaaaacagggccttggctggggcccggagcaggctcgccaagcggccgggccccgcgacggagcgctcggactccgaccggctcccacagctgcgcccacccaggcctcccgcggtggcgcaggcgcggaatgcggggggctgcgcaggcgcggcgtttccgttgctagggccgcgtcgcgcccacctgagtggccgaagtgaggttcgcgagtctctgggtcgcgacgggaaggagtgaaacacc

SEQ ID NO: 4766 - DNA, 320 bp, Homo sapiens
  source 1..320: mol_type = other DNA
gacagtcagtattaaccatcactcatatcatatattttcttattcatgcacatatatgcatgtataagctatgaagtacaaattgcataatttctgtgattccacatatgagatcagtgcacttatattagtatttaaaactagatggatggtgaacttcatgctaacaatttaaatctaaatttttcttggaatgatattaaataacacataaaaacacagagaaagttttatattttatgaccaacacaaatatgttaataatatacaatataatgtcactaacagtaagtgctgtagatctgctctacgtttcagga

SEQ ID NO: 4767 - DNA, 509 bp, Homo sapiens
  source 1..509: mol_type = other DNA
agagaaagttttatattttatgaccaacacaaatatgttaataatatacaatataatgtcactaacagtaagtgctgtagatctgctctacgtttcaggagggtcccggctggagcgtggctccggggtggggcgtgcagggctagcccgggcgggggacgctgcccaacaagcagtttgcggagactcacaccttagattctgagtttttaagcttacgaacgtttcgtgtacggtatgcagggtacggtgcggagccctagcgtcactgacgaccgggacagccgagcagctgcagccagcaattttaatatttaaaaattcgttactgttctccctgccagagggcggccgcgcgctctgagtacagcttcccgcggagccggccaggtcctccagggcaccgagaaagccggccagaacggcggcgccctatcccggccgcagcgatgtctgacggcgccccggaactgacggtccgcggcaacggcggctttaaacgtcatcgc

SEQ ID NO: 4768 - DNA, 408 bp, Homo sapiens
  source 1..408: mol_type = other DNA
gttcatctgtaaaatgggaccacaatttcacctaataaaagaagacatctttctatttaaaagggtgttttgaaatgtgcaaagctttctagaaacagaagttcttactcaagtattttccgaagctttggcaagataactttattaccccgtctgtgcctagaatgggcctataagcaaattaagagaaatgtagcctccttttttttgccggtgaacagagctttggttaacagaaaaccaaggcgattttaattgcagtctcaattcagatcctgttttcctttcagatggtgttggaaaacattgcaggaaaaccatggatacccacgaagaaattccaaaatttatccaggagtccagctaaacgcttgtagggtgaagacagaattgactggtatccctggc

SEQ ID NO: 4769 - DNA, 336 bp, Homo sapiens
  source 1..336: mol_type = other DNA
ccagggaagctacctgtgcgagcgcttagcagcacctgcagcagctgggagatggggagtagccaatgatgtggccatcacccatcacagcgctcagcctggcccagaccaggcacctctctccacctggatgggcttccttttagcccatggcacagtctggcggcatgaatgaatgagtaaagcaatgatgccatcaaccttattgccaccaagttcccggccatgctgctgtccagaaagcctattgggcagggacgcagactgccaacgtgcaggtgagaagctacggggcagttctccaatgctcagtgaccccgctcggggctggagagg

SEQ ID NO: 4770 - DNA, 312 bp, Homo sapiens
  source 1..312: mol_type = other DNA
tgtggcccacccctccctttgagccaggggacagaattgagacctgtcctcaggtcttcggcagagtgcaaatgtgttttgcttcagagaaaaaatttgctccaacatgtaaaaattcaaatctcacaaaaaaggtggaatttctagctcctttgggtgggctggcacagccatgcagaagccaggggaccaccgtccacctgctctggggccccatgggatttgagtcctgtggtggcagaggttcagctgagactctctgaggtctccggggagcgggcccacgtcgtggctctcagtcccctgtgagcc

SEQ ID NO: 4771 - DNA, 599 bp, Homo sapiens
  source 1..599: mol_type = other DNA
caaacggttccttccctaatgtccattggaattcggaaggacaggcaggccgggcggactggagacggcggctcgccttgggaccctctgagcttgcgggccccgctgagcacccaaaggccggccctagagtccaggagaagagcgcagcggcgcggagctcccaggcgttccccgcagcgcgtcctcggtcctggaaccaccgcgccgcgcgtcctgggcgggcaaggcctcggtctcctccccgcagcagggctgcccgcggctgcgggaccctcctggtcctgatgcctggctcgaaagccgaagtacatagcgctttccctgcagagttagaaatttcgacgatgtgccgcgcgctctagagcgcgctcagcaagcgggtcccaccgtgcccaaggcaggaccgcggcgcgatgtcaccagtcgccccaaactggcttgggggtcgagtatccggggctctcccccgcactggcgcttcccgcgcgggcgccccaggtgtccgttccgttccgccctctgcctggcagggcatccagaggtgtccgcgctcccggagctgggcggagcggggcgcagcccacgtggttcgggcg

SEQ ID NO: 4772 - DNA, 483 bp, Homo sapiens
  source 1..483: mol_type = other DNA
gctctagaggagcaaacctggggcgttagctcaactcttgcccccctgctctgtgactgccctggggagggcgcagtatgcttaaatgcaatatcatttctatgaaattaacgtgtttccatttgagctcagccctcaaaacaaagatgtctgtgtgtgtgtgtatgtacgtgtacacacttaaagcctgttgcaaaaacaagatgcccaatatatttcttgtttctgagctgcctgcagccctaccagctgcttgtgaatagcaaaaggcagtgcgcctcttcacctgcaaaagctgtggccgcgtccacccgggagcagggcgccctgccatctggccaggtgagcccaggcctggacgcacacatgcacacactcgtgtgtgtgtgtgtgtgtgtgtgtgagatttatgcaggcctgtgtacagcactcaggcagtgccatgagcctgtgcttgtccctgcagagttccggtccctccac

SEQ ID NO: 4773 - DNA, 177 bp, Homo sapiens
  source 1..177: mol_type = other DNA
gtggatagatgggtggatgcatggatgcatggatggatggatgaacggatggatggatggataggtggatggatggatgcatggatggatggatggatagatagataagtgatggatggatggatggatggatggatggataatgagtggatggatggataaatcgattgatgggtg

SEQ ID NO: 4774 - DNA, 358 bp, Homo sapiens
  source 1..358: mol_type = other DNA
ggtggccacgccccaggggcctgtgttaggactggctagtccgtcctgcagggatgaggggcagagcctcagcccccactcccacagggcggaggaaccactgtggtggcggagcttgcttgggaagaccaagaggaagtccacctccccctctcctgcacctggagtctcccatgtgcacggaggccacgcccccaccccgccctcaggtggcatcagcccaggatctgaccctggactggctcacactcagttgcctctggccagtgcagggctcagccaggctgacagtgggaggaattaattcatctgaccggaatattcttttctcgttagcgcgcaggtgctcccgggtcac

SEQ ID NO: 4775 - DNA, 382 bp, Homo sapiens
  source 1..382: mol_type = other DNA
gctgggattccaggctcgagccaccgcgctggcccaaccctgcaggaaggtggatgagaaagagaagcacattcatgtatttccaccagacctttggttaccagcctgggggcaagggcccagccgagcatgctggcggcttccagggaggtggccacgccccaggggaacctgtgttaggactggctagtccgtcctgcagggatgaggggcagagcctcagcccccactcccacagggcggaggaaccactgtggtggcggagcttgcttgggaagaccaagaggaagtccacctccccctctcctgcacctggagtctcccatgtgcacggaggccacgcccccaccccgccctcaggtggcatcagcccaggatctga

SEQ ID NO: 4776 - DNA, 643 bp, Homo sapiens
  source 1..643: mol_type = other DNA
gcttctgcccccagcctggcgaggtcgggaaccgtttcccgggaggtggcgcgggctggagccctcccggaggagaccggcgcctggcagggggtcgtcgcggccgcagcctggacggtgtggaccccgggttctgcgacgccagatcggccccagcggcccgcacccgcgctcgttctcccctgcgggccgccgcaccgggccaaggggggctgtgtgcacgcagctgcgtcgtcctggaagtcggcccttctcggcccggccggcaggtgcagcggtgctggggcctaggcttccgcgtccaggaagctcaggcgggaactcataccctcgcccagccccgggcaggtccccccccggaggggaccccctcttcgggtcgacccctactgggcgcggcatcctccccggagcgcccgcttcccacggcccctgcgggtggagctgcggccggagcctgaggggtgaggggcggggcaggaccaggaagatccttccgagacggaggctcgccaggcgagggaccctccgaggcggagcggcgcaggggggccggggcggggcgtagccgggagggcccctccgaggcggaactgcgtggggggcggggcgggccgtgggacgggcggaggcgcccgagtcc

SEQ ID NO: 4777 - DNA, 513 bp, Homo sapiens
  source 1..513: mol_type = other DNA
gtgccctaggcaggggcttttaagtgagctctgcgacgcacctgccccgatcctagaggctggggacccaccagccttgagccgctgtgaagccggcgcccaggaggctggccaaggtcacaggagcggcggtggcgggcggatccgagcacctctcggcctgaccccagagcctctcaccccggcgagggacttccaccccgactcaccgcggaatggggagcgccaggctgaaccaaatccggtgcccaccgccctggcgcgcgtcgctccgcgattaccggcccgccggggctcccggtccctcaggtcccgcgtgcccggccctgggcatccgcagcgtccccgtggtatcggacccccatcctggcccctgcagtccctggcccgcgctgcggacctccggctctggcttcccccgggtccccgcggcccccgtccccccgcgtccccgcgtccccggcccagcgcccgctgacgccatgacgccgcggcggagggaggggccggggc

SEQ ID NO: 4778 - DNA, 690 bp, Homo sapiens
  source 1..690: mol_type = other DNA
cctcccggaggagaccggcgcctggcagggggtcgtcgcggccgcagcctggacggtgtggaccccgggttctgcgacgccagatcggccccagcggcccgcacccgcgctcgttctcccctgcgggccgccgcaccgggccaaggggggctgtgtgcacgcagctgcgtcgtcctggaagtcggcccttctcggcccggccggcaggtgcagcggtgctggggcctaggcttccgcgtccaggaagctcaggcgggaactcataccctcgcccagccccgggcaggtccccccccggaggggaccccctcttcgggtcgacccctactgggcgcggcatcctccccggagcgcccgcttcccacggcccctgcgggtggagctgcggccggagcctgaggggtgaggggcggggcaggaccaggaagatccttccgagacggaggctcgccaggcgagggaccctccgaggcggagcggcgcaggggggccggggcggggcgtagccgggagggcccctccgaggcggaactgcgtggggggcggggcgggccgtgggacgggcggaggcgcccgagtcccgcttccccggcgcccttccgactcagcccgcggccacctgcgccccgcccctgtcggccgcgcccgagcccagcgccgcgagccgctccccggcgggctggctcctgg

SEQ ID NO: 4779 - DNA, 351 bp, Homo sapiens
  source 1..351: mol_type = other DNA
cggtggccctgtcccagggctgtgctggcagccacccctctggctgccaggcctgtgctcgggcgtcaccccctagattcaccaattgaagggcagggctgccacccaatggggtaggtggtaggcatgctggccctgagtgccctcccagcctgctgtcagctgtctccccttctctgagcttactgcaggtggcagcagcctctcagccacagactgactcagcaatgctgtgcgcttgcagcttccaccacaaaagagacagctgtggccgcagcaccagggtggtgattcttccccctccagtataaatttactgttgctaagagttctcggaacaaggccaggcct

SEQ ID NO: 4780 - DNA, 403 bp, Homo sapiens
  source 1..403: mol_type = other DNA
agtataaatttactgttgctaagagttctcggaacaaggccaggcctgtggccaggccctcacaacctcctgccaggctcctgcagatctggagcagcattccagggcctgcgccaggcgcggtggcgagttttgccccccacgctccccagcgcctgcacctgggcggagaggtattagccttttgcaaggaggagaccaaaggaggccttcctgggaccccaagtgtgccgccccccgggaggggcctggagacgcccgcgcggcccccctgcaaagttttaccggccctgggcgcccccggccctggcacccacgcggggagccgcagtgggccgggccgcgcggccgccgcctcccaccgctcccgcgcccgctcccgcccccggcgcgtctcctccgg

SEQ ID NO: 4781 - DNA, 456 bp, Homo sapiens
  source 1..456: mol_type = other DNA
tccactgttagaaacctctcagtggggtttttcggggcctgcctgacgcccaggacggcccctcggaaatggatttttaaggtactttaaacacatttaagagaccgcccggtctccctcaccgcctgcactgcaggctgcgggggcctgtccagtcctttgcactccaggtgcggcgctggacagcgggagctccagccacggaggccgctccttcagggaaggatagcccgggctcctccaggtgcaaaacccccagccctccggcgctcgggctccagagccaactcggagcggcggttgcccgccccctggccgcgccctctgccaatgagcgaggtccgagaggcccgtcgcccagcccagtcccgatcggcgcacgccgctgttcgcgttccaaataaagtttttcgcgacttagcgcccgctgctgtctcggctgccgcgggcgagagc

SEQ ID NO: 4782 - DNA, 268 bp, Homo sapiens
  source 1..268: mol_type = other DNA
cctcatctgtcacaggagagaattgggtccccccactctgcattcccgaccgcctggaagtgggggcaggatcttccccttaaggaaggggtaggattctgctgtggggcttccccccaccacatacctgcctttcaggtagtaggcagtggtcggtcaaccagcgtactcctgtgccgagcaggaggttcctgggccattcacaagtgagcaggtcaattacaacttgtggaatttagaactggaatgctgttcagaacagctgatc

SEQ ID NO: 4783 - DNA, 758 bp, Homo sapiens
  source 1..758: mol_type = other DNA
aaggtactttaaacacaccgcccggtctccctcaccgcctgcactgcaggctgcgggggcctgtccagtcctttgcactccaggtgcggcgctggacagcgggagctccagccacggaggccgctccttcagggaaggatagcccgggctcctccaggtgcaaaacccccagccctccggcgctcgggctccagagccaactcggagcggcggttgcccgccccctggccgcgccctctgccaatgagcgaggtccgagaggcccgtcgcccagcccagtcccgatcggcgcacgccgctgttcgcgttccaaataaagtttttcgcgacttagcgcccgctgctgtctcggctgccgcgggcgagagcggccgagtccccgccccgccacttccggtcccgccgccgggagccggtgcggctgtgaggggccgcgtctcgcagcagccgcccggaccgggcatggtgttgggcgccgggcccgcctcgcctgtctcggggagcccaggtgaggagcgaccgtgcggctctgcggcggggcgaggtgcggccgccggtgcacgggctggcctgcgggccgggcggagggcgcgggcggtggcggggccgcctcgggcccgccgggttcctcacgccgggggcctggcgggcgcgggcacccggacgcgaggccgagcggcggggaaggggccgcgggccgcgggccgcgagccgggggtcggaggcggcgtcggcggccggggcgctggcctcgcccg

SEQ ID NO: 4784 - DNA, 475 bp, Homo sapiens
  source 1..475: mol_type = other DNA
acagagccaggctggagttgcatagctcactgcagcctacaacttccgcgggactacaaggacagggtcttatttgccctggaggtggcctcccaaaaagtcataaatgatgttgatatactttatccccacaaactttaaatgtaaagtacaatagcatcttcagaaaaatccaaaatggaacaggctgttcttgcaaggagcagtaactttcagccatagtaacttgtattgcaaaggaatctggggcttctgattggatttggacgcactgtggataccttctgcagtcccaaacccagggggtgtgggaggtgacagaggtctcaccagcactgtcagccagaagcccacgggtagactttgctgctgagactagcccttgtggatgcagcgcatcaacacatgcctcatgggtgaggtgagccagtattcagggttgaacacgtgttcagcgagtcaaactgcacactga

SEQ ID NO: 4785 - DNA, 331 bp, Homo sapiens
  source 1..331: mol_type = other DNA
ttatcctgcagggacatctgagacccagcaggagggtaagagctccaagtcatctgtccaccttcatttcaatgcatgaggatggagctctgtggcacacccagctctcttctgggcagggtggtcatcctgccccttcctgagagcagcagctgtggctcacatccattgtggccaaactttccccatctggaaaatgagaagggataggtacccccttagggtctacccagcactgtgtcttgcgtgcagtaggcacccaggtcgtggcgaaatggcactcagactccgcaaggtcccagtccttctaccaccttggcgaccacagggg

SEQ ID NO: 4786 - DNA, 378 bp, Homo sapiens
  source 1..378: mol_type = other DNA
gaaacagcaagaggtgtgaccatgttgccctgaagaagaccatcttcatgactgctcattgtagatggagaattcaacataaatacagcaagaagaaattcttaagaagttgtaatgaactcaaaattgaggctttaacaaaattggttttctgcacaacaaactgtgattggatgcaaaatctcttaaagcccagaatgcatagagtcattcactgtagatctcttattgaaatgcgtattttatttaatgtaagtatattttggaacagatttgtaatttgtacaattcaatgctttaattatttttagaaaatatgaaaggcacattattcattttgtccaaatgcaatgagaatctcactctaaatcagctctt

SEQ ID NO: 4787 - DNA, 342 bp, Homo sapiens
  source 1..342: mol_type = other DNA
taagagctccaagtcatctgtccaccttcatttcaatgcatgaggatggagctctgtggcacacccagctctcttctgggcagggtggtcatcctgccccttcctgagagcagcagctgtggctcacatccattgtggccaaactttccccatctggaaaatgagaagggataggtacccccttagggtctacccagcactgtgtcttgcgtgcagtaggcacccaggtcgtggcgaaatggcactcagactccgcaaggtcccagtccttctaccaccttggcgaccacagggggaaacagcaagaggtgtgaccatgttgccctgaagaagaccatcttc

SEQ ID NO: 4788 - DNA, 633 bp, Homo sapiens
  source 1..633: mol_type = other DNA
actgtctcaccgctccgactaacggacgcgcaggtccagcggacctgctcatcactgtccagggtggcctgcgggagacccccggggccctggccctgctgccgcggccccggcacttcccctcgagggttcgcggggaacaaggccgcgcggccccggctctcccggagtgcacggtcccgcgctcatgcggctagagggaggcacccgcaggactgcccagccgcctctgctcctcaggtccagctcgggccccgcctgctcttacgccgactaaccggccgcggcccgatggcggccctgccgcagaccggggctcccccggaagtgaaagtgcggggatccgccggcccaggagacgcggcttctagcgcccggttcccgggaagctctgtgacgcgctaagccccgcccccacccgtcacctgacccagcgcagcctcgcctccccgctgggggctcggcggccctctgaagcgggtgggggtgcttcgctcagccaatccggacgcgcccgggcgtcgcggccccgcctcctccccggcgctctgggcccgtagcgctccgcgggaaggaggctggatgcccggcagcagtggggcggggatggaggcggccgtggcgccggggagg

SEQ ID NO: 4789 - DNA, 580 bp, Homo sapiens
  source 1..580: mol_type = other DNA
gggacaccaaccattggtggatgtttacacttgtgactgtctcacagacaactcaacacgctccgactaacggacgcgcaggtccagcggacctgctcatcactgtccagggtggcctgcgggagacccccggggccctggccctgctgccgcggccccggcacttcccctcgagggttcgcggggaacaaggccgcgcggccccggctctcccggagtgcacggtcccgcgctcatgcggctagagggaggcacccgcaggactgcccagccgcctctgctcctcaggtccagctcgggccccgcctgctcttacgccgactaaccggccgcggcccgatggcggccctgccgcagaccggggctcccccggaagtgaaagtgcggggatccgccggcccaggagacgcggcttctagcgcccggttcccgggaagctctgtgacgcgctaagccccgcccccacccgtcacctgacccagcgcagcctcgcctccccgctgggggctcggcggccctctgaagcgggtgggggtgcttcgctcagccaatccggacgcgcccgggcgtcgcggccccg

SEQ ID NO: 4790 - DNA, 355 bp, Homo sapiens
  source 1..355: mol_type = other DNA
catggccagcatgccaggacgaatgccatggcagggatgatggggggggtgcccagcccacatggggcagggtggtctgcactcagcaaaaatagttaacagtgaagacccttctgaaaattttgcacatctttctggcagtggcctgacactggcactccagagttctgcattgtgttgattcatatgatttgagatccttttacaaattctatcacatgatgaaggcttttgtgactctgcgtgtcaaaaggggtggcactcacagcaggactatgcattgcagagcatttctcctgtgtaagcacttagcatgtatacagagtaggtccttggaaagttcttgttgaataaa

SEQ ID NO: 4791 - DNA, 261 bp, Homo sapiens
  source 1..261: mol_type = other DNA
tagagacagaatgtctgtctgtcccctgcaaagccaccttgggcctgcgaggtgccttcacagcgccaactggtgggtaggctcctcgagggagccctccagtgcctggtgctgtcaggaggtacctggttctgcccccaggccgcggagctggtgacccagaactgcgaggcttatgaggcccacatgagggacgggtgctcccagaccccaggacctgtggggattgcagataccacctggaaaagtctaaatttcaaa

SEQ ID NO: 4792 - DNA, 367 bp, Homo sapiens
  source 1..367: mol_type = other DNA
tgacctcagcggccttggctaatttttaaaaaatattttgtagagataggttggcctcccaaagtgctgggattacaggtgtaagccacctgaaattctcaggttaattacatcagcagtcattaatggctgtgcttgtgaaagaagagggaaatgccttctggcttaatagattagcaggttacaaatgcgattttcaaggccagctttagccaagggagaaaggaagcgttttcttcggctcctgctgtgagactctccccagctgccagaatggccagtgctggaattccaccaggtggcacagagggagggaagcagcctgcgcccagcagggctggagccccatctcaggggcatgtgctct

SEQ ID NO: 4793 - DNA, 557 bp, Homo sapiens
  source 1..557: mol_type = other DNA
ggcctcggggtctcagggccagagaggccactccagatgcggccccagacagacacttctgagtactgatcagtcaggagcgccctggctgcgctaggaggcactcacaccgaaggcgacgggctgctggcctccccagtggggaaagcggggggtgaaggcggggagccagcacgcccatcacccgtctgtcaggaaggcaggctgtcctaggagacccccgcgtcccactggcaggcccaggcccgtcacctggctggtgctgtggaccacagcaggggcccttcagaaggcagatgaggccccagaggcagggctggcctcaagtcgtccagcggtggtggccggcaggtcagggccccaaacctcattgcctggctcgaatccaggccctggagggaggccacaggacccgctgctccagcagtccacctggaccccagaggtcctgctgccccagggtgacggggacgcacgtgctcagccagccctgtccggggcctgaggtgccccgagaggtacagccagagtctgcctcctccctgggaggatggctg

SEQ ID NO: 4794 - DNA, 546 bp, Homo sapiens
  source 1..546: mol_type = other DNA
gagagtacgtgcatgtgtgcaggagagtacatgcatgtgtgtgcaggagagtgtacatgcgtgtgtacgtgcatgtgtgcaggagagtacatgcatgtgtgtgcaggagagcatacatgcgtgtgtgtgcatatgtgtgcacatgtctttgtgagaccacagggcgctgggcacagcccccagagctcagctgcctccagagggagcctggaagctgagctgggggtggcccacccaaggagatgaccctgggacagaaccctgatcaaggacctggcacaggctccccaaggctcgtccactgggtgcccctgcccctgtctaggtgagcagggaagagcccacgggggtcccccactgaccaggctgcactgttggccacgaggcgctccctggaggaggcccagggccagggaaccccagccgtgagtgcacagccccaagtgggccacccagggcatgggcctgggagagggtgccactggcctcccctccgaggtcctggaccggtgggcaagtctgcgggcagccgggcaccccatcacc

SEQ ID NO: 4795 - DNA, 176 bp, Homo sapiens
  source 1..176: mol_type = other DNA
ctggctgtgatgcagaccattgcaggcagcaagggaaccagctttggggcctgcagagctgcgttaggggcggcctcaagcccttcccagctcctcccctgctgcaggaggggccgcggcgtggcccagcggtgtgccgcaggctctcccatcgaccaggcgggggcgggccccac

SEQ ID NO: 4796 - DNA, 474 bp, Homo sapiens
  source 1..474: mol_type = other DNA
cgaccctcttcctggtagggccgcccagaggcctctctgccaccttctccgaggcctgcagggtctggtccacctctgggggcactgaccggtgggcggtgggcagcctggcttccggtctggtctgcccccacaccgataggggtcagttctcccagcccaggccccgctcagccccaccagggcagggcggctgtcctgagtgggtcccggcaggttccctgcgctcagagcacgccagccatggacggagggcggcctggaaggggccctgagggtctcgagccgtctgggaggaggcagcgcctggctccccccagggctgggagaaggggcgcctcgctccccaggaagcaggggggacgcgcccagcaggggaacacccctcgctctccctccccccatccccatgcagcgcgcacgggagccgggagggggcgcgggcgggcgcgcggtctcgggcgaggcgggggc

SEQ ID NO: 4797 - DNA, 735 bp, Homo sapiens
  source 1..735: mol_type = other DNA
gcccatgtctgccaagggtcagggctgggccatggccaggagaaggcttcctggccactcagtatggcgggtgctcagggaccagcgcctatgccctgcctggggcagcaccaggtggagctcagcctggcacccacagtcaccactggccagggctggggcagcctgccctggaggaggcagggctgagtggagccgcggagtccacactgaggcctcctgcagatttacccccagcgtctttggaaaatgtgggtggggaggccaagggcgctggggcacttctgcccgagcttcccaaatcttgagggaaacgggagccgctgcagggtcaggacgcaaagactccgaggcccttcaggccgaggggacgtcgccctcgccccacccctgcgcccggcaggcccctggtctcgttcagggctggacccacgcggcgggcgggtgaggggtccctggcgcgcggccaccgctcgctctgtgccaggtgcggtgcggcagcgggagcgcgcggagcccgaaccctgtacgtgtggccccgccgggccggtcgctgcgagcctcgccccggtctcggccaccgccggggaggacgacgacgacgtggtgggggacgtgctggcactgctggccgcgcccctggccccggggccgcgggcgccgcgcgtggaggccgctttcctctgccgcctgcgccgggacgcgttggtggagcggcgcgcgctgcacgagctt

SEQ ID NO: 4798 - DNA, 357 bp, Homo sapiens
  source 1..357: mol_type = other DNA
tattggcggtgttttatgaaattgttcacattcaaagagaacacccaggcctagctgtttgtacaggcatggagggggacaccattaaggaggagcccctcttctccgctccccacagacaccagtgggtgcagacaagtcaggggctccagaaagccttcccaggcatcaggggctgcccttgagctggggcccggggttcgccaaggcgggaaacaccgcggggcccagacggcgccgtccgcccggctcgcagtcggggcgcgggaggggcccacgcgcatgcgcaccgccccgcccccagccgccccgcccagcccgcgcgcagccctctggggcggccgggccacgccgcgc

SEQ ID NO: 4799 - DNA, 672 bp, Homo sapiens
  source 1..672: mol_type = other DNA
cgccgcctgcccgccggacaaagggtgcgagacaaaggcgcggccaacacctgtcgctcttggcgcggccgccgcttctccgccgaagcggccgcagctgccaactgtcacggcggcgggcctgggaggcggccccgcggggctggtgacccgcagagcccagggggagagcggcgcgggcgggagcacccgggaccccgccccactaggactccagtgctggcggagggcggcgtcgggggtccggcccggcgtctggacgagtccggaagaaactcaggggccgccccgccaccgctgcccaatggaccctgcctccccggggcttggcagccaccccagccgggacctggggctctgcacaccagggacgcatctcctggggccagtggccccagcgctcaactctggaggcgccatcggcgggacggacggacgggtggacgcctgctcgcacgcgcggcagatccgcgggcagggccgcagctacccggggtcgccgccccggtgccgcccccgcgggggtctagggaaggccgggctgggggccccgcctagctcagccagctgcccgaccgccagagccgctgggccggacaaagcgcgctgccccgattggctgcagcgcgcctcgcggtcggccgccccgggcccgcgcggccaatcggcgca

SEQ ID NO: 4800 - DNA, 298 bp, Homo sapiens
  source 1..298: mol_type = other DNA
tatccaagagctctgagctccgtgctggaggtggaaagggttcatcccccatcttggttcagcaagaatggcacaactccttacaagcagggatgcagtgagatgtatttttgcatgcccctcaacggtgtcaacaagtatttgtggagtgtacacaaatttccaataatttcaaagcacttgataatttctaaaagaattgatttcaatatatttctaccagatttattggtggaaataaaacaatggagctccccattgacgtcaatgcaggcctcccggggcttctgtggagggc

SEQ ID NO: 4801 - DNA, 661 bp, Homo sapiens
  source 1..661: mol_type = other DNA
tgtcgaccacaggcacctcagaggcccgggtgggcgtgcccccggagctgctgcagggcggtgctgccaccttctcctgggctgctccggggccccgcgatgaatgagtcatgccgcgcggactttcccgcggccctggccgctgggggcgcgcctctggccggtggccggaggtggaggtctccctcgtccggcttcggcgcgccgggtctgccaggccggccggaggtgcgcaggagccccgcgcccagctcccccgcccgcaatggtacgcgccactccgcgctccccgagctggcgggcttgaggaacgcgccgcgtctccattgcgacgggcgcggccaccaatgggcgcgcggcgttcgtaggccccgcccctcatgtatgcagatgagacggagtcgcggccaatggcggaggccgggggcgggcgcggcgcgcgcggtcacgttttccactatgtgacagcggcgactcggccgcggcggaggcggcggcgctgaggggacagctgtgggcggcggcggcgggcgcggggccgggcggacagagccgcgagtcggcggagggaccggcggacgggctgacgcgggcgcggccggcggtaagtggcgcggcgcggccccgctgcggcttacgtaaccgccgccggcgcgcgggc

SEQ ID NO: 4802 - DNA, 399 bp, Homo sapiens
  source 1..399: mol_type = other DNA
gcatccaggaaacaattgggaacactgcaaactcttcccagatttcctgacctatgctgaggtcagcccggacttctggcctcaatggcaatgattacaaatccaaaattatcatttttgcggcttataagaagaaatatcttacaattttattgagatttggtcagccccttttaaaatcctctaacaaagagtttagaaaaatagtcttctagatgtcgaactttgggagctccatacgttggcctgaacccagggcaagcagggcaggcttcttccctccatgcatgtggccctacatgcatcaccactttcactgggggtcatggcgtatctgtgtcacagaaatagataaatgctacatattttttctttctttttttttaatgattggaatca

SEQ ID NO: 4803 - DNA, 454 bp, Homo sapiens
  source 1..454: mol_type = other DNA
cggattgcctgaagtcaggagttccagacctgcgcagctactcatgaggctgaggcaggagaatcacttgaagtgagccaagatcgtgccactgcactccagccggttataatggtgttctcattagaagaacctcaatcgcggaaggatttctgcggtgctttgtcctgctttgtgggagcagaagtgaagtctcagagaaacagggtgccttcgaaagcccttgagatttggggcgagcgaacaccggcttcccgaggccgtcgctcggcagaggaggggccaggcgcccgatcccagatcccctttccccgcgccgcgcgcctgctctggcggaacccccactcctgcctgcgcgggcgctggaaggcgggcagggggcggggcgccgcggcgcgtccgttgctaaggccgcgcagccctagtgaccgaacgccctgcggcggccgcgcag

SEQ ID NO: 4804 - DNA, 573 bp, Homo sapiens
  source 1..573: mol_type = other DNA
cattgtatggatggacggcatttcgtttatccattcatccggcttcaggcttcggagttgctgaagctccgaggcagctgtggtggagccaggggctgggcacacccctggctcctggcctggcaagtggtgctctctgctgtcatcaagccccacagggcctgccaggtctgcccccagtgggccccctggtgcatctgggccacccagggccagcctcagcaggggcactcgcggggctgcgcctgcggcttcccttactccagtctggaatgttgagccagcagctcacgcccacgactgctggggtctccggactcctcctgcatgaggccccgctgtctaactcagcaccaacaccaatactcatgcacgaatgcattcatttattcaatgaacttgctgcgacgctcagccctgcagtggcaccctcccggggctgctcgtggctagcggggggcacctgcggggaccaagccagcccggccgaggcccgggtcccgcccgccacggccctcggggccccgcccacatctggcagaagccacgccccgtccgtgtgggtggggacgg

SEQ ID NO: 4805 - DNA, 538 bp, Homo sapiens
  source 1..538: mol_type = other DNA
agtggtgctctctgctgtcatcaagccccacagggcctgccaggtctgcccccagtgggccccctggtgcatctgggccacccagggccagcctcagcaggggcactcgcggggctgcgcctgcggcttcccttactccagtctggaatgttgagccagcagctcacgcccacgactgctggggtctccggactcctcctgcatgaggccccgctgtctaactcagcaccaacaccaatactcatgcacgaatgcattcatttattcaatgaacttgctgcgacgctcagccctgcagtggcaccctcccggggctgctcgtggctagcggggggcacctgcggggaccaagccagcccggccgaggcccgggtcccgcccgccacggccctcggggccccgcccacatctggcagaagccacgccccgtccgtgtgggtggggacggcccgccggaccgaaattcccagacttcggttagccgcgaagttcccgccggacgaagggaccagccagcgcccgccggaagcggaggcgt

SEQ ID NO: 4806 - DNA, 608 bp, Homo sapiens
  source 1..608: mol_type = other DNA
cccagtgggccccctggtgcatctgggccacccagggccagcctcagcaggggcactcgcggggctgcgcctgcggcttcccttactccagtctggaatgttgagccagcagctcacgcccacgactgctggggtctccggactcctcctgcatgaggccccgctgtctaactcagcaccaacaccaatactcatgcacgaatgcattcatttattcaatgaacttgctgcgacgctcagccctgcagtggcaccctcccggggctgctcgtggctagcggggggcacctgcggggaccaagccagcccggccgaggcccgggtcccgcccgccacggccctcggggccccgcccacatctggcagaagccacgccccgtccgtgtgggtggggacggcccgccggaccgaaattcccagacttcggttagccgcgaagttcccgccggacgaagggaccagccagcgcccgccggaagcggaggcgtggcccctgcgcggccccggaaaccagtgaggccggcgcgcgcccgccggaagccgcgaccccgacgcgccccccattgccctcggcgccggaagtggtcgcgggtcctgcccgaggggcg

SEQ ID NO: 4807 - DNA, 744 bp, Homo sapiens
  source 1..744: mol_type = other DNA
cggagctgcccgcgggctgccagcgcagcggaggctgggcccggggcagcctcgtgcagctcccggagcgccctccgtcctctgctgacccgcgaagcgaaggcggagcgcagaggctggggccgtacaaggcgggccggcaggcgccccaacccgcgcccagcaacccgggtagggccaggcaggcgggcgcggcgggtaccgggcgctcccgcagaggctcgcgaagggcgtcggggccggggctccccagcaagccttgggcacgggcgtctccagggggccccgactgtccttacactggcggtccggacaccgagacccctgccgcgcagctccccagaccccaggcctaagcttgcgggccgcggtgcagactagctgtgcgcccgggggcggccaagacccacacaggtcgaggaggctcctggctgcgtcctcatctcctagcccctcacgcccagagagagaaccccccaaagcccagtgggggccgatctctacgttgaggcgtagacaaagccaggcttggccgggcctagggctcggggcggcctgagagtgccctgcgttcggggtgggggcgcgggcggcgggcgaggacccggcccccgggatgccctccgcgccggggccgaagggggaggcatgccgcgccggggggcgggggcggccggcgaaggccccagaacttgtcctgcccccggccaccgcgtttccaaaaaagttagaataacttcctct

SEQ ID NO: 4808 - DNA, 814 bp, Homo sapiens
  source 1..814: mol_type = other DNA
gggaggttgtggggccgccgccgcggagcaccgtccccgccgccgcccgagcccgagcccgagcccgcgcacccgcccgcgccgccgccgccgccgcccgaacagcctcccagcctgggcccccggcggcgccgtggccgcgtcccggctgtcgccgcccgagcccgagcccgcgcgccggcgggtggcggcgcaggctgaggagatgcggcgcggagcgccggagcagggctagagccggccgccgccgcccgccgcggtaagcgcagccccggcccggcgcccgcgggccattgtccgccgcccgccccgcgccccgcgcagcctgcaggccttggagcccgcggcaggtggacgccgccggtccacacccgccccgcgcgcggccgtgggaggcgggggccagcgctggccgcgcgccgtgggacccgccggtccccagggccgcccggccccttctggacctttccacccgcgccgcgaggcggcttcgcccgccggggcgggggcgcgggggtgggcacggcaggcagcggcgccgtctcccggtgcggggcccgcgccccccgagcaggtgggctccgggccgccgggagtgagggcgggggcgggcgggcgccggggccggccgggcgccgttttccctgccgggggtccgcggccccgcgcttgtcgtcgccgctgcgagcgcccggggggtcgcgggagggcggggggctgcccgggacccgctcggctcagcccgcagggcgccagcaggccgagacggggcccggtcccgctcgggggtgggatccgcgtagcaaattatctc

SEQ ID NO: 4809 - DNA, 510 bp, Homo sapiens
  source 1..510: mol_type = other DNA
ttttgagaatcctgtcaaatgatactgaatcttatctagatgttagctagctacagaccctgtttcattctacatgaaataagtttagcctaagcatttcttgcaatgaccaaagttttctaattattaatgagatatttaaggaaatgtaaaattggcatttttattttgctaactgtatttttatcctgcccacgccgtcgggccccacgaaccggcgcgcgctgtcaagtcctccctggaacgcgggattccggggacaggatacgcccacccgggcggtgcgccgttcccgccacctccacgcctgcctggacccggactcgagaccctggcggcgggccgggctccctccgcctgagcagggacgcggcgagcgcatcccacgaccctcggcagccgttgcaggcctgcccacaccctcacggccgcgttcccgccgcggggcagggcgaggcccacggcgcctgcgcactcagtgaccgggccgccctgcgcctccgtgcgcac

SEQ ID NO: 4810 - DNA, 489 bp, Homo sapiens
  source 1..489: mol_type = other DNA
caggtcctgacgggagcaggatcacgaggtcggagatcgagaccagcgcctgtagtcccagctactcgggaggctgttgcagtgagcgcgatggcgccaccgcactccagcctgggcgacagagcggaaaaaaaaaaaagagatggacttggagcgtgtgcttttgttttcgctccggaggcgacccaggccggccttgccaggtccctctccctgacaggcgccccgcgacaggggtcccaccgagaacgttctgagagcccccgcagaagtcgctccacgccctgggcggcctcagctcccgcgagcagcccaggcaggggccgggcagccagcatgctgcccccacgccctggcagcgcactggctgtctccgcggaagcccccgagggcctcggcgcggccccgccccctggaaggttcccgacaggcgccgcgggcaccccggccgtgacgtcacggcagcgcgccggccgcgagagagggccc

SEQ ID NO: 4811 - DNA, 732 bp, Homo sapiens
  source 1..732: mol_type = other DNA
acgcccacccgggcggtgcgccgttcccgccacctccacgcctgcctggacccggactcgagaccctggcggcgggccgggctccctccgcctgagcagggacgcggcgagcgcatcccacgaccctcggcagccgttgcaggcctgcccacaccctcacggccgcgttcccgccgcggggcagggcgaggcccacggcgcctgcgcactcagtgaccgggccgccctgcgcctccgtgcgcacgcagcacgatggacgccgcggcgaggcctggccggctccccgcgttagcctgcaccccattgtgtgccctctaagcgcgaattaggctcgcagacatgcggtgctgaccgctaggcagccatgcgggctaccgagtgcgaccggacacggccggggcccgtgtttacggccactactggcccccggtccctgccctcctcaaccgcgaagcacccagcggctggcgcctggagcgtcttttggtacccccaccctctagaattggcagctccagcagcggaggaggcgggcaggggtggagcctctctgccgctcatagggcatccggccccgcggttgagcagccgctgggcgaggggtgcgggccaatggaaggccggccaggcgcccggggcgggcgggcgggaggcggggccgagccaaggctgccgcagccaatggttggcgagccgccggctggctgggcggggccgggccggctgacgggc

SEQ ID NO: 4812 - DNA, 449 bp, Homo sapiens
  source 1..449: mol_type = other DNA
aaggacaagtgacatttgcttatgcacgtatccatcgatgggcagggacagcgggggacgcttccctttttcatttattataaataccccggctgccgcgtctcactccccgccgcggtgcgaggggccccgtgtgccgcgcacccttccaccgcgtcccaggggtgcagcggccgtggggccctggtcagacaaacgtctgtttgcggcagagtctgaggctggatccggcctctggtcggaggcgtgctctgcaggcactgctcccattgctggcagccttttctccccgtggccgcccggccgcccatcagaggcgttgcagacgcccgccctcgccagcgcaaagacaaacgccggtggccgcggacgcgccggcggccgggagcaccccagcgggcgggcaccacagaggcgcggtcctccggcggcgcgcgccggaagcggct

SEQ ID NO: 4813 - DNA, 574 bp, Homo sapiens
  source 1..574: mol_type = other DNA
gcagccctcccgccttcttcaaagacatcactttggtttcctgttgccgctccctgggactgggagcccccggtgcgagccggagcccagcgcgagacggctggaagggcgcggggagaggggcggcggctcgaggcgcggccggcgggcggagggtacggaggcgccgggagagcgttctcggggcgcgctgccagggtgcaggaagccggagcgcgcatgccgagggaggcgtgatgtcacgtccggcgggggaagccctgcctcgcgcaccctccgcccccgtccccgcccccacaggtggtgccaccgccctgggcgctgggcgtggggggccgccctcggggaccccggccgcggccccgcgctgcccggctccgccgcctcccgccggggatcgatagagtcgcgcggccaggcgggccctctgggtccctaagagccagaggagcgcccagtgcgccccggcccgcgcccccgcgccgcgccccgccccgccccgcccggtgctcccgcccctctcctctcccgcggccgcctaggggccgggccggcggcgggggaggcgccgagc

SEQ ID NO: 4814 - DNA, 697 bp, Homo sapiens
  source 1..697: mol_type = other DNA
ctgttgccgctccctgggactgggagcccccggtgcgagccggagcccagcgcgagacggctggaagggcgcggggagaggggcggcggctcgaggcgcggccggcgggcggagggtacggaggcgccgggagagcgttctcggggcgcgctgccagggtgcaggaagccggagcgcgcatgccgagggaggcgtgatgtcacgtccggcgggggaagccctgcctcgcgcaccctccgcccccgtccccgcccccacaggtggtgccaccgccctgggcgctgggcgtggggggccgccctcggggaccccggccgcggccccgcgctgcccggctccgccgcctcccgccggggatcgatagagtcgcgcggccaggcgggccctctgggtccctaagagccagaggagcgcccagtgcgccccggcccgcgcccccgcgccgcgccccgccccgccccgcccggtgctcccgcccctctcctctcccgcggccgcctaggggccgggccggcggcgggggaggcgccgagccgggactgcgctagcccgccgcgctctgggctgcccgagcgagcgttcggacctcgcaccccgcgcgccccgcgccgccgccgccgccggcttttgtgccgcctcctcggccgccgccgcctctggaccgcgagccgcgcgcgccgggaccttggctctgccc

SEQ ID NO: 4815 - DNA, 430 bp, Homo sapiens
  source 1..430: mol_type = other DNA
agtttttagagaaataatagactacatgaaaatattagagtgcatgcatgtagtatgcaacttttaatgtgtggaggcagagcagccagtggggagggccagggcatcagctcttcacaccccctgccctgttgctgaaatgcgctctgtagcgaggccctcggagggttccacatttactgaatgaacaaaggccggggctggaatcaggcagggcttgagcaagtcgtggctccacgtgcgctccctgtgcccccatcacgggagtgttggggcggcccaggggctgaccgggtaagcgggaggctggcaccgaggcccgcggggtgtcggccccaagcccctgaagtcacagagggcgggcacgcccggaggcggggccgggtgcgtcctggcgggggctgtctccagggaaacgcgacgctctccg

SEQ ID NO: 4816 - DNA, 495 bp, Homo sapiens
  source 1..495: mol_type = other DNA
tatggccatgagagaacagaggagccttccaaagtgctctctccactcctccatcctaggaaagttggagtccttccttagacctccacggaggtgatgtctggagctgcaaccagggaagacctggctgcagacatatttgagtctttagctcaagagtgaattgagacagttgcttttcagtgtatccattgcctgaaaattaccagatgtcagaaaaattgaaggagtcttaaatggcaatttcatggacattaagtgatattaaattttttaaagttacaatgctgaccccaataaattacttaggatgaaaatagaaattagttttattttatgagccatgtgttataatacatagaaaaaaatgcaccacgcagcccgccgtccacgtgcaccgggtagccacggggccctagccgaacgacgcggacgcgaagtgggcgggcccggccaagccacgcctccgcgccagacgccgcagtagagcgggca

SEQ ID NO: 4817 - DNA, 702 bp, Homo sapiens
  source 1..702: mol_type = other DNA
acctccacggaggtgatgtctggagctgcaaccagggaagacctggctgcagacatatttgagtctttagctcaagagtgaattgagacagttgcttttcagtgtatccattgcctgaaaattaccagatgtcagaaaaattgaaggagtcttaaatggcaatttcatggacattaagtgatattaaattttttaaagttacaatgctgaccccaataaattacttaggatgaaaatagaaattagttttattttatgagccatgtgttataatacatagaaaaaaatgcaccacgcagcccgccgtccacgtgcaccgggtagccacggggccctagccgaacgacgcggacgcgaagtgggcgggcccggccaagccacgcctccgcgccagacgccgcagtagagcgggcagggcgctgcgcccaagagccacagacgcaagcccagtgccacaggccgcgggggcggggaggacggcgcccggggacagagaacatgggacgcagagcggtccaaggccccggcgccctggtgaggcccaaacctcccgccatgccccccctgtcccggcccagcgcccgcgggggacccaagccccagcctggtccacctcggaggcctctaggacccgggggcgcccggcggcccgcccggctcccacaaatagactcctgggcgggcgcctgagcccccaaaata

SEQ ID NO: 4818 - DNA, 393 bp, Homo sapiens
  source 1..393: mol_type = other DNA
tcatcaacagcttgtttactaaaaataaacacaagaagagttgcttttcctgattgattctgattactgtagccccaaacactcaagattctggagtgtaaataatggaggatcccccttcgggacatccttcctccaggcagcaggccttcaagcttcaagcctcagggcccaaccctaaggctgggggctctccctgcaggcaggactgggcctggagggcctcctcattgagaccagaagcccgggttcggttctgctaccgggcgagcgctggccagcaggggccaaggcgggcccagctgtaagagtgggccccgcccaacccctcacgagagagacccgcccctcccggaagtgcctgtcgcccgcccacctggaaggccttcgcca

SEQ ID NO: 4819 - DNA, 643 bp, Homo sapiens
  source 1..643: mol_type = other DNA
cgacatcatggtggcccctgttaaggcgagcaccccttccctcggggctcaggctcctggacaggctcagccttgggcagccttcgccaggtccacagggggtggggacaggcgggccagaccctccttcgtaccccagcacagtcagaggaacttctgccttctaactgtatttaattcgcatcgaaggctccggcgcttctcgcaccgcagggcccacagcacagaccacacctgtagacttggaggagtggcaggggtgccaggagaatcctgccctgcccgtagcggaagcagcctgcccctgtggccccaaggttcccgggtcccttcagcggctgccccaggggcctggccggcagtgtctgggagggagcagcgatcccgcctcctgggatctcccgggcgccgcccggggaggaagcgaggggctgggggtgctgctcacccgctccgcgcgcctcggctcccaacacagcgccccggccccgcgccgcgctcgattccccggctccccgcgcccctggctcctggccctccccgcccggcgccccggccccgcgccccggccccgcgcacagcgcccccggcggcggccgagcggagcccgagcggggcggcgcacggcgcggggccgggccgg

SEQ ID NO: 4820 - DNA, 548 bp, Homo sapiens
  source 1..548: mol_type = other DNA
acggggtcactgtccagccaccaggaccaggtgcctggccatctggggctcagcggtcgaacgagtgcgacgccgctccctcaagctcttagaggtgttgagttgagcctgctgggctcctaacgaaggccctggggcccggggttgaggcccccttctcccctgcctgacgacgacggcggcaggaactcgaccggcgccggccgcggccacggcctccgcagcagagcgccggaagcagagctgcgacgcaactcggccgaggtggctccctggtccctgaagctcccagagcccgcgtgttcaggcggtcccgacaccccggcccgagcctcaccggctggaggactgaacgcctgccggccctccgggtatgagcggaggccgggatagccctgggctccgccgcccccgtccgccgcccgaccacgaaagagcggagctcgggagccccgccccctgggcctccgacgtccgtggcgctttccgtcgcgcgagtgcgattgggccgcctgtcacgtgacccgagaccccacgcccggttggct

SEQ ID NO: 4821 - DNA, 421 bp, Homo sapiens
  source 1..421: mol_type = other DNA
tcccctgcctgtgtcacccaggggcctctaggggtgctctggagctgggagccactgtccagcacttcctgtctgccaagcagtcactcagtcttgaccactcgttttgccgcaaggctctatgctctttgttctggaggctgcaagtccaagattgaggcactggaagacctggtgcctggtgaggacctgcttcctggtccagagacagcaccttctctctgtgttcctcaccttggggatgaggacataaatgtgtcatctatagaagggcccatctcttacacaaatgctgggtgcaagggcttgaaggcagggcctggcctttccatggggtccgcatgtgggctgaagaccgtctccccaccatggtgggaagggggccctggcagatccggacgggcaggactgggtgtgtccc

SEQ ID NO: 4822 - DNA, 476 bp, Homo sapiens
  source 1..476: mol_type = other DNA
tctccaatgaacatcatggcccatggagggcccaagggcgtgcccagccagggcttcctcacgtgcctctgggtagagagccctggtctggctcaggaggcccaggcactggtctcagacctgccaccacctgtgtgacgctgggccaagccgtttccaccgctgtaaagtggggaggggtgaaactgaagctctccccagcctatcccagccgttgaggagggagaggctgaggagacgaggctcctgccctcagggtggacagggcccaggaagggggtgctctgcaccatgggggcgcagcctgggcctacgggctcccccaccatgagctcaagcaggggaggagccagcctgcctgcgtgtgcctctcagcgcccacggagcgtgtctgcatgaaccaggatgagtgtgcgtgctgcaccctagggcgagctgaccgcagaccctgggagggctgggccctgggaaggttt

SEQ ID NO: 4823 - DNA, 530 bp, Homo sapiens
  source 1..530: mol_type = other DNA
gagcgtgacgctgggccaagccgtttccaccgctgtaaagtggggaggggtgaaactgaagctctccccagcctatcccagccgttgaggagggagaggctgaggagacgaggctcctgccctcagggtggacagggcccaggaagggggtgctctgcaccatgggggcgcagcctgggcctacgggctcccccaccatgagctcaagcaggggaggagccagcctgcctgcgtgtgcctctcagcgcccacggagcgtgtctgcatgaaccaggatgagtgtgcgtgctgcaccctagggcgagctgaccgcagaccctgggagggctgggccctgggaaggtttgcaaggatgctggctcttcagaggtgtcagcacaggcagcccacgccctctagctggggctggtgcaggagcagtggggaactcctgttacccctgacctgctgccgtcagtcagccgcccgcccccccaccttaaggaggggcagagtcagggaccagccctgaggggtggctcaccccagct

SEQ ID NO: 4824 - DNA, 474 bp, Homo sapiens
  source 1..474: mol_type = other DNA
cctgagttctcctgagggcaggtgaggctcgggtctcacccagaccagaccccaggcaggtcaacaagcttgggggtccctgccttcccataggcagggacgcagccacgtgcagggggcctggcctagctggggacacagccatcacctaggctgccatgaggggcctcccaggcggacacacagtgcaggttcagtgggggtctcaccccagtggggacacagtgcagctggggccctcactgatcaggatctgggagaccctgactcgggtccggtaccagagctgggccagtctccagcgcccagggctggccgagcgtggccaggccaggctgtggggcagggcccctgtggccatcctggctgtgcacctgggtggcagccagtggggcgggagctggggctgcagctgtggtgttcccagaggcccaggtgccctctcccacacgcctgggccctctgggttgtggg

SEQ ID NO: 4825 - DNA, 479 bp, Homo sapiens
  source 1..479: mol_type = other DNA
cctgagttctcctgagggcaggtgaggctcgggtctcacccagaccagaccccaggcaggtcaacaagcttgggggtccctgctcccataggcagggacacagcccacgtgcagggggcctggcctagctggggacacagccaggttcacctaggctgccatgaggggcctcccaggcggacacacagtgcaggttcagtgggggtctcaccccagtggggacacagtgcagctggggccctcactgatcaggatctgggagaccctgactcgggtccggtaccagagctgggccagtctccagcgcccagggctggccgagcgtggccagtgggccaggctgtggggcagggcccctgtggccatcctggctgtgcacctgggtggcagccagtggggcgggagctggggctgcagctgtggtgttcccagaggcccaggtgccctctcccacacgcctgggccctctgggttgtggg

SEQ ID NO: 4826 - DNA, 645 bp, Homo sapiens
  source 1..645: mol_type = other DNA
ctgggctggaggggacccagccccggggttcagggtggcccgaaatccgtgcacccccgcaccgcagtgcggggaggttcccatgggcgagctgcccagagccggggtggcccccgaggggcggggggtccccacgagccgcggtagaggcgaggcggcgggtccgcgggcgggttgcatcatccggcggggagggcctgggtcactgctgctcttcccccggcgccccggcccgagccagcatccctggcgcaaggagccccgccccccacgatgcgtctgtcgctggctcagagcgggcccggcgaggggtccgcgggcaagttcaggtgcacgcggggcttcgggacggggcgccgccgggtccctcccccgcgaggtctcaggggcacgccgggggaggggacgctgcgtccgagccgggtgtcggtcccccaccctccgcggggcccgccgcggtgtcagcggtgacgtcacagcccggccccggccccctccgtccccagccccatccccgcggcggccgcgtcgcccgtccctctccccgcgcgacaaaccagctggcgactggagctcggacgccgcgcgcagccaaccagcgcctcgggaggggcgcggggcggtccgggccgggggcgcgcagcc

SEQ ID NO: 4827 - DNA, 228 bp, Homo sapiens
  source 1..228: mol_type = other DNA
agggtgcacccctgaccacaagggcccaaggtggtcggggcacatatgaggcatcaatcaatacatgatttataaacatattttgatcctatcagacttcaccctggcggacagggaaccccatagcaaaccatgtttgtaaataaacagctgctttgcaagcacgcagcagggttgagttgttgctgggggctccctctgcctgagggcttcctgcctggccgtgac

SEQ ID NO: 4828 - DNA, 478 bp, Homo sapiens
  source 1..478: mol_type = other DNA
tctgcagtcaccctgagtgatgaggcagaggccagagggcccctggactacaccctggaacaggccctccagggactctgggctctgcaggggccatggccagacctggtcaggaatagtggctgagctccgtcactgtgagcctgctggcctgggcagcccagaaacgggggtggctgagctccgtcactgtgagcctgctggcctgggcagcccagaaacggcggtggccgagctggctctccactactggcagctgccgccgcagcctcagcctgtagctggatccaacatgggcttcccatgcatgcgggaggaaaggcctagcttcgctccaccctctccagctctggagtgggagccctgtggccccagcctggactgctgctgcctcctcccctgcagagaaggcagcagagatagggctgggactttggccccagggctggggcagagtgagcaggctcaggaaggcctg

SEQ ID NO: 4829 - DNA, 469 bp, Homo sapiens
  source 1..469: mol_type = other DNA
ccaggagggtcacacttttgattcaagcccaccgggggattttatcccctccctgttcctcagggaaggggcctgggcaagcagcggccagacgctctgcccttggagaccgttgggccctctagggagaggggaccccctcgtggctccctcactggaggcgccctcgccctgtgggagccgttgctggccaggcaatagccacggcccccacaggggcttggggcgtggccaggggtccctgctccagccccgcccttgctcctggggcactgggtccctcctgcgtgggtgtggaggggcggggggcacaggacagctactgccgggcctccacagcggagtgccaccagccggactggctgaggcccagtgacagtcctgcttgaggaggggagcctcatcaggaggtatcccactggagacctggccccacccctgggtgccactggcctgagaaggggacttc

SEQ ID NO: 4830 - DNA, 589 bp, Homo sapiens
  source 1..589: mol_type = other DNA
tgtcaaaagacagttttacataaattgtcaatcaaatcctttatgtcagtccagaatgaagtagatacacctttttattcttcacaagcatcacgaatacacattgggctaaaactttactatatttcatcctaagaggagggaaatgtgccgtaattcctgtcattttacttgggtcttttaaaaacggcaaattctcatcttccactggctgagagtaaaaagaaagaaaagcggtaaagacttctttttaatacagatttttacacaataaaatcttaaatatctctaatctgcctcgggaaggattgagaggatgggccaggacgacccattcgttcacgcggcccagagctctgcgaaccgaggcccccgaaggctgaggccgcggcagaggcggcggcacggtgacgggcgcgactccggccttccggctttctaaggggcggccccgggacacctgagccccgcggggccgtgaacgctcagcacagctccgggccggaacgatccaccacaccgcgctggcgctgggaacggcgtcggtgacggaccgggggccggaaaggacgggggaggaccgctgctt

SEQ ID NO: 4831 - DNA, 458 bp, Homo sapiens
  source 1..458: mol_type = other DNA
ggagtgcagtggtgcaatcatggctcactgcagcctcaagtgatcctcccacttcaggctcctgagtagctgggactacaggtctcacagtgctgggattacaggcgtgggccttccttttctttgacataatccttttgtcaaaagacagttttacataaattgtttgcaatcaaatcctttatgtcagtccagaatgaagtagatacacctttttattcttcacaagcatcacgaatacacattgggctaaaactttactatatttcatcctaagaggagggaaatgtgccgtaattcctgtcattttacttgggtcttttaaaaacggcaaattctcatcttccactggctgagagtaaaaagaaagaaaagcggtaaagacttctttttaatacagatttttacacaataaaatcttaaatatctctaatctgcctcgggaaggattgagagga

SEQ ID NO: 4832 - DNA, 519 bp, Homo sapiens
  source 1..519: mol_type = other DNA
ctcagagccggccctgccaatgggattccggcgcggcgacttcagccgcgccgcgcctgcgtgggcccagcgcctcatgggaagttccgtcatgaggccgcgcgccgcgcctcccccagagcaggtaatttcaggcggcggagccccgggccacctctgcgagcctcgctggtccccgcgcgggctcggagcaggcgggcaggtgcggggcacttgcgctggtggggccgctagccagctggctggctccggggcgccagctgggctccccttgcaagtcgttcccagcccagtgcggacgctgcagccttcgtctaccctgcggagcctgaacgagccgccccgcgtcctccgccttcagaaagaggcctccaagaggcgagctctgcgctactcacccattttgatcgcgagtcgggaggaaaccgcatctgcccggcccgggggcggaggcgcccattcctttggctcctccgaagcgccgtaggggtgtttggtgcgtccctagcaacccttagc

SEQ ID NO: 4833 - DNA, 554 bp, Homo sapiens
  source 1..554: mol_type = other DNA
ccccaaaatgaacttttaaggattcaatgcttaggagtcattttatcttagacggcagcgcaggcccctgccgtactcgtaaccacgagcgccggcggcgcgcgcccccgaccccgcggcgccggctgagcccgcagggacccacacgcccagtgcaggaggctggcgggatccgggctggttctcctggagctcgccccgcagggccggctgcggtgaagagagcgcagggtcccgaggcgacccgaggcgcggggcctcggcgcccaccgggcaggctacactgaagggcaccccgaagacgctgggggcgcggggcccagggccaacggccgcaaccccgccgcgatttgggcacggagaggacgcgggctcggcggtgcgcgaagggcgacgggcgcaggggcgggagacccggggtcgggctggtctcgggcggcggatcctcctgggccaggggcgcggagccgcgcaggccccacagccgccctggggagatggcggagcccggcccgctctcccgagcgcaggtatctcacctggatcaggcgagc

SEQ ID NO: 4834 - DNA, 674 bp, Homo sapiens
  source 1..674: mol_type = other DNA
tgtacgtgcacgtatatgactgtacctacagatatgcagaaaattataaacacatgtgtacgtataacatatacatatatgcatgtggtttttttttccaacagaaagttgaattcagactttttggaactatgacagctttgaaaacaggtatctcgcctcagtttcctcgtcagctgaccgaggaggctcccccgcccgtcaatctcagaggctcggggcgaggctccaactggactgaatggagccaccgcgtccacccccggcctggcctcgcgccgcctctgggtccttcccggccgctgccgcccccgggccggggctcccccgaggtccagcgcctcccccgctcccccgggtccggctgtcagctgtcagggggccgcgcggcggcggccagaggcaggacgtggtttctctcaggcacggagcagttccagcccgcagctccccccgcccgctgggcccttgggccgccgcccgcaggggccgctcaccccgccgcgttccgccgccacagggctcccgcctcagagccggccctgccaatgggattccggcgcggcgacttcagccgcgccgcgcctgcgtgggcccagcgcctcatgggaagttccgtcatgaggccgcgcgccgcgcctcccccagagcaggtaatttcaggcggcggagcc

SEQ ID NO: 4835 - DNA, 531 bp, Homo sapiens
  source 1..531: mol_type = other DNA
gctaagggttgctagggacgcaccaaacacccctacggcgcttcggaggagccaaaggaatgggcgcctccgcccccgggccgggcagatgcggtttcctcccgactcgcgatcaaaatgggtgagtagcgcagagctcgcctcttggaggcctctttctgaaggcggaggacgcggggcggctcgttcaggctccgcagggtagacgaaggctgcagcgtccgcactgggctgggaacgacttgcaaggggagcccagctggcgccccggagccagccagctggctagcggccccaccagcgcaagtgccccgcacctgcccgcctgctccgagcccgcgcggggaccagcgaggctcgcagaggtggcccggggctccgccgcctgaaattacctgctctgggggaggcgcggcgcgcggcctcatgacggaacttcccatgaggcgctgggcccacgcaggcgcggcgcggctgaagtcgccgcgccggaatcccattggcagggccggctctgaggcgggagccctg

SEQ ID NO: 4836 - DNA, 331 bp, Homo sapiens
  source 1..331: mol_type = other DNA
ccgtggcctggctgcaggctgtgcggacctgaccccattccctgggtaaggctgggtgtgcccttcccggagggtggagaccccgagagtaggggtatccaccgtgggctcagaggccacacttgcgtgtatacatctatgtagagatggagccataagagccgcctgggagcctcactgcgctgtaggaccactggtgacatctgcttccagagcacagttgggtgggcctcccgggtgctgggcggcccggggcggcggggaccccagcggcggggcgggcgggcgctgacgtgtccaggcgggattgggccgccgccctatatagcag

SEQ ID NO: 4837 - DNA, 698 bp, Homo sapiens
  source 1..698: mol_type = other DNA
agagccctctcctaacagctcccctgtggggtgactggagaagctggttgtaaaatcaggagcaggtttctgccccaacgcctgccctgagttaggagctcaccgagccccagccagcgcagggcaggacagccggcctgaggccggtcaggagaggcggccctggcgctgcgcggtccaggacgagggagcgcgatggggtggcggcaccacgtggactggccggtcctccgcggggggcgcgttccgagggctgagggcggacggtggcggagagcccggccgtgaccccctccccgcagtgctgcagggtggagatccgcttggacgcgcgcaagttcgtctgcgagtaccggcgcccggtggccgagcgcgcccaggacatcggcatctggttccacatcctggcgggcctcacgcacctggcggtcatcagcaacgtgaggcccgggcgggagcgcggggcggggcgggggcgcgcaggggcgggggcgggcagcgggggcgcgcaggggcgggccgggggcagcgggggcgcgcaggggcggggctgggggcgcgcaggggcggcagcgggggcgcgcaggggcggagcgggggcgcgcaggggcggggcgggggggcagcgggggcgcgcaggggcggagcgggggcgcgcaggggcggagcgggggccgcctcgcgctgacccctccggc

SEQ ID NO: 4838 - DNA, 553 bp, Homo sapiens
  source 1..553: mol_type = other DNA
attgtgacttaacctatcttaatagggttttaaggaagttagctgctaagaaagtgactatccttaagcagacaccaaataaatgtgaagtcattgattgagggccaaatcgtcatgttccttaagattacgacttaggcactgtttaataagcttttcaaaccacggtgcttcagtgcctccaggccacgcgggagggaggacaccccgggccggggcacaacccgcgggccggagccgcccgcgcccatcccgctcaggccgcagccaggcacggcaccctcccgtccccgagccacgtcgctgctcgtgggctcgcggagcactccccaggtctcacctcgggcccagctaggggccgcgccagctccgccctcccccgcggggcggcgggccccagcccgggcacaggaaggccacgtccccggggagggacgcccgactcgatggtctgcgcagggcccgtcggccccacgtgacgtgcgcgcagccaatccgaggccccccgatcatcgagacggcggcggtggtgggctagacgagtttcgcgcgg

SEQ ID NO: 4839 - DNA, 577 bp, Homo sapiens
  source 1..577: mol_type = other DNA
tcctcgccgaaggtacccgcagacagggcctagtcgctctcccctcgcttatccacggcatccagccgatgggcttggaggtttgggggctggccagtcctccacgcctcagggtgtttgtcggaccgcactcgacgccccgaggcccagcaccgacgaccggaatccccactcccgcgcccgggcctgcccgtgtcggagccactgtcgccggcactaggaccgcccgggacgggggagcccacgataagtgccgaagagcctgggctcggccgcccctcccccacgagagtatgggacgagcggcgcgtcccccgcagctcctcgggagggccggcccacaacttgtgcggggtacaccggcgagaggcgccgaccgaccgcgccgcggacccgcccagcgctcgcggtccgctcacagcccgccccagcccgccccgccccgcccagcgcgcaggcggattgcgtcaccgcgtcaccccgccccccatgcggccggcttccgagtgcgcaagcccagagtcgtccgcgttgtccgcctctgcgcaagcgccgtgctcctcccacggcagttggc

SEQ ID NO: 4840 - DNA, 688 bp, Homo sapiens
  source 1..688: mol_type = other DNA
ccccgggccggggcacaacccgcgggccggagccgcccgcgcccatcccgctcaggccgcagccaggcacggcaccctcccgtccccgagccacgtcgctgctcgtgggctcgcggagcactccccaggtctcacctcgggcccagctaggggccgcgccagctccgccctcccccgcggggcggcgggccccagcccgggcacaggaaggccacgtccccggggagggacgcccgactcgatggtctgcgcagggcccgtcggccccacgtgacgtgcgcgcagccaatccgaggccccccgatcatcgagacggcggcggtggtgggctagacgagtttcgcgcggccgctcgccgtcccccgcccagtcgtactcggcgccccagctcggtgctgccgccatcttcttggaggacaggaggagaggcgaaggctccccctccccgtgttataagcataagaaaaccgagctcataaggtgaagaggctacgcttgacctccccccccaccccgccaactgccgtgggaggagcacggcgcttgcgcagaggcggacaacgcggacgactctgggcttgcgcactcggaagccggccgcatggggggcggggtgacgcggtgacgcaatccgcctgcgcgctgggcggggcggggcgggctggggcgggctgtgagcggaccgcga

SEQ ID NO: 4841 - DNA, 265 bp, Homo sapiens
  source 1..265: mol_type = other DNA
gtcccaactgtgacctgtgaacttcttgtagttcaaacttctgcacctttggccattgcccaaactcttaatgagggcagggcacatgtttctcaaatactttttgaatcacactgccgatatatttaatgtttcaaaatagttctgccgaaagctcattaattaactcatgatgtgtactgtaattagatcagatttacatagggccagggtttccctctatcattcataaatgtaattctgctgtaaaagaagaagttgtggg

SEQ ID NO: 4842 - DNA, 774 bp, Homo sapiens
  source 1..774: mol_type = other DNA
cctcgcgcgatccttcgatgatccccttcggtccctgtagtcccacgagggatgcaatgtggcagccaggccggcaaggcccgggccaagacctatccccgcccagcgagccaggcctcgcccagcacctatccgcgcccagcaagcctaggcctcgcccagcacctatccgcgcccagcaagcctaggcctcgcccagcacctatccgcgcccagcgagcctagaccccgcccagcgagccgactccccgcccaggacctagccccgcccagcgagccgactccccgcccaggacctagccccgcccagcgagccgactccccgcccaggacctagccccgcccagcgagccgactccccgcccaggacctagccccgcccagcgagccgactccccgcccaggacctagccccgcccagcgagccgactccccgcccaggacctagccccgcccagcgagccgactccccgcccaggacctagccccgcccagcgagccgactccccgcccaggacctagccccgcccagcgagccgactccccgcccaggacctagccccgcccagcgagccgactccccgcccaggactagccccgcccagcgagccttggcttcgcctaggacattgcctcgctcagcaagccgacgccccgcccaacgagccgagcgctgtttcaggccgcgggacgggaaggctccgccctggcgccccgcaggccaatcgactgcgcgtccgcgtcgcgggggcggggtcagggcggggcgcgctg

SEQ ID NO: 4843 - DNA, 745 bp, Homo sapiens
  source 1..745: mol_type = other DNA
gtcacctgtgctgagttcctcaccggacaggtggggatccctgcggtgcactaggggaatgcacacagggggcactatgacctggcggcccacggggcacggggacgcaccaggtagccttgggatctgcaagtccctcccggaccctggggagtgccatgacggcttccagcagcagtcactgtcctgggcgcgtcccgcgctctagcccaggtgggtcccacaacggtgtgaccaaggacgtcctatgacttctccaaggcctggtgcgccctggcctgtgcgcgtgatcccgggcggggtctcagtcgcgatgtggccagcgcgggcttatctccgtgccgtgacgacaaggctagaagcctgggcggccgcggtggatcctcgtggcgaggcggggagggcgccgggcctcactggcccgctcgaaccagggctgcgcagggcagagcccaagggagagggccgcgcggccgccgtaacgtcggagacgacgcctggcaggcgccagcgggagggcgcgacgcgacaacgaccacgtgccccgcccgcccaggcgcgcggcctgccgggagacgcaggactaggggtcccagagagcctcgcggcgcgcatgcgagccccggccccctctcgcgcagcctgccgggacttgtagtccaacgccagcaggcttccgggcccggagtgggcggtgggactcggggtcccagagagccgtgcgcgggccgcgacgccgagcacc

SEQ ID NO: 4844 - DNA, 777 bp, Homo sapiens
  source 1..777: mol_type = other DNA
agtcactgtcctgggcgcgtcccgcgctctagcccaggtgggtcccacaacggtgtgaccaaggacgtcctatgacttctccaaggcctggtgcgccctggcctgtgcgcgtgatcccgggcggggtctcagtcgcgatgtggccagcgcgggcttatctccgtgccgtgacgacaaggctagaagcctgggcggccgcggtggatcctcgtggcgaggcggggagggcgccgggcctcactggcccgctcgaaccagggctgcgcagggcagagcccaagggagagggccgcgcggccgccgtaacgtcggagacgacgcctggcaggcgccagcgggagggcgcgacgcgacaacgaccacgtgccccgcccgcccaggcgcgcggcctgccgggagacgcaggactaggggtcccagagagcctcgcggcgcgcatgcgagccccggccccctctcgcgcagcctgccgggacttgtagtccaacgccagcaggcttccgggcccggagtgggcggtgggactcggggtcccagagagccgtgcgcgggccgcgacgccgagcaccgccctcgccgtcgcctccgggcttccggtcgctgccgccaccaccgttgcttcgcgggctgggaggcccggggtccccgggcgaacagaggctgcgggtgggagccttcgcgggcgctgcagagcgggccgggggaggccgggatggagccccgcggaggtgggcgcgctgccgggcggggcgctggcccggggcggggctcggtggc

SEQ ID NO: 4845 - DNA, 433 bp, Homo sapiens
  source 1..433: mol_type = other DNA
ttctgttattgacttttaattcagagaggacacactgtaagatatatggtctatttcgataaacatcctatgtgcacatgggaagaataagtatttttacacacaattaggccaagttggttaatcctattgttcaaactgtatttatgttgagatgttggggatcctccattcaataattaatatgtaatcaatcatagatctaaatatgagataaattggacatcactaagagtaactccaagatatttgcaataacttcaataaatgccagacccggggaacacccaggcggctggggctggctctaggtccccactgctctgccttgcgggggccgctccggcctggtcgccttctccgggcgcatccagggaactcgctcggtctaagcggggaagctcggaaagcgtctccccgactccgcccttcc

SEQ ID NO: 4846 - DNA, 562 bp, Homo sapiens
  source 1..562: mol_type = other DNA
gtcacctgtgctgagttcctcaccggacaggtggggatccctgcggtgcactaggggaatgcacacagggggcactatgacctggcggcccacggggcacggggacgcaccaggtagccttgggatctgcaagtccctcccggaccctggggagtgccatgacggcttccagcagcagtcactgtcctgggcgcgtcccgcgctctagcccaggtgggtcccacaacggtgtgaccaaggacgtcctatgacttctccaaggcctggtgcgccctggcctgtgcgcgtgatcccgggcggggtctcagtcgcgatgtggccagcgcgggcttatctccgtgccgtgacgacaaggctagaagcctgggcggccgcggtggatcctcgtggcgaggcggggagggcgccgggcctcactggcccgctcgaaccagggctgcgcagggcagagcccaagggagagggccgcgcggccgccgtaacgtcggagacgacgcctggcaggcgccagcgggagggcgcgacgcgacaacgaccacgtgccccgcccgcccaggcgcgc

SEQ ID NO: 4847 - DNA, 705 bp, Homo sapiens
  source 1..705: mol_type = other DNA
atgtaatcaatcatagatctaaatatgagataaattggacatcactaagagtaactccaagatatttgcaataacttcaataaatgccagacccggggaacacccaggcggctggggctggctctaggtccccactgctctgccttgcgggggccgctccggcctggtcgccttctccgggcgcatccagggaactcgctcggtctaagcggggaagctcggaaagcgtctccccgactccgcccttccgccaagcctctcgccagctgggagtcgcgcgctgcccacctcgctgcccaggcccccgacgccgcggcaggagccccccaagagcgcgggaagccccgtggacctggcgctcccggctcgggcgtggacggggcgggcgccggggcggggcgcgcgtcctcgcgggtctgaagggtcgaggtcgtcgtcggcggcgagcagatcctgaagccagaactccaccccggcgcccgcgccatgcggcgggagaggtgagcgcggcgggcgtggcgtccgtgccggggtgcccggggtgccacgggaacggcgaggccggggacacgcgcgcaggacgccagcggcggaggtgggcggccccgggccggggcggggagggccgggtcctggcagtcgccgtgggggacgcgctgggctgtgccctccgcccccgccgcccacgcactcgtcttcgagggc

SEQ ID NO: 4848 - DNA, 347 bp, Homo sapiens
  source 1..347: mol_type = other DNA
aaagctacccattttagtaattggccatcttatcaaattcacttgtagattctaatagttcttcaattgagactcagattaacgaggaaatcaaacataacatttgcaaattatttgtatccactttatggcctttttatattttatagaaatacttgctgtaacagctcctccccaccttgggacagctggtgcgggccgcgcaccctcagcgggagctccaggaaggagccgtccccaggtcccacttcctgtcctgggttcccgggccgcttgccaggagacaggacagtctctggagcctccatgtggaggctagctctgaaatgaactacaattcccagaat

SEQ ID NO: 4849 - DNA, 840 bp, Homo sapiens
  source 1..840: mol_type = other DNA
cgttcgccgccgcgcctctccccgcccggcaggctccgccgccctccacggccgacctggcgcaagggcctgtgcagccacaacctccggagcgctccggacgggaccggaactccagcgcaaccgacggcgggttccgcggcgcagtgcgccgccgtccccctcccgctgccccgcgctcccgcagcgcccgccgccccggcccagcctggcccgcaccggcgtgccccgaggcgagtcgcggcagcccgacccgagcaggggagtccggccgccgactgacccgagcggcgtcgctccgacgggccagcaacgcgacgcggcgacgggacgccgcgggggccaataggtgtgccggcgcaggcggcggcgcgcgagcggaaatacgcgggagccgccattttggcgtacggccgggccgacgcgagccccggggcgccctgcgggcggcatggggtcgtgtcgtgggacgacggctggttctgctgtccgacgggacactgggtggcgcttcctcctcttagaggacccaggagcagttgtcgaggcggcagaggcgagctctgtccccgtccgagcagccatcttgcggtacggacgtgctcggcgcgcccatgtcgcggtacggacttgccccgccggggcgactcccccgcccgtctgcccgcctgccgacggacgctgcgaggggcctgcggcgccccgctggtccgaagacgcccgaacccgcggctggcgaggacgcgggcgggggctggggcgggggcgggcccgctgcgggcgcctgcgcctccatcttgccgtacggcgcggacgccgcgggccggcccacgtcccgag

SEQ ID NO: 4850 - DNA, 540 bp, Homo sapiens
  source 1..540: mol_type = other DNA
aaaaatataagaaaattcactgtttctctttctcgtcacggaaaagcagcttggaatacgtatactgtgatgaacacgtcacgtttcgcggaaaggctacgctttcgcccgccgctcgcgtccccggcccggaccgcggccgccccgttcgccgccgcgcctctccccgcccggcaggctccgccgccctccacggccgacctggcgcaagggcctgtgcagccacaacctccggagcgctccggacgggaccggaactccagcgcaaccgacggcgggttccgcggcgcagtgcgccgccgtccccctcccgctgccccgcgctcccgcagcgcccgccgccccggcccagcctggcccgcaccggcgtgccccgaggcgagtcgcggcagcccgacccgagcaggggagtccggccgccgactgacccgagcggcgtcgctccgacgggccagcaacgcgacgcggcgacgggacgccgcgggggccaataggtgtgccggcgcaggcggcggcgcgcgagcggaaatacgcgggagc

SEQ ID NO: 4851 - DNA, 662 bp, Homo sapiens
  source 1..662: mol_type = other DNA
gggcgtcgtggcggccgcctgcagtcccagctactcgggaggctgaggcagttgcagtgagcagagatcgcgccaccgcactccagcctgggtgacagagcgagactctgtctcaaacaacacagcgtttccagaacgcagtcgtgctgggctccaggtgagctttgggaggagccccggctgagcccctgcactgggccccgcgcttcgggaagcatctcgctcgttcgtctcgcgcgccgcgtgaccggagccctcacgctggcagcgggcaccgcagggccctgagagtcgggcccgctgcgcgcagccaggggccaacgagagccgacgctgggcgggcagcgtccgggagcccctccgaccctgcgctccccgccctgaccccgcgtctccggccgtccagcccgcgccgcgtcacctcccctcccggagcgaagggccctgctcgcccgaggacggaggcccgcacgggacacggggccccagtttccgccccggaagcccaggacacggctccagtggcggcgcggcccagggcgcaggcgcgggtgtcggtcccaccgcgcgtcgtcctcgccccggccccggccaatcccttcgaatttggccgaggccgggatcacggcgcgcgctgttgacgccggccaatgggagctccg

SEQ ID NO: 4852 - DNA, 935 bp, Homo sapiens
  source 1..935: mol_type = other DNA
ccggatcgatcgcgcgcagggcggacccaggcggccggggtgggggcggctgcgctgcccgaggcgcccggcccagagacggcggccgggccaaggtcacacagcgcccacgcccgctcccccgcgccccggccgccgaggcccggcgcccccgccccccgcgttcgggccggccgcggggcctcagtttccccgcagggccgggtcggggcgggggcgtggcggcccggggcccgcgtacctgtggaaggagacggcgcgcttctcgccctttccctcacggccgcacagcagcaccatcgcgggccttggcccagccgcgcagccaggccccggccctagccgcccgcccgcccgcggaccgccccgagggagggagcgcggcggcgacacggctcgggacgtgggccggcccgcggcgtccgcgccgtacggcaagatggaggcgcaggcgcccgcagcgggcccgcccccgccccagcccccgcccgcgtcctcgccagccgcgggttcgggcgtcttcggaccagcggggcgccgcaggcccctcgcagcgtccgtcggcaggcgggcagacgggcgggggagtcgccccggcggggcaagtccgtaccgcgacatgggcgcgccgagcacgtccgtaccgcaagatggctgctcggacggggacagagctcgcctctgccgcctcgacaactgctcctgggtcctctaagaggaggaagcgccacccagtgtcccgtcggacagcagaaccagccgtcgtcccacgacacgaccccatgccgcccgcagggcgccccggggctcgcgtcggcccggccgtacgccaaaatggcggctcccgcgtatttccgctcgcgcgccgccgcctgcgccggcacacctattggcccccgcggcgtcccgtcgccgcgtcgcgttgctggcccgtc

SEQ ID NO: 4853 - DNA, 503 bp, Homo sapiens
  source 1..503: mol_type = other DNA
ctctatggaaagaggaaacaacttgcccgttccctcgggcgtcgtggcggccgcctgcagtcccagctactcgggaggctgaggcagttgcagtgagcagagatcgcgccaccgcactccagcctgggtgacagagcgagactctgtctcaaacaacacagcgtttccagaacgcagtcgtgctgggctccaggtgagctttgggaggagccccggctgagcccctgcactgggccccgcgcttcgggaagcatctcgctcgttcgtctcgcgcgccgcgtgaccggagccctcacgctggcagcgggcaccgcagggccctgagagtcgggcccgctgcgcgcagccaggggccaacgagagccgacgctgggcgggcagcgtccgggagcccctccgaccctgcgctccccgccctgaccccgcgtctccggccgtccagcccgcgccgcgtcacctcccctcccggagcgaagggccctgctcgcccgaggacggaggcc

SEQ ID NO: 4854 - DNA, 884 bp, Homo sapiens
  source 1..884: mol_type = other DNA
tgcccatcccgggccgacgtcaggggtcccgcgtggggtctgcccctctacgagcgggagaccctgagcaggctgctcggcagcgctggaccttccctggtgtgtaaagtgagggaaagcaccgtccgctcagccgctgggggcgccgacctgctgccacctggaaacagcacagcccgcccaccagggccgactcggcaccgccctccccgcctccgcgccgcagtccccagtgccggggagagacgccccgcggcccgcacgccctccccagccgcggtcggccggcgcacacgggcgcacagccaggcggaggcccagaccccggagcccccaaggcccggagccccgcagcgggcgccagctcctcctgcagacgggacagggacgggcgggacctggcggggccggggccggagctgatgtgggcggggtcgaggccgcaagccccgcccagcatcgccaggccccgccccgccgtgacgcacctggaattggcgcgacccagccggcgggaccccccgcgcccgccccccgcgcccccctgccccgccccgtccgcgcgccccccgtcgcgcccggccgcgcccgccgccctcccgagcccacggggtctgcatgcggtgcccggcgcgcggggggctgcggcacggaggactccgcgtgggcggcgggcgcggggcccgtggggcgcgcttactgttacatggcggtcgccatcttcgtccgcggccgcgctcggggtctgcgcgggcgggcggtgccgcgggaggcgggggcggggcggtgccagcgcgctcactattcatgagtcgcgcgcgctgattggtcgcgcccgggggcggggtcggacacgcctttcagcttccggcgggcggcgggct

SEQ ID NO: 4855 - DNA, 668 bp, Homo sapiens
  source 1..668: mol_type = other DNA
cctccggagtagatgggattacaggcgtgcgccagcgcgccggccttctcctgcctgcctcgagaggtggcagcaaaggagccagtgccctcactggtgctgggcggggcggccgctttcctcggagggaaggggcggcgttggcgggggaagggcgccagggcccaggccctgagggaggggcagctcgcccgggccacgcggtgccggccctcggctcaggccgggctgaggccccgggggctcggggtccgggggaaaggcgctgagccagacaggtcccaaggagccttcgggaagggagggcctcgtggcggcctgtccgggacccggccgggagcaggggtcgcgtgggcgccgtcaggacgggcgtgaggtccccgggaccacgtgttcaggggcggaggggagacgcccacctgggtgccctgggccgcacgccgggcggtggggccgggaacccctgctcctcctcggcctccgatccgctgcggccctgggtcctgctcgctgcccgacgccgctgccacaacctccgcccgggccccgcagcccgccgcccgccggaagctgaaaggcgtgtccgaccccgcccccgggcgcgaccaatcagcgcgcgcgactcatgaatagtgagcgcgctggcaccgccccgcccccgcctcccg

SEQ ID NO: 4856 - DNA, 479 bp, Homo sapiens
  source 1..479: mol_type = other DNA
atctgctcagagattgtggtgcacgcccgtagtcccagctacttgggtggccgaggtggggttgcagtgagctgagatcaaccccagaactccatgcctcaggcaggggatcccaggccgggaggctcctcgctcccctgcaggaggcagctgccccctaagctaggaggccgctggggaaaggggcgccccctgggctcggcctcggaggagcgggccggcccccaggtccctcggccgagcccacgtcccgggcctcgttctggagaaccctccagctgctgctggagggatgcgcccgacagccggcgcgccggaggccctcaggatggccgtcgagcctccggtgccagtcggggcggggcttggacggcggggcgctgtaggcgcgcagggctgggcctggagggcaggcggggcggggcccgttaggcgcgcggggcggggcttcggccgctgggcggagccgtcaatgcgca

SEQ ID NO: 4857 - DNA, 635 bp, Homo sapiens
  source 1..635: mol_type = other DNA
ccccgctgctcccggctgctctcggctgctcccggctgctccccagctgctccccaccggccttgggtctggtgggtgtggccctcctagtgggaccaggccacacactggagcacatgggcacggcaatgccaatgccgatggaggcgggttcctgggcatgtggacctgtcccttactcgaagcagctgaggggcctccagccagccccgtccgcaccccaggggttagggctctgccatgggggagtcaccgtggaccaggcaggctgccagagcggctgtggggccgggcagacaccctgactccctggggctcccagcagggccccactggcaacaggcagcctcctccctctggccgccgggcctccctttcccagcctggggctgggaccaccgtgccccagcagggggtgaaggtggctggtggctgaggaccccctgcccaggccgaggtgcctggccgtgaccctcaggcgtgtgtccctggcacccaccgtttgtaacacatggctcggccaaggtgattctggggtaaggacccatgaggcgccaagggaggctccttaatggtggcagggcacgccggtggagagctgcccagccgtgccagcaaggccccggcatccctcc

SEQ ID NO: 4858 - DNA, 478 bp, Homo sapiens
  source 1..478: mol_type = other DNA
ccagggtctctgatgccagggacctccatggctatggggcctgcacccatccgagccaggcactggctagggcagggaggctgccttgggctggggccagtcccggaatccaggctcagctcggaattaatatctatttcctgaaaagagaaatgaactttcttgcagtaaaatctaaacaaatatttatatttattttccacgtttcaaacttattgtccagcccaagattttaaaaagtcagagtggccacagggccctctgccctctcgtctgcgtcaggtcctgagttctgagtccagaagtggagcccaccaagcccgtcccttgtggggacagctccctccaagccccccggggggatggacactgagggtggggcaggggggggtaggccccaggcaggtcctcccagggcctggggaacacaggggcccatcgagggctccccagagcgtggctcccgtcccaggaggca

SEQ ID NO: 4859 - DNA, 288 bp, Homo sapiens
  source 1..288: mol_type = other DNA
caaacccagggggcctggaaatgatcgccagatacatctaagctcaagactcagtaaatttacttgatctaaataaaacttgtttaatcctaaacgggtcctggtctcgtcatgcttcaaggcccaagaaagccctgggcaaaactcttgatgggcttaacagttgtcgcggaggcctgcgtgagtgaggcctccccttggcacatgtgggcccgagtgagtcggtggccgctgcgttggcagcccgacgcagtggccgctgcggtggcagccctgtccccaggcgtg

SEQ ID NO: 4860 - DNA, 462 bp, Homo sapiens
  source 1..462: mol_type = other DNA
cagctgggtcccgcctgacccgtgggggcaggcgttctgccctggccaggcgtggtgtccggcatccccgcatccaggtgccccgtgtgcccggcctgggcggctggccgtggatctgaccgctcctgcatggtggaggaccagcgtccgtctgcctttgtgcgatcagactgagagaccccccaggcaggtcccgcctgatgccccctcacccgggccctgccctggtgggtgttgcctgggagcaaactcccagaatggccgccgggccccactcggctttctcaggtcagggccctgcaggtgggaagcaccaggcactggacactgtggggccagctgcctgcaggcaggggtctgatcaccaagcacctgtcccctgaggaagtgggagccgatccctgggagccgatcctgggagccgatcccctgtccccagagagccccgtggctcccacaggt

SEQ ID NO: 4861 - DNA, 633 bp, Homo sapiens
  source 1..633: mol_type = other DNA
agctgatgagcctgacgcatctcatcactaataatgctcagcagggccgccagccaggcccaggcactggaccccctgaaccaccccaccctggcacgagtgggctggagggcaggctggaaggggaggtcagcctcacagccagcccctgccaccgccccagcccccccgtcaggctgttgcaggcatcacacggtggaaagatctggaactgtggccatggtgtgaggccatccacaaggtcacctgtgccccagcgaagggggatgggccgggaaggcagaggccaggcacctgcccccagcaggggcagaggctgtgggcagccgggaggctcccagaggctccgacagaatgggagtggggttgagcccacccctcactgcagggcccagagggggccacccaccttccccaggcagggaggcccggcccccagggagatgggggggatgggggaggagaagggcctgcccccacccggcagcctcaggaggggcagctcgggcggggagacccccacggggtagggcgtgggggccacgggcccacctcctccccatcttctcgcccacgtggatgtggaggaagagggggcgggagcaaggggcgggcaccctcccttcaacctga

SEQ ID NO: 4862 - DNA, 366 bp, Homo sapiens
  source 1..366: mol_type = other DNA
taaagctcagaagctgcacagcgcctcaacgttgtctgtgcaggcacggccaggctggtggcacctctgccaggagggcaggcagccagctctggaggctggcagactttagaataatttgtgaagctatttatgttttaggcattttatgtaaatattttatatttctcactagtaaaaagtttaagagagccaccgctcctgaaaacacccgggcctctacacgcacgggtctggggaggcccctgcgtgtccacgggcccacgcccaccaccaccaccacggtgctgccacagggatgctctctgggtcggagacaaatctggttgccatggagaccagggatgcggggacgtttccttgggc

SEQ ID NO: 4863 - DNA, 584 bp, Homo sapiens
  source 1..584: mol_type = other DNA
acttgcattcacaatttgccaaggcagttggtaagagcgatgattaaaatttaaaagtccattcattcattttcaaaatattttattcgattgcttctgaggcagaatcatgagtctgctcccggtggtggcatccaactctgaggatagctcatccaactctgagggtagctctgaggggagctaaatatcctcattgttcaatgagctagatgattagtggagtaaaaattagaagtcaataattctcttaccaaaacaggattttcaaaagtggtatcctgtaaaaattttggaaaataccaccataatggtataaatcaaatgtagtgctaaaaattataatttttccatatgaattttggaatcctaaaatatttttatgtgtttgtggattcgcactgaatatgagtacagaaggctttcctctccaatagtgaattaataaaggataagtaggaaaacgatgtggtaacattatagactctgtattagggcaaaaattgtgagatagtagaagatctgtaaatttaagcatgcacaatttgacagcggatggtcgtagcatattttgtaaattcaat

SEQ ID NO: 4864 - DNA, 586 bp, Homo sapiens
  source 1..586: mol_type = other DNA
tctgaggcagaatcatgagtctgctcccggtggtggcatccaactctgaggatagctcatccaactctgagggtagctctgaggggagctaaatatcctcattgttcaatgagctagatgattagtggagtaaaaattagaagtcaataattctcttaccaaaacaggattttcaaaagtggtatcctgtaaaaattttggaaaataccaccataatggtataaatcaaatgtagtgctaaaaattataatttttccatatgaattttggaatcctaaaatatttttatgtgtttgtggattcgcactgaatatgagtacagaaggctttcctctccaatagtgaattaataaaggataagtaggaaaacgatgtggtaacattatagactctgtattagggcaaaaattgtgagatagtagaagatctgtaaatttaagcatgcacaatttgacagcggatggtcgtagcatattttgtaaattcaattaaacgtacctcttttgaaaagcacgaccaaagtttttggcttggtctcttgctttccaccgagataaagttaactctccctgtcccgcgggagcgt

SEQ ID NO: 4865 - DNA, 392 bp, Homo sapiens
  source 1..392: mol_type = other DNA
ctacactgaaattaagtgatttgactagattcatacatttagaacaggactaaagtactgtgtcagaaaaagctttaaaaatgagactttcatcctttttttggttataattgtgcagtgtaaagaaaaacagatttttattttctttctaagaagagaaatatttcatttggcccaaagaatgtttaagacaaatttcagccaacatttaaatactggagatttcatgtaaaattcatatttagaatgccacaggttagaacccagtggtttgtcccccaaagaggtaattaagggaccttaaagacgggcccagcccacaagggctgctgaagcacatctggagctgttactgccccttgtcctgaagggtgtcaaatcacaagacagtg

SEQ ID NO: 4866 - DNA, 463 bp, Homo sapiens
  source 1..463: mol_type = other DNA
attgggagaaacaatagggtagcccattttgagtctttctaaagcctcttatattagaccctgtgaatcagatgaaagtaaactgaggccaagaaatatcttttgacttatttctccacttactttaagatgctaagagtataatttctttgtatgccaacatgaaaataagtccaaactatcattcttttctcatgttatataaaaagtttagacaaaaacaattcttcttcttggaattacaaacctgtctttaagaagcctcatacacacatttaaaaaatacaacttataaaggttttagtgatagtgcatacaatcatttgattttaactggcatgcttcaaaaagcttacatttgaatactgtcttaatctttgcttgcaaatgacaagtgaaaccagaggaagaaaaaaattacttcctttcctgttggaaacctaataagtagttagtctgaccc

SEQ ID NO: 4867 - DNA, 383 bp, Homo sapiens
  source 1..383: mol_type = other DNA
caggagtgaagctgcataatcttgaagcaatcttaatgtccattgatggatgaatgaataaagaaaatgttacacatacaattgaatattattcagtcatgaaggtgacctgagccggctgcctggctggctcgagaaaagttctctaagtcccggacccagaagcccagccggcttcgcttctcaatggcagtcgcagcggggcgggcagcccagcaggcgcctgccggctgcggggcccgccaagcccgcgctcacccggaacccacgccggcccgctagcgccgggcgcgcagcctcggcgggcgggcgcctcgccttccacacctccccgccagcagagggagctggctccggcctcggccagccccagagaggggccc

SEQ ID NO: 4868 - DNA, 393 bp, Homo sapiens
  source 1..393: mol_type = other DNA
tgccaacatgaaaataagtccaaactatcattcttttctcatgttatataaaaagtttagacaaaaacaattcttcttcttggaattacaaacctgtctttaagaagcctcatacacacatttaaaaaatacaacttataaaggttttagtgatagtgcatacaatcatttgattttaactggcatgcttcaaaaagcttacatttgaatactgtcttaatctttgcttgcaaatgacaagtgaaaccagaggaagaaaaaaattacttcctttcctgttggaaacctaataagtagttagtctgacccaatttaatctttcatggccctggctttcaatgtagaaagaattttccttttgaatattccaaacgaccagctgggaaaaagagt

SEQ ID NO: 4869 - DNA, 321 bp, Homo sapiens
  source 1..321: mol_type = other DNA
aacttgtgccactgcactccagcctggcatctcaaataaataaataaataaataatttgatatgatagaaactctgaggcagaaaactacttgactttcttgatatgcagcagaaggtttgaaacttgggaaggtgacagactgcagtactttgtaagccaggcacagttttattctcttctagtttatagatatggaaattgagtcccaaagagattaaagtaattgatttaagtttatacagtaaaaaagttagaggttctgaaacttcagtgtgcatcacaatcacttggaagtcttattacaacacagaattctggg

SEQ ID NO: 4870 - DNA, 289 bp, Homo sapiens
  source 1..289: mol_type = other DNA
taaggagacagggaatcctgcatcactctcgcttagtaaagccagctttgctagctagccaggtcttgggtgcacccacagaccaacactgccattgttacaatttgtgtggcagagaaagtggggagagggtactcctcaggccttacttcctatcaaatcatgtgtcagtgttgcctaggagacggaaaacttgtttaccttgtcaccatgagtaaaagttaattcccactcctgaagagagcaatatcagataatggctatctggatgcacagttgctctgtacat

SEQ ID NO: 4871 - DNA, 395 bp, Homo sapiens
  source 1..395: mol_type = other DNA
gccagatagttgatactatatctaaactttgaaaatcacatttttcaggtctgacaacaattttcaacctgataacaattgctccggtttcattttggcaactgctaaaatggtcaccttgggaaccccaggcacacacgctgactgtagagccttttggaaattgcctccaggaagcctgtctgtctgagactctcccagtcagctcctaaggagacagggaatcctgcatcactctcgcttagtaaagccagctttgctagctagccaggtcttgggtgcacccacagaccaacactgccattgttacaatttgtgtggcagagaaagtggggagagggtactcctcaggccttacttcctatcaaatcatgtgtcagtgttgcctaggagac

SEQ ID NO: 4872 - DNA, 476 bp, Homo sapiens
  source 1..476: mol_type = other DNA
ccggcacttggccgaggcctggggaacacgaggtcaggagttcgagaccagttggccaacattgcagcgagcccagatcgcgccaccgcaccgctctagaaagaattaatgaactggatcaatcaactgtggacttaaccctatgcagagataacatttaccgaacagtcgcaaaggaagacagctgccagttgtctcagatcgcacgggcatgccgcgcagatgggcttctgagcagctcagggccagccagaggtctggcgagaattaaacgaacccgcgccggtttcctcagggccccccggggctccgcttcgccccagcgggcctcggcggggctgggaaaccggctgaggttcgcctcacggtggggaggagcgacgggaggcggaagcccttcggtccgggccccgcccccgcactgcccgccgcgacttcccattcgccgccaacccatgtgcgttggtgacgtcacc

SEQ ID NO: 4873 - DNA, 516 bp, Homo sapiens
  source 1..516: mol_type = other DNA
aaattttctgaaatcattttttcaaatctcagacagttttccttcctcgctgaaaaagtgatacaagtcataatgagtaggctagtttatattcagacaattttatttacccatttcaagtatgtttctgattaatacttgttaattttggaatgtaatgtacatatatggaaactactgaagttattgaagttgtatgtacatacattgaaactactgaaatatatgcttcttattttaagaattgaaactaatgctgtgcccccttcgtttaaaaacaaggtggagactaaaggctctcagcctcagtttctccatatgcaaaatatcaggattaaataagagcgtgtacgccgggcactcagccgtggatggcaggggacggcgttctgtccccgggacggagcgcgcgccgccgtctgctcccctggggccgccagggggcgctgtggccccggtgcgcggcagccgcgcgacacgggccctccctcggagtcttcggcaccgccctgtccc

SEQ ID NO: 4874 - DNA, 593 bp, Homo sapiens
  source 1..593: mol_type = other DNA
tgaagaatccaaaggatgattctcgaataatgtatccttccaaattctccagaagttctaagtttagacatcataatgaaatgtcacaagccccaaggcttttctgaagccctgcttccggctggcgactttgaagctgagacgcaggtcaaatcagaaagctgtaatttcaaagtttcagaaacgttttcggaaagcctcctccaatgggaagcgacttcgccgctgagtctccttcccgcggcagggacaccggcccgggccaggtctgcggaggacgcccccgggcgcgcacacacagcccgaggacgcgccctgtattttaagacgcagggtcggatttcaccaggccgaactgtgtctggttctcagcccccgagcccgagttctacgccggggccccagcccagccgcagcctgccgtaagcggcgaccgcggcccggccacccgagccccgccgcgctgcgcctttgttgggcggtccacagatggtgcccagcacggggccgcgccgagggcgggggcgggaggcggagacggcggagcagccaatccgcgcgcggcccatcagctgaccgcctttgcttacacc

SEQ ID NO: 4875 - DNA, 263 bp, Homo sapiens
  source 1..263: mol_type = other DNA
atgagaacagattgtaaatgtttcttatcagcaggccccgcaaccactttctcaggttaaccttggcagaaatgctccaccggattcagcagctccatcagggagtgagcatgcccccacacaaattccttaaggtgtgcgtttaactaaagcacctcactttgtttcgtccgtgaagcgccttccaggccactcctgccatgaggcggtggggccacgggaccacaagtcccagcatccaccgcgcggcccaggactgtcag

SEQ ID NO: 4876 - DNA, 231 bp, Homo sapiens
  source 1..231: mol_type = other DNA
gtgcggtggcgccatctcggctcccgagtagctgggactctcgatctcgatctagaacagtttcttaaacttaagctctgtcgccgaggctggagtgcagtggcgggatctgggctcactgaaacctcgctgggacagattttaaaaagtgaagtgcttagcatagtactctggcacttaccaaatgcccagcaaatttgactgcaactctcctggtcacttcgcgtgacc

SEQ ID NO: 4877 - DNA, 449 bp, Homo sapiens
  source 1..449: mol_type = other DNA
ggtagcccgggagcccaggcattacttggcagcgagctcttggagagcgccccgcctggatgcgcatctctgtgtgagcacagctcccaggagcactcagagccggcaagtcttacctcctcacgggcgataaaagacaaagtgctctcacgcgacttgcctgttcccaggcttggtttctcgtgcaaacccgagcagggcgcgtttttgtgccccggatttctgaaattcttggctcggggaatccccggccccagtgacacctggattccagggaaggggggcagccggagaggcgtccccaagggttgcgggcgcttcccaggggtgactttgaacggctggctccaatttagggcccagcccgggcgcccaggggattctgggacttgtagtccctccccgcagcctcaggcgccgcccagggagcttcccggcctatataagcc

SEQ ID NO: 4878 - DNA, 568 bp, Homo sapiens
  source 1..568: mol_type = other DNA
agcgctgctcacaccgcgggctgttttccctgctcccggctgagtgagaaggtcacagagcccggacctttccgggggaggtgggtggggccctccggcagcctaactggggccgctggaggaggtccttccgccccgggcttgggaaaacacaaagcaacacaagttctcattgtttttctgggtgcagaccgcgaacagcgccgaggcagggagagggccgatccgggctggcacgccacgtccccggggtctcagtccctgggtcaacgcagagaggctcgcggtccgcggtgctacgacctgagcccggccacgtgaagcgtcacgccctgcgctgctgcagggcaggcgccgccgccgcggttgtgtaacgctgcagccggaggggaggcgaccggggcgcctctgctccggagggggcagaggagggagggagcgccgggcacagcgcccggtgggggtgacactggggcacccagggggctgcgcaaccgggtgcccgcccgcccgcaggttgtgcccaggagcggagctcctgggagcgaggggccctcggctcacaccc

SEQ ID NO: 4879 - DNA, 593 bp, Homo sapiens
  source 1..593: mol_type = other DNA
gggggtgacactggggcacccagggggctgcgcaaccgggtgcccgcccgcccgcaggttgtgcccaggagcggagctcctgggagcgaggggccctcggctcacaccctccacggtcaggtgcgcgcggcgtgctcggcggcagcctcagctgcccctgcgcttggccgtcggcccgcttcccatggggtgccctccccaaggcgggcaattcctggacgcgagggtccagcctctggggaaggctggggggccgggcgactccctccgcagcgcgccggttcctccaagcgggccgggcgggggaggaggagctagcaaggggatattcctctcccggcttgagtcagacgcgggcggatccgtcctcccccgttccctcccaggagacgggaacttacttcatttccctggggcagccaactgggcaggacccaggtcgtgctgccaccccctcttcggggaaaggcggccgcagccgcagacacctgggggccggggctgggggtgggggctccctagcagccgccggaagccgggggagggcgggcaggtcgctccttccctccccggcagtggccagacgtgcctgg

SEQ ID NO: 4880 - DNA, 444 bp, Homo sapiens
  source 1..444: mol_type = other DNA
tataatacttttaagtggcatgatctcagctcactcggcttcccaagcagctgaggctacaggtgcctgattataatacatttaaatgttaagtaatatgcaacatacagatttgttcactatgtgtgtaagaccaccttcatacatattaataataagttaaatatgtttacttggccaactaatgctctcctttctaaatttataaacggtgtcatttttaagttaacactatcttttgctactaccaaaaatgtaggacaggaattttagagtcttgaagtcttcctgcagattgttaatgaacaattatagcaaaaaatgaatgaatatacgctgtgctgcggagcatgcccaccaggtggcgatgccagcggcgggcgggcctggccggattggccgcgccgctcttgccgtgggtgccgacggcggcgccgggacggg

SEQ ID NO: 4881 - DNA, 468 bp, Homo sapiens
  source 1..468: mol_type = other DNA
tttatgtgaaagccatagccctttagagctaacatttgcaatctggtggtggtgggagccttcattcccacccccaaagacaaaagcaatataacataactttgtatttcctgaaacttccagtttctaagaactaagttgggtgtttgaatcaaaagagcagaattcatgataccgttttgtgcactccttgagctaaaaggtagtcgatatgcaaaaatagctcgttttatacagaaacgatcctttcccagagacccgatccacccaaggccaggcggtctggggtcacgtctgtgtccagcgtccggcgggcgctgccgtgccgctcctggaagttccctcgcgggccggcgcggctcctgctcgccacgccagcccatcgggctacggaccgcccaggggggcggggcttgggggcggggcccgggtgaggggcggggcctcggggcgtcgcggacgtcctgg

SEQ ID NO: 4882 - DNA, 549 bp, Homo sapiens
  source 1..549: mol_type = other DNA
ggtggtggtgggagccttcattcccacccccaaagacaaaagcaatataacataactttgtatttcctgaaacttccagtttctaagaactaagttgggtgtttgaatcaaaagagcagaattcatgataccgttttgtgcactccttgagctaaaaggtagtcgatatgcaaaaatagctcgttttatacagaaacgatcctttcccagagacccgatccacccaaggccaggcggtctggggtcacgtctgtgtccagcgtccggcgggcgctgccgtgccgctcctggaagttccctcgcgggccggcgcggctcctgctcgccacgccagcccatcgggctacggaccgcccaggggggcggggcttgggggcggggcccgggtgaggggcggggcctcggggcgtcgcggacgtcctggcggcctactgcgtgggagggagtcctgggccgcgccccgcgaggccgggcccaggccgggccaatcccgggccactgggcgggcgaccgtggggcctggccggcccgccggagagcctgggggtt

SEQ ID NO: 4883 - DNA, 271 bp, Homo sapiens
  source 1..271: mol_type = other DNA
tggggaagttctcctggatgatatcctgcagagtgttttctaaatttttttcaaagttttcaatggtgaggaactgcgttcctttggaggaggagaggcactctagttttccttctaacagacaggaccctcagctgcaggtctgttgttggcaggtgcctcccagttaggctgcagtctgcccgttctcagtgtgctcaggacatttaagtctgcagaggttacgctcccagaggtggagcctacagaggcaggcaggcctccttgaact

SEQ ID NO: 4884 - DNA, 437 bp, Homo sapiens
  source 1..437: mol_type = other DNA
tcccaatcaatggaaaaactgccaccaggtgcaccagatgcatctctgctgtcagtgctagaaagtgcgctctgcggagttctcagttgttccctctctgcaacgtaaaaagaaggggtttccctgcagccaagctcagctcctggccctggaaacccctttgggtaatctttaagtgcacgtgtggctttcttagcaaaaaactagcacaggctagagtctagctagggtcttcccagagctaagagcctaggctccggacctagggtttgggagcagcacgacgtcctcgccccatcccgcggctgatgacacccgtgcccagaacgtgggtgtgggtagtgagttagggtcgagagctaggctctcgcttgctccccgcaatccctagattccctggggaccacggcagcccctccctgcgtgatgatgcaaac

SEQ ID NO: 4885 - DNA, 578 bp, Homo sapiens
  source 1..578: mol_type = other DNA
cattccatggatttgtgaactcagatggaatcttgtttgtccaggcctatttatctaaaaattactaacttcctagtttatagttattctgattatttcctcatctatcgtcttacagtcataataataataatatctgagataatatgagcatgatttcttgctcatggaataagaaggatttatgttaaagcaagttataagaaagcagtttaatactttacgaacgttaagtttaaaaaaatcataaaactcgcccaggtttgggaaacgttagccagctccccccgcgccccctacgaccaggcagaaagggtgggaaggggagatggatcgcgggagccgcgccgcccgccccaccttcggcccgttgccctttaaaggaaaagggcgtggggacgggccgcggccatgctgacgtcagggcagccggcgctcagctccgctcgctgccacagtgcagagacctccctgagggagggggacagcctcgcgctgggattggctggcctcgcgcgagcgccggcgcggagtggctggcgaggttttagagggagtcccgctctccaattaaagcg

SEQ ID NO: 4886 - DNA, 217 bp, Homo sapiens
  source 1..217: mol_type = other DNA
tgtggagctggctctggaagccaggtaagcccagtctcctccccactcccagggagatggcctgagggcagaggagagaacagttgtttctggtcttcctagagtacataaaaggcaggaaaagctttccacctcccttcttgggagggggagctattagtgacacaaagtgatcacagagcacctgagaccctgggactgggggatcgggctctgt

SEQ ID NO: 4887 - DNA, 348 bp, Homo sapiens
  source 1..348: mol_type = other DNA
caggccacatttagcctggccagtcagctggtttaggaaaagaccttttacaaatccaagcgacagtagtggcccacatggctgggttgggagccagctctgcccatgagtccccagggagatgaggctggtgatgctcaagatctcagaggccctgcccaggctgagtatctgtatataatatcccccttggggaggtaggagtctgcctcctacagctgggcgatgtagctcagttgtcaggcactctgactagagagtcagactgatgagggtttgaatctatcatcctgctcagaaaaatgataccagtgcccctctcaaaggggtctgcagagcagtggtcca

SEQ ID NO: 4888 - DNA, 422 bp, Homo sapiens
  source 1..422: mol_type = other DNA
tgacccctgaggattcagagttgccatccttcatgctgctggagccggtatctaagagaggtgcaccccactgatgcataagggtagcacgaacatggacttcatgttccccccaccgggccagtgcaggctccagacggcagacgaggggcagccccacactgccaggtcaccaagcagcagggccaggcactggcaatccacgagaagcctcatctctccatttcagaggagggactaaccccacttccctccacgggcagtcagcagtggggcaaattccaggggccccggagcgaccgccgagttggcgccctcaggcccagtgccctgaggcagccccctttaaggacttggaggcctgccacagctgtcagccggcatgctgggtggggcctatttagctggcagggacataagtc

SEQ ID NO: 4889 - DNA, 363 bp, Homo sapiens
  source 1..363: mol_type = other DNA
aaccgaggctccagtgagagacctcgccggcaggccatcccaactcgggccgggagcgcacgcgtcactggggccgtcagtcgccgtgcaacttccccggggggagtcaactccatcgggctcgcactccttgttcctggaggagctcggggtgttccgagagactcagagtccttgattatctgggtccacttcgaggctgccgggctggggagccccgccccagcagggactgcagaaccgggtttccaccgaagcaggtgctgtttcccaggcaagtggctatttggggatttccggaggaagtactgaggaggtacctccaacggggatttctggggtggcggctgagcaacccgaggc

SEQ ID NO: 4890 - DNA, 332 bp, Homo sapiens
  source 1..332: mol_type = other DNA
tgcccaaggtcacttcgataggtactattgactaatattgattaatactgcctgccaatgtagaaccctgggatccaggtgcttttaatgcattttaaagagccctgtttatattaattcttggccactgtaaattacttcaaaaaatgattttagacatttagaattttaattccgaagctttaaatgaagacagtgttgtgcttcagaatttcatttctaattcctggaataggaatttttacatctgaaaattaacatcatttttgggaaataatcagtttaaatgcttttgtaacttcatcactatctacccggggaagaacactcgg

SEQ ID NO: 4891 - DNA, 346 bp, Homo sapiens
  source 1..346: mol_type = other DNA
tgatacttgttaaagcacaataaggaaatgatcaatcagatatcaagagtgatcacatatcaaaggtgggttttttgctaaaactggatttttacagcctgactaaagtttgctcaagcaaagaatcttcgtcaatctctccgaagaaaaagaaaaaccgtgcattaaaattttaatatgaataaaagcaacagctcccatttaaacccagaggtcctgtttggaatctgactcgaaggtcatgagcctggaccttgacaggtaagtgcggcagaagcctggcgcatgcgcagtacaagcccttaagcggcgccccgccccggcaggctccgcgcccgcctctggc

SEQ ID NO: 4892 - DNA, 267 bp, Homo sapiens
  source 1..267: mol_type = other DNA
gctaggcttcccagtctgtcaagactggagtgcagtggcacgtgcgttggccagccctttatgccccactatttctattttttttaaactaaagaaaaatatgaagtaaatttaaataaagagactcggtgtctccagctttaacatgtgaagcgcttacccagtgctcggcaaggggaagcagcttactgaagatcctcaaactcctttccccaagaccttgtgggggaacccgccgccagcgcggagccaccgtgactcgtagct

SEQ ID NO: 4893 - DNA, 530 bp, Homo sapiens
  source 1..530: mol_type = other DNA
agagtaaaggggccgaaactatatgggcaggttgcctagaccttctgtttttttataggtaccaaacttttttttcagctaagagcagctttaggaattcagagtttgtccaaaggcccaatccctaaaattatactctcaattcttgaagaatgtaaatgccaaatgacaatgaaggtaggccttcattatacaactttatatatattattcacagttttaaaatttttagtcttttcttgcttacagaaaggaagtggaagccccctacctttcaagacgaagtggcactacaaaggggcctagggggcagcacacccctattccaggcagtaccagggattatgaatatggttgaatgacatccctgattaataagtggttttcttccttaaaacagaatattattaaagagcatgtatatttcttcataaagccacctaatataacttacctgtttactgagttccttaaagaggaagacttaaagctaccctgagaaatagtatataatattctggggtagtatt

SEQ ID NO: 4894 - DNA, 442 bp, Homo sapiens
  source 1..442: mol_type = other DNA
cctgtgaagtgtgacttaagctgcccactttacagagacagttttagactcagtttgtctgggttcaaacccaccacgccggctcccccttggggtgcgcctggggtgttgccaggcgctgagctgggggcaggggaagtgccctggcagccaacgaatccccatcgcaggcgtgggctgctaccagggggtgttggcagtttcctaggagactctgggaaccttcaacgcctccaggctttgtggggcctcacagccccttagctcaggctggaagaagggagtcccctacatcgggggccctactgtggaggtgtgcttgctgccccggctgggggaccccaggtatcgtggccaccctttccgccccgccccgtcccgcacgcccgctcgggagcgcgcctccgccgggccgcgccggtgcacgagagcgcgcgcctcg

SEQ ID NO: 4895 - DNA, 264 bp, Homo sapiens
  source 1..264: mol_type = other DNA
tagagacggagtctcattctgtcacccaggctggcgagtagctgggattacaggcacctgccacttaatattggtaaccactgccattatggacagctgggatgacaggtggcccaatggttgagcccggcttccccgggggaaaccccttggggcggatcacgcggtatcagccagtggcctccctggtggatagaaggatcgctctgcgccgggggcgggccagtaatcgtaggcggggcgcgggtccagagctccgattgg

SEQ ID NO: 4896 - DNA, 222 bp, Homo sapiens
  source 1..222: mol_type = other DNA
agccccgccccgtgactctggccccgcctcaccgccttcctccgagaccaaggccaggtccctcccgcagccgcggcgccagcaggaggcagggagagggggaggggagaagggcgggctcctcacgcccagccccgcgctcaccgtccggtgacttcagtctccagaaactccactctcccggagggatccgtggcgaaagtgcagctcagtagcgccgcg

SEQ ID NO: 4897 - DNA, 217 bp, Homo sapiens
  source 1..217: mol_type = other DNA
acagtgacaaaatgaggataaagcaggcataaacattcaggctcttaattgtctgcagaggatattcaatgtcagtaagagagagtctggaccaagctggttcctctgggtgtgaaccagggagaagaggggctctgcagcaccgcagcagggtgggggaggtccctcctgccctaagtgcagctggactgtacagaacactccaagggccaatggc

SEQ ID NO: 4898 - DNA, 410 bp, Homo sapiens
  source 1..410: mol_type = other DNA
gcacctgtagtcccagctactcgggaggctgaggcagtgatcgcgccatcacactccagcctaggcgacagagtgagactccgtctttttcatgccatcctccagaagggaagaaattaaagcgactagaaggcaggctgcctcagggctgggacttggactcaacctgatgggcttctgggcccagccccaggcagcagctgtggcggccggcgggaggagaggcctctgatgtcctgaggtctcagaggacgcctaaaggccctctggagacacttcccgagggctctggggccggagctgtgccctgaggaaccgcggggcgcccagatggaactcgttagcgcccgcgagcagctggcagagagcccagtgccggccaaccgcgcgagcgcctcagaacggcccgc

SEQ ID NO: 4899 - DNA, 376 bp, Homo sapiens
  source 1..376: mol_type = other DNA
gaggtggagtggggtcccaagcaacgtgcctcctccggtttcttcccaaggaaggccttgagcaaaccgacctttgccgctctgaggagcaagtgtctggggctgaagcctcagctccatcttgcagaggaaccggggcctcagttccagggcctgtttcccttcagggcacggagaattggccggcctgcttcagacagacggggttcgaatcctgcgaccacccgctgatttgaaaggcgggaagcgtccagcaggagatctctgaccagaagcagggagatggcctccacccgtgccccttccccagccttggagcggtgcctcgaggctccacctccactgacatcagagccgcaggcgggcggagagagcc

SEQ ID NO: 4900 - DNA, 336 bp, Homo sapiens
  source 1..336: mol_type = other DNA
acttggactcaacctgatgggcttctgggcccagccccaggcagcagctgtggcggccggcgggaggagaggcctctgatgtcctgaggtctcagaggacgcctaaaggccctctggagacacttcccgagggctctggggccggagctgtgccctgaggaaccgcggggcgcccagatggaactcgttagcgcccgcgagcagctggcagagagcccagtgccggccaaccgcgcgagcgcctcagaacggcccgccggtggtgctgtggtctgcccctggagaacccagaagaacacagctgtgcgcgcccacaggctctgggtttgatgaccc

SEQ ID NO: 4901 - DNA, 453 bp, Homo sapiens
  source 1..453: mol_type = other DNA
tccgggttcctagcccctgcggcagacccactgccctgaggccgaacagccgggggtccctggccgggggcccggctctctcaccatcgcgggcgctggctgggccggaaagcggaagtacggaagtggccagccccgcgatgcctgccctttcgcgagaagcgcagctacggtctccgcccggacttccggacggtaccatctatgctccgagcggggatcagattgggcaccaaattaggacaagccgaagcggacgagcccttcgtttcttccggctacccgcagctcctggcgctcggcggggctaactgcagcgcggagatctcggccgccaagctccgcctcccgccccgggctgtgccccggggctcgcctgaggccgaccacccgcaccccacctccgcgtcaactgcaaggggcccgcccatagccagttccggggcggttgct

SEQ ID NO: 4902 - DNA, 428 bp, Homo sapiens
  source 1..428: mol_type = other DNA
gacagcctcaaggaagcccagcttcagtcacagggcacttaactgggtaccaagctaggtgcagacagagaaagaaactgagactctgtaagggtccaagatgcaatttggctggtaagccagacagacctgggttcaagcccaggctgaacatgttatttgacctttttcagtctcagtttttccatctgtaaaatggggacaaaagaagtctcggtctgtttccccattaaaagtctgaatctgaaaaattccctgggatgttctgagtgtctggcacagaagtgggactgtttaatggctggccccgcccgggggtcgccctcgctgcggcctcctacggccccaggggccgcgggagggggcggggagttccggtcgatgtgagcaaccgccccggaactggctatgggcgggccccttgcagt

SEQ ID NO: 4903 - DNA, 357 bp, Homo sapiens
  source 1..357: mol_type = other DNA
cacagttcagttctgaccaggaagggcctgaatggaagccgcctgccttaagcaacgcctcagaggctaagaggccgacttccgggttcctagcccctgcggcagacccactgccctgaggccgaacagccgggggtccctggccgggggcccggctctctcaccatcgcgggcgctggctgggccggaaagcggaagtacggaagtggccagccccgcgatgcctgccctttcgcgagaagcgcagctacggtctccgcccggacttccggacggtaccatctatgctccgagcggggatcagattgggcaccaaattaggacaagccgaagcggacgagcccttcgtttcttccg

SEQ ID NO: 4904 - DNA, 524 bp, Homo sapiens
  source 1..524: mol_type = other DNA
tcagtctcagtttttccatctgtaaaatggggacaaaagaagtctcggtctgtttccccattaaaagtctgaatctgaaaaattccctgggatgttctgagtgtctggcacagaagtgggactgtttaatggctggccccgcccgggggtcgccctcgctgcggcctcctacggccccaggggccgcgggagggggcggggagttccggtcgatgtgagcaaccgccccggaactggctatgggcgggccccttgcagttgacgcggaggtggggtgcgggtggtcggcctcaggcgagccccggggcacagcccggggcgggaggcggagcttggcggccgagatctccgcgctgcagttagccccgccgagcgccaggagctgcgggtagccggaagaaacgaagggctcgtccgcttcggcttgtcctaatttggtgcccaatctgatccccgctcggagcatagatggtaccgtccggaagtccgggcggagaccgtagctgcgcttctcgcgaaagggc

SEQ ID NO: 4905 - DNA, 361 bp, Homo sapiens
  source 1..361: mol_type = other DNA
gtgagccgagatcgtgccaccgcgctccagcctgagagcgagatcaaaaaaaaaaaaaaaaaaagaatgtccttattctcctttttctccttctgcaaatatagattacttgtaaatctaaatatttcacatgtcatctttatatcatagttattttctgtatatttgctattggcctaatagattgtagcactattgatatttgagtctcgataattctttgtaagtcatgacaattgatgtctcagcattcctctggtctgaccccaggttaaaaaagaaagaaatgtaccctggcaggcaaaattgtacaccttggacgtctcgaaggcctagtctgttctgttcacagtagtgtctt

SEQ ID NO: 4906 - DNA, 377 bp, Homo sapiens
  source 1..377: mol_type = other DNA
tatccaaaatgcttgggaccaaaagtatttcagattgtggaatatttgcagatacttaaccagttgagcataatccaaaatgctccaatgaggatctcctttgagcatttatatttttagtacaaatgggatatcaccatgtggccaggctggtctcgaacctgacctcaggtccagtttcagattttggatttcagatttgcagattggggatgttcaacttgtagttactaaaatagctatcttttgtaaagctaattaggaatcagagtcattttacagatgagaagagcctgtgctctttctgctgaagaacacactcactggtatggtctcatagtgattccagtatgttttcaggagtagagctcctgtta

SEQ ID NO: 4907 - DNA, 299 bp, Homo sapiens
  source 1..299: mol_type = other DNA
gcaatctgggctcacttcccgagtagctgggactacaggtgcgcccacctcggcctcccaaagtgttgggattcagtcttaaagccacagttaacattgggtcagttgtaaattttctctcctggtcctagatctaacctctggggccaattattctgtaacaagacttcaagttcctgactcattctgatgtgccacagatagttttccagagatgtctgatacacgttcagttgcttggatccaacctagacaccctcccccagagcagctgggctgctgaatgaccagctcagttc

SEQ ID NO: 4908 - DNA, 398 bp, Homo sapiens
  source 1..398: mol_type = other DNA
tgtgcaggggctggctcccacaccattgaacccccaaatttggatttgtatatggcatttggcaactaattcatattgttttaaacaccatgtgggccatgtcctaggcagcatgggacacaaaagtaccagaacctgggtccttttccacttggccctctgagtccccaggccccttgcatgagagcccccatgaggcaggacgctggcagggctttctagcagcctccatgccagggcacaagggagccataggtcacttctgatgaagagcagtgccaccaggatgcaccacgaaggcgtcctggagtcactccccgagcagcgcggcggcggcagggagtgcttgctagctgggcaagaaagcagcagtggacccggccacacgtgcctggtca

SEQ ID NO: 4909 - DNA, 367 bp, Homo sapiens
  source 1..367: mol_type = other DNA
atgaagagcagtgccaccaggatgcaccacgaaggcgtcctggagtcactccccgagcagcgcggcggcggcagggagtgcttgctagctgggcaagaaagcagcagtggacccggccacacgtgcctggtcactggctccagtggctgtgactggtcccatggagccagatctcctatgccaccccaggtggggagggagggaggtttcagactcccccagcactggttggggacaagggccaaattggtgaccaccagtcatgcctaggacctggggcccaaaagccgggcaacctctggctacaggggccattgggtgccctcccaggtcagtgccagtgcctgtgccagagagctctggccgg

SEQ ID NO: 4910 - DNA, 330 bp, Homo sapiens
  source 1..330: mol_type = other DNA
cctctgagtccccaggccccttgcatgagagcccccatgaggcaggacgctggcagggctttctagcagcctccatgccagggcacaagggagccataggtcacttctgatgaagagcagtgccaccaggatgcaccacgaaggcgtcctggagtcactccccgagcagcgcggcggcggcagggagtgcttgctagctgggcaagaaagcagcagtggacccggccacacgtgcctggtcactggctccagtggctgtgactggtcccatggagccagatctcctatgccaccccaggtggggagggagggaggtttcagactccccca

SEQ ID NO: 4911 - DNA, 338 bp, Homo sapiens
  source 1..338: mol_type = other DNA
ggtgttatgcatatatagttccattggatagtactagaccttagtaagaaaaagacaaaagacccttgtgtttgatcagtttcttagtctatgaatggagatatatattttttccaccagcccagtggctgggctgttgaacttgccttgaggcttggaggtcctttcatatttaatattagggtcctagggggtaagggcaacttggaacagctattgcccccctccacccaggctggagtgcagtggcgcaagcatggctcactgcagcctcagcttccccaggctcaagtgattctcccacctcagcttcctgagtagctgggaccacaggcctg

SEQ ID NO: 4912 - DNA, 293 bp, Homo sapiens
  source 1..293: mol_type = other DNA
ccagtgctgcctctggatttgaggcaaattgtttaacagcctgcataactgttggctaaggacctaccctaggcccatctgccaggcccagcaggtctgatctggcctcaccaggctccagccaccctggcgggactgtcccttccctgaagttaaatgcgccactttatctaaactagggccggtggcaccagctcatcaagggtctgggtgaggccccaggtcatatcgactgccccggggcccatcgcagcccccaaccagccccgagcggtctgatggtgcccagggat

SEQ ID NO: 4913 - DNA, 269 bp, Homo sapiens
  source 1..269: mol_type = other DNA
aggtgggggatccaccttcactcttaagagcctctgcctgcgggggcactgctagagtttgcctctcaaactgtccccagtgctgcctctggatttgaggcaaattgtttaacagcctgcataactgttggctaaggacctaccctaggcccatctgccaggcccagcaggtctgatctggcctcaccaggctccagccaccctggcgggactgtcccttccctgaagttaaatgcgccactttatctaaactagggccggtggcacca

SEQ ID NO: 4914 - DNA, 523 bp, Homo sapiens
  source 1..523: mol_type = other DNA
tggccaccaggctccagccaccctggcgggactgtcccttccctgaagttaaatgcgccactttatctaaactagggccggtggcaccagctcatcaagggtctgggtgaggccccaggtcatatcgactgccccggggcccatcgcagcccccaaccagccccgagcggtctgatggtgcccagggatggctcgagcctaggcaggaacttcccgggcgacgcggaggggcgcgggatcaggggccctgggagggcgagcgcggcgaggggcgcatgcagggccccgacgcgccactgctcctgagcgcgagggagctggggcccgggcgccggggctcggcctcctggtaccgccaggagggcggcgcggtgtgcaactggctgcggaagccgcagccgctcgagccacgtcccctcggcgcgccgctccgagttccgtccacccaggaggctgccatgggccggccctgcctccgcccagtccgaggagggtcacgcaggcggcagatgccaggcgggca

SEQ ID NO: 4915 - DNA, 609 bp, Homo sapiens
  source 1..609: mol_type = other DNA
ctagggccggtggcaccagctcatcaagggtctgggtgaggccccaggtcatatcgactgccccggggcccatcgcagcccccaaccagccccgagcggtctgatggtgcccagggatggctcgagcctaggcaggaacttcccgggcgacgcggaggggcgcgggatcaggggccctgggagggcgagcgcggcgaggggcgcatgcagggccccgacgcgccactgctcctgagcgcgagggagctggggcccgggcgccggggctcggcctcctggtaccgccaggagggcggcgcggtgtgcaactggctgcggaagccgcagccgctcgagccacgtcccctcggcgcgccgctccgagttccgtccacccaggaggctgccatgggccggccctgcctccgcccagtccgaggagggtcacgcaggcggcagatgccaggcgggcagccccgcccctgcgcgccgcctcagcggcgccttcaagacgctggtcccaggcacccacgcccagggcgcctcgtccgcaggatggtgaggcccgtgcggcccgctcgctctggcctacagcggctgcgaggacgtaggccgagaccctaggcccag

SEQ ID NO: 4916 - DNA, 597 bp, Homo sapiens
  source 1..597: mol_type = other DNA
cgactgccccggggcccatcgcagcccccaaccagccccgagcggtctgatggtgcccagggatggctcgagcctaggcaggaacttcccgggcgacgcggaggggcgcgggatcaggggccctgggagggcgagcgcggcgaggggcgcatgcagggccccgacgcgccactgctcctgagcgcgagggagctggggcccgggcgccggggctcggcctcctggtaccgccaggagggcggcgcggtgtgcaactggctgcggaagccgcagccgctcgagccacgtcccctcggcgcgccgctccgagttccgtccacccaggaggctgccatgggccggccctgcctccgcccagtccgaggagggtcacgcaggcggcagatgccaggcgggcagccccgcccctgcgcgccgcctcagcggcgccttcaagacgctggtcccaggcacccacgcccagggcgcctcgtccgcaggatggtgaggcccgtgcggcccgctcgctctggcctacagcggctgcgaggacgtaggccgagaccctaggcccagctggcgaggatcctccaaggcgtctcacatgaaccgggcgct

SEQ ID NO: 4917 - DNA, 359 bp, Homo sapiens
  source 1..359: mol_type = other DNA
tcataagacctgtaatcccagcatttggagaccagcctggccaacacagcccagtctctaccaaaaaatataaaaattatttgggcaccagatgaccaaggcgggccttggcctgaggccaggagttcaagaccagcgtgccagctttgtgccactccagacctgtaatcagagtgagaccctgtctaaaaacacacagtattgttagtaatgcatgtaagtgctcagcatgtacaataaatattagccattgctattatcattattaccatgcatatttattatagtctgtttatttctcctaatggaatataaaaatttcccttatgcaatacttattgaagaagtatccttctctc

SEQ ID NO: 4918 - DNA, 464 bp, Homo sapiens
  source 1..464: mol_type = other DNA
gagagaaacaggcctcagcttttggcttatattctagagcaggttctaatggaatccccatttgttgaattgggttccaaaaaaggctgcaggctttggatttctaaggcagacttccgattccacaatatgttctaaattcaggttagaatttggatccagattctatgctagatttaaattacattcagaatctgaactaggacacagtctggttcttgatggtcagatttggggtctttacacaactgaaacaggagcaagttcttttttttttttgagacggagtctcgctctgtcacccaggctggggtgcagtggcgcgatcttggctcactgcaagcctcccgagtagctgggactacaggcgcccgccttctaaactcaggctctagagtcagaaaaggtagagtcaggttctggatccaaaatggggcaagtcatgatcaggttctggaaccaga

SEQ ID NO: 4919 - DNA, 434 bp, Homo sapiens
  source 1..434: mol_type = other DNA
agagtgagccttgcaagcggggccaaggctctgagcgcagatccagtcagagtctttctgaactgggcagtcctgccctgccctctcaatctccggaatttgccgtggtttgatgaggttgatgccaactccttcttcccacgccagccctatgcctgaacctcaggctgacagagcagggctgaagctctggcgagagaaacaggcctcagcttttggcttatattctagagcaggttctaatggaatccccatttgttgaattgggttccaaaaaaggctgcaggctttggatttctaaggcagacttccgattccacaatatgttctaaattcaggttagaatttggatccagattctatgctagatttaaattacattcagaatctgaactaggacacagtctggttcttgatggtcagatttggggtct

SEQ ID NO: 4920 - DNA, 531 bp, Homo sapiens
  source 1..531: mol_type = other DNA
ttggcttatattctagagcaggttctaatggaatccccatttgttgaattgggttccaaaaaaggctgcaggctttggatttctaaggcagacttccgattccacaatatgttctaaattcaggttagaatttggatccagattctatgctagatttaaattacattcagaatctgaactaggacacagtctggttcttgatggtcagatttggggtctttacacaactgaaacaggagcaagttcttttttttttttgagacggagtctcgctctgtcacccaggctggggtgcagtggcgcgatcttggctcactgcaagcctcccgagtagctgggactacaggcgcccgccttctaaactcaggctctagagtcagaaaaggtagagtcaggttctggatccaaaatggggcaagtcatgatcaggttctggaaccagaacaggcctcaagcctaggggctgagcagggtatcccctggcctgggagcagaggacttctggctgactgctgcccgcaagaggaagag

SEQ ID NO: 4921 - DNA, 421 bp, Homo sapiens
  source 1..421: mol_type = other DNA
aacctagcaaggtaggcacagctgggatgcagacccgcctctggaggaggaaccgggagggctccgtcggccttcaccccctaggaccttgggccccacgggcaggttggtgggcactaaggccctgtcgaccacaggcaaggccttgaggactctacttcaaggtggcacccagcatcctcacacccagtggacagtgctgagcacggggtcagggagggcagctcccaggctggctggcaccccaagggaagagctggtctccctcagaagccctccgaggcccccagctggaagtgccccagggctgaggcctgccccatgaagaggctgagccccctgacccctgccccttgttggtacattccagaggcgcaggggcctgggggatatgaagctagggaagcccctgcttcgattc

SEQ ID NO: 4922 - DNA, 381 bp, Homo sapiens
  source 1..381: mol_type = other DNA
gaagactttccttttaaagagcaatggcttcaaggctgcaactatctgtgcaaagggttgggcccttcaagatgagcccagggctatctgcttagacctgtgatctaatatgggtgccaacagccacatggcaatgtggctatttaaatttaaattagttaaaattcaataaagtaaaaaatacagctcctgtgccaggtgcagtggctcacgcctgtaatccccgcactttagctgggcgtggtgcgatcgccccattgcactccagcctggaattcagctcctgaatcacactagttatgtttcaactcaatagccacatggctagtagcaatgtggtgtgactcacctcctgccagcgtaaagtggactctgtcccca

SEQ ID NO: 4923 - DNA, 311 bp, Homo sapiens
  source 1..311: mol_type = other DNA
atatatatattgtttcacaatgactaattctgaagcctcccgagtagctgggactcctgacttcgaggggccacaggactagtagggccaatctcaggttggacaatcacgaactaatttcccaaagttagcttggcgtcataattttgtaatataatttttgcaaattttgatcagatcaaattcttctgctcctaaaagcataggaaggcatttctgcatttccttcctgggcggaggaaaagccccgcctcctcaggctctgagactccagctgaccaatcagcgcgctggctggagcgcgggtctgc

SEQ ID NO: 4924 - DNA, 183 bp, Homo sapiens
  source 1..183: mol_type = other DNA
tttagtagagatgcaaagttctgggattattgagacagggtctcactctgtcacccagaatggagtgcagtggtgtgatctaagctcaccgcaactcaagcgatgggtggagttgggaccacaacccacagccaaagctttcgtcaccccaagctcttttccccagctggggctgaaggctgg

SEQ ID NO: 4925 - DNA, 250 bp, Homo sapiens
  source 1..250: mol_type = other DNA
cttgtaatcccagcactttgggaggccaaggtaggtggatcattcgagaccagcctgggcctcagctactcagggtgtgtggggcccgctccctctgctccagggctcagctgtgagctctggggcttcctgagcagggcgtactgactagtgggtccttgaagctagaggcccctttggtatggagccctttgcctagaagagacctctatctccagcacccagtgctgagtagatgggtgcgtccccc

SEQ ID NO: 4926 - DNA, 229 bp, Homo sapiens
  source 1..229: mol_type = other DNA
gtgtgtggggcccgctccctctgctccagggctcagctgtgagctctggggcttcctgagcagggcgtactgactagtgggtccttgaagctagaggcccctttggtatggagccctttgcctagaagagacctctatctccagcacccagtgctgagtagatgggtgcgtcccccaaccagcccctgggggggctttcctcagtccctccacttggaggggaaggagc

SEQ ID NO: 4927 - DNA, 610 bp, Homo sapiens
  source 1..610: mol_type = other DNA
ttttcatccaaaagaagtacatacttatcttattcttccacctgcttaagttgtgagggccctttcagccgggggagcttgtcattctttaaaactcggatttaaggaagtaaaaattttaaaatttttatttaaaaatatttattgtagaaaatgtggaaactccatgaaggcagggaacagttttttttttctttaataaaattgtttattgaaggtataacatgtatacaaagaccacgtctgcttttgctcactattataacctagtgtctagcatgtagaaataccccttacgtgggagtgtttataaaattcattttaggcaaggcgtccttaggaaaggctgcctttaatataacacctaccatatattacgtggtaggacgaattactgattaatctttcaccaaaacctaaaaggcagattattctctccctctacagatgaggaagctgaggctcaaattagaaattcggtttcgaacgtgactcgggagcccacgcagggcgggagcccacgcggggctggatcccctcaaggcaccgggcggaacaaggggtggagctcgcgggggccacggggctttccaggatgggggacaggccc

SEQ ID NO: 4928 - DNA, 444 bp, Homo sapiens
  source 1..444: mol_type = other DNA
actttgtctctacagataaagtttatttggaaataatttttctttcatggccttgacatttttgaagagtacagtccagctctcttctagactagtatttttggcagaaacatcatagaagtgatgctgtgtcctcagtctattaaaagaggcacaagatatcagtttatctcattattgatcaaattaactgactatatgtttaagggagacaagccagatttcctcactgagagattccctgtttctctttgcaataattaaatgtgagaaacttattttgagacaaagtctcactctgcactctgtcccccaggctggagtgcattggggttcaagcgattctcctgcctcagccacccaagtagctggggtcacaggaaccctggtcttgaactccttcagtttccccctctgtaaagtgtggacagaagtatcctaccc

SEQ ID NO: 4929 - DNA, 338 bp, Homo sapiens
  source 1..338: mol_type = other DNA
cttgggggccagggattccctttcccactctgaggctctggccagagggagagaggactctggacctaggaaaagagaagaaaacacagtgtgcttctctagtgctccttgatcccccctggtgtgtccatacagatgggacccctgtctgccaggctctggggtcctgggcagtggtgaaaagccgagacttagtgggcccaggactccagggctgtgtcctccttagggctccgggggtgagtaagagctcccttactcaggcccctcccagccaggtgtcagcggtgcggccaccaccctagtccaaggctgctggctcccaagcctggtgttgg

SEQ ID NO: 4930 - DNA, 395 bp, Homo sapiens
  source 1..395: mol_type = other DNA
ctaccatgcctcggctaggcaattatctggtaggtgcactagtgtacaagaaatgatatagatctatagatatttacatgaaaaatgtgccagaatatatttgtacagttaatcccaacactttgggggtccgaggcgggctgatcacctgaggtcaggagttcgagaccaccggaggttgcagtgagccgagatcacgccactgcactccagcctaaaaaaaaaaaaaaagtatacagtatgatgtcatttctatttaagatgtacatgtaactgtacattgagaagaatctgaaatacataccaagctgtaggtaggatttacctaaatccctcagagatgacctcggtgggctgcgctcctgtgggcgggctcgcgatcggcagcgccgggc

SEQ ID NO: 4931 - DNA, 715 bp, Homo sapiens
  source 1..715: mol_type = other DNA
gcaagcgctgggcggagggccgcccccggggagccaggcctgtgccagctcggcagcggccgccaggggccgcgcggctctgctcctctactcagccgatgactcgcgagcgcctggtgggcgccctggcgtcggccctgtgccagctgccgctgcgcgtggccgtagctgagcgcgcaggggcccgtggcttggtttcacgcgcagcggcgccagaccctgcaggagggcgcccggtgcggtggcgctgtgcagcgagtggctacaggatggggtgtccgggcccggggcgcacggcccgcacgacgccttccgcgcctcgctcagctgcgtgctgcccgacttcttgcagggccgggcgcccggcagctacgtgggggcctgcttcgacaggctgctccacccggacgccggacttcctgggggccctgcagcagcctcgcgccccgcgttccgggcggctccaagagagagcggagcaagtgtcccgggcccttcagccagccctggttccatcccccggggactcccgcgccgggacgcggggtgggaccaggcgcgggacctggggcgggaaggcagacgctgtttttctacccatgtggcccacacgcgtctccgcggggctggcgccccgcggcccttaagccaatggcacatggcccgtcgccattggctgggcggcaagctccgccccctggactgcggcgcgggt

SEQ ID NO: 4932 - DNA, 351 bp, Homo sapiens
  source 1..351: mol_type = other DNA
gaaaaaattttaaacgttggacattttgaaaaatagagtatatccaaaatttcagaattctgtgaggtacttatagcagcttatatagatcaatgaatctgttgaatagctccaaagggggtgagggtaaaagcctttctcatttcctcattttaccgcggcccgggtcgcaggggagcgtctgtcgcccaggctggagtgcagtgcagcaatctcggctcactgcaggctctcccgagtagctgcgactacaggcgcctcgatccccccaccttggcctcccaaagtgctgggattccaggagtggcccgacgccgctctgacgccactgaggtgcgccacgacgtgacg

SEQ ID NO: 4933 - DNA, 464 bp, Homo sapiens
  source 1..464: mol_type = other DNA
ggattaggtacgtggccatgggataatcacatatgtggaatcccatggccaccattaccagggttgtacccaggggtcccacgtcagctggagtgcccagcctccctggcagagatcactgacagagtggtcagcttggccgcagtccccagagcaggaatgccttcccttgcaggggaaaacagcccgtgggaagtgagtgacctgggggatccgtgccccaggggctaacctctgggctctggcttagccccaccgaagagagccttgctgcaggaagactcggctgttggtggcagtaccccaggctccaaactctctgggcctgggggcaatcccgccctgccctactgcccgccccgcagggaagtggcccaggagagcccagtgactccagtcggagggggcgggccccaggctaccgagctgcagctgacaggcagtccggcggcgtcgggtctcca

SEQ ID NO: 4934 - DNA, 606 bp, Homo sapiens
  source 1..606: mol_type = other DNA
agacatggcaatagccaggtactgggaatacaagtgatgattacaaagttgtcaaatcactccttcactaatatggcgaaagtgtatttctgcattataagaatgagacaaaatcattctttttgagatttttttgttttcaggtcttgaactcctgggctcaagcagtctacccatctcagccacctagatagctgggattacaggtgagaaaggttttctgtcaggaaatcaaggaaagacgtgcgtttcagagctctgggtcactctgcctgagcacccactgagcagagtgtgatgagttgggactaacttttaacactaactacaggtcctgtgatcaaaggcacacaggtacacagccctcctgaaggccaagtcctggacaaggcattccaatgaggggggggagtgtggccctgacgcctcccagtagggcgcctcgagcccccatccccgccgcggctcgggctgccctgccgtcctgggtcacaaaggcggttgccaggcgccacgaacagcggccgccacttcagcaggtgagccccgggcccggatggtgggactgggcccaggttcccaccgcatcgtccgcagaaccttctg

SEQ ID NO: 4935 - DNA, 521 bp, Homo sapiens
  source 1..521: mol_type = other DNA
tctcaaaaattaaattaagttaaattaaataaataaataaatactgcaatgaagtatgttaggaagggaaatgataattacaattccttacatgtctaagttacagattgcaaagcgctttggtgcttagcatctcagctaacctggcactcttcccaacgaaagggtgggatgggatagttctaggtaaacccaccgagggttggcgactaacctaaaggattaacagcaccgtttttgttttttgtttttaacactcaattaattgatgtctatgagggaggtactgttattatccccatttcacagagtaaggtcaccttgccagtgggggcgactgcactttcttgtccaaggtcacggcggtgtctccagcagcactgaaagctggctcccagccggtgatgggcgagcttctcttcaccggggcgcagcacagaactctgctgcagcggtgagcccagcttattgccagctgggctgcccggccttccacttccggcgcggaagttggcgtcacg

SEQ ID NO: 4936 - DNA, 575 bp, Homo sapiens
  source 1..575: mol_type = other DNA
agaacaaaggtgacaagtcttatttgtggtgtggccaagtaggccagacatggcaatagccaggtactgggaatacaagtgatgattacaaagttgtcaaatcactccttcactaatatggcgaaagtgtatttctgcattataagaatgagacaaaatcattctttttgagatttttttgttttcaggtcttgaactcctgggctcaagcagtctacccatctcagccacctagatagctgggattacaggtgagaaaggttttctgtcaggaaatcaaggaaagacgtgcgtttcagagctctgggtcactctgcctgagcacccactgagcagagtgtgatgagttgggactaacttttaacactaactacaggtcctgtgatcaaaggcacacaggtacacagccctcctgaaggccaagtcctggacaaggcattccaatgaggggggggagtgtggccctgacgcctcccagtagggcgcctcgagcccccatccccgccgcggctcgggctgccctgccgtcctgggtcacaaaggcggttgccaggcgccacgaacagcggccgcca

SEQ ID NO: 4937 - DNA, 352 bp, Homo sapiens
  source 1..352: mol_type = other DNA
ttttacaatattttcaacacttatcaccataggtggtacatagtagggccttaataaatatttgtaaaatgaacaaagttaatgagtgtttatgtttgtagtattgtaagaattcagttcctcgaaccttgttacgacgtcggcacatttagtcgtggtggtgcgcgcctcgcttgaggtcaaggctgcagtgagccaagctcgcgccactgcactccagcccgggcgacagagtgagatttgtgctggaggatccttctgcgcacgcgcacagcctccggccggctatttccgcgagcgcgttccatcctctaccgagcgcgcgcgaagactacggaggtcgactcgggag

SEQ ID NO: 4938 - DNA, 377 bp, Homo sapiens
  source 1..377: mol_type = other DNA
cagcctggccaacatgagcctgtagtcccaactacaccagaggctgaggctggaggatagcttgagcccaggagttcaagcccacagcctgggcgacagtaagaccttgtctcaggcagtctggcccagctggttgcagtgagccgagatcacaccactgcactccagcctggaatttccttctgaaagggactgttccagttcatattattttttagactccgtctaaaaaaaaaaaagacttgtatttaatgtgatttaactcactgcggacactgagtgcgcaacctgagcctcgcgtgcactacaacctcgccgccggcgtccaggcttctgtgttctagcctggcagcgcaggcgcactagaggcctgtagg

SEQ ID NO: 4939 - DNA, 236 bp, Homo sapiens
  source 1..236: mol_type = other DNA
tggcctcccaaagtgctgggatcacaggcgtgagccacccactggaccaggctcaagggatcctcccacctcagcctcctgagtagctgggacgacagacgtgtgccactggaccttaatactaagttattttattattttctgtcctccaggctggagtgcagtggcgggatcacagctcactgcagcctcgacctacctcagcctgagtagctggctggccaggctggtctcta

SEQ ID NO: 4940 - DNA, 384 bp, Homo sapiens
  source 1..384: mol_type = other DNA
gcacgacatattagctactatagtaaagtctacctgactaccctatttaatagaaaatagtgcttattacctttaagacactctgtaacatactatatttattatttattgttagtcttttgtaagtcttatgaaagcaagggcttcttcacccaggctggagtacaacagcctcccaggtagctgggacaggctagtctcggtattaccaacacctagggagttgcctggcatacagtaggtaattacagaaggcctcctgccgctgcggcagaattcccgtgtggcccgattctctggccggcgctggggtggagccggcggggccgtcgtgccgcccgtggccgctggggacgctggtgccctcccgccccgcccaagccg

SEQ ID NO: 4941 - DNA, 577 bp, Homo sapiens
  source 1..577: mol_type = other DNA
cggaggcgcgtcagcggacaccacctgcctgcacatctggctggcctcaacttcccgctgttcgagcccgtcccgactccaaggcgcctggctttgaggcgggctgcgtcttcggagtcccgcccctgccgggtcgagcaatgggcgccttccgtttggcgcaggccccgcccctgtcgctctccggcctgcgggccgcagggctcgttccggagggcgggcgccacggaggccggagtggtcgcagttcgggcggaggccgggccaggcggggctgtagggctggggcaggcggcgggctgcccggcgggacagctgcggcagccggcggggggcgtcctgagttggcggtcgagggcgctgccagctcccgaggggccgctcgggccccttccggcccgggtctggttgggccgcaggagcagggcgggctgcggcgcccgggtctggccctggcctacgggctaagcgcccggccccggggccgcggatccggcagccatgcttctgaagcgcttgacagttctaaagggctttaaagcgcttcgtagccccggaagcgcttaggcatctccga

SEQ ID NO: 4942 - DNA, 298 bp, Homo sapiens
  source 1..298: mol_type = other DNA
gacagacgtgtgccactggaccttaatactaagttattttattattttctgtcctccaggctggagtgcagtggcgggatcacagctcactgcagcctcgacctacctcagcctgagtagctggctggccaggctggtctctacggaggcgcgtcagcggacaccacctgcctgcacatctggctggcctcaacttcccgctgttcgagcccgtcccgactccaaggcgcctggctttgaggcgggctgcgtcttcggagtcccgcccctgccgggtcgagcaatgggcgccttccgt

SEQ ID NO: 4943 - DNA, 633 bp, Homo sapiens
  source 1..633: mol_type = other DNA
ggctggggcaggcggcgggctgcccggcgggacagctgcggcagccggcggggggcgtcctgagttggcggtcgagggcgctgccagctcccgaggggccgctcgggccccttccggcccgggtctggttgggccgcaggagcagggcgggctgcggcgcccgggtctggccctggcctacgggctaagcgcccggccccggggccgcggatccggcagccatgcttctgaagcgcttgacagttctaaagggctttaaagcgcttcgtagccccggaagcgcttaggcatctccgattggaaaccgacggcagccacggtttggcactctgatcagtgaggctagcccctggctctgccccgtcctcctgggcccggggtgggaatccaggccccctgtaccttgcaggtgcccatggcgtccgagcggggcaaggtcaagcacaactgggtgtccccgcaagcgcagctgcctccgggagccctgtgatgtggccccctccagccggccagctcagaggtctgcgtcgcgttctggagggcccagcagccccaagcgccttcctggggctcatcccgccgcaggccctggtgtgggcggggccgcctccaaaggctgcctgggaacactcg

SEQ ID NO: 4944 - DNA, 500 bp, Homo sapiens
  source 1..500: mol_type = other DNA
atgatgaggccatggtcacaggcctattccctgaacccaatacagctgttcacagcagtaaagttctggacatttctgaagccagggtttatgttcagctgatgacagcctgggaggccatcttcacatcggaaggtgccttcttttctgcagcctgatgttgaggagatctccacagtcagattctctcaggaggaacctgtctccctgaaaccttcgctattggaccagcagccccaagccttctagctacccctccacaggcagcagcagcaacgatgcagcccaaaacacctccagagacatggaggcctcagagtttcgcttctccagaagctcagaagaaagagaggatgcctccgcgtccttgtggaggacacgcatccagctccctgccaaagagccacctgccaagctatctttccaagggacctttacaaagttcagaaaaatttacagcagctccttccctaaggaatttcagggctgcatctctgact

SEQ ID NO: 4945 - DNA, 411 bp, Homo sapiens
  source 1..411: mol_type = other DNA
tccctatttcctccctcgccaggtaagtcacccttacaaggttggcagggccagactcttccaggcagtgcaaagccctaccctgtagagggtagtccaaggaagcgtgggaccctgctcacccagagcccccatgactaggactctccctgcacctgcaggtaaaggggtctctacagggcagccccaaagaggtccttgctggctttatgcccacccgggcctggccttgcgagattgccagagtcaaagatcagccactctccctcaccaaactcacattctgtattttttaaaaaccaggacaagtcttttgttgcattttgttaatgtaaagaatataaacatagtatgagcattaagcctagggcgaccagcagcctgacagaacacaggctggcttgaagtctg

SEQ ID NO: 4946 - DNA, 349 bp, Homo sapiens
  source 1..349: mol_type = other DNA
cactcattgtccatgatggagatccaggacatcttggggaagaggaccccaaaggaggtacttcctcctcactgatgccctcagggctgctgtcggaaactgcccccttcttgggaacatttgaccaaaaataaaattctccgaagctctgctgggcagctcagccatgttacattgtctatgcagaataagcaggcctggtcccttgtctcgttacaggcccttgtactttgtttcaaaggatccttcacccttgtaaaatacatcccttatggaatcctaaattcctctaggtgtttttagccttgtgagctaaaatggaatggatttaatatttcctatctggcat

SEQ ID NO: 4947 - DNA, 317 bp, Homo sapiens
  source 1..317: mol_type = other DNA
ggctccctgcggactcccggggctcacagaggccagctcagagctctcccattttacccagggagagcccattggggcaccgtgttccagggacagctggagcaatctgacctccactgttgacttctacccagaggacaagaacatttttagttcccaaggaatccccacggaagctaggccacctctgggatggggttgctggtttagtgtcggactgtctggctggaagacagagcttcatttaggagctacatgagctctcagaggggaggacccccgctacctgtggaagcgggggtctgctgggctgaagg

SEQ ID NO: 4948 - DNA, 380 bp, Homo sapiens
  source 1..380: mol_type = other DNA
cctgggccgagggaaatgaggcagtggccttggcctatcgccaggccaggcagtcatgtcacacctggcagaaatgactgatggctcactctctggagaggatgatcaggagcagtctgctcaaccgggaggtgggactcctcctcgggaaggtgtagaatcaccagcctggctccctgcggactcccggggctcacagaggccagctcagagctctcccattttacccagggagagcccattggggcaccgtgttccagggacagctggagcaatctgacctccactgttgacttctacccagaggacaagaacatttttagttcccaaggaatccccacggaagctaggccacctctgggatggggttgctggtttag

SEQ ID NO: 4949 - DNA, 439 bp, Homo sapiens
  source 1..439: mol_type = other DNA
tgatagtgccactgcactccagcctgggtgtcaaaaaaatatatatgtatattcatttagacatatgctgttgcacacttagactatagtatggtatcagcatacgttttatatttactgggaaaccaacaaaattctttctattgcaaaatgtgaatctcgaaattataaacctctttcagactgaagtttagccaaatctatgaaaaaagagttctaaaccaactaattatcagtacaaataaaattataatgaaaagtctatgaagataatttgttctcagatgcccttcacatatagcaattaattcacaaatgatgagtcactcatgtgccttcatgaaggcaggccctcaatattattcacacttgaaaactcctctgttccgtaactgacagggcagcgaggtagcttccggatgactcctaggggagtttc

SEQ ID NO: 4950 - DNA, 251 bp, Homo sapiens
  source 1..251: mol_type = other DNA
cttagcagcctttggcccaggcgccgaggtgcccagtgttcccaagcaacgatggggttggatgggaattatacgcttagctaccaagccaccgtggacgccccagaggtcctcggcccccaccctgttcctgcagagaggtgccgggtggctctagcgcaggagtcttgactccaccctaaattgttgcacaagttcaacgatgtggtgtggcatgtgagctggtccatcacagccaacatcctggctgt

SEQ ID NO: 4951 - DNA, 444 bp, Homo sapiens
  source 1..444: mol_type = other DNA
ctctagctgcaggagccggcagggccagaggtcccagcctctggcgaggggcccagggacagtctacttactcctaagatgtcactcatagatagatagatagatagatagatagatagatagatagatagatagatttttttcttttttacaagagtgtctctctgtgctggagtgcaatggtgcagtcacggctcactgtaaccctcagcctgtagctgggactacaggcgcgcgctgacctcaggccagagcttcagattccaaagccctccgggtcagggtaactgcggcaaccagagccccagccctctggtctcgcacgtcactggaggataggggctgggccacgggagggcggggcgcgccctctggaaggcgcggaactgctgtgcgagccgagcgcgttgctgcccggaggctcctacgccacggcccgtcggg

SEQ ID NO: 4952 - DNA, 462 bp, Homo sapiens
  source 1..462: mol_type = other DNA
gtgagcagctggctaggggcttccaaccactcctcacccggggtccctgggttcccgtggaagcctgcaacgattaggtgggtgtacagacacacacccgagagcccccaccaccacacccccccgagggcaggtggggtcgcacagggcagcagagagctgctgcgggctcagctccactggccctggaaacacagatgtgtttaaaatgtgttgagtcgacttctcgccccccaggtctgggggtgccttgactgcaggacgacttggggccatttgagcaaaatcctcgcttcggttcctcatgatcccacgggagggcgtggtggttcggtccacacacccccgcccccatcccccagcctccggcagcggcaggggcggcctctgcctcccccgagattgcattttgccggcgagagcctagaaccggcgccggcgcctccgccccccgccccccac

SEQ ID NO: 4953 - DNA, 513 bp, Homo sapiens
  source 1..513: mol_type = other DNA
ctattataatgaacaggacagtgtatatcatccttacaagaagatggacaaatgtgtgtaggtctacatattgtataatactaacaatgggtaatgttcattgggcactttcaaggtatcaagacctttataagcatttcttaataaccttttacctatgtcctggaccagacatatcagcgtccctggggaggtagtcagacacgcaggcagaccgtgatgtgtagtttaaacaagacccgcaggtgtctggtctggtctagagcccattcctcttattagaaccggcctaggccggaatgggcgcttccactcttggcccagcaggccagtgggcagggccgcgggaaggacgggcgctgcaggggctccgcgcgctcaaggtgctcgcgggctcccgggcccagccgggctgaggtggcgtgggcgccctgcgggccgggcctccgcggcgcgtcccagtcccagtctccgcgctggtctggcccgcccgctcgcgcctcctgaaaagcc

SEQ ID NO: 4954 - DNA, 340 bp, Homo sapiens
  source 1..340: mol_type = other DNA
agtctgggagaatccctcaagagaagggtgtctggggctcctgccaccatccctgtgtctccatgaccaaccgctggcagtggaagggtgtccttcccacccccactcacccagagcctggtcaccccaggccaggcctgtgtttccaggtgtaacgggcagcagacgctgccctaggactagagcagggagggggcacgggcccaccccaacccacacagctgcggggagcgcgcggcgggcctgggggagcgctgggcgggggcgggcggtgcgggcagggctatacccgagctgggcgggctccgggcgccgcgggccctgccctccccctccccct

SEQ ID NO: 4955 - DNA, 349 bp, Homo sapiens
  source 1..349: mol_type = other DNA
actcaatattaatttctttcttaaaccacagagtttcaaaaagaaatagagtgattgcagtctgaagcgagcctctgtaatttctgtaattacgatagggggaggggaagagcaggccctactcccagacccactactcactccatggcggggccatggcctgggacaatggcagccctgagactccagccctggcccgcctgtccctctgatgcagtgggacagagggagagggctgggctgggcccatggcccacgggccccacccccagaatagatcctgggtgtcggggcaccttggtgtctttcaaaagtgccaggctctttgaaatactgtatcccagagagt

SEQ ID NO: 4956 - DNA, 496 bp, Homo sapiens
  source 1..496: mol_type = other DNA
aaactgctggggtaaaatctgaaaccataactgttcaaagggagttttcccggcgctgagaaggcagaaaaacctgccagggacagaggttcccggggacctgcagaggggcctcacccccaccccactcctccccttgtaattaaaacacatcctattttgaaatgtgggctagaccctggggtctctttagtcaatctatctgtgattgactctgccaaacataaggttctgacccttgcctcgcagagcccgagcccgggtacccagcgggagcagctccaaacctggggcgcgagctgggagagggtgtccgagcgagaggcgcgcccctcgcgccccctctctccgcgggggcggccctgggcgcgtggaaccgggtgcgggggcgctgcaggcccgcggggcccgggtccccgccttccccgctgctcgcgggtgggcccctcggagcggctcctcctccggcgccccgctccccgagagctccccggcg

SEQ ID NO: 4957 - DNA, 548 bp, Homo sapiens
  source 1..548: mol_type = other DNA
gttttcccggcgctgagaaggcagaaaaacctgccagggacagaggttcccggggacctgcagaggggcctcacccccaccccactcctccccttgtaattaaaacacatcctattttgaaatgtgggctagaccctggggtctctttagtcaatctatctgtgattgactctgccaaacataaggttctgacccttgcctcgcagagcccgagcccgggtacccagcgggagcagctccaaacctggggcgcgagctgggagagggtgtccgagcgagaggcgcgcccctcgcgccccctctctccgcgggggcggccctgggcgcgtggaaccgggtgcgggggcgctgcaggcccgcggggcccgggtccccgccttccccgctgctcgcgggtgggcccctcggagcggctcctcctccggcgccccgctccccgagagctccccggcgcccccgccgccgcccccgcgacacccagcagcctggccgccgcggccaacgcgccaccaaactttccccggagccggcgccggtgagtcgcagcg

SEQ ID NO: 4958 - DNA, 353 bp, Homo sapiens
  source 1..353: mol_type = other DNA
agtgagttgctaactgtcttgcagacaagattagaaaagggtcccatctgggacactggaatgcagcagagctgagttgtccctgctctgccactgagtctcagtgttatgatccgttcaagggtttgaaagctggagctgctttccatgagttagcccaggccaagctcctgcaaactgcattatcatgattgtcatttcatgcctttttaaaactcaggaacaaagaaggaaaaccacaaacatgctttgtttataaaattaagtcgtttctcttagagatgaactcttcccttggaggagatgtcgccagctttgtgtgccacaccccacactgggcagtggagtcacac

SEQ ID NO: 4959 - DNA, 404 bp, Homo sapiens
  source 1..404: mol_type = other DNA
gattacatctaataagtatccttattagtctggatttgttttcttatttgccagaatcaaacaaactttagagatgtaaaaccctaattaatagcagtcatcgctctttgtgaaaggccttacaggccaacagagaaacttgtcgaataactttatctcactgacagtgaggagctgtgagtggtcactgtcctggagaatgaccatggtgatcattcctgtcatcctaagagagaacgtgggcactttcttaaaaagggaatgtagacattccgtaagggagacgctctccatcgcttcccccgggggcgtcaccgccccctgatgcacttagctcggtgctaggggctcctttgcgcacgcgcgccgcttcccagtggcaagcgcgggcaggaccgcgttgc

SEQ ID NO: 4960 - DNA, 347 bp, Homo sapiens
  source 1..347: mol_type = other DNA
gttgaagatgtgtttttcaccagaacagaaatgctattttcataatctgctttttataattagaacctctggtttataaaatactatatctggttgatcagagtttactctgatacttctgctttggctaagacatctgcagcctaggatgaaggaagttgcttcctacagtgcaggagttgcggctgcagcaggggccggctgcagccctgctgtggagttgcatgcatgccttattttgaagttttataaaagccttatgttattctgacagcaaatctattttctcaccaaatagttcctacctaccccaggacccgcagtgcagggggcaagcaggcccctta

SEQ ID NO: 4961 - DNA, 392 bp, Homo sapiens
  source 1..392: mol_type = other DNA
taaatcaggcaggggacctattcctaggtaagaggccctgtaggggcccttgcatatccaattgatatgatcagatcagatgggaaaacagtttgaaaactgcaaagcattttttttttccagcagcagagccctctcccagggaaagcccttacggtaggggctctatttattttatgaagttagccgctggatatgttaagcaaatgttttcttaattgggatggcggggggcgggtatcaggcctctatcccccggccccccaccaggaaaaaattaaagacaggccttttcttttcgtggccaaacacagcaaacactggtgtgtgagcggctgaaggacttcctcctccgggcgaggcgggggaaggacgccgccgagcgcctggag

SEQ ID NO: 4962 - DNA, 400 bp, Homo sapiens
  source 1..400: mol_type = other DNA
gagtttggagactactgatggactaaaacggagtctatgtaagagtacctttgggaagactgggaaccttccgagctttaatctgtgaatatttatccaaatcaggcaggggacctattcctaggtaagaggccctgtaggggcccttgcatatccaattgatatgatcagatcagatgggaaaacagtttgaaaactgcaaagcattttttttttccagcagcagagccctctcccagggaaagcccttacggtaggggctctatttattttatgaagttagccgctggatatgttaagcaaatgttttcttaattgggatggcggggggcgggtatcaggcctctatcccccggccccccaccaggaaaaaattaaagacaggccttttcttttcgtg

SEQ ID NO: 4963 - DNA, 523 bp, Homo sapiens
  source 1..523: mol_type = other DNA
ttggagccagacctgggtttagctctagttttgccacaggctgatgtgatcctatcacctgaggccctcctgccacagggcactagagggtgctcaacattacctgaatgttagctattactatttctattattctcctgaatggtaatcttcagcaagtttctccagttatacaaagaggagagctgtaagatttttctactcaactggcacctttgtgagaagggggcaaaaactgtgatccacccttgaaattaaatgcaagtatcgtgaagaagtctccgtcaaatcttgttttgtgtttttccaaatcttcgaaatctgcaattttggaactagacacaatattgtgaaggcactacatgctactacactcagaacggctagttccatattatgtgagtgtcgcctcacttaaaaaccgattttatagtcattctttaaaccgtagttctcagggcccgcggagtcgggtgacgctcgcctccgccctcgcgttccccacactaaggcgagcaccgcc

SEQ ID NO: 4964 - DNA, 524 bp, Homo sapiens
  source 1..524: mol_type = other DNA
gaaagatcttgaagagatgtccttcttggtattggatgcatcaatgcattcttggttttctctcactggtcagtgaggagggggagagaagccacccctccttccatgacagagtagagaggatctgtttctcccctttccctctcgccttggagtaaggaggctgccttcctccctagaagaggtgtgtgtgcgcgcgcgcgcgcgcgtgtgtgtgtcccttccccctcttctgggggctggggagatgacatctttctccccagcgttgggaaaggaggtggttcttgaggctgacacctcttatccttccaaaaggagtgggaaacttcccctggggagaaggcctggctcccacgcccttgctggaggcctgggtcgccccctcctgcaagccccgagagtcgccagacgcgcggctaggtgccctccgtgagcggggcggggccgcctctgcggcgcggggcgggggctatctctggccccgcccctgccccgcccgctccctctccgcgagcctcgcg

SEQ ID NO: 4965 - DNA, 378 bp, Homo sapiens
  source 1..378: mol_type = other DNA
aactcctgacctcaggtgatcaacccgccttgctaagctgtcccaccttctagaacatgacagaagtctagggcctcgagagggctttgaggtccaaggttttgggacactttgtgttttgtacaccaagagcgctgtctccagctatctggagagtctgaggctctgggagaaagggtttctaaagcactggctgcttctaaaagggcagcatgacttaggcagggaaacagaggtcagggcctccttccaggcttccctctgcatctgagtatgcaggtcggaagagcctcgggtcctgcctccgcgggtggcctagagccaaaggaaggcggagcccgtcggggcgggattggcccttagggccacctcataact

SEQ ID NO: 4966 - DNA, 430 bp, Homo sapiens
  source 1..430: mol_type = other DNA
agaactaggattcaaatatcttgattccatcacatttacaaaatcataaaatctcaccataggcctgatatttttttaaccataaaaatctttttatcatctctagttaaatatagtaattaaatagtgggtttgtatctctaacaggcaattaactttcattttcctagtctctagtaacttctactcaaagaaattttcagagcacaaaaggtctctagatatcagtggggatgagatccagagaaggaactgacttatcaattgttacactgttttatgattcaaatttgggttaaagttggattttgatggaatacgagagaattctcattaataaataaaaataagatgagatacctcttgcatgggaataaagacctttccctgccacagggcctggccacttctctcttaggaaagaaagatt

SEQ ID NO: 4967 - DNA, 344 bp, Homo sapiens
  source 1..344: mol_type = other DNA
gctttagaaatcacgtactctcatcccacagcaataatcccatggagatttgggatttggaacggagtctcactctgtcgcccagactggagtgcagtggcacagtctcaagtacctgggactacaggtgtagaactcctgacctcaggtgatcaacccgccttgctaagctgtcccaccttctagaacatgacagaagtctagggcctcgagagggctttgaggtccaaggttttgggacactttgtgttttgtacaccaagagcgctgtctccagctatctggagagtctgaggctctgggagaaagggtttctaaagcactggctgcttctaaaagggcag

SEQ ID NO: 4968 - DNA, 534 bp, Homo sapiens
  source 1..534: mol_type = other DNA
gctgaagtggggggcctcaggcatcgcctgagtccctcggtgtcagaaacactgctaagaaatttaagaaattctgttaatgagtttaagaaatgtttttaatgattaaaagtcagtgacttgtgaataaccatgtaacttacaccgaaatatgctttaattaaattttcttttaaaatgtcactggaaagaacatcttgggaagacggcctggccgatcgccgtgtgaagggcaagccactctggccgagagggagccccacacctcggtctccccagaccggccctggccgggggcatccctcggaaatgggaccctctctgggccgcctcccagcggtggtggcgaggagcccaggtagcctgccgggaaagccggtggctcccgccgtgggccctactgtgcgcgggcggcggccgagcccgggccgctccctcccagtcgcgcgccgccgcccccgcccccgcccacccccagccggcgcccgcgcccgcccccgcgccgggcccggctcggcccgacccggctccgcc

SEQ ID NO: 4969 - DNA, 681 bp, Homo sapiens
  source 1..681: mol_type = other DNA
ccgaaatatgctttaattaaattttcttttaaaatgtcactggaaagaacatcttgggaagacggcctggccgatcgccgtgtgaagggcaagccactctggccgagagggagccccacacctcggtctccccagaccggccctggccgggggcatccctcggaaatgggaccctctctgggccgcctcccagcggtggtggcgaggagcccaggtagcctgccgggaaagccggtggctcccgccgtgggccctactgtgcgcgggcggcggccgagcccgggccgctccctcccagtcgcgcgccgccgcccccgcccccgcccacccccagccggcgcccgcgcccgcccccgcgccgggcccggctcggcccgacccggctccgccgcgggcaggcggggcccagcgcactcggagcccgagcccgagccgcagccgccgcctggggcgcttgggtcggcctcgaggacaccggagaggggcgccacgccgccgtggccgcaggtcagagtacgggtgcccgcggcgctcgggaaccggctgctggctgggcgctgaggcagggtcatggtccggcaggacccggactgacgggtcgcgggcgggcggctcacgggtgacacccgggctgagggtcgcgtctaccggagcgcgcactaggggcggagggcgcgggca

SEQ ID NO: 4970 - DNA, 568 bp, Homo sapiens
  source 1..568: mol_type = other DNA
cagatatatatttattttactcagaatatcacgataagtataattcagagaattattgccttctaatcgtctttgaaagaacttgagcaagaagccagctttttccatagagaactccattttttcattatgacatagcacttatcgtttaaacatcaattgatgttcaaacatcagctggtgtaacattgctgcagttgcattctctcagctatttaattttacagaatttagatagcagagtagcatgctgataccaacgtttaaactatggatacatatttgaattccaaatttttcttcaaataatgtgattagagaactttgcccaaataagctttctggtatttcataagcaagagatttaagttttccatttaagaagcaattgtgaattttacaacaataaaaaatgcaagtggatattgaacagtctctgctctgataattctaaatagggtcaccggcgagacagtgtggcaatattttccctgtaatgtaccaagtcttgccaaagcagtgaacattatgacacaactttttgtcacagctggctcctaataggaca

SEQ ID NO: 4971 - DNA, 600 bp, Homo sapiens
  source 1..600: mol_type = other DNA
ctgaggcagggtcatggtccggcaggacccggactgacgggtcgcgggcgggcggctcacgggtgacacccgggctgagggtcgcgtctaccggagcgcgcactaggggcggagggcgcgggcacagagagccgcggccggtgccgactcgagtggacgcgagccggtgcgtcccggcttccaggacagcccccctcgggagagcgccgggtgggcgcggagccggggacacggggacctccgcgtccccggcggaggtgcgcaagcgtcgggagccgctccgggggagatccgcgtgcgtccgtcctgaggccgcgcggcacccctgctgaggaggaggtcccgttcgctgtccagagcccaggggcgaccgccgcttggggaccgggggaccgttcagcgaggggcgcgcttgtagctggccaggccctgtgccctgacgcgttgtgctggccctacgcccggcggaggggctggggacggggactgggtgcctccgtgcctccgcggatggagcgcgcagccaggacccccagccgcaccccggggggctggaaaggcctcctgcaagtgccaggcgctgaccactcctcctgggag

SEQ ID NO: 4972 - DNA, 424 bp, Homo sapiens
  source 1..424: mol_type = other DNA
ttaaaataaccggatgcagagcaggtggacctgccgcctattgtcccttaactgcacaggcagtctgggcacacagaggcttctggccaggtgtctgcgctgcagcgtacacaggtgcgctgctgtgatcctctttctacattgagaaagatgagatcagtttccgtgacatttgacgggtaactgcatctcatctgtaaaatgcgtcttgcaggatcgttctggcttccgtacaatcctgcagagagcagcaaagcgcgcacgcagcctccgcctcatactccgcagtggcagagctggcgcacagaacacccgccagccggccgtgcgcaggcgcactccgccaagtcccgacgggagctctgcggctgcgcactcggctggctttgcggccgcactgcttgacggcagcggtgtccgcccc

SEQ ID NO: 4973 - DNA, 341 bp, Homo sapiens
  source 1..341: mol_type = other DNA
ttaaaaggtgaatgacatgatccgatttatgttttaaaaatagatttttaccaggactatcgcatggctggccaggcgtgcacgcctgtaattccagctacgtgcgagatcgccccactgcactccaataataataatttcaaaaataacttttggggtttccaccgcaggactaagatgccagccaggctccgccccggaggcttggaagagggatgccgggacagccggcccgatccccggtgcttgtgacgacggctaggttacccgccggcgctacaaaggtgccacaccggaggggcggcgtgcgccggcgtgcgccggcgtgacgcggctacgcg

SEQ ID NO: 4974 - DNA, 386 bp, Homo sapiens
  source 1..386: mol_type = other DNA
ggagtaatcccaaaaaaagcgccgggccctttttttgttgttttttaaattcagtaactatctagttcattcttggatggatgacaacccaatgcaaataatatggcattaaatatcttcacacatagctttttgtgtatgtgtatacttatttctctagaattagattttaacatgtccaagttccaaccaaaccggatattatcagtttttttaaagggactgtccacatagctgtcaagtggcgtcaaagttggacactgtgccgggccttgcaatgctgggcaggcaggccttcctcgccaccagatcgctaggccacgccccgggggcggggcctgagttcaggccagagcggacgagcaccgagtcgagggctcgctcgt

SEQ ID NO: 4975 - DNA, 493 bp, Homo sapiens
  source 1..493: mol_type = other DNA
ctgcctggctgattagccagggggaattcaggctatactgaaggcaggacccctcttcaggaagtcctcctggggagcccacagctcctgggccttgcctgtttccctccaaggctgggggctggctgtcctgagctgagctggggccctgccctcggctgtgtgaggtctgacactgcggagtgggcactgccagtccttcccctctgggacgcgcagggcaggttgggacacgtggctggggcctgagtcagcctcaccaatgtgggtggagggggtacctgggacacgtcccctccttccttcccggtacagccaagggtggcacagctgcccccatttcactgtctcctggagtctgaaggcatggctgtggccctgaggcaggaccaggcatgtagctgccccacctgcccctccgctgatagcaccagcaggaaggaatgccatcccagcgagtggggcccagggacaacgtcacggtagtcccgcc

SEQ ID NO: 4976 - DNA, 341 bp, Homo sapiens
  source 1..341: mol_type = other DNA
aaagtattggaattataggtgtgaaccatagtgctcagccaatttgcacaattaggtgacagagggagaagcgtggagtttggagtcaagtctccaaatttcatcttccacatatgcaaaatggagacaatttactctaaatgtgatcttctgaccactaagaggcgcacttcggcggattggcttcgacttctggcggaagtaaattcctccctaaatttctacgtagtcccaaggataggtagaatacatttcctattcctagttattattgtctattaaaacatgtatactcagaatttttgcggcattatttatttaaaagacccaggggttacgac

SEQ ID NO: 4977 - DNA, 309 bp, Homo sapiens
  source 1..309: mol_type = other DNA
ataaagatttcttttatccttatcttatgagtgagaaaaacatagcttgaagccaggcttgtctggctctccagcagcctcctggctgttctgcagtcaatcctgactccatcccagattcattccccagatcctgtctggctcaggggcggccggcgctgcgctgtcagcagggcaagggctggggccggggccaagaccaccaagccaggcccaggcccgcccgcctcccgcggccgccacggccaaggcgtgagcacggggcggggcgggagtctggtgagcgcagcccgcgcagctggcgaggga

SEQ ID NO: 4978 - DNA, 405 bp, Homo sapiens
  source 1..405: mol_type = other DNA
tcatggagcggaagccgtctcttagttggcccagttaagctgagcctcagtttactcattggtaaaatgagggaactatcactaaagaactctaaagtgctaattagtattactttaagcttggtaccaacctcaggatagggcccattcccttctctggggcgcatcagagccccagaaccacacataggcagatgttgagtaggcaaagtcctccttccagaacagaggccgcgcgctgggacctggatgcagtgtctgggactccgcccttgcgccccgcgcctcggctcggccccgcccctgcgcgtagccccgcccctcgcggcgccgtgtggccacgcgtgcagtctcgcccccgcgcgcagccccgcccccagctcgccctccggccccgcccccagc

SEQ ID NO: 4979 - DNA, 283 bp, Homo sapiens
  source 1..283: mol_type = other DNA
gtgtcccagcacacatggcatgagctgttctggggcacatactggctgtaaagcaagcatattctcaatttcagaattcttaattcaagtagtcaactttctcactttattaacagaaatgcacatgcacatgtgtgcacatgcacggccccaggtgcacacatatacagtggcccaactgcaggctgcagggcgagggcaaggcggacagccctccccgcccccagcaggaccagctgctgctcctgccaaacaggtctgtggggctgcagtgtcacgtgtc

SEQ ID NO: 4980 - DNA, 640 bp, Homo sapiens
  source 1..640: mol_type = other DNA
tttgggacaggactggcacaaacgaggactgcgagacgcggcttgccaaggtctcatcgcccttcagtggcagagacagccttggagtcggccggcctcactccagggccagagccccgagagctccgcggctcgcgtgtctcagtgccgaaggcagaaaagccgcccgtaggctccgcgcggcgcgtgctccagcgcgggccaggaaggggccggcgccccgcgccccgccgggtgtgtgactttgccgcgagggcgcagccgagcggccgcgcctgatgctgctgttgccatggcgaccagcgcctcggcgattggtccggcgcggccgcactgggcgcggggggtgggggaggctccggcgcgcccgccccttctccggatgctgcgagagcaaacccggggcagccttcatccccgcgccccgcaccccggatggacgggagggtgggcccaggtagcagcgaggtggacgcccccgcccagcctggcgaccacggttactcgacgtcctcgctcgctcctgggcacggtgtgagcgcgcgctacgtgccagggccctccacagcccgctgctggcgccgccccccgctcccgccccagcctccctggaggagcccgccacccccgggaatgtgac

SEQ ID NO: 4981 - DNA, 466 bp, Homo sapiens
  source 1..466: mol_type = other DNA
gggagccgaggatggatgtgcgcttctcccctccacctcgctggctctgggccagttctcagccacacgtgcctcacagagggccttccccgtctgatggcagaagtttgggacaggactggcacaaacgaggactgcgagacgcggcttgccaaggtctcatcgcccttcagtggcagagacagccttggagtcggccggcctcactccagggccagagccccgagagctccgcggctcgcgtgtctcagtgccgaaggcagaaaagccgcccgtaggctccgcgcggcgcgtgctccagcgcgggccaggaaggggccggcgccccgcgccccgccgggtgtgtgactttgccgcgagggcgcagccgagcggccgcgcctgatgctgctgttgccatggcgaccagcgcctcggcgattggtccggcgcggccgcactgggcgcggggggtgggggaggctcc

SEQ ID NO: 4982 - DNA, 260 bp, Homo sapiens
  source 1..260: mol_type = other DNA
atatatagagtgagatttacctgcctcgcaagacatatgtatatgtatgtatatgtgccatatttcatatatacatatgtgtgtgcatgtatgtgtatgtgtgtgcatgtgtgccatgttttatatatatatatgcttgtttatgcataaaatttctctggtgttggaaaacaacaaataccctctgaggctgccggggcaggctcagcctatgcgggcctcgctgaagcccagtgcagcggcaccaagcagtcaggtgc

SEQ ID NO: 4983 - DNA, 495 bp, Homo sapiens
  source 1..495: mol_type = other DNA
agcggcaccaagcagtcaggtgcctgctgacgcatgccttcatgcaaaatgacctataggtaacctctaatggctgagggggagcgggccccgggccttcagcgcttccgagcccggggtccctcttctgggaagcatgggctgggacaaggcaggcgccgctgaccgtgggtccgggccagagcgcaaggtccaaagccggcggcttggctccaccgccaggggaccagggcgggatgcgtgctgcggggcgccccgggggctcccccttgggacttctagggtccaggggtccccgcgggcgcgccccaagccttctccctcagctccgggggcccgggcgcgcgcccatcccccagccccgcgtccctgcgcgagggccgggctgggggtggggtcgccgcgagctcggcccccagagttcccgcgctcaggcccaggaagcggcggccgccgacggccctcgccccgcccccgcgctcatcacctgctggc

SEQ ID NO: 4984 - DNA, 589 bp, Homo sapiens
  source 1..589: mol_type = other DNA
cagtacttcgcgccactatgctggcgggtggccgagtttgggtttaatccaggcccgaacctcagttccctcaagataaagttggggtgattatgaggctcagatgccatcatgcaatcatggcaggcacacgggggcccctcccttgtgccccgccctggcacacagccgcccccgcggagcccagggatcccagcccggcagtcctccgcggggacggctgggccgacagagaggcccattgtctccgtccttggggcctcctcctgggttgcagccccacggacaaccccagctgtcgcttgggcctggctcagcttaccccggcggtgagcgcaggctctgagagcctacatgtcgccgggagtgcttgtcccggagctgctcgcagactgggccgggggtgggctcgggtcggggacaggcggcagggccagagaaactcccccgcccctcgccgtttctacccagcttgggaagcgcaggaacaggacatacggtggtcgcgccccttccgcgaggccggggtgaaacccgcttggccctcccgccagggggcggagcttccgaaccaggcgggattccaccg

SEQ ID NO: 4985 - DNA, 605 bp, Homo sapiens
  source 1..605: mol_type = other DNA
gaggctcagatgccatcatgcaatcatggcaggcacacgggggcccctcccttgtgccccgccctggcacacagccgcccccgcggagcccagggatcccagcccggcagtcctccgcggggacggctgggccgacagagaggcccattgtctccgtccttggggcctcctcctgggttgcagccccacggacaaccccagctgtcgcttgggcctggctcagcttaccccggcggtgagcgcaggctctgagagcctacatgtcgccgggagtgcttgtcccggagctgctcgcagactgggccgggggtgggctcgggtcggggacaggcggcagggccagagaaactcccccgcccctcgccgtttctacccagcttgggaagcgcaggaacaggacatacggtggtcgcgccccttccgcgaggccggggtgaaacccgcttggccctcccgccagggggcggagcttccgaaccaggcgggattccaccgcgggcaggcttctgtgtcgcaacactggcggggcgggccaaatcggccagagctctgcccccagaggacgcggctaagcccgggggcgtgtcctgggctggccccacccg

SEQ ID NO: 4986 - DNA, 145 bp, Homo sapiens
  source 1..145: mol_type = other DNA
tacaatgttttcattttgtgattactaccaagaataactgtactgccactgggccgccagggtggaggagtctgccaggagccaccccactcccacctgctggcagacagcccggccgccctggagcgaactctgactgaatgcc

SEQ ID NO: 4987 - DNA, 592 bp, Homo sapiens
  source 1..592: mol_type = other DNA
ggacgcggctaagcccgggggcgtgtcctgggctggccccacccgcgccccgccccgccccgcccggtcgcggagctgcggccagctttgggagggccggccccgggatgtgagtgccgcggggcgagggcgggggtgggctcccaggggtcccggtgggcgggcgcgctagggcgagggcggggacggccgggcgggcgcgccaggtaagagggacgctcgggacgggtgtttccaggccctcccggcgcgccaggccagccccgcgcccctgctcggtggcccgagggacgcgcgccggccgcgggcctgggcccggacccggagcggtcgggcgatgtgcgcgggtctgacgtctgcgctgcccagccccctggctacgcggacgcccccacggaggcagccactggggcggatttctgtctagcagcgcagcggggtcaggggatccccgccccccgccctggctcaggttgggtcccgacttcagccgaagccttgtgccacacagctgtgggaggccttgcagccagacacacctgagtgcacgcctgcttcttgtgaccagggagctgctttctgccgaggctgc

SEQ ID NO: 4988 - DNA, 158 bp, Homo sapiens
  source 1..158: mol_type = other DNA
ccacccctgagggtgtcagtgactgctgtggtctgccctatggggctgcgccctaagctgcagggccttgagtgccaggctcagctgggaatccagagctctcaggccagagacaggagcgtcccctggggctaagcctgcagtcccgagggtctcag

SEQ ID NO: 4989 - DNA, 582 bp, Homo sapiens
  source 1..582: mol_type = other DNA
ctgctgtgcggccctgggcaggcagctgccctgccctgtgccttgcctcacccctgtcctgggctgcagggagacccctgggggtgggggtgaggtggtgaccaccagcaccccgggggtcaccctgttccaaagctgggggctcagtaccgtctgcccaggcacatgcagcagcagtggggctgcaggcaggcccgggaggcagggcctggcctctgggcaggggcccctcagccctcacaatgtgcccaaggctgctgggcccatcttccaggggtgatcactgaggctcaggctggctgaggtggccggaccccaacccctggccctgccctgtgggcagcagtgccaggtctggcacgggcgcagggagggtgcgggctccgcagcgagcgcgccgggcggcctctaggagccgggtcagcgagtctgggctctgagcgagcggcgccggcccggccccctctccggcgggcggccgagaccccgccccggaggcggaggcggagtcaggggagggggccgggggccggctggtcccgcctctcgcgcctccgccccgccccgcgcgcacacagccag

SEQ ID NO: 4990 - DNA, 745 bp, Homo sapiens
  source 1..745: mol_type = other DNA
ccggaggcgcaggcgcagccgctcctagagactgggcaacccccaggtggcaggcgggaccggtccgtcagggagaggtgtacaccaaagaagggtgttagccccctcgggtcggccagggcactcaccgggagcgaggccgaggtgcaccacccgccgcgtccgcctggtgacgccgcgagcgcgctctgagcggccagctgcgcccctcacgctcccgcggctcaggcgccccactgctgttccgcgcggggcaactgggcctcagcccgactcagtctgtcggctaacagcaggatcccagaggaggctgcccaacctgggcaccccctgccgccactcgggagtaggagcccgtcgctccgcgaaagggggcgccctcccctgaagctggggttggggaactggggtgtgccctgtcagccccagctccctgttccgggctggagggagcagggcagcagaccaaggcactaggcctctcggccgagtctggccactcgccctgcaatctgcaagttagtgacgggtggggggcgagcgggctcctaccgcctccaaccgggctgtgctccccagcctgccacctgcaccccggagcagggagggggcccccgggagcgcgcatggaaaggcgcgagcgcgcgccttgtgcaggcggccctgtcccgcgggcgcaggggcgctgggcgggcgctccggggaggcgggcagggaggggcgggggctggaggcagcagcgccc

SEQ ID NO: 4991 - DNA, 566 bp, Homo sapiens
  source 1..566: mol_type = other DNA
agactcggtttacagagactccctagggcggagagctctctgcccgcctggacagccctgtctgtccattgctggacagctccacttgggccaagggactggcgccctctctgaggtcgcgtccagctctcatatccgagtccgcctccgcacgaacgccgaggacgaggcacggaggagctccaggcggcgcggggccccagggcgacggggaagcctgggtgtggcccggctggcccggggatactcacattcgcggccatggtgggacccggctcgctgccgccgcctggagcgtggtgtccagcggcctcttgccagctccgcgtggactccagggccaagcgggacttactgcagttacctccccctgtgcccagtgtttctgcgcatgcgcgcggcgagacgtcctggaaactatacggtccgggacattgcagtacctcattgatgccctggagagctgtcgaggagcgcgcgacctgctggggcctggccgcggttgcgagggcgccgaggcaggcgcgcggcgggcaggcctgggagggggcgggtccgcgcgggct

SEQ ID NO: 4992 - DNA, 549 bp, Homo sapiens
  source 1..549: mol_type = other DNA
ggaacagccctcagccaggcctcctccaaccaaatccttgctagggggaggaggggccccgaagactcggtttacagagactccctagggcggagagctctctgcccgcctggacagccctgtctgtccattgctggacagctccacttgggccaagggactggcgccctctctgaggtcgcgtccagctctcatatccgagtccgcctccgcacgaacgccgaggacgaggcacggaggagctccaggcggcgcggggccccagggcgacggggaagcctgggtgtggcccggctggcccggggatactcacattcgcggccatggtgggacccggctcgctgccgccgcctggagcgtggtgtccagcggcctcttgccagctccgcgtggactccagggccaagcgggacttactgcagttacctccccctgtgcccagtgtttctgcgcatgcgcgcggcgagacgtcctggaaactatacggtccgggacattgcagtacctcattgatgccctggagagctgtcgaggagcgcgcgacctgct

SEQ ID NO: 4993 - DNA, 626 bp, Homo sapiens
  source 1..626: mol_type = other DNA
tttgggacgcgccttttaaaggcgcgtgctagtgataattaaccaccaacacgcaacgtgctcggcacttcggcccctctgaggtcagggttcgggcttcactgtgaccccccagccggcccgcctccgagtgtcccagggtgggcacctgggccgcgcctcaggtggcccgcgcccggcgtggtcgcggggcgccggggcccgcgtgtctcccgcaggccctcgtaggccggtctccgtggcagcccgccctccctaccttcctgccggcaataggacatggctgcagcccgtccctgagaccttgcagaagcggcggtggcggcagctgcacctttacgccgctcctctggcagggcgggctcctccgaagcccgcgcggacccgccccctcccaggcctgcccgccgcgcgcctgcctcggcgccctcgcaaccgcggccaggccccagcaggtcgcgcgctcctcgacagctctccagggcatcaatgaggtactgcaatgtcccggaccgtatagtttccaggacgtctcgccgcgcgcatgcgcagaaacactgggcacagggggaggtaactgcagtaagtcccgcttggccctggagtccacgcggagctggcaagag

SEQ ID NO: 4994 - DNA, 354 bp, Homo sapiens
  source 1..354: mol_type = other DNA
ttgccagtaagcagctttggtgggcagcagcagctcatgaatggcaagctgacagcttctcctgctggtgaagggcggccgttagtcattactgctgagtcctgggtcaccagctctgtgacctggagaaaagctggacatatacttttctgaaataagatttaaaaacaaaacaaaaacttaatatttcagactgttacaggaaacaccctttagtctgtcagttgaattcagagcactgaaatctcagtgtcactgagaagctttacaatggatgcttttgaaacaagtatcagcaaaaggatttgttggagaaagcacttatggtttaaaagattggaagctttatactaa

SEQ ID NO: 4995 - DNA, 346 bp, Homo sapiens
  source 1..346: mol_type = other DNA
tctgtgacctggagaaaagctggacatatacttttctgaaataagatttaaaaacaaaacaaaaacttaatatttcagactgttacaggaaacaccctttagtctgtcagttgaattcagagcactgaaatctcagtgtcactgagaagctttacaatggatgcttttgaaacaagtatcagcaaaaggatttgttggagaaagcacttatggtttaaaagattggaagctttatactaaatgggctccttcatggtgacgccccgtcaaccacttttaaagataaagtatgttgtaaccaggatgtcttaaatgattctttgagtaattcctttagcaattaagt

SEQ ID NO: 4996 - DNA, 308 bp, Homo sapiens
  source 1..308: mol_type = other DNA
cctctctgaggaggtcagatttcagtcctggaagtcttacatatttatatttacttttatctgttctcctcgcaaatataagctccaagtaatggcaaggatctctttatctgctgaatgaataaataattgttgcgctcactaatgataacaacggcacgactggccatttttcctgagtctggaaaaagcagcctagtacaagaagctccttcgagcgacctaaatagagattaggggcgtgactaggcctccaacgaaggggcgtggccaagcgcaccgcctcggggcggggccggcgttctagc

SEQ ID NO: 4997 - DNA, 386 bp, Homo sapiens
  source 1..386: mol_type = other DNA
tgctttataacaacatgagttctgcattgcccatgacaaatgtaaggtgggatcccactgtggaactctgggtgagactcatacgcaggagcttggatcgggcgaagctcgcgggcggggacagcggggagggccggccgcagcctgccgggctgcccccacggcgcggaacgcgcgcagcaacctgggcctcctccgcccaccggcggcgtctcccgcgaagcccgctgggctcgcgtccccgcggctccccgccggccgcgcgtttccgagccatcgagtgacgcacccggccgcgatgcgctagaacgccggccccgccccgaggcggtgcgcttggccacgccccttcgttggaggcctagtcacgcccctaatctctattt

SEQ ID NO: 4998 - DNA, 537 bp, Homo sapiens
  source 1..537: mol_type = other DNA
atggtggaaggatcggctctctcctccccgcctcccaggtgcagagagagagagagacgtttccctctcatgctgccagggcggggcagtggaggagacaagcgcaattgagtcacttgcccagggtcacacagccatggcaaggccaggattctggagctctgtacctggcttcacgagtctcccagaacgtggacgatcgcccagggcaacgcagtggagtgcgagcccggtctggtttgcacctggctgctccaggagccctgggcctcatcctagactaggcgggtcgggtcgggtctgtcctgctcttcttccgcaggcaggaggcgcccagggcgggctgccgcacctggcaacgaacgttcgccgcgcggcatgagggtgtgcgcgcgcgctcggcgagcccgggttctttgtgtgtccgagcccatgcgcgcgtgcgtgtttgcccgcacttggggcggggctggaagccccggccccgccccggccccgcccccggcccggccgagctggtaacccagcaggatgggt

SEQ ID NO: 4999 - DNA, 483 bp, Homo sapiens
  source 1..483: mol_type = other DNA
tgtgcagttgtacaggttgttgacatccactctgaccctcagttggtgccagcacacactggtgggatggagggcaggggaaattgggtgcagcctgccaccccttctcacagacgaggagcaaggctaaggcccagctgggtctgggacggggcagagcctgccaggtgtggctggagcctgtgaccaactggccctgcctatcaagcccagaggcgggcacccagctcacttggaagctgggtggccactccacgtggccccattttaccgagggaaaactgatcttggaatctgagttagaagcaggctctctctctgcctgagagccctgggggaagccccaggcatcccctgtccagacccaggctgcaggggtggggcatgttggaccctgtcctggagccaggcagagagccgcccgctgcagtgggtggactcggtgcccagccagtgggagctgtgagcttccctcccacagcc

SEQ ID NO: 5000 - DNA, 197 bp, Homo sapiens
  source 1..197: mol_type = other DNA
cattaggtaaataaaattatatccccctttaagtaacttgggtcaggctggtgcgcccggcccaggagttcacgttcttaagagctgaaatatgtaaagtggcccataataagcactacattaatgttagctattattcttgttatttctactaagattaatataataatccttatctcgttggtgaacgtaatacg

SEQ ID NO: 5001 - DNA, 571 bp, Homo sapiens
  source 1..571: mol_type = other DNA
aaatctgacttctgaagataggcgttagcctctgaaatcagatgagctcagctgcctcagcctggtggagggaatcattattatctgcctccttcccaggacagagctgagggctcctctggagggtcctggcactcactcaattgattgatttttttcagtaacttatcacccatttactcacttattaatttactcattgataaaggcactaattcattcattcattcactctcccattcactgattcattcattcactcacttattcacatattcattcattcactaattcgtggtgaagcgagggtgcgagacggctggggcgccttcgggctcccctccagccgccgccatcccgcccccggcgcccgggaaagcgcgcgctcgaaaagcgtagctgctcagccgcgggctcgggagccggagcggagcgcctggcggccgccccggcacccccaccctcggcggccgtccatgcccgcggctccctgggcccgcggccctccccagcgctgcgctgcgccgccctgcccggcgggggcggggccggggccgggctggcgaggccg

SEQ ID NO: 5002 - DNA, 596 bp, Homo sapiens
  source 1..596: mol_type = other DNA
aaaaaaaaaaaaataagcccagagtgtcattttcaattttctagcaaccatatttaaaaagtgaaattataacatattttatttaactcagcatatccaaaatatttcaatatgtactcaatatatgcaaattattagtgagatctaaaattattcttcacactaagaattcaaaactcactgtgtattacttgatctgtatttagattttgtaaaatatgcagttgaaaaacacaaattcatagttaaacatagtaaagtttttcagtaactgaattgaacatcaagtttgaaaaaataaattcaggtgctcaaagggcccatgcatctagtgctgctgtcctggacagagcggctctaagtggtccgactatacataatcctcccattagtaactaaagtattggccaataaatttttcccaggcatacattaatggccatgtttaacttgggagcaagtctaagcaaaatgctttagatcaaaaattgccttgaattatttacgttcttggctcaataaatcattttatttgctgcagaaaagaacattcaaagctcaagtgcagcccacagggaggttttcagctgaccttg

SEQ ID NO: 5003 - DNA, 310 bp, Homo sapiens
  source 1..310: mol_type = other DNA
agcataaactgctttaaacagagtgagaaagatattccttcccatctgctcaggtggctgcctggagtgcagtggcacagcactgctctcaccatgttgcccaaactggtgctagaatttaacaatgtaagtaattggaagtttcctttttaaatacacctaagttgaaaatgtggatggatttagtgaaagatattcaacaaataagacgtggcaaacatccttaagatgatgtatatatctctgggatccagtccactggggggcgtctctgcactggccagacccgtcccgcttgcagggtttggat

SEQ ID NO: 5004 - DNA, 534 bp, Homo sapiens
  source 1..534: mol_type = other DNA
ggtgtctgtgtggacaagcagactgactgggaggtggagactcctccacctggcaggtctgagcgccaggcaggtaccaaggaaaggcttctcattaactgggtctcccttccactcagggaggttctcaaacctggagggtttgataaaacacggggtttctgattcacagaatggcggcgccatctgagagccatcgctcagcaagacttgttccgtgctcagcgcagaggctggcgcggcactgctgagttctcgtccttcgaacccccagcgcctcccgcggtgcccatggccacggcccctttaaatgtgcgcagggacgccccggccctcgcctccctgaatccttcctcttcgggagcggggaggcgcggctgcggcgcaggcagaggcgcaggcggaggcacggcggccagagcgcagcgcgcccggagccgggagcggacgcgacgcccggcgctgccccagccgccgcccccgcgctcgcgccctcccccgccccgcgcccccgcccggcggccccgccccgga

SEQ ID NO: 5005 - DNA, 530 bp, Homo sapiens
  source 1..530: mol_type = other DNA
aaagatactttttaaactccatattttgagtcaggagaaatttaggagttaacttgctgaagtattttgagtgcttactgattggcagaaagaaatcactcatacacctaaactataagttgcatgtatgtttatgcaatagaaatgaagtggctttacaacccttttcctttataaggggctctcagccatcaaataaggcctgccatggctgagaaaatagccaaattcttatgacctctttattctttttatcaacaggatttacatcattattgcagaaaacttacactaacatttccatgtaagggaatgtttaaaaacatagagctctcccagttgttgaacaaaatgaaagcaaagttgggttttcagtgtgctggatctaactggatgtttaaattttcattttcttgtcaaagtagtacatatacatacatttaaaagttgaccaataaatattaggcttaaagcagaaaacagcaggttttatttaacttcatgctttaaaaaatgtccttaccccacta

SEQ ID NO: 5006 - DNA, 592 bp, Homo sapiens
  source 1..592: mol_type = other DNA
gttaacccatccattctggagtcaatatttattcttaataagcaagaaaactgaagaaaaaaaagatctacagcctgtagcctaaacacttcagggcataatttcttcaaataaatttaagcaatgctgctaaaagctgctttacacctacttccaaatttgatctggatcgtatgtttactaagaaaccaaaaattataggttctatggtacagacgctctgctgagcggctgggagaatccgtcgcgccagtcagggcccgggccttccagaagccttggctaagcggcagggtggaggccgccactgcgaggacggtccccacccagctgcgaggagctcgcggttccccagaggggcgggcctgcgtccgggtaaccgtgcgcgacgtccacgacgaccagcccttcagcctctaggctccgcccgcccggccgcggccaaggccggcggcagctacgtagccgccgccgcccggggccccacagcccacgggccggatggaccgagcgccggctgcggcgttccggtgcgcgcgcgcgcctcagccaatcgcgttctcgcccgccccccgccgcggcggcgaggctg

SEQ ID NO: 5007 - DNA, 466 bp, Homo sapiens
  source 1..466: mol_type = other DNA
tagaattctaaatctggcaaatcactcttcaaaatacctttcagatcaagagtacttcagaaatgtatctgctggagtgcagtggcgcgatctcggctcactgcaacttcccgggttcgagcgatccacctcagtcttctgagtagctgggaccacaggtgctgccaccacatgggtttacaggcgggagccaccgcgcctggccatagtttgtttacgaaaaaattgaggtcctgagttaagtggctgaatttaggaaggaatgaagtttcaacgtcagaaagtgcagtttgaactcttcatgataacgttatcagctgacttggtatttttagcctatgtaaaaatattttcccgtgggtggtctcgccgcgccgggtcgaaggccgcctacaagtcccagagtgctccgcggcgtgcgctgcccgccgggaagcgtctcctgtgcgtctgcgcgggaaagatc

SEQ ID NO: 5008 - DNA, 261 bp, Homo sapiens
  source 1..261: mol_type = other DNA
cttacactgtgaagcggagactatcattatcatccccattttacttctgtaaaagggggccagaccccgtggtacccatgccttttgaaaatgccatcttttccacaggcttggccatgctgtacaccccggggtgtacaaggcggtgcagagccattggctggctttgaaagcgcctgcgcagaagccgccggcccgccaagactcggcgctcgacaggcgtctaccagcttgtcttccggtttcgtcgccgccgcaggc

SEQ ID NO: 5009 - DNA, 643 bp, Homo sapiens
  source 1..643: mol_type = other DNA
gaaattagagtcccattttaaatgcaggccaaatgactaaaaatttagagtataattaaaaaattaaaagtacacacttaaaatgtagtttgataagttttgacaaacgtatatatttttacaccaccattgagatataaaacatttatagatggaattatacattatgtactcaattcttacttcatgaatttggtggtgcccatcactaattcatttttattactgctgacttcagaagacataaatcaaataatcacctaattaagtatttaattacaacagcatcaagttaacctaagggtaagtacaagtggaaatacattaccttgtttgttaacaattcaatcaatacgaagagtgactctaaagaacctctgtcctccacttaacagaggaaaggatcccgccaccgccacgcataaggcggtgtgtgggcagctcggacgtggcacctgccctcagctgctcaatcccgggcgccgcgacggtcacgtgcacagcggcaggcctttttgccccgcccccgcggcccggctcctgcgtgggcccggccccgcccacagcccgcgcagtcccgcgagcctggcctcggcggccccagcttctaaggagctcgtgagggccaggctgcgcctgcgtc

SEQ ID NO: 5010 - DNA, 512 bp, Homo sapiens
  source 1..512: mol_type = other DNA
tgcctggccctaacatagttattcttgtgtgggccaaagaatgttaaatacagaaattgagagtaagactttagattttttttttttttttagaaactagaaaaatgtaccctcagatgttaccagttgttgtctgaaatatttacaatgaccatctgttataattttaaaaaaaaaaaaaagtctttataagccaaataaatgaatttctctggaaggaatttgaaaagtgctataaaggcactttaggatcttctacaggtcatatatatgcttatttagaaaatacaataaatcaagatataatggaaaacattccaaatattaagaatatttagatatttgaacttagttactctgtgtatttctaaatcaataaatgtgggcacgtataggttcttgcacaactttagcaaaatgctattagtggccaaaacatgttctggccattggctagaacatagaaataaatattgacaatcctaggcgtttcttccttttaagctacaaat

SEQ ID NO: 5011 - DNA, 385 bp, Homo sapiens
  source 1..385: mol_type = other DNA
atctcaaagagctgggattacagtgccagacccagtgataggttctcagaaagaagctcctttctcaagcaacgatgggctacaggcctccgtgtaggacatgtgcagacgtgagcccctgacatcacagtggtcataaaagcacacacacgtgcctcttcagtttggcctcactaattcataaattcttggccagagtgtgcccatcaacaagaggccgcagccttcggcaatgcatcagtgcacggaacctccgccattcccaagggtcctgagggccagggtcactgagcgtaggcttcagaaggcgacttcacgagcctcggaggaggccggggcgggacgggggcggagcgggcgctgcgctgactgccgcggcagaaag

SEQ ID NO: 5012 - DNA, 412 bp, Homo sapiens
  source 1..412: mol_type = other DNA
agtcagctgcttgctcaagtcaaaattttaattgcaagttttgttggagctaatttccaaatataacctaaatcaaagccacgtctctcactagggcccctgggactcactgaagcaaatatactgactgtgtcattctttgaattatcacttttataataactgtaaaaacttattataaaacctattataaaggctccatctctattttttaaaaataaaaaataaaaattaaaaagcaaatattaatccattctcacactgtcagttctgcattgctggggaggcctcaggaagaagcaggcaccttcttcacaggactatcagatcttgtgagaactcattcattatcacgagaacaggatggaggaaactgcccccatgatccaattcaagatgagatttgggtggg

SEQ ID NO: 5013 - DNA, 341 bp, Homo sapiens
  source 1..341: mol_type = other DNA
tcataacaaacaagaagcgtcttttaaatgtgggtggaaggaggcccgcggccgcttctcgaagctctccccgagcctcaggcaatgttcctcgcggtccagcagcgggtttgcggtcccattcatggccccgcacctgcctcgcacccagatcggcgctctcccggtgcagccgcgatccgagcttctggcgctggcgtctgggaggactgtgcttccgggccaccgctctggaagacaaggagagccgagccggcacccacccgggtccagaagcaagttctctcctctgcgtgggggtgaaggccgtgggacttccggcgtcgggtaggaacttccgg

SEQ ID NO: 5014 - DNA, 361 bp, Homo sapiens
  source 1..361: mol_type = other DNA
ccagatgagtcaactattacaataaatcgatttagtttacgaaaaagttgcgaagaaaatattcctcaattttcggtgcccgcgaaagggggaccggggaaatgaagctaagcctgggtgggctcatttcctgatcacactgtcataggaaccagagggagcgtcactttgcagggactgagaccctcgcaccggctcaggaccctcaggatagactaggctgcatgggcccctagaccctgaggaggggtccatgatggctagccggccaggcgcactcaccccacagccagccccactgggcctcggaggcagaaattcggggaacccggaagttcctacccgacgccggaagtcccac

SEQ ID NO: 5015 - DNA, 534 bp, Homo sapiens
  source 1..534: mol_type = other DNA
aggggcaggatgccgcatccagtaactagcagactgtttctgagttaactcctatgaggcatgtaatatgtaaattaaagcaaaatgaacaactctgtgaattattattttgttttagtcatctaatcatctctataacaggcttttataaactcataaaaggtattaagaatgtgataatttttatttgaataattttgtctagccaaagattaagttagtgatgttatttttctgaatatagtttgataaaaatcattcacttttctatacttttttgaatcaaaaggttgcagcttttggagagagaaacactttttcacagagaaagctgtttggaaatataaactacttccttcctcctttttattggatgattaaagaaaaaaattaaaagttaactttacatttgttacacaatgggtaaaaatgtcacaggccagtttgccaaaaaagaaaattttgacatcttaattttaatgtgggcatttgatatggagcttgagataaatataactctctgtagcatggaga

SEQ ID NO: 5016 - DNA, 463 bp, Homo sapiens
  source 1..463: mol_type = other DNA
ccttctaaagagaaggaatcatgattaggtgcttcagtaaataatcagggagccactgaagactcagataaatgagtgtgatgtctgagccttgttaatgaaaaggtttgcaatagtaggactactgattaaatcttgatcatctgatggtagttgataatgtagcctgtgctgtctagtatagtagccactaggcatgctgcaactgttgcaaattagatttaaattacttcaaattaaatgaaattaaaaatttagttcctcagtttagtcacaggtttaaaacatttctatcatcacagaaagttctactggacattgctatatagacaattataaatataggaagataaaagtatgcctttgagttcagctgaaatttttttaatgaagtatttcagagaatgactttttttctacaaggtttaagatttaaatttcatcaaattcacattatgagcaa

SEQ ID NO: 5017 - DNA, 402 bp, Homo sapiens
  source 1..402: mol_type = other DNA
attgcacattgcaaacgattttcacacaaaaatgttttaaaaggctatgaattatgaaacgccatagttcctaattttggagagaaaacagtgctctatactaccttgcttgtgacccaatggctgaatagtgggtaggtcaggatctcaggcacggtctggatctactgactctgagcgtgctacaataatttaaggactaacgacgcgcgccgggcttcccagctcccggcagcctttgcgcagccctccccaagtccaactgggcgcccggggcggggtctggaccgcacgcccttaccacaccccccctcagagtcccgcctccctctggcattctggcgcgcgaatggagcgtgtttacattctcacctctcccgggaagtggacgaatttagaccg

SEQ ID NO: 5018 - DNA, 304 bp, Homo sapiens
  source 1..304: mol_type = other DNA
tccattccatatacagtatagtggaatacgtgggttcaaaccctggctctgctactaccaggtcaccaaaggcaagtttggtgtaacaacagttaatattcaacagtgattgatatgatatatgtaaagtactatctgggtgtttgcaatgcatacctaccgctattgctgggcagcatatgtactccacatcctcgctgcgctctgcgaagttaggtactgcacctctgacggacggtctaaattcgtccacttcccgggagaggtgagaatgtaaacacgctccattcgcgcgccagaatgc

SEQ ID NO: 5019 - DNA, 402 bp, Homo sapiens
  source 1..402: mol_type = other DNA
gtttgaaaatgtctgggtttagaaaaatcctcaaaaaattaaaagttccactgtttattacaattggaaattttatgtttattgtcactgacattgcacattgcaaacgattttcacacaaaaatgttttaaaaggctatgaattatgaaacgccatagttcctaattttggagagaaaacagtgctctatactaccttgcttgtgacccaatggctgaatagtgggtaggtcaggatctcaggcacggtctggatctactgactctgagcgtgctacaataatttaaggactaacgacgcgcgccgggcttcccagctcccggcagcctttgcgcagccctccccaagtccaactgggcgcccggggcggggtctggaccgcacgcccttaccacaccccc

SEQ ID NO: 5020 - DNA, 461 bp, Homo sapiens
  source 1..461: mol_type = other DNA
agaaaaaagcctggctggggcttccacaacctgttcggctgcgaagacgacgccctacccggtctcggcctgcagcccccggggaggacagcagcgcttgccctggctgagggaggcgtccgcgctccacctccacgtgcccgccccggactccgcctaccacgcctgaggcggcagcgcctgggagccgggacacctggccgccctcccccggcccgcaccccgccccgcccgagccgcggccccgcgccccttgcggcttcctccgcatgcccctcccgtcgcggtaggcgggggggtcaccagcgagcgcggcggcgtggccaatgggcgctcggcttactctggcctctcccccgcgcggccgccaatcgcggcgggcggtggtggatgccgccgctgccgcgggctggaacggcgcggccgcgggggctgccaggcggccctcagaggaggaggcg

SEQ ID NO: 5021 - DNA, 446 bp, Homo sapiens
  source 1..446: mol_type = other DNA
gcaggatgagggagtcattcctcttctcctccatccaaggatgctatttattagaaatcctttaagaaaattgataagcctggctggggcttccacaacctgttcggctgcgaagacgacgccctacccggtctcggcctgcagcccccggggaggacagcagcgcttgccctggctgagggaggcgtccgcgctccacctccacgtgcccgccccggactccgcctaccacgcctgaggcggcagcgcctgggagccgggacacctggccgccctcccccggcccgcaccccgccccgcccgagccgcggccccgcgccccttgcggcttcctccgcatgcccctcccgtcgcggtaggcgggggggtcaccagcgagcgcggcggcgtggccaatgggcgctcggcttactctggcctctcccccgcgcggccgccaatcgcgg

SEQ ID NO: 5022 - DNA, 257 bp, Homo sapiens
  source 1..257: mol_type = other DNA
agctgtctagaggacatctcgaatgtcactattcttccaactactcagaacaaaataattcatcagcaaatcctataggttcttccttaaagtatcccctctcactcagaggaaaaccagggggtgtcctgcatccatgccggctggatagttttaattgtatctgtcactagaatgcaagctccatgagacacacatttttgtctgtgttcaaggcacatagcatgtgttcattaattatgagctttatagggaaa

SEQ ID NO: 5023 - DNA, 359 bp, Homo sapiens
  source 1..359: mol_type = other DNA
ccagggggtgtcctgcatccatgccggctggatagttttaattgtatctgtcactagaatgcaagctccatgagacacacatttttgtctgtgttcaaggcacatagcatgtgttcattaattatgagctttatagggaaagagcatgccactcctcttccagcgtcccccttggtggccagggcagagcagaagaagggacttgcaagatcatctcccttagctccctcattttcaggaggccagggacagtggtggagagtccaacctagtttgcctgatcccccatgggactgcagccacagcctttctgaatcagagggtattagtctttccaggagtgacgcgaaaggaaacca

SEQ ID NO: 5024 - DNA, 484 bp, Homo sapiens
  source 1..484: mol_type = other DNA
ttcccaataataaaaggtgatgttattactattactaaaaatcatcgtcgttaataatgttaaatccctgccttccaggtcgccctggggggaggtcgaggaggctaagctgctctcgcctccccaccccgcctttcccgagggccgggaggctgctacctagcacctgctgcagccttcagcgggctatttaaggcgttaaagttgcaggcgcctggaatactccgcggtagcgcgggcgagccccacattctattggtcgctgccgcccaagcgccggaagggctagtccttgcccggcgcgacctgatgatgccgagcccaggccggttccggcgaagttaaaccctcggagctggcctcggactgctggggcgttaccccttcggccacccccgcatgacgaggtggaaatcgaggacttccaatatgacgaggactcggagacgtatttctatccctgcccatgtggagataacttctc

SEQ ID NO: 5025 - DNA, 442 bp, Homo sapiens
  source 1..442: mol_type = other DNA
tctttcacaacgaaaaaactggtactcacataagtaatttgttcttacctcagtttaaagattaataaaatggaataacatgtaaactcctagagttgacaattccacttagtgcaataacatacttcccaataataaaaggtgatgttattactattactaaaaatcatcgtcgttaataatgttaaatccctgccttccaggtcgccctggggggaggtcgaggaggctaagctgctctcgcctccccaccccgcctttcccgagggccgggaggctgctacctagcacctgctgcagccttcagcgggctatttaaggcgttaaagttgcaggcgcctggaatactccgcggtagcgcgggcgagccccacattctattggtcgctgccgcccaagcgccggaagggctagtccttgcccggcgcgacctgatgatgcc

SEQ ID NO: 5026 - DNA, 402 bp, Homo sapiens
  source 1..402: mol_type = other DNA
agtctcttggtggcttgccttccccccaaggtgggtgagaaccccagtcattttcccctagaagcgtcacttaggggaaacacctaggcttcgaggttgggagggatcgggcagagagacagaggctctccgccaccctctccctgaccgagaagttatctccacatgggcagggatagaaatacgtctccgagtcctcgtcatattggaagtcctcgatttccacctcgtcatgcgggggtggccgaaggggtaacgccccagcagtccgaggccagctccgagggtttaacttcgccggaaccggcctgggctcggcatcatcaggtcgcgccgggcaaggactagcccttccggcgcttgggcggcagcgaccaatagaatgtggggctcgcccgcgct

SEQ ID NO: 5027 - DNA, 441 bp, Homo sapiens
  source 1..441: mol_type = other DNA
tctggggttaaaagatcatgtggagtacaatttttttttttttaatttgagtggagatggcagaaaaaaattatactagtgtgatcttttgagtataaaataaattcaacaaatgtttacttacctacaaggtgacacaatgattctcaaagtttgtttaagcacaccagacccattaagtcagtcttggtgttgtggtttggttctgtgtccccaccccacctacagttgacactacagaacaggtgtcaacagactcagcttaactggctgctggtgcctgctgtaaatatgatacctgcagttttagaacataacagctcttcagcagaactgagcatacagtcactgacgttgatggcattttttctaagtaaaaacaaacaaagcagcccttgatactgctgcaagaggccctatttccgcaaatttaagctcacc

SEQ ID NO: 5028 - DNA, 437 bp, Homo sapiens
  source 1..437: mol_type = other DNA
taaacaggaatccaaccctgattacgaagaaaatattttccagcctggtttactagcaagttgccacgcaaggtgattctcctctcaaacctctggacatcttaccaagggatggcattcagcagcacgtcgagaaatggaatgagcccctgacccctgggttctgaggctgccagggtcgcttgcagctcggccgcgtggaggtgaccgggcggaactccgagggggcgcggggagagctgggcgggcccaccgctccagcggctgctgtcaggggccgcgaggctttccctgaagatgcagtagccggcggacgcgcggcggcggcggcgggggcgcgtcggggctggagccggagcgcgccgggcgctgggcgcagcgagcgagagcgcggcggccgcgggctccggcgagggacagacgcaccgatcgccgga

SEQ ID NO: 5029 - DNA, 434 bp, Homo sapiens
  source 1..434: mol_type = other DNA
gcccaattagaaaatggagataattaattaaattatctcaccctttaaaataatgataatagctaagttatagagtggttagagcagttaagtcacttacccaatactaaagccaggaatccaaccctgattacgaagaaaatattttccagcctggtttactagcaagttgccacgcaaggtgattctcctctcaaacctctggacatcttaccaagggatggcattcagcagcacgtcgagaaatggaatgagcccctgacccctgggttctgaggctgccagggtcgcttgcagctcggccgcgtggaggtgaccgggcggaactccgagggggcgcggggagagctgggcgggcccaccgctccagcggctgctgtcaggggccgcgaggctttccctgaagatgcagtagccggcggacgcgcggcggc

SEQ ID NO: 5030 - DNA, 569 bp, Homo sapiens
  source 1..569: mol_type = other DNA
ttagattatcatttttgtaaactataccatacatttcagtatgcatactgagcgcggcgccttcctgggactgaggcaccggacctgcgcacacgcgctgcgtaccctacgcccccgccgcgtgggcgccgtcgtcccccgcagcccccccacgcagggggcggggcgctgccacccattggctgaggccgataccacgcgccccgatacccggcgcaggagccacctccctgagccccgcggaccacgcctcagtccgcctgcgctcctcagcctgacggtccgcctctcgaagccgcgcagcgggttccagcggaccagccccagaagtggtgcgccaagcacagcctctgctcctcctggagccggtcgggaactgctgcctgccgccatcatggtcgtcttcactcggggggcacctgcctggacgcaccacagccatggcccggcggcctggcagtggcgcggcctaaggtgggggtgggccccgaggacgcgctgcctcgccggccacgtgcaagggccacgcagaggtttggggtgcgggttccccacccccgactgcccca

SEQ ID NO: 5031 - DNA, 536 bp, Homo sapiens
  source 1..536: mol_type = other DNA
atattgaaaataaaacgttttattttaatcccgcattactaggtgttagttcaaaaagtaacattttaatgctttccgtcagtacagaagtgaagtttgcatagctacttagccctgcgtattctgaccttaagaatgttctagaattctctaggcaggcctagcgccttcctgtaaggcatgtaagataacacatgtacaggcactcagtaactatttcttgaaagaacaaattctatctcaaacttgacagaaaggagtgcaagttaaagtgatggcgctaaccctgtgccttagagaacattagattatcatttttgtaaactataccatacatttcagtatgcatactgagcgcggcgccttcctgggactgaggcaccggacctgcgcacacgcgctgcgtaccctacgcccccgccgcgtgggcgccgtcgtcccccgcagcccccccacgcagggggcggggcgctgccacccattggctgaggccgataccacgcgccccgatacccggcgcaggagccacctccctg

SEQ ID NO: 5032 - DNA, 436 bp, Homo sapiens
  source 1..436: mol_type = other DNA
atctgatttttttgttacaattacaaaaataattaactttaatttttacacttagatgcaatgaatttagtctctgctttgagtatattgaaaatagcccaaaaagcatcgctgtggttttactgaacagatggtctgatgacgtcagtgtctccaaattacctgcagaaattccttgaataaaatggcattcagtaatgcctctgccactaaaaaataatattgattctaaaaagagattattaattgtgtaaaagcgtatatttagctctggacacattgtattttgagagatttacattccatttttctctatgcaaagtgtcagctgcataaagtgatgtaactatagatcagccaatctgtgctggattatcttgagctcaagatctaaaatctgagtcagaatcatagagctttctgtttacaaatgaag

SEQ ID NO: 5033 - DNA, 628 bp, Homo sapiens
  source 1..628: mol_type = other DNA
ctcccgtccactcggctttgaggtccccgcggcccgatgacccggcctcggtgacagcagccgcgacggcggcaatctcgacagcgcagccggcgggtggggtgggtctgggctgccccctccgggagctgccccggggccgcacggcgattgtcatacccggccgcccctgcccgccgtgggcttcctctcggcgccgcgggccttaacggggctctgaggggacgtgacagagctcggcacgcggcagcctctggggagttagggtccggagagacccacgcgtcgccccccgcccgcccggggccgggagatcctcgggagccgcctccgcgtgtccagagagtgtcggggcggccgccacttcccctcgcccttcgccggaggtgggcgcctgggtgctccgaccccagttgctctgagccccggggaagcgcgccccgagcccctgacgtgggcgccccgttacctcggggtgggtgcctggggcccctgaggtgggcgcgggttgccccggggtgggcgcccggcccgcgcgggttgcgcccgcagaggggtgccgagagccggggctccgccggcgccggagctgactcgaggaggggccgcgcgcggcggcccgaggcgg

SEQ ID NO: 5034 - DNA, 239 bp, Homo sapiens
  source 1..239: mol_type = other DNA
ttataatcctttgggtatatacctagtacaatggttgaactggtttacagtcccaccaacagtgtaaaagtagatgagtagattgcaaaaattttctcctatggttttaggtctaacatttaagtctttaatccatcttgaattaatttttgtataaggtgatttattaaatagggaattgtttccccatttcttgtttttgtcatcaaagatttcagtttattagtggccaagggaca

SEQ ID NO: 5035 - DNA, 848 bp, Homo sapiens
  source 1..848: mol_type = other DNA
aatttttttcttaaagtgttataaaaataagtatctcaaatatagtgtagttaaaagttataataactattcatgatatctttgaatttatctcaaattaaataagttaggtgaaaattacatttataattgtatagaagtttgtaattttgaagcaaaaaacatttaccgaaattatcccaaagtttaggaagtccactaatttaaatttgaaaattcaaaacaatcttttgttaatgatttttatttacccttgtagataatttaaatgcaaaaataataacctatatctctttacatgtaaatgtcagtccaaaagatgactgaaaattaatgactttttttaaaaaaaaaaggtctttcttaaaattttagattagatctaatttttttgttaaaggatttttatacaaattatgagaatggcttaattataaaacaaagataatttaaattcagaatatttaatttaatataatttaaactcaaatatataattatgcataattatgacttctaattatataagtcataaccttttaagataatttttataattaggtgaaaacaaggcgctaatatttgcaatgtaatagtagagttaatccttaattgttgaaaaaagttgtctataacatggttatcgattatacttctataatacagtacatgatacattgtaagggtcaagcattcaagaaatacatgtttaaaagtaaaacttgattctaggagacaatcactgattaaacctaggaatttattagattagctttccttcaaatataaaatatgtgctctttcacaaaggtatacagttctggtttgaacagaaaaggttcaactct

SEQ ID NO: 5036 - DNA, 484 bp, Homo sapiens
  source 1..484: mol_type = other DNA
ttagtacgacttaagtttattcacacgtaagaagggcaaatcccgctccacaagtgaataccagttactcgttttagttacaggaattataatctgtgtttaaagttaacatcctgtaggtttttttcgaataataactttctggaaagagttcatttgtcaactctgaattggacaaaatcctaagattttaacatgcaggtttaaacctttataagtgttgtgctcttgcacaaaatacttaaagcaggaagcaataaataggtattgttgaaaaatgagcctttgctatcggtggcaaagaaattcatttatatattggtttttctttcatttgtaaacttgagcatttttaatttttacagctatctgcagtatcacagaacactcaaacctattgtgtgcaaataaataaagtgttgtatttatcaataaacatgttctttttaataactcacccagctttcagagtgagcaggctgag

SEQ ID NO: 5037 - DNA, 648 bp, Homo sapiens
  source 1..648: mol_type = other DNA
tttactaagtgaagcatttaccactctaattaacattatgatttaaaggcttttgggttaaaggggatcttaaatcatggataaaagttttagacattccctgttttagggagatactacaacactgaagaccaagtttctacaagtgactcctctaaagtaggcaggggtaagtttcgcctactcagccacagtgtggcatggaaggccatttacctgtgacaaggaaatgtaaattccttggcaggagagccaggatctcaggagagtccctgggaccctctgctccccttctggtggatgtgaacctctgactaagacccaggagctggttcccagcctccagccgcgcgccggttggaagcagggcaggcgcatgcgctcagcagcctgccggctcagccaaggagagctctgcccgcggctctctcgcgcctcgcgggccccagaaacccggacccgagagcgagcgcgttgcgctcgcgcgcagacttcaggtcccgtgcgggcgcctgcgcacgagcttcccaggcgcgcgggccgcgaggcggggagggcgcgcggcgggaggcggccgccgttacggcgcgagcgtggtcacgtggccgctggtcaccgccgccaccccctcccgccctgttctctttc

SEQ ID NO: 5038 - DNA, 484 bp, Homo sapiens
  source 1..484: mol_type = other DNA
tatacatatactaattatgaaaaagtgtctgtatacactaaatttaaatcctaaccacatctgagtttgctatagacagtaagaaattgtgtgtgtattaaattggaactgtctgatagaaaattcacaagtgtgagaatatcagaaatcctttagtctcatgacagataacactgaataagagcataagctcatcttctgttcttcctggtgaaacggagcagaacacaaatttctttccccgctgattttaaatctttgttaattatttacatcataatttgattcctctgctgatctctgataagtaagtgtcaaagaagctatatgtaggatccgggaccaccttgtttctttgcagcaacagcagcagcaacagcaacagcagcagcagcagcagcaggcaccgccgcctccacagccacagccggcaacccacggtggcctctccagcagaaaatttcagtggaagccttgggaatcc

SEQ ID NO: 5039 - DNA, 180 bp, Homo sapiens
  source 1..180: mol_type = other DNA
ggaggtggctgggggtgccttctgatcttcctcctcctccccagacgctcacagccccgcgtcaatgggcagggagaggctgtcccccgctagatgccctcgttgggggtggccttttttttaagagaagacattttacaaacccctatatgttggttttcgtttctgcccttcccccgc

SEQ ID NO: 5040 - DNA, 320 bp, Homo sapiens
  source 1..320: mol_type = other DNA
gcacccacagcggcagcggcggcggcggcggcagcagcagcaggagcagcggcggagagggctgcagcccgggcggacgcgcggagccgagcggggcacggcggcggcagcgacagcggccggggcgagagaagcagccccgtccggggactcgcgctccggccgccctctatcctgcccgggggcccagccgaaagccagggcggaggtggctgggggtgccttctgatcttcctcctcctccccagacgctcacagccccgcgtcaatgggcagggagaggctgtcccccgctagatgccctcgttgggggtggcctt

SEQ ID NO: 5041 - DNA, 291 bp, Homo sapiens
  source 1..291: mol_type = other DNA
aaattatttgaagaatgatggcatcttttcctttataataacaagtcaggtctctttcaagtgacccaaattttgttatggctcactagtacagaacgctcttacagttctcatagtttaaggaccaccctccttacacggggccggtgcccctgccgcccgcgcgccgcgcgctcccctccccgctccggcggacgctgccagggaagccctgcgccctccctggcgcgtctggcggcggccggcgctagccctcgcacagcgcctgcgcgcccggggccggaaatcgtg

SEQ ID NO: 5042 - DNA, 217 bp, Homo sapiens
  source 1..217: mol_type = other DNA
atggctcactagtacagaacgctcttacagttctcatagtttaaggaccaccctccttacacggggccggtgcccctgccgcccgcgcgccgcgcgctcccctccccgctccggcggacgctgccagggaagccctgcgccctccctggcgcgtctggcggcggccggcgctagccctcgcacagcgcctgcgcgcccggggccggaaatcgtgccg

SEQ ID NO: 5043 - DNA, 578 bp, Homo sapiens
  source 1..578: mol_type = other DNA
gtctatacacagttatagtcacatattactgacatcagggtagaatatggtcttaataacaacatataaatcaaatctgttacataaggttctccttcactacactgaagaaaaagtgtctactatagtaatttatatatcgttcctaaaggtaagtctatttaaacttgatgtcttcatagagtgtgatcaacacattaacacacattatttcatacttttgaacttatgccaatgatttttttaagtcttttttaagattagatatttcagagtaaatagatacagattgtgtgtgtatatattcagtagcatttcttcaacatattgcacttttacagttgttgcagtttgaaagttcagaagcgaaattctaataacctctttcaatggactttcaaggatgtaagttacaagagatgaaaattagttaactggtacctcaggatttatgtccgaagtggcttgtaatcaaaaattaaagaaaagatttcgctggataaaacatttaactgtgcaatattttattacagcacccctttcccccaggtgtgcaggaagtagaggggactctaccc

SEQ ID NO: 5044 - DNA, 597 bp, Homo sapiens
  source 1..597: mol_type = other DNA
aagcatacaccccacgcaggctgggttggggtgggggtgcttcggtgttgggggccccgggcagggttggcgggcgacgagaaccgcgccgcgcaccccaagcgcacccctcgaggctgtgcgccccctggcccgccccctccggcccgccgccccccacaccccggccggcgcgctgggagggagcccgggagcggtgcgcagcagcggcggcggcggcggcggctcgggctcggctcggctcgggcttcagtgcgcctagtgtcgccagcggccgccgaggctcccaccgccagggggagaagccgggcgggcgctggggaggcgggccgggccctggccgccccgctggccagcccgcgccgcacaagctccgaagcggcggctacgcggggtccgccgagcccccgggcgcagcgtgcccggtccgaagcgccacgtctggatgcgcgtcccgggtggctgcgggctcccgcgggggacgccccggccgctccggtgcgcctccagactgcaggcgccgcgaccgacgagacgagagcagctcccgccggccccttcccgcgcgctcgcgaaagaggacaacttgaagtcaag

SEQ ID NO: 5045 - DNA, 266 bp, Homo sapiens
  source 1..266: mol_type = other DNA
cctcctctctaaataaaattatttatggggacttaattttgcagttcatgccatgaacctaactacactaagaggaaaagtaaaaactatgttactatgttttatctttctgcaagtaaacagtagtaattttctgttgacatactcaatgcaaattcaagagagggcctcctcctccttccgccacgtgctcctcacttggggtgcagggctcctggacaaaagcatacaccccacgcaggctgggttggggtgggggtgcttcg

SEQ ID NO: 5046 - DNA, 308 bp, Homo sapiens
  source 1..308: mol_type = other DNA
aaagcagcatgaatacatgctgtattctcctttatttagaaaaagcacacaaaaatacagcagagttgatgtgtttgtcaccttttagactttccaggaacttccctgcaaacagtgctgtgcgctggcaggatggaaatcttagcaatttcctcctctctaaataaaattatttatggggacttaattttgcagttcatgccatgaacctaactacactaagaggaaaagtaaaaactatgttactatgttttatctttctgcaagtaaacagtagtaattttctgttgacatactcaatgcaaatt

SEQ ID NO: 5047 - DNA, 468 bp, Homo sapiens
  source 1..468: mol_type = other DNA
ctccccacagggctgtgccgcaggcttgggcgactttccccgcagaacgtccgagggagtccccgcggggggggccgtttttacttacgtggtattttgcaaattaataaaaatagcaaacttttctagaaatgctttattcacattttaccggagaatgggaaaccatccatttcaagccagtttcccggactaaaagaccctggtactggggagggcctcacaactaactcgggctgccctgcccctgtcgcgtgggctcgcaatggcaagtgctccggaagggggccgcctccccgtggggctcctggctgcctcgacaccactggggggcctccccctcctaagttctaggttgaggccggatacctgccccacccacgggactccagtctccccgggagtgggacgggctcccggggcgtgggagttgctcgctctcctttcccggcgtcccgtggagaccgg

SEQ ID NO: 5048 - DNA, 589 bp, Homo sapiens
  source 1..589: mol_type = other DNA
gtttttacttacgtggtattttgcaaattaataaaaatagcaaacttttctagaaatgctttattcacattttaccggagaatgggaaaccatccatttcaagccagtttcccggactaaaagaccctggtactggggagggcctcacaactaactcgggctgccctgcccctgtcgcgtgggctcgcaatggcaagtgctccggaagggggccgcctccccgtggggctcctggctgcctcgacaccactggggggcctccccctcctaagttctaggttgaggccggatacctgccccacccacgggactccagtctccccgggagtgggacgggctcccggggcgtgggagttgctcgctctcctttcccggcgtcccgtggagaccgggaggctcagcgcctctcccagctctcagcgccgccctcccagaccccagagacgtcggtcagggcgcggcgccccgggccactgcgggctctttccgggcgggcgacgtggggggcgaggcaccgcgcggcggcgcctggcgggcactgttgcccgcggaggggagcctgcgccgggctgagcctggaggtgcgggg

SEQ ID NO: 5049 - DNA, 287 bp, Homo sapiens
  source 1..287: mol_type = other DNA
gagaccagcctccagctacccggttgtgccactgcactccagccatctcaaaaaaaaaaaaaattactttaaatgtgatttaaagcctagttgttaaagtgtaagtgttctcaaggactttaagatgtctttatgccacagttgtcaaatataatatttctagaatttaaagtcattttttagcactaaaataactacaaaagtgttcatcaccagaaagtttatttgttcatcatcacctctaaaacgactgtgttgcttgcgtttcccaggtaacctgataaaca

SEQ ID NO: 5050 - DNA, 468 bp, Homo sapiens
  source 1..468: mol_type = other DNA
gccaggacggagaccaggcggaacctgagaagggaaagggtgacacccgtcgctccggtctccagagcccctggaggatgagtcaccagcagggccgcggacaggctggggaccgcggataacctggggtccaggcccccgctgcgcaggaggaggggcggttcggttacctgagaccgcagcaagccgagctgcggggccgaagcttcctggcagcaaggcccaggcgtggcggtggtggtggcggcggcggcgtcgcctgctcttagcgccgctcccctcacactggactgtgcggggctcgtgccgtggtgccgcccctgtcgggctcctcctcctccgccgccgccgccgccgccggcgctggagttccgcggagccacttccgctgcccggtgccggccccgccgccacgtcgctgcacgcagcgaactgcgccactttccctccccgcctaggtttgttcgc

SEQ ID NO: 5051 - DNA, 375 bp, Homo sapiens
  source 1..375: mol_type = other DNA
tcttgtgtctcaaattctttacctataaaacatctacaactagaagctgccaggcaaatgaaagactcgagtgtaagaattcaatgggataattcctgtaaagcgtttagtacagtaaaattctgaataaaaggcagacactattttaggatttggcgacttcttattgtcaggcgcctaaaggcggcttttggattagccgagatgccaggattggggttagggaaccaaaaaaacacaagttattttgatcttcccggccgccaggagcccgctgagtcgcaggcacgtgacatcctgcctcgccccgccccgcgaacaaacctaggcggggagggaaagtggcgcagttcgctgcgtgcagcgacgtggcgg

SEQ ID NO: 5052 - DNA, 410 bp, Homo sapiens
  source 1..410: mol_type = other DNA
ctcgagtgtaagaattcaatgggataattcctgtaaagcgtttagtacagtaaaattctgaataaaaggcagacactattttaggatttggcgacttcttattgtcaggcgcctaaaggcggcttttggattagccgagatgccaggattggggttagggaaccaaaaaaacacaagttattttgatcttcccggccgccaggagcccgctgagtcgcaggcacgtgacatcctgcctcgccccgccccgcgaacaaacctaggcggggagggaaagtggcgcagttcgctgcgtgcagcgacgtggcggcggggccggcaccgggcagcggaagtggctccgcggaactccagcgccggcggcggcggcggcggcggaggaggaggagcccgacaggggcggcaccacg

SEQ ID NO: 5053 - DNA, 605 bp, Homo sapiens
  source 1..605: mol_type = other DNA
tgataataagcacattatgaccggcacttctgaagggtcctgagaaaaagccctgggcttttaaaacctgcttaagaaggcggaaaacaacagttttcaacaagagttggaaacactgagttaaagtttgaggccaaaatcgatatttattcttttgaattatttgaaaactgttaacaaactttttgtattcaaactttttccactgcatagtttttgacaatgctttttagacaatctttcttttagcaaccagcactttcaaacaaaaattacagagaatagtaagtttttttcgaagaaagtgttaattatattaaaaaatagtttgacagaaagtatttaaaaagagaaaacatcacgtctttattttggtgaattagcaacaaagaaaaagattagcgggtacttttcaaaaatatattttttttcgttgtctctctgtcagagacagggtggaagagaggaggctgccccctcccactggtgcaggcgtgcgggggtcgggggaggtggccagcaggtgcctgggctccaggcccctacccccacccacccagggattggcctcgccccctggcgggcgagcggtaggtgccccggcc

SEQ ID NO: 5054 - DNA, 387 bp, Homo sapiens
  source 1..387: mol_type = other DNA
tccagagcagtaagatagtatatatatatatatatatatatatatatatactgtatatatatacacatatatatgtatatatgtgtatatatatatactgtctatatatatacactatatatatactgtctatgtatatatactgtctatatatatacatatatgtgtgtgtgtgtgtatatatatatatatatgcagagagagaaaaacgaacaattgtccagatagtggtaacattttcagcttgatatggtaaggtggtcgtgaccttcacacaacataaatagtaagacagtatatttaacaaatgctccttctttcagaaattccaaagtttacttcatacaacttgtgatgttattgcttcacagtccttctgaatcataa

SEQ ID NO: 5055 - DNA, 716 bp, Homo sapiens
  source 1..716: mol_type = other DNA
actgcatagtttttgacaatgctttttagacaatctttcttttagcaaccagcactttcaaacaaaaattacagagaatagtaagtttttttcgaagaaagtgttaattatattaaaaaatagtttgacagaaagtatttaaaaagagaaaacatcacgtctttattttggtgaattagcaacaaagaaaaagattagcgggtacttttcaaaaatatattttttttcgttgtctctctgtcagagacagggtggaagagaggaggctgccccctcccactggtgcaggcgtgcgggggtcgggggaggtggccagcaggtgcctgggctccaggcccctacccccacccacccagggattggcctcgccccctggcgggcgagcggtaggtgccccggccgtggggggcctcccagcgctggcagacaccgtgaggctggcagccgccggcacgcacacctagtccgcagtcccgaggaacatgtccgcagccagggcgcggagcagggcgtgtgctgtggcggcggcggcagcggcagcggagccgctagtcccctccctcctgggggagcagctgccgccgctgccgccgccgccaccaccatcagcgcgcggggcccggccagagcgagccgggcgagcggcgcgctagggggagggcgtggggggagggtctcgctctcccgactaccagagcccgagagggagaccctgg

SEQ ID NO: 5056 - DNA, 346 bp, Homo sapiens
  source 1..346: mol_type = other DNA
gttcttgacagaacagcattggcaaaagagaattttaaacaaaatatcttaaaggagtttgaaattcaccttaaatgcaatagggagccattgtaaagtttcctatttgatacttgttttgtaaaaatattaatctatgaagaatatataaataatcattaaggacgatttctcagctagaattttcaggtatctgcagtttaagctggctgaccgctttagtcccggcgggtcgccgagacccgaccgcaggctccgccccagggccaggtggatgcccggatgtgtgcgtcacgtgacgtcgcctggcggggcgggactctgcctgcgacggtgggtgcatcct

SEQ ID NO: 5057 - DNA, 270 bp, Homo sapiens
  source 1..270: mol_type = other DNA
gaggctttgctaagctttagtgtgctttctacctgcctactaagggaggcagcaaattcaccaagtactagctttctgggatgtgatcacttctaagtgtgaacctcttccttttattcctcttatatataaacatcacaaaaaataacaattgtctaattacacgttaatggcaagtggtgagagactgggctcgtcaaagcttcccgagagccatggttggtccaggcaggcagtcggagcacctcgtggagcggctgctaacccagg

SEQ ID NO: 5058 - DNA, 312 bp, Homo sapiens
  source 1..312: mol_type = other DNA
ctcagccgatattagaaattgttcatttgtgtgtcgtaactcaaaatatggttcttgaatcagcagcctctgtccagatctactggatcagaatcagaactgtaaccaaggttattcctgtgcaaagtaaccctcaggccgcgggcccctcccttcgcgcgggctcgctccccagcctggtgcacctgggctgacgccggctcgggactcgtgcggagcgccgcgagcgcggcggaggcagaggcgcgctgactgccacctccagcccgtgccggagggacagcacgcgctgcgcaacggagaccgttctcc

SEQ ID NO: 5059 - DNA, 378 bp, Homo sapiens
  source 1..378: mol_type = other DNA
aacggaacctaatgtggaccggctggtgcgcattctgggccagggcgagccaaaaggcagaagggccttcgtgcagactcaggcttagcctggaagaagtttccaggccaacgtgaagttggtaaaaggcctcctcgtcccactgccttggggtaacccctaacccccagccggcgttatgcgcgtgcccggcaaggtcccagagcccagtctgcgcgcgggcccaccccctctcccgaccggcggggcagcccgcccgggcgcgctcccgcccccgccccctcgcggccgcgcgccggaggaggaggggcggggggaggagggaggcgcgcggcgccgcatggccgacgtggggctcgcgctctcgcggtctctccc

SEQ ID NO: 5060 - DNA, 331 bp, Homo sapiens
  source 1..331: mol_type = other DNA
aaaaatggcttaatattttaaaaataatttggtcaatttagcgatctgcgatccccagatacatctaatgtaaaatgacacaaaaaattctaaatccagtctaattcagtagtatgtcaccctttgtatcactcttataaaaaaccacatcactttctataaaaagtgagtggaagaatctaatattgtacctgagcagaaaattcctagtttgggattttctcactagcagggaaagccctcgcccccttcccgggcgtccggaggaggcgctggggtgggtctcctgggtcttcctcgcgcacccccaggaggtgttgcagggggaggg

SEQ ID NO: 5061 - DNA, 579 bp, Homo sapiens
  source 1..579: mol_type = other DNA
accggctggtgcgcattctgggccagggcgagccaaaaggcagaagggccttcgtgcagactcaggcttagcctggaagaagtttccaggccaacgtgaagttggtaaaaggcctcctcgtcccactgccttggggtaacccctaacccccagccggcgttatgcgcgtgcccggcaaggtcccagagcccagtctgcgcgcgggcccaccccctctcccgaccggcggggcagcccgcccgggcgcgctcccgcccccgccccctcgcggccgcgcgccggaggaggaggggcggggggaggagggaggcgcgcggcgccgcatggccgacgtggggctcgcgctctcgcggtctctcccgggcgggcgcgcaggcacgcgcactcgcgggtgcgcgcgcggacggccgggcggcggcggctcccggaggtggtggcttcactttccaggactcaggggcagccacagcgacagccgcgggcagcagcctcaggagccggagctggaacggccgggggcggcggcagcggcggcgctgagggtgagtccgggcgggcgcgagcgcggcggggacaggc

SEQ ID NO: 5062 - DNA, 359 bp, Homo sapiens
  source 1..359: mol_type = other DNA
agagagctggcggtactgccagcagcgtgaaatcaaactgtgtattaaatatcatccgctttaagtacacaaccccagcacagagcggtgctcggcacgttttggtggggcgggtggctgcggcaggcggcgtccccaaccgctaggctgccttgggtcctccaggatccgggcccagctcgaattcgcgccggggaggagggagacctatctccgaggacgcagggtccccggacctacgcagcctacctgatggctgccgccagacggaaaggatctttccggtggaaagctgcggcctcccagagcgtcatgggacatgtagttccggcatcgcgcctggtggcggagttctgccg

SEQ ID NO: 5063 - DNA, 367 bp, Homo sapiens
  source 1..367: mol_type = other DNA
tagctgaggcaagagataatggtttgctctagaacataattttgctggcttcaggaacttgcagatttaccaaaacagtaaatattgcacatgtaaatatgtcttccacgtgacattttcagtaatgcgtttaaattgcgggcatcaatgcactttagcttttttcttttgatctaaaatttacattcaaggtgaaacgcccccgtctaaaatctgaaatataaatccaagaacataggtctacttaagctatgagattggatagtctgtgccctcagagaccgggcgcaagggttgagcaagcccgaaccagccggcccagccggggtcctgagaatcacccttgctcggcgccaagccaccgctt

SEQ ID NO: 5064 - DNA, 525 bp, Homo sapiens
  source 1..525: mol_type = other DNA
taagagataatgattgaaattaaagccacatgacttaaattaaagccaaattaggtcttggcaaaaacattctgctcttctgaaaaactgtggttctcatgttagcaaatttggcgccccgacccgcgacgccccgactccgcgaaggcctccctgggaggctggggaagcgtcgggggatctctcagcgcagctctggggcccagatttctgcgcccgtcgtgcggtggccagagagggacagcgcagcgcggagacgcggagacgcagagactccgcagggggagccgcggccgcggtacgcggccaccggctttggagcctctcgcggagagacagtcgccgacgctcgcttagccgccgagacctcgccgccccaggccgctcaggctcgaatcttgcggagcagggggcgggacaatagcggccgcggcgccccactcggcagaactccgccaccaggcgcgatgccggaactacatgtcccatgacgctctgggaggccgcagctttccaccggaaaga

SEQ ID NO: 5065 - DNA, 335 bp, Homo sapiens
  source 1..335: mol_type = other DNA
agtaatgcgtttaaattgcgggcatcaatgcactttagcttttttcttttgatctaaaatttacattcaaggtgaaacgcccccgtctaaaatctgaaatataaatccaagaacataggtctacttaagctatgagattggatagtctgtgccctcagagaccgggcgcaagggttgagcaagcccgaaccagccggcccagccggggtcctgagaatcacccttgctcggcgccaagccaccgcttctcccggccgggagcggcggggcggaggtcgccgcagcggccggccgagggcgggcggagggagggggtgtgtgcgcgggtcacatgg

SEQ ID NO: 5066 - DNA, 439 bp, Homo sapiens
  source 1..439: mol_type = other DNA
agtaatgcgtttaaattgcgggcatcaatgcactttagcttttttcttttgatctaaaatttacattcaaggtgaaacgcccccgtctaaaatctgaaatataaatccaagaacataggtctacttaagctatgagattggatagtctgtgccctcagagaccgggcgcaagggttgagcaagcccgaaccagccggcccagccggggtcctgagaatcacccttgctcggcgccaagccaccgcttctcccggccgggagcggcggggcggaggtcgccgcagcggccggccgagggcgggcggagggagggggtgtgtgcgcgggtcacatggtcgcggctgccctccccgtcagccgccctcgccgccgcggtgcgctggctgcaggaagccgccgcgccgccgcttttgttgtcagggacccagcgaggagcgcc

SEQ ID NO: 5067 - DNA, 789 bp, Homo sapiens
  source 1..789: mol_type = other DNA
ggagcgctgcggcacgggtcgggccggtcgggccgggcaaagaaggccgagcccaaacccgcacctatgcgcgcaggcaatcgggtgggtggacgcgcggccaccaaacccacagcaccgtaccaaccctgggagggcacggccgggattaggaggagggggagcgcccacacctggggaggcaggtgcggaggcggccggcccggggacctcgagtgcgtaggactcggggtcggggtcggggtcggcaagccgggcgctgtgagcgcgtcggagcgctggcccggagcctggcagggggcgtctgtaccggctgggcagcccggggcggtggcgatggctggcggcggcggcggggtgtgcgccaggaggccatttcctcgctgcgcccctggcggagccgggtttgcctgctcttggccgccgccgccaccgccgcgcaagtcggacagccgtgagggctggagggaccaggtcaccggttcgcagacgcggcgcggagcaggcgccccgggcccggagtaagacagcgcccgggaagcgggccggggcgggccgggcacgcgggggacccggagaggcggggactctggtgccccagccgcagtagcttcctacgcgagagaccggggaggtgcggcgcggccctggctgcggccgcctctcttcgccccaggactcgcgcgacgcccagtcgccggcgctccccgggaccccgccgccgggaggagggggcggaggagggtcttggccaaggaaggcgcacatcctcgggcgggcggccgtgac

SEQ ID NO: 5068 - DNA, 733 bp, Homo sapiens
  source 1..733: mol_type = other DNA
gtacgcgcctctcccacgatatgcataatggcggtgggggcgggggtgtcctccttaagggcaacccaggcacgtcccaaacttccattcgtggggtgagatggtcggaccaggagcgctgcggcacgggtcgggccggtcgggccgggcaaagaaggccgagcccaaacccgcacctatgcgcgcaggcaatcgggtgggtggacgcgcggccaccaaacccacagcaccgtaccaaccctgggagggcacggccgggattaggaggagggggagcgcccacacctggggaggcaggtgcggaggcggccggcccggggacctcgagtgcgtaggactcggggtcggggtcggggtcggcaagccgggcgctgtgagcgcgtcggagcgctggcccggagcctggcagggggcgtctgtaccggctgggcagcccggggcggtggcgatggctggcggcggcggcggggtgtgcgccaggaggccatttcctcgctgcgcccctggcggagccgggtttgcctgctcttggccgccgccgccaccgccgcgcaagtcggacagccgtgagggctggagggaccaggtcaccggttcgcagacgcggcgcggagcaggcgccccgggcccggagtaagacagcgcccgggaagcgggccggggcgggccgggcacgcgggggacccggagaggcggggactctggtgccccagccgcagtagcttcctacgcg

SEQ ID NO: 5069 - DNA, 532 bp, Homo sapiens
  source 1..532: mol_type = other DNA
caactgttaccccccgttagccaccagggggccgcctgcttggaacaagtggtgtagacgccacagcttttccggggcagctttggagcaaagcccaggaacttccctggtgcagacttattaagagtagaaaaccctgagcaggggtggggggcctctcacccctttccctgggatctagagaaccttccaataaataacctatacattgtcaggcagctgaggatccatatcgtagatgtgaatattaaattatgatgtcggaattattttaatactgtctataagaaattaattgtactctgttgtcaaagtagttttgttgcaactatagttccttttctagctcagaaagcaagtctcttcctggtctccaggacttaaggtcgggggcatttgagagacctatatttgcccgggaaagatctcttgctggttttatctatacatttccagggcaaagacagtacgcgcctctcccacgatatgcataatggcggtgggggcgggggtgtcctccttaagggcaacc

SEQ ID NO: 5070 - DNA, 486 bp, Homo sapiens
  source 1..486: mol_type = other DNA
tctcagagaggccttccatgactatttcatgtaaattaaataccttcatacattaccttatttcttttttcctccatttatatatatatatatatatatatatatatatatatatattatatatgtacatatgtatctttatatgtctcttgatatacttttttttttagacagagtctcactcttgatatacatttagttgtatttctatctcatttgactcaaaggcccacaaaggaagagataattttgctttctttaccatgatcacatcactgagattatcaaaacatgtgtcctttctgcacaattgttctatgcacatatgcactgtataattgtatgtgacgacagaaccccttgaagatgttactcaattccaagagaggaataaaaggggcctatggttgcatttaaacttctcaagccagatgtttggcttctgcctctaagcttcagctttagtaaatgtgacataagcagaga

SEQ ID NO: 5071 - DNA, 291 bp, Homo sapiens
  source 1..291: mol_type = other DNA
gtctgatttcctgcccagaaactgtttcgggtgaaaaagagtatattacatttcttgaatacctgcagggcagttgggcctgccgcaccgctgattcccaggggccatgttacttagcagggaagcttccctctttgctgcatgtcagaacctccagaagagctttaaaaatctcctgatgtccatgtttcaaataaagggcagccaggctctttattcagatagtactttgaaggttgcccttcaaacgcattggaatcgttggcaaagtagattaatttagtaacatcc

SEQ ID NO: 5072 - DNA, 451 bp, Homo sapiens
  source 1..451: mol_type = other DNA
gggtaatgattttcgacattatgaataaaacgttggctcatgccggcttttgccaagccttctccagagaagattgccttattacacttaataatgtttacagaattcttctttgagctcattagagctgtcagatcagattatctctaaagacttctcagtcaatctccctgagatagatctgggttaccccttggcaacttgggacatcctggctggcctgtggcatgcatcagccacagcggtgaaggcggcaggggcagcaaccagagcagcagcagtggcagcagtagcaggcgcggccgccgccgcctccggctcagctcacgcggaaaccccactgggccgtcgtggctccgcgcggttgcgggccagcgtggagaggcgggacgtggcgcccgggggcggggcctggcgccagggggcggggcgcagcgagccgggctcccgc

SEQ ID NO: 5073 - DNA, 320 bp, Homo sapiens
  source 1..320: mol_type = other DNA
ttatttcctcccagttaacactgacgtgggtagtattatctggaattggaatctagttcagtttgattcaagtccagatctgaaatctcatgactactctatatgctgcatagaacctggagaggatttttcaaagtaaatgaatctcgtgtggaatggaaagtttcccaacccaagcctttcccaagtggaaaaatacataagttatggcggaacaccgttttcacgtgagccaggagcagcgtcccggctcctcccctgctcattttaaaagcacttcttgtattgtttttaaggtgagaaataggaaagaaaaaggc

SEQ ID NO: 5074 - DNA, 455 bp, Homo sapiens
  source 1..455: mol_type = other DNA
agaatctatctagaattattaaatcactaattttcgttcatggcaactttcattcatttgttataaatgactcttatccataggaaaagatccaatctttgtaaaatgctttgggatctttaatttgggtattaaattatgcacaattttgtttcatagctctgacagtcctagacaggccagattagctgttctacacgagtgatgacataccactccaaaaggtttgagaggcattaaatctacacaacctttctagaagtcagtttatcaacatgcattaaaaacaaaatatttttaaaataacaacctttgaactgataattacacttcagtaatgtatttgaaggaaataaagatgtggtgagattagctacaaagttgttcatcacaatggaatgttttctgtgaaaaatatttatcgacaaggaaataaattgatgacatcataggtt

SEQ ID NO: 5075 - DNA, 378 bp, Homo sapiens
  source 1..378: mol_type = other DNA
acagtgatgtaacatcaattataatcttagtactgttcttgtagtaagagccacatagtaaatattttacgtagcatgtacaagctatgtttcaataaaactttgtttacaaaagcattcttacaacttctaaaactcagaaggcaagcccgagcaggtaattgagctacgtccagaaatacctgacgtcacagaggtttctggaacatagtctatgacaaataactcaaatgcttaatgtcttaaaacaatagacatttattattcattataattctggatagcttgggccaggtggtctaggacggtctcactcacatgtctggggccttggcaggatgaccagatggtggatgggttcccatcagtaagagaaga

SEQ ID NO: 5076 - DNA, 270 bp, Homo sapiens
  source 1..270: mol_type = other DNA
aattttcattcttagaaagctttaatgtgaatgaaattattccttactgtgcatttgaaaattccactgaaaacagttttaaaaaaaagtgacagtgacatctctgcattgttcagagaagaaataggcccttggggaggccgggtcacggggcctccttgcaccagtgttacaatcgacccgttcctttcggttgccccctcgggtcccgcccctccagggggcttggagcgctgactgacagcgggggcggccgccgcgccctccctc

SEQ ID NO: 5077 - DNA, 584 bp, Homo sapiens
  source 1..584: mol_type = other DNA
tgtgggatgcaaatttttattcccttattctataatattgcgtaattattatgcatgtgttttacgctggtcaccacgcggtaaaccgactatggtttaaaaatacacttccttacagaggaatcatatactatggaacttagattttcagtcattagccaaattctgaaaagaatccatataacaaacccagcagagtttatagccatggttttgcatctatgtagaacgtcctgacaatctgcgaagagctccaccttggccccggagcgcaaagggatccgggtttcggagcccaggaagcacctcgcccctgccggccgaggcttgccccccgcgaaggggcagccgtagctcccagccgagctcccccgctcctggccccggtccccgaccccgccccaggcccccgaccccgcccctgccggccgaagaccccgcccctgccggccgaggaccccgcccctgccggccgaggaccccgcccctgccggccgaggaccccgcccctgccggccgaggaccccgcccctgccggtggctgcggtagctgctgcgcgctgaggcgcctgctcagtgtggga

SEQ ID NO: 5078 - DNA, 638 bp, Homo sapiens
  source 1..638: mol_type = other DNA
gtcagctctaagcaaacagttaatgaatttttcacacttagaaacaaatgtctccattgtgacaatggagacaatttttgagcactgtctcaaatctggtgataatttttttttaagtgaaaggtgacaacttttaaaaagtaaaaactttattacaaaaacatttgtttattgtagaaaagctttattaaataaagctaagcagtatacatcttgcagacctttaaagaattatttttgaaaaaacggatatatactgttttgtaactatgtctcctaacaaatagtcgcaacatctcattaataaatattcacctgcagaattattttaaacggctgcatatccacaagatacacaacaaatttttggccattttggttaattccactttactcacaattactaataacgttgcgagctatagcaataactttgaaactgcagagaatttccaatatttgggcattatcactgccaaagaaaaatgcctttttgatgggtgaggcaggtcctcgattatcggcgagtcactgaggttccgagaggggcgtctctgctggtctgacctcagccaaggtgacgcggcttaatgcgtgggaaagcgcatgagcgtacgtgcgagcgcgcatgagcgtac

SEQ ID NO: 5079 - DNA, 412 bp, Homo sapiens
  source 1..412: mol_type = other DNA
aggagaaaatgagtgaagagataaatctataaatatataagttccgcaagtgattggcaaataaataaataattaaaatcatgaaataagaacatcactaaaaccattaattttcttaaaacacacgcgcgcacgcgagcgcgctcgcacacacacacactggcgtgcgcgcgcttttttaaggggcctatagactccatttcgctgcagcaggaaggagaaaggaaaattgaattccaccttcttctgatttgattggttgaggatcgggatcagggaccacaactcaaccccgaaactttgggcttccagaggggcgggaggggggtaccttattcataaccctccctcagggcaatccttaattcagctctgatctcagtagggagttaatactcctacctcagctggt

SEQ ID NO: 5080 - DNA, 426 bp, Homo sapiens
  source 1..426: mol_type = other DNA
taaataattaaaatcatgaaataagaacatcactaaaaccattaattttcttaaaacacacgcgcgcacgcgagcgcgctcgcacacacacacactggcgtgcgcgcgcttttttaaggggcctatagactccatttcgctgcagcaggaaggagaaaggaaaattgaattccaccttcttctgatttgattggttgaggatcgggatcagggaccacaactcaaccccgaaactttgggcttccagaggggcgggaggggggtaccttattcataaccctccctcagggcaatccttaattcagctctgatctcagtagggagttaatactcctacctcagctggtccattccggaccccgcaaccgcgaggcgagagagcagcgccggcgaggcactggctgggctctgacttcccagcctggg

SEQ ID NO: 5081 - DNA, 494 bp, Homo sapiens
  source 1..494: mol_type = other DNA
aataattaaaatcatgaaataagaacatcactaaaaccattaattttcttaaaacacacgcgcgcacgcgagcgcgctcgcacacacacacactggcgtgcgcgcgcttttttaaggggcctatagactccatttcgctgcagcaggaaggagaaaggaaaattgaattccaccttcttctgatttgattggttgaggatcgggatcagggaccacaactcaaccccgaaactttgggcttccagaggggcgggaggggggtaccttattcataaccctccctcagggcaatccttaattcagctctgatctcagtagggagttaatactcctacctcagctggtccattccggaccccgcaaccgcgaggcgagagagcagcgccggcgaggcactggctgggctctgacttcccagcctgggtttggagggctacggcgcctggagcagggtctgcagcggccgccgcagcaacgcgagccaagtcgtgccc

SEQ ID NO: 5082 - DNA, 608 bp, Homo sapiens
  source 1..608: mol_type = other DNA
aaatagatattatcatgcccattttataactaataagttcaaattactagcagtaactagtaactactaagagacaaagttagacaaacttaggtatgcctaattccaaagtcctttaaaaaattactgctttataaggttttcaaagcctttaagggtaatagtattaaataatcttttcaaaaagaaaaaaaattgaaacacaatagtccattcatcttcatttacttataagtatgtctagtttaagtccagggacatttctttaataaaacaaaaaataacccttagtgataactattgattattaattttttcttcatgcaacttgacagtgatcaagtgcaacacctcatactctttgagaatatttaggtaaagtattggtagtagtaattgtagtagtagaggtagtattaaatgttgtgcatttcaatctgaatgtattaatttatcaatagcaatgttttattctatgggcgatttcactataaaaataagttcagcagggagccaaatatatttgtcagaacctttaacaggctgatatccattgtgagtctcagaaagagtgtttttcagacttatgacttcataatattcatttg

SEQ ID NO: 5083 - DNA, 624 bp, Homo sapiens
  source 1..624: mol_type = other DNA
tttaatgaaatgtgacatttggaaaagctctaatgaacacatacattccaaaaatgtatccattcaaagtgcatagtagacaaatggattttgatgtaacaatgtgtaaaatgttcatttggaatggtttcagattctacgttgcaactattaagaaacaatatacttgttgagtttgagaatatctgtgtgaatatggatttttaaatatactttaaccgaagtagatatgagaatccagttgtcttctattaagttagataattgaagagatttgtaaaaatgtaaaacagaggtattcctctaagttttgtcttgtttttgaaaagttattttcattaaaatgttatgtatattaacatgtaatggctttattattgtgtaaataattctgaataagtactttgaagttcggtcttcaggaatttttaagaatgtagagaatcccaatactttgttttttggttacaatgataattataaaccatactattcttagagtatgcactctttgtactaacattgcagaaaggtttcagttgaaaacggattgctgcattcctttggtatttttacttataactaaatgtgtatattactttccaaacttagaagaagcacagt

SEQ ID NO: 5084 - DNA, 400 bp, Homo sapiens
  source 1..400: mol_type = other DNA
gatcaccttagctcaggagttcgtcccagctactcagggcaagcacaggaggacacctggtcaagtgtaccccataacttccaggagtcgtgaagactcgtctccttccctgcagcctctaaagaatgtagttaggagccaagggaggtggtgaccccccaccccattgagagttcctagttagacgctcagctagcggaagtccgccagccgccgattggctgggacaaatgtccgtcccgcctccctcccgccccatctcccggtggcctagcggcgcggcccgcgggcgcgctgaggaggctggcggtgccagactggcaggggggaggcggggcgggggggcgtgtcttgcctggccccggcgccgggctcgtcacggtttgcggctccgcccccg

SEQ ID NO: 5085 - DNA, 439 bp, Homo sapiens
  source 1..439: mol_type = other DNA
acaaacctttcccactgggtaaaaggatgggaggacgggcgcttccctgcaagctatcagcttgaagtccagcggagggtggacaccgctatggagaccccaaactttgtccccctaaattccggcgaaattacagacaccaggattgattatcacagcgggacttgatccaattagtaaatgcctaattgaattagtaggagggtctccgggctgtgaggccgggaagcccctccctggccgctccaagtggtcaacttgaccgatgcttcaccttcttccgctttccttccggaaaggacgctggattcagggcgcgccagtacgcgcagtagcggcccgcgagtcggcaggtgggtagccccggcgcgggaggaaggggaagttaccttcccctcggaagagggcgctggctcccccatcctgcctttataataag

SEQ ID NO: 5086 - DNA, 328 bp, Homo sapiens
  source 1..328: mol_type = other DNA
ctggagtttaattcaatatcaaactgattatttcactaattatatcctaagaagctgagagcttaggtcctccaggactctggcacaaacctttcccactgggtaaaaggatgggaggacgggcgcttccctgcaagctatcagcttgaagtccagcggagggtggacaccgctatggagaccccaaactttgtccccctaaattccggcgaaattacagacaccaggattgattatcacagcgggacttgatccaattagtaaatgcctaattgaattagtaggagggtctccgggctgtgaggccgggaagcccctccctggccgc

SEQ ID NO: 5087 - DNA, 277 bp, Homo sapiens
  source 1..277: mol_type = other DNA
ccttgcagggaagaagcagctgctccttgtttttcttggctcgagccagcatacagcttttactgatagaggcaggatttgtaaccctgtatagaggtacttctagacattttaatttatgaataaaaggaactggatgattcatttggtggggctcggactttggcccagtcaccgagtgaggcacagtccccgcctccagtcacggccgacccgggtctgcaactggtgcacaagccctgaagcgaggctgcgcgcgtcctgcacggtcccgccc

SEQ ID NO: 5088 - DNA, 340 bp, Homo sapiens
  source 1..340: mol_type = other DNA
ttgctaatcggcggttagtgacgttaaattttctataattattgttccttgtttatttgtttatttaaccaataataccttaactaattaattcattaattacagacccctacgcaattcgtcgcttgtgcctcaagtgatcgcctgagggctagggcgcccctgaagggggcctggcgtcccgcggccccgccccgtcccgccgcggaggctcacgggacatgtagtacgccgcgcgccttcctcgcgcgtccctggcgccgagcccgcggacagcggcagcccctccctccctccggcccgtgctggtcccgacggcgggcctgggtctcgcgcgccc

SEQ ID NO: 5089 - DNA, 330 bp, Homo sapiens
  source 1..330: mol_type = other DNA
cacacctcttggagcaactgatgggaataccgtatacagccctcgatcaagttttgtatcggaaagcccaggagtgggccgctccctagtcaaaggagggaaaaatgacgtgtcttttgagtcactcacccagaagccaggctacgtagggccgcccccaaggccgccgagtttcgattccttagtgtttggaaacggaccgaaaacaaaccgggtcgccaggggtcaccacgggcttccggtttcttcgaagacaccgccgcttccacagcgaagggagctgctccgggcacgtcgcggagggagtcccatttcttctgactcggcagg

SEQ ID NO: 5090 - DNA, 334 bp, Homo sapiens
  source 1..334: mol_type = other DNA
aacacagatttctaagtatttttagaaatgtcataaaacttcaactttataaattttcacttaaatctaaaccaaagctgacagttgggctgtattgctaatcggcggttagtgacgttaaattttctataattattgttccttgtttatttgtttatttaaccaataataccttaactaattaattcattaattacagacccctacgcaattcgtcgcttgtgcctcaagtgatcgcctgagggctagggcgcccctgaagggggcctggcgtcccgcggccccgccccgtcccgccgcggaggctcacgggacatgtagtacgccgcgcgcc

SEQ ID NO: 5091 - DNA, 421 bp, Homo sapiens
  source 1..421: mol_type = other DNA
tttgtatcggaaagcccaggagtgggccgctccctagtcaaaggagggaaaaatgacgtgtcttttgagtcactcacccagaagccaggctacgtagggccgcccccaaggccgccgagtttcgattccttagtgtttggaaacggaccgaaaacaaaccgggtcgccaggggtcaccacgggcttccggtttcttcgaagacaccgccgcttccacagcgaagggagctgctccgggcacgtcgcggagggagtcccatttcttctgactcggcagggcgcgcgagacccaggcccgccgtcgggaccagcacgggccggagggagggaggggctgccgctgtccgcgggctcggcgccagggacgcgcgaggaaggcgcgcggcgtactacatgtcccgtgagcctccgcggcgggacg

SEQ ID NO: 5092 - DNA, 361 bp, Homo sapiens
  source 1..361: mol_type = other DNA
taaggtttttagcaagtcttcagaactaacaagacttaatgacacagttgtgctcatgccagcaatatggagcactagacaatattctgaaagaataattgcagaaatgggcatacctgaaatggggctactagtatcagcagtgtggcttatgctaccacatggcagcccctgtggaagccatggacaccttgcagttttcacggctaatgctctgctccacagaggatgaaatgcaaaatggcaatagtaagtccttacttactgtttgctatttacccatcaataattacattgaatgtcagtggatcaaattctccaattaaaagacatagagtagctggatggatttgttttaaag

SEQ ID NO: 5093 - DNA, 440 bp, Homo sapiens
  source 1..440: mol_type = other DNA
ggaccctttaaggaaatatattttatctgaaacaatttgtattataatgtagcagctgatagacatgacagaatattatcatggaaaaaactctgccaagcaattatgatttttgttcttttttttttagatgatatcagtaaagtgattaaagcatcaatgagaaacagattttatctgtaaaatatctgacgaacctaagttttttttttttttttttttacaaaatggatgtattttaaaaaagttattatttttgatatgttcagttgatcagtccatctattcttcaatacttaacatccaccaagttttccagggataagaaataatccaccgcccgcatcggcagcagcgttgctgcaaaaagaggaaatacactgcgtacgctgctccctggagaggctctctcggttccacccaccggctggaaggagggg

SEQ ID NO: 5094 - DNA, 273 bp, Homo sapiens
  source 1..273: mol_type = other DNA
tttttttttttttacaaaatggatgtattttaaaaaagttattatttttgatatgttcagttgatcagtccatctattcttcaatacttaacatccaccaagttttccagggataagaaataatccaccgcccgcatcggcagcagcgttgctgcaaaaagaggaaatacactgcgtacgctgctccctggagaggctctctcggttccacccaccggctggaaggaggggctcttttttctttttctttaaggtggggaaagagacaaccaa

SEQ ID NO: 5095 - DNA, 201 bp, Homo sapiens
  source 1..201: mol_type = other DNA
gggataagaaataatccaccgcccgcatcggcagcagcgttgctgcaaaaagaggaaatacactgcgtacgctgctccctggagaggctctctcggttccacccaccggctggaaggaggggctcttttttctttttctttaaggtggggaaagagacaaccaaatcccaagtggaccccggcagctgggggaagccaggc

SEQ ID NO: 5096 - DNA, 246 bp, Homo sapiens
  source 1..246: mol_type = other DNA
gggataagaaataatccaccgcccgcatcggcagcagcgttgctgcaaaaagaggaaatacactgcgtacgctgctccctggagaggctctctcggttccacccaccggctggaaggaggggctcttttttctttttctttaaggtggggaaagagacaaccaaatcccaagtggaccccggcagctgggggaagccaggcgttttttaaaaaaatctgaagcctcatcagtcaccgggactgtca

SEQ ID NO: 5097 - DNA, 360 bp, Homo sapiens
  source 1..360: mol_type = other DNA
atatgaatttcatgtatttttatattaatgcactgattgattatgctgatgggataagcctgtcctctcctagcacaggacagctggagacctgaggtacctgggagttccacgtcctccctaatatgtaacttacagcctgtagtttcccagtaggaccaaactaaagctatcctttgttgaatttcacttgaaaaagtatatccggggagcacttctttaataaattttacccaccaggaaacccttctcagcctcgcgtggctgattctgtccatggaaatcacaaggtttttttcatggtgatttgagttttctgaaataacaaaacttactcaaacccaggatagctcctttttt

SEQ ID NO: 5098 - DNA, 206 bp, Homo sapiens
  source 1..206: mol_type = other DNA
gtagattcgcaccaggcaaacaaggaacattcaagatggtttcattcattcagtcattcatagaatcactatttataggaatgatttctttgtatcaggaattatgctgaacagtaatgttgaggattttattttattagggaagaagatatgctactttaccaatctaaggaatgccatatgctactgccaggagcacctgataa

SEQ ID NO: 5099 - DNA, 570 bp, Homo sapiens
  source 1..570: mol_type = other DNA
gaaaagctatcatatacctatgaacatgcttgtccatcgaaacgttgggaacatgaccagaactttaccttgtttaccaataggagtttattttaatctaatattctgcttttcaaaggaagaaacttattacagtttgaatgtatcttgtccaaaatgcctgggaccagaagtgtttcagatgttgaatttctttggatttttgaatatttgcatatatgcaatgagatattctgatgggacccatgtctaaacacagagtttgtttatgtttcatatataccttatatacataatctgaaggtaattttatacactatttgaaagtaattttgggcatgaaacaaagttgcgactgttttttctgcgacccaccacataagatcagatgtggaattttgcagttgtgcatcattttagcgctcaaaaaatttctgattttcagattttttatttagagttgcctaatctgtatacaaaaactttaagtaagtgcattcatctgcagattctctgataatcattattagggacctgtcctacatacaggacttcaattttataagagtc

SEQ ID NO: 5100 - DNA, 482 bp, Homo sapiens
  source 1..482: mol_type = other DNA
ttgatcacatagtttattatccaatcaggattaatatttaaaaatgtcttgggcaaatctggttgaaaggaaatttgaaagtttatactgttctgctcccatgagaggtaagtattctctttcttcacctgcattaagggaataaaagcacaagttttacagttatcacttcgtgataggtgatcatttacaattactcactgactcagtcccgggaagagctagaaatgcagaatctctgcctgaattagaatctgcatttttaaataagatttccaggtgatcaatatgtacattaaaagacagtgtatgcacatacatacatgcatatagacacaaaatttaatgaagtagaatttaccgttactattttatttgggaaagaaatgactcaatagattggagtattcactcctggatctcaacttgcaatttgaaaacgcattgtgtgcacttagtcattcttgagtaaatacttggag

SEQ ID NO: 5101 - DNA, 452 bp, Homo sapiens
  source 1..452: mol_type = other DNA
ggcaaaaaggaaatttgaaagtttatactgttctgctcccatgagaggtaagtattctctttcttcacctgcattaagggaataaaagcacaagttttacagttatcacttcgtgataggtgatcatttacaattactcactgactcagtcccgggaagagctagaaatgcagaatctctgcctgaattagaatctgcatttttaaataagatttccaggtgatcaatatgtacattaaaagacagtgtatgcacatacatacatgcatatagacacaaaatttaatgaagtagaatttaccgttactattttatttgggaaagaaatgactcaatagattggagtattcactcctggatctcaacttgcaatttgaaaacgcattgtgtgcacttagtcattcttgagtaaatacttggaggctctcgggcggagagaggtcctgcccagc

SEQ ID NO: 5102 - DNA, 485 bp, Homo sapiens
  source 1..485: mol_type = other DNA
taattatgcttgccagaggaaacactaggcatttgcaaatgtaaagcgattttcttttttttagtccattgagatctggattacaaatgcagctccgtaaatgtagttgaaatggcattaactgatgtttctatcccatcgacagcctcagttaaaagctcctaagggaatttaactttaaacataaaggcattcactaattaaatttaaatttacaataggaacgtgactgaaactaaaattccagagaaaattttactctaaagactagacaaatattgagcctttcccttttccaaacttaaaattttgcagttatagaactcttcaccacagctggttccttcagctgatgacctggtgcaggcatcatatttagcctggggctcctccggctggatgaggctctgcgaagtcagcctgtatcctaggagggctggtagggtcccttccccgcaaaggcggagagaccctggccctgggtc

SEQ ID NO: 5103 - DNA, 341 bp, Homo sapiens
  source 1..341: mol_type = other DNA
ttagagggggcaaaggtgatatccacttgggacacatgggtcaggcaagagcttgctctgacactgactctctgtgagacgctgtacaagtcactgcctcagttgtaaaatgaggaaatttccgtgcattgacttgaataggcaagaaattcatttaactttcctctaagtgaacttttttgattttttgccaaaaatggctgcaagatgtaccagaacttgcactttcttcatcaagaagtcaagtctgcctcagctattagattatggcagaagtaatgctgtgtgacttttatcatgaagcttctctattacatggagatagagatctgctgaaggag

SEQ ID NO: 5104 - DNA, 605 bp, Homo sapiens
  source 1..605: mol_type = other DNA
accttcgttctattattatttagtataacgtccagggtaagttagtttcactcactcgacggaatgtatgcaggcattatatttccagtgaacatacagtactttcgccggtgtcggaaaacttgtcattctcggattcccgcggccgcagaagccggaggcggaggctgtgtcactgccgccgcgggctcactcgcagcgccagccgaggagcgccacgggctgctgaacccctcggcccgacccacgcgccgagggctaggataatgcgcctgcgcggccgtcacgtggtgagggctccgcgcaaaacgaccgcggagagcccgcgagcgtcctgctggtcggtgcggcttcccgcccctcggcccagctcagctccatgaacctagcggagccgccgccgtagccgcgcagctcggccactccgggcgaatcggcgcgaggccgggaggggggagggggagacggttgggtcaagctccgccccagctcgcgcccctattggtgggcgcagcggttctgggcccgccccctaacggacctgtcgctttgtgacaggcggaggggcctcgggccggaggcggagtcagaggttgcttgagctc

SEQ ID NO: 5105 - DNA, 626 bp, Homo sapiens
  source 1..626: mol_type = other DNA
gtaagttagtttcactcactcgacggaatgtatgcaggcattatatttccagtgaacatacagtactttcgccggtgtcggaaaacttgtcattctcggattcccgcggccgcagaagccggaggcggaggctgtgtcactgccgccgcgggctcactcgcagcgccagccgaggagcgccacgggctgctgaacccctcggcccgacccacgcgccgagggctaggataatgcgcctgcgcggccgtcacgtggtgagggctccgcgcaaaacgaccgcggagagcccgcgagcgtcctgctggtcggtgcggcttcccgcccctcggcccagctcagctccatgaacctagcggagccgccgccgtagccgcgcagctcggccactccgggcgaatcggcgcgaggccgggaggggggagggggagacggttgggtcaagctccgccccagctcgcgcccctattggtgggcgcagcggttctgggcccgccccctaacggacctgtcgctttgtgacaggcggaggggcctcgggccggaggcggagtcagaggttgcttgagctccgcccggactccagggggctcctccccctgctcctttcggctgggcgggcggcgggc

SEQ ID NO: 5106 - DNA, 706 bp, Homo sapiens
  source 1..706: mol_type = other DNA
gctgtgtcactgccgccgcgggctcactcgcagcgccagccgaggagcgccacgggctgctgaacccctcggcccgacccacgcgccgagggctaggataatgcgcctgcgcggccgtcacgtggtgagggctccgcgcaaaacgaccgcggagagcccgcgagcgtcctgctggtcggtgcggcttcccgcccctcggcccagctcagctccatgaacctagcggagccgccgccgtagccgcgcagctcggccactccgggcgaatcggcgcgaggccgggaggggggagggggagacggttgggtcaagctccgccccagctcgcgcccctattggtgggcgcagcggttctgggcccgccccctaacggacctgtcgctttgtgacaggcggaggggcctcgggccggaggcggagtcagaggttgcttgagctccgcccggactccagggggctcctccccctgctcctttcggctgggcgggcggcgggcccgtcggctttcgccgccgccgccgcagctgcactggggatacggatggctagtggggcgccggcggcgattgcggccgctgctgaggcggagactccccgccgccgcttcctccacccccagtccgccggcctcgcggcgctgagggcgggagcgcgcagagctcttccctccccgggtccccgcccagcacccctcgcaccaggcggc

SEQ ID NO: 5107 - DNA, 474 bp, Homo sapiens
  source 1..474: mol_type = other DNA
acacagagaatccttcaatgtttgtaaatatctcggtttcagagcctctgctcctaggtgcacgtgcacaaacctgagagttcgcgcgtcataatcctgctgcatgaaaatgcccggcgagctgcagacaacgcggagggcctccctgagctgtgaccctgtcaggccgggcgggtccatatccgggtggaccgggtgggtggggctgcccctccctccaggtcccgaggtggataaggggtggggagttccctttcgccccttcggatccaaagggcgtgcccaccctgcagatcggcctcctagagtgtcccgagggcctgagaggccgcaggggaagagggctcgcctagccggccacccgctccgaacttgcccgggaaactagtgcggagggaggggccgggccctggccgcggcgggaggaggggcggccgcagctgcatccagccccgttggcccggggatttggag

SEQ ID NO: 5108 - DNA, 397 bp, Homo sapiens
  source 1..397: mol_type = other DNA
gtgagggtgacacccactgaatgcaagttcagtctggagtgcagtgagtagcaccaggtcaagtttctatcttgactctaactagaaaaggaagtcctctgaagatccaagttctctaagaagagtcaacctaggagcctctctcggctccaaggggcaccacggcaagctggttgggtctgctccacccatgaggatggagtgcagcctccaccgggaaccaggggcgcgagtcgctgctcagtggcctgggcctgcatgtggcgcggcgggagctgctgcctagggccgcgcagcgacggggggtgaggactacatgtcccgacgtgcctcgggcagggcggggcggtgccggagccgggcctggaggccggccggggccaggcgtgcgcagcgg

SEQ ID NO: 5109 - DNA, 502 bp, Homo sapiens
  source 1..502: mol_type = other DNA
actttgagaactactgctccagggagaagtgctatattttaaattttaagaatttacccaccagcaccaaatgcacatggatggaatctctccaaatctacagccctagacttaaaagacactaattccttgttttatttttttcttctcagcacacttgataagacactgtgaagaaaatgtcccttctgatcgtgaatcaaagataccctcgatttatagccaaagattatttccttttcttttggtggcttccagataaaatgtttcttgctaccctttcacaaataatcttttttcgcattttagagatggcattactgaggtccaaaaactagagccactcgctctcagttcccttcttgaaacattttttggtgacgggacggttacgctgaatcctgccaggcgccgtcacccaggctccaccggtccgcgggacagagccgcggagagcgcctgacaccgggctctggcggcggccgcagcaggagggggagaa

SEQ ID NO: 5110 - DNA, 555 bp, Homo sapiens
  source 1..555: mol_type = other DNA
tttagagatggcattactgaggtccaaaaactagagccactcgctctcagttcccttcttgaaacattttttggtgacgggacggttacgctgaatcctgccaggcgccgtcacccaggctccaccggtccgcgggacagagccgcggagagcgcctgacaccgggctctggcggcggccgcagcaggagggggagaagagcgggccgtctcccgggcagtgctggcggcaggtccggccgcagtcattccctccgcgccgagtcctggagcggcggagtccctggaggcctgggtttccttaaggggccccaatgcccgcagccacccgcccaggtggaaggaaacaggctgcgggcctgggccaggcggggcctggagcggaagacggccagaaggacccctgcgccctctcctccgcgccgcccgccaggctgccaacccagccaccctgggtgcgacgcggcgccttctccgccgctgggagtcgggcaacaggtgaagagggcgggcgtccgcggcgcctccgcggggcggtccctctcctgcccgcctc

SEQ ID NO: 5111 - DNA, 346 bp, Homo sapiens
  source 1..346: mol_type = other DNA
tgactgcaggcgcccgccaccaattacttgaagcaaacatatgctccttaccagtgcgttcacttgcagatatttgtcccagagaaatagcaagcttggtgtccatcgtttaaaaaatacggtatctttgcacagtggagtactactcagcaataattctaatttgttatgttgaaggagaatattctgtattacttcaagtttatgaagtccaagaccgcgacggttacacaggtgtacacatatataaaaattagtggagctcactttatgtaagttaaacttcagtaaagtgcgtaccagctgtggtccgggccttgcccacctcggagaggccacgacccaa

SEQ ID NO: 5112 - DNA, 332 bp, Homo sapiens
  source 1..332: mol_type = other DNA
aatataattacattccttgacaagttcacacaaaattaacatatgtgactgtctcattgtacttcaaatgaaatacgaattcttgagtcaaacactttcgtgaaaggctctccccagaactttacaagcctcacactttgagtctcattcaattcaaagatcatggtcctcagagaggcctttcctgaccactcagtttatctttttttttttaataaatttatcaagccaccagaaatgctgaatccattattttcgtatccttggctgtcacccaagtacctagaaccaacagctaacaagcaaatttgctaaggcccaggaagtgacgg

SEQ ID NO: 5113 - DNA, 482 bp, Homo sapiens
  source 1..482: mol_type = other DNA
gaagcaaacatatgctccttaccagtgcgttcacttgcagatatttgtcccagagaaatagcaagcttggtgtccatcgtttaaaaaatacggtatctttgcacagtggagtactactcagcaataattctaatttgttatgttgaaggagaatattctgtattacttcaagtttatgaagtccaagaccgcgacggttacacaggtgtacacatatataaaaattagtggagctcactttatgtaagttaaacttcagtaaagtgcgtaccagctgtggtccgggccttgcccacctcggagaggccacgacccaaagggccgggactgccgctacctttctggaaggcgccggccggccagtcaccggagggatcccgccagaggcggctccgcgtctccagcagcggggcagggacccgggcgccccgccctcgccagcgcccgcccccgcccgcccccggcccgccctctgtatctgg

SEQ ID NO: 5114 - DNA, 464 bp, Homo sapiens
  source 1..464: mol_type = other DNA
tttaagaaatgctcttacaggtgtactttaaaacaatgaaatacctttacctagtaaagttctaatagaaaaggagttattttagggctagtataagtcatgacccgcataggatcttttcaaactgacaataatttttaaaaaataacagtctatttccagggtaaacaattactttaatactccagcccagggttgcagggcagcccgccggcgaagcgccggtttgggcgggggaccgctctcagcctgaacagtgggtgggccggcgagggagcacttttcaccgacacacccaacccccctgccgcagcccagggccgcggatgagcggaaggaaagcacgcccgcgtacgctcagcccctcagcgccggccaggcagccacgcacgcgccatcagtcctggcccggcccggggccccgcccccgcaggccccgccccgctcccgtgcgctgaacgccc

SEQ ID NO: 5115 - DNA, 425 bp, Homo sapiens
  source 1..425: mol_type = other DNA
atgagaacactcttctatggtgtcctggacaggatcctttcttagatgtgatcaacgtaacatagtaaaataattaagatgttgtgtcatctttgcaacttttctgcacaactacaactattctaaaataaaaggcgtttctttttaaacgggaatcctctcagtgcttagcacataaattggttattgtaatattatgtaacattgagggacaaaagctctgacacctcggtgttttaattcaaaggacagacgcgcgtacttccagccagagtacgtccggccggaggcggggcgcggaggggacgtcggcgtggggcggggccagtagcagttcccacgccggcgctccaggcgcggcaggctgccgcccccggaagtagtgggtaccgggacgctgctagacgacgggaactagctctcgt

SEQ ID NO: 5116 - DNA, 405 bp, Homo sapiens
  source 1..405: mol_type = other DNA
ggtaatcaaggttaacatgatcagtgatgtcattttgacagcatatgagaacactcttctatggtgtcctggacaggatcctttcttagatgtgatcaacgtaacatagtaaaataattaagatgttgtgtcatctttgcaacttttctgcacaactacaactattctaaaataaaaggcgtttctttttaaacgggaatcctctcagtgcttagcacataaattggttattgtaatattatgtaacattgagggacaaaagctctgacacctcggtgttttaattcaaaggacagacgcgcgtacttccagccagagtacgtccggccggaggcggggcgcggaggggacgtcggcgtggggcggggccagtagcagttcccacgccggcgctccaggcgcggc

SEQ ID NO: 5117 - DNA, 600 bp, Homo sapiens
  source 1..600: mol_type = other DNA
cgcagggcgcgcgcggagctcggatagcattgcacgacggcccgcgcggagcggttcagggcggcccgcggggacctgcggccccgcgcgctaagccgaagggggcgtgcgtgaggcgcccaggccaggcgaggcgggggcacgagggctccgggccgcgtggggcgcgcgtgcgtgttaagcgcgggcagccgcggcccggctgggcaggcgcgcggaagactcgaggcgcgtgggacgcgcgtgcgtactgcacgcgtgcggccgcggctgggccaccacgagctgcagctgctgcggggcccaccgccctgcaggggaggccgtgcctggctgtgcgcaagccccaagcgcagcacgccgggccacccaggagcccctggccgccgcgtcatgcggcggggcagccgacgtcgcgcggggagacaccggcttggcgacgcacccgaagggaagcctcagctgctccagggagtcggaaggcacgcggcccccaagttatccggaggagcgctcgggccggacgtggcgaggccaagcgggcagcgctgctctggtgccggctcccggatctgagtgagtcggtgactcccccaccca

SEQ ID NO: 5118 - DNA, 294 bp, Homo sapiens
  source 1..294: mol_type = other DNA
ggagaagcccgccagccctgtcggccccgggcagtgaggggcttagcacccgggccagcggctgcggagggtgtactgggtcccccagcagtgccagcccacaggcgctgcgccttcccacggggcaggcctcgggactgcagcccaccatgcctgagccttgatgccgccccctgctccagggcgcccagtcccatcgaccgcccaaagggtgaggagtgcgagcgcatggcgcgggactggcagacagctccacctgcagccccagtgcgggatccactgggtgaaaacacc

SEQ ID NO: 5119 - DNA, 455 bp, Homo sapiens
  source 1..455: mol_type = other DNA
ccccaagcagaaggcgcttgggtgaggggtcttcccaaaaggacttgaagctatgttgccaggccacttcacactggtttgaggccatgtcaactaatgtggttcatacatttggacaaatttttagcaaacttaaatggaatttttttttttaaactaaaaagcgaaaaaggagagcccaggagttcaaggttacggtgagctatgattgcaccactgaacaccagtctgggtgacagagtgagaccctgtttctttaaaaaaatctcttttttaaaaaccaacaaatacatttttgtatttttaaaaaaactaaaaatcttttttaaaaagaaaatgacttcattttttttcttaatctttgggaaatgactaagaatcattttctgcttcctacttgaacttagtacagttgggtgaggacgcacccttgaaaggcaccgggtccttcttag

SEQ ID NO: 5120 - DNA, 524 bp, Homo sapiens
  source 1..524: mol_type = other DNA
cagtagctgggattacaggcgcctgccacctgacctcaggcgatccgcccgccttcattctaactcaaccccaaagagcccgtatatgagactcaaggcagccagggaacagggagagctgctgaaagcaggccctccggactgcagttccaaagggtcccttcccaggtggagtcacgcggcggcgcgcagcctcctagccgcccccacccgcccggctcggccacagcggggcggggcgcggggctgagcaggcgcgagggctggctgctgggccgaggccgtgacgcgaagcggccggcctgggcgccgactgcagagccgggaggctggtggtcatgccctacgcgcggcttgcgcgtaagtctgcgggacccgggtacgggcggggaaccgggctggggtcgcagccacccgcggtcccgcagggcggggagcctgagccccgaagtgccccccagcaggctcgcggccggcggaacgcaggcagtggaccggccttcccgtcgggggcgggccgggcg

SEQ ID NO: 5121 - DNA, 410 bp, Homo sapiens
  source 1..410: mol_type = other DNA
agtaactgatactttctcaattaatagaattttggctactttgttatacaatgtaaaaaggctttttggaacaaggcataaactaaggttattttaaaaaagaaaatttttttttgatacggaatttcgctccagtagctgggattacaggcgcctgccacctgacctcaggcgatccgcccgccttcattctaactcaaccccaaagagcccgtatatgagactcaaggcagccagggaacagggagagctgctgaaagcaggccctccggactgcagttccaaagggtcccttcccaggtggagtcacgcggcggcgcgcagcctcctagccgcccccacccgcccggctcggccacagcggggcggggcgcggggctgagcaggcgcgagggctggctgctgggccg

SEQ ID NO: 5122 - DNA, 527 bp, Homo sapiens
  source 1..527: mol_type = other DNA
ccgagatcgcgccactgcactccagcctgggtgacagggcgagttagttcttgtaaattatttcaagatttaaaagtttaaagattttttaaaagtgctgccatgcttctccagcatattccaccgaatggtgttgcagattcataaggtgtgcacatcttcaacctgactagctatacagtttacaaagtgctctaaaatttaaggttgggcagtgctattaaaagtgcggcccttgggcccgcgaatcagaaaccgcgtagattatatagaccgtagggccgatgtatataatctattagggccgcgtcggccttgcaggcgggtctccaagtgaatgagcggcagagtcccatcatgcgcatcagcctgcgtgaaccagtgcgcagcgcgcctttcccgggcaccctctaggtgctggcagctggcgcccagatcccccggctgggtggggaggggcggccggacggggcgggccggaggctggcgtccccgccccgaaagcactgggcccgccgcgtcgcacc

SEQ ID NO: 5123 - DNA, 670 bp, Homo sapiens
  source 1..670: mol_type = other DNA
aatactgatctttattactctacctatgaagaaagcaagttcttctttcaggacactttaacttagagttctcagaccctttcgaggtcacttactgctccttgagaaatactagcgtagtggtgaaggaagcgttcctgaagatatcctttcctcagtgacgcttttaggaaagaggaatttcgctattctaacttagattttcctctcttcattaaaaaaaaaaaaaaaaaagagacactcgttgtctaacggccctgccggaggggctccgcctgtcagactgcgtcaccctctcgccaagggtcccccagacgggcgggggctccttgcggccggctagctactctcccccctcgccctccgccccgctgtacccgcagagcgcgcggcccagcgcagccccttttggcaccgaggtttccaggtgcccagcgcgaaggcggagccgggttacagccgcctcctcggcgccacagagaagacccccgggagttcggcggcccaggcgctccggctctgcgtcccgagcctcccccggctctccgcgctcctccctctcggcgcgcccggcgcgaagcctgcgattcgtgagccgagcgcagagcgcagagccgagtggcgcacgctgggcagtggcctgggcaaccccaaacgcgccagagccctc

SEQ ID NO: 5124 - DNA, 556 bp, Homo sapiens
  source 1..556: mol_type = other DNA
ggagagaagaaatcttttcagtacatttcaacaattaatgcaagctgaaaaatcctgtagtaaatcagatgtggattcaaatccaagttcttactgtgaaaagaaagtaaattatttcaatgtctgtgtcctggttcattaaatgaggataatcatttcaattgtaagtatattttatttaagtgtgaatgtatgggcactcaatagatgtttgttgacccatacatcaattataacaatactgatctttattactctacctatgaagaaagcaagttcttctttcaggacactttaacttagagttctcagaccctttcgaggtcacttactgctccttgagaaatactagcgtagtggtgaaggaagcgttcctgaagatatcctttcctcagtgacgcttttaggaaagaggaatttcgctattctaacttagattttcctctcttcattaaaaaaaaaaaaaaaaaagagacactcgttgtctaacggccctgccggaggggctccgcctgtcagactgcgtcaccctctcgccaagggtcccccagacggg

SEQ ID NO: 5125 - DNA, 531 bp, Homo sapiens
  source 1..531: mol_type = other DNA
tggactagatttcaggatatctagagttcccttcaaccatattaaaaacattcaacaaattgccagttgatttaatgaattagacaacatgcatagaatgctattccattaagtggtatgcaaagataataattttttttttttttttgagaccaggctggagtgcagtggtgtgatctcagctcactgcaatcagcctgccgagtgctgggactacaggcgtgagccccaagataatcatttttaatctaaaaaagtagattataaaacagttacctatggtttgccaccatttttaagaatacagtatattataacaactttaaattcttgttattggtaatttaaaatgttttcaataatcatgcattacctgtataacgttttttttaaaaaaaaaaaaatccatggtctatcagactgccagttccagggccgggggcgaggggtgggcggtccaaagggcaccgcccctgcgggtcacgtgctcgccgaccaccaatggccgcctccgagcccaccttggggacg

SEQ ID NO: 5126 - DNA, 389 bp, Homo sapiens
  source 1..389: mol_type = other DNA
agggcgaagcccgggccttgacgtgccgcagtggcgcggtccaacttcaggagaccgcctgcccttaggatttcaactcaggcagatggggtgcaaaccgctcactccctcggtagagagggcacctccggaagtggagcttcgtccaagcccttgcagtagaaggggcggaaactggcagcccttttggcaccgcctcttcctgggctgctgtgcggggacgcagcgaggccaccccggctgggaacagccgcgtgggcggggccgcattgcactctctggacagttcctgggccgcgaggcgcggggagtggccctaagcgcggggctgtacggggagggccgaggcgtggggcgaacgccggggcggggtcggggcggggccgggg

SEQ ID NO: 5127 - DNA, 756 bp, Homo sapiens
  source 1..756: mol_type = other DNA
taggttttaagcttattaatttatcctccctaatagtgttatgctaaaaaaataattttttaagagtagaagataattttttcctgcaagttgtattacttaaaaacactttctgaaatagaatgtgactttagagtgtctatttgattcttttttcttttaataaataagtcttaaaactttcttggcatattttaagatatatttaatagttaaatagttatatattaaaaatagttatttttctttaaaatatttaataatatctctttataggaattatttaattctatgtttaagtaaagaaagttcattatattcatctgtgtggtaaacctagagaaaaccatctcttctcatgcatataagtagatgatactcgaaaggagccttgtagaatcatttatgaaaacaaattgttttgtttggtttctatggcttaaataaagagcagattttaagattacagagttaattatgcacagtaatgagcactgtggcagtctatgctttactgatgcaataagcatcccagcagaatgaatattgcataaaaccttattttctatttatataaattttcatgtcaaataagaaaaacagatttctaagcctttagttttgaatgcctttgaaattttgatatagaataaggattatagctaatagagaattttttagatgcatggagaatttttacctttcatctggcagtagctgccataagatgatgtcaccttgtagctgattggctgt

SEQ ID NO: 5128 - DNA, 449 bp, Homo sapiens
  source 1..449: mol_type = other DNA
ttcttttcataaagcagttgcttttatcatgacaaattgttgaagagatgggccagttatcctgcagaatgtttttttttataaacttagatgattcaagttaaatatttttgcctggaatataccatgatgatactgtatactacatcctttaaaaaatgtaaattataagtgtatatagcttcctctgcatttattatacaatactaaacaaattcttcaacttggacaacaagtttctgaatgatttgagtttcgtttctagtcctgaaacatggtagggcctctgccgcaaattacaggtgtcgtttttaatttatttaaaattttgttctttctacaaaacagcaaagaaaacctactttatcttatttaaattagggaccttaaggtctgtgtcaacctgacagtaagctgcacgatggcaggggcctacttggggaggtagc

SEQ ID NO: 5129 - DNA, 453 bp, Homo sapiens
  source 1..453: mol_type = other DNA
cctttaaaaaatgtaaattataagtgtatatagcttcctctgcatttattatacaatactaaacaaattcttcaacttggacaacaagtttctgaatgatttgagtttcgtttctagtcctgaaacatggtagggcctctgccgcaaattacaggtgtcgtttttaatttatttaaaattttgttctttctacaaaacagcaaagaaaacctactttatcttatttaaattagggaccttaaggtctgtgtcaacctgacagtaagctgcacgatggcaggggcctacttggggaggtagccgcaaactctcgcaggtggcaggacaccagtagtccaggtgggcgtagccgccgcgacaccttcacgtgaccgcggacagcttaaggaccccgcatccagtgcgcctgcgctggagctcccggaagttgccggacccggaacgcaggcggag

SEQ ID NO: 5130 - DNA, 491 bp, Homo sapiens
  source 1..491: mol_type = other DNA
tgtgttagtgagtgctccgagacaatgaaaacggtaaaatcaaggcttttatttcttcgtcaagagtccccaggagtccaggggcgcccccgagacgggtacgctggagggcctgatacatgcctgctcgctgggagcagggagacgctgctgcgcgtggctcatgcgcttttctccagccttagggctggcggacggcccagggaatgagtggtaccgcgggcgcccggcgcacccagcaggtgccatcactctggatgggccagttctggatgctcccagtggcgcagaggcggcgacactggcaggcgtccggctgccgccacctcccgggtgtggcgggtctggggcccggggtctccggccagagcagctgtggagccacgtgcaacacgcgcgttgccctcagcccgggcggggaccggacgcatccggagctgcggggaggagccgggcgccgcccccggcggcagtgccagccgcgtgggagg

SEQ ID NO: 5131 - DNA, 473 bp, Homo sapiens
  source 1..473: mol_type = other DNA
cacaacaaatggctttgtaacccaatatgttattaatatagccacagtaagggtttctaactctcaaactacgtaacttgcaagctggcagtggcaatcccgatggggagacaagaatattaggaattcttcttcccaaactataagtagagagaaaagagctttttataaaagttttcttcttttttttaacttttatagagaatgtttcattaaatcaaaacctttctgtacactttattcaggtagctttcataaagagagaaaccacataaacagcattaaaatgtataatgtaatctataattaagacaaaggctttggttagaaaaagaggcaagacttttgctcataggtgatccatcctcattgaggcaaacacacaagcttttttttttttttaatacaaagtgcgagatttcactaaaaaaggttaaaattgaagtgagtaatccggtgcataatgcaattac

SEQ ID NO: 5132 - DNA, 539 bp, Homo sapiens
  source 1..539: mol_type = other DNA
tgcattttagatttattattatataaatgtgcctgcttgcatccagcagttcactgaatgtaaccatgacaggatctgtatcagagactcatttgtagtttggagaattagagctcaatttgttcactccattttaaatctggtcatgttctgttttttacttaaatactctaaaaaacaagttaacaagctgtttgccagtggaaaatggaactttttattttgttgtgccactgaaatataaggcctgtgtattttaaagatatcattagataccatctgttttgtcatggtagattttagcaaaatcatacttcctattttcagttggaaataaagttactgaattagtaaatggtaattgaatactcccaaagaaacatattaaaactcttatttgtctagtaataattaccattgtaatgactgggaatggttattgcttgggatttttttgaaaagaactaactttctttttctttctatttttctcacagcttaaaaaagtgaggaggaagtaaatgctaaattattcatga

SEQ ID NO: 5133 - DNA, 334 bp, Homo sapiens
  source 1..334: mol_type = other DNA
gaagctgttcttgcaaacatctacagctaattttaaaaatctgaacagaagtttgcaattttgttttaaaaaattgagggtatttaaaagaaagcctagatttgaggctccacagtcggaaatgcatggattttgaagcccaaatgtgttcgaattccagtttcaccaattatagtttagtgacttaaagcaaattaccattatctctctgctttagatcaaagctgagcagtgcccgtgagtcaggggacccccactaaatagcttagctaagtcactgtctcagtcactccaggcgctggccgcgcagccccgccctggagctgcctccccg

SEQ ID NO: 5134 - DNA, 525 bp, Homo sapiens
  source 1..525: mol_type = other DNA
catggattttgaagcccaaatgtgttcgaattccagtttcaccaattatagtttagtgacttaaagcaaattaccattatctctctgctttagatcaaagctgagcagtgcccgtgagtcaggggacccccactaaatagcttagctaagtcactgtctcagtcactccaggcgctggccgcgcagccccgccctggagctgcctccccgcctcctcctgcgggcgagcagaagcccgctcgcccgctgccgagtggcagtcacgactgtgaggtcgccggcgaggtggccgcgggcgcggcggggcggggcagggcgcactctcctccacgcccgcggaagtgccggggaggtgggcaggggcacgtcggcgcctcggcgaggatgggagtccccaggacccggagctgagcagcctggcgcgcggcgggcagggcgcgcaggacagaagcctcgctctccgggagccccgttcccgcgcggccacgatgatccctccgagcagcccccgcgaggacggcgtgg

SEQ ID NO: 5135 - DNA, 302 bp, Homo sapiens
  source 1..302: mol_type = other DNA
acaaagccattgtttgtctgagaagttttcttagagagaatattagttttaaagttttccctctcttcagatcaaaactatccattcggatatggtatttatgatctgattaacatctacatcataggagctcaacattatgagacgagtcctgagttctcaccactgcagggaaaagaccaggactggtcgtttatgctcaggatcctctgccttgtgaacccttcaaggccaagaggcggcagagcccgaggcctgcacgagcagctctctcttcaccgcagacgctccaccagggccgc

SEQ ID NO: 5136 - DNA, 334 bp, Homo sapiens
  source 1..334: mol_type = other DNA
ttatgctcaggatcctctgccttgtgaacccttcaaggccaagaggcggcagagcccgaggcctgcacgagcagctctctcttcaccgcagacgctccaccagggccgcgcgctcgccgtctgacgtcgacggggcgcagaaggcacagggccccatcgccctccggaggctgggcgtcatccacattctgcgggaggcgcctgagaagcgccaagcacctcctccgctctgcgccagatcacctcagcagaggcacacaagcccggttccggcgtagccgctcaagctgtccaatcaatagctgccgctgaagggtggggctgattggctgaa

SEQ ID NO: 5137 - DNA, 365 bp, Homo sapiens
  source 1..365: mol_type = other DNA
acgctccaccagggccgcgcgctcgccgtctgacgtcgacggggcgcagaaggcacagggccccatcgccctccggaggctgggcgtcatccacattctgcgggaggcgcctgagaagcgccaagcacctcctccgctctgcgccagatcacctcagcagaggcacacaagcccggttccggcgtagccgctcaagctgtccaatcaatagctgccgctgaagggtggggctgattggctgaaggcacttccgttgagcgctccagcttggctacgacttaacgggccgcgtcactcaatggcgcggacacgcctctttgcccgggcagaggcatgtacagcgcatgcccacaacggcggaggcc

SEQ ID NO: 5138 - DNA, 496 bp, Homo sapiens
  source 1..496: mol_type = other DNA
ctgcctgtgagtaaccagcagcatgcaaacccacttctttttctttcttagagggaaaaaagttcaagtgtttgctttacttttttcaccgtggtaaaccttaactgttagttagtgactcagcgtttctactataaacagaaaaattgtagagatgatatgtaaggataaaggtgacttaatttttttatgttgtcataatgtataagttcttaatcagtgtttaaaataatattttttcaagataacattttattttgaggataaatctatatgaaaaagtgcagccaacgtcatgctctgtttaacagatgcagagataatgacctagtattataatatgtagaataagaatttcagaaagtgtgattcatttcgaaggtagatcactcactttgtgaatcattgctatgaatctgaaaattgaaatagaggtttatcatcgaaagttgaagtatttgcagaatgctggaatttccttttttttttgccagat

SEQ ID NO: 5139 - DNA, 430 bp, Homo sapiens
  source 1..430: mol_type = other DNA
tatttccggaataaataacaagtccgtgtgcccaagcccaccaggccgcagggtttggggcaaccaggggtggggcagccctgaccgttcacattacccgcactggtcctggttcgaagagcctgggcaggaaccgtgggacccagagaagccacccgcccaaggccgcctccggcctccgccccgccagcagcccagggccccgccctaccggcagccgcgcctcgccgccctcctccagcttggccctaacggctcgcaatggcgccgcttggggaacctcacccgccggcccagggctcagctcgccgtgtgacagccccgggtactttgcccagcggggtgcaagcccggaccgcggcaagcgccactcccgggcagtcgcggccacaactgcttccgggtgagtgggtcgtcgaccctgtggccc

SEQ ID NO: 5140 - DNA, 313 bp, Homo sapiens
  source 1..313: mol_type = other DNA
ctggtaaacaaaatttgctagaacgtggagatcagcatatactgttagattctgatacgtttcagatttcttttaacatctccaaggcctgataaaggtttttgaatgaattcgtgaaatacacgatttgtccaaacacttgaggttttacagtattggcatagggacttccggcccgtcggccctgctgccatcgatttcgcagggccaaagagccgcgacggccgaaccttgcgtcctccagtgcagcgagttcggaagcgaccggccgagcgcgcatgtgcgggacccgacatgagctccacgtaggccg

SEQ ID NO: 5141 - DNA, 427 bp, Homo sapiens
  source 1..427: mol_type = other DNA
gtgtggtcagacttcaatcaattcagtaggaatcttgaatttgagtagtcaagttcacatgcatacaaatggttaagatggtaaactttctgttatgcatatttacaattacttcagagcttccgatttagcagggctgagtggtttgttatgaacaacaacagccggcggctcctcactcttaggcccagcagggccggcagagcctgtagtgacggaggggagccttatctccgggaacccgagcgccccgtgcgcggcggggagggggcagttcggggcgccccggcgggtcccaggggctgactcccgcccgggaagtgcgcgcagggctcacggcccgcagggggcgctgccgcgccgtccagccgccgccgcccgggccgcccacctcgcgggcgcgcccctccgcagaccagcgccgccc

SEQ ID NO: 5142 - DNA, 314 bp, Homo sapiens
  source 1..314: mol_type = other DNA
gacaccctcacgtgcaggaggttggtccttcaggacccgccgcccctcacgcgggctctggggccgaatgctgacgcgagtcccgtctggcccggtccgcatcaagctggggagcgcagccctgggcctctccgaacacagcagcgccgcgcccgggcccctctgcgggccgtctgggtgtcctgccccgggcccccgcgcgcgcggccgccccctcccgcccccgctcccctctcccccaccaggcgagcaggcgagcgggcagagcccgcggcggaggccggtccccgggccgggacacacccacccgcccg

SEQ ID NO: 5143 - DNA, 375 bp, Homo sapiens
  source 1..375: mol_type = other DNA
ggggagcgcagccctgggcctctccgcacagcagcgccgcgcccgggcccctctgcgggccgtctgggtgtcctgccccgggcccccgcgcgcgcggccgccccctcccgcccccgctcccctctcccccaccaggcgagcaggcgagcgggcagagcccgcggcggaggccggtccccgggccgggacacacccacccgcccgcccgcttccagcggcgccgggcctcccgctccgcctccccgtgcgcggctctcccgggcgcggctccggggttcatggtgacgaggcggcggccgctcgagcccagcggcggcggcggcgggagctggggcgcgggcccgggccgcctctcccagagcgcggggccgggcg

SEQ ID NO: 5144 - DNA, 425 bp, Homo sapiens
  source 1..425: mol_type = other DNA
ctgagcccagacctgggtcaatattgacatggagcgggagggctttgctagcaaggcaaactctgcccagggccccagcccccttgccctttcctgctagggggaggagggaggggaaggctaggcatcccaccctcccattcttgggggtgtgacagccatgagccggaggctgtccaggccagactcaaggcagtgctgctcatcttggccccaggccaggctctaaggccagactgccatctatcctgggcctgggatcagttctctccaggtgacatcttctggtttgcagagacccagacaattccgagggttggggccttggagaagttctcatgccccccactaatgccagctggggtatctggcccatggaaaggggtcaccccctcagcttctcagagaaggaggacttgactcac

SEQ ID NO: 5145 - DNA, 363 bp, Homo sapiens
  source 1..363: mol_type = other DNA
ctgcacgcgcagaatcgctatttgcagagcctgtggctgtttgcagagcctgtgtttatacagagttcctctgaatcatgcactgcaggctagggactggaaaaaaaaattgtcaagtgtttatgcctctgcagaatctgagtcatagtctgtgagagccctcctaataaaagtcatgttctataatgaagggtgtcggtctccagcctgagaaccctggcctgcgatggacatcagcaagggcctcccaggcatgcagggaggcctccacatacaccccaccccagcgggtgtcatgggtagagtcctctcccagaaccggaagatggtgccggtacccgagggggcttacgggctctgccc

SEQ ID NO: 5146 - DNA, 329 bp, Homo sapiens
  source 1..329: mol_type = other DNA
actcagtcaccctaggtcacccactgtcacattggttatacctcagttgaacagtatcacaacagatcacacgctgtcacactgggttacaagcagccacctcagtgccacaatgtcacacactttgtttcaggggtaactaatcacctgagcgccgccaccttaaggctccgctcctgcaggtagagctccctggagcggctccggctccggatccccaggcactgcatggccctccacagtgcccctgcctgcgcggagccgggtccggggcagtgccgcctccagtgacaccctctgctcggggggcggaactgtcgcccttggag

SEQ ID NO: 5147 - DNA, 175 bp, Homo sapiens
  source 1..175: mol_type = other DNA
cttcccacatttttaaatattttgtaaagatggggtctctcatttgttccaagaagtaatcgctccttctaaaggcagaagcagcatcatacttctttggtatcttcatctttacacaataaatatgatgagtgaatgaacagttgcttaacaaattagtaagctcacttttaaa

SEQ ID NO: 5148 - DNA, 608 bp, Homo sapiens
  source 1..608: mol_type = other DNA
gagctggtccaaggccttatcagcccaggaggcctgggtggcttcctgggaggccctctgggggctctctgacaccaagcaacaggatctagggaccctcccagggtctgtggtgggtgggtctgcatagggaccttgcccagacagccccttgggaggccacctgaagaagggaccctggggatcctccccctcggctgcatgtcttggggtcctcccagcgagagggaaggggaccctcctcccgacaagcacccatttcgcacgaacgctgggagctgcggctggaagcctggacgccgcgtctccctagcgcagcagcccggctgggcgtcggaccttacttccccgggatgacgccggattctttccccgaccccagcgaggcgcccacaacagggcgtggggcccggccgcccgcggtaatgacagggcccgcggcccgtgggtggcggcggctggtcggggcgcgcccgctggcccgggccagggttggccagtcctccgggcccccagctctgccctccctctcgcgtccccagaagggggcggggagagacgagggcgcagggcagcgggggcggggcggtgtcccgggaccacccccg

SEQ ID NO: 5149 - DNA, 407 bp, Homo sapiens
  source 1..407: mol_type = other DNA
caaggcaccctgtcctttgggggcacgtggccttgccctttagagggacacagtcctgacctggggagccctggttccatttactcattcgacaagtacttattgatcatctactaagtggctccccggataccctctctgccttgttaaaatcattccaattgggtgtaaaactggtaaaagtgtgaaatgttcattctccagttagaaatctgttctcccggccagcccggaagccaggactcgggcggtcccccagctcgggtactgggaccggggaattagagcctcggcttccatctggtcctggctgcccagccttccgtttggctgcgggcagccctcctatagagggcttggcggtggcggggaggggcgggttcccaggccgacttcgcagagctgtg

SEQ ID NO: 5150 - DNA, 485 bp, Homo sapiens
  source 1..485: mol_type = other DNA
tccgggctggccgggagaacagatctaactggagaatgaacatttcacacttttaccagttttacacccaattggaatgattttaacaaggcagagagggtatccggggagccacttagtagatgatcaataagtacttgtcgaatgagtaaatggaaccagggctccccaggtcaggactgtgtccctctaaagggcaaggccacgtgcccccaaaggacagggtgccttgtcgagggcagggccacggcatgcctcaggctccagaaggcagctgtccgtccgagggctcccacttgtcccctcctcgccatcctcgagggcactccgtggaaaggagggtcgtcctctcgagggcggtgccgtggacctctccccgcctcgagacctcaagggtagaggtgggcacccccgcctccgcacttttgctcggggctccagattgtagggcagggcggcgcttctcggaaagcgaaagccggcgg

SEQ ID NO: 5151 - DNA, 256 bp, Homo sapiens
  source 1..256: mol_type = other DNA
ccgggggcaaggcaggtgcttatttgagcttcagatctaaagccgaccagtggcccaaggccttttatcctagttggcagtggtccctccacaccctgtagagcctttcgcacgtctcgagggtgtgacggttacgccgtgacgtcacagctcttgaagggctgcaacaaaccacggccacactggagatggcggccggaggcgggcccgaggtggggcgtgaccagcgcagtgacgtcagcgcgctgcgaggggc

SEQ ID NO: 5152 - DNA, 251 bp, Homo sapiens
  source 1..251: mol_type = other DNA
ggattggcaggtattgcatatcttgggctgctgtctctgagtgctgcaactactctcagggtaagccattggctaagctcatgactgtatcttttacacagttaataaaacatcctcagatgttataagctggagtgaactatttgctgaatgtgcaggtttgttacatagatatacatgtgcctgacaggccctggtatgtgacaacttcatccaagtcacacctagggggaatgcagctatcaccactg

SEQ ID NO: 5153 - DNA, 377 bp, Homo sapiens
  source 1..377: mol_type = other DNA
gttgcttataacagactgcttgaaactgagttatttataaagaaaagaaatttatttcttacagttctgaactctgcagtctcccaagggggcacaggtgagggaaccgagcaagctagcttgtctttcttccttaactcattaacccattaatctactaatccatgattggtgattcatggattaacagattacagaggacaaatattaagccatagcaatgctctaattaggcatgaagcttgaagccctgttcctgcaatctggcagaggaggcttctaggtcagaccccggcagctctgaccaaggccaagccatttgaaacagcctggcaggggggttctgccttgcccctggaggctacagccagtggtgg

SEQ ID NO: 5154 - DNA, 359 bp, Homo sapiens
  source 1..359: mol_type = other DNA
gacaggcgccctcagctccatgaataaaaggagtgggtctggtgtctccccgtgggggcatagccgctgagtttaaatacatctggatagggcttgtcaggactcagtgcttccaaccccagggcccctgtggcccctgagtcaccaccatgggtggacagcgcctccacaggcaggctccctctgaaagacaagccggcttatagctgaaacctctggcccaggcgtcctctcaccgtcgattgcacaggacgcggtcccggctcgcgtagccccgcaggcggcgccagagcgcaagcccgcctcgtgactccggtccacagtccggccgggcggagctaggggcgggcccctgcgtc

SEQ ID NO: 5155 - DNA, 368 bp, Homo sapiens
  source 1..368: mol_type = other DNA
ggagcctcatccctgagctatgatttgggcttcccaggttgccagaggcccttttccacctgctgggcttagaggggcgggactctgcccgctctgtcacccccattgcacaggtggggaatccaaggcacagaggcgtctgggccagagtcccgggactatccactcgcagtggccacaggctcccgggcaaagtggtcaggagcccattcccgcgtccgcgcgccccgccctgtcctccagcaagttggtgcacgcgcgtcctcccacagggcgcgggatgggggcggggcctcctctctggggccccgcccctcaggggggcgcggaccacgcggccggagggcccgcctcccctccccctcccc

SEQ ID NO: 5156 - DNA, 439 bp, Homo sapiens
  source 1..439: mol_type = other DNA
aagttattcctaccagttatctaagaaataggaaacttgaagtttctgctaagcaaaatgaattttatattctatcaagacaaagagtagagatgactcaaacatttctaacatttatagagcacttagtgacatgcccctggtaaatatggtctaagtattattattccaatttaaaagagaaggtcccgccaaaaatttagccgggcaatgtggcacgtgccagctactcagaggctctggagaccttagtgtaaccatgcgcaagtgtttactcacctattaaatgagactaaaggtattttcttctcatgactatccatcgccccgtccagtggaccagggatgaagcggggatgcgctaggcatcccggtttgtcaccagggggcgtgcgaggccctcagcttggatggcgggggccggcatgcgcgcgcatgc

SEQ ID NO: 5157 - DNA, 322 bp, Homo sapiens
  source 1..322: mol_type = other DNA
catgtatatatatgtatgggtgaagcgtcgccggagtgtgcgccccggcgggcgctggtgtgtcccccctccgagcgggcggagcaccacgtgcggagccctgggcgcgtcgctctggggcggagccagcccggggccccaagccccaggccgaacccaggcggggcccgccccgaccccgcccccgaccccgcccccagcccgagcccgcgccgcctgcccagcccgggagcccgaacagagccgcggagccgagacggcggcggcgcccgtaggatgcagggatcgctcccccggggccgctgagcctgcgcccagtgcc

SEQ ID NO: 5158 - DNA, 197 bp, Homo sapiens
  source 1..197: mol_type = other DNA
agtataagagatgatttaaactagaattgtctctggagttacaaaggacatgatctcgttgaagatggaggccacctcctttgcaaggagtaggagatggtccagcgccatgtctagcactctcggggagcagccccgccactaacccttggccaaagggaaaggggcaggacatcctcccgctctgagccacctcc

SEQ ID NO: 5159 - DNA, 185 bp, Homo sapiens
  source 1..185: mol_type = other DNA
catgggccatatgaacaaccgcccttgccaggggcggggagtcacgagggagccctcggacagcgcccgggccacgcaccatagggaggagtctcatctcgggccgctcgcggctccgagtccgggtctggtggggcggccggcactctatcgcggcaaccgagctgctagccggttgctaggag

SEQ ID NO: 5160 - DNA, 261 bp, Homo sapiens
  source 1..261: mol_type = other DNA
tggaagtatatatataaagaggtatatacatgtatatatatgtatgtgtgtgtgtgtgttggtgaagcgtcgccggagtgtgcgccccggcgggcgctggtgtgtcccccctccgagcgggcggagcaccacgtgcggagccctgggcgcgtcgctctggggcggagccagcccggggccccaagccccaggccgaacccaggcggggcccgccccgaccccgcccccgaccccgcccccagcccgagcccgcgccgcctg

SEQ ID NO: 5161 - DNA, 632 bp, Homo sapiens
  source 1..632: mol_type = other DNA
gctgggaccctacgactggcaggacgcgcgccgacgggctcccccgcagctgcgtccactcggttaaccccggcccccgggactgtcctcggcgtggctgactctcttcccaggcccagcacggagagcggcccgcggcaggcgaggcacgagtgcgtcccgactggtagtggtgcattcttcacccgggaggagcgccattcccggcggccggaccaggaaaacgctccgcttccggcactgctggcacttggggcgggcgctgggcccgaccgcggccgcggactagccagggtccgggagtcccgcgaggccgcctctcccaggaggctcccaccgggcagggggcacctcccgccacccaggcggaaacactcgggccgggaccccgccgcagtcgccagccagccggcgaccggacgcccgggcgcggggttgcgggcgcctcgccaaggtcaccggcgccgcggcggcaactcaccccgtggaggtggaagccctcggcgccgcctgcgggctgctcagcgctgacgcccaggcccatggcagcggctccgctcggcacccaggtccagtcccgctgcgcctacccggaccgacccgacgccagtagcaccgactcgctccggcgc

SEQ ID NO: 5162 - DNA, 398 bp, Homo sapiens
  source 1..398: mol_type = other DNA
gggctcccaggccaggacttggttgccggggcatgtcgtaccgggagggttggccccgagtcaggaaaggccttgcattttaagtggccaagatctggcccggaagaaaccagcctttttaggcaggaatgaagttcaggcccataaaataaactccctaggagacgtcggctctgccactgtctagcccgtggcctctaccggggcggtggggcgctcggctctgccggcgtccgcggcggcggaggcgcagtcgccgggtcacagtccgcagggaggcccccaggccgctgcgccaggctccaggcgggggaggaggcggcgcctccggggcggggctgccgggcggcctggctggaggcccggcgtgcgtcagcgcagtgagccggcggagcggc

SEQ ID NO: 5163 - DNA, 206 bp, Homo sapiens
  source 1..206: mol_type = other DNA
ccagccagctactcgggaaagccactggaagcttggctccagctgcccagacacctcctgcatgcggaaggacagggcctttatcttcaggaaaggtaaagtgtacatgcacatctgtggctgaagaggggctctcaccccccacccccaacctggaggtgacagcattcatctaggacctgggagggggagggtcaggctcccac

SEQ ID NO: 5164 - DNA, 158 bp, Homo sapiens
  source 1..158: mol_type = other DNA
gaagctgatgactccagggtcagagaaagcctgggccctgagtcagagggagctgggcctggccaatctcggcccagtgaagagctgggcctggtcaggaggaggtgcccagcctgccctcaggagacctccagtctcctggcacggtgggtggggca

SEQ ID NO: 5165 - DNA, 534 bp, Homo sapiens
  source 1..534: mol_type = other DNA
ggggccttgaaggggtcacagaccattcatgggccaggccctagttagggacccaagctggccaggccagggagcagaagcatggctggatgccggagcccaccaggctccccactgcaggggtcctgggtgaaagctgtgtcctcagccttgactgaaatatttaccgagcatctacaaggtgcaaggtactcactaaaacttagtatgcatatcactcttctaagaatttcattaaaatgcagattctaattcagcagatatagggcagggctttgctttaataagctcccagtgcctgggactgcactttgaggagaagagctgtgtgtgccccagtgtggtccagtgagtactctgggctccctctcgtgggcagggaagctgagggccccatgagctctcccagcttccttgactgcagggcctgctccctgccccccacctccaggttggggtaagtggcacctccctgttggcagctggcctccaccttgcctgtggcagcatctaaagatagtctcccttacagga

SEQ ID NO: 5166 - DNA, 163 bp, Homo sapiens
  source 1..163: mol_type = other DNA
cagtccttgcctgcattgtgtgatgggtgcctgcagtgatgggtggggacacccatcactgtccagggtcctgtctcaactggaagagaaggcagtgagcaaccttgaaggtcatgcttgccaagcatgaagccctgtgctgctagcagctgtggaacatagc

SEQ ID NO: 5167 - DNA, 430 bp, Homo sapiens
  source 1..430: mol_type = other DNA
ggggattacacagagccaaaccgtatgagatggggtcctggcatccagcagatatttctactgcatttctccaggctgaacttctgtttccaggggaaactgacttaaagtgattttcaaatggcattcctgttgaaagagttaatatatgtacatgcatacaacatacacacacatttgtgtatgctacataccatggaggaaagccagtcctggtataaattgtataacttcaaaataataatggaattatgatttcattttaatactgatttcaattaaaaattttaatagactattttttagaggttttaagtttacagaaaatctaggtataacaaaatacttaaacaacagaaatttgttttcccacagttctggatcctctgagcaccctaggagacaccagtcctattgaattagggcctca

SEQ ID NO: 5168 - DNA, 421 bp, Homo sapiens
  source 1..421: mol_type = other DNA
aaaaaatattatcttgctccctagtcactttcctttctgataatgcttttccatggatccacatgttaaagtttaaatgttttactagccacatttaaaaagaaacacatgaagttattattatttgttttaggttacaggcctgggccactgcgcctgaagttaattttaatatttcacctaacccaatatatccaaaatatcatttcaacatataaaaattattgagattttacgtgtggtttatgcatacagtacatatcaattccacactaaattttcagcatttaaagggaaatatggtccacactgcttgttttaatataattaaaattaatgtatcaattaataaatcaatagcccacgttctgggcagaccaggtctggatggaagccaccaggtggcactcagaacaccctc

SEQ ID NO: 5169 - DNA, 551 bp, Homo sapiens
  source 1..551: mol_type = other DNA
cacatgttaaagtttaaatgttttactagccacatttaaaaagaaacacatgaagttattattatttgttttaggttacaggcctgggccactgcgcctgaagttaattttaatatttcacctaacccaatatatccaaaatatcatttcaacatataaaaattattgagattttacgtgtggtttatgcatacagtacatatcaattccacactaaattttcagcatttaaagggaaatatggtccacactgcttgttttaatataattaaaattaatgtatcaattaataaatcaatagcccacgttctgggcagaccaggtctggatggaagccaccaggtggcactcagaacaccctccatctcctacggtgctgaagcctgcagcagggcaggagccgcggagtctgcggcgcgggtgaagagcggcgcgtaattcccgcagcaagattgttccgcgcccgcagcccctggactagcaggatccgaaccccggcggctgcgtgcttataggcgcagacgtcagagagcccgcggcttaaagcgcgt

SEQ ID NO: 5170 - DNA, 481 bp, Homo sapiens
  source 1..481: mol_type = other DNA
gctggagtgcagcggtgcaatcacattcactgcagacttgacctctaggctcaagctacctcagcctcctgagtagctgagcccctggatattgcaaaatttttcttctaccaaaaaaaaaaaaaaaaaaaagatagatataatccataccatctgttcaatcttgtcataacgcatacgatcagttcaatcttatcttttttaactttttcagagaaaacttcccttaagtgaacatttaaatctgaattacgtcctgttaaactgttctccaggaaaataaaataaaataaatcttcaagtttttgtttacctaacaatttgttgtgtcgaacaaacctgttccgcgctctggacaggaattatgcacagggcgtcgctgtggcctaccggctacagcccagaggcccgctcctgcggcgcaagcccgaaagcccagtcccggcagtttgccattggctgacaacggagtacataagga

SEQ ID NO: 5171 - DNA, 260 bp, Homo sapiens
  source 1..260: mol_type = other DNA
tgtggccccacattttagagactgaagccaataaaatgttaattgaatgagatttatcattcgcagaaactgttcaacataagagatttatacgtgttttcataaatgtgaatgcatagggtaattgtcatggaaacttccaaattcaatgttagttgtaactagactggattagactcttgctaatcaagtgtacattaatctacatggagtataaaaactcctggaatttgtctcttcgctgaggactcatcaaaaac

SEQ ID NO: 5172 - DNA, 477 bp, Homo sapiens
  source 1..477: mol_type = other DNA
tgtacacacttgtattggccaacataacagtgttttgtaattacatactgcacatatgcattgaccctgagtttgttgagagcagagacattctcagtatccagtttatgcccattaactaagttgattcctgttgattatttctgcatctgtcacattcctagaagattttattgcatgaatgatgattgttttaataataaataataataaattttttattttgctttttagagaaaaggcttttcctaactctagaatattatttagtcaaggatatgtttggttttaaatgttttcctatcttacatgggtctctaaaacataaggaaaacaagagcccatgtttctttttctccttaaaaacacgatttttaaaaatacacaaatgaaaattaatgaactgttagttgagttcctttccactctgtagggcccccctgaatgttacctgagtacagggggctccagagtaga

SEQ ID NO: 5173 - DNA, 531 bp, Homo sapiens
  source 1..531: mol_type = other DNA
ttattttcatggaagtcccggcctggagtggaacctttcaactcccagtcattcttccaggaccgggaactcctggcacgagcccgaactgacagcgcgggctcactaacccggcggttccgcagccctctggtgacccattactctacggtcactgagggtccgggcccccaggactcagaggcagggtcgcacatgggggctcccgaaccgcggccccaatactgcactgcgccgcagggaagagccccgggaggggcgcgggtccccgccccgggcgcgcgcagccctgccccgcctcctcccggtgcgccccgcccctcccggcgcgtgccgcccgcgcgcccgaggtgctctggaggaaccggcccggcgggcaccccctgccccggcgcaggcgcgatcgcgggccgcccctcccgccgggcgccctgcacgcgcccccgccccgcctccgcaggctcccccgctccgggcgcctctgattggctctcggccgggccagcaggtgtcggcggtggctgcggccag

SEQ ID NO: 5174 - DNA, 590 bp, Homo sapiens
  source 1..590: mol_type = other DNA
tgataggaagatattacggtctggtacattctgaggcacacaaaatgagctgacaagctgattttctccactcgatgccaggcccaggattaagctgggcagtgattctcaagcctgatcccagaccagcaggcaggatcagcatcaccaaggagcttatgagaattgcagattttcaggtccgtccaatcctggaaagagaggctcccatctccagtattggttgagactaacaccgctcctgcaactggggttggagagggtgactcatagagattagccctgagcgtcgacccctcggcgccgccactgaaggggagtcaagagagacgcttgagtcccttgactgtcctcccctacgagctctctgggaagagagccccagacctgcgaactctgggccgctctgcggccgcttgaacacttcgcgggtcttccgccccgcgctagaggacgcactccgtgacgggaattgcggtctcggccgcccccggcctcaggctttccgggctctgctgcctccagaaaactacaagtcccaggatgctcggcgcgggacggtcacgtgggaggggccgcgggcgcggcta

SEQ ID NO: 5175 - DNA, 544 bp, Homo sapiens
  source 1..544: mol_type = other DNA
ggtcaaacagggcctgcttaggcctcttgctgggatcactccaagggtctctggggtcactcagaggagccgggaggctgcctgctgctggagacagactcctggggtgtttggatcacggcagcccaagaatggccctgggcatggccaaggcacctgccatactttgtgctttaggcccaagtgacctaggggccagttgactctactccaccccgtggagagacggagcacaggggtcatgcacacccacagagtgcccagtccctgcctggccttgtcttttccctccacctagggttggggttgcaagaaggaggcagataatagacacctcccttccccctcagggcgctccctcctctccgacttcaggtacaggtgagtgtggagggcagggccggtcttttggcaagacgctctctctcccttccccttccatcgagggctgggtgtgaaggtgaccttgacacggacggggggggcggtcccaggccgaggccgccccgcccccgccccgctatacccggcgccgcctcccggc

SEQ ID NO: 5176 - DNA, 284 bp, Homo sapiens
  source 1..284: mol_type = other DNA
gaggagggagaccctgtctctgccaggagaccagccatggtggcgcgcgcctgtagtcccggctacttgggcggaggttgcggtgagccaagcccccgccacatgtcggcaatttcctttcaaatgatatagcacatgcaaaacgttaacatttgtgtgtactagtttagcaatatttctgtaactgtgaattacttgaaaatgaaaggttaacacagtgagcttgcgagcgcgtgcgtacgcacgcacgcacgcacgcaccaaccaatcggtgctcacgtcgg

SEQ ID NO: 5177 - DNA, 386 bp, Homo sapiens
  source 1..386: mol_type = other DNA
cgggaaactgtactccagcctgggctacagaaaaaaaaaaaaagttttagtcagtctcaagatctctgttttttacaaaactgttgcatgaattgactcagttaattcactgaatttataaattacaaacttttaccattctcaactgataaattgaggcaacgatttaagtatattggagacaccataccccatggtcttaggtcacagtcattcggttaagttaggaattaagtaattaggtaaggaattaggaattcagttaattaagttacaaattgttaaatatggaggaatttatcatgtagcggccgggcgcggtggctcacgccgggcggacagcttgagctcaggaagggccagcctcccggcttcctagagaggct

SEQ ID NO: 5178 - DNA, 499 bp, Homo sapiens
  source 1..499: mol_type = other DNA
tagatacataatatactctccaggctgggccgggacacacatcccagtacagggctaatagctctttcgctaaacttcgaaaattgtccttaaaaaaatctacctattttgtgtcttcaaaaaacacaattggactgtaaataatttacctatcaattaactaatttaatgaattaaccccaagaggttggtaccaccatcataatacccattaacttgctgcaggtcacacaactagcaagtgctgagtaatgggtcccttcattatctggaaggccaggatagtaaccattctgtggcctgagctggccagacgtcgccaccaggtgtgggcgctgcaggacccctgcctggggccgcccgctcgggcccgtgttgtctcaggcagtagggacactggcgctgagcaacttcccaggttcctaggacgcacttccggcggagggtctcaagctttccccggtgtcggcggcaggtggaatttccacgctttatctgc

SEQ ID NO: 5179 - DNA, 501 bp, Homo sapiens
  source 1..501: mol_type = other DNA
tagatacataatatactctccaggctgggccgggacacacatcccagtacagggctaatagctctttcgctaaacttcgaaaattgtccttaaaaaaatctacctattttgtgtcttcaaaaaacacaattggactgtaaataatttacctatcaattaactaatttaatgaattaaccccaagaggttggtaccaccatcataatacccattaacttgctgcaggtcacacaactagcaagtgctgagtaatgggtcccttcattatctggaaggccaggatagtaaccattctgtggcctgagctggccagacgtcgccaccaggtgtgggcgctgcaggacccctgcctggggccgcccgctcgggcccgtgttgtctcaggcagtagggacactggcgctgagcaacttcccaggttcctaggacgcacttccggcggagggtctcaagctttccccggtgtcggcggcaggtggaatttccacgctttatctgcgc

SEQ ID NO: 5180 - DNA, 747 bp, Homo sapiens
  source 1..747: mol_type = other DNA
acgtgtactgatctaaaattatgtaaattaatggcaagtacttgttagtgacttgggactttggtcaaaaaacagtcttttcctttcctgaatatgaaaagtaagttcttttaattagcgtccaactaacagaacagaccataaaggtctgtccagatcattatttatggaagtatgagatatatatatttcagctggtgttaacattttatttaagtgccagttactgagcagaaaaatagctgtaactacgagtttttgtaatttattggaaaaagctaaatataagacatttcatttaatataggacatgtcctgtgtatacaggatgcctagcaactgtatttctacgcacatctcccagctgaggacccaagcaagatcctgggcttgggcctcttagagaaagcccaggcttcaggtgagccacggggccggcggccaacagctgaggcgcagcccgtgaactgggggcccacttgtgcctagagggcgaggtctcggtagagccaggctgtatcagtccgtgacactccagccagaggcgatgccgacggctgccggagaaagccgggcttagagcgccacagttccacgcccgccgccggcctctcagcccagccggtcgccgcaacctcgcctcttccgcagggcggggccagccatgaaaggcggggcgggtctggccacggggcgaccgagatggcggcctccgggggcctagagggaccctgggcgtgcactcgc

SEQ ID NO: 5181 - DNA, 753 bp, Homo sapiens
  source 1..753: mol_type = other DNA
atctattgatacctagtgacaattaacctaattgacagcgctctgtttaggtactcctaaggaccggccctgattcaggtcgaaattcaagctgaacagcctgctgagaggtgggatccaccatccggacagtgggctgcgacccaggtccagcagggagtgtgcggcacagaccacaaggtcggcgaggccccctaacccgcgcccggccgggaacccgcagaccagcgacggggcagctgcggggccaggagcgccccaagacgggcgggcgctgaacccgagcccctgccgccgccctggccccgaatccgccctcccaggacctgtcccggccgccccgagcggtactcgaaggccggggccgagatgccaccttccgcaggccgcgggaaaggcgcgccgagtcctgcagctgctctcccggttcgggaaacgcgcggggcgggggtgggacaggggaggataccagggccaccttccccaacccaggccgcgggggcccggcctccccgatgcagaccacagcgccctcacgggctgccctcaggccgcgcagcgggcagccgccagccgtcaccccggggagcgtccgtggggtgcccaggcaccccaccccggcccggggcgctcagacggcagcagactgctgggcggcgcggggactactttccaccgccccctcgcgccccgccccttgtcctcgcgcggcggaacgctccgcgctgcgccggtggcggcaggatacagcgg

SEQ ID NO: 5182 - DNA, 417 bp, Homo sapiens
  source 1..417: mol_type = other DNA
ttcaagcattgcaacttctttagtggaggactttgaaccgagacttttcgaagttaagttcctattctgaatctgccaagcttgaaagctttggcagttgcctttcataaagtctaggcgtcacttggtgaacgaacattcaataccttgtcttcgtgttgacttgtattcatcctaagaaatagtaaatatagtctcaagtgttttaaattattgacataaatatttattttacttttatatttaaatctttgaaaaatctctgattaaaaaaaaagtacccttaaaggtacaaaatttggttaatttgcgcccaatattcattactttccgtgtacaaggacaaggccctgagattattgcaacagtaacttgaaaaactttcagaagtctattctgtagagcttagtatagcat

SEQ ID NO: 5183 - DNA, 270 bp, Homo sapiens
  source 1..270: mol_type = other DNA
ggtcggagaagtttgttattaccgaccttctgaagccaaacaggcccctcaggtgcaggtcttggagggtatcaccagcagaggctgcagcagcaaatattgctacctgatccttcctctggaagctttgtcccgaggggcacctgcctgtacgagcccctactgggaggtgtctcccagccaggctacacaggggtcagcgacccagtctgtgtgttctcagagctcgaatgcctcagagctgcacagccgggctgcagccttacaggt

SEQ ID NO: 5184 - DNA, 322 bp, Homo sapiens
  source 1..322: mol_type = other DNA
atttgaaggtaagctgcatacattatgacctttaccctttcaagatactttagtgtgtatttcccaagaattagatattcttgtacataattacagtggaagttatcaacatcgatgcagtctaggatcaggcatggcatttagctgctgcattgtccccaggaatactgcatagctgatgtggacatgatatccatctgctctcattggtgatgtaaattttgatcacctggtgagtaagcattcatggatgattcttgcctgagccaatcttcactatacactgatgatctcttcatccctgttaaaccgtccacaagtg

SEQ ID NO: 5185 - DNA, 353 bp, Homo sapiens
  source 1..353: mol_type = other DNA
tgcaaaaaagtctggcctgtcccaccccatcttccctttagtttacacaatcaacttgagatcagacaaaaaggaaggtaattcacagccttctcttttctaaatggtgaggaccccggggcccctgcttctgagaatgacgaggtctcagttctccacactcggatggtgggccgaccactatgactgtcccagtctctggcctgtgggctcgtccaaaggcagggcgtgatgcctggagggaggggccctcgtggtctctcacttccgggccccagccaacaggaacggaaactgcacagccagtcggcttcctgaggaggggcgtcgcctttgggcctgtggacctgtcc

SEQ ID NO: 5186 - DNA, 252 bp, Homo sapiens
  source 1..252: mol_type = other DNA
cttcacagctgggcgcagatcacctgaggtcaggtcaagaccagcacagtgctactgtactctagccttggcgacagagtgagactctctcacttcaaacccgagaaacagctcggtgctgttgtgtttagcactggcttggtaaacaggaacacttctgtggcctcccagggctttgccaagtgcagtctcaggacactgcttgttccactttatttttaggcaaaacaggacagctcacaatcttaggat

SEQ ID NO: 5187 - DNA, 470 bp, Homo sapiens
  source 1..470: mol_type = other DNA
aatgtcaatagtgctgaggtgggaatgaaattcaacctataggatagcctagaatctgtcttattatcttgttttattatgaatatttcaaacatatcaaacatttagaactaatattaactgtattttttaaggaaataaaacatatgggtgcatttataaggaaagttttaaaacctcatttttcctgcaggttacacatgtacgtgtccatgaaacagcatattctagaagtttgagcaaaataagtgaaaatgtttccattttctaagtaatttacatttcctttaagtggtggtcaaaaattatagaagatgtttaatgatttgcagattttaaaaggtggcagatttcaaatccagagtcttctttctatcgtgacccaaagtagggtgaataatgctgccagcatccttggaagagtttgtgagacagccagtggtggtgtgtgtctctgatctggataggac

SEQ ID NO: 5188 - DNA, 129 bp, Homo sapiens
  source 1..129: mol_type = other DNA
ctagcaattagagagatctttataaatttgcagtgcttcagcaggacaattcctccgccagcgccccacctttaaacaggtgtgcctgctcactgcgcctagcagcccccttccgggtcctgcccgggt

SEQ ID NO: 5189 - DNA, 421 bp, Homo sapiens
  source 1..421: mol_type = other DNA
cgggtgagaggggtgaggtcctcacctccaggctgcgcagctgggggtgcggtggtcaagttccccaggaccctcgctggcgccgcttgtcgacaacggggaacagtgggcgccgcgggtgcttggcccggattgagccagctgtggccagagccctttcactgacccagaacactggccctcggaagcgactcctcctctctccttcgacagcgcctcggacgctccggggtagggggccgacgccccctcccttcggaggagactccaaactcctaggtttcccaccttggagagtagcttctcggacccagagggggcggacacccggcaccgcgcgtgggagggattaactccaccccacagcgttgggtaaatacatgactggccgacgccgccgggtggggctatttaagagaca

SEQ ID NO: 5190 - DNA, 401 bp, Homo sapiens
  source 1..401: mol_type = other DNA
cctaaactttttctaataaaaatactgtttgatgctgtctccttgaaaatcgacaatatattgattatatatttaaaattaaatatttatatttcaataaaaagccttttctcaaacaccgctaatgtgttagtttgcatatggtccggctggaccaatctaatcgtgtgagagggtttgactcacccttgctggctttgtgcttagcagctgggaatggcccttagccgagaatcctcttctaaagcctttgggaaggagcacagtagaactttaagataataaattgtgttgtttaagccactaaatttgtggtaatgtatttcagcagcaatagaaaactaatacaaatgtgacagtgacagaccctccctttttcagaaaggattctagaagagcat

SEQ ID NO: 5191 - DNA, 456 bp, Homo sapiens
  source 1..456: mol_type = other DNA
ttactttttgaatttagttgatttctaagttattctaagaataaaaaacactgttgcaaatgcaaaccattgtccaaaatgtactttccagaggaaacactatttgttggcaacgttaaacccatttttcattttactaaaattatctttagtgggatgcaaaatgtaattaaatattaccctatagtacatgtgttagtgctctgaaaagttggttcagtgtatccaatatttaaagtctaatattaaacaatgctctgacgtgagcttcgtgaatggttaaagaaagggagaagcccttggcgcccatctgtcagcccagggttcctgcaggcgcgtgccttgggtggccccggggtccgggaacgtgaagccccgtggggagccccatggtcaaggccgggactgagggccgggtgggccctgggccgcctccacctctgggcccgccctgcg

SEQ ID NO: 5192 - DNA, 552 bp, Homo sapiens
  source 1..552: mol_type = other DNA
cccagcggccgagcagccgccccttggaagctcagcaccaaaggcaggcggccagggtcctggcccctctctggaccccagtatccgcggagtcggcctgcgggctgggagcagacctcgctccccacgcgagggcgctggcacttcagcccagcctccctggggaggtgccctggacgagacccgcgagggtgcggacacctcatcctccctggagcaggtctcccgaggcttgaagggccagggcacccaacaggtgctgagcgcgccccaccaggtagagtcgggcctctttcgaggggttgttgaaaattgatcaaacacacttgctgggccccagctcgcagcctgggaacgtaatcggatttgcgcgcacgaggaggcctcctggaggaggtggctccgagggtagacactcgagattcccgggtgatgagccactggcaggggctccccagccccgccccatacctgcgcggcggccccgcctccacgcccgtcagacgagcccccggggcccgcccccagccctgagctgcgcctcttagctct

SEQ ID NO: 5193 - DNA, 363 bp, Homo sapiens
  source 1..363: mol_type = other DNA
aaggagctcgaagagcagtttgtcaggaactgttcctggcacatagcaggtgctgggtgcctcggtccccagcttggggtgtgtccccctgggtcggactttggcgccccatccacgggcctcccgcccagccgcgcggaccgcagaacatacgccccgggcgttattcacgcggagcctccccgcctccagacgtcagtccggttgctaccgcaggaatcgagctccttccacctccggacgtgagaattacaggcttggatctcaaaccgccgcggtgagagccgggaggtgggaagaaagttgggaggcgcgcgcccccgtcacactccctcgccttcgccgggacgggggcggtggctc

SEQ ID NO: 5194 - DNA, 327 bp, Homo sapiens
  source 1..327: mol_type = other DNA
gcccaagaaggtatgtccagcttcctccttgcatcttgcggcacaacacctttgcggtatggtgcctggaaagccaggctgcccgtaagagactggctttgctaaggaaccttgggcaagttacttaacctgtttcgtcatctgtaaaatggagaaaataccagtgctttttagggttgccaacctaagcgaatttctcgctgcagatttggcctggcaggagacaatgccatagccatgtatctgggtgccagacacgctgggtgagctgagatgcgccactgcactccagcctgcgcccccggcgttctgggggctgggaccgag

SEQ ID NO: 5195 - DNA, 298 bp, Homo sapiens
  source 1..298: mol_type = other DNA
tgcatcttgcggcacaacacctttgcggtatggtgcctggaaagccaggctgcccgtaagagactggctttgctaaggaaccttgggcaagttacttaacctgtttcgtcatctgtaaaatggagaaaataccagtgctttttagggttgccaacctaagcgaatttctcgctgcagatttggcctggcaggagacaatgccatagccatgtatctgggtgccagacacgctgggtgagctgagatgcgccactgcactccagcctgcgcccccggcgttctgggggctgggaccgag

SEQ ID NO: 5196 - DNA, 339 bp, Homo sapiens
  source 1..339: mol_type = other DNA
tatccaataggaaaatgttgacacttacttgacaacataagcaaaaattaatgatattagatcatatcatagacttacacgttaaagactatgtaaaacatatattcaagaacttgcaattgacttaatcagaattaaaaacttctttgccaaaaagcaatcatttatgtaacaaaagattttcattcagagcatacatatatctaacaaaacatttgtattcaagcgctcggaaacagagaagtctcgtgcgcggcgctctaggagcgctggctggaggctcctcgagagctccccagacacgcccccgtgcgtacgcccccgtgcgtacgcccccgc

SEQ ID NO: 5197 - DNA, 520 bp, Homo sapiens
  source 1..520: mol_type = other DNA
aatggccttgtctgaccaacttattaaaatagtattatttatagaatataaactataaaaggaagaggcctttgaccctagaacacaacacatatatatatgtctccaattaaaacttttgtcctatgctttagaaggaaatgtttcatttaaaaaaaatacactaacaaatgattccctaaagacaaacattaatgctaagtgcatgcatgctgcaattctgcgtttatcacaaaagatcttaaattctagctaaagattcttaaggaaaaaaattaacatattagtgatatatcgtgattaggaaacacacaatatttcctactagttggtgtctgcctcacggagacactgggagagaaacctccttttcttggcgccaggctggctacgaggactcagtccgactgcgagttaggggtgtgcccaggccaccaagagaaaacgctcctacccgctcccaaaaaggccgggggagggttgctgagggtagacccctccccttcgccaaggcaggcct

SEQ ID NO: 5198 - DNA, 489 bp, Homo sapiens
  source 1..489: mol_type = other DNA
tcactccctagaatgttaaaaccccgggggtttaaaaacctagaatagtagaatcctaagaaattaatttgctagcacatctgacaccttagaagtgttaaaactaatagtgtactcccaggacacagtaccttggtgctgttgaactgaggtgccacctccataaagtggcaaccttgtttacctaaggtaccttcttgctttcttgcaaggaggagggacagaaagaggaaaagtcttcccattttaggagttcaagtccaggctggactgcctcctgtatccagggggagaccctggaagagaggctccagtgctttcccgtccatttagaaatgaggcagccaggccctcatctttcagaatcccataagcccccggggctgagtcaagtctttctctgggagggggcctctgcccagctgtcccctgtgcgtcatgtgcaggaggccaggcggctcgccttacagggacccggccacctctata

SEQ ID NO: 5199 - DNA, 603 bp, Homo sapiens
  source 1..603: mol_type = other DNA
gctttacccccggggcatctggggcaggcaggaccaggggaaagggtatgcccccgtgtccacaggccagccctggtctgggggtctatcaggagaggccccaggctgggggccagctccttgcagaggcctcactggggacaccccgcactgacaaagctatttcatgaggaggtgcctccaccctcaggccgacagcacagccatcaggctggcagcctctgctgtgggcaggggcagtggtggtcttcaccccagattccagaggggggtcactgagaaaccgcaggcagaagtctgtcccaggtctgccatgtgaccttgacaggtccctgcccatctggcccatgacccctccatctgtacgaggagaccgtcggctgctggggggcccgtgggcaaaagggccacatcagccacctcttggccccgtcatccatggagtccttgggaagcccctgagccccgtagtacggcccagcagttctccaggggacaagctaggcccccgctggaggtggtgagactcagccggggcctgattctggtcagcaccacagcagccagtgccctccctggccccgcctggccccgcctggcccc

SEQ ID NO: 5200 - DNA, 343 bp, Homo sapiens
  source 1..343: mol_type = other DNA
gggcaaggatgcccctcccctcaggtatccagggctgaggccttggattgagggccctgtcctaccaggactcccagttggttaggaacctccctatgggacagggctgacttatggggatccctctggcaagtcagccctccctcaggcactgatgcatggccagccaggagagcccaagcatacaagcctggagaggctggtgggaccaccaggagtcttcctgggagagagaggcacaggctctctaggagaggcccaggtgtccctgtaggatcctccctgcggctccctgtggccagcagctctgcagccctcaagggggtggggaccccagggctgg

SEQ ID NO: 5201 - DNA, 399 bp, Homo sapiens
  source 1..399: mol_type = other DNA
ctgatgggtggggagcagcacctccctcctgcctcctcaactgagcctgaagctggggtcataggggagctgtcctgtgactgatcacaggggcaaggatgcccctcccctcaggtatccagggctgaggccttggattgagggccctgtcctaccaggactcccagttggttaggaacctccctatgggacagggctgacttatggggatccctctggcaagtcagccctccctcaggcactgatgcatggccagccaggagagcccaagcatacaagcctggagaggctggtgggaccaccaggagtcttcctgggagagagaggcacaggctctctaggagaggcccaggtgtccctgtaggatcctccctgcggctccctgtggccagcagctct

SEQ ID NO: 5202 - DNA, 494 bp, Homo sapiens
  source 1..494: mol_type = other DNA
gggcggatcacctgaggtcaggagttcaagaccagtcatcccagctactcatctatcatagatagatagatagattagatagatagatagatagaaagaaatctcccttgaatcatctttcctagaaatattgccctgaaatatagtagtgtcttacattggaaggtgccatttaaaaaaaaaaaaacaagtattttcctttatgaaaataaacgatgttcattattttaaaaattctctaaagtgtaaaaataaaaaaaatataaccacttttaatatttctatttcggtcttgttttagtgcctagtttgaaataaacacaactttatttatttagcattgctatttacatttttcaaatatatctgaatggctactttaaattttgtgcagaacgtttggtccacaaaacttttttaaaaatatactccagaagatttaaaatctccagcgcactcgagatcgtgctcgcttggatccagcccagcgcgcc

SEQ ID NO: 5203 - DNA, 556 bp, Homo sapiens
  source 1..556: mol_type = other DNA
ggggacctgacagctcacggtcctggccgacaaccgccctgggagcggaggatggagcccgcagtcgtcccggcgcactgggcaagctctgctcccactgtggcaggccagatctcattctgatgcatgtataagttaaacatttttcaacccctagagtttaattaaaataatggagttgtttccaaggctctgaagcaattgtctaaatgcactgaatgtatttaagcactagaaaaacttgtattaataattttgagttggtctccttctccctgtaacggacccgggtgggtcggcccgcatcccttcccggcccgtgaggcgtccgcaggcggcggcgctcgggacacggcgttcgcggtgctcgcctccgctgcccgaggggaaaagggcaggagggagtccttgggccaggagccaaagcccctcaagtgcccgggcgcgaaccccaggcggtacgctagagccggggtagtgggccagcactcaccggcccagccaatccaggacccgctgccgcgcacacgcacgcgtccttttgcggccgctggcc

SEQ ID NO: 5204 - DNA, 246 bp, Homo sapiens
  source 1..246: mol_type = other DNA
aggactggaaggtcctctgctagaccggagcgctgaatgttccaagctccggggaaggcctcggctcccgactcctctcatccgcccatgctcgaggccgggcctgagccccggcatcggcctggccacccgccccgcggcccgagtccctggctcgcggccagcggccgcaaaaggacgcgtgcgtgtgcgcggcagcgggtcctggattggctgggccggtgagtgctggcccactaccccggc

SEQ ID NO: 5205 - DNA, 539 bp, Homo sapiens
  source 1..539: mol_type = other DNA
taaatgtatttgattgatgtctcatgcctctctaaaatgtataaaaccaagtgtgcctggaccaccttgggcacatgttctcaggacctcctgagggctgtgtcaggggccacggtcactcaagaaaaacaaatagctcgctgtcacgaggggcctctgacatctccttcttgagagaaaggctggccggtgaggtcgtagttcccgcgaccccgtgcttgcaagtactggctgcctcttccaggaaggatcccgcgggggacctgacagctcacggtcctggccgacaaccgccctgggagcggaggatggagcccgcagtcgtcccggcgcactgggcaagctctgctcccactgtggcaggccagatctcattctgatgcatgtataagttaaacatttttcaacccctagagtttaattaaaataatggagttgtttccaaggctctgaagcaattgtctaaatgcactgaatgtatttaagcactagaaaaacttgtattaataattttgagttggtctccttctccctgtaac

SEQ ID NO: 5206 - DNA, 285 bp, Homo sapiens
  source 1..285: mol_type = other DNA
ctttcgggggtggaaaggggatgatccctttctttcccatcataagcgttacagctaacatttgctggcctctgtagtcccagctactcaggaggctgaggtgagcagatcacttgagaacaagagaaaaacattataaatgtactgtatttgatcaaggtttgttctctgccaggctggagtggagtagcgtgatcttgtctcactactcaagtacctgggactacagtgatgcaggagccttcagagtgaagacccaaagatacaggtgactctgtctcatta

SEQ ID NO: 5207 - DNA, 304 bp, Homo sapiens
  source 1..304: mol_type = other DNA
agaaagaaatcagttaatgagtcatgtctagctatttatttatttatttatttatttatttatttatttattattcattatttttagggagtgcagtggtccgagagtagctgggacttcagcttttaaaaactatgaaacagaaaggaatagaaactatccttttcattggtagttctgtgagccacagaaacaggttaattttgctgggtatgcccagaactctccatttagagggaattgagttctgggatcaggccaaacaggccatgaacccatgttccccacttcccactctgatatg

SEQ ID NO: 5208 - DNA, 277 bp, Homo sapiens
  source 1..277: mol_type = other DNA
taataatgttatgagaaattttaagaatttgtgttgggctgaagctgtcctgggctgcataattctaggaaggctttctacatcaaagcccttccaacaaacatttactgagtcggggtttctgaatcctggcaacccaagcagatgtctgcactctgtaattctaacatgtagtaaatatgtaagtgaagatattttgataaatgaatacatatattgatttcaaacaaatgcatttgtagcaagattatacataaccccttagctgaaggggcca

SEQ ID NO: 5209 - DNA, 212 bp, Homo sapiens
  source 1..212: mol_type = other DNA
attttgcaagtctaaaaattattttaaaataaggatgtaggtcctagaactgggacctagagaaacttggaggcctcacttgattcttggtcctgtgaccccagagaaaggcaaatgtctaaaagcccagctgtgattgctcagtcattcaccaaggaggtactgatcctggaccacaggtgctgtcctggtaatgcatcatatatccacag

SEQ ID NO: 5210 - DNA, 212 bp, Homo sapiens
  source 1..212: mol_type = other DNA
cagggacaaggtaccatgtgcctggagtctgaagacttggatttcagatgcaacttgactagtagcatgactgctgctgtcattgttggcattattgatcactgaacattcatcagacttggttgtttgctgaaacaaaagcagctcagaagagctggtgtttaatcaatgtcaactcctgagtaataagccctgataagacccgagtatac

SEQ ID NO: 5211 - DNA, 137 bp, Homo sapiens
  source 1..137: mol_type = other DNA
aagcccagctgtgattgctcagtcattcaccaaggaggtactgatcctggaccacaggtgctgtcctggtaatgcatcatatatccacagtcttatcaatgagagaatcatgtccagttgaaagcaggatatacata

SEQ ID NO: 5212 - DNA, 206 bp, Homo sapiens
  source 1..206: mol_type = other DNA
agcatgactgctgctgtcattgttggcattattgatcactgaacattcatcagacttggttgtttgctgaaacaaaagcagctcagaagagctggtgtttaatcaatgtcaactcctgagtaataagccctgataagacccgagtatacccactcaggctgagctatgtgtggtttccacagcatctggtccagatgccatcggat

SEQ ID NO: 5213 - DNA, 229 bp, Homo sapiens
  source 1..229: mol_type = other DNA
tcttcacttgcctttgactgtgtactctgtgcacatggaggtaggagcagacatgacttcaacaaggtcatgcccccttgcagtgaggttaacttacttgaccaatgattcatttctaccaactgaatgaagctggtgagcagctgtgaccatagctggaagcttctctctgagagggcaaggtccaggtgctcagacctttacttggactttccaaggcctcccaaag

SEQ ID NO: 5214 - DNA, 271 bp, Homo sapiens
  source 1..271: mol_type = other DNA
gactgcaaacccctgcagcagatgtgagctgccccaaggacaatggaggtgggggcaaatgtcccttattcaggctttggcacagcattgatatgcaatcattacagcaattgattcgttcattatgctataacaatccaaatgctaaatttaacaagatcaataaaacgtataaccattcacattttcttgcatttacagtaagatgatgcagcgtcatgagcaaggtgcctcaactcagaactgggctctggggaactcgttcaccagt

SEQ ID NO: 5215 - DNA, 446 bp, Homo sapiens
  source 1..446: mol_type = other DNA
aaactgctgggtccattgtctacaggctcttaataatcctggggtccaaacattgggccactgggggacacaaatccagctgttagtggggctagccctgattttgggactaccccctaagcccagcggatagactctcactcaggggacacaaaggcactgtctgtgcatccacttacttcagtgactttaacagtgattagttctcaaggacaaaaactcttcattgttaatagacttgtccttctgacaagcgacagaagaaaaagacttgtcctgcttggcagcagtttgggcaacactcagccatattgctgagttgcagcgcacccgtcaggcgggcagtcagggcagaagactgcggctggccgagcccccggcagggccttccccctcccgcgctttcaggggaatggggaagctgggccgcggcagggactttgcaa

SEQ ID NO: 5216 - DNA, 587 bp, Homo sapiens
  source 1..587: mol_type = other DNA
ggctagccctgattttgggactaccccctaagcccagcggatagactctcactcaggggacacaaaggcactgtctgtgcatccacttacttcagtgactttaacagtgattagttctcaaggacaaaaactcttcattgttaatagacttgtccttctgacaagcgacagaagaaaaagacttgtcctgcttggcagcagtttgggcaacactcagccatattgctgagttgcagcgcacccgtcaggcgggcagtcagggcagaagactgcggctggccgagcccccggcagggccttccccctcccgcgctttcaggggaatggggaagctgggccgcggcagggactttgcaaactctgcaaaagtccgaggctcgccgggctccctcagatcatctcagtagatccggcgtgtattccccacccgcggagtatcccggtgtgcagcgatctcccgagagttggcgcagggccacttggctgcagagaacgtgtgcacctgcccgccccagccgagtagccgcgcatcctgggaagcctggcgagccacggcgccgggggcggccaaggggaggctctgcgag

SEQ ID NO: 5217 - DNA, 480 bp, Homo sapiens
  source 1..480: mol_type = other DNA
gaaccttttatcattatataattatcctgaaagtaattagaggcttttgactacatgtttttaaaggtttttggctgtattgacaaattgccctgcaaaaatttaccaacttaataccttaacatttgggctaatttaaaataatcataaattaaagtcagggctttcccaatttgataggtagaaatgacttaagttcaaaaaaagtcaagagaaaagatctaaaattcataactcaagaaatagggcatatgtatattcggagaattcctgcccttgaggactggacagccaggactgttctctgtagcattacaatttttaaaagcatgtaaacgtattaattaccttgactttacaatgacatttggttgttggttaaacttgcatttaaatttattatcagatggtggcgcgcgggctgtccctcccaggattccgcgagccaaggttgtggccggggccagggcaaccgaactc

SEQ ID NO: 5218 - DNA, 435 bp, Homo sapiens
  source 1..435: mol_type = other DNA
tggtttgttggtgttcccttccaggaaccctgaagagcttgcatgccatgcttccaggggtgggagtcgggagtcccctcccaccctctgcaagggacctttaaggccagcactgcatgttgggcttttccaattttgcttaaataacaacaaaatcaaccgaattttttcaaattagaaaactacagagaaaaaaatcatattatgtatatatatgtatatacatatgtgcatgtgtgtatgtatatgtatttttacaatttttttatccttgtttaaacctgccccctggtcccgccagccgcctcagccccgactcgccggggtcagaaagccgccaggatgccctccagcagcccgcgcgccggccgcaggtgcgcgccgccccgccctgcccttcccgcggccccgccccagcgctgacgtcacagtgac

SEQ ID NO: 5219 - DNA, 382 bp, Homo sapiens
  source 1..382: mol_type = other DNA
gttgcagtgagccgagactgcgccactgcactccagcctgggtgacattgcgagagactctgagcctgtaattataaaaggatctgtttttcacaacttgaaagtgagctacagttaaaatgagacttgttcttatgagggaaatgtgaaggggcgtattcctttcccctgccccgaccgctcgcggttggagagcccatgccgccccggctcggagtgacagcccaaccaggcctgcgacgcagttccgcccctcccggagctaccgcccagtgaggccccgcctctcccgccgcggccccgcccccctgcgtgtgaccgcatctaggccccgccgcgtccgccacgcccagcgctcggcggcgcccgccccactggcctg

SEQ ID NO: 5220 - DNA, 543 bp, Homo sapiens
  source 1..543: mol_type = other DNA
tactgctatttaggttagtcatttcacctcaataactcgaagtacctaaacatagacttttttttttttatcctacctcaggctcccgagtagctggaattacaggtagcccgccttggccgcccaaagtgctgggtcaccctcccaggtatctagagagtcgagtgggagggaggccactacagtaacatcagcacctagagcagtgctcaactgactgaaggctcctgtgagtcgccctctccccctggccccccaacccgcggggaaaggctggcgggacgccggacgcacctccgtccccaaggtgccacctgacgggtgatgcatgaatacagtcattattcaaattagctaaaacacctaactcattcgggtgagtctcgccagtccctctgggctgactgtcccgccccgcgcttacacccgggagcgtcgggcgggaggaggcaaggccgcgcacgcgcaaacgcgggcgcgccgccgggccgtgctagtgcgcggaagacgcatgcgctggcggcctgcgccgccttaagtgcc

SEQ ID NO: 5221 - DNA, 316 bp, Homo sapiens
  source 1..316: mol_type = other DNA
atcagctgcattgtgtcctggactccaaggcaagagaataacttcctttctaatatttcggttatgtttcctaggcaaatttctccagacgtctgaagtagaaccgacgtcaaaaaattaaatatatatggaagtttacttacaatttaattattccactcattaactactattcttctactaacaagtgcaagaagtcatttaggtgtagaaaagaataaactcactatacctgtatataaaaaagttatgtgtgttcttctaaggcacataccttcatccgaaagatgaattatgacatttgaacgtgaggaag

SEQ ID NO: 5222 - DNA, 403 bp, Homo sapiens
  source 1..403: mol_type = other DNA
gagtttcgtctgcccaaactcgagctatgattttcgtgggaacagaaattcttgaatgaacttagagggatcctggctaaatgaacccaacttggattgaatttgccaaagttcagacaatggaaaagggacaactcaaatttactagtggcatatgtaactcatgcatagaaattctagttacttttaaggtaacagggaagtctagttacctctaaattcctcaggtaaggagttactaacagtaaaactttcatgctgaaatgtttaaaagttagctatatttatacaaggaaaaccaaaagaaatacttaaatgagacttttaaaattcggcgccagctccgggagttccgcagagcctcgccccctgccagggcgcccggggcgaaggaccgcacggc

SEQ ID NO: 5223 - DNA, 467 bp, Homo sapiens
  source 1..467: mol_type = other DNA
atgcatagaaattctagttacttttaaggtaacagggaagtctagttacctctaaattcctcaggtaaggagttactaacagtaaaactttcatgctgaaatgtttaaaagttagctatatttatacaaggaaaaccaaaagaaatacttaaatgagacttttaaaattcggcgccagctccgggagttccgcagagcctcgccccctgccagggcgcccggggcgaaggaccgcacggcgcatgcgcgcctcctccttgggtcaggacccaccatcggagtgctcgctcgcgcctcctaaagctctcagccgagcgcgccgagacccctcagggcggccggtagctgacgtcagctagaggcagggcaccgcggaaggttgaatccacgccctggctgtgcgcaggcgccgtagggggaaggcctggcacgctccagccaaccagggcgtcacctgcagctcgtcc

SEQ ID NO: 5224 - DNA, 642 bp, Homo sapiens
  source 1..642: mol_type = other DNA
actaacagtaaaactttcatgctgaaatgtttaaaagttagctatatttatacaaggaaaaccaaaagaaatacttaaatgagacttttaaaattcggcgccagctccgggagttccgcagagcctcgccccctgccagggcgcccggggcgaaggaccgcacggcgcatgcgcgcctcctccttgggtcaggacccaccatcggagtgctcgctcgcgcctcctaaagctctcagccgagcgcgccgagacccctcagggcggccggtagctgacgtcagctagaggcagggcaccgcggaaggttgaatccacgccctggctgtgcgcaggcgccgtagggggaaggcctggcacgctccagccaaccagggcgtcacctgcagctcgtccccctgcccgggcttgcctcgagcgccctgccgccgccggagcggggagggtgttgggagggcccagctgagaattcagggttgggggctcagagggcactgcggctaggagcccgtcaaagcctgtcgcccaccggggcgagggcaggtgggagcgcctggccgtgcgtcgcgcgctggttggccagctgacgccccagtgcgcatgcgcgtccgaacagccctgcgggcggagcgactgtcctccctt

SEQ ID NO: 5225 - DNA, 348 bp, Homo sapiens
  source 1..348: mol_type = other DNA
tgcccatccgtcaacatgttgcagcctgccacctccaatggcagcagatggccttatggctttggctgtgcaccctcaaggttctctggcactggcctacagggggtgggcaacctctccaggttgcttcacctccatcattgttcactcaccaggcgagccgttccttctcctggccaggaccagtatccctttcttccctggagggaaagaggccttcagggcagccccgcaaggtgagggatgttggacaagccccgccgcccgccgcaccggagccggagagaagtgggcctcccagtttcctagagaggccgcggagggccccgggcgccgacgcgcgtgcgc

SEQ ID NO: 5226 - DNA, 379 bp, Homo sapiens
  source 1..379: mol_type = other DNA
acatttcaacagtgttctagtcgagtctggctctgttcccaggctggagtgcagtggcctgcctcagccgccgaagtagctgcgattacaggcgccgcgccggggtttcaccgtgttttcccaaagttctgggattacaggcgtgagccaccgcgccaggccgctggcccctttcttccctgaaggaaaagaggcctccagggcagccgtgcaaggaggcgaaggatgctggacaagccccgccgcccgccgcccgccgcccgccgcccgccgcccgccgcccgccgccagcggccctgggcccagggagaagcagagatgttggccctcccagtttcctagagaggccgcagagggcccggggaggcgacgcgcgtgc

SEQ ID NO: 5227 - DNA, 423 bp, Homo sapiens
  source 1..423: mol_type = other DNA
tctatcttggctcacacagatatatgaggaacatatgtcagggcggattactttgggccctgtaaaggacctatcaataaaaacacacagggcctgctcaaccatgtttgtaacaaggaccacacctgggtaccacctgccacccagaggctagacatccctaggaacctctacatggacaccagaatgctggtgctacatgcttcttcatttttaagatgggagatgcttgcttgactgcctctgcatttttttcagatgagaaaacagcgggatgtgagtggcctgggccctcgcgagaccccgaccccgcccgcggcaggtggccgggcacagccgagaagtaagccctgccagctctcccgggtgcggggacgcgcgcgcccaccttcgcaaacgagacttccgggatcccggaggggg

SEQ ID NO: 5228 - DNA, 295 bp, Homo sapiens
  source 1..295: mol_type = other DNA
tctcatagctaacaagtctttgaatatgtggtaagggaaaaaatcctcttggcccactatgggaatactctttcccttgaatgtaaactcaatggggcagagagttcattttcttcactactgtatccgcagcgacagtgagtgacaacctctctgctcagcaaccgggagtctcagcctgaggctggcagcctggccacccagagccaagcccttccatccaatgatagggcaaagcccggaagggaggcagggccagagcgtcggccgaccgcgcggggcttctgaggggcgg

SEQ ID NO: 5229 - DNA, 258 bp, Homo sapiens
  source 1..258: mol_type = other DNA
tgctcattgaataaacattcatctacaacctatatggcttcagctttgtactaggtgctaaatacatgggatccatgcagtcccatatagggtatatacaccagcttgattattatttaatatcatagctccaatatgtcatcatgatttataagtcatgttattatttatagtgagacaacctcaattgaaatgcaaatcaaaatagaaatctttcctgagacccggtccgcctctcttccccagttctgggaaaag

SEQ ID NO: 5230 - DNA, 452 bp, Homo sapiens
  source 1..452: mol_type = other DNA
aatctataggtgctatacctatacacactgttgatttcctttttcattttatgtaagatgtaaccatgagtttgcaacttcctgtgattctatcatttcaaaataaaaagtaaaaacaagtgtgtgaaactgatttgaaaaaaagttataaaatacatgttttaggacagttgaagaatattcttaatcttaagatttggaatgaagtgttctgatgtttacaactttcaaaaaaatgattttaaatatgtattgagaccacatggaaaatacgggtattcaatgtgccatactttcaactcttctgtactctgatattttcaaaataaaacatttgaggggtgcgcgcctcgcctgagtgtctcatccctgcttgggatgcgcccctccctgaggctcacaggttcctagagaggccggcttggcgacttggggagccggaagcccatccc

SEQ ID NO: 5231 - DNA, 252 bp, Homo sapiens
  source 1..252: mol_type = other DNA
ttaacgaattcaacaagtatttattgaatgccttctctaccaatcattgtgctaaacattgagatataatgataaataatagctccatatagctgattagagttgtataattgtgtgtatcttcctaacaatacctacgaaagaaatacaagtgtatgcattttagaaggctagctagagctagaataactaattcttaatagagactattttaagcaggtagaatatactagtttcttgttgaggctgaac

SEQ ID NO: 5232 - DNA, 340 bp, Homo sapiens
  source 1..340: mol_type = other DNA
tagtcctaacatttactgaagatttaaaaaatactagatgttcttagtaattcacacgtattaattatacctggtctgaatgtttttgagacagagtctcactctatcacccaagctggagtagtgattctcgcgcctcagcctccggagtagctggaattacaggccctgacctcaggtgatttttcttttggccacctgaacaaagatcctgggtcaagtaagagctccttgtggtgccggcttaaccggcgcagcaccgaaacccgtagctgcgtgcgggaaggaaccaccgagcggaagccgctcccaccttccgcggactgctgacgtcacgccg

SEQ ID NO: 5233 - DNA, 395 bp, Homo sapiens
  source 1..395: mol_type = other DNA
agctcataatcaggtagtgaatgtagggtttatcataaaacataaagacattgctgacatctgtgttttaacattccatttatttaaggaaagaggagaaagaaatgtttataaacccttcccttgcgccagactcctggagttcatgcctagcaagaaccttgcggccatcctttcacagctgtatttgggggcaaaaatagggtaacgaagccgggggcccagacttacttttgcagccgggtgccataggcgcgcgcattccgcccgctcaagatggccgcaaatttgaatttggcgctggacgttgacgcccgcatggaggccgccatgttgcccggcctacgcatcgggggcgtggcccagtgacgtcacagctaagcgcctctgtatcg

SEQ ID NO: 5234 - DNA, 446 bp, Homo sapiens
  source 1..446: mol_type = other DNA
aggcatgtgccaccatgcccggctcctgacctcaggtgatccgcccacctctatattatttttatttatttttaattaacaaagcatagaaacagattcacgttccagactcgagtcctcacagcttttgaaagtgagaaagaagagacaataaagtgatctttctttaccatctcacagcagcgctctgaaaactacagagcttccccgagttccaccggaattgggttcgagcgcgggtgccttagtctctacggtgggtccctccctgtagccgacccgttccttgaagcgggccagaaacgccggctcggctggccgcacgtacgcgatacagaggcgcttagctgtgacgtcactgggccacgcccccgatgcgtaggccgggcaacatggcggcctccatgcgggcgtcaacgtccagcgccaaattcaaatttgcggcc

SEQ ID NO: 5235 - DNA, 428 bp, Homo sapiens
  source 1..428: mol_type = other DNA
gcactttatacatttcaacactttattttcaaggacgtgtactttttaaatgggaacattttatttttactggagtgcaatggcagctggcctcaggtgatccaccatacgtaagtataacaggagattagaagtcaggtccccagcgccctctgccgaggcatctcttggtccggcggtcctcaggctggacgcggggcccgttaggcttcaccgggagcccggcttggcctcaggcctcgggtcccgacgtcctccccaggttaggccggaggccgccacagcccagggtctctgccacctggcccgccccctccgaggcgccggagagcgattcccaaggggcctgccggagcgtggcgtcacaggagcgtcgcgtcacgtgaggctgccatccaatcgcggcgcgcgctctgccctgcgggcag

SEQ ID NO: 5236 - DNA, 646 bp, Homo sapiens
  source 1..646: mol_type = other DNA
catacgtaagtataacaggagattagaagtcaggtccccagcgccctctgccgaggcatctcttggtccggcggtcctcaggctggacgcggggcccgttaggcttcaccgggagcccggcttggcctcaggcctcgggtcccgacgtcctccccaggttaggccggaggccgccacagcccagggtctctgccacctggcccgccccctccgaggcgccggagagcgattcccaaggggcctgccggagcgtggcgtcacaggagcgtcgcgtcacgtgaggctgccatccaatcgcggcgcgcgctctgccctgcgggcagcgggtgccaggcacggtgtcagcaggcaacatggccgagaggccggggcctccgggcggcgccgtgtccgcgaccgcgtaccctgacacccccgcggaattccctccgcacctccaggcgggtgcgatgcggcgccgcttgtgcgccggcgcgttcggggccctggccgccgcctccgccaagctggccttcggcagcgaggtcgagcccggggcgctgttggtgctgctgctgcgggcgggcgggcggggcgccgctgggcggaggaggggcgctgcggggcccgcggggctcttggggtggggcgggggtgggcgcagggc

SEQ ID NO: 5237 - DNA, 334 bp, Homo sapiens
  source 1..334: mol_type = other DNA
ctggatgagtgctctattcatggagcaaatgtaattctaatcatggaagaattcttaagttagatcagggtggagccggactcaaggctccatggcccatgtacctgctgtgtctacctgtagcctctccactcatgcaggggagtttcaagcccaaggcttctggctcagctttcctcctggcacccttagaaggaagtcagtcccaggagagtgaggttgtctagacggaccagctggaaagatcatgatggtggcccagccttgggcatcagccaagggaagcaggcctctgatggagcaggctgcagctgcagccctaccccagtgagcc

SEQ ID NO: 5238 - DNA, 375 bp, Homo sapiens
  source 1..375: mol_type = other DNA
tcatcctaaagcatacaggtcctggcatgttgtccatggcaaatgctggacccaatacaaatggttcccagtttttaatctgcactgccaagactgagaggccattgtgtccagggagttaagtttatgattatgaaataaaaactaaataacaaaataataataatagtacattatttgcttctcagttttttccattttgaaccatgtggatgcattatatattcaaaatgtaaaacaaaaaactcacaagcatctcttactttttcaacttgaagaaaagagaagaagaagaaaggttagcctgggttcctagacttaagcttcatataacagacaaggaggtgccattgtccgttgtagattccgggattt

SEQ ID NO: 5239 - DNA, 311 bp, Homo sapiens
  source 1..311: mol_type = other DNA
tatcggctgcctaagcgattctcccccgagtagctgggtaagtgctgggattacaggcgccgctttttaaaggccctggggccgatgctctctcacttgcccgggttcggaatctacggagagtcgccgcagctcggctgcctcctcactggcaaacccagggcaggccgcgacccgcagggccaggctgaacccggcggccgacccaacgccgcctacctggacgcctcgctcagcgtcacggacgccatgctgccgagctgccccacgagccgcacgtcatctgcgcgcgcgtcagcgcgtcatcaacc

SEQ ID NO: 5240 - DNA, 277 bp, Homo sapiens
  source 1..277: mol_type = other DNA
caggctccaggcaggagggaaggaatcccttggattttttaaccaaaaaatgcataagggggcattgctaccccgtgacagctgggtagcctgggcaaattccgagcctcaatttcctcaatggtaaaatggggaaaggaacagccactcagctacccaaggtagctgctccgcagatgtgatgacaaccaccgtgtgtttctcagaatcctaggaaataagggcttctttctagaaggcaggctccctggcagagaggctctgtggccctcaggac

SEQ ID NO: 5241 - DNA, 497 bp, Homo sapiens
  source 1..497: mol_type = other DNA
aactgctcacagctcccagtgttggggacgtccgggcactgcgcacctcgccagtgccggttaccaagcgcctcctcccccgtctgtgggaggggtggggacgccttaggactagtgtcccccattcccggacacctagggagggctgcatcgcctctccagccatcctagggactctctctctctctctctcacacacacacacacacacgcctctcccactgggagtcccccggcccgtgaggctcgcctcggaggccagtcccagaccccggtggggctcccgccgccgccgccgctgccttcccctgcagtccccaacccgggacccggcctcgggcttcggcgatggctcctcggaacgaggcgccgcggctctctggactcggccagacaccgggcggcgcgcaggagaagcccatcgagctctcccggcagtggcggcggccgcggctgcaggagcggccgccgcgcaggttgatgacgcgctgacgcgc

SEQ ID NO: 5242 - DNA, 393 bp, Homo sapiens
  source 1..393: mol_type = other DNA
ggaaactttgcacatatgggcaccttggtgcaaattacaaaaggtacctcctctaaactgacaaattatagaaaggcatctctttttctggtctgacccactctagccagggcaaggcttaggagacaaatgggccttcatgtgtcccatggcaccctatgctggtacatcacgtgactgggtacagtggcagtctctgtgtgaggcacacatgacctcaggctggtttgccagtatacacaaccactctttgtgagtgtggaatgtatgcagacacagccaaatcctgaagccctggtgtttcagaaagaccagggtactggctgccagcaggacagctcctgttagagccatgtgcacctgggttccaggccagccctgccagctggggct

SEQ ID NO: 5243 - DNA, 271 bp, Homo sapiens
  source 1..271: mol_type = other DNA
agataccctcaggatcaacccccagctgacttcaggagccctgatgacgtcctgcacggccttggaagagatggctgtcttctgctgaggcagtccctgcaggaggctgaaagctgaggactttcttcctgcagcattcctagctgactagagtctgtacatacacctgtctgtcaagatattcctttccacagaaatctttagtaaaaggttctagatatttcagctagaaatgggccaggctcaagcctctgaccacagcctgtgccca

SEQ ID NO: 5244 - DNA, 404 bp, Homo sapiens
  source 1..404: mol_type = other DNA
caggttgctccgggtgactctggcccagcttctggctatccatgaacacaagtagtcccagggagtcattctggcagaacccaggtctgctagcaaaaggagtccagcgccgtttgacctgaatggagtaggctgcaggctcaccgtcctgcaaatactagcagaggatccagggcttgggtggcccacaaaaacgaggcgcataatggcctttgtctcctcgacagaaaagggaaggtagactggcttcctctcattctcagacttggggacaagtccgctccaacgccgcaatggggagtagtagggacccagcaacccggtgccgggagccctgcaccctgggagggagccgggtcagctcgcgatcctgctgcgcagggcggggctcgggccggtccgcc

SEQ ID NO: 5245 - DNA, 434 bp, Homo sapiens
  source 1..434: mol_type = other DNA
tacaaattaaaccttatcataggtatgtatgcataggcaattcaagcctgtaggaaagaaatggctcccaaacattactttttcctgtcctataggatattaaccaattttgcacaattggcaaattcatttcagtattcttgactgcccacatatatgagttcttttaaatcgatttgtgatttattacaagcatgaaacacggaaagggaaggcatcatgctttcctgccgccccagggtcactcatcatgctgggattcgaaccctggggtctgggctatatcccagggctataactgtaataatttgagtcccagacgtctagagctttgccagaggccgagaggcggagccccgggccgccgcgcagacgccccgccccgcccggcgggctgctgggagtcgaggactgggttgctctcctccccgacg

SEQ ID NO: 5246 - DNA, 295 bp, Homo sapiens
  source 1..295: mol_type = other DNA
agctcgcaaaggccggggctgctgcagattctgacgcgcagccgcaccgcaggacagcgggcatcaaaatttcagatatttaactttcacattacctttccaaggtcttgtaatactttcacattgtgaatatacatctttacaaatagctgatcacccttatacagtttgaacgggcttccgggtaccaccaatccgcagcggcttcgtcacggcgctctccaacccgccgcgtcggcaccgcctcccgttcaggccggctctcctgcggggcggggaaaggcggccgctgtgc

SEQ ID NO: 5247 - DNA, 283 bp, Homo sapiens
  source 1..283: mol_type = other DNA
aattaattgatcgattgagtgattggttaacggacagtgtccgatgacttttcgcgccgattacctgaggtcttcttacggtaaaaacaccggtagctcgcaaaggccggggctgctgcagattctgacgcgcagccgcaccgcaggacagcgggcatcaaaatttcagatatttaactttcacattacctttccaaggtcttgtaatactttcacattgtgaatatacatctttacaaatagctgatcacccttatacagtttgaacgggcttccgggtacc

SEQ ID NO: 5248 - DNA, 345 bp, Homo sapiens
  source 1..345: mol_type = other DNA
catgagctcttccttgccaggcaggagagaggggaagatattttcaagccccggacccagtaggcacgcagggccaaacggaggggacgggactgccgggaaggtccctcacttcttttgaaccatatgacattgtcctttctataaattaaaaaatggttgaacggagctgggaagtggttcacagccgtgtccccagacaacgcctggcagccccgccgagccggaggaccccaggggactccgccctgtcctctgcgtgccttcccggccgcgacgatcgggcggggtggggcttcgcctctcggacgggcgcgccgttaatgagattagcaatttaaaaac

SEQ ID NO: 5249 - DNA, 216 bp, Homo sapiens
  source 1..216: mol_type = other DNA
gttgacccaaggctttctgtgggctgatcactgtgaatcagaatttctggagataacccaggaatttgttcaacaagcagttccaggcatatggaaaaacccatgctttttgcattttttttaaatggaaaaatgttgctagagacttttagctggaaatatcaggaagttccgaggcgcgaagcgcgttggtggccactgcagtcatcagccaat

SEQ ID NO: 5250 - DNA, 353 bp, Homo sapiens
  source 1..353: mol_type = other DNA
actttctaaagcagtgcctttcaatagcacccattgggatagccactagctgcatgtggctattggagaaactagttaacacttaaaacatttttcttttttgatacagggtagtgcagtggtgcaatcttggccctcagtctctcagagtgctgggactacagaggtgagccactgcactggccctagttagcattttaattaatttgaatttaaataggcacatctgccaggtgacaccacctactcatcatggcaagcctgacaaggctgacttctgtctaggaagagaatttgctctcttgggctaccccaccagtgacaacacaggcaggggtggcctggcttccttt

SEQ ID NO: 5251 - DNA, 361 bp, Homo sapiens
  source 1..361: mol_type = other DNA
tccacaagaaggcagctgcttctgcaaggcactggggcatgtgacccaggctgacatgcctccaattcctgccttccagcgttattagggtcagtaatgttaactgaccagcctacgcagggtgggtgggcactgcttaggaggtggggctgcaccaggccctctggcagacccatcatcatgctgttgattgctgctatggggcttaacagctatcacatatgctggagctgcatatgcacgcgcccataccatggtgactagtgaattaagtaattttaaggtacggagtgtggggtatcagtcacccatccatctctgacccacgcgttacacaggggcgggcagctgagggctctta

SEQ ID NO: 5252 - DNA, 750 bp, Homo sapiens
  source 1..750: mol_type = other DNA
gttaaaatcacatagtttatcatgaactcttatgtgagggcccacagaatacatggcgggttcatggactcccagaattgtgtgtgtgtgtgtgtatatatatatacattatttctgagaaaaggtctgcagtttttaggagattctcaaaggagtttatggtcaaaaaaggttaagaatcacaattttatatccttttgacatctatttgttgtaatagtaatagttaatacttattttgcatatttactttgtgtttacactgttcttagcaatttaactgtattgcattttccaaaatcagtaaaaatacttcctaaacatttaagtatattctattttatgtatgaattgtaatttgcttcatcattatcagacttttacactacttccaaagttgtagattttttttttaattttcagaaaacaaaataggattttaattatagaggataaagaaatgaatgtttttagttcgcctagaagggaaagtaatttttcatactctatttgcacagcactgtaatctgtttaccaattattatacatcaaagtttaccaattattacacatgaatttgcacaggtcctttgaggaaatgaacattattcttaagagcaaagccacctgtttcatattttaaatgatgaaaaaatatgtttttgcccatgtgaatcaataacacatacacatcgccccagagagcttgtggggggcaggatgtcctctaaccaaggatttttattaagc

SEQ ID NO: 5253 - DNA, 469 bp, Homo sapiens
  source 1..469: mol_type = other DNA
ctgttttagctacatctaatttataaaattagatggctaatgagatgtcatagcctaaaatcgactaagaaattgattttctttctgtattattgtacactgattgaatgcattttgttctattttgcaacacccatcttataaatagaagttgagttcataaacacgtagtttttgagcactaattttaagtaagaccctgatattaagaaataagggcaccaatacatgtttttctatttcccaatatatcaaaatattatcattttaacatgcaatcactaaaaattaatgagctagttaacaaggtgcacgtgccacacaagaacagcgttgttgtcaaacctggggccggggactgggcggtgggagcacttaaaccccgccctgcggagtcgccgggagttgtagtcggagccccgggagtccgatgggagttgcaggcctcagccccggggagcacgccggg

SEQ ID NO: 5254 - DNA, 211 bp, Homo sapiens
  source 1..211: mol_type = other DNA
ataataaaaagactaataactcaaatttttaaaataaaaagatgctcaacatctttattcattaaggatgtggggagggagtgttacagctcttttactccccccacaaaagtctgagtcacaggtttttacaggcttagaatgacttggactgagaccttggcccaggaccaatcccaaggatgtttcagtttctttaagtgaaatatga

SEQ ID NO: 5255 - DNA, 340 bp, Homo sapiens
  source 1..340: mol_type = other DNA
cttaggaggctgaggcgagagtatctcttgagctccagagttcaaggcaatagtgagctgatcatgccactgaataacccaaggaatgagataaattatttttaaatcatatctctgataaggatctagtatccagaatgtagaaataactcttacaatttaataataaaaagactaataactcaaatttttaaaagataaaaagatgctcaacatctttattcattaaggatgtggggagggagtgttacagctcttttactccccccacaaaagtctgagtcacaggtttttacaggcttagaatgacttggactgagaccttggcccaggaccaatc

SEQ ID NO: 5256 - DNA, 397 bp, Homo sapiens
  source 1..397: mol_type = other DNA
gctccaggccagcatggatttctgaaatcagagcctaagaaagacagggtgggcagaagtctggcctcagcctggccacgcccagggctggagtaaggtgaggcactgcagaggtgtccctcgggctgagcttctgtggcccagcatcagtcagccgctagagtgagtcccaaacatgtctgtctaagggcaactcttgggcttcagaaatgctgatgtcagatcccaacctcagagattgtgatttcctagcagccaggactcttagcacctaaggcatgggtgcaattacagtaactgctatgtcaccactgctcagactctgttgtgcccaagaatctgctgggtcaggggagatgcagagtctgattcagcatgtctgggttgggcccagaac

SEQ ID NO: 5257 - DNA, 364 bp, Homo sapiens
  source 1..364: mol_type = other DNA
agtcacagtactcatcatttgtcagacatcactgtgccaggcactctgacatttttcatgatctgagtgatctgcccatgtcacaggtggagagctgggatttgaacttggcccatgttcgaagctgctgcccttccattcacaatctttaagaagtaaggctgagctcccagggccaagactcaagaggctcagagtgagtcctcgcagttaacgtggccactggtgggcgttgtggccattcatgagcaccaaaccacacaaaaagaagaactttgtccctttcttgtcattttgaaagactgtgaaactggagccaattctccatcatcacacaggactgagtacttcctacggtcaggat

SEQ ID NO: 5258 - DNA, 394 bp, Homo sapiens
  source 1..394: mol_type = other DNA
gacatggctctgccctatgacgcttatgtcacagtggcatctgcagagcaatgctatgacttaaatatcattatttccagtttagagatgaaaaagctgaggtccagcaagtttaaattactcaagtcttttagacttgtctaaaccttggaccctgcagaataattagtttattcctttgccgggaaattcttatgcttattcaagaattataaatcccaggtctttagagaccagcctggccaacatggtgaaacggcatgtgcctctaatattgcagtgaactgagatcatgccactgtactccagcctgggtgacagaatgaaatcctgtcagaagctagtctgtttaaaacaggaagttatatacttacattgtttactactttactaa

SEQ ID NO: 5259 - DNA, 443 bp, Homo sapiens
  source 1..443: mol_type = other DNA
aaaacgtctttccaaggaggggcatttaaaataacttttgctaaggacgttcctgacacaagagataatttagcatttccttttcattaaaaagtttgaaatcctgtaatttgtgataatggaatttttttttaaataagtcctagctactcaggaaagttgctatcttagaaacggtagttaataatgaattctgtatatataaatagctagaagagagggttttcaatatcattattatttcaaaagaaatgataaatgtttcagagatatgtaattaccctgatttgatcattgcacaatgtatacatgtagcaaaacatcacattgtgtcccataaatatatacaattattatgtgaattaaataaaaaaaaattttaaagtcttatctaaatgaaatttctaatgtgctcatatcatgcaaattatcactagtaggag

SEQ ID NO: 5260 - DNA, 494 bp, Homo sapiens
  source 1..494: mol_type = other DNA
ccagagggcatcttgtggctcgggagtagctctctgctgtcttctcagctctgctgacaatacttgagattttcagattgactgtatatagtatagtcataaagaacctgaacttgaccatatacttatgtcatgtggaaaatttctcatagcttcagatagattatatctgttactcatttagacaacaggttgtttccgtttacagagaacataatgtgaagtccaggatccccctctacatttaaagttggtttaagttggctttaattaatagcaactcttaagataatcagaattttcttaaccttttagcttgaaaaacaaatcatttgcttcttgatagtaatttcttttactaaaatgtgggcttttgactagatgaatgtaaatgttcttctaaccttcagaccagagatctattctctagcttattttaagctcaacttaaaaagaagaactgttctctgattttatactgtctatatgattga

SEQ ID NO: 5261 - DNA, 216 bp, Homo sapiens
  source 1..216: mol_type = other DNA
ctattttgacaggtacaaattttgtattcaacacatctttggtgggaaaaggatgtcatttaatcaatatataaattctaaaagagaagctcatctagaaccctagcccccagcctcagtttggggttaagtacacccagggcgtgactgtcatggcaggttggtcaggaccctcaggtctggagtgctgacagtagctggtacctgttacctact

SEQ ID NO: 5262 - DNA, 162 bp, Homo sapiens
  source 1..162: mol_type = other DNA
ttaatcaatatataaattaagagaagctcatctagaaccctagcccccagcctcagtttggggttaagtacacccagggcgtgactgtcatggcaggttggtcaggaccctcaggtctggagtgctgacagtagctggtacctgttacctactagcggcagt

SEQ ID NO: 5263 - DNA, 276 bp, Homo sapiens
  source 1..276: mol_type = other DNA
gtacacccagggcgtgactgtcatggcaggttggtcaggaccctcaggtctggagtgctgacagtagctggtacctgttacctactagcggcagttcccggttgctttcagacgcttcagagatcctctggaggcctgggggagccaccaggggaatcaacagtggtttctcgtgcccctcagggtcaggagcagtctgatggccattcccacagctcccggatgctgggtctggaggctgcgcccttcccctgcaggagctcgcatggtttcaaa

SEQ ID NO: 5264 - DNA, 374 bp, Homo sapiens
  source 1..374: mol_type = other DNA
gcaccatgctgtatgtgacactattcttagaagcagtattctagcttttgaattttaaaatctgacatttatggcgattgttaaaatgaggttaccatttcctactgaacatagggcatctttctcattggcaaataagaacatggaaccagcccacagcagggcagggagataccccatgggcagcttgcctgagactcctcagctcactgctgagccaaggtgaaatcatctgctgctcctctgctctgtgtcctgccctctagaaggcactgagaccagagctgggacagggctcagggggctgcgactcctaggggcttgcagagtgcaggctggctttcctctcgcagcgcgggagcctggatcctcaa

SEQ ID NO: 5265 - DNA, 366 bp, Homo sapiens
  source 1..366: mol_type = other DNA
acaggcatgagccactgtgccctgcctgtgtcccacaggcaccatgctgtatgtgacactattcttagaagcagtattctagcttttgaattttaaaatctgacatttatggcgattgttaaaatgaggttaccatttcctactgaacatagggcatctttctcattggcaaataagaacatggaaccagcccacagcagggcagggagataccccatgggcagcttgcctgagactcctcagctcactgctgagccaaggtgaaatcatctgctgctcctctgctctgtgtcctgccctctagaaggcactgagaccagagctgggacagggctcagggggctgcgactcctaggggcttgcaga

SEQ ID NO: 5266 - DNA, 369 bp, Homo sapiens
  source 1..369: mol_type = other DNA
gcctgccgaggtcctcctcttgggaggtggccagggacataggtcagtgcctggccccgaggaagacacattggacgggtcttgggatgcggacacccagagtcttgtttcctcctcaatcctctcttgcaggaagcagaggatgggctgggcaaacagtgagggggcagccttggctgtcggaatccgaatcccgctgaggtcctgtagcctgtctccaccgtttacagtggtgctggctgaaattcactcctcctgatttggaacattttgatgaataaaatcacaagttctgtgtctttttttgtccttggggcagagacatggttcatgggcccaatccaggtcctcaaagggagggcaggtctg

SEQ ID NO: 5267 - DNA, 296 bp, Homo sapiens
  source 1..296: mol_type = other DNA
aaagtggaaaacaccattttcatttctaagtcatgcagagagcccagcagtgctcagtccagatgtccctaggaagcactgaagccagtcactgtcacttcactgccagaatgacattccagaaggacaatgtgcaatgtgccctagagggagcgttattggctgtaagtgactattacactaatttccattgcataaatggaaggattcacatttctagtttttttaaaaaaaggtgtgagaaggagtcttaaaattaatgtcattaatcaagacagagggttaccctcatgctt

SEQ ID NO: 5268 - DNA, 454 bp, Homo sapiens
  source 1..454: mol_type = other DNA
cctgaggtcattctagaccagcctggccaacatggtggcaggcgcctgtaatcccagctacgttgcagtgagccgagatcacaccactgcactccaataatgatttttaaggaaatgaattttagaagtatgacacatatatcacacaatgattactgattattaacttgtcagcaaaacatatttggccaattagtaaagtatctaaagagaacctaaactcacatacattttaggatattaaaaagataaaatgtaacggtgaaattgagaccttcgatgtcgggttcccagcttagcgtgctgagcactcggaaccagatagtccctgggccggggctcgcgctggccggctgcagcgcgcagggtgccaagcccctgttttgtctcaggctgggctgagtcacatagaatagatagatagttgatttagcacatgtcctccagacatatt

SEQ ID NO: 5269 - DNA, 362 bp, Homo sapiens
  source 1..362: mol_type = other DNA
tcagcctccccagtagctgggattgcaggcgcctggccaggccctgaggtcattctagaccagcctggccaacatggtggcaggcgcctgtaatcccagctacgttgcagtgagccgagatcacaccactgcactccaataatgatttttaaggaaatgaattttagaagtatgacacatatatcacacaatgattactgattattaacttgtcagcaaaacatatttggccaattagtaaagtatctaaagagaacctaaactcacatacattttaggatattaaaaagataaaatgtaacggtgaaattgagaccttcgatgtcgggttcccagcttagcgtgctgagcactcggaacca

SEQ ID NO: 5270 - DNA, 271 bp, Homo sapiens
  source 1..271: mol_type = other DNA
acctgtggatccatggcattcacacagtggcctcagctttagaaattggaattaaatgcgatttagaaactattaacgactttgggcgtatttaataacacatgaaatagaggcgactccggctcatagacgcgcctctccaggcctcccatgccggagaactttttcctggaacaggccggcactcccactggagagtcccagctgctgcgcctcggctctcccgggcacctggcgccggctcccgcgttggaatttgcacttcaagtct

SEQ ID NO: 5271 - DNA, 297 bp, Homo sapiens
  source 1..297: mol_type = other DNA
cgactccggctcatagacgcgcctctccaggcctcccatgccggagaactttttcctggaacaggccggcactcccactggagagtcccagctgctgcgcctcggctctcccgggcacctggcgccggctcccgcgttggaatttgcacttcaagtcttcttggccacccgggtatcccccagggggagtacggggctcaaaacaccaacttgattagagaaactgatttttcttttttcagttttacaagattgtcatgctggtgggcgtcccgcccacctgaaggagaatccccg

SEQ ID NO: 5272 - DNA, 360 bp, Homo sapiens
  source 1..360: mol_type = other DNA
tacagagcaaggaggcaacttgtcccctggacaaaaaataaactgccacagttgtatgtttcagaaaacttggtgttgcctattatggcatcataaacgatacacacatatatcaaatataattgtcaaaaactaagtatgctctggcctttgtaagatttgtgttgttgccatggcaaaactccatctctacactccagcctgggcgacagagtgagactctgtctcaataaataaataaataaataaataaataaataaataaataaataaaatagatttgtattgttgcttagttttaaaattgactactattttatactggttactacccaagagccaccagtcatgacagtccat

SEQ ID NO: 5273 - DNA, 605 bp, Homo sapiens
  source 1..605: mol_type = other DNA
ggggatgagcttggcaggccccaggcccctacttacctccactgggggtctcttcagcctggcaggttgggggatgcctcccacctcctcagtagggggctgagtagggggctggtgggccaccctggaacctgagtgccactgagagcaatgggtgactaacctggtggccagagctttgttacaggtttgaactaagttccctcccgcgctccgcacaggaggggcggccggccgtggacacccagcccagggggccgcagggcgcctacgaacccacacagcgctccgcgtgtgctggcttctgtgactcagggcagacccgggaggtcacggggctgcaccacaggctcgcagagcgactgactggcggggcgaggtggtggcacggcggcctcggagcctagggggcggaggggtcaagactcccacttttcctccccgcgccgggtcccaggggcctccggatcccgggggacgccagagggaggcctcaggagaggcttggggcggcgggacggatcaataccgcgcgccagctcctcggtggcccgcccgtggcccccgcaactccagagcaacacccggaggcggggcggggcggg

SEQ ID NO: 5274 - DNA, 471 bp, Homo sapiens
  source 1..471: mol_type = other DNA
acgctaggtccctcccgggcagggtcactggggccttccctgtcccccaggcctggtctgaacaggcagggaagagacacgcactgccccagggagggggcgctgaactgtcacacctgatcccgccgccaggcatttgccatgccgctcccatgcgaaaaggccacctcctggaatcccgggtcgggcccttccgccagccggctcctggcatctcctgctggctggggccccgtggccctgccaccacggctcaggtcaggcccggggcgctgccccgaacccaagcaggctagcagccaggcaggactgccgccgggaccaaggagctgggcggggaccgcagcagccgaggaggcgggagcccccacctgcacccgtccgcagacgcgcgcccttcgtcgcgcccttacctgagcgctgtggttgccccgcgccgggactgcctgtgcggctcctcgctcgcccgcc

SEQ ID NO: 5275 - DNA, 414 bp, Homo sapiens
  source 1..414: mol_type = other DNA
cctccttggagcccctcaggcagccaagggtcccaggctggaaaccctccaaggggtgatgtgcagcttaggggatgagcttggcaggccccaggcccctacttacctccactgggggtctcttcagcctggcaggttgggggatgcctcccacctcctcagtagggggctgagtagggggctggtgggccaccctggaacctgagtgccactgagagcaatgggtgactaacctggtggccagagctttgttacaggtttgaactaagttccctcccgcgctccgcacaggaggggcggccggccgtggacacccagcccagggggccgcagggcgcctacgaacccacacagcgctccgcgtgtgctggcttctgtgactcagggcagacccgggaggtcacggggctgcac

SEQ ID NO: 5276 - DNA, 488 bp, Homo sapiens
  source 1..488: mol_type = other DNA
cttgcccattcatggcatgtccaggccagaacctcacagggctctggagccacagggtctccctggttctcagggcaggccttgctgggccatccccagcctgcgcaggccttcaccagtgcccctggtgataagggttccaggggcccaacacctgggctgcttctcctaacactcagcagcaggaggaaggggagtctaccaactccaggcctccccaggtcagggtcctggcttagactgaagtcagagtcagtgttcaggctgcccacttctgtcctgtggggctgaagatgctggcttcttctggaaccctccatgctctggtgtccagggtgaccagagccgcctctgggctgggaaggcccatagaagggagggggacctgttgattagggacctggccccacgcccacccccacctcagtgtccctggggatgcggaaggtgggggcagggagggggagcctgcggcccgatctcccggg

SEQ ID NO: 5277 - DNA, 383 bp, Homo sapiens
  source 1..383: mol_type = other DNA
ccctgccaggttatagatttcctcaacccaggagctctttcctttgaaaatacctgtggtcctagctactcgggaggctaggaggctgcagtgagctatgatctcaccaccatcacactccagcgtggtgacagaatgcctgggctgggcactagggtgcttcatgggccaggtaccaggcactgtcacgagccaggcacatcgtactgtcggcctaggaggcactgtcacgggccgagcaccgggagtaccactccagggaggttcctgacagcagcatcaccttgtggccctggcagggccttgccatgaccaagtcctgtgactgccacagccaggtaggcctccaaccttggggcggatgcctattctagaatcttggc

SEQ ID NO: 5278 - DNA, 361 bp, Homo sapiens
  source 1..361: mol_type = other DNA
agaatatcctggcttgccgtaccttagaaaaaaatattttcttgtagagatggactcgaactcctgggctcaagtgggacaggtgcatgccacaatgctggatcctcagtggcgcaatggtaagcaccagtgttcctctgtggaggagacttagaatgaagcagtctttcaaaatcattatttaaaacacatctatcgcccgggctgtcactaggggcgcccttgcgggtcagacaccacgagcgccgtggcgggtggcccctggggggcgccacgcaggcggggcactaggagcatcccagctcaccagaggccgcggcatgcggccaacagggggcgccgtcgtgggggcggcactggg

SEQ ID NO: 5279 - DNA, 402 bp, Homo sapiens
  source 1..402: mol_type = other DNA
gaggtcaaggctgcagtgagctgtgacactgcactgcagcctgggtgacagagtgagaccctgtatatccaacttttttttttgtaagttataaatatgtgttaaatttttcaaatgacttttgaaccttttatgtggagaatccactgagaattctttcaatgtcttaatcatcatggtgcattgttttttaaaaatacaacatgagctactattttatttagaatgcgtgtttcatacgttcatacaaccatataacttgacttggcactttgaatgttcaatgtgaaaacttctgacacagaagtcaggagcttgcatctaagaaatgcagcaagcattatagcttttcagaagtggcggaggaacttccccagatgcaagaaaatgcatttcttgcca

SEQ ID NO: 5280 - DNA, 243 bp, Homo sapiens
  source 1..243: mol_type = other DNA
ggagaaaaacccacagtgggctggtccttacacttgttcgtggaaaacactgtcatggctgtccacttttggacaggaaaaagtggaacatacagcaattcaaaagttgttattgttgttgtttttcctccaacttcaacaaagatgaagcgccgatatctaggtctatgtggagaatgagggctcctccatgaattcccagccaggtaccatgcctacaggtctgcgggcatcgccctgggg

SEQ ID NO: 5281 - DNA, 582 bp, Homo sapiens
  source 1..582: mol_type = other DNA
aagaagccttttcaagccttgccactgcctcacagcctgctggtgggctctcccaactaggattccaagacttcctgaaggagaagagggaggtgggccctgggccctgccagacacctgggctggttggtccagagcttctgcatccactcagggacacaggccccgggtgggagccaagcccggagtgtgtgttgggaggtgtgcaacttatcacacgcacagtccagcgacgcatgctggtggccggctcccagggctcagcctccctcggcgacgcgccacatcccgggaggagcggccgctcctctgtgctcctccggcccggccctcggcgcggccagccgcgtggaaaccgcagcggggcgggccgggatgagctcacgccgccgcccgccaggccgccaaccctaactcgctccagatgcagggcggcctgtgcggggtgggccggggcctgggccggggccgggggaggcatggcccactcgcgccccctgcaggggaggcctccgcagatctcctggaggcgggggctgcaggctctgggcacaggggcgcgggtggcggctgcctaccccg

SEQ ID NO: 5282 - DNA, 213 bp, Homo sapiens
  source 1..213: mol_type = other DNA
tgccctagagggagggttcctggagacccttggacccatagccagggctacagtaagttcagaggtgcccttagatcatcccagtctagcatgcttacggacctgcagagaggcagcagggccctgtgtctccctcccccttcccaacaggtgattgggaggaatggagatccctcctccactacccatcctattgtgcactgcaggggaggc

SEQ ID NO: 5283 - DNA, 584 bp, Homo sapiens
  source 1..584: mol_type = other DNA
ctgtggcttcgccccacgcccagtggggggagggggcgggggaggcgcgttctgagccgcgcggggcagcccttaggtgttccggccgccagcccccggccgttcggcctcctgagatcccagaccctcggcagcagagccccgcttgcgcctgtgcggctcgggcgcgcagcggccccgacgctctgtcggtctgcctgtctgtcagtccgtcaccgagccgagcggcgcggggctggcgactcccccgggttccgaggaggcgccgccgactgacaccgagacagagcagcctggctgctccggccaggcccggagtcgctcctccccgactccggccacttcccctcggcgcgggtccccagccccgacttactccgagcgcgccgccgcggcccccgccttgccatggatgtcggggcccccccgacagcctccccaagccagcgccccgtccgcggccccggggggacttcatggagctctcgggataccccccgctggccggcctggcctccagcgccccccgcccggccgccgctcggagccaccgcccgccgcgcgcatccctcgcctcggccccg

SEQ ID NO: 5284 - DNA, 484 bp, Homo sapiens
  source 1..484: mol_type = other DNA
gggtcgaagggcccctcctcttagagcgagggtcccaggcggcccggtccgagccggccgataggattgagccccaggtctggcagcctcgagcctccggggttggggctgggcaagctggagaggcccggccagcagcctgggcgggggtcggggctggcctagggccgagggagggcggcagcagccaagccgggctcggggctggcagccgagcggcctccccagggaccccgacccggcccgaacgggagcccagtggactgacagcgtcgcggccgggggcgcgcgggggtaccgggcagcctcctcaggggattcgcccatggaagcggcggcggcgtcccgggttccctgctcgggtccgccgccgtaagactccgggcctcggcctctagcgcaatgtcccggggcggggggcggaaggctcctctcggcctctccacactcccgcgtcggcggctgcggagggggtgggggcggg

SEQ ID NO: 5285 - DNA, 599 bp, Homo sapiens
  source 1..599: mol_type = other DNA
gatgcgcgcggcgggcggtggctccgagcggcggccgggcggggggcgctggaggccaggccggccagcggggggtatcccgagagctccatgaagtccccccggggccgcggacggggcgctggcttggggaggctgtcgggggggccccgacatccatggcaaggcgggggccgcggcggcgcgctcggagtaagtcggggctggggacccgcgccgaggggaagtggccggagtcggggaggagcgactccgggcctggccggagcagccaggctgctctgtctcggtgtcagtcggcggcgcctcctcggaacccgggggagtcgccagccccgcgccgctcggctcggtgacggactgacagacaggcagaccgacagagcgtcggggccgctgcgcgcccgagccgcacaggcgcaagcggggctctgctgccgagggtctgggatctcaggaggccgaacggccgggggctggcggccggaacacctaagggctgccccgcgcggctcagaacgcgcctcccccgccccctccccccactgggcgtggggcgaagccacagggcgggccgggggcggggggcccggccatat

SEQ ID NO: 5286 - DNA, 452 bp, Homo sapiens
  source 1..452: mol_type = other DNA
gctcacccagctgggggcctcagccacacttgtgcgcccaccagactgccacccgccagcctcctggagatgatgctggagtcagccctgaccgacatcaaagaggcccccgtgggggtcctggccagcctcacccagcaagcgctttggctgctgcgtctgctgcaggacttcctgctgaaggccatggtaaccagactcatgttcatgcaagccgcgcaggtgctgtgtgcacaaactgatcgcctgggagcctggccccacctggccaacggcacagctgatctccgtgagatggggagctccaagagtggctgggtgccactcatctctcttgcgcccacagctgcatgcccaggcctacgtgagattgcacatgctctgcagtgccagcccgccgcgaggaggcctgctatgtgctctccaagctggaggctgcactggggtcagcc

SEQ ID NO: 5287 - DNA, 569 bp, Homo sapiens
  source 1..569: mol_type = other DNA
gaccactggtcttgatgacctctgatttttcatctctgatagaacacaagaacaattgccctttatacaaatgtctttcaaacatatgtcaggtttttaaaaaattctttttaaaaaatgctacctggaaaatagttataaaactgaaaaaagttatttatggatttattataccattttctatacttttgactgtgtttgaaaattttcataataaagatatatatagcttagtgaaattcatactatttgttattaaaaagggcttttcatttctccagtaaacattttaaactgtgcagtccatttgaaagtaactatttattgtagtagtaattgcttattttgttcatttgtaggcaaagattgaaaatgtgcagaaaacaggtttcatcaaaggaccaatgttcgttgcttctagtcgatttttgcccaaaggcaccaaaacaaaagtttgaaggtgtcattcagcttcagccttacaaagaaaactttgcagaataggtttctcactgcacttggcaatgaaaagcaaagtcttatctactgcagaagaatcttccccacca

SEQ ID NO: 5288 - DNA, 598 bp, Homo sapiens
  source 1..598: mol_type = other DNA
taggaaagtgattaataccctttttgggtgggggcagagcgccgcgccgaggtggcggaggaggctgccgggagctcggcctccgagcaatcccccgcctcgaggggcccgggagcagccgcggccgcgttacctcagagcccagaggcctgggggaggggccctcggcgctgccgcggactccggggctcccggcgggcaggtcctgcagggccgcggagcgagaagggtctcggccagctgtgacacggtagcgggccgggtcacgctgcccccggccgccaggcgggttgcgggaggggtcgcggtgccgcctctccaggtccggtctggccgggccggccggagagccacaggcacggtcggcctggacccgccgggcagtgttccgctctgcccgtcccggcctggggtcaagccaacagctgcaaggcacgccgactggcggcagatcggtggcccggtcgctcccggtgtgaggagcgacgagcgaggtagcgacgcgggccgcccctgccgccgccgccgccgccgccgccgccgccgcggtcggacctgcggcctcctcccctcccctcccccgcgtcgccctgctgcg

SEQ ID NO: 5289 - DNA, 202 bp, Homo sapiens
  source 1..202: mol_type = other DNA
tacatacatataaaggctattttaaaaagttaaccactgaaggatgtttggctcctgcctcagcctcccgagtagctgggattaggctaaaccactgtttaaactcttcagcgtctagaaagtttagcccaaaaataacaactcgtagctctttcaagttatgtaggaaagtgattaataccctttttgggtgggggcagag

SEQ ID NO: 5290 - DNA, 357 bp, Homo sapiens
  source 1..357: mol_type = other DNA
tataacaaagcaagtcatttgtctttaggggtggaaggcaccaggtgggtccctatctagatgaggggctgtcatggggaaccctcatagctacccgtgcacaagactaggatgcaggcaaaactagactttctccttgacccccgcgtggagcctgggcggcagtgggctggacccattccggtccctctctggagaggtttcctcacctgtatccctgcctcacggcctctatgtcctggacgcgacgtggagcgacccagctgggaagctcaccgttcaccaggcagcgacgctcccgggacgcgactgccgcaaccgcggggctgcctggctgtggctccggggattccggaa

SEQ ID NO: 5291 - DNA, 372 bp, Homo sapiens
  source 1..372: mol_type = other DNA
aagccttctcttctagaacaagagaaggttcttcagtgcagcatgtggagccggccaccgcccctgcctccatagtaagtccattttctcttgtctgcatgacagaaaaaggaggctgtcacctcaacctttcctttcaagggctgaaaggcgcggtaccttgagggtcacgtcgcccctgccgccggatctcctccatgacgccgtagccgcgactaggcaccggccgctgcaactgcgcaggcctcgccggccggctagacacgcacgccgacagccgctcggagcgcggagcagcaatcggacgggcctccgcggccgccgtagttgaatctcctcggcgccggaagccccgcttccggaatccccgga

SEQ ID NO: 5292 - DNA, 450 bp, Homo sapiens
  source 1..450: mol_type = other DNA
gggtaagatatctcggccagcaggcccagccccggggacctttgtggtgcttcccacctcaaaaattttccagagaagattttaaaagctcttaagagacaaagtactaagccttctcttctagaacaagagaaggttcttcagtgcagcatgtggagccggccaccgcccctgcctccatagtaagtccattttctcttgtctgcatgacagaaaaaggaggctgtcacctcaacctttcctttcaagggctgaaaggcgcggtaccttgagggtcacgtcgcccctgccgccggatctcctccatgacgccgtagccgcgactaggcaccggccgctgcaactgcgcaggcctcgccggccggctagacacgcacgccgacagccgctcggagcgcggagcagcaatcggacgggcctccgcggccgccgtagttgaatctcctcggc

SEQ ID NO: 5293 - DNA, 356 bp, Homo sapiens
  source 1..356: mol_type = other DNA
gcacaagactaggatgcaggcaaaactagactttctccttgacccccgcgtggagcctgggcggcagtgggctggacccattccggtccctctctggagaggtttcctcacctgtatccctgcctcacggcctctatgtcctggacgcgacgtggagcgacccagctgggaagctcaccgttcaccaggcagcgacgctcccgggacgcgactgccgcaaccgcggggctgcctggctgtggctccggggattccggaagcggggcttccggcgccgaggagattcaactacggcggccgcggaggcccgtccgattgctgctccgcgctccgagcggctgtcggcgtgcgtgtct

SEQ ID NO: 5294 - DNA, 296 bp, Homo sapiens
  source 1..296: mol_type = other DNA
gacgagtctcgctctgtcgctcagggagagttatttctaaaagtaggtgatacagccatatgatttaacaagcactgcccggcctcccaggctgggctgagtaggccagtttcgcagcactgggactgaaacccccagctggagggaggagcgcggcgggcgggacccgcagctgggcttggcccgggagcggggaataagctcgctccgcgcctcctccccgccctactccctccgcgcgaagaagactgagcatgggtggctgggttcactgcaactcccggcaggccaccagt

SEQ ID NO: 5295 - DNA, 538 bp, Homo sapiens
  source 1..538: mol_type = other DNA
gtggggacctgtgtttccctcgaggggaggcagcctccccttcccctgtagctgttgctattataacaaatacctgttccctggaaaatggttaaatgtcaacttatgcttttaaatgtctaggaaatataaaacagggaacatgagcatctctcaggtgatcctcctacctcagcctcctgagtagctgggaccacaggtgcgcgccaccacagccggctaattgtggagacggaggtctcctacgttgcccaagttggtcgactcccacagtgttggagagccggtgggcccaaacccggcgggccctaacccggcttcacgctccgcccggcccggcccggcccggccgtccatacttccctccggtgtccaccagagggcgaacgggagacgcgaatgtggttcgactacgcatgcgcacgccgctgggcgcacgtgcggagggcggcggggcggcggccagggagggcgccacgcaccggactgcgggccgagagcgcgcacgccgcgctccgcccctgctgccgcccccgtc

SEQ ID NO: 5296 - DNA, 403 bp, Homo sapiens
  source 1..403: mol_type = other DNA
gccaggctagtctcgaactcctgacctcgtgatccctccgtctcgaggccggcggatcacgaggtcgggaagtcccagctacactcggtagtgagccgagatcgcgccactgcactccagcctgggcgacagtctcaattaaataataataataataataataataataataataataataaattccctgtcctttgtttttgttaagctcccaggagtgtggggccgagccttgggggcccactgggagggctcgggcgccacgcagatctgcgcggaatgagccgccagaggccgctggcaggcccatcgtaccacctgggactcgacggacgtctacgcgcgtgcgcagcggtcccatcgaggcacccgcctcattggctgtggctggctcgcaaaagtg

SEQ ID NO: 5297 - DNA, 536 bp, Homo sapiens
  source 1..536: mol_type = other DNA
tgggcccatgtgtgcccggctggggatctagacccctggcctcccggagaagggacttaaaggccgctccccaggctgccctctaggctatttggctgcgaacggattagatctgatccgattagagcctgggcttgccaggctctgccaacgacccggagacctccctgagagccttcccgctccatgcgccccgggcctggcacagtgggggctcgtgtgcgggtaactgggcccgcgacgtccccgcctccgtgcttgccgcgtggcgggtgggttcctccgggtcggggccccgtgccgcctgttcacctggggcgggaccgtggccccatcccacaggtctcccgcccgtgcacctgccgcctaacgccgcgcgccgcgccgtgcgcctgcctcgcgctccccgtcgcgaggggtctgtctgttcccctggcaggctgaccaaggggccggcgtcaccgctacgtgcggcggggccggcgcggcgggcggggtgagggcggcgctgagcgcagcggcggcagcggcggcgc

SEQ ID NO: 5298 - DNA, 414 bp, Homo sapiens
  source 1..414: mol_type = other DNA
ctagagctcctgggctcaattgaccttgttaataatttaaaaattttcggctaagtatttactgtacacaggtgttcaggatacacctgtgaacaagttaagattaggttctcatgtaatttatgtggaaggtaatgaacagttgttcaagattgttaagatctgacaactactttctgagggcccctggggcaaatgccgccgggccgctgggggtggagggcctgagggaaagcggggcccggcgcagtcccagtccgggtgcagggccctcggccagcactcgatgaggcgggctatgacacataacccacctgcggttgcgcagggccaaggcacggccgcacgagtgctacgcatgcgcgtgcgctggctcgcgtcaggatggggcggggccgggcgtccgcgccggaa

SEQ ID NO: 5299 - DNA, 667 bp, Homo sapiens
  source 1..667: mol_type = other DNA
atccatcctagaattcatattgcctgttattaattaacgaatacaatcatcccagtaggcagctgacaaaagagagagagtcacactcgcttagtggctgagctcgacctgctctggcacacgagactgagcaggggcagagccccgaaccccagtcaggccccgggatcgcgggcgcccagagcgggcggcgggggcgtggcgggcccggcgcctgcctttgtcgtggcgtgcgggggggaggggcggcccgaggcccgcgaggccagctgccgcctccggccccggtcgcgtggtctcccggcccccacgggcgcgcgaacccatgcccagccagctgggacaccgtctccgggctctcccaaaacttggtggccgggcccccatctaggcctgcggctgccgccgcaatccccgagcccgtggcgcctaccgctgtccccggcccgccgccgcccgccgctgcggccatcgtcgcagcccgtcgtccccacagcctggcccaccccggccctcgcggtgtttcccggtcgttcccgcgcgcacccccgcgcgcgtagccgccactgccgcttcccggcccttccggcgcggacgcccggccccgccccatcctgacgcgagccagcgcacgcgcatgcgtagcactcgtgcggccgtgccttgg

SEQ ID NO: 5300 - DNA, 239 bp, Homo sapiens
  source 1..239: mol_type = other DNA
cccaggctggagttcaatgacaaggtgatccacccgcctctgggattacaggcggggcggacctccagatttccagctttgcctaacgttgtacagtttacgaaatcaacgaaccaacacgttgatttcatcttccctatcccggagcccgagctggaaaccgttccccgctcagccatgacccggggcgcagagggcgagaagacccttcccgctttcctgcaggcagccggcgccgc

SEQ ID NO: 5301 - DNA, 449 bp, Homo sapiens
  source 1..449: mol_type = other DNA
ctgggattacaggcggggcggacctccagatttccagctttgcctaacgttgtacagtttacgaaatcaacgaaccaacacgttgatttcatcttccctatcccggagcccgagctggaaaccgttccccgctcagccatgacccggggcgcagagggcgagaagacccttcccgctttcctgcaggcagccggcgccgcccttcgcgactccgccggaagtcccgcctgcaccgccgccgcgccccattgggccgggtgctggggcatcccgggcgctgggtgccccgagcggctacgacgagtcccaggtggggccgggctccaggcccgcgggggagcggagccgtgcgccgcaggcgggctccgtgacgccgggtggggaacgccgggccggtggcgggacttccgccacgggactcggaaggggccgcgccgccgctgctggga

SEQ ID NO: 5302 - DNA, 408 bp, Homo sapiens
  source 1..408: mol_type = other DNA
agataaaagcagaaactacaaaactgtaaggttttgcttattttttggatcctagatcagttcaactggtgtaagcctttagagccaggcatggtggctcatgcctgtaatcccagcagaccagtctggggtggtgtgcatgcctgcaatcgcagctactcaggagtagtgagctgagatcatgccaaaaaaaaatgcctttagaatgtggttagaaataatttttggatagattaactctgaatgttttcctgaagtgggataaatgtaaagtttaaaaaaaatgctcctttttcaaaattttgaggggttaggtattaagaatcttttaaagttttactcatttaaaaaatttagataaaatggaagattcattcttaaggttggtgatatcagaaatgtaagcct

SEQ ID NO: 5303 - DNA, 634 bp, Homo sapiens
  source 1..634: mol_type = other DNA
gattacaggcactccaaatataccccaactgtcatcaattttgttataattaattatcccacttgtaaccatttaaaaattatagatgagtttttttttttttttcgtgtgtattgtacacttacagcacatcgagctcaccagccacatgcggctcacgggagcggagccccgccgaggacctgtggcgtcctcccgctccgcccagatggcccgcgacctaggccccgccccgcgcccctgcccacaggccccacccgctggtggcccggtccgcgtgtgcgccgactctcgcactctcctcgctccgggcgcccagactctgagagagagcgacggccaacagcgaaggcagtcgatcggcctgcggtccgcttcggcattcgcaggccgcaggcgggaggctagagcccccaggcgcacctcgccccaaccgcccgcggctcgggcagctctgcagagacgtcgtggcggcagggccagcacccattgccctccccctcgccacgcttattggccggagcggcggcgctcgccgggtaggcggtggcggcgtccctcccttgcgccggccctcaagaggcgacgaggaagcggccgcctccctgcgccccgcccctccggctagctcgct

SEQ ID NO: 5304 - DNA, 584 bp, Homo sapiens
  source 1..584: mol_type = other DNA
acagactgtttcttgccttcaccttggcaaaataaatttctaaatcaattgagacctgtctcagatacttcttggtagggatggaagattccaatacttttgagttttcctagccaattctattcctgaagtctgggacaggaatatgctggctactccaggcagcaggaagaatgatcaaagtaactttaaagctcccacctgtgtgttttcctacaacagtaagttggaatgaagtaatgttaatttcaacagaaaaggaaacctattttttttatttgagacagggtctcactctccaggctggagtgcagtggtgcgatctcagctcactgcagattacaggcactccaaatataccccaactgtcatcaattttgttataattaattatcccacttgtaaccatttaaaaattatagatgagtttttttttttttttcgtgtgtattgtacacttacagcacatcgagctcaccagccacatgcggctcacgggagcggagccccgccgaggacctgtggcgtcctcccgctccgcccagatggcccgcgacctaggccccgccccgcgcccctgccca

SEQ ID NO: 5305 - DNA, 454 bp, Homo sapiens
  source 1..454: mol_type = other DNA
tatgcccacttagaaaatggggataattcctatgtcacagagttgtaaagattaaatgaattaatacagattaacacactgcataagcattatgtaaactttagctattactgaggcccacagcacaggttgtactgcggggttcaaatcccatgaggccagcagcacccagggtctgtgagccctccagagttgctccctcattataaaatggggcctgagaggccgagccaaggctggatccggccagacctccacaggcctcagagtgtggggcgcccggctgggggcgaggtagcggaggcccaaagggggccgacggcagctcgcgatgggaactacgcttcccagcatgcgacggggcaaaggggcctttcagccgcgagcagcgcctcgcaggttctggggctccgcccccttctgagagccgatgacctggcagagtcccgggggg

SEQ ID NO: 5306 - DNA, 450 bp, Homo sapiens
  source 1..450: mol_type = other DNA
ccaccctagctttttaatatgcaaatgtagggctccatgaagttctacacacgtgtgccatgccatcctgctctaggagcccaggctttcctgctagacaagaaacctttctggagctgctttaaaagaaacaaattaaaataatttcttaataactcctataacatcataatttccttaggtataattttgcaaaggcggtttcaaaagctctttggggtcctcagtaatttttaagagtgtaaaaggattttaacaacaacaagccttgagaaattgtaagtgtatttatataatgtttacaaccatggaaaacaacactatattttgcttatgggtacctgtggtaagcacaaccccaaatgggacctagaaggtcaaagtgcgcgcatttcgccccgagaactacgcttcccggcaggctgcgcgccgcgcggtgacgcacttcac

SEQ ID NO: 5307 - DNA, 498 bp, Homo sapiens
  source 1..498: mol_type = other DNA
gtctttacattgatgacagttatcgtttattttcattcttctcattctcagtgatttccctcaaaaaaaaaaaaaaaaacccaagaaaccaaaacactttttttttttttaaccatgaaaggccgttatgacttgctgttacgatccaaaagactttgaagggcctgtgccttcgctatcgagcgcggtgtctctgctggcgggcatcgcccccgccgggccgccaccctgaacgagcccgtccggtcctctgggttccgccaccctgcgtagcgctgcgccagcacccggcccagcactccctcccgccgagggcgcccaggccggcttccgagggcgcccaggccggcttccgaggggcggcaagcgagttccggcgcccagaacggcccgtccgcggcaaatgcatgcgcccggcgcaaccggactaggaccccgagcagggctgcccagggagcgcctgaaggaccctgcgagggccgcaggctatccagcgtg

SEQ ID NO: 5308 - DNA, 232 bp, Homo sapiens
  source 1..232: mol_type = other DNA
actcccgtgtgtctgcctggaggcaggccactgagcctcacagagggacccctgtcttatgctgcagcaaaacaaatttatttctcacaattttggaggcaccttctcatgtcctcgcatgatatgaacagggctagattttataaggtcactggtcccatcataaggaatcctgggagagccatcccagacaaggcctgctccctttgggcggacctctgtggagaagcca

SEQ ID NO: 5309 - DNA, 605 bp, Homo sapiens
  source 1..605: mol_type = other DNA
gaagtgagcccttgcttgtgcgcctctgcagcccaggttccccgctagaggtgggatcacccccacttactggtgagcaaagctccgggcgcggggcgaggccgggcgctgggtgctacccggctctggacgggcgggaagaggccgggacgctgttccaccagcacctgcgggtgcggagcgcgaccccccgcctcggctcctggcaaccaggaaagttcccagtgaggccgacggggcggggcggctctggctcccggggttcactcctcacccctccgggcgacccgcgttgccatggcgaccgccgcggtgcagcccgcccccgccctcccccgtgcgggaggggtcgggtccccagccctcggccgatgcggagcccgcggggctggaatgcggggtcccgggcggttcggggccgcgcgcccggctctccgggctgcttccggcctggcccgggcggcgggcggggggagggcagcccggcaggcgaggagcggagacgagcccggccgacgcggctttgtctcctttgttcccggcggtggcagcgccgcgcgggaggggcgggcagcgggcgcagttttccgcccctcggtctccgg

SEQ ID NO: 5310 - DNA, 309 bp, Homo sapiens
  source 1..309: mol_type = other DNA
gctaagcacctgtgaggctcccctagcctgtggaggccttggaggctcctcccaggaagctgtgccaatggctttgagccaaagaagggccctgcacagggtacaaatggtccccaggagagaacctttctgccagcgtttcctcccgcagaagggtgagtagcccagacttgcccaacgcttctcagcttggggtgggtccaggtctgggtcctgggctgggaagaggaagtgagcccttgcttgtgcgcctctgcagcccaggttccccgctagaggtgggatcacccccacttactggtgagcaaa

SEQ ID NO: 5311 - DNA, 309 bp, Homo sapiens; identical to SEQ ID NO: 5310
  source 1..309: mol_type = other DNA

SEQ ID NO: 5312 - DNA, 272 bp, Homo sapiens
  source 1..272: mol_type = other DNA
ttgggcagtgagcatggcccaaatgccccccaccccagagtaatggctgctaagcacctgtgaggctcccctagcctgtggaggccttggaggctcctcccaggaagctgtgccaatggctttgagccaaagaagggccctgcacagggtacaaatggtccccaggagagaacctttctgccagcgtttcctcccgcagaagggtgagtagcccagacttgcccaacgcttctcagcttggggtgggtccaggtctgggtcctgggctggga

SEQ ID NO: 5313 - DNA, 469 bp, Homo sapiens
  source 1..469: mol_type = other DNA
gcgctcagcactgttatttaaaaaaatagaccagtgattttccagctactgggggaatcgctccattgcactccagccaaaaaaaagctttattgatatataacttgcataccatataattcacccaatgtgtacaattcagtagttttactatattaacagagttgtatggccatcaccaaaataaatttttttgaccattttcatagatgaacaaacagaaattataaaactccttacagggttttccaaagctataggaccacgtgatataagctgtgctttccttggttccaggaaagcgacgagcttgaagctcatgcacatgccctgctgtctacctgcagtgctcttcccgcgcacggccacaggcctggtaggccgtccggtggcaggacaaccctactggggagcgccgcatccggtaaactaggagccaatcagcggggccgcctcgctgtctacgaca

SEQ ID NO: 5314 - DNA, 315 bp, Homo sapiens
  source 1..315: mol_type = other DNA
aggcggacagtgcgctgtctgcgggacacggtgctgctgctgcacggcctatcgcagaaggacaagctcttcatgatgcactgcgtggaggtcctgcatcagtttgaccaggtgatgccgggggtcagcatgctcatccgagcctgccagaggccatcctgggtgtcccctcagcactgcaggtgcctggcagagccacggtttttccagaaatagccgtggaggtgggacctgccctaggccctggcaccttggctgaggccctgagtgtccagccacatggtggcaccagcaggacccggaccctgagtggcc

SEQ ID NO: 5315 - DNA, 326 bp, Homo sapiens
  source 1..326: mol_type = other DNA
ggatgttatcaaatgtacacatgtgaaacatccactctcctcaagaaagcctaggggtttgtgggaggcctggagggcaggctgctcctgcgcggccctcctccacggaatgccagggagggagcgcaaagccaccagcgcggcggagctggtgcgcctccggcccgcctctccggtaacgggtcgcgccgcagtggacctctaaacaccgggcggggccgggtgtggcggcgcgctcggacgttcgtcattcctccgcgccctccgcctgccagctgattggcccctgggccaggggcggggcactcgcggcggaggcaagcggc

SEQ ID NO: 5316 - DNA, 312 bp, Homo sapiens
  source 1..312: mol_type = other DNA
gtgcctggcagagccacggtttttccagaaatagccgtggaggtgggacctgccctaggccctggcaccttggctgaggccctgagtgtccagccacatggtggcaccagcaggacccggaccctgagtggcctcctgagtcattgctttgggcttggcccaggcctaacccacaggcgcagcaggggctcgaccgggagctggtctggcaccactgccctggtccttgtggatcttggaaggcctctggggtcccccgggagcccaggcaggctgacgagcagggcgggcctggctcacgtgggcctgtag

SEQ ID NO: 5317 - DNA, 414 bp, Homo sapiens
  source 1..414: mol_type = other DNA
aggacccggaccctgagtggcctcctgagtcattgctttgggcttggcccaggcctaacccacaggcgcagcaggggctcgaccgggagctggtctggcaccactgccctggtccttgtggatcttggaaggcctctggggtcccccgggagcccaggcaggctgacgagcagggcgggcctggctcacgtgggcctgtaggcgggcccacgccaagtttcacttcccgccactgctgccagcgagagccgcgggagagtgtgcagcgagtcacttgcccctgctacggtgagtgtggcccccacaatgggatggcgcagggcaggagggccatgggttcccccaccccagactaagggggcactaggggaggggagaccctctcatcctgcctgaaaatgggcccgcaggtac

SEQ ID NO: 5318 - DNA, 380 bp, Homo sapiens
  source 1..380: mol_type = other DNA
cctcaaaaaaataataataataaaatttcctttattgtaaatttcactgtctggtatgcttcccaaaagccttttcttcttttattgtcaactataatacatacacaggaaagtttaacatgtaattataaagcaaattcctttgcttgcatggtggccccaggtcagccagggccccagggtcgccctctgggcctagatggatgcagaagctcctcctggaggtggggcccactgaggctggggtggctcttagaccccctagtggccaggctgcattctgaggtcaggccctgtaggcttggctcagggaggcagctctgggaggcaaatggggcacctctgcttccccttggctgctagccggctgctgggcgggg

SEQ ID NO: 5319 - DNA, 348 bp, Homo sapiens
  source 1..348: mol_type = other DNA
tgttgcccagactggagtgcagtggtagctgagaccacaggtgcttgctaccatacccagctaattttaaaattttctgtagatatggggcacccagggtgtggaacgctgcacccagctttggatgtcagggaggatgtgactccagtccctcactaagaccctcccagaggcccttcttggccaggaggtgatggcctgggaaactactgggaacatcccagattgtccccttgggtttctccccacgtggcacacagggtgcacaacccagcctgggtgccccactagtgtgactgactcaactggacccctgccccgaagtgagggggcggagccctgccctgg

SEQ ID NO: 5320 - DNA, 448 bp, Homo sapiens
  source 1..448: mol_type = other DNA
cattgcactccacaatattgaaatgtgttttgagtctctatccatggtaaaagagcttttccagcgtggttgagcatgctcccccggggctcggagcagtcaagggggaccccacggctgggactgcaggcctactggcccctgtcggctctgaccaacctggccgtgcgggtcacgtaggaacccctccctcctgggggccctgggctccctagcaaggaggtagccgcgtgccgctgctcagggatgcagcgccagggcggagccaggttgggagagctgagtttgcgcatccggggcgggcctgcacaatccgggccttgaactggggcgggcggagttgaactgggcccacttgttccaaaaaggccgggcccctttcagctggggcggagcctactcgggcggggcccaaggggcgggacctcgggtggcccgaggtggcccg

SEQ ID NO: 5321 - DNA, 473 bp, Homo sapiens
  source 1..473: mol_type = other DNA
cccccaccgtggggtccttgggccagggttccaggtcagggtcctgccagccgtggagcccccagtagggtccccttctggacccctctgaggtccctctgcctgagcgtctccggggaaggtcagatggctgacgacctttccaacctgtcctcaccccaggactgaggcccagataatgagctgagattcgaggagtcggggtctcagcagaaccctgtgcacgtgagcgtgcgtgtgcacgtcctggacaaacccccattgtggctcctgccaccctggcagatgactcactgtgatgtgactggcgtctgacccgccccttgacccaagcctgtgataaagctgctgttttaaaaggctccgggtacagagtccctctgcccagtcctgaacttgtccccggaaatggtggggggctgcctcatgccaggaagcatgtaccagctcccaccccagggggctgagggaga

SEQ ID NO: 5322 - DNA, 472 bp, Homo sapiens
  source 1..472: mol_type = other DNA
gtgacttcagggccctgaggcccctgctcttggctccaggacctgtgcctgtgctccgcgtctctcatgcagagctatgggtggccgagacacgcacatgggtgtccatgaatgcagggcacacgccaagcacgtagggtctgcatgcagggcacacgcatgggcactgtgtgcacacagtggaaatcagtgctgcccaccttgccccggggccagcagccactgctcccagcacaccctgccctacctgcagagcgggtaccccctgaggatgatgagtactctgaatactccgagtattctgtggaggagtaccaggaccctgaagctcctggggaggggcaggcagggctgagccctgctgacctccccctggttccctgccactggatgagggctcctgcactgcctacaccctgcgctggtaccatcgggctgtgacaggcagcacagaggcctgtcacccttttgt

SEQ ID NO: 5323 - DNA, 388 bp, Homo sapiens
  source 1..388: mol_type = other DNA
ctggtccccttgggcctgacctggacccggtggtgacttcagggccctgaggcccctgctcttggctccaggacctgtgcctgtgctccgcgtctctcatgcagagctatgggtggccgagacacgcacatgggtgtccatgaatgcagggcacacgccaagcacgtagggtctgcatgcagggcacacgcatgggcactgtgtgcacacagtggaaatcagtgctgcccaccttgccccggggccagcagccactgctcccagcacaccctgccctacctgcagagcgggtaccccctgaggatgatgagtactctgaatactccgagtattctgtggaggagtaccaggaccctgaagctcctggggaggggcaggcagggctgag

SEQ ID NO: 5324 - DNA, 466 bp, Homo sapiens
  source 1..466: mol_type = other DNA
gctcgattccttcactgtgggtggtcccgccctccacagatgggcggccccctccctgcaggcacagctggattgcatctgctatgcataagcatgacacaggttctctcctccttccggcttatccccaaagaggtccaggccaaggggaccttggtttccctaagaccttcttgcctgtcaaggagatccgggtggggcccaggaggcccaccagacaggccggcgggacccatggcctgagggcttgtctgggcacccccactggattgggggtgagtcatccccaactgcagccccaccccccacggcgctgctgccttgtggctccacgtactccctcagcatctgcccatgcagaaccttctgggaaattcccagaagccacggggggtcacctctcagggatatgggtgagggcgggtgcctgggttcccgcctgccgctccgccccccgagatcaggg

SEQ ID NO: 5325 - DNA, 241 bp, Homo sapiens
  source 1..241: mol_type = other DNA
ccagtgccacggagagtgaggtggcccggggtcagcggggaggggtagagtacactgagtcagcatgaggtcagggaggtccttgtcaacctgtgtgaggacgacgcagcctcgccgcatccccctggctgaagcggcctggcagacacctgggaggtgtagggtagcgcagcctgctcctataggcatccctggtgtcctaggcagctgtcacctgcaggcatgctgcctggagatctct

SEQ ID NO: 5326 - DNA, 426 bp, Homo sapiens
  source 1..426: mol_type = other DNA
ctgcctcagctggagtagctagggcccacctcgctgggattacgaattctttttcctcttacagaaaaggaaagggcctgtacttagttcttttaaagagaaaactgccataatcccagctactcgggaggctgagggagatcgcgccattgcactccagcctgggcgacagagcgagaaccaacttgtggtcccaggtaagtttccacgctggtactttagccctgggctcgaacctgcggacacgctgtggctgcaactccccgcccgccagacctcagtacgcagcgcggctggtgagaaatgcactctgacttcgcacggcgggcggacctgctggcggcagcgcggtctcccggttcccgccaggaggcggccgagcaccaactgtacggtactgcgcctgcgccgcgaccgccaacgcgc

SEQ ID NO: 5327 - DNA, 433 bp, Homo sapiens
  source 1..433: mol_type = other DNA
ccttggcctcccaaagtgctgggattacaggcctgagccggtggctactccactgcactccagcctgggcacagagcaagactctgtctcaaaaaaaaaaaaagaatttctgttagttactggtttctttctttttttatcttttttgagaaaaaatctcactctggctggagtgcagtggtgcaatcacagctcattctgggattccaggtgggcccagcttcaaaaggaggtgctccctcagtttggggccagctaggcccgctgggacagcaggacccagaacccaggtctgccgttgtcctcaagccctggactccagcccccacagccagtttctggccaggctgctcatgaaaggccatgggcctggctggaaccgccttagagccaggcctcttcccgggggaggggcgtttgcccgttgccaggt

SEQ ID NO: 5328 - DNA, 321 bp, Homo sapiens
  source 1..321: mol_type = other DNA
ggaataaacttctatagaaaacagttgttgcattcactgcagcctgcggtgaaaccaacctgaggaacctcggcggcccgcgcagtaaccttctgggagctacgtccgggctgtgcttggcccgttggctccgggtctcaaagacctgcgggtggcgctctcagctgaaggcaagagaggcgccaggacctgggatcagctccaacctactcagggcctgggggcgcgactgcggccagcccggcgcgggtgctcccatccagctccgggcagagggccgggcgagcagcgagaggcctcataggccaggtcgccggggag

SEQ ID NO: 5329 - DNA, 419 bp, Homo sapiens
  source 1..419: mol_type = other DNA
attcactgcagcctgcggtgaaaccaacctgaggaacctcggcggcccgcgcagtaaccttctgggagctacgtccgggctgtgcttggcccgttggctccgggtctcaaagacctgcgggtggcgctctcagctgaaggcaagagaggcgccaggacctgggatcagctccaacctactcagggcctgggggcgcgactgcggccagcccggcgcgggtgctcccatccagctccgggcagagggccgggcgagcagcgagaggcctcataggccaggtcgccggggaggaagcggttaaatcctccttctccagcctccccgcccggcgcgcgccacttaggccccgccccagcgcgctgattggcccaagcctccccgtcctgccccgggattagcccccgggagagcgcagctgg

SEQ ID NO: 5330 - DNA, 349 bp, Homo sapiens
  source 1..349: mol_type = other DNA
tgagtccgccgtgaggggcggggcctcccattgtgccaaccaggtccacccattggcctggcgagaccggcgcgtgccaggggggacccgaagaagcggggcccgcagccatggggcaacgccgggctccacgtggcatcccagagcactcgggactcgcagcctgggagggggtgcagcctccagtgaaggggccccgagcccgggagactgctggggtccctgctccgcaggggccgacatgtttcataaaactagctgatggggtgctggcaccccaggaccaaaatccgggacacggttcagaactagtggaccttcgcgctctggagatccgccggggcaacca

SEQ ID NO: 5331 - DNA, 295 bp, Homo sapiens
  source 1..295: mol_type = other DNA
tcttatgcaagaaggcgtcccaggttgcgaaggtgactcagacgcctcctttggggattgtggacacagaaagcgctggtgctgtcaaaaccacttctgggggtgagctgtgatcaccactgttgtctctaaatagataaataaaattccggccgtgtatcaggcccagagctctgatcctggggaggtcctcacctgttgcctgaccttggccacaaggggcgctcgggaggtggaacccgcagaagccccgcctcccggaagcggagcagtcaagggccagaggccttggcca

SEQ ID NO: 5332 - DNA, 401 bp, Homo sapiens
  source 1..401: mol_type = other DNA
gtctctccaggaccctgagggccgatttcatatatctggagatctgggctgggtggatcaaataggctcttaaggccaccgtggtaccccactccctttcagcccgctctcagaaagtggccaccaccggcactcggtgaagacaggtggtgaggcctagacacaccgagagccgggccccgcgggggcttcgatgggacccactgccccagggcggtaggggcgcacccgctacgagcggagcgcgctttcaccgggaggtaggacccagaggagacagcgagctgtcgaccccagccccgccgcacctcttggggccgcgcgggggcgctgctctccgatgcgtggaacgatacagcccggggcggggcttcggcgggcgggcgcgcgcgcgcctgcgt

SEQ ID NO: 5333 - DNA, 476 bp, Homo sapiens
  source 1..476: mol_type = other DNA
ctgataaaaatagtgacctagaacactgtgtatctttttaaatggagttaaccagccttgatcagttgtttttagatacagatgttaatcattaaagctagacccaagctccattgctaacaaggttaatggggctcagtcttactagataatgagtaagcaggttttccctgtatttaaatgcattttataaaaatataattaatggggccccgaatggatcatgaggtcaagagatcccagcagtcgagattgtgccactgcactcccgcctggcgatagagtgagactccatctcaaaaaaaaattatatatattaaaaaattatatatatatatttattttatatatataatatatattatatataatatataaaattaatgggaaagcttgacactcttattagaaaatggtaagatttaatccaaatattaggcttgaaattgtgatttcacctcaccatggcacgcaag

SEQ ID NO: 5334 - DNA, 395 bp, Homo sapiens
  source 1..395: mol_type = other DNA
aggggcaaaggataacaatggtctgctcaacttcatcaagcagtgctagatctggggaccctggtgaaagtgctccaggaggaacaggcacagaggtctttgctgcttttgagtgaatttgacatctcagagacctgacagctggcagccaaggtggtcttgacttcccctgggcgggtcctgctcaggcctcggggctcgccggaaagtgagccacagcagaatcacactgatgtgctcgtatgccgaccccccgacagcccgagggggcgggtcatctagtggcgcaagcgcactgagggccggtgctaagcggggacgcgcacgcccgcggtggcgtgcgtcacaaccaggacgcctgccccgcccgtccagctcgcctgcccgtcggtccc

SEQ ID NO: 5335 - DNA, 278 bp, Homo sapiens
  source 1..278: mol_type = other DNA
gtgagaggagctgctcacagaagtctctcctatcttaataaatacttgttgaattaaaaagtgtatgagtgaatttacacctttgcaaatgcccagacagaggaggctctgcccattctcagtggagccttgggagctgggttgggcactgggtcatccaccagtccccagaaaactagacggaggacaatcctttccggaagctgctgcagcgaatcctggcacccgcctctgccagtccgcgtgcgcagctcctaggacgagggtgcagggggcgg

SEQ ID NO: 5336 - DNA, 281 bp, Homo sapiens
  source 1..281: mol_type = other DNA
tttttttagagacaagagtctcgctatataagggattggcacagatagtacttattactacttgatacactatgcattttttagtcctccagcacctagaaggacgcctggcatatggcagggtgggaaggcttcctggaggaataggcccgctggcccacactccgcggctttgcgctctgccacgcccatcgaagcggggccgaggccggaagcagccccgggcggaagccctaccgtgccaactgggccctcctcccgacctgccccgggctcgtgcc

SEQ ID NO: 5337 - DNA, 338 bp, Homo sapiens
  source 1..338: mol_type = other DNA
cgagtagctgggaccccggcaaattttgtaaatttttagtcaccatgctggtcaggccagtctcgaattcctgacgtgagccacggtgcccggccacgcggcattcacctgctggactgcagtggtgccctcagccccctgagtagctgggatgcacaggtgtgtgccacctcgcccagcttttttgtagaaaggaggggggtcagagtctcgctctgtcgcccaggctggagtgcagtggcgccatctcgactagcctcccgagtagctgggaagacggggtttcagatgccaccgcgcccggcctgcacaggtgtcttgaatatgtatatacgcga

SEQ ID NO: 5338 - DNA, 387 bp, Homo sapiens
  source 1..387: mol_type = other DNA
agcctcccgagtagctgggaagacggggtttcagatgccaccgcgcccggcctgcacaggtgtcttgaatatgtatatacgcgattccattgtggtgcagcaacaatctgagtgagccttactggaagtcatgatgacaactttaagatgcaatctcggcagtggttgcggctctggggccaccctgcgaccgcctcggggtgtagggaccagatagcggccgagaaacaatggttatctgctctccgtgcccgatccgcgaatagtggctccagacgcggtcggcgcctgccgtaccacaggccctctagccgggagcctgtcgcgacccgagcgaccgtgggtcgaccccgatccggaagtgacgcaacggcgccacacttccgg

SEQ ID NO: 5339 - DNA, 181 bp, Homo sapiens
  source 1..181: mol_type = other DNA
gccttggcttcccaaagtgctgggattacagcagctcatcagttgaaagctgggattacaggtgccctggtcctcttgtcatccaggctagagtgcagtggcgcaatcttggctcactgtaaacgagtagctgggctggtcttgaactcctgacctagtgctgggactgaaaaatcagtca

SEQ ID NO: 5340 - DNA, 538 bp, Homo sapiens
  source 1..538: mol_type = other DNA
tgcaagtccacctcggggaggggggtcagctctgccctgagggcttcctgaggataaccagctctagaagagcagggatgcctaagaaaggaacctgagcacgcctgatgccagggctcctccaggatgcccccaaggcctgcctgactccggcgagacttcccgggagatccggaccgaccgcggaaccgaggaggctctaccctatcgccgcttacgcagtcccagcctccgcggcgcccccaaatgccgcactgttgagtcatctcagcgctgcctcctccgcgctgctcctggagctttcccggaggcaagagggcgtcttcacgcaggcaccgagaagctcccactagtgtatgccttaagaagagaagccccagcgtgggctggggctcaaggcgcaggaaggccgagcccggcgcggacgcaggcggctccgggcgggctcagcacccccaggcaccgtctcctagtgaccgcggcgctcgcgggcctggcggccgttgtccgggcgactgcgcagcgcgggcacccccgc

SEQ ID NO: 5341 - DNA, 422 bp, Homo sapiens
  source 1..422: mol_type = other DNA
aaaaattataattaaaaaattaaaactaaataataataaataaaaatggtggcgcatgccagctacttggtaggctgactgcactccagcctgggcgacagagtgagactccgtcacacctgccgcctgcctgcaagtccacctcggggaggggggtcagctctgccctgagggcttcctgaggataaccagctctagaagagcagggatgcctaagaaaggaacctgagcacgcctgatgccagggctcctccaggatgcccccaaggcctgcctgactccggcgagacttcccgggagatccggaccgaccgcggaaccgaggaggctctaccctatcgccgcttacgcagtcccagcctccgcggcgcccccaaatgccgcactgttgagtcatctcagcgctgcctcctccgcgctgc

SEQ ID NO: 5342 - DNA, 409 bp, Homo sapiens
  source 1..409: mol_type = other DNA
cctgggagcatccacaactggggacctgttccctgtagcagatacttagacaagtgaagtacacacctctccaggtctaaggatgtgggcccaaattattccttgggccttggctggcctggccatagagtggggacaggttgccacccagtctgattcaggatgacgtggacctccgtgacacacggaggcactgtgaccagtcttctggtacgggcctatggccaggcctggggggggtgccctgagtacagcttccctttacccagcccccgtctgccacaatggaggttcctactccctggggcttgggacacatgtcccttgctaacccaggatgcatagctggacccaccttggtcatgctctgaggccaagctctggccagcccagcctaggatctcacgtc

SEQ ID NO: 5343 - DNA, 496 bp, Homo sapiens
  source 1..496: mol_type = other DNA
gggcctatggccaggcctggggggggtgccctgagtacagcttccctttacccagcccccgtctgccacaatggaggttcctactccctggggcttgggacacatgtcccttgctaacccaggatgcatagctggacccaccttggtcatgctctgaggccaagctctggccagcccagcctaggatctcacgtcaccctcctcttctaggttgggtgggtgacgtgctgcacgggggctgcctggtcacgcgcggcaccaagtggcgcggcaagcgctgttccaacaggagatggcccgccttgcccgagaagggggcaccgactcacagcccgagtgggctctggaccgggcctaccgcgatgcgcgcgtggaactctgagggaagagttagccccggttcccagccgcgggtcgccagttgcccaagatcaggggtccggctgtccttctgtcctgctgcagactaaaggtctggccagccccgccgggcccg

SEQ ID NO: 5344 - DNA, 610 bp, Homo sapiens
  source 1..610: mol_type = other DNA
tccctggggcttgggacacatgtcccttgctaacccaggatgcatagctggacccaccttggtcatgctctgaggccaagctctggccagcccagcctaggatctcacgtcaccctcctcttctaggttgggtgggtgacgtgctgcacgggggctgcctggtcacgcgcggcaccaagtggcgcggcaagcgctgttccaacaggagatggcccgccttgcccgagaagggggcaccgactcacagcccgagtgggctctggaccgggcctaccgcgatgcgcgcgtggaactctgagggaagagttagccccggttcccagccgcgggtcgccagttgcccaagatcaggggtccggctgtccttctgtcctgctgcagactaaaggtctggccagccccgccgggcccgacaaactccgggtcggataggtgcagcgggctggcagctgggagcgccccgcaagcgtcacgtgagggggcgaggggcgggatgcccctccgcgggccccgccaatgatgagctggattgcgtgggacgaaccgccgcgggcgccctggtctggcgctgttgtgggcagcgcggcgcgctgggaaggctcgttctcgc

SEQ ID NO: 5345 - DNA, 667 bp, Homo sapiens
  source 1..667: mol_type = other DNA
tattccagtgacgaatattcatcatgtgtaaaatgggagtacccggtctaagcgcccaccgggtcgcgaggatcctttcctgaccctaggcccagggagggccccgagatttcagatccggggcccggctgtgcaggtggaccacgccgaaagcagccgacagggctaccactggcgcacctgtcccggaagttcccggtcaccatggcgaccaggcgccttggggtcggggagacgctgggggccctcaacgcggccctggggccaggcggtccggtgtggatcaaggagccgccacctgcgttcccgagactttctggcaccgcaccgcgcgctgcaggcgcgcttcgatgacggccaggtgggcgtgagccgggcggggccgtgcggccgggagatgggccccgtgccgtggctcgttccggagcatttgctccatgccctcgcctgcctgcagggccccggtgtggccccggtgctgcgctgcgcgccgacccccgcgggtctgtcagcgcgtcctcagcgccgtggccgcctatgccacgcccgcctcgcctgcctcgctgggccagcgcgtcttactacactgcccagcactgcgcagctccccctgcgcactccgcttgagccagctgcgtacggtgctcgtggccgatcacctggcgcg

SEQ ID NO: 5346 - DNA, 228 bp, Homo sapiens
  source 1..228: mol_type = other DNA
gaacagatttttaatagagacggggtttctgtgtgctttaacaacgatccttaaagcttcctgttttagggcttggcaaggcccctttctgggccagggctgaggccctgctgggaggggcggacacgacattcccgatggcttctcgggtgcccactcccctcagtcaaactgaggacttcagggcagccctgggggagtcactaccattgcagccctacccagagg

SEQ ID NO: 5347 - DNA, 350 bp, Homo sapiens
  source 1..350: mol_type = other DNA
ctgttccatcatgatggttgtgatttctcaggtatcaagagaagaccacccgggctgggtgcaggaccagtgcgggcgcccgtaatcccagctactcgggaggctggccactgcactccaactattctttttaaaacgagatattttaagtaggtattccagtgacgaatattcatcatgtgtaaaatgggagtacccggtctaagcgcccaccgggtcgcgaggatcctttcctgaccctaggcccagggagggccccgagatttcagatccggggcccggctgtgcaggtggaccacgccgaaagcagccgacagggctaccactggcgcacctgtcccggaagttcc

SEQ ID NO: 5348 - DNA, 777 bp, Homo sapiens
  source 1..777: mol_type = other DNA
cccgacctccggcgcagctccagtgtcagcacctgccgccctccccgccccgggcccttgcccatagtcccgggggagtggaacacctggcagcgtggccaccctcagggcgttgcctgggccgcagccgcggcctggcccccgggctctcagctattaagccgcgctcccggggcggggcgaccgcccacctggtcgcgtcccgaacacctggccaggcggtgggtgccagacttctagcccctaattccagcctttggggcttcgggcaccgtgggcggggcagccggctcaagtttctccggctagacgcggaagcaccccgcgcgaccgttggcctctccgcagcgcgcggagaggggcgtggccgagctctgcaggcaggctgttcggctggcccagaccaggccgaaccggaccagacttgaagtagaagcgcgtggagcatcaccttgtcctcgttcctctgtcgcgtcctgggagtcccccgtcccccgtcttgatccaagtcaagggcctactggcgcgagagtcgctggcccccgcgcggggtttgggcatctcggcacgcccgctttcgctacccgcggggccgggcgagcgggaagctcggcctggggccggtcgcaatgggtttccgggggtcccgcggctgctctgtggaccccttcggcccctggtgctccgggcgctggcagcgtcaccggacaaaggccaccgagcgcgggggtgtccccgaggtggacgcgcgggtttacttcctctccggccccacgg

SEQ ID NO: 5349 - DNA, 607 bp, Homo sapiens
  source 1..607: mol_type = other DNA
ccagccgttggcggggggcgggggagctcctgcccccaggtcactcgccctggggcctgggggcctcccctgggaccgggtcccgatccggattagatccgttcccacgaagcctgggccactccgtcacgcgcccgtggggccggagaggaagtaaacccgcgcgtccacctcggggacacccccgcgctcggtggcctttgtccggtgacgctgccagcgcccggagcaccaggggccgaaggggtccacagagcagccgcgggacccccggaaacccattgcgaccggccccaggccgagcttcccgctcgcccggccccgcgggtagcgaaagcgggcgtgccgagatgcccaaaccccgcgcgggggccagcgactctcgcgccagtaggcccttgacttggatcaagacgggggacgggggactcccaggacgcgacagaggaacgaggacaaggtgatgctccacgcgcttctacttcaagtctggtccggttcggcctggtctgggccagccgaacagcctgcctgcagagctcggccacgcccctctccgcgcgctgcggagaggccaacggtcgcgcggggtgcttccgcgtctagc

SEQ ID NO: 5350 - DNA, 782 bp, Homo sapiens
  source 1..782: mol_type = other DNA
agcagccgcgggacccccggaaacccattgcgaccggccccaggccgagcttcccgctcgcccggccccgcgggtagcgaaagcgggcgtgccgagatgcccaaaccccgcgcgggggccagcgactctcgcgccagtaggcccttgacttggatcaagacgggggacgggggactcccaggacgcgacagaggaacgaggacaaggtgatgctccacgcgcttctacttcaagtctggtccggttcggcctggtctgggccagccgaacagcctgcctgcagagctcggccacgcccctctccgcgcgctgcggagaggccaacggtcgcgcggggtgcttccgcgtctagccggagaaacttgagccggctgccccgcccacggtgcccgaagccccaaaggctggaattaggggctagaagtctggcacccaccgcctggccaggtgttcgggacgcgaccaggtgggcggtcgccccgccccgggagcgcggcttaatagctgagagcccgggggccaggccgcggctgcggcccaggcaacgccctgagggtggccacgctgccaggtgttccactcccccgggactatgggcaagggcccggggcggggagggcggcaggtgctgacactggagctgcgccggaggtcggggaactcggcctcctaagactgaggacactcgcctgctgggccggtcgagctgtgcggtgccctccgggacgcagggggcgctgcagccacgctgggtcaggctccgcagggccctcccaacccgg

SEQ ID NO: 5351 - DNA, 568 bp, Homo sapiens
  source 1..568: mol_type = other DNA
aaagaagaggcctccattttttgctgcttctgtttaaaatataaaagaaaaataaacctgctgcggcagactcctcagccgatggtgctgtgaaaagaaatgtggcccctttccatcttcaagagagattggaccctggagggaatctccccagccgacttccactgggctgacagttcttttctttcttcatgatcagacataaacttagcatcttaatggaagaaaaatgaggggaacttcaattatgatttattaaagacaatttctattacaccctcctttatgacaagtgacattttagatgtaaaagtaaaaactttaccatgccttttttttttttgttcattgaggccttaaaacctgaggctcctgtgtgtaacatacacttgtgtatcatataaagataccactctgtttctcttatgtattcttactctagttgtttattaagaatgacaagcacgtcagcgccagctccgcccccgccgcagcgaggcgggtaggttccgcccgcgcgcactacgccctgacgtcagcgtcgcgcgcagcgcagtgacgaaatcgc

SEQ ID NO: 5352 - DNA, 479 bp, Homo sapiens
  source 1..479: mol_type = other DNA
gtcacggcctgtgcaagactggaagaggttcctgacccagcctgggcctcagacgaagtgacttctgaagggagtctacagcaggctggaagccctctgggggcagtgtaggctgctgctgaggcccgagtgtcgggggcccgctttaaggtggacccaactgcggaaggctgaactcagatggcagcagacagcgggatgactcctccaggaggtgagcaacctagaggcttcccaggcagggcacggctggggacgccaggcccaaagcgagaggccgagcctggccaggccccgccccgcgtgggcgtgctcgaccaaaggaggctctggcgggcgacgtgggtccaaagagctagcttggagccccacggccctagctccgccccacatggagaggcgtccatgggcggagcgagccgctccattccgctctagcggccagaagatctcgcgggatccgacgccccgattatcgc

SEQ ID NO: 5353 - DNA, 389 bp, Homo sapiens
  source 1..389: mol_type = other DNA
gtgcaatggtgtgatctcagctcactgcaatgcctcagcctcttaagtagcggccaggctggtctcaaactcctgacctcaggtgattcacccacggcctgtgcaagactggaagaggttcctgacccagcctgggcctcagacgaagtgacttctgaagggagtctacagcaggctggaagccctctgggggcagtgtaggctgctgctgaggcccgagtgtcgggggcccgctttaaggtggacccaactgcggaaggctgaactcagatggcagcagacagcgggatgactcctccaggaggtgagcaacctagaggcttcccaggcagggcacggctggggacgccaggcccaaagcgagaggccgagcctggccaggccccgcc

SEQ ID NO: 5354 - DNA, 336 bp, Homo sapiens
  source 1..336: mol_type = other DNA
ggattaaaggcctgagccactgcgcccggccgccagctgtgtccaagtgggcacctgaaaaccggcggacttatggggcccctggagtttccatgacaactccaaagctgtggcgtcaaaagcgttcctcctgcctcaccggaaaggccggtttgtccgccctgagttcactagcctcggcctgagcgagcagaaggcccgcgagacgagaactcggctctgagcgcgcagctgcgcgaggccgctactcaggtgcgagcccctctgcccccggcctggtttgcagaccatgctgcaacgcagcgcggggcggggtccagatcccgacctgccccg

SEQ ID NO: 5355 - DNA, 206 bp, Homo sapiens
  source 1..206: mol_type = other DNA
cagtttctccagcctcagcctcctgagtagcggcgtgcgcggattaaaggcctgagccactgcgcccggccgccagctgtgtccaagtgggcacctgaaaaccggcggacttatggggcccctggagtttccatgacaactccaaagctgtggcgtcaaaagcgttcctcctgcctcaccggaaaggccggtttgtccgccctgag

SEQ ID NO: 5356 - DNA, 341 bp, Homo sapiens
  source 1..341: mol_type = other DNA
ctggcagcctctaccagcccaggtcgtgcccaggaggctggtgctggctgcacagcctgttgcaagccgctcaggacaagctgcagcggctgcgcagcgtgcttcaagccatcaacttgcaggtgcagatctacaacacctgcactgaagagccagtcccgggggagtctccaggggaacctcgaggttgcccccagcagcgcctccttccgctcgggcccgccccggagctgcgggtcgctccgagcccattcccgccggaagtgcgtcaccagcttggcgctaaggcggtggcggcggcgccgggacgggggaggggcgcgccggaaccggaaccgacc

SEQ ID NO: 5357 - DNA, 276 bp, Homo sapiens
  source 1..276: mol_type = other DNA
gctggcagcctctaccagcccaggtcgtgcccaggaggctggtgctggctgcacagcctgttgcaagccgctcaggacaagctgcagcggctgcgcagcgtgcttcaagccatcaacttgcaggtgcagatctacaacacctgcactgaagagccagtcccgggggagtctccaggggaacctcgaggttgcccccagcagcgcctccttccgctcgggcccgccccggagctgcgggtcgctccgagcccattcccgccggaagtgcgtcaccag

SEQ ID NO: 5358 - DNA, 390 bp, Homo sapiens
  source 1..390: mol_type = other DNA
gatgacctttggtcagagctgtggagaccactctgacctctcactgaagtcacagacccctagggggggctgaggctgggccagtgactatacctgcccccacctgcctgagcaagtatactcaggcccacagtggtatactggagcccccagactccatgtgcgcttgggcttgcgtgcaccacttgtgatcacgtgcacaccagcctattctcaggaagagaggaaggcctgctgtcctcggagaagaaggagatcacctgagactccctgtgggcgagtccttgcctggggccgcgtcagcctgttcttcagacttctgcacagggccgaacgggtttggagcagtcaccgcggcccccggaagcggaagcgcagtgcacttccggc

SEQ ID NO: 5359 - DNA, 303 bp, Homo sapiens
  source 1..303: mol_type = other DNA
ggtgcccctgaggaactatcatcagctttcttccctggatggcagctcagggcactccctgccgggactgtggaggcggcaggccagacccatcccccagcttcccgttcccagggccctgggtggggcgcgccccatatcccccctgcggggcgccctgaataggggcatgtgtttgatgctggagccctgggatcaaacggcttccacggcgcccatgacgctgaggggaaaaaccttcccctggccctcgtataggtgtggggtgggggcgctctccgcccggtgttgcgactttgctca

SEQ ID NO: 5360 - DNA, 463 bp, Homo sapiens
  source 1..463: mol_type = other DNA
gacttagctaatactctgaatgctcagataggcagggccaaggtctgggcctgaggatactaaaaattgatagttataatgtgccttgggtcccagagtagcccaggtctctcaggccctacaggatgaggccagagtgacccactgggaggtcccctggcctctgagaagggtaagggcgccccaggctgcccccacacgacagaggcccaggccatgtccccagtggcctccagggggcgccgccgggaagcctgtaattgggctcctgggagctccgcggaggtgggcaggcgccggcccctcaagccctcgggttcggctggcctgctcgacacagcctgcgcacccaggctgggtcgggctcggcacgccctgctccagctgcggcatgtgcaggagggggaggggggcgaggggcggacctggcccagccccgccccgcgccggagcagtgccggag

SEQ ID NO: 5361 - DNA, 215 bp, Homo sapiens
  source 1..215: mol_type = other DNA
tgacgcgatctcggctcaccctcagcctccgagtagctgggaccacagaactgtgctctgaccaacagtggagtgtaggtcgagcgacaagcggtgtggcgccaggcaggcagcttggcggggcccaccctggaaccgttagctgcctgtcgtggcggggcggggccctgggacaggacggcctgggggcggggccgcgcgtgccgttgcagagg

SEQ ID NO: 5362 - DNA, 415 bp, Homo sapiens
  source 1..415: mol_type = other DNA
agctagccagattaattctctggagaccgctagagtattttctttgttgacttggcagacactgcatatgcgagaagagcctctatcaggctagttttatttcatcatccttaggtgtgacagagctggctggcattccttcagaccttcataaatgagaagctcagctgctgcctggcaggggcagccatcctcaggtggaagggtctcctctgtgtggatatggcagataattaaagcagcttatgtgctattttaccaacgtcgagatgatgaattttataagacaccttcacttagcagttctgttcctgggatgatgaggcttgcagcatggcactctgcagactgctagtgttctgtctaaaaaccagacaaggaaatacccttcttttatgaagtgagaaatttctgt

SEQ ID NO: 5363 - DNA, 441 bp, Homo sapiens
  source 1..441: mol_type = other DNA
tcctttttgagaaggaacagattagaaaaataaacgcctaataagctagccagattaattctctggagaccgctagagtattttctttgttgacttggcagacactgcatatgcgagaagagcctctatcaggctagttttatttcatcatccttaggtgtgacagagctggctggcattccttcagaccttcataaatgagaagctcagctgctgcctggcaggggcagccatcctcaggtggaagggtctcctctgtgtggatatggcagataattaaagcagcttatgtgctattttaccaacgtcgagatgatgaattttataagacaccttcacttagcagttctgttcctgggatgatgaggcttgcagcatggcactctgcagactgctagtgttctgtctaaaaaccagacaaggaaatacccttcttttatg

SEQ ID NO: 5364 - DNA, 344 bp, Homo sapiens
  source 1..344: mol_type = other DNA
aacatagtgttcaggacgttgtatcttgttccaggaactaagttgcttggcaagtgactacaacacaccattgagtcttggtcccaaggcgctggggagcaggagccccgatctaaggcctccagctgaaccctgagatcggcgggctgaacacgcccgaaggccgcgtagcgggcggcagggcgggaggaagtagcagctgctgctccccgcccacccgctccactgttcgccggtgagctaggtggcgcgagagagcggctgcaggagccgaaggccgcggctcgaggtggggcaggggcgggcacgcgagcgtgcgtgcgtgggcgcggtctatagcacgc

SEQ ID NO: 5365 - DNA, 573 bp, Homo sapiens
  source 1..573: mol_type = other DNA
agaggagccaccagttctcatgggtggcagttaatttttccaactactaatagaataaaggcagttttctaggggtaggaggatgcaaggacttcctggcctagctcaccctggggaaatgattaccctgtaccgcattctggttcaggggaggactccggcagcgttggggcagagcttccaggactctgcccggttagaacccgcacgagggggagggagaccggaagcctagatccctctggctgtcccctgcactgccggtaacatggcacaggagagggggctgtttgtgcacgggcagctcctgcagctgctgccgtcgcccgccctcgagggccccagcccttggaagggtaacctggcgctgccgcctggttgcctgggccagaccagacatgcctgctgctccttccggcttaggaggagcacgcgtcccgctcgggcgcactctccagccttttcctggctgaggaggggccgagccctccgggtagggcgggggccggatgaggcgggaccctcaggcccgggcctgtgccacgtgacccgccgccggccagttaaaaggag

SEQ ID NO: 5366 - DNA, 473 bp, Homo sapiens
  source 1..473: mol_type = other DNA
agggcacaacgttaagttctcccatccaagtacctggcttagcttccgtcagatgcgttcaggggcgggggcggccagcccacggaggttcgtaggaagcctcacacggtgatacaaccgaagagggtcacgcgcatgtcctgcgcctcccaactcgctgcccagcgcgcccagcaccgtggccggcagagcctgcaaggcctgcccagaccaggactccgccatgactggccctcgccccacccggggtactgtcaccgtagtccccaccacgcacgcgtgtggtcttccgggaccaggcccgttagtgcgcacgcgtaaacccagccagggtggggcctacttcgcgtgcgtgggagtattaaaaccgcgcacgcgcaccttgagctgtgagtgcgcgcgcgtgcgcggggccgcgacctgtgccggctcgagcccgctgggcactcggaggcgcgcacgtcgttccccgc

SEQ ID NO: 5367 - DNA, 620 bp, Homo sapiens
  source 1..620: mol_type = other DNA
tttaatcaatatgaaacagtgattgtcgtttctcgttaaacgtaaaaagcaaaatggagttgtaaagagtttctttcccatttcaactcgccacgcgcgctttcagcggccggctacactgcgcggtcgcggggcccggcccaaagcccccgccctgcccggcgccgctgggagaggaagctccggggaccgagggcgggcaggcgggcagcctgggctccaccaggcccggccgggcgggggaaggggcacaggagactaccgggcgcgcttccggggactgcgcgggcggggtcgccgcttggggcgcggggcccgggctgggagtcaggtcaagggtcaggggccaggggcggctcggccacgagcagccggtggggcgcggccgcggcggtgcggcggcctgccggccggaagagtaccgggctggcgggcctggggccccgcggcgcctggagggaacccttccgctcacgcctcttcgcgccggggacgccggtccgcgagtcgcaaactcggagaccgcgggcgcggggaacgacgtgcgcgcctccgagtgcccagcgggctcgagccggcacaggtcgcggccccgcgcacgcgcgcgcactcacagctca

SEQ ID NO: 5368 - DNA, 661 bp, Homo sapiens
  source 1..661: mol_type = other DNA
cgcgcgctttcagcggccggctacactgcgcggtcgcggggcccggcccaaagcccccgccctgcccggcgccgctgggagaggaagctccggggaccgagggcgggcaggcgggcagcctgggctccaccaggcccggccgggcgggggaaggggcacaggagactaccgggcgcgcttccggggactgcgcgggcggggtcgccgcttggggcgcggggcccgggctgggagtcaggtcaagggtcaggggccaggggcggctcggccacgagcagccggtggggcgcggccgcggcggtgcggcggcctgccggccggaagagtaccgggctggcgggcctggggccccgcggcgcctggagggaacccttccgctcacgcctcttcgcgccggggacgccggtccgcgagtcgcaaactcggagaccgcgggcgcggggaacgacgtgcgcgcctccgagtgcccagcgggctcgagccggcacaggtcgcggccccgcgcacgcgcgcgcactcacagctcaaggtgcgcgtgcgcggttttaatactcccacgcacgcgaagtaggccccaccctggctgggtttacgcgtgcgcactaacgggcctggtcccggaagaccacacgcgtgcgtggtggggactacggtgacagta

SEQ ID NO: 5369 - DNA, 261 bp, Homo sapiens
  source 1..261: mol_type = other DNA
gcgccgccgagctgctatggacttccctggagccaaggtcattgttccccagtgagggggcccccatgcgggcacacagtcccatgctgggaaacccttttgctcagcatgccctttgtgcccaccaggaccctgcttctgagtgacacctgcccaaccctcaccatggtttttcacattgcaaagggtaataacatgggcatttgctttccgtaaatgcaaattgtccttactgcaagtcaggaatgattgctgactcat

SEQ ID NO: 5370 - DNA, 146 bp, Homo sapiens
  source 1..146: mol_type = other DNA
gaagaactgcaggatcacgaggagatcccagctactcggatcccagcaccagctacacagagtttgaggacctcataaggacctcctgtggctccagggaagcgccgccgagctgctatggacttccctggagccaaggtcattgt

SEQ ID NO: 5371 - DNA, 361 bp, Homo sapiens
  source 1..361: mol_type = other DNA
cttagtagctatgtgaccttgtaagatgggaaccagcctgcacgaaccagggcacctgctagctctgcaaggtgagagggctgggctggggttggagccaacctttgcccatgggctagggacaagggcatcttctcccacttgcagagtaagacatgctcagggcttgttctggtccctgaataaggctttagtccagcagggatgctgggacctggatacttggtcactggctccctgggcccaggccccactgcagcccaggtactacaggccggcgtggcagatgacctgaggaaactgcccttcatgaggctgccgcgtgacccgctgtggctacatgccggtagcgggggcagtc

SEQ ID NO: 5372 - DNA, 264 bp, Homo sapiens
  source 1..264: mol_type = other DNA
gatcatcaagaggactctcaaagaccttggacttgggccttagggttcataaccttttggtaactaagtgacctggaagccaaaacgctccactttggtcctaggggacactgtcgctgtttaccaacgaggctggaggcatcttagatgacttgattgtactgggagaaagatttggccctcttgtccaagattcaagagcaggccctctctggagcacgccagcttagtagctatgtgaccttgtaagatgggaaccagcct

SEQ ID NO: 5373 - DNA, 274 bp, Homo sapiens
  source 1..274: mol_type = other DNA
taacaggctgctcttccctcatgtgagaaaaacctgtttcagcagtactgcacaggccatctgagggcctggtatgcagtaagctgtggtgctgcctacctgccaggctggcccacctgaggtcctaaaggtatgattcaggggtcttctgggcagcccaatcagctctggattgcccgagctgccctggcttcttccggttgtgcgctccggagagagacctgtccgagcagaggcctggactacatctcccggcgtgcctggcagtgtggtt

SEQ ID NO: 5374 - DNA, 177 bp, Homo sapiens
  source 1..177: mol_type = other DNA
atgcaaacacctgacctcaggtgatctgtaacaggctgctcttccctcatgtgagaaaaacctgtttcagcagtactgcacaggccatctgagggcctggtatgcagtaagctgtggtgctgcctacctgccaggctggcccacctgaggtcctaaaggtatgattcaggggtcttc

SEQ ID NO: 5375 - DNA, 380 bp, Homo sapiens
  source 1..380: mol_type = other DNA
ctgaggtgagatcactggagcccgcgaagtcgaggctgcagtgaaccgtgatcgcagcattgcactctagcctgggtaactgagaccctgtctcttaggttctaatttgtatttcctctataaatattaagtatcttttcaggctaatcactgctgatttgtgtttatgtatttatatgcctttaacgcgcggctcgcgggtaggctctaagcctcgagcatcagtgggaggggcgcggtgacccacgcctgtaattccgacactaatcccagctactagggaaatcgcttgaatccggaggttgcagtgagtcgagataacgccactgcactctagctggggcgacagagcgacccggccgatcctgagcttcggcctc

SEQ ID NO: 5376 - DNA, 482 bp, Homo sapiens
  source 1..482: mol_type = other DNA
cattcccagacccatccggtaactgtcagtttcagtaactgtgaaagctggggacgagggttaggcctgaggcgctttccgactccccagcctgctgtgggcgaggctctaggagatgagctagcttcccgcgggcagcaaggctttcatcctttgcaattgtaccccttgatttgcattcgaaggaaataaaaggcctgaagttgggcggggagcccctcccccacactactggccgagtgaccgggaccgaccgccggggtgtgtcccgggacggacttccctggccgtctggccggggcggggcttgcgcgcgggtgcggcgcgctgcggagcggccgacgcaggcagaagccggcggcgcgcggacagccagtcggcgccgcgcggagctggccgctggattggctgcaacactcgcgtgtcaggcggttgctaggctccggccgcgcgccccgcccttgcgctcagcgccctctcac

SEQ ID NO: 5377 - DNA, 495 bp, Homo sapiens
  source 1..495: mol_type = other DNA
ccccagagctctccgggatccaggtggctggtggcagccagttctgtgttcagaatgtgcttgctgtcaagagtgcaggcctggaattccagcctggccacaggccaaggagggaatggacccatcctgcgcatggtgtggggatgagaagcaccaccacgggtctcattcccagacccatccggtaactgtcagtttcagtaactgtgaaagctggggacgagggttaggcctgaggcgctttccgactccccagcctgctgtgggcgaggctctaggagatgagctagcttcccgcgggcagcaaggctttcatcctttgcaattgtaccccttgatttgcattcgaaggaaataaaaggcctgaagttgggcggggagcccctcccccacactactggccgagtgaccgggaccgaccgccggggtgtgtcccgggacggacttccctggccgtctggccggggcggggcttgcgcgcgggtgcggcgcgct

SEQ ID NO: 5378 - DNA, 411 bp, Homo sapiens
  source 1..411: mol_type = other DNA
ggtttgtaaaatgggttcaagttactcacgcctttctacacagtcatgatttatgacgtcagagatgaactggaatataggctcctaggaaatattctcccacaggaaagtacaggcttgtgtgagaaggtacagagactcccccgctgtggcactccggttacccggaggagagttggcggaaagcccctctgactccaaagcagggctcagcgcgacgtcccagaggccgcttctagtggcaggtgcccctcctcacagggccctcgcagccccgccggcccccgcccggctccttccgatacaaccgcgtcggccctggacagcgcatgcgcgggcgccggcggctgtttcccagcgaccccgaggctggcgggagcgcgcacagggcgcgagacgcgcatgcgcagc

SEQ ID NO: 5379 - DNA, 324 bp, Homo sapiens
  source 1..324: mol_type = other DNA
ccaccgcgcccggccggccgggactacttaactagttatcttgagtaagtacacgtgcacagggaacctgcctgcctaggttttttccacaggaagctccctggtcctgggtggagtctgagcccaccccaagagctcagggtgaggccttcttgcggcaggcctggcgactgataagtccgggcaactccctccagggcagggcctggcactgtgtggcctcgtggtggacccgaaggaaccctacagtcagccccagagccgcgggagatccacgctgcggccggctccgccccgcccaaccgtgcttgggccatgcccgtc

SEQ ID NO: 5380 - DNA, 400 bp, Homo sapiens
  source 1..400: mol_type = other DNA
ggtggagtctcccaagagctcagggtgaggccttcttgcggcaggcctggcgactgataagtccgggcaactccctccagggcagggcctggcactgtgtggcctcgtggtggacccgaaggaaccctacagtcagccccagagccgcgggagatccacgctgcggccggctccgccccgcccaaccgtgcttgggccatgcccgtcccccgaagccgggctcccgggttccgcttccacagggtcgcccctcggtaagaggcccaggactcagcccacggccccaggccgggtcctctcaccgtcaaggcccgccccctgccaaggccccgcccctcacagattgccgcagggcaggggcggagacagcccgggccgtcccaggctccgcccccggaag

SEQ ID NO: 5381 - DNA, 527 bp, Homo sapiens
  source 1..527: mol_type = other DNA
agccggaacccgccaggctcagagccctgccgcccctcactcacccggagcctcggccgcagcgacccggcgccaaatcacgcgcacgcttgcgcgctgagcctccagccgcgcacgcgcactggcccgcgcccagcctccgctaggggaccccctccatggctctgctctggggatgctcccagccctgctgcggcaggccccgctcagacggtccttaaaacgtctgaaaggccgttgagatgagcgagcctctctgggctctgccgccgggtgtgggctgacctgcctacagctggggcctgataaggcagtggggcaagtaattttccccaatttacagggaaaaccaggggctggagcccagacctctggcagctaggctgcagaggggtttcaccccaactgacctatgggacctgaggcctggcccctcatggctcctgtcaccaggtctcaggtcagggtccagcaggccctgagctgacgtgtggacaatcccgtagggacaggtttcacaacttccc

SEQ ID NO: 5382 - DNA, 644 bp, Homo sapiens
  source 1..644: mol_type = other DNA
cctgccaaggcccgggcaccaccgcatgtagcaggtgctgtagctctgtgccccggagcacttggaagtcattcaatggcgagcgctgccctgcaggtgggcatacatgtcagtaatgtgtattggcatgtccacacgatggaccctgtatgcactttcaagggccagtctagccccgtcaccggtgcctctgttttcccaggcaccgggctcagatctaacacatacgctctgtgagagcagtgggtgatgaagcttgccccacctcatctctcaaatgagaatgctaaggctcagagccatcacattacccagccaggggccctggctaggcattcagactccaaatctgggctctcacgtcctgacactgcttcagtgctagatgtgctcaagagggcaaggtcactgccccatgcccactgagcctgacttttttctcatcctagaataggagaatggggccaaccccctcctgaaggcagatggggatcagggttgggggcacttaccagggacccctaacagcaggagtgggagccaccccatccttctggctggaggctgcactgtgacccaccacagccccatccgggaagttgtgaaacctgtccctacgggattgtccacacgtcagctcaggg

SEQ ID NO: 5383 - DNA, 608 bp, Homo sapiens
  source 1..608: mol_type = other DNA
tcccgacctcgggccctcggtgggcgtactaccagagtagttgaagatctgattaaactcagtcattcatttgatccggagtgggctccgggagtcagttgctgaggcccgtgagaggcggaccttgtccccgcccggggactccctgtcacggctatcccgtccaaccccgccggggtatccggactcagaactgaacctactccgtctgggagcccaaggacggcgagggcggcgcatggctcccccaagtcgcccccgcctggccccaagctccacaggacctgccagaccagcttccgctgatccctgcgctgcaggtgcactagcccggaccgcgaagggaatagccggaacccgccaggctcagagccctgccgcccctcactcacccggagcctcggccgcagcgacccggcgccaaatcacgcgcacgcttgcgcgctgagcctccagccgcgcacgcgcactggcccgcgcccagcctccgctaggggaccccctccatggctctgctctggggatgctcccagccctgctgcggcaggccccgctcagacggtccttaaaacgtctgaaaggccgttgagatgagcgagcctctctgg

SEQ ID NO: 5384 - DNA, 622 bp, Homo sapiens
  source 1..622: mol_type = other DNA
acacatacgctctgtgagagcagtgggtgatgaagcttgccccacctcatctctcaaatgagaatgctaaggctcagagccatcacattacccagccaggggccctggctaggcattcagactccaaatctgggctctcacgtcctgacactgcttcagtgctagatgtgctcaagagggcaaggtcactgccccatgcccactgagcctgacttttttctcatcctagaataggagaatggggccaaccccctcctgaaggcagatggggatcagggttgggggcacttaccagggacccctaacagcaggagtgggagccaccccatccttctggctggaggctgcactgtgacccaccacagccccatccgggaagttgtgaaacctgtccctacgggattgtccacacgtcagctcagggcctgctggaccctgacctgagacctggtgacaggagccatgaggggccaggcctcaggtcccataggtcagttggggtgaaacccctctgcagcctagctgccagaggtctgggctccagcccctggttttccctgtaaattggggaaaattacttgccccactgccttatcaggccccagctgtaggcaggtcagcc

SEQ ID NO: 5385 - DNA, 557 bp, Homo sapiens
  source 1..557: mol_type = other DNA
tcagggttgggggcacttaccagggacccctaacagcaggagtgggagccaccccatccttctggctggaggctgcactgtgacccaccacagccccatccgggaagttgtgaaacctgtccctacgggattgtccacacgtcagctcagggcctgctggaccctgacctgagacctggtgacaggagccatgaggggccaggcctcaggtcccataggtcagttggggtgaaacccctctgcagcctagctgccagaggtctgggctccagcccctggttttccctgtaaattggggaaaattacttgccccactgccttatcaggccccagctgtaggcaggtcagcccacacccggcggcagagcccagagaggctcgctcatctcaacggcctttcagacgttttaaggaccgtctgagcggggcctgccgcagcagggctgggagcatccccagagcagagccatggagggggtcccctagcggaggctgggcgcgggccagtgcgcgtgcgcggctggaggctcagcgcgcaagcgtgcgcgtgatttggc

SEQ ID NO: 5386 - DNA, 361 bp, Homo sapiens
  source 1..361: mol_type = other DNA
atcttcattttacagatgggacaacatgctgtcacaggatctcaagacaccagaggctgctgtggcagcacagactgcggtagctcctcacactccagcaggaggaggtgcgagacccagcacctccatttctagaggtggcgtgaccttcctctccagagtgaactgggggctgcaccccccttctcccagagtggggggggacgcagagaggccaagggcgctccggcctcgtagtagccagcgaaaactccgccgccagtgccgcttcggcagaggccctgagaggcagactctgactgacacgtgagctgacctatagcaccccctcgggggcgggttctttgcagtctatgacgcc

SEQ ID NO: 5387 - DNA, 614 bp, Homo sapiens
  source 1..614: mol_type = other DNA
ggggtgctcaggtgagccctctctatagtgcttccctgggccaagctgacaccagcccctgagggtggggtgaccccacccctccctctctgggcctgtgcagtgagcatggggggagtcctgaccacatggcagactgctttgaactttaaagctgtacaatttggttatgtttgtgctgacttaaaatatattttaatgaggaaaaaataatggagaaccctgggaaggacctggttcttttgcttctcctccaccgcccgaggcctgcgccggtggctcccgccgcagttgggtgctcggtccgagcccgctcccgtggcccgggagccttccctggtcaccctcggggcgaggccggggccgtggggcggggccggcggctgctggaccgcggcgaagcagggaacaaggcctcgcccttggcgccagttccgcctttggatccgccaatggccagctgacccgcgggtcccggcccgggtctccatggcagcccggcgtactcgggcgctcattggctacgtctgtcgcagcgctgcgctccaacgttccgacgccggcggccgtgccacgtacgcggcagccgattggcccgcggtggtcgcgtcact

SEQ ID NO: 5388 - DNA, 240 bp, Homo sapiens
  source 1..240: mol_type = other DNA
cagatctcaaagttacagcccagtaaatgttaaaatctatcataaaggattccttttgtgtcaagtacagtggcacaagcaatcctccagtagctgggatggatcaccacacccaactaattttttcctgagctcaagtgatgcaggtcctgttagagttgtaatggaagcctgccagaggtctagaactcagtgaatctgggaggcccaggagtcccgcctgcccagctatgtttgagc

SEQ ID NO: 5389 - DNA, 606 bp, Homo sapiens
  source 1..606: mol_type = other DNA
tcctgcctcagcctcaggagtagctgggactaggtctctgggattacaggcgtgagctgtctgcagctacatgttgatagagcagcctcagcaccgaccctcagtctgcacctggtaccggcaaagggaatgccgacggtcgcgcgtcgccgctggactcgcgactagccaagcactccccactagagggcagtcccgtctagctcggttgggacgcggctgaggccccgccggtgcgctgccacaaagtcccgcctcagacgggctgaacacgaatgggtcccgtgggtcaggccccgagggtccacaacctctctgggtccgaccatccggggtgctctgcctatgtgcggacgcagcacggcgccccgtgagagggaccgctatttcaccattgaacaaacggggaggatgaggcccccgcacggaggcgacctgtcctgcgtcacgcagcaacgagtctgggggctcggggggtccccgtaccggccccgtccggccgcccttcccacccagaaccgcggcggagtcgggagggacgccgggctttagccccgccccctttggccgcggggccggggcggggcgcggctgccagatgtcggg

SEQ ID NO: 5390 - DNA, 544 bp, Homo sapiens
  source 1..544: mol_type = other DNA
ataatggactattattcagccattaaaaggaatgaaatattgatacaggctataaactctatgaacattgaaaaaaggaaatagacataagaggtcacattttgcaattcttttttttttagactgagtctcactctgttgcccaggctggagcgcagttaggcgcacaccatgcctggtcttgaactccagacctcaggtggtccacccgccttggcctcccaaagtgctaggttgaacaacactgtggatgcactaaatgccactgaattgtacactttaaaattgttaactttatgttacatgaatttcacctaaattaacaacaatggtttggctattacgtagtttctagagaactggccccagttttttgcaacttcttatgagtctataattatttcaaaataaaagtctaaaaggaaaatcaggtctgacactcagagactgatacctcttgagagtcctggaactcatcccaggttttagaccctgaatggcctgtctggggctggcgtctggaggcaggatcaggagccagctc

SEQ ID NO: 5391 - DNA, 512 bp, Homo sapiens
  source 1..512: mol_type = other DNA
caaagattctatgaaatgaaatctcactctgggtctatttcagctggagcagatcagctagagggagtaacactgccattactccagcccaggtgggcctgggtgaactcaccagggatgctgctctctgggaggacctcaaagataacctcctcaaagataacttctctgatgtgggaataataaaaaggatttgttagtctctagtctttgaagcatctgggcctccaaaattcagtacttggatgaagccaaggttggcctggtctatgggaactacagaccatagcgcatggtccatcactgtccagagcccaagggacccatcgggaccatttggcccagcctgcctcgcgccagctctggcatgggaccacaatgcgctgccttgccctggaaaagggtccagctggcagcctcgctgctccccggtcgagtctccccagaggacgcctgagagcgaccgcgctccgcccaggattctctacggcctcggggccgctaagccccgc

SEQ ID NO: 5392 - DNA, 512 bp, Homo sapiens; identical to SEQ ID NO: 5391
  source 1..512: mol_type = other DNA

SEQ ID NO: 5393 - DNA, 378 bp, Homo sapiens
  source 1..378: mol_type = other DNA
gtccgtgagcctcacccaggccaggtgggataccttggtgccacagttctcctgtgagactttgctactacagtctagggccctcactgttttcacactgactacctgcaaacacacacctctgtgtgtttactgctcctagctagggacacacacctctgtgtgtcggggagctgggcaaagccccgttccctagagactaatgactggcataggaggcctcctccggccccaggctgagggcctaagggagccattgagaaccttggccagggctaagcaggccagtgctcaccagcaccgcgctccgccagggtcggggcggggccggttgggaggccccgcccccagcccgcccccggcccggggtgcgaatcc

SEQ ID NO: 5394 - DNA, 476 bp, Homo sapiens
  source 1..476: mol_type = other DNA
agaatcgctagtgagccgagactgcgccactgcactctagcctgggcgacacagtgagactccgtcataacttgttttggagtggtccacacaagggctgggttctcaaactccaggtaacctgcagtgtgatgtggtcatattacagttagagagactcccctactgctaaggtgtagttctctccccctcctatagaggcggcagatgctcctgtgtacccctgctgttgagaaccaaggctgccttacaggggacctcagcctggggacagccattagcgcggccacacggtggctgccgcaacaccacccccaaaaaggggtgggtggggtgatctaagagggcttgtgaagtcttctcccaaccaccagagatccctctgaaagtctggaggtgggatttgggtcaccagaacccctggccaattctgctttggaaaaggagtcaggaccctgcactgggtgtggccgccc

SEQ ID NO: 5395 - DNA, 351 bp, Homo sapiens
  source 1..351: mol_type = other DNA
cttccatatactgaggctgcagaggaggtatgggcctccacttacgtgcctctctgactctgaggtccagtcagcttatggccctgggagagcaggggccgggcgctcccaactccacatggtgggcccccaggccacctctgggcaccagccactgagggtgttgctactaagtgcaaactagttccctgccccccttctcgctgcgaaccagtcggtagtggggggatgggatgggacggctcagactggctcacctctggatgggcggagggcctgggctaggccaagccttcctcgcggccccgcccccacggcccgactccgcccgcccagcccggcgccctcggg

SEQ ID NO: 5396 - DNA, 446 bp, Homo sapiens
  source 1..446: mol_type = other DNA
tttgaaattcaattaaatcaaaatctctagggctggtgtccagtgcagggcatgatcaacgccatcaagcctggctagtccaggctggtctggaactcctgacacctcggtctcccaagtgttgggattacaggcgtgataccgttctagagcattatactgatacattaaaacgtggctacaaatatgtttttagaaacaattagtgactgttctcgctcggacggagaggcccagagtccagggctgttctgtgtgggactctagactcggaggaggcgcccaggcccctagaaggcggcgccggatgaggcaatcgcggacccgggtcaggacctgcccacggctctgctgggactaggagcccagaaccagtccctcggcgccgcaggcgcaccccgggggcgggccgagtcgggctgagcggctggagctgggccttggcc

SEQ ID NO: 5397 - DNA, 251 bp, Homo sapiens
  source 1..251: mol_type = other DNA
gctgttgccaggcaacagtgcagtggcgcgatctcggctcactcgcctggcaggctggtctggagtgcagtggcacagtgtcggctcactgcaacctcagtagctgggattacaggcacctaccatgttggccaggctggtctagaactcctgacctcaggtggtccactcgccgcggccagctggagatggcaggcaggccagggccgtacccgagctgctggagcgcgcaccccagaaggcaagtcccc

SEQ ID NO: 5398 - DNA, 300 bp, Homo sapiens
  source 1..300: mol_type = other DNA
cgcctggcaggctggtctggagtgcagtggcacagtgtcggctcactgcaacctcagtagctgggattacaggcacctaccatgttggccaggctggtctagaactcctgacctcaggtggtccactcgccgcggccagctggagatggcaggcaggccagggccgtacccgagctgctggagcgcgcaccccagaaggcaagtcccctgcgcgcggggcacggcgggagcagctgtacttcatctcccagcgggccgagcgctgaaggcagcggcgcggcgcctttgtggtagcagtgg

SEQ ID NO: 5399 - DNA, 176 bp, Homo sapiens
  source 1..176: mol_type = other DNA
aggctggagtgagtccaagtagctgggactacaggttgctcccaaagtgctgggattacagctggagtgctgtgacgagatcacagctcactgcagcctcgacctccctctcacctcagctcctgagtagctgggacaagagttgtgtatagagtagccctcgcacgccaggccgc

SEQ ID NO: 5400 - DNA, 320 bp, Homo sapiens
  source 1..320: mol_type = other DNA
catagacagggatgaccgtgatgagcgtgaatcccgagtgtacactctgagccttatagtaatagagcactttgggaggcccgtctccgtctcccaccatgtacttttgagcacttgacttcatgaattcatttaggtctcagtacaacgttattcccattttaaagatgaaacaatggggttatgataacatattagttctgtgttttgaaatgaatgataaatataagttagcccaggagttaggccagcctggccctgtctttaaaataataataatgaaaaataataaatataagttgttgttttggtcatcttga

SEQ ID NO: 5401 - DNA, 586 bp, Homo sapiens
  source 1..586: mol_type = other DNA
ggccaacgcccctgggagcctccgcagggtgcccggggcagggctgaggtcccagtgctgagccattggctcatcaccaggccatttgaaagcaaatgtccccttgaggagggctgcccccgacctggcctaggctggaggctgagcccgcgggaaggtccggcggtgccagccgtcccaggggctgcaccgccacctgctgagcagcccgggcagtcaggggtcctgcgccgcggggcccacgcacgggaccaggggcacggccggcggcgaagcgcaggctcgttgctccctggcgctgcagcccttctcgccagggagttgaatgcccgggtaaacaccaggcgcgatgtgtgcagggcggggcgggggcgccgcccgcgaagcgggggcgggggcgaggggtgcagactagtctcccccggcgcggggtgcccaccgcctgggaaccctgagcccggcccacggacaggtggagcgggggcggggcggtggctgggcgggtcccgccccgggggtggggctgggcgggccgggcggggcggggctgcgctatgcaaatgtcgcccacgggcggccaattgcc

SEQ ID NO: 5402 - DNA, 738 bp, Homo sapiens
  source 1..738: mol_type = other DNA
gctgagccattggctcatcaccaggccatttgaaagcaaatgtccccttgaggagggctgcccccgacctggcctaggctggaggctgagcccgcgggaaggtccggcggtgccagccgtcccaggggctgcaccgccacctgctgagcagcccgggcagtcaggggtcctgcgccgcggggcccacgcacgggaccaggggcacggccggcggcgaagcgcaggctcgttgctccctggcgctgcagcccttctcgccagggagttgaatgcccgggtaaacaccaggcgcgatgtgtgcagggcggggcgggggcgccgcccgcgaagcgggggcgggggcgaggggtgcagactagtctcccccggcgcggggtgcccaccgcctgggaaccctgagcccggcccacggacaggtggagcgggggcggggcggtggctgggcgggtcccgccccgggggtggggctgggcgggccgggcggggcggggctgcgctatgcaaatgtcgcccacgggcggccaattgccggcgctccccgcgcggctctgagcgccccgtcccgccggcggccgcgagaccagagcgagcgaacgaaccgcggcggtccggagagccccgagcgcagcgcaggacctgggtacgccgcgaggaaccgtgcagcccagcgcggccgcccggcccgggtccagcagccaggagagcgcagcgcttcgaagccgagtgcgcgccaccgcc

SEQ ID NO: 5403 - DNA, 377 bp, Homo sapiens
  source 1..377: mol_type = other DNA
gcattccccccgcactgggaagtggggcaattaatcggatcagagccagtgactgagacagctgtctggtggaacctgggacccacccgtctctagcaccaagggcctgtgtgccaagggacaggctgacagctggggccccaggtgaggctcaagcaagccaagccttactccttgcctggggtggaccaccctcgcccccaccccacccctggttgggaagggggaggcaggtaggcctgagtgtcgcctgaaagtcccccaggggttaatgtgacacccacagacctcaccgaccagcccctcctcccgcgggccgccagggattggcgggcggggggcgggccgggggcggggccgggcgcccttcatcccgc

SEQ ID NO: 5404 - DNA, 385 bp, Homo sapiens
  source 1..385: mol_type = other DNA
gtgtaaagatggaaaccaatttttttttttttttttgattgctctggcactgcaacctccgccacccgggttgaagcagttctcccgcctcagcctcctgagcaggtgggatccatgttggccaggctggtctagaactcctgacctcaagtgatgagggctggttcctgctctgccctcgagggcaccggatccccaccctcggggcgcccggtcccgcctgcagcccgcccagtgccgggtcccggggttcgtggccccgcctgcagcccaggcccgagcctgggctgcgcctaagccccgcctgcaagcccgccccggcccagtcacaggcttggttcgcccaggccccacccccggcccgccccgccgtcggtgcgcggcg

SEQ ID NO: 5405 - DNA, 458 bp, Homo sapiens
  source 1..458: mol_type = other DNA
catgttacaaatggggcacgttcaccagactcagcttcactgaggctccgaggtgcaggagcgggtttggtgggggttgttcctcccacctccaacctaaagggaggtcacatggtctgcccccggcggactccagatgggccccgccctgtggtgcagaagtgagatttggggactgggtcctgagggcccatccgacctccagttgagagccccagctgcccggccaccccagccggtccctgggaactgaggtggcagctgagctccccattatctttccccacagctccccacctgtggagggagaggttgagatattgggtggccttgctttaaggcccaatatgggaggggtcgtccctaccagcccctcctggctgccgtctccagctggtcccggctgcctgcccggtcacccgatccgccctctaaactttacggcacggcgggcggtg

SEQ ID NO: 5406 - DNA, 379 bp, Homo sapiens
  source 1..379: mol_type = other DNA
gcaaatgaagggctgcctcaccttgcccctctttgattcctcaggggtgtggagagagagcccaaatgcagaggctgcttcagctgggttgggagcagtccccaagtcagaggctgaggcttctgcccaggtcttgtgcccagagacatgtctattcttatgggtgcacacgtttgcacatgcacaaatgtgcaacacatctgtgtgcaaaatatgcacatatcacacatatgtactgcatggattgcacagtgccacatgtgtgtgcacaccaacccatatccacacatgtgcaatatgacacactatatatttgcacatagatgtgcacacacatgcacatacatgtggggacactgccacctccggggacaggagc

SEQ ID NO: 5407 - DNA, 387 bp, Homo sapiens
  source 1..387: mol_type = other DNA
caaatgcagaggctgcttcagctgggttgggagcagtccccaagtcagaggctgaggcttctgcccaggtcttgtgcccagagacatgtctattcttatgggtgcacacgtttgcacatgcacaaatgtgcaacacatctgtgtgcaaaatatgcacatatcacacatatgtactgcatggattgcacagtgccacatgtgtgtgcacaccaacccatatccacacatgtgcaatatgacacactatatatttgcacatagatgtgcacacacatgcacatacatgtggggacactgccacctccggggacaggagcggaggggagggttcggaagtggaatgcgaccccccagcctctttcccctaggggctgtaatcatcccggg

SEQ ID NO: 5408 - DNA, 404 bp, Homo sapiens
  source 1..404: mol_type = other DNA
gaggtggtaacaagcttgtgctttgcccccactgggaaggaagggaagctggaagctggaccacctcctcctttcaaggtaagcagtgattcagtgtacactgccagctaaggttgcaagcttagtaacactggccagcatgggtgaagctatcagagccctcatggcatcaatagcattgtgtgctagcaggtcatgcagtggaggcacaggcttcctttgtctgtctggctgccacatgggcacctgactagtggaggcaggctcctggctggctccctccaggctggcccacgtggatcactctgccccttgagggctgccctatagcccagtgggctgagctcaggcctattttaggccaaggctgggaggcagccaggccttccctgggctcacaaagg

SEQ ID NO: 5409 - DNA, 421 bp, Homo sapiens
  source 1..421: mol_type = other DNA
ggctgcagtgagccatgatgctgccactgtctctaaatcaaataaaaattaaataagggctatgggctgagactagcctggccaaatgggcatttgagaccagcctggccaacatggtgtaaccccgtctcgcatctgtaatcccagctactcaggaggctgaggttgcagtgaatggagactgtgccactgcattcaatctcagctacttgggaggctgaggttgcagtgagccgagatcgagcactccagcctgggcgaaaacaaataataataataataataataataaagagtgagtgaaggtgaaaccagattacctcatctccctcctaccccagcctaaggtgctgggcgacgtgtggggcgagatcggaggctagccgggcttcacgcctgcgcccccaggtagccacgggga

SEQ ID NO: 5410 - DNA, 528 bp, Homo sapiens
  source 1..528: mol_type = other DNA
tcctcaggaggagctacctggtggacaccttgggcccctatgtgatcaatgtgaccagggcagcgatggcctgcagtcaccagcggtgccatggccacgggcgctgtgcccggccctgtggccagacggcagccttgagtccttcagctgccactgttactggggctgggctggccccacctgccaggagcccaggcctgggcctaaagaagcagtataaagccagggcccctgccactgcctcttcccttggaatccctgagggctctgagacatgtgagtcctccacctagggctttgtgcctacacctcactaagcccatgtcggtaaagtgctaagctgtccccagacccaggcaggggtaggtctctgggctgccaagtgccctgagaagccagtcctgccttggtgctccactgagggacgcttcggagttaaccaccgtgcacttgttcccgacgcggggctggggcgcgcgcagggcattgtgggtcagccagcgcgtcgtcggctggtgggccccaggc

SEQ ID NO: 5411 - DNA, 488 bp, Homo sapiens
  source 1..488: mol_type = other DNA
actagagagtccctactgtagagttagaatcgtgcccacatggatctggccagcccagcactggcttgcagcactaggggcagccggcgtggtgctctggggggacctgagcctctccagctctgcctgccatgtagcacatgctggggtcccagggtgggcttctcctcaggaggagctacctggtggacaccttgggcccctatgtgatcaatgtgaccagggcagcgatggcctgcagtcaccagcggtgccatggccacgggcgctgtgcccggccctgtggccagacggcagccttgagtccttcagctgccactgttactggggctgggctggccccacctgccaggagcccaggcctgggcctaaagaagcagtataaagccagggcccctgccactgcctcttcccttggaatccctgagggctctgagacatgtgagtcctccacctagggctttgtgcctacacctcactaagcccat

SEQ ID NO: 5412 - DNA, 401 bp, Homo sapiens
  source 1..401: mol_type = other DNA
atctgacgtcagtcaagggcggctgcttcccagggtggggcccaaatttgccctgtcctggagcctggggcggggctggcggaggcagagccagctggaggcggggcctgcgcctggctgaagtgacgtgctgggctggggcagggcctggtcgcccgcgcgggtgctgggaggccttagaacgccgtggcgtgccgcaggacgcgacggctgcagaacatccgccgcaccgctgggggccaacgttgtcggaccgaggagttaggtccaccccgcgcgtgcggtccccaagtggccatgccaccctgcaggccactctctgaggaccccggagccccgcccacagtgggtggggtcggcacaggccgcggggaagccccgggctcagccctaggggcgga

SEQ ID NO: 5413 - DNA, 388 bp, Homo sapiens
  source 1..388: mol_type = other DNA
atctgacgtcagtcaagggcggctgcttcccagggtggggcccaaatttgccctgtcctggagcctggggcggggctggcggaggcagagccagctggaggcggggcctgcgcctggctgaagtgacgtgctgggctggggcagggcctggtcgcccgcgcgggtgctgggaggccttagaacgccgtggcgtgccgcaggacgcgacggctgcagaacatccgccgcaccgctgggggccaacgttgtcggaccgaggagttaggtccaccccgcgcgtgcggtccccaagtggccatgccaccctgcaggccactctctgaggaccccggagccccgcccacagtgggtggggtcggcacaggccgcggggaagccccgggctcag

SEQ ID NO: 5414 - DNA, 439 bp, Homo sapiens
  source 1..439: mol_type = other DNA
catgtccatatgcatctacttggcaaggtcagagccagtctttgaactgcagcaatcacaaaggctgacattcactgagtgccattcctcacaatgaggctatgaggaaactgagtcactcacattgagaaacccaggctgtctagctccgggggtacagtccagcaaataaagcagtcatgatttacttagctgtttactgagcgcctaaaatctgacgtcagtcaagggcggctgcttcccagggtggggcccaaatttgccctgtcctggagcctggggcggggctggcggaggcagagccagctggaggcggggcctgcgcctggctgaagtgacgtgctgggctggggcagggcctggtcgcccgcgcgggtgctgggaggccttagaacgccgtggcgtgccgcaggacgcgacggctgcagaacatccgccg

SEQ ID NO: 5415 - DNA, 372 bp, Homo sapiens
  source 1..372: mol_type = other DNA
tccatgtccatatgcatctacttggcaaggtcagagccagtctttgaactgcagcaatcacaaaggctgacattcactgagtgccattcctcacaatgaggctatgaggaaactgagtcactcacattgagaaacccaggctgtctagctccgggggtacagtccagcaaataaagcagtcatgatttacttagctgtttactgagcgcctaaaatctgacgtcagtcaagggcggctgcttcccagggtggggcccaaatttgccctgtcctggagcctggggcggggctggcggaggcagagccagctggaggcggggcctgcgcctggctgaagtgacgtgctgggctggggcagggcctggtcgcccg

SEQ ID NO: 5416 - DNA, 370 bp, Homo sapiens
  source 1..370: mol_type = other DNA
tccatgtccatatgcatctacttggcaaggtcagagccagtctttgaactgcagcaatcacaaaggctgacattcactgagtgccattcctcacaatgaggctatgaggaaactgagtcactcacattgagaaacccaggctgtctagctccgggggtacagtccagcaaataaagcagtcatgatttacttagctgtttactgagcgcctaaaatctgacgtcagtcaagggcggctgcttcccagggtggggcccaaatttgccctgtcctggagcctggggcggggctggcggaggcagagccagctggaggcggggcctgcgcctggctgaagtgacgtgctgggctggggcagggcctggtcgcc

SEQ ID NO: 5417 - DNA, 393 bp, Homo sapiens
  source 1..393: mol_type = other DNA
tattaataattaatatataatgtgtcccaagtagctgggactacaggtacataccaccatgcctgctaagactatagccatatatatatatatatatatatatatatatatatatatatatttttttttttttttttttttttggggagtagctgggattacaggcgcctggcctggccatattttaaaatattttttttaaggaggggcctgcccagcagggtctgcccctggctgacagcgtgggaggggccactgttggcccagccccacccccaaccaagatccctttgccagggattcagaggtagccctgatgcctggctggcctggcctcctaatccaaggcccgccccttggcccgcccctggcctgggtggggtgaccccctac

SEQ ID NO: 5418 - DNA, 558 bp, Homo sapiens
  source 1..558: mol_type = other DNA
cctgccccccaccgggagaggcctgtggagcgtaggggggccctgggagacccctcttgctggctttctcggaggtccagccagaaactgctgcattgagagggagccgggctccgactgtcccgccctgatgcgagtcagggagaggggcggccaacctcctagaccccttgcggccacgccgcgacccagagccgggctgccaggagcctcggcccttcctgggccggctaagaagcggtgcttggccccttccctcagtctggcagggggcggggcctccctttagacggcggaccagagaagggggcccctgattcgtgggaggcggggcactactctccaggagaccagaggtcgcctcagggggacagatctggtgctgccccctgccaacctcggaggctggcggcgccgcggagctgggaggactgaaccaccggcctcgggcgcccggctcagaggggcattagggtcctaaatgggcggccacgtccctctgcagaggacctggggctcttcgagcccgaaacggcccacctccgcactggagtccca

SEQ ID NO: 5419 - DNA, 404 bp, Homo sapiens
  source 1..404: mol_type = other DNA
ggcttctggcccctgtgaagccagcacagtggtacagggacactgccctacccctcacacagccttctgttgggggagagctgctggaaccttgctgcagtcctccctagggccagccacaggaacacccctcccagaggagtataccccttaaggagccccctacatccaggaatgaactccagcaggaacaaggctagttcccttcttgggcacctgctctgggggaccatcagctgaacgatttgaggatgggccccaatcctagggaaggagcacctgatcctgagccctgtcacctggcgcagctggcggggccagatcctactcgtggagggaaacagggtcaaggcgatctcctcccccatcctggccctttcctctcagggggcagcaggaagtct

SEQ ID NO: 5420 - DNA, 379 bp, Homo sapiens
  source 1..379: mol_type = other DNA
caggcctgtaatcccagcactttgggaggccaaggcgggtggatcacctgaggtccggagttcaagacctgcagtgagtcgtgccacacgctctgggagaaggtgtggcataactcaattcttgctttagcatgctgggtttgaaaacactgaattcgaagttcttcagaactgaatgtaatgtgaatctggccagttcaattttctttagatgggcacccggcggtctggccttaggccctgaccaggtgttgggggacgtcagcacggccaccactttcctcggtgggagctgtcccagctggtcagatcgcgcttgctgggacctgggatctcgcaacgcatgctgggatgcccagcatctaagggcgcccattgg

SEQ ID NO: 5421 - DNA, 517 bp, Homo sapiens
  source 1..517: mol_type = other DNA
gcgcctgtaatcctaggtactcaggaggcggtgagccgaaatcgcgccattgcactccagcggtgacaaaagcaagacgcagttttttgttgttgtttttttaatgcctctctgcctgtggccttccggccggtttccagacgcccaggtggccaacatgaggtaaccgcgagcagcggccctctcccaatctccgggacatttccccgacctggagctggactgttgcgggccccgggacctgggctgggaacccgcggtggagcgcacagtgcaggcattctcgagggctgcctgggtgccgcgcgcaagggaggggagcctggattgccggctccgcaagtactccacccgctgcaagcggacccgggcccaggctgacccaggctccgcgcacgcgcaccgccctcgcctccggccagaggccactcttgtgcgcttgcccggacgctggcacccgcccccgttccctgtggtaggttcctgggggcgaagcgtgcgtgtccccgccccggcg

SEQ ID NO: 5422 - DNA, 231 bp, Homo sapiens
  source 1..231: mol_type = other DNA
tcaattaaattttggccatgttcagaccaggccagtgatcaggactgagcccagacttcatcgtggtcaaagggagcaagctttccctgtcccgggcagtttcccctgtagtcccagtcaccgcgggcgcctgtaatcctaggtactcaggaggcggtgagccgaaatcgcgccattgcactccagcggtgacaaaagcaagacgcagttttttgttgttgtttttttaat

SEQ ID NO: 5423 - DNA, 497 bp, Homo sapiens
  source 1..497: mol_type = other DNA
tggatgtgggtggggtgcccccaccttccagggccagtcagaccttcctgactttcccccaggtgggctgagacctacaggctggatgtgctagaggcagtggctccagagcggccccgctgtgcttactgcagtgcagagtgcctgcagggagtgccaagttcctggcagccctgccggagccccagtctccgcagtggagagcagagcgggcggtaaagctgctgaccgatctccctccctcgagacttcctgccccacccagtgggtaggccaagtgtgttgcttcagcaaaccggaccaggagggccagggccggatgtggggaccctcttcctctagccctccagaaacacgggtatctccgaggcggggggggctctgcgagagcgcgcccagccccgccttcgggccccttcccgccgcccagtctggatcctgggggaggcgctgaagtcggggcccgccctgtggccccgcccggcccgcgcttgcta

SEQ ID NO: 5424 - DNA, 500 bp, Homo sapiens
  source 1..500: mol_type = other DNA
ctctcctagatcccagaaatctgggagcggcttggcaggcaattgccaagcaccagctccagcatgtgttcagcccctcagagcaggacctgcggctgcaggcgtggatgtgggtggggtgcccccaccttccagggccagtcagaccttcctgactttcccccaggtgggctgagacctacaggctggatgtgctagaggcagtggctccagagcggccccgctgtgcttactgcagtgcagagtgcctgcagggagtgccaagttcctggcagccctgccggagccccagtctccgcagtggagagcagagcgggcggtaaagctgctgaccgatctccctccctcgagacttcctgccccacccagtgggtaggccaagtgtgttgcttcagcaaaccggaccaggagggccagggccggatgtggggaccctcttcctctagccctccagaaacacgggtatctccgaggcggggggggctctgcgagagcgcgcc

SEQ ID NO: 5425 - DNA, 307 bp, Homo sapiens
  source 1..307: mol_type = other DNA
ggctggagtgcggtggtgcaatcttgcctcactgcaactacaggtgtgtgctaccacacctgtcttagagacagggtgcccaggctgcctgatatacacttttaaggccacagccgcaggaggggctgttggggtcggggttacccccatccctaggacagagtccagaccacaaggatctggagctcaggagagactcgtgggccacgaatccaaatactatggcgattggcagtcgcgtaggcgaggcgggctagagacccgcccggatttaggcgcgagccacctccaggggcggggcccaggc

SEQ ID NO: 5426 - DNA, 361 bp, Homo sapiens
  source 1..361: mol_type = other DNA
ttccctcaaccagccaggcctgttggtactggagccaggcctggcaagcatcaggtgcccactgttcactcctcactggagaaaaggctgcaaggcaggaatgccaccctcaacatgccagtcgacggccggcggcctgtcaacgtgtcgccttccaggtaggccacgccgtcgccggcagtgctgccagcatgctgcccctccacgctagggacttgcctgcctctgccgcagcgcagatctgactccgggccctgccgcgcgcaccgccgctccgtcacggagcccgtctacccacccaggacttcctgggacgagccgtcccccgccccagccacgcctctgagtcgcgctgcgcagg

SEQ ID NO: 5427 - DNA, 387 bp, Homo sapiens
  source 1..387: mol_type = other DNA
aaacacttggactgtgtcaaacagctctcgggagatgaagtcttcagggacccccctcagtggacatctgtactgggtgtagtacacaggggggtgggaggcagcatgcctgcgtgcagcacgggaaactactgccttcaggcagccagttgagcgtcccgcgagcccgggtggcacctgataggcctgcattcgatgcggcagccgctgcccatggcaataaccgggcccaggcccgtagaggcgtccccctgtgaacacttgtcagagacagcctcgaggcctgtgtcgctggggcacgcaagcttgccaatccctctgcccaatggcgcctgcgcagcgcgactcagaggcgtggctggggcgggggacggctcgtcccaggaa

SEQ ID NO: 5428 - DNA, 251 bp, Homo sapiens
  source 1..251: mol_type = other DNA
ttaagggttgaggaataccagcagcccatcacccaaggaggtgctgccaaactgtgagccccttcttgctctggatcagaggccatgcttccctcaaccagccaggcctgttggtactggagccaggcctggcaagcatcaggtgcccactgttcactcctcactggagaaaaggctgcaaggcaggaatgccaccctcaacatgccagtcgacggccggcggcctgtcaacgtgtcgccttccaggtagg

SEQ ID NO: 5429 - DNA, 455 bp, Homo sapiens
  source 1..455: mol_type = other DNA
caggggggtgggaggcagcatgcctgcgtgcagcacgggaaactactgccttcaggcagccagttgagcgtcccgcgagcccgggtggcacctgataggcctgcattcgatgcggcagccgctgcccatggcaataaccgggcccaggcccgtagaggcgtccccctgtgaacacttgtcagagacagcctcgaggcctgtgtcgctggggcacgcaagcttgccaatccctctgcccaatggcgcctgcgcagcgcgactcagaggcgtggctggggcgggggacggctcgtcccaggaagtcctgggtgggtagacgggctccgtgacggagcggcggtgcgcgcggcagggcccggagtcagatctgcgctgcggcagaggcaggcaagtccctagcgtggaggggcagcatgctggcagcactgccggcgacggcgtggcctacctggaag

SEQ ID NO: 5430 - DNA, 503 bp, Homo sapiens
  source 1..503: mol_type = other DNA
aggcagccagttgagcgtcccgcgagcccgggtggcacctgataggcctgcattcgatgcggcagccgctgcccatggcaataaccgggcccaggcccgtagaggcgtccccctgtgaacacttgtcagagacagcctcgaggcctgtgtcgctggggcacgcaagcttgccaatccctctgcccaatggcgcctgcgcagcgcgactcagaggcgtggctggggcgggggacggctcgtcccaggaagtcctgggtgggtagacgggctccgtgacggagcggcggtgcgcgcggcagggcccggagtcagatctgcgctgcggcagaggcaggcaagtccctagcgtggaggggcagcatgctggcagcactgccggcgacggcgtggcctacctggaaggcgacacgttgacaggccgccggccgtcgactggcatgttgagggtggcattcctgccttgcagccttttctccagtgaggagtgaacagtgggcacctga

SEQ ID NO: 5431 - DNA, 496 bp, Homo sapiens
  source 1..496: mol_type = other DNA
tatgtacagttttttaaaagtaactccatatacaaaaaaaaacaggcctagcccaggcttgtggagagacctggcttgtagagagacctctcatcctccgcagttatcagaagtccctggtggggaggagggtcactgagggctgcccagcctcgtccctatgcgggagggagccctaggttcgtgctccaggtccacctcacttggcactcgctgagcacccagggtggactggcattttacacctttcccctttaggacaggaagatcatgtcatcagctacattttatggcccatgaaactgagtttcaaaaaggttcaggaacttaccacacagcctccgaggcagagcaagggttccagcctgggtcaggtcccattcaccagtgggggctagagctgtgttgcttcccgaaccctcaccgccgctttcaggggttagagatgctaattcatcccttcccacctccggaccggtccgcagcccgctgccgc

SEQ ID NO: 5432 - DNA, 687 bp, Homo sapiens
  source 1..687: mol_type = other DNA
cctggcgcagaggctgtgcaaactccgggaactggggcttgggacaggcctgcacacagtgcctgttcagcccagggaagcgaagcgagtggctgcagagggctgcatcctgccgtccccagcccccccgctcggaggtccaggccctttctgccagcagccgggcgtgcaagccccgggggctgtaggccttaagcctgttgaaggtcgagcccccaaaagggtctgctcctgccttgggccgcggggcccgggactcttcccgcgggtggggtggggcgggggcgcacccggggcgctcgggtagcagctggggcgcaggacgcccgagccagtagggcacgggctgcgcggggacgagaggcgcgcgggcacgggtgggcgcgtggccgcggcgggggcgcgcgggggcgggccagcccgggtgccggcaggttggcggcggctgctatttgagcgcaggtcccgggccgggcgctcagagcgcttggagccagcgctgcagggagatagcagcgcgcagcccgcagaggcgctgcggcccgtgcagccccggaggcccctcgcggagaaggcggcggcggaggagaggccgagttaccgcccgccgcccgcgcccccccaaccccgccgccgccgccgccgccgccactgccccccctccccgcggcgccgcatcatggaaac

SEQ ID NO: 5433 - DNA, 555 bp, Homo sapiens
  source 1..555: mol_type = other DNA
cttcagtagaatcctaggacttcatcctggaaatgggagtgggcacccacacgacaccagccccagtcttctgcccacagcagggaagagccaggcctggcgcagaggctgtgcaaactccgggaactggggcttgggacaggcctgcacacagtgcctgttcagcccagggaagcgaagcgagtggctgcagagggctgcatcctgccgtccccagcccccccgctcggaggtccaggccctttctgccagcagccgggcgtgcaagccccgggggctgtaggccttaagcctgttgaaggtcgagcccccaaaagggtctgctcctgccttgggccgcggggcccgggactcttcccgcgggtggggtggggcgggggcgcacccggggcgctcgggtagcagctggggcgcaggacgcccgagccagtagggcacgggctgcgcggggacgagaggcgcgcgggcacgggtgggcgcgtggccgcggcgggggcgcgcgggggcgggccagcccgggtgccggcaggttggcggcggctgctatttgagcgc

SEQ ID NO: 5434 - DNA, 243 bp, Homo sapiens
  source 1..243: mol_type = other DNA
attctgtatttttaatagagacagggtttcaccatcgggagacactgagctgatctctggcccggaagggcctggccacccactgtcctccgcccaacttcggcgcaggccacggggtgagggtagtaaactgcgaccaggttctaggctccctctgggggtggagccagacccgagcgacaagcgaagtccaattctgggcgggctctaggcccgacagccaatcggaggccgggggcgcgg

SEQ ID NO: 5435 - DNA, 234 bp, Homo sapiens
  source 1..234: mol_type = other DNA
gatcagctcagtgtctcccgatggtgaaaccctgtctctattaaaaatacagaataaaaagtagttaacagtgttctagttaacagtactttctgaagcggcccctggggtctggccgccagtcggccgaccccctggtgggctcgggccactgacctcggtagggtcacgacactgggactggaccccaaagttggaccatggtccccgccggaacacccgggccctctggtg

SEQ ID NO: 5436 - DNA, 419 bp, Homo sapiens
  source 1..419: mol_type = other DNA
gtgaaaccctgtctctattaaaaatacagaataaaaagtagttaacagtgttctagttaacagtactttctgaagcggcccctggggtctggccgccagtcggccgaccccctggtgggctcgggccactgacctcggtagggtcacgacactgggactggaccccaaagttggaccatggtccccgccggaacacccgggccctctggtgaggggccagctcggagcaatccccttgggctggagcccactttcctgtatgcaggcctgcgagcgtagagggagtggaattcacagcctccccacccatccgcaggggtctcctgggaggaacccaccaggggctacggcgtccgcccgagccttttcttaaaggcgccgaccccggaagcggggcgtccgagggagcgcgcgacggg

SEQ ID NO: 5437 - DNA, 220 bp, Homo sapiens
  source 1..220: mol_type = other DNA
gcagcccaaggagaattctcggcctgaggatggcatccctggtggggcagacccagggaggtggcattgccctcacagcaggctgggtgagaatggttcacacccccagccctgaggtattcactgccaggccaggggaaggcatcccccgatgtggctttacattggggtgaacctggtgagttctcagaaatgtctgcacctggtgccaggtcagctc

SEQ ID NO: 5438 - DNA, 317 bp, Homo sapiens
  source 1..317: mol_type = other DNA
cccttacctcaagtctgggaaatttgaagatgagaggcaggagccaaggtccttctcacattgggatcccagactgggctgagacagggttgtgatgtgggggtaccccaagcaggagcctcccgagagttgcagaccatcaggtgccagcctgaggaaaggcaaggatctgcggctggcttcccaagaagagcctacttgctagcctggcaggctagcgtagagtgctctgggccccccaggctgagcccaccctgtgagttcaatccacagtgggagggggcggggagtgggagtgtcacagccccacacagagc

SEQ ID NO: 5439 - DNA, 440 bp, Homo sapiens
  source 1..440: mol_type = other DNA
gtgggggtggtaccaacccagagtccgggccatctgctcccctgactggcagggccggccagaaaccagtgccagccaagactgaactctttcaaagaaaacgttctcttggaggagccgctcgcagggaggacaagcccgggactccgccccccgccctgccagcaatctgggcgcgggttgctgagcccgggcccctccttacagccccgggtccacgcgctgctattgcgctcggccagcgtcgcgattggtcagctcgcggggccccgccccgttttcctggaaagttcttggaaatctgtcaaagtatttcctttcactgctcagggccccagacccggcgacggggcccgcgcaccccgcccgggccccaccgctcagcccgcggttctcttcggcagcagctcgtctggcccgcccccctcgccctcgcaggc

SEQ ID NO: 5440 - DNA, 571 bp, Homo sapiens
  source 1..571: mol_type = other DNA
cccttacctcaagtctgggaaatttgaagatgagaggcaggagccaaggtccttctcacattgggatcccagactgggctgagacagggttgtgatgtgggggtaccccaagcaggagcctcccgagagttgcagaccatcaggtgccagcctgaggaaaggcaaggatctgcggctggcttcccaagaagagcctacttgctagcctggcaggctagcgtagagtgctctgggccccccaggctgagcccaccctgtgagttcaatccacagtgggagggggcggggagtgggagtgtcacagccccacacagagcctgcctcccgtgcgcccctcgtggtggccgggaagggggcagagagccgcgcttacccctgaacgcagaggaccatgtccccgcggcagcggcgactccggagtggggactcggctggacggcggcggcagtgggcgcggagcgcgtgctgggtaggctcccggggcgcgcgggcgcaggacagggactgagaggcagtggcgcggaccgcctgcgagggcgaggggggcgggccagacgagctgctgccgaag

SEQ ID NO: 5441 - DNA, 380 bp, Homo sapiens
  source 1..380: mol_type = other DNA
tctgccattctgggcagagcaaactgagccctgtcttccctggatgctatcgttcaggcccttcaacaaggccaggggtctgtcatccctgcccaggatctcagagggaccctggatgggggtggggagtggaccctgcaacctctccaaatcccacagttcttctggcccaagggtttggaggagattcacaccctacagtccttcaagatgctccctgattcagagctgggaccaagctagcaacaccagttaaatgcagcaagtactcccgtgggggtggtaccaacccagagtccgggccatctgctcccctgactggcagggccggccagaaaccagtgccagccaagactgaactctttcaaagaaaacgttct

SEQ ID NO: 5442 - DNA, 357 bp, Homo sapiens
  source 1..357: mol_type = other DNA
tgagccagctcgctcaggtccctcagcttccggtgattgcgcaagtagttcagatctgtcccaatggctctagaacactagtctaagatgggcttaacatctgtcactcggatgggagacagctgtatatcgccagtgctggagactcccctcggcatgtttaaaaagttgagtacgctgagggttggccgccccgggacccgcacagtagcggactgccagtacaggggcctccctgggtgtccctggaaaccgaggaagtaactcctattttgttccggctcgggggcgggacccagccggggcccgcctggccctttaaggctgacctagcggggccccaagttgggggaggtc

SEQ ID NO: 5443 - DNA, 642 bp, Homo sapiens
  source 1..642: mol_type = other DNA
agctcttcctttagagaggggcacgagtgcaccccacctggttccctcgtggcgactccatcctgcgggccctgggaatgcacagggtggctccggggacctttccgacagcactgtgggtggatgggtctgaaaccgaccaggaggcctgtggccatctcggggcgcgggagtccgggtagagggagtcgcccacctgaccggcttcgccccctccggggtttgctgcagctgagggccccggaccagcgattctagaagccggtccggggccgggcagtccaatagctatttccctccgctggcgcgcagcagcggcgcgtggattcgcgcgcgggctcgggacggcgcgagcccgggcagcgcgagcccctgcgcggcagggagtggcgcatgcgcgggcgtcctgcgagcccgctggggcgagccgagccgcggcggcgccgggagccgggcggcggagctgtgcggcggcacgggagcagcggcgacggacaggtggcgagccttcgcccgcgccgccaggggctgctgggccacccgcggagcctcgcggtccagacgtggcgggggtggcggcggcatcccggacggcctgtgagggatgcgccgcccactgccccgcgccgcctgaccgtcccc

SEQ ID NO: 5444 - DNA, 470 bp, Homo sapiens
  source 1..470: mol_type = other DNA
cccgcatcctgccttgaaggcaggcagccaggagggcccagtgcttctctggtgattcccgggaccccactcaggaggtcccacggcagcgggggaccccgagggcctagccggggaggcaggaggaggctggccagccaccaagccacgtcagagcttgtaagggtcctcgaccgatgatctggcccgggcgcttccctccacggtctagagtggcggcccagctttgagcttggcggcctatgcacggcgggctccgccagaactcctgcaccacgagtcggagtccgggcgagcctggggcccagggcggccgggttcaatcagcggccgacaactgtctagggcggagggcagcgtggagccgcccgtctgggctcgcggctcctggaccgtggcatgtgggagggcgccggggggccccccgccaatggggagctacggcgcgcggccgggacttggaggcggtg

SEQ ID NO: 5445 - DNA, 311 bp, Homo sapiens
  source 1..311: mol_type = other DNA
gcacacctgtagccccggctacttggtgtgatcgcgccactgcactccagcgttgtagtctcagctggctgctgcactccagagcgattctgatttatatgtttatgagaaatattttcttagattgaaaaagtatcaggcgattacagtactgtgccttccgaagcagccaatgagtactcagcgactggtgggcccgcccctagacgcggaacttcatttcccaggcccttgctcgcggtcctcgcgccaagtaggcgcgagcgcgcgcgcgcggtgcacgtagcgcgcgagtgacgcataatatgtgg

SEQ ID NO: 5446 - DNA, 282 bp, Homo sapiens
  source 1..282: mol_type = other DNA
cctctggagagagtgggcactgaacaggtaggggtgccccaaggctaccagggccactgttcccagcttgaggagaagatctggtccctggctcaggggccttaacctcctttatcagtgatcaggacccttatatatattcaaaaggggcaagggtgctcctctggccctagtcttttggcgatgactgagacatgagaaacgactggtgtcctggtccctggtcctgtggggaggcaaccagctttgtgacttcacaaaaggctatcttgtcagaagcct

SEQ ID NO: 5447 - DNA, 295 bp, Homo sapiens
  source 1..295: mol_type = other DNA
aagtccgggatttgaagcctggccctctactgcgggccactgggctgcctcccgtacccgagcctgggccaggctgtcactgtggtcccctggggtgttgctaaatcaacctcagcggtacgccgtgggttccgccgcagccagcgctggggctaggcacacgcccgttgccatggagacggggcggggcaggcctccgccctccgggtcccgcgcgcacgcgcccacggccacggccatgtcccgccgcgagagggggcggagcgagcgtgcgcggcgggcgcgcgcaggctcc

SEQ ID NO: 5448 - DNA, 368 bp, Homo sapiens
  source 1..368: mol_type = other DNA
gcagatagcaccttccccatcctgctgtgggagggaagagtcaagagaatcttctcagagctgtccttcctacgcagaggaaggaaggggaggccccattctcctctgacctctacatgcctccaactcaggcctgggatgtggacccggggatgggcacctgtcggggcgcagtgaccttccccaccccgtgccccgctctctaggtggtagtctgactatggggcggagtgggccacgaagcacccgctccagcgcagagcgagagcgctcggggattcagcaccacgaggcggacagctccaggccctgaggtccccagctgggggcgggccggggccgggggcggggcggggcgggccgcgatt

SEQ ID NO: 5449 - DNA, 410 bp, Homo sapiens
  source 1..410: mol_type = other DNA
aggaaggaaggggaggccccattctcctctgacctctacatgcctccaactcaggcctgggatgtggacccggggatgggcacctgtcggggcgcagtgaccttccccaccccgtgccccgctctctaggtggtagtctgactatggggcggagtgggccacgaagcacccgctccagcgcagagcgagagcgctcggggattcagcaccacgaggcggacagctccaggccctgaggtccccagctgggggcgggccggggccgggggcggggcggggcgggccgcgattgagccagcgagccagcgagcgagcgagcgggagccggagcctcgcgccccccgctccactccgcgccagagccagcgcgccaggtagggtgagccggtggtggtggtgccgctgccgca

SEQ ID NO: 5450 - DNA, 452 bp, Homo sapiens
  source 1..452: mol_type = other DNA
gagaaaaaaaaaaaaaaaaaagaacctgtaggtagtctagcttttttcatttaatatattcatttttgttactattactccattatactaatatgtcacgaatttttgtctagtataaagctgctatgaatatccatgcacatgtctttgtaaaatgtgttttcatttttcatttgcaaattttaggactgaaactattggttgaacttcattaggaagtgccaaaccattttccaaagtgattctgctgtttcacacctttttatcagcagtgtatactgaatccctgccaggatttagtactgtccaattgtttcattgaactgaaatccatgtgactgatcaatttttgtttttatcaactagattgaaagcattaactatataccttttagtcaaattgtggccatgtctgcaaaaaatgccagagtcataggtgcccttatgacatc

SEQ ID NO: 5451 - DNA, 356 bp, Homo sapiens
  source 1..356: mol_type = other DNA
gtttatgtgattaatcacattttattgatttgcatatgaggtgaagtactttgttaaggatttttgcataaatgtttgtcaaggatattgacctaaaaggatgatgctcctcatagaatgagctggggaggggcctttcctcctcaattttttggtgttggtaagctatttactactaattcaatttcagagctcattattagtctgttcagggaattgtcatttctaattgtaaatgtcttataaaaacatttacattaaatgttaaaacaccttaatgtaaaatcaatctgagaaatgatatttgcacaatttttcaaaaggcactgtggcccctggtcatagttgcctttgtg

SEQ ID NO: 5452 - DNA, 420 bp, Homo sapiens
  source 1..420: mol_type = other DNA
acccaggttggtaaactgtgtatctttaaaactggtcttgtcagaatactgccttttaaatttaatttaaggctagagagtgatatggggatgcaccgtcatggtcctccctgctttgccatgctgatgataatgagtgaggagagccctgctatggaatggcactcaagtgctctattttccaccctcagctctgacacatctctgacaggaggcaatttctcttactgtctcctgtctctgaagagaatgaggaagtagggtggaccccttagagttgaaagccctttaaagggccaggaactcgggggaagctacagtacaagttcccctggagtttgtttctgacagagacacatctctgtggcagatgtcccaatccctatgtcataatgcaattgtgaattcagagctctctcc

SEQ ID NO: 5453 - DNA, 517 bp, Homo sapiens
  source 1..517: mol_type = other DNA
ttggacccatttgagcctcagatggagtccaggctggtcctcaggccctcatggggttccttggggacaatcattggtaatagtttggtatatataccttttttcttctttatattcatttacaacatataatgtgtatcatgtaataacttctggcataaattattcaattttatgtgtataattatgttcctagttttgtttgcatagtgggatcaaaaggaactttagttttttacttataaatacatctttatatatttcctcattagtaatatagatcaaattcttatttttaatagttatgtagtattttatagtatgaatgaactatgcatcattaaattaatcccctattgattatttaagttgcagtggcatgatcctgtgagtagctgggatggccaagttttttcaattaaatgttattagaaatgactggctttttataaaccttacatctggcagaaaagaatgggcagcgagccatctggtgcctgagtcacaggtgccctta

SEQ ID NO: 5454 - DNA, 532 bp, Homo sapiens
  source 1..532: mol_type = other DNA
atcctcccggatcaagagttcccactccggatcagtggccttgaactgatagagggcaaaggccagtcccaccaggccttgccctgccctgccgtgggcaggaccggtcctggctgccacccggcctggttgtgtgcgcctcccagggcagtccccagcctcagcaggccgagtcaggcgaccagtcccacggacgggtggacactcgatctggcatatccaaggccggggcagtcgcgtccgtagcgctgctcatgtggccggggcctgcagcacgcatctgccggtcgcgcggtgaccttgggcccggatacagacgcagcctccctctccccggggctgcttggatccccgttgggtctagcgccgggccgcgaaagggcgccgcgtctctggcgccccccagcggccaaggggcgcaaacagcatcaggccggaagcgccgtggagatgcgggcttcctactcgagcctggtgcgggtgcatcctatgggtgcctgggcccggctacatgccaggcggctggggaggg

SEQ ID NO: 5455 - DNA, 531 bp, Homo sapiens
  source 1..531: mol_type = other DNA
tctcaggggtccagaccagacgggcccccccccctcggttccctcagaaccccaggaatggggaaggcggtccagggcgaagggctggggaagggccgggacccaggtcccctggatggtgacggttgtcccagtagcagggctgaccgcggccctcagaagcgccatgcttcgccgccgcttgccggcccccgcgccagccccggccccagaggccggctttcagcagccgctgttgccgacatgctgcccaccaggcgtgtagcagcggccgcagaactcacgtggcagctgaaccctcccctccccagccgcctggcatgtagccgggcccaggcacccataggatgcacccgcaccaggctcgagtaggaagcccgcatctccacggcgcttccggcctgatgctgtttgcgccccttggccgctggggggcgccagagacgcggcgccctttcgcggcccggcgctagacccaacggggatccaagcagccccggggagagggaggctgcgtctgtatccgggccc

SEQ ID NO: 5456 - DNA, 567 bp, Homo sapiens
  source 1..567: mol_type = other DNA
tccaagcagccccggggagagggaggctgcgtctgtatccgggcccaaggtcaccgcgcgaccggcagatgcgtgctgcaggccccggccacatgagcagcgctacggacgcgactgccccggccttggatatgccagatcgagtgtccacccgtccgtgggactggtcgcctgactcggcctgctgaggctggggactgccctgggaggcgcacacaaccaggccgggtggcagccaggaccggtcctgcccacggcagggcagggcaaggcctggtgggactggcctttgccctctatcagttcaaggccactgatccggagtgggaactcttgactccgggaggataatctggccccaagaatcctgcccccaggatcctctgcctcggcccggcaaccatgccagggctgaactagcgccccgaagtggaagagagagagcctcctttcactttccctaccccccctgttgaccagagtgggcagactggacagagtcctaaccttgcacgggaggccaccgaagggccaacccggggtggggcaagttggtgctgtgctggc

SEQ ID NO: 5457 - DNA, 691 bp, Homo sapiens
  source 1..691: mol_type = other DNA
tccccctgccctttgtccaccaggccagatggagaggaagggagattggattcccctccccacccacattccccgcggggggtgcccagcggacttgagaacagttcatcaccccctatccccaaaaggaattccgggggtagatttggggctctcaggcccctcctccagcctgtcctgcgcggacgagggccgggccatgcagctgtggggcgcgcagcgagcagagccgggagctaggcggggcgcagggtcccagccggagctcggagggacgcgggccgggagcgaggcggagccggggctggccagggggctcggcagaggcgccgggcgggcggcccgggccggaaggactggcctggcgggagcggaggggcggagccgggcgcagcgcgggcggtgcggggaaggccgtggctggggaccgggcttcaggccggacgcccctacccccaacccgtggggctctgggagtggcaggggaagggtcgcccgagccctccaggaagcggccgccgctcggggcgcaccgcggcgcgcggggcggggcgggcggctgcggcactggggcggctggggcgggcccgccgctctgtaatcggatccggggaggggcggggaggggccgggccgggcgggccggggggtggggggggggcgcggagccgggctccgggccggccgggct

SEQ ID NO: 5458 - DNA, 513 bp, Homo sapiens
  source 1..513: mol_type = other DNA
ctgaatccctgcaggtctggggcactccaaggaagcagcagcccctgcccctattggggagctggcccctggcagcttcctggcggctgtggtgctgggccgcccctggctcccagctcccgggctttgtgccagtggcccccatctgcactgacaaaatcaatgctgccagctgaggtgcccctgccaggagcaaggaagggtgcatccctgggctttcctctgggaggagctgaccacccaaactcagcagactactgtgccaagccctgtgctaaactgtgttctggggcagacaccaatctgtgcccccacccacttccctcatatggggtgggctctgattgtatatggagaccaggacccgagcacctgaagcagctgcccaaccaccgggtgctgatcatgaagggggcggggcacccctgttacctggacaaaccagctgctggacttcctgcaggggctccagtgaagcccagcactgctgcagggggtgggctgcctgcctgc

SEQ ID NO: 5459 - DNA, 393 bp, Homo sapiens
  source 1..393: mol_type = other DNA
gcgtggagggggtgctgggggcagagccccagcgctctctggcccgctccccgcctggagttaaggataaaacccaccgcacaggtcaagcctcagaacagtgtccgggacgcacacccacggtcagagcctgggctggccctgggctcgttcagtctggcctgtcccagcccaaggctccgcgtggcgaccaggcccagcactgggaggctgtgcagagcgtggtctgcagaggttggcaacatcctccgtgccaggccaacaagttgccctgggctcgctccaatgtggggcaggtcgctgaagagttcgaaaccgtgctcagcaccgcgtttggacgctgcgagcttgtggccacaagagggcgccccggagcacggcccagtccccgcc

SEQ ID NO: 5460 - DNA, 407 bp, Homo sapiens
  source 1..407: mol_type = other DNA
gccgtgctccggggcgccctcttgtggccacaagctcgcagcgtccaaacgcggtgctgagcacggtttcgaactcttcagcgacctgccccacattggagcgagcccagggcaacttgttggcctggcacggaggatgttgccaacctctgcagaccacgctctgcacagcctcccagtgctgggcctggtcgccacgcggagccttgggctgggacaggccagactgaacgagcccagggccagcccaggctctgaccgtgggtgtgcgtcccggacactgttctgaggcttgacctgtgcggtgggttttatccttaactccaggcggggagcgggccagagagcgctggggctctgcccccagcaccccctccacgcagacgactcggtaactgggttgcagg

SEQ ID NO: 5461 - DNA, 345 bp, Homo sapiens
  source 1..345: mol_type = other DNA
ggggtggcagagaccccagattggaggagtccacgaggttagaccttagttataatgcgattgtaaaacgcgttctgattttagcagtattaaatgcagtgagattaaaacaaaccgagtgtggcctggtagttagaagcccaaaaccccaattcccccacttgctacttggcactttgggcaagaccagcattcttggtggaagctgatgccatgatggtgactgagcatgctgtgtgccagagaacacctcagatgcacctcctcacactgtgaggtatactcccagaactttgcccagagcaagggaaagggcaagggctggagctcttcctctgggtcctt

SEQ ID NO: 5462 - DNA, 516 bp, Homo sapiens
  source 1..516: mol_type = other DNA
gtaaataattagccttgtgagttaaaatctatttgcccgcatgacagagtgagactctgtatcaaaaaaataactaaataaagaattatccagcattgttcaagctgactcagcccctggagcagagggcagctggggcacaagtgggcaactgcagctgtggcctgcagggggccagtggtacacctgtgcctgtttagcctccccctctggtggctgcagaagagcctaggcactgtccgggctcggcacggccccgggcagaaccttgcaggaagtctgaggcgtcagggaggacctccccgaggggctgaggcctgcagtgggcgagggcgcaggcccagggctttgcagctctgcatcttgagagcctcggggcggccccctttcctcccgccctatccgggggctgaaggaggaggcgcccttaggggacgggaccgtcctgagctcccggcgcatacctgggggcaggagggcaggcgtgcgtgtggggcggggcgagcctgtcagagc

SEQ ID NO: 5463 - DNA, 631 bp, Homo sapiens
  source 1..631: mol_type = other DNA
ctcagcccctggagcagactggggcacaagtgggcaactgcagctgtggcctgcagggggccagtggtacacctgtgcctgtttagcctccccctctggtggctgcagaagagcctaggcactgtccgggctcggcacggccccgggcagaaccttgcaggaagtctgaggcgtcagggaggacctccccgaggggctgaggcctgcagtgggcgagggcgcaggcccagggctttgcagctctgcatcttgagagcctcggggcggccccctttcctcccgccctatccgggggctgaaggaggaggcgcccttaggggacgggaccgtcctgagctcccggcgcatacctgggggcaggagggcaggcgtgcgtgtggggcggggcgagcctgtcagagcagggccagcccggagctcgcaactcgcggggcggcgctggccgcggcggccgctgcccggggacgggatccggatcccagaggcgggcggggacatccgcgccgacgcggccgctggcgccgggacggccctcactgacggtcttcggtctccgccccgacatccggcctcggccacgtggtgggcggaccggggcggtcctgagcctgcgacctcgcaggcgacctcg

SEQ ID NO: 5464 - DNA, 239 bp, Homo sapiens
  source 1..239: mol_type = other DNA
atctgtgacagacacatgagatataaatcaaacatttatgtgatattacttttttctgagagaattcttgtgcctgggattacggcagtctgctgggattacaggcatgagccactgcgcccagccgtacttgaaagggtcagaccctacccagctaggcacagcccactcaaatagggcaagatgcccaggcccatgtcctgatcctgcagaagtggatgcacccccaagtgacacct

SEQ ID NO: 5465 - DNA, 411 bp, Homo sapiens
  source 1..411: mol_type = other DNA
ggggcggggcgagcctgtcagagcagggccagcccggagctcgcaactcgcggggcggcgctggccgcggcggccgctgcccggggacgggatccggatcccagaggcgggcggggacatccgcgccgacgcggccgctggcgccgggacggccctcactgacggtcttcggtctccgccccgacatccggcctcggccacgtggtgggcggaccggggcggtcctgagcctgcgacctcgcaggcgacctcgctggaccctaagtcgctcagctactctatgagctgtccttgtgacccagccgggagccgccgtggggacaggctgtgtgcaggagctcaccgaggaggagcacccatcggtgacgctcttccgccagtacctgcgtatccgcaccctgtgacggggcc

SEQ ID NO: 5466 - DNA, 228 bp, Homo sapiens
  source 1..228: mol_type = other DNA
ctcgccctgtagcccaggctggagtgcaatggtgcgactgggattacaggcacgtgccacccaggctggtctggaatcgagaccagcctggccatcccagctactcgggaggctgaggcaagagaatcgctccgagattgtgccactgccctccagcctcggttttctttttcagtatcttgaataagacttaagagacaggcaagctcgtagcaccgcctccacgga

SEQ ID NO: 5467 - DNA, 186 bp, Homo sapiens
  source 1..186: mol_type = other DNA
ttgatcttcaatgcaaggggatgtccttgcagatttaagggacaggatctgatttgtatcttaaaacaagtcccccaatttctcaattctgatgtcgacataggggctatctcgccctgtagcccaggctggagtgcaatggtgcgactgggattacaggcacgtgccacccaggctggtctggaa

SEQ ID NO: 5468 - DNA, 671 bp, Homo sapiens
  source 1..671: mol_type = other DNA
acacagggcgggcggaggccccgcccacttccccgccctgggtggaaaccgcggcgggccccgcctccctccgccaccgcctggccatctgcatggcaggcgcccgcctaccgcggagcattcccctcccaccggccccgtggaaaaagtcacgtggcgcttcactgggcgaagctttcttaaagggctcgcgatcggaaggtggcacggccctgatgatttcccatcaggcctgctggcgtgagacgctctccctcaggtctggagcctgtgaccgtcaggggaacgatgagcctctgaacggtgaccgcctagcacagtgcctggcacgtagtaggcgttcagttctcatttgttgaatgaactcgatgagggaggaggagaggttgctcagcttgaccatcccccccaccacgtggggtgggggtgccaggcataggacgcccccagggcctctcttcccgcagtgtccagaagagcttgggagcacgcgcagagtgaacccatgagggcgtgcggaggcggtgggggagggccccgccgctggtctcccgggctcgggtcgcgagcgcgcccgcataccccgtggggaggggcggtggaggcgctgcgcctttaagcccgggcgccggcccccgcggccccgccccccggagaacgcctcggcgcgc

SEQ ID NO: 5469 - DNA, 450 bp, Homo sapiens
  source 1..450: mol_type = other DNA
caggcgtgagccactgagcccggcctctccttcttttaaagactgggtttctaacagcttctgaggccttaaggatcctgacagctccctcgtgttacaaatggggagagagttcccgaggggcgaatactcagctctcaactggctgcgccggcgcgcgcgggtgctttaacgcaatctggttacagcaacccacgtgtccttccgggatccttaaggcctcgcttcgggtggtaaaacccggcccgccctcttgttgcccaggctggaatgcaatgcattggggacgacggaacccttcatcaactgggcacggagaccgtggcgccggccgccggtcatacagctctgcgggcaaaaagctgaggcgcttattgcggtgggcggggcgtgccgacgcggcccgcgttgctattggtggccgttgggggcgcggaaactgaacgggcc

SEQ ID NO: 5470 - DNA, 385 bp, Homo sapiens
  source 1..385: mol_type = other DNA
ttcaaattttattttatatatatatatattttttgagacggagttgttgcccaggctggagtgcagcggcaacatggtttacaggcgcgtgccatggccagcaggcgtgagccactgagcccggcctctccttcttttaaagactgggtttctaacagcttctgaggccttaaggatcctgacagctccctcgtgttacaaatggggagagagttcccgaggggcgaatactcagctctcaactggctgcgccggcgcgcgcgggtgctttaacgcaatctggttacagcaacccacgtgtccttccgggatccttaaggcctcgcttcgggtggtaaaacccggcccgccctcttgttgcccaggctggaatgcaatgcattgg

SEQ ID NO: 5471 - DNA, 503 bp, Homo sapiens
  source 1..503: mol_type = other DNA
agtacctctgagcctggcacaggcccagcccaacacagcccaagccaagctgggaagggtgtggggcaaggaagccagactgacattcctgagacgggtttgccaagccctacactttatgtgttgtacccggttggcatggaggcctaagccaccctgctggtgcccagggtggccagcaaggggcttcagaaataaaaatagtggctaatatttgttacacgctaactattgtcacccctcctccccaagtgctcagagctgtggagtggatgggttccaccctaaaagtgcccaggcgggatggatggtcgggaaaagagacctcgtccgccctccctgcaggcgagccggggaatccccggcagcaccgatagcagagcccaagaagtgggcctctctgccccgcccccccggctcgccgagggctacgcggcgcgcctgcgcagaagaaggcagcgcccaaggcgcatgcgcagcggtcactcccgctgtatattaag

SEQ ID NO: 5472 - DNA, 378 bp, Homo sapiens
  source 1..378: mol_type = other DNA
ggctttgactccagagtcagcgtgggctgtgggcacacccttcagcatggtggacccagcagaacttgctgaggggcccggggtcacccaaggctttgggcccgaggaatctgagtctcctcacctagatgactggctggcggccctgctgggccagcacacacctggcctctaggagccccatctggggggccccagggtgaaggcaggtgcagcctagcctcctgctcagtcggcagccgctgtcctgagggcaccagctgtggtgcgagctctgggccttagctcctccctgggcttggtgaggacccatttgactatgcaaatggcctttgactcatgggaccctgtcctcctcactgggggcagggtggagtg

SEQ ID NO: 5473 - DNA, 441 bp, Homo sapiens
  source 1..441: mol_type = other DNA
ctggcccggccagactctgcgtctgcagatgaacttcatcaaccaggcccagctcggcatcttcaggggctgacagccaccatggggagaaggtctggctgcagcctggggaccttgctccggccccagtggacactcccagttgcccagctctcgcacctgcagtgcctgcgcctgagccacaactgcatctcgcaggcagtcaatggctcccagttcctgccgctgaccggtctgcaggtgctagaagctaccgcgactggaggccctggacctagctctgcagtacgtcgctgcgggccctggacttcagcggcaatgcactgggccatatgtgggccgagggagaatctggctggacttgtcccagaaccggtggtggagcctccacttcctgcccaaactggaagtcctcgacctggcaggagaaggccctgacca

SEQ ID NO: 5474 - DNA, 399 bp, Homo sapiens
  source 1..399: mol_type = other DNA
cctgcctgccatgataccacccagagtgggcctggggggagcaggctggcagatgtgcagccttgcctcctcccagcagcaacaattcattaattcattcattcagtctgtgcctgcccagagctgactgctgggtggatatcaagcacttactatgtgctgggcactgcaaggccctgaggcaggagaatgcccaggggctcagtcaactgcaagcaggccagtgggccgcaggtcccatagggccttgttggccatctgtggactgtggctttgactccagagtcagcgtgggctgtgggcacacccttcagcatggtggacccagcagaacttgctgaggggcccggggtcacccaaggctttgggcccgaggaatctgagtctcctcacctagat

SEQ ID NO: 5475 - DNA, 438 bp, Homo sapiens
  source 1..438: mol_type = other DNA
tgtaattccaacgctttgggagtcctcagaaagaaaacttttccctccacactccatctagtgggtgaaggcgggcctaggcccgtgagggcaaagcctagcggccatgatcaccccgaggtgcccaggaccccacgggaggcgctccggcccctggggaagagctggcgcgcccacccacaagcaggggtgcaacccgtgtacgctgggacccactcctattcggagacccacctggcttggggcgcacagatcgggcgcgcgcgcacgatccgccccacccaccaccgtgatcagggcgcgccgcaggcccccctctcctgccacagaggaacgcgctggcgtgcgcacggcggatcaacatccccacccggaccgaggcgcaggctgcgcgcacgcgcggccccgagtccccgcctccctgccgcgcctgtcggg

SEQ ID NO: 5476 - DNA, 559 bp, Homo sapiens
  source 1..559: mol_type = other DNA
caggctggtctcaactcctgagctcaagcgatcataaagtctacctcgagaccagcctggccagtggtggcgcgcgcctgagcgagagactgtcaagcttgcctgcgagcggctcacctgcctcccacgcagcctgcgatcgggacgcctgcaggaggcgccagagtcttcgcgggggttgcaatcccgcgcaagggcccccggctcccaaggcatccgcaaccttccgatcccccgggaaggccctgcacgtctcggccgctccctgccagcagcccgcctccgccgcggccgcgctgacgtcaccaccccgccccgccccctttcccggcgtgcgccgcggctgaggctcctcgccctcagcttctgcctgtcgccccaaaatggcggacacaatgagccggcgacgcgccggttgtccgtgaacggtcggcgaggctccacaggaggcggcccaactgttggccgacttcccgctagccgccggcgcggcgcccgccccgcctgggttggcccctcggcagcccgcccgctcgccgccgggccccgccccggccct

SEQ ID NO: 5477 - DNA, 751 bp, Homo sapiens
  source 1..751: mol_type = other DNA
gtcctcgagggtggcagcagcctctcagtgtgggggtctgacacctcgtcaggtccccacccagcaggaggaggtccgaggatctgcgcgacgctggccccgcggagtgtgggggacttttcctctcaaccaccagtgccccgcaagcgtgggtgaacagtcctccctggctactgtgggacgctgggcaggcggctgatgccggcgtgggcttcttcaggcggtcgcgagcgttgacccctggagtcagcgaaccagccgcgcacgcactcccgggcggaggtcggggctggggggcgacgcctcccgtctgcgcgcccccggccccgcctcccgccggcgcacccctccctcggctccgcccgcggcccgcttcttcctcccgcgggcggcccagccctagcgccccgcgctccgcgggcagccccctgccgccgcgccatgtccgccggctggttccggcgccgcttcctgcctggggagccgctccccgcgccgcggccgcctgggccgcatgccagccccgtgccctaccgacggccccgcttccttcgcggctccagctccagccccggggcggccgacgcctcgcgccgcccagactcccggcccgtgcgcagccccgcacgaggacgcacgctaccctggaatgcaggcttccccgacccccagctcaggcccgggcctgaacccgcttcgggtcctgcgcccgcctagaaagcgggaggagctgagtgacagtccccaccca

SEQ ID NO: 5478 - DNA, 469 bp, Homo sapiens
  source 1..469: mol_type = other DNA
tgcctccggccaaagtaacacttttgcacaggaccgcctggtgacagctagccagtggttgcccaggtctgaactcggaccagctggagcctttgggggtccgcgaagacaactgtcctcgagggtggcagcagcctctcagtgtgggggtctgacacctcgtcaggtccccacccagcaggaggaggtccgaggatctgcgcgacgctggccccgcggagtgtgggggacttttcctctcaaccaccagtgccccgcaagcgtgggtgaacagtcctccctggctactgtgggacgctgggcaggcggctgatgccggcgtgggcttcttcaggcggtcgcgagcgttgacccctggagtcagcgaaccagccgcgcacgcactcccgggcggaggtcggggctggggggcgacgcctcccgtctgcgcgcccccggccccgcctcccgccggcgcacccctccctcg

SEQ ID NO: 5479 - DNA, 436 bp, Homo sapiens
  source 1..436: mol_type = other DNA
cacttatatgatagaacctttaaaataatcctgctagccactaaaaaggctaatttttgggggaatgcagtggcacgatttcggcgcactgcagcaggctggtctcaactcctgagctcaagcgatcataaagtctacctcgagaccagcctggccagtggtggcgcgcgcctgagcgagagactgtcaagcttgcctgcgagcggctcacctgcctcccacgcagcctgcgatcgggacgcctgcaggaggcgccagagtcttcgcgggggttgcaatcccgcgcaagggcccccggctcccaaggcatccgcaaccttccgatcccccgggaaggccctgcacgtctcggccgctccctgccagcagcccgcctccgccgcggccgcgctgacgtcaccaccccgccccgccccctttcccggcgtgcgccgcg

SEQ ID NO: 5480 - DNA, 239 bp, Homo sapiens
  source 1..239: mol_type = other DNA
aaacatgtttcaataaaattgttaggaaatcaaaaacatcagtaaaaacagtgaactgttttgtatttttggagagtcagtgcctgacactcagggtgcatctgctcgagaccagcctgggcacatgcctgtaatcccagctactcgggaggctgaggcatgagaatcgcccagtctgggcttaccctcaatgtagagatttaaaagtggccagcaaacaccggcttcagccagagctc

SEQ ID NO: 5481 - DNA, 386 bp, Homo sapiens
  source 1..386: mol_type = other DNA
tccggtaagaaaagacagccatgcctgacttctgttggattccgaaaatgggtccagttttggccagggggacccctagcaactaagacagccggtctttatagcctggatgaaatttgtatctattgacttccggttaaatttgaatttcaaataaacaagtaatttttaaagtataagtatgtgcatacaatgtttaggacttaacaattattcgtcgtttataagcgcatcacctgaggtcaggagttccgggcccaggtgagccgagatcgcgccactgcactccagcctggagagtgagattctaactcaaaaaaaatgtaactggacgctttgcatttttatttggtctctccgaaactccgggaagaaggctggtacca

SEQ ID NO: 5482 - DNA, 483 bp, Homo sapiens
  source 1..483: mol_type = other DNA
gggggctgagcactgcaggctcctctgccaagagccatggccagtaggctattcttcgtggccccatgatccctgttatcctcattggattagtcatggcagtgccaaccccaagagggagcctgttatggctggagactccccaagcctgggcatatttggcctctttcccttggaaggagtggggctggagttactgaggtggtccccaggctcctggctccctcagcctttcctccaccttatacagggctaggaggcagagccctgactctgtccacagcagcgagtcagtgccaccatttccagggccttcaaggaggtgctgttagaaccgatatcagccccttgtcaaaggagagagtttacactgatctcagacatcctgggcctatccagagccccctgggaggtgggacccaaggaacttgccatccctctttggctgcagagaagggaatccatttcctaggccctgtgatg

SEQ ID NO: 5483 - DNA, 699 bp, Homo sapiens
  source 1..699: mol_type = other DNA
tcctgcagctgcaggcttcaggaagtctcctggggctatcagatggctccttcttgtagcagcagctgtggggtccactggccctgagccctcagaggggcggccgtgggggacctctctaggcagccatgggtgccaggcagtgctgagagcagtggggcatggctgcagccctgcaggtcctgccccgcttggcccgagccctggcggggctcagtggcccgtctggccagcagcatggccttggcagagcaggccaggcagctgaggtgcagtgctgccgggccccatgctgcaccgggcactatccggtgcgggaccggaactttcaggcagctgcagctgaggaactactgggccagcatcttgtgcagcagcgttcccaaggggatccgtgctgccatggagcgtgccggcaagcagtaaggagccatgggggcctgcctccctctatctatctggagggaaacctgggcccagacacaggctgaatggcctggccccaggatgcatccccacctgtaaagttgagagatcaggtgggaggagaggagtccaccccatctcttgcgtgctccctccccagggagatgctgctgaagccacaagggtgcggaggacaacctcccggaccgcgatgcgctgcgggctgcactggccatccagcaactggctgagggactcacagctgatgacctg

SEQ ID NO: 5484 - DNA, 339 bp, Homo sapiens
  source 1..339: mol_type = other DNA
atggtgcagaggaggcggctggttcatgcgcacaagccccatcccacgtggtgaagcctccaggcagcagcctcaatggggttcaccccaacccttgcaggattctctaagcatggctgggtcaagctgcctgggcctgggtaaaggcatgtgtttcctctgtttctcttaaaacccctccgtggggttctatccagtgtaagtgggtggcagcctccccacaagccaaggacatggaacagctggaggggttccgctgactcagtctaggctcagcctgggccgaaagacctggcggcaggtgtgggccgcagccgagttccagtccgcccaccccag

SEQ ID NO: 5485 - DNA, 163 bp, Homo sapiens
  source 1..163: mol_type = other DNA
ctcattttgcggatgaggcccagtgagagaagggcatttattaaagtagatgcaatagtacatatgtagtacagatccagtggggaaagaccactgtggtaatcccagtctcatgagataatgaaatagaggccccagactccctctgtcaatgattaactcc

SEQ ID NO: 5486 - DNA, 445 bp, Homo sapiens
  source 1..445: mol_type = other DNA
tcacaaccgttccccggaggttaacagccggagaaggggcttaaggagcatcccgcggatgccagaccaggctcatgtcgcgcctgccgggcggccagtgcagggccgggccgaggtcgcctccgccgctcctcctcgcggtagctcaccggccgccgctcccggccagagccaccctcccagctgtctgagggcgccgcgccgtggtagctacctccgggcggccgccctgcgcggtgactgcgccggcgaagactgcgagcgcgcaaacggggtcgcggcgacgcctaccgttagtagaaaccgaccgctaacggccgcgcgctaacggccgcgcgccccgcccatcctccgcgcgtgcgcgttcgccttcgagcgcatgcccgcatctgctgtccgacaggcggagaggcggacagggccgtcgcgccttggtgacgtctgc

SEQ ID NO: 5487 - DNA, 461 bp, Homo sapiens
  source 1..461: mol_type = other DNA
gggcatgtcctgaccttgcactgcggagcagttcccagttactggggctacccacttcagttctttgcatcgctgtcgcaggcagtggcttatcaagttgtttcactggatttcacaaccgttccccggaggttaacagccggagaaggggcttaaggagcatcccgcggatgccagaccaggctcatgtcgcgcctgccgggcggccagtgcagggccgggccgaggtcgcctccgccgctcctcctcgcggtagctcaccggccgccgctcccggccagagccaccctcccagctgtctgagggcgccgcgccgtggtagctacctccgggcggccgccctgcgcggtgactgcgccggcgaagactgcgagcgcgcaaacggggtcgcggcgacgcctaccgttagtagaaaccgaccgctaacggccgcgcgctaacggccgcgcgccccgcccatc

SEQ ID NO: 5488 - DNA, 282 bp, Homo sapiens
  source 1..282: mol_type = other DNA
tgagtgagggcgcaggggtgggccgccacagccccggtccgtgatggtcaggcaggcgcgtcccgggcccatccggcctccccagcccccccgcggggcggcccctcagcgccatgtccagcgggagcccccaccgcccccggggcccctcagcgggcccagtcgcgtcacccgcccgcgccggcggcagacgtcaccaaggcgcgacggccctgtccgcctctccgcctgtcggacagcagatgcgggcatgcgctcgaaggcgaacgcgcacgcgcggag

SEQ ID NO: 5489 - DNA, 423 bp, Homo sapiens
  source 1..423: mol_type = other DNA
agcatggggaggtcccgtcactcaccccagccccgccacccagtcagtattcagggtgggggaagtgacctctaagagatcataggctctggaccctgagtctctggaaggactggaggcctgagggaggcagggcaaggggaggttccctcggcatggagtcccctatgaagtgttgccggacctcaaacacctgtctaggacatggcgccccttgggctgggaatggccctccacccttacccaggggagctggagagtctggccaaagcttccaaggcagagcccagctaggcccctaccgctgtacacatggccccctagctgggaaggtcttcccaatggggagctggccagtgtggcaagcggcaggtggacggcaaggccccagcctccttctctccgcccaggactgggtggagc

SEQ ID NO: 5490 - DNA, 322 bp, Homo sapiens
  source 1..322: mol_type = other DNA
ccgccactgatggtcaggcaggcgcgtcccgggcccatccggcctccccagcccccccgcggggcggcccctcagcgccatgtccagcgggagcccccaccgcccccggggcccctcagcgggcccagtcgcgtcacccgcccgcgccggcggcagacgtcaccaaggcgcgacggccctgtccgcctctccgcctgtcggacagcagatgcgggcatgcgctcgaaggcgaacgcgcacgcgcggaggatgggcggggcgcgcggccgttagcgcgcggccgttagcggtcggtttctactaacggtaggcgtcgccgcga

SEQ ID NO: 5491 - DNA, 273 bp, Homo sapiens
  source 1..273: mol_type = other DNA
ggataaacttgatacgaagtgctgccactgagcacaagaaccccacggcttaagccttcttgggacaggctcctctggcagaagggctcctggccaccctgtcctaaggagcttggcattcgaggcttctcttggcagggccctgcaggcaacccgccaacctggttggatgggaagaaaccttttcagagagtccctttgggttcgtctgctccctgccctgggcagaggacgtggggactcaggccagcctgagatcactggctgggccag

SEQ ID NO: 5492 - DNA, 446 bp, Homo sapiens
  source 1..446: mol_type = other DNA
ttaggacagggtggccaggagcccttctgccagaggagcctgtcccaagaaggcttaagccgtggggttcttgtgctcagtggcagcacttcgtatcaagtttatccataaacagtactgcgtgctgggcgagatctccgaatctcagagaggttcagaactggcccagaatcactactattatggcctcctttatgggagactcgggaccttctgtcccctcttcccgaggacccaggggcgatgcccagagctgtcaccacccggggtctcagggctgtgcagggtaccgccggcggcgccacgcaggtagattacgcaagcgagcacctcgcacgcgcgccctgagtggcccctgtcagtcacgcgcgggggcggggcggatggcggcgcagcgcgcggcgggggcgacgggcggcgggggccggggggcggtgggacgttga

SEQ ID NO: 5493 - DNA, 393 bp, Homo sapiens
  source 1..393: mol_type = other DNA
cctaaggcttatagggcctgcgtcagggtcctgtaacggtcttccaggccggggcccctccagtcctagaggatctagaggggttccgcctccctccccgggccccgagcaacccttctcccggacctgcggggcccaccccgagtcggactcccgttcgggtgccgacgcgcgcttccttggccggctcggcttcccgctcgggcccgaaggtgcgcgcggtcgccatgttcgggtctccgccgccaccgccgcccggcgcagactagcagcagcagggggcggggtcaacgtcccaccgccccccggcccccgccgcccgtcgcccccgccgcgcgctgcgccgccatccgccccgcccccgcgcgtgactgacaggggccactcagggcg

SEQ ID NO: 5494 - DNA, 361 bp, Homo sapiens
  source 1..361: mol_type = other DNA
aatgtcagctggtggctggtgctgccaggtgaaccaggtgcagggccacctgcaggctgagggaggcgctctgaagtggtggcccttgacctgagaccacctgtctcactgaaggagcagagaggcctgcgcggctggagcagacctgtctgggcagccgcagcacccattcaggggctgccctgccttccgcacctctgatagagcccaggtcccggggctcatggtggcctggacttccaggttgtgatgccaggagggtcccagccgggaagccccgagcagggctcaggccgcccatggggggtcagtggccagcaccttcccttccgcctgcaggctgctgatatgcaggaggagc

SEQ ID NO: 5495 - DNA, 683 bp, Homo sapiens
  source 1..683: mol_type = other DNA
gcgcccagctggctcccctccgacagggcccacggctactgggtcggcctcctccggaccctgagcacagcctggtatgcgtgcgggctcggatgtcgacgttgctagaaagcggccagttgccgaggtccgggcgcagtgaccgtggcccacaaccctgcagcgcacggcccagtcacctggttagcggacgtcggctgccctgcaggcccctcggcctcccccagcgtgggcctggcaccgggaagcgcgggacagtgagtggactggcccgggctctggtcagtgggcagtcagtccgagcccagagaccggggaccaggaccccgggagggcggcagaggacccgggggcccggggggtacccgtcgcgctccggctgtctcctctcggcgcctcggccgtccggagcctctcagggacggccgctcttaggcccgctgacttccagggctggggccagggaaaggcgccgccatcgccggcgtgacggccgaaggggggcgcagagtcctcccggaccgcgccggagactggctgggggagggggctggggagccctccccgccccgccccgccccgccgggtccggggcctcccgccccccgggccgaggggcgcgcccattggcaggccgggctccgcgcgccgcacccattggccggccgccgtgaggagcacga

SEQ ID NO: 5496 - DNA, 238 bp, Homo sapiens
  source 1..238: mol_type = other DNA
gcatgcactctatagtaactgattaatattagttagaatattcattatgatgataatgattggcagagagacaggacctcgctctgtcatccaggctgaagtgcagtgctatattggccaggctagtctcaaactccgtctcttaactgacagtttaagcttaagagacttcagtcatagggcccgcagtgagcagcctgagctgccgcctgtacaaccggctttggagggccagccc

SEQ ID NO: 5497 - DNA, 392 bp, Homo sapiens
  source 1..392: mol_type = other DNA
cactgcacttcagcctggatgacagagcgaggtcctgtctctctgccaatcattatcatcataatgaatattctaactaatattaatcagttactattaacagagtgcatgctctttacaagtgcctgtggaactgtaagtgccccatacaaaagaaggcattgcataattgcattttggaatgggggcgcggctgccaactgcgagctcagacctgcactggggaggcagggggcggggccgggccggcgccacgtgggctgtccttcccttttgggccgtcccacctccagagctgaggcgcctgcgccagctccttcgaggccctgctcggcttcagggagcacgcgcgccctgccgtgctctgattggcggagctgcacgcggatccg

SEQ ID NO: 5498 - DNA, 869 bp, Homo sapiens
  source 1..869: mol_type = other DNA
cagccttcgctgcccgggctgagagggggccggacctccagggcgacatcgaggtgtgtctgggaagtcctcccctttggtccggccgtccctaggagcccgttccgcccggcgccgctcgtcccgccccaactaagggttggccgagaacaaggccaccgcggcttcacggcaggcgggaccccgaaggaagtcggcgggggcccagcactccggcagccgctcgaggagccccgagctcctgcagaccgagcaaacctcccgcccgcccccgggcgtcggggcgccccagaggcccccgggatgaacggccggagcttctcgcgaaaagccgcccggcccttgcgctccggggccctggcgagccccactgggtgtttccccggaggagcggcaccctggggctcggtccgtccccggcgcacgtcccgccccggctcactagcgagcccataggtgcgcgctgaggtcggcgccgctggtgggtgcctgggcgggcgcggagcgcgggacgccggggcagtgggcgccgggacccggggggccgcacccagggcaggagggcgaggacgaggcggctcgcggcccgccgtggcctccgcacagcagccagcgccgagcggccgcccgcagccccgcacccgccatgcccaccgcgcgccgcccgccgcccgcgctgccctcggccagcccgccgcccgccgcccgccgccctccgactgcgcgcccgccacggtggcctcgtgctcctcacggcggccggccaatgggtgcggcgcgcggagcccggcctgccaatgggcgcgcccctcggcccggggggcgggaggccccggacccggcggggcggggcggggcggggagggctc

SEQ ID NO: 5499 - DNA, 552 bp, Homo sapiens
  source 1..552: mol_type = other DNA
ctttcaaatcacaatatactatttgatagtattgttagattgtattgcaatataagcattgcaggactttcttgtatatacaaatagagttatagttaaaattgttatagttaaatagagtacgtgttatagttagagtatgtcatatcactaaaaggtgaaggatagtttgtacctctgtctaaatggagaacattcattttcagggttttaattttagagtacatctaaagtgctagaaggttaattgtcctctgtcccctggtggataccttggggcctctgtaccccaggcctgcctgaatgggctgaaggcttaataccttcagcacactaatgtactgctacatataggttgggaaactctaggccagatatacaaatgaatatgcttttgttgaatttgtcccatcaaaattagctagttaaactagttttagcaggtgtccagctgaagacttggtgatctatttaaatgtaagaacatggctgattatttcttatagaagaagttggattccatgggttccaagagaagaagagctacctccc

SEQ ID NO: 5500 - DNA, 356 bp, Homo sapiens
  source 1..356: mol_type = other DNA
tttagcaatgtgtttggttacttgctttctttaactctacaaagaaacacatcacaaatctgttaacccaaatgattagttctgggttaacgcaacctaacgttaagaattaaattcagtagatccagaatggagtctgggaggcgattctcagctctcacctgggccagtctgcacgtggccacgggaatgagcccgcgcggttacaaggcctacgcgtaggctgtggtggctgcagcaacttccagacgtgggtccgaagccactgacgagcgtcacgcacttacgctgccgccgtaaagtgcgtcaccgcctctctgcgtgcgcgggcacgcagtgtcgcgcggagcagggat

SEQ ID NO: 5501 - DNA, 537 bp, Homo sapiens
  source 1..537: mol_type = other DNA
tctgggaggcgattctcagctctcacctgggccagtctgcacgtggccacgggaatgagcccgcgcggttacaaggcctacgcgtaggctgtggtggctgcagcaacttccagacgtgggtccgaagccactgacgagcgtcacgcacttacgctgccgccgtaaagtgcgtcaccgcctctctgcgtgcgcgggcacgcagtgtcgcgcggagcagggatcgcttggcggccgcgggactgagggcggcgggtgccgaagcgacggcagcggccgcggccggaggagcaatagcagcagccgtggcggccacggggcggggcgcggcggtcggtgaccgcggccggggctgcaggcggcggagcggctgggtaaggccgggcccagggcgggtggggccgctcccccttggtcagctgccgggcctttgtgtgggcccgggcgggcgggagccgcggcggaagccccgccccggccgtggggacgcgcgggtcgggccgggcgcgcggggttgggcggggcgcggcggctggcctc

SEQ ID NO: 5502 - DNA, 677 bp, Homo sapiens
  source 1..677: mol_type = other DNA
ggaaagtaagttaattaaaacaattcacccaacatacgcttctataattattgtaagaatttctatatccactatactttaaattaaaacttattataataacaaatcccaaaatcccggattctttgtggtgttgagaagctgaaatatctggcctctactataaatcactaagagtttgtgtcggctttgaagctgccccgcgacgaaagcggggagtttccgacccgtagtgcgcctttgtccctgccggcaggtgcgacaaggctactgggcccatccggaggccagccgccgcgccccgcccaaccccgcgcgcccggcccgacccgcgcgtccccacggccggggcggggcttccgccgcggctcccgcccgcccgggcccacacaaaggcccggcagctgaccaagggggagcggccccacccgccctgggcccggccttacccagccgctccgccgcctgcagccccggccgcggtcaccgaccgccgcgccccgccccgtggccgccacggctgctgctattgctcctccggccgcggccgctgccgtcgcttcggcacccgccgccctcagtcccgcggccgccaagcgatccctgctccgcgcgacactgcgtgcccgcgcacgcagagaggcggtgacgcactttacggcggcagcgtaagtgcg

SEQ ID NO: 5503 - DNA, 490 bp, Homo sapiens
  source 1..490: mol_type = other DNA
ttctgggcttcccgggaggacggtaaccatccgggcccggaacagcgcagcaccgggtcggtgctccaacatgggcttcccatctgcgtgggcagcgagctcagatgctccagcatggctggctgaggaggcgggcagctgagcgcgggtggcaggctgcgagaaggtctggcactgcgcgtcagtagccgggccttctaagcccgggagagcgatggcggcggccccggaagcggaagtctccgacgggccggtacagcccgtgtccccgccccgcgccatcgctaggcgacgtgcgcttttgccgcgccgtgctgcccgcgagggcagctgaggtggtggtggcggccgccttgtcgaggcatcgcgcgcccgggtgcctggagccgcgtcccccgtcccgaaaactgtccttgacagtacttgcgcggcccaacggccgccggcgcccccgcgtctccatggcgacggcctttttccctgcgaggac

SEQ ID NO: 5504 - DNA, 593 bp, Homo sapiens
  source 1..593: mol_type = other DNA
cacgctctgggctcttccaaggcaacagcctggtcttgggcagtcccaccctgtcccgggagtgccttgggggccggagagccagctgggacccagaggcccgggttcctcagcgtgggcatcccacctggcggacccagccacagccgagcaccagggtcccctctccaagggaattctcccctaaattccaagggtcagtagggccccccttacactttgaagtgatcggaaagtgatgtgacgctccggggatcccaccaggctcagagatacccctggttagggctccgacaagtcgttcccctcaaaggctcgccgcggccgcccttactgcaggcgatggaggagatgcggatgcagcccgcgccccgacccgccctgccagctcagcgcccgcgccgcaggccccggagcccagcccgttgtctggccgcccgcgttccctgcacgctgggccgagcacagctccgtggcagccgcgcagccccactacgcccagccagcccgcagcggtaaccgctagagcgtcgcgccaagcaggcgccgcggggcagccctgccgccggggtcctcgcagggaaaaaggccgt

SEQ ID NO: 5505 - DNA, 298 bp, Homo sapiens
  source 1..298: mol_type = other DNA
tgagtagttctgggcttcccgggaggacggtaaccatccgggcccggaacagcgcagcaccgggtcggtgctccaacatgggcttcccatctgcgtgggcagcgagctcagatgctccagcatggctggctgaggaggcgggcagctgagcgcgggtggcaggctgcgagaaggtctggcactgcgcgtcagtagccgggccttctaagcccgggagagcgatggcggcggccccggaagcggaagtctccgacgggccggtacagcccgtgtccccgccccgcgccatcgctaggcg

SEQ ID NO: 5506 - DNA, 702 bp, Homo sapiens
  source 1..702: mol_type = other DNA
caccggacccagccacagccgagcaccagggtcccctctccaagggaattctcccctaaattccaagggtcagtagggccccccttacactttgaagtgatcggaaagtgatgtgacgctccggggatcccaccaggctcagagatacccctggttagggctccgacaagtcgttcccctcaaaggctcgccgcggccgcccttactgcaggcgatggaggagatgcggatgcagcccgcgccccgacccgccctgccagctcagcgcccgcgccgcaggccccggagcccagcccgttgtctggccgcccgcgttccctgcacgctgggccgagcacagctccgtggcagccgcgcagccccactacgcccagccagcccgcagcggtaaccgctagagcgtcgcgccaagcaggcgccgcggggcagccctgccgccggggtcctcgcagggaaaaaggccgtcgccatggagacgcgggggcgccggcggccgttgggccgcgcaagtactgtcaaggacagttttcgggacgggggacgcggctccaggcacccgggcgcgcgatgcctcgacaaggcggccgccaccaccacctcagctgccctcgcgggcagcacggcgcggcaaaagcgcacgtcgcctagcgatggcgcggggcggggacacgggctgtaccggcccgtcggagacttccgctt

SEQ ID NO: 5507 - DNA, 225 bp, Homo sapiens
  source 1..225: mol_type = other DNA
ggcagcgcactcctaggcattttaaaggggcctaggcccacctagagattgatactgataatttactttgaatgtatcaaaaaataggatgaatgttactggtagagagtctgtcacccagtcattagacaacaaatatttagaggaagctttccctgactctgttgcgcggagcctggcggagtcgctctggcctcctggagcctctgctctatcctcccgggg

SEQ ID NO: 5508 - DNA, 326 bp, Homo sapiens
  source 1..326: mol_type = other DNA
caggctgggctggaacttctggccacattcagatcgcaccactgtattccacctgtgcgatagagggagatcacctgaggtcaggagttcgagaccagctggccaatgtggtgaagccgtcacctgtaatcccagctactcgggaaaagtaaagcctaatgaagtttagaaatccatttttaactgttcatgtcaccgtgtcactggtgctgccttgtgccagcccgaggatgagatgagccatccggggatcctcaccaaattttgattcctctaaagttgatgcaaaagaatccatgtttatccagcactgtattgattactgg

SEQ ID NO: 5509 - DNA, 324 bp, Homo sapiens
  source 1..324: mol_type = other DNA
acagcctggacctcacaaatgtgttagcagatggcgggggcccacttctcccagtggcatatctgggaaaagggcaactgcacggcagcctgttcagtgcaccgtgctggcatctgcagacctgtcctggctggggagggcagccctagagatggatgagcctcctgaccacacaggtcctgagagggcctgtccatgtgagcccttggataaggacgtctccatggcaggtcagaggccagcaagaagcctcagactctggccttggctcctgggtcccagtttgcctccaagatgggagccaagcacagatgttgaccactt

SEQ ID NO: 5510 - DNA, 296 bp, Homo sapiens
  source 1..296: mol_type = other DNA
cctgaggtggctcaggaggtcccagcccccactgagaccaggtcctgccctgttgtcctggaagctggagcccagcctcactacgacttttagggcaatgactccccaaaaggctgagggcagccaagtccctggctgggccctggaagccagcccccaggagctctgggtgcagagggggcaggcagccctcagggcccatagtcctctaggggagtttcacgccctggctgcctcaagaagggaggcgggcctcttccgagtcccccggtctctcaggaattgctcatataagg

SEQ ID NO: 5511 - DNA, 452 bp, Homo sapiens
  source 1..452: mol_type = other DNA
cgttggagggacccttggtactgagcccattaccggggcccaggcctctgtgcttgggaacaggcagcgcctaccaggaggtgctctggggatctccagcagcatcagatgacggcagacgcacgctgagggcttggcacaagcagaccgctgagcccagctggggtggggtggggactggcaggccaggagccaggctctccagggccccactcctgtccttgcccaggaactagacacagtccggtgtaagccagcttacagaaaacacatgggccctgagatccctggggttggttggggacagtcggaacctctccctgtccacacccctggagacctcactctaaagggacgccaggactccctgccctcatttcagagagcgcaggctggattaccaggaggggcccccgggagttccccctgcaactgcagggccgcttctgggg

SEQ ID NO: 5512 - DNA, 337 bp, Homo sapiens
  source 1..337: mol_type = other DNA
cggtggccagccgcagaggggccagcttggtggatggggccccaaacccggagccatgacatctgagttgtgtctttccctcagctttgggggtaagggcaggctgtagctagacccttcctgctccacactagtccccacagtcagtgtgtgggacctgccccagcccctgccaggcagatgcagatgtccggccctcactgctcctgccctggctgggcggagaatccagcagctgctggagcaaacgtgagtgcatcagcacggtcttggcatcatgtccaagctccagattctcccgtgtctccgcatccgatgctgatcagcaggccctccg

SEQ ID NO: 5513 - DNA, 578 bp, Homo sapiens
  source 1..578: mol_type = other DNA
catgacctcacccctgagacaggagtccaaggatgccagccctagggcacacgagccctcagggagcccttctgatcagtggaggccatcactggtgccagcctcagccgagagaacaaggccaggagctttgctgcgggcatccaggccctgggaggctgtggccctgcagggtgggggcttccagggctcctggctggggacctcctcagggaccaacatcaatgatgcaatgctgatggctgtgcagttgctggacagcagcaaccaggtgctcaccgatggcgaccccactgtgggtgagggccctgcccgtgactccaggacgtgctgcacaggggaggcggctgggggtcactgaggcccctcggctctgaggttccagaaatattcttcaagcaaatccaaacccctgggtccaggggagactaaccccaggagcatccaggtgcgggaagctgtaagtggccggtacagcctcctggagaagctggcactggacaatggcggcctggcccggcgcaactcagactctgccctgcagctccaggtgccagtgtgccccggacttctaccag

SEQ ID NO: 5514 - DNA, 566 bp, Homo sapiens
  source 1..566: mol_type = other DNA
accaccctgacggtgtctgtctgtgctctctctttgttttatccagaaagtagaaacaggaaaacatcctcaaaggctgtgctgggtggtggtctgctaacacagggtccagggcaccagccctgtgaggttgctggccagggcccaggtccacccaggcctctccagcccatccctgctgccaggaggcagtgtaatctgacccagcatgctagcccatccaagtggggccacaggaaggtgggtgcaaaatattatctccagggaggggtagtgccttgcccagctcctctggctggtgacagccctcgtctgatcaggaggcttccttttctccaagggcatgacatccctgggggggagcttgagggaggtccattattgttcatctcccagctgttgggggagaggctccccaagccgggtgtggggagaggggacatagctgccctctccgcacccactcctgggtggatctcaagccctggctgtgacatctgtcgatttctccaaagctggagctggacctggggttctcagctcccttggactcccaggacctccga

SEQ ID NO: 5515 - DNA, 456 bp, Homo sapiens
  source 1..456: mol_type = other DNA
tctcactctggccacaatgcccaagaatgtggtctttgtcattgacaagagcggtaggtcctgtggcccagggcagggccctgaaaactcccaggcccttcccagacccccggcaccatgggggaaccaaggttggccagagcctagggcagcccctgttcctagacatgacctcacccctgagacaggagtccaaggatgccagccctagggcacacgagccctcagggagcccttctgatcagtggaggccatcactggtgccagcctcagccgagagaacaaggccaggagctttgctgcgggcatccaggccctgggaggctgtggccctgcagggtgggggcttccagggctcctggctggggacctcctcagggaccaacatcaatgatgcaatgctgatggctgtgcagttgctggacagcagcaaccaggtgctcaccgatggcgacc

SEQ ID NO: 5516 - DNA, 412 bp, Homo sapiens
  source 1..412: mol_type = other DNA
ctgctcaagtgggggtgtacgagctgctgctgaaagtgcggccccagcagctggtcaagcacctgcaggtacctgctgctacctcttccagggaggcctcctgcatgacccttgcccgagggcctcctgtgagccccagcccaggctcctggctgacccagggactggagacagagagcaaccaaccagctggggcagaataagaccaaggtgggcctgttgtggtcagcaggtgagggtaccaagggccctgccttcaggccagccctatgagcccggatttctggaaagcaggatgggcggctcctgagatctctgcatcccctcctctgcttgcgcagctccaggaacagggagccaaggctgcatcctggaattcattatccgctatgatgtggaccgggccatctcc

SEQ ID NO: 5517 - DNA, 279 bp, Homo sapiens
  source 1..279: mol_type = other DNA
cgggacccaccccaggcctttgggcagcgctcccctgggtctgggctgtggcagcatcacactgctcatgacaacatgtgccacgaaggaggcgccccgtgcccagcacctctcacttcagaaatacggcgtatgggaagccgctagggtagccctgtagggctggacttagggagagcagactgacatcttcactgtcaattcccgcacttttcagaaggggcatgtacccccactccaaacatgtgggtggggcagcaaacaagttactaatccatt

SEQ ID NO: 5518 - DNA, 228 bp, Homo sapiens
  source 1..228: mol_type = other DNA
ggcctgtgccctggggttccccttgcaacctgcaggccagcccccctgcggtggcctcacctactcggaggtgagtaggctcaggcctgagcctgagcctgtttcacacccatgctgtcaccatcgagctgctgcaagggcccagtgaccagagggcaaagggtctctgcagccatctgctttcatcagggctgcagcccccaggcagcagtactgggatcatcaggg

SEQ ID NO: 5519 - DNA, 372 bp, Homo sapiens
  source 1..372: mol_type = other DNA
atgcactctgtgtgtggccacacacataggtctgtctgtcgtgtgtgcacatagggacacagctggatgcatcgctgtacagggggttgctctgaggagcctggcccaggctgagcgaggaaatacctgcacctgcacccaagcacaggcaggtctcagactcacaggcgcctggggttgaggggtagggtaaacaccgagcctgggtgtcccccaccctggagggacagaccagcctgccaagagagaggactgtccttgctgcctgccgcttttctggaagggggcaatccttgaggaaccagtgtgaggctgcagcagccactgctcccacaaggcacagaggtaggtgtgcctttctaccgaggctcc

SEQ ID NO: 5520 - DNA, 211 bp, Homo sapiens
  source 1..211: mol_type = other DNA
gatatgtgtgttactgggagggctgcgacctatgccccaccccaggcgtaggctcctggcctgtgccctgggggatcttccccttgcaacctgcaggccagcccccctgcggtggcctcacctactcggaggtgagtaggctcaggcctgagcctgagcctgtttcacacccatgctgtcaccatcgagctgctgcaagggcccagtgacc

SEQ ID NO: 5521 - DNA, 468 bp, Homo sapiens
  source 1..468: mol_type = other DNA
agaggagccagcgcccgagggggccactggcggctggaggtcccagggacctgaggccctgccccgtgtccgaccaccgagtggcaaggtggaaggaagcacaggcacacagaccgtgggtgggtctcctcaccgtggctgtgggcagtggctaaaagtgactcgttgaccaagttggaaccggaatgctttcttactcaaaatggcttttgtaactattgattgcaaaacagagatttacttttatatttttaagttatattttcatactattgtatttaaaaactctttttagtccccaaagaaatgggtttattttatttggaatattattagatgatgccctatgataagagcagctggtctggatgcagatccaggagctgcagagtgtggaacaggatctgcccagggcccatgagctctagcattcagagatcttagttaaatttgaccaagaaaggctta

SEQ ID NO: 5522 - DNA, 473 bp, Homo sapiens
  source 1..473: mol_type = other DNA
gtgtttgtgtgtgtgtgtgcacgtgcacgtgcacacacatgtacacacacaaatctgtatccccaggagtgcctcctgcagtcactgggggctcttccgaccacccatgagagcagatcagagggctgtggtcaggacttcctcgtgccttacgaggtgcagctcttcacctggccacatgggtccaaatctggcaaatttcttgtaactattggaaataaactactgtcatatccaaatggaagctcagcttgcacacatgcaagaggagggtctgtggcccctcagccgtgctggtggacagggagtcataatggctgcctcagaaccctggagggagcagcgcccagctggcagctcactctgcccttgcttcgcagccaggctaagataggcagtgcaggagcttcccactggccagagcagctgccttgtagaatgtgcagctaagagtgcagagctctctgttttac

SEQ ID NO: 5523 - DNA, 455 bp, Homo sapiens
  source 1..455: mol_type = other DNA
tggccaacatggtgatcatgtagtgaggcgagatcgtgccattgcactctagcctgggtgacagggtgagactcagaaggccctgctgggggtgactcaggccctgcctctctactgcctcagatcctgatctcagcggatgatgagatggaggagtccgacgtggaggaggacctccgcagactgtgctgggggtgacgggagggccccgccagccgctggtgtgcagagagaggagccagcgcccgagggggccactggcggctggaggtcccagggacctgaggccctgccccgtgtccgaccaccgagtggcaaggtggaaggaagcacaggcacacagaccgtgggtgggtctcctcaccgtggctgtgggcagtggctaaaagtgactcgttgaccaagttggaaccggaatgctttcttactcaaaatggcttttgtaactattgatt

SEQ ID NO: 5524 - DNA, 358 bp, Homo sapiens
  source 1..358: mol_type = other DNA
cttgagtgcagagtcacagtgaggggcagacagctctgtccagccaggacccattcccactgtcccttgggcctgcctagggcaggagggcagagcagcctgcgacagttcctctgtcagtggagagttgatcttcaagcattaggatatttgaggggtagccagacctgaggccaggatatgtgttctggcggccccgcagcactcaccccacatctgcgtgcagggccagctcgtgggaggcttccccggagaggctgtcagacaagtatttcgtcatgacaccgtaatatgttctgcttctctaggtgcttgtctctagaatctggccagcacccagcagctcatgagaatgcac

SEQ ID NO: 5525 - DNA, 353 bp, Homo sapiens
  source 1..353: mol_type = other DNA
cactttgcaagtcagggtctccaagggttccttgtgggctttggaggaagcgtcttaagctaaggctccctcagggcctatgggtattgaagctggccatcgtcatgctgatcgggcagggttcctgtccaaagttctgagtctgacagaaagctcacctgtagccctcaggtccagacctggaaatgccataccagggctcccgtccaggatggaggggcctgggaccctgccgaggggcctcccaccaagaagccccacccatatagttcaggattgttcggtgtgccggccacccacatggagtctgtggggaggggcctggaacgcgtgtccagagaccttgcttccag

SEQ ID NO: 5526 - DNA, 495 bp, Homo sapiens
  source 1..495: mol_type = other DNA
ccaccatgttcactgacattctgcagcaggaaataccaaccatttgtcttttacactctatgtgaaacctggtatatttccaaatgaaagtgattggattcaggtgaccatttaaattatgtctatgaaaaaagaaaatagactcagtctcagattgtttactgaatcacgatctctgagggtggaattcaggaatgatgataatttctccaggatatagggattttccttagagggaaaaataattcctacctccggacctggagctcgtgattcccaggcggtggccggctcacctggcctgtctacctgcgggcgtggcggggttggagaggggagcgggacccgcgaccccgccccgtggcccggccggagccccgcccctcgggggcgggtggggagagctgccgcggccgaggcccgccccaaccttggctgcgccaatcaggcactgcgatctcagacgtcgggttacgcgcggcgcggagtcggcgg

SEQ ID NO: 5527 - DNA, 385 bp, Homo sapiens
  source 1..385: mol_type = other DNA
caatgtttataagtgtgttaaactccttacctgggagcctgtaacaaaaaaagtgtggttgcaactatacacagtatatatatgtttcatgtcgtgaaaagttgcatttctttgtaacaatatggattgttttttcagtggtgctaaaaaaaatctggattcaaatgagctcccgggtctcggtggcgcgggaactcccttctggagggaactttccggagcaggtgggcgggtgtatgtcccacgggcacctgcgctcaggaggagggggcgagctcgggcaacgtaaccgcccacggtcacctcgggctgcggggccgacttgaagccgccttcgagtgcaggaagactcaagatttacagggcgcctcctgcggaagcctag

SEQ ID NO: 5528 - DNA, 360 bp, Homo sapiens
  source 1..360: mol_type = other DNA
atactgtttttttaatgctttcaaagaggaaggcattgcaaaaatcccagcggggtgggggatcactactctgtgccactgcattccagcctggagttggggggcccatcagggagaggaatgggcactcattgtgcctcctaccctgctgcttgggtggatgagtgggggctcaccctgctcaggaagtggccactcatgtggcccactcccctcatgacctttggccagtgacatccacagcagtggttagggcttcccctctggaagctccctgccccaccctggaatgcagggccaggtccaggacttgctgtggcgcgtgggtggctcctccccgcaggcctggtcagaggaggt

SEQ ID NO: 5529 - DNA, 845 bp, Homo sapiens
  source 1..845: mol_type = other DNA
gagctcccgggtctcggtggcgcgggaactcccttctggagggaactttccggagcaggtgggcgggtgtatgtcccacgggcacctgcgctcaggaggagggggcgagctcgggcaacgtaaccgcccacggtcacctcgggctgcggggccgacttgaagccgccttcgagtgcaggaagactcaagatttacagggcgcctcctgcggaagcctagagacatcgggggcgccgaagggcccgcgccggacttcgcagacagggggcacttgggtgccctttcaggtctcagagggagcgcccgatccccgacgaggggcaggcaaacgggcgcagtgcccgcggcggcggcacgcgcgcatctgggatccggccgcttctccgctcaccgagccagtcacgtgcgggcgacagcggcgcgcttcgccgggccggtactccaggtccgacccgcgaacccctctgggatccccgccggtgaggcgcaggctggatcggggctgggccagggcgggcactgggttcccggggacgcgtctcctcttccgggccgttccgctcggggccacagcgccgtcgggggcccgaggcgccgccgcgtgtcctgcgccacggcctcggggccgtccgcgccgagttgctggctgggggcgtgggtggcccgcggcgccggacccccggcacaccagcccgcggagtccttgcctcccgcgcggccccagccaggagggatggcgctggggcgggagcggggcagccgggcccgggagctccacgggcgcggcgcgaggggcgcaggctgcctggaggaccgcggagctgggggtgggggggcgcgggcgc

SEQ ID NO: 5530 - DNA, 157 bp, Homo sapiens
  source 1..157: mol_type = other DNA
gagtcaccgtgtagattcgaacaagttctcagagctttcggaaggatttcacaaaaccatacacataacagtgcttcttaacgggccagtgagaatgaaagcctcagagaaggaacttcaatcagacagcgaggcgcgccgtgacgccatcttatcg

SEQ ID NO: 5531 - DNA, 481 bp, Homo sapiens
  source 1..481: mol_type = other DNA
ccaggacctctgggaatcatgaggctcaggcgcctgccggtaggggcaactgccagtccgagtaggggcagttcccagaaccgcctgaggagcagtgcagcgcgctcagtctttggggcagagccgggacagcgggcttggcggcgggcaccgcgcccggccgcgtccgagctccagggcgggccagctggccagtggggagtcccgggcgtgggtgtggggagcgggggaacccccgccggcccctcccaggccccagcgggcggagggagcctccccaccgggcctcagcgtcctcctctgtaaaatgggccccttctgagggccagagggaccgggagactcggtgtcccgcgcaggcagaggcggagggacgctgtccccgattgcagctggcggggcgaggcctggcagggcgaggcctggcgggggcggggcctggcgggggcggggccggcggcacctgggtgaggtcgctcgg

SEQ ID NO: 5532 - DNA, 422 bp, Homo sapiens
  source 1..422: mol_type = other DNA
gggcactggcccagtgttacatggccaggtggctgtggagcctggctgaggagccaggtctctgactccctcgttcagtaggttccatgccctccgaggagaggagctcctgttggagcagctccacccactcctccctttcaaagggagggaggggaaaggcagtctgcagctgcctgctgccccctcagggctcctctggcctcctgcaggacatgggggtggacgtaagccctcctgccagcctgcttacccttcagacccctggagtcagcctgtgggctgggccccctacacccatggcagctgggggcagggcccagcctgtcccagggacagcattggccttcactgtgtggggcccagaggacttctgcaggcatcagacagaccctgagccagggactggaccgttccccact

SEQ ID NO: 5533 - DNA, 390 bp, Homo sapiens
  source 1..390: mol_type = other DNA
tcccagctacttttgaggctgaggcagaaggatcacttgagcccaggaggctgaggcttcaggcacagcctgggtgaccatgggtgaccccgtctcaaagaaaaaacaagttttttaattattagaaaaaagaaatagcgggttcatgccattgcactccgctcaagggcctggggttggtcggctggggccaagcctggcacccaccagccttgtgagctttcgagtcaggagcccagactcgaatcgttaactgctaacctcgcagtccgcagcggcccagcgcctaggggaggggagcgggcaggaggcggccccaggcggggcggggctgaaggcctggggtgatccgagccccgcctcctccccccccgcccggcgacttaacgc

SEQ ID NO: 5534 - DNA, 398 bp, Homo sapiens
  source 1..398: mol_type = other DNA
gagacgtcagggcatggtggcgcgcccatgtaatcccagctgcagtgagtcgagatcgcgccactgcacttcagcctattccaacttgaatctatgctcctggggtgcaatcctcaagcttggcccaaataaactctctgcttgcatttattttgcttctgtggccccgggccctgccagacagcgcaccgcgaggccggcacttcggcggtctttgcctggaaagagctcggcaggcgagctagaaggaagcgccggagctccagcctgcaagctccactacgcagccttgggtagggccgcggaccctgacaacgccggaacccggcgcccggagcgtgcgcgcggcggaccagaatggctgacgtaccgccctgccgcgaggcccgcgtagaggc

SEQ ID NO: 5535 - DNA, 752 bp, Homo sapiens
  source 1..752: mol_type = other DNA
gactggaggcaacagggtttgactgcctccaaacacacgtgggggcggggtggggtggggggagatattgccccccatccccgttgccttccgcgacgccaggccaggcgcagggcaggggagaccctggattcgcggttccagctgcaggcagttacctggggtagtgagtgctctctacagacccgggcaagcagggggcgcctgccccgctccggagcagccagggagcccggccgagccttgacgaggatgagctcggagaccgcagcagctaccgcccgctagcacctgagctcccagggggcggggcctcctccaggtgtgcgcagaggaggccggcgcggagtcggggccggcgcgggagcccgagctgtcccccagcccagaaatgcgcggggaggagcggttcatccgcaccccagcgccgcgggagacactggcgccgcctgcctcctccgggtcccggggggagagcgcaccgtgcggcgcggagggggttaaccgggcagcccgccgctggagcgcgcttaaccctttggagcccgcaggtcagccgggccaggctggggtggcggcaccccgagtcccacgcgacggccaccccgagcgcgcaagtggtgccgggcagaaccgcgcgccgggctgcagacccgccggggcgcggcgcggcgcgggccgtgggcggctcggggcgggcggagggcgggggacggcggcgggcgcgcagcgtcgccagggcgaagccggcg

SEQ ID NO: 5536 - DNA, 878 bp, Homo sapiens
  source 1..878: mol_type = other DNA
ctgcctccaaacacacgtgggggcggggtggggtggggggagatattgccccccatccccgttgccttccgcgacgccaggccaggcgcagggcaggggagaccctggattcgcggttccagctgcaggcagttacctggggtagtgagtgctctctacagacccgggcaagcagggggcgcctgccccgctccggagcagccagggagcccggccgagccttgacgaggatgagctcggagaccgcagcagctaccgcccgctagcacctgagctcccagggggcggggcctcctccaggtgtgcgcagaggaggccggcgcggagtcggggccggcgcgggagcccgagctgtcccccagcccagaaatgcgcggggaggagcggttcatccgcaccccagcgccgcgggagacactggcgccgcctgcctcctccgggtcccggggggagagcgcaccgtgcggcgcggagggggttaaccgggcagcccgccgctggagcgcgcttaaccctttggagcccgcaggtcagccgggccaggctggggtggcggcaccccgagtcccacgcgacggccaccccgagcgcgcaagtggtgccgggcagaaccgcgcgccgggctgcagacccgccggggcgcggcgcggcgcgggccgtgggcggctcggggcgggcggagggcgggggacggcggcgggcgcgcagcgtcgccagggcgaagccggcgtgcggcgcggcgcggcgggcgcggagcgagcgggcgggcgagcgcctccgtccccggatgtgagctccggctgcccgcggtcccgagccagcggcggcgcgggcggcggcggcgggcaccgggcaccgcggcgggcgggcagacgggc

SEQ ID NO: 5537 - DNA, 478 bp, Homo sapiens
  source 1..478: mol_type = other DNA
gctcaaattgttggccttgcagcaactacagcaaaagggatgaattcttccctttagtgccttcagtgacccagaagattccctcgatcattcagggtactggccttgtgccaggcccttcgccgctaattgcaggcggtggcatctgagaccgggtctgtctgattcccacgcccctgactcaagcaacctgacgccgatgtccggggctgccctgagggtgcaggcatgccccttgagccggcagtccgcgcacgccttcggggcagcctggactggcggatcagacgacgtccggcgctcctgcacagcgcggccaggcttagcagcacgagcgacatcgccgggccactgcgcgggatccaggccacccgcacgctgcgcttttatcccggcgccgccgggccgccccttctcggctccgcctctcgcagcgcgccacccgaacagagggcgggcccgctggccccctcccagg

SEQ ID NO: 5538 - DNA, 841 bp, Homo sapiens
  source 1..841: mol_type = other DNA
tggtccctgggccacccacccacgaattacgggggcgtgggtggaggctcgttaaatgcagatcccgggcctgacccggacctgccgtctggcgctagagatcccgggccagggaaacttgagaaccgcagctccaaatcgccagtgctgacggcttccgctttgggagccccaggtgttgctgtccgaacttggtgtcgggcagcgggcactccttcgctccctcaaaggagtacccgtttcgcttcgcgcggcggggcgattgtgtaaagcgggcccgggtctcggcgtccagcccggccccaaacctccggcccccaggcctctccgggctagcggccgggcggcgctgctgcggggtggtcggggcgcctccgcggctactcacccggggcgactcggccgagagcccgacagtcgggaccggagcgggaggagcgggtggccgcggcccggcccctgccccgcggcactttaaccggcggcgccggcgccccgcgcgctctctgcgtccggaatggggacgcagcagttccgacccggtcggccccggagccgcgaggctagctgggctccagcggaggcgcgcgaagcccgagggcgggtgcagctgatgcacctggctcactgcatgcacgtgtgcgcgggggtaggcgcgcgccgcggcggcccgtgctccgccagcgctcggacacggcccatccctccgagccccagcaggcgagggcgctgcgacctgccccagcctgggagggggccagcgggcccgccctctgttcgggtggcgcgctgcgagaggcggagccgagaaggggcggcccggcggcgccgggataaaagc

SEQ ID NO: 5539 - DNA, 419 bp, Homo sapiens
  source 1..419: mol_type = other DNA
tttctggggaaaatgctctctccaaaatcaacataaaattagatctttgtcagttctaagtattagaacataaaatcttaaccaaagttgttaaactcaaaatagattttcagcatgtaattttcattttctggaaggtgattaggaatctttccaaagagaccattaggtctccacgctgaaagaatagctaccatggtatgtggtccacatttactgaatgtccaagacatgtcttaatttatttttcagttgcctcacaaaaggctaagaaaaacttagtttctgcccaggtagacatgctcattttaaagagaatgaatatatctaggaagagcctggcagtatattcccaatcaacacgtctggaaaattcggaagcgttaaaacgcccgtcgggggcgcgtctgcggcctgtg

SEQ ID NO: 5540 - DNA, 519 bp, Homo sapiens
  source 1..519: mol_type = other DNA
ctgctccccaagtgagccgggcgcgcgagaggcaggcggggcggcgcggagcggagcaggcagccccgcgcgctcgcccaccgcccgctccgcgcagctccccgcggccgctctcgtcgccgccgcagcgggcgcgtcggagggagcccagcatggccgggccgggctcgccgcgccgcgcgtcccggggggcctcggcgcttctcgctgccgcgcttctctacgccgcgctgggggacgtggtgcgctcggagcagcagataccgctctccgtgtaagtgccggctcctgcgccgcccggggaggggaccttgccgcctgcgacccactgtgcccaagtttgggcgcctgcaggtgcggctgggcaggacccgccgcgggcgtcggcctcgccgctcgcacctgcctttcgggacccgcgtcgggcggcgaggccggggtgggatgctctggcccctgcccgcaagaggctcacctcaagtgacggcaccaactttggagccatccaacttcccccat

SEQ ID NO: 5541 - DNA, 726 bp, Homo sapiens
  source 1..726: mol_type = other DNA
cggcgccgtccccaccagtcaccgcagccgggcggactccgaaggcagcggccgctggggagccccggggcctgggtcgggcgcgcagggggccgctgcgctgcggccggatgccgggagccccgcgctggtgcgcccaagccgtggtggcagcaccgccctccgtgctttcccctgtcgggcgccgcggccggaggagcagctgcgggcggtcacgcagcgctgccctagccagagccccgaatccgccccgcgtgcgatcccgcctgccgccgcgcagctccctccccgcaggagaatcgcgcggcgggggcggagggcgcgccccctttaggttccgcggcccccgaccccgcccggcccaggggcggagcgggcatgctacgccctctcctagcagccgcccgcaaagtgcggagcgccgcgccctgccctcggcttccctcccgcgcccccaacccccaccctggctagggtcgcccggcccggggccagccccagagtcgcgcccgcggtggcggactgcggagttcagcggccgcagtagcccgggtggggcagggcgcgctccgccgcggccaaggacactggagtttccgagtccccgcccgcgcggcgcctcctgccccgccgccctcccgccgcggcccgccggactccccggggccgccgaggcggggccgggcggctgctgctgctagaggcgcgtctcgctgcctcctgctc

SEQ ID NO: 5542 - DNA, 309 bp, Homo sapiens
  source 1..309: mol_type = other DNA
cacacagcagaacattttgttttatctagaagggcagcttcaggggttgaaaccccacctcagcaagggaaagttccctgaagcttcaattagagaagagtcacagtcgactgacgccttaagaagtatttcttaagtcacactaaccaaaaggcatggctatgaatttcatgcacggggctctgctgctcgacccccaggtgagggtcccgtccagcagaagccacagccggattaagaaggcagttttattttggtgccctgtacttcaagcagattaaataatcaaaattgacaaacaaataaatg

SEQ ID NO: 5543 - DNA, 338 bp, Homo sapiens
  source 1..338: mol_type = other DNA
tgaacttgcatgtctaaaatgtgtactctgcatgtgtttttgagacgtaacatttgaaaagcacttgtttcagaagtgagtcactttactataatgtgtcttatatgtaattttttctttgtctgtgaaaagcttccctcaaaactataacatgaggaagttcaccttatttagggaatactgaattccctggagcacgtcatttaccccagtgcagttttgcaaactgtagtccttttgcttaaagacctacagtaattcaaaaaatcacttaaatactctaaaaattttgcgtgccacttaccctgataactatcaagggcatttcacttcctatc

SEQ ID NO: 5544 - DNA, 612 bp, Homo sapiens
  source 1..612: mol_type = other DNA
gcgtggaaatctgctgcgagctccacggagccgcctccgccgcccagagccggggtccgtgcggcagctgcccagcgagcccttccgccgccgccgttgtgcccgggaccgcccgcctcccgccggcccgctctcccgcccctcggacccgggcgccaaacgaggaggtgggcagcttcgccggccatggaccgccggagctgagtcgccgccgcggagctccgagctctcgcccttccccagcctcgcgcccgctcttcgcccttcgccctggaaaaacggggaaaagggtggggggggggagcccgcgtctcccctgggttagtcgcacccctccggcgacttgtgcgttttcagcggcatctcccggagaaaaagccatgcgcgcctgattgttctgtggccccaaagcttggggtgtgtgtctgtgtgtgtacagagacgtccacactaactcgcggctgcaggatcagcgtctggaagcagacgtttcggctacactgggggcacctgggcgcacagatcgccccccttcccccgctgaagaatttctcacgcccacatttggggttggaaagccctaattaccgccgtcgcttggacgttggaaac

SEQ ID NO: 5545 - DNA, 525 bp, Homo sapiens
  source 1..525: mol_type = other DNA
aaactttaaagaactttttgggacgcgtccccgcggtcggacaggatcgcgtggaaatctgctgcgagctccacggagccgcctccgccgcccagagccggggtccgtgcggcagctgcccagcgagcccttccgccgccgccgttgtgcccgggaccgcccgcctcccgccggcccgctctcccgcccctcggacccgggcgccaaacgaggaggtgggcagcttcgccggccatggaccgccggagctgagtcgccgccgcggagctccgagctctcgcccttccccagcctcgcgcccgctcttcgcccttcgccctggaaaaacggggaaaagggtggggggggggagcccgcgtctcccctgggttagtcgcacccctccggcgacttgtgcgttttcagcggcatctcccggagaaaaagccatgcgcgcctgattgttctgtggccccaaagcttggggtgtgtgtctgtgtgtgtacagagacgtccacactaactcgcggctgcaggatcagcgtc

SEQ ID NO: 5546 - DNA, 417 bp, Homo sapiens
  source 1..417: mol_type = other DNA
attttctattattgttctaaatgttagctcttatccaaatgaaagcagtcacatttcatctctccagacattagatcttgtagagaaagattgacttgaaggtgcacagatgtctgtgcctggaagcaaagcctcattggaaccccactattctggaattcctgggctggtctcagccagctgcctgtgtgtagatacgcttaaattagttcaataaattctagctcactcttaattactgctggcatttgaaagcaagtaaatgccttcccttgaaaaatattctataaatccatcaattttgcttattttaaatgacttctcccacatttgtccaaataagtgaagctttaccattttgaaagatttagctttgggttttgaatcccggaaacccagcaataaccttaaagttcc

SEQ ID NO: 5547 - DNA, 323 bp, Homo sapiens
  source 1..323: mol_type = other DNA
tcagaccagtgagacattaggggccacatggtaaagctcagtgcactgtatttaaggggtatcccccccaaccctgaggtgggagaggggcatacagactgcatgtgacctctgttttgaatataatcagtgggaacactctaacaaagtcctagagccgcttgttttcatttttagaatgtacattcagagaaggaagtcttcctccttccttgcataggtccacatgtcgcgggagggatctggtggaaggtgaccggatcagtggggcggtttcccccatgctgttctcatgatagtgagttctcacgagatctgatgat

SEQ ID NO: 5548 - DNA, 501 bp, Homo sapiens
  source 1..501: mol_type = other DNA
ggcagcagctggggctccagacttgttgagtggaagctttttccaatgaaaaacttgtccaatatctgcctgtgtgcgcgcgtatcaactcagacatgggggaacaataaagtgaagatcttatgaaattctttcaacctcctaaggcggtgccagggtatggtaaccacgaccccaaagccacctgacaagttcccagtgtgcctggcagcttggtgcttcgcgccgcggcctgccgggaggaggcgctgcgaagacccccgcccatgccgggcgctttctgctgcccccagcggaggcgcccgggccccagccccgtcccccctagcggctcctcgggaggcctctgcgagcgggcgagcgtgccggccggccgggtgggggccccgccgagcgcagcgcctggcagcgccgcgcgagcgcgcgtctcgggactgcggcgggtgccgccccctcggccgccggccccgcccggccccgcgcctggccctggccctccga

SEQ ID NO: 5549 - DNA, 391 bp, Homo sapiens
  source 1..391: mol_type = other DNA
ggaggaaagaaggatccatggcagcagctggggctccagacttgttgagtggaagctttttccaatgaaaaacttgtccaatatctgcctgtgtgcgcgcgtatcaactcagacatgggggaacaataaagtgaagatcttatgaaattctttcaacctcctaaggcggtgccagggtatggtaaccacgaccccaaagccacctgacaagttcccagtgtgcctggcagcttggtgcttcgcgccgcggcctgccgggaggaggcgctgcgaagacccccgcccatgccgggcgctttctgctgcccccagcggaggcgcccgggccccagccccgtcccccctagcggctcctcgggaggcctctgcgagcgggcgagcgtgccggccg

SEQ ID NO: 5550 - DNA, 364 bp, Homo sapiens
  source 1..364: mol_type = other DNA
aaaagcttttggaaaaatatactggcgtattccacaacattgtatcatggaattgtcacttgaaaatggctaaaaatagcaaattttaacacagtaaaggtttgtcaggcatttaataattaatacctttcattgtttttgtctggaaagagtgtgtgcaaagatacttaacaaccaaatgtaatgtgtgatccttgtctaaatgaagagaattattatgaaattaatgatcttaggtataataattgtactgcggttatgtagcagaacatctattctttacaatgtctatgttacaatgtctgtaacttactgcgagaagcgcaggtctccgccaccgaagctttacgcgggagccccggtc

SEQ ID NO: 5551 - DNA, 396 bp, Homo sapiens
  source 1..396: mol_type = other DNA
taagaaattgtatggctatggtcatgagcaagccatttaagagtgtgccaccacacctacctaatttttgtaatttttgtaatttgagagttaatttaagtaacgtgtaagacatgtaagtgtatagcactatgccaagtattataacagatgtaatttagtgttaattttaaaacatgtattttacctcctaggtcaatatagtctatatttaaacagtatttctaatcagccaaaggatgagaacattatgggattattcaaaaaaactgaaatggtttcatctgtcccagctgatagttactctgaatacttagagctatttaaaagcttattacttaatatttatggagtcagttgtgtagaaatgtatgatacagtttctgttatcttttg

SEQ ID NO: 5552 - DNA, 596 bp, Homo sapiens
  source 1..596: mol_type = other DNA
taaggtagaaaccactatgtaaagggctcttaactatgaagttgttcccgaccgcaagtttattttttctttaatatacatttactataggaaaacgttgatgaacgttccaggttaacactaggttgttaagtcccatcagaggatctcaggtgaaagtgcttgctggagctgtgacactgggtcacactctctgagataaaggctgtcgaggcttttaggctattaccgcctgtttttgtacacatgcaaatagttctgggccgagataactcgtgcgcagaggaagggttttgcccacaaatgggcgacgcctgcgctccggagaagaggccaagctagtctccctcgcctgcagcgcggcgggggaatccccgggaacccgaagatcgccaggggcccacgcattccgcaggccacggctgcggcgtcgaggtcctcgcggggcgttgcggtcgccccttttggcgggctcgggcgccccgaaactccgccccccggcgcggtatttccgcactcgcgcaggcgggtgccgcgctcccattggtggagtggcccgcggtggccccgccccctcccggccccgacgcgcgcac

SEQ ID NO: 5553 - DNA, 551 bp, Homo sapiens
  source 1..551: mol_type = other DNA
gcggtattacacagtgaagaaagtttatttaagcactccctattgatggatatattaccatttactgccccagacagggctgctgcaaacaatcttgggcatttataatgtcattgtttctccacttgaaggacactctgtcagattgccctcgagtgtcaggcagcctctgaatatgctagtcaaatttaaaagttggtgtttacatttgtcagaactcaacaaacggtactcttaaaatgggtgcattttgccatttgtagattatattccactgacattcatttaaaataatgtgggcttttaaaacgctcggctatcatggggtctgcctgccccgcaatcgcggcccacgctctgcgggggcgcccggagtcgaataccagcggggagagagaggtccctctccacccgcgggaccgccccacgcccctcgcagccccaggaggtgtccgcgctgcggcacgtgggccctcccggcagcgtggggcggtgccgagccggcggcccgccccctccccacccatcaaggcgtggctggcacggtcccg

SEQ ID NO: 5554 - DNA, 268 bp, Homo sapiens
  source 1..268: mol_type = other DNA
catggtggcacatgcctgtaatcccagctactcgggaggctgaggcactccatctctataaaaaattttaaaattagctgggtaaaggctgcagggagccgtgattgtgccacggcactccagcctgggcgacagagctgagtagctgctgctacaggaggccggggtgtccccacccccacagtaggagtcagatggggttcctggaggaagctcacagcagcagcagcctctgctctggtcccgggctgggcccatgtgacccagg

SEQ ID NO: 5555 - DNA, 597 bp, Homo sapiens
  source 1..597: mol_type = other DNA
gggccgccctccaccttaaaggctgtcgttaatgttaacagtttacacgaccgtaggcgttcatctgttgaatgaatgaatgcctgcagaaccggcgattcctgagagcttgctgggcgccggggttcacgcagctccaggctcgtcctcattctcacctccaccgtggaggaaagtgaggctcccagcggtgggggtgggggcgccgcgtgcaggctctggccctggaccgctagggtagcccctaccaccccggcacgagagtccactcccactcgggtacctggcccttgacccgccctcggggtttccgcggcgcgttctctggcgggacagtgggagcgaggggcagggctgtttacccctcctccgactcggtcaattctctccgcctgagtctgatttaggtggcggcgggggagggatgtcctggggcctccgctctcctgggtgtcgagcggtggccgggcgtggccacgtccaagtcctgcgtcgcccggctccggcgcccgcgggggtccccggcccgcctcccgcccacgtggccggcccggcctccccgcccccggccccgcccagcccaggggagccgccgcc

SEQ ID NO: 5556 - DNA, 348 bp, Homo sapiens
  source 1..348: mol_type = other DNA
ccacttcatgagcaggtctggcaggtaacagctgtgtgaccttatagttaatgtttcaaccaacagaactctccccagactaggatacttattctagcaagccttttgtccaaagtcctactaggtgtttattaaattattattaaaattattattattacattctttgtgttttcctcaggttttgcatagagtgagcatcacttggacaaatcctttggccagaggggcagggccacaactggagggccaggctgtgggggcggggccagcacacgaggactgagggtgggggcggggcccgggctggcaacgcatgcccagtgcggtccccttcgctgccgccgc

SEQ ID NO: 5557 - DNA, 308 bp, Homo sapiens
  source 1..308: mol_type = other DNA
agggcctttgcaatcttagctcagggatcccttcaaactagtaattcctccctagtcatagggctattgacagtatgtcagattccattgatacttgttaaatgaattaattaatgaatggaaaacaggatccaggatgttatctcctgaagattagacgtggccatttccccaggtcttaactgaattgcaaataagagctggtcatttgcttacttcaggttcggaaaaaaaacaaaaaaggacccatttgtagtctggggcggcggtctccgacctggactgcgcgcgccccctcgcggttacat

SEQ ID NO: 5558 - DNA, 738 bp, Homo sapiens
  source 1..738: mol_type = other DNA
atcagcagttatactttaattttaatttcaagttttcttaggattatgaaattaaaacattctgttcttggttattttcataagccttacctcaacagacggaaatttttctttagaaagcaaactatgttcttttctttgaaataactgtgatagagaaattattcactttaagttctaagttgcttgaaggtgattacatatgaaccttcatataaacatgtatctctctcatttaaaagaaaagaggaaggaaaggaattagcccattaattatttaaaatacttggtgcaactgttcctatgaattaatccagcatgttaataacattgccaactattgtgttttcattgacaacattccctattacatatgcatatgaaaaacaggcattttcatcagaattactgtaatagcattaagagattattattttttcccatttccttggaagaaaatttacttaaattagattatttattactcagtataaacttcagaataaaaagcttgattttatacattaatgatttcaaataaaagataagtgccacatttgtgcatcacttctttagagaaaagtctgtgttctgcttaggagagataacactttttgtagccattagttgctaattacttgcaaacaaataaacaattaactccttaagctgctggctgggcattaaaactttctaagacaggattttaattagtgacgttctaaatccagccccctt

SEQ ID NO: 5559 - DNA, 788 bp, Homo sapiens
  source 1..788: mol_type = other DNA
cagcgcagcagtcgcggagcggcgaaggcaccgtccatccctcgccgtgcacagctcgagtgacagcgaccacagtcacggccgcgacacgggcacacggggagagcggtcttgggctccgggacccgtcacgggctccatttccttccttagcttgctgagcctcggaaatcattatctgcaatttttctgaagaggttctcagggagaaaattccaggacccgcgcgcgtacgtgaccgcccggcccacgagcaccagcggctcggtctccgcctgcggccctcggcccagccgagcaggcccacgcgggccttgggcggcgggcccagcctccacaactccgggcgcggcctgcgacgggcggtgacctagggcggcggcggcccccacctgggccggggcgggcacctgcgggagccgcggaggcgccagacctggggtcggccagctgggctctccctcgtcgcccaccagctcgcgggctgtcctccagcgtctcctcgatgggcagcttgtcgatccccggcatcgtggcggagggagggcggtggcaggagacgcagctgccgcccacagctccccgcgccggcccgcccgccgcagctgaccccggcccgccctctccggcaagggctgcagccgtccccgcccgcacagccttctccaggcgccgagcggccgtgcgggaaatcccgccccctcggcctccctgccccgcctcccggcgcgtccattggctcccggggacgcccatccgcgctgcggcggtggtcgggaggttcccgt

SEQ ID NO: 5560 - DNA, 583 bp, Homo sapiens
  source 1..583: mol_type = other DNA
tactttgttattttctctgtataatgatgaaagcctacaacccaactttgagcttcactttattgtaaaattagaggctaaaactatttaacgcttccaaaactttttgattcaacaaatgccaattagttactaacataattaatcagtgtatcctgatttttaaaagatattttcctttgtgatttaaaagaaacatgtgaaggactgacctcgggaggccagactggcaacaaaatcacatgttttcaactgaatatactgatattcgaaagcattgacacagctgcggatctcagacatctgagttagtcagcaccattctgcgggaaacccccgtcctaactcgaggctctggctcctcgcgccggcaaacgcgcgcgtgcagggaaggccatcccagggcagacactgccacctccgccgcttccgacgcccgcgctcgcgggagagcctagcgccgcacgggaacctcccgaccaccgccgcagcgcggatgggcgtccccgggagccaatggacgcgccgggaggcggggcagggaggccgagggggcgggatttcccgcacggccgctcggcgc

SEQ ID NO: 5561 - DNA, 647 bp, Homo sapiens
  source 1..647: mol_type = other DNA
cccaactttgagcttcactttattgtaaaattagaggctaaaactatttaacgcttccaaaactttttgattcaacaaatgccaattagttactaacataattaatcagtgtatcctgatttttaaaagatattttcctttgtgatttaaaagaaacatgtgaaggactgacctcgggaggccagactggcaacaaaatcacatgttttcaactgaatatactgatattcgaaagcattgacacagctgcggatctcagacatctgagttagtcagcaccattctgcgggaaacccccgtcctaactcgaggctctggctcctcgcgccggcaaacgcgcgcgtgcagggaaggccatcccagggcagacactgccacctccgccgcttccgacgcccgcgctcgcgggagagcctagcgccgcacgggaacctcccgaccaccgccgcagcgcggatgggcgtccccgggagccaatggacgcgccgggaggcggggcagggaggccgagggggcgggatttcccgcacggccgctcggcgcctggagaaggctgtgcgggcggggacggctgcagcccttgccggagagggcgggccggggtcagctgcggcgggcgggccggcgcggggagctgtgggcggcag

SEQ ID NO: 5562 - DNA, 446 bp, Homo sapiens
  source 1..446: mol_type = other DNA
aatcattgcgttaaacggtaacatttaacaaatatcaggaattatctccttcacaaatgttaagtctacctaaagtaattatacataaatatttcaaatacataaattaagaaattataaatatggaaaatattaaaagttacccaactatacctcttttgactaggaatcatatttaatttgaaatgtcaagtggtccctttgctttttttagtgtatattaacaatttaaaaatatttcaacaaaacagaattttgatcaaaattttatcttgtgtagagtgaattcttcccttaggattccaaggacactgacctagtgaatctagtacattgggacagtcaccatgaattctctttgcatggccaaccccctgcaaaagcattttattccaggaataaaatatttaatcctttaaatttgatgaatgtagcattatagtaaa

SEQ ID NO: 5563 - DNA, 436 bp, Homo sapiens
  source 1..436: mol_type = other DNA
tccttatctgaaattgaatttaactgagatcctgtaattttatttgttaaatgtagtaactaaatagagtcttcctatttactaactaaaaataaacactgggtcaacctgtaataaaaaataacaaacagccttccgcagtttgtcagtactatttctaagaactatgaggcttaaataagatagtgcatagtctgcgctgttaactaccacaaaggctctgctcagaggtgcgtaggcgctggctcagcctggggtgaacccactccacactgcgagtaagctcgcaatccgggtggaggcctccacgtcctagcgcagtccagtcccgggcgcagggaggagagctggtccatccacttccggcttggagggcatgccctcccattctgacctatcgtgtaggtaaaaattaatcttcagagtattccctctc

SEQ ID NO: 5564 - DNA, 502 bp, Homo sapiens
  source 1..502: mol_type = other DNA
agaaaaatagattaaatctttatcctggcaatgagtctaatacatttatcattgctgtgaattttaaaaggtgtagcaggcggcgcggtgagtcaccgcgccaggcccgatcataaacacttttaaagtgaagaggctttccgcttcctcaacataaggagtaaatctttaatgctgcttctaggaaaaaaagtacaagaaaagcaagacttcctccttgccttctctttaaaaagcaacagccgatgaacagaaagcgtctagccctagctcattagggtgttcatccgggcggaagcgtctcacacgcagcctcagccggcctctcccggctcctggggccacgtccgggcggtggcgccgtcgagagatgactggccaatcccctgcaggcgcaagcgcagtggctcgggcgcaccggaagcgcaggttggaggggccgggccgctgctggagtcgccgcggccgccgcgtgacgtggcacagccagagcctaaaggct

SEQ ID NO: 5565 - DNA, 401 bp, Homo sapiens
  source 1..401: mol_type = other DNA
tctgcccaacctggagttccagaggtagtgaatgcacagatctctgaatcagcaaactgaattttccttatctgtaaaaagaaataaatagtctacttatttgcgattatgtgaagattcaataaggtaatatttgtaagtattcgcacctcctgagtagctgggatcacaggcgccgctttcataatttaataataccttataataattatgaactgtgtcattccacgaataatttattccctggtcgttgactgcgaacgaggttgacaaggaaaacagccatttcagtcccaaagagcttttagacaaggaagccaggtgacgccacgtcctcccagggtcacgtgacccgcagccccgcccggactgagtgggtccccagcggctgcgacagcagc

SEQ ID NO: 5566 - DNA, 409 bp, Homo sapiens
  source 1..409: mol_type = other DNA
aggtgccaggctctttttaaaaaccagctttctagagtgagaattcactccaacactgaggatcaaatttcaacattgaggcttgagagaggtctttttgaatagtgattgtactgtcatctcgttactaaataattttgtttaaaatttcagaatgttaacatgatagaacttcaaaattgaaatgatagtaattttagggaaaaatcttacttccctctttaaaaatacgatttttttttcaggccaaggtgggctgatcatctgagaggttgcctaggcgtttacagataatgttctgtagaacatttcttttctacagaacaaacttttcttagaagtttaaaacagagttaggtttgttaaataactgaattttcttatttttctaggtagcagagggaaaaca

SEQ ID NO: 5567 - DNA, 568 bp, Homo sapiens
  source 1..568: mol_type = other DNA
acattcatcatgttagccaggatggccttgcggcccctctttctgattttaaaaagtcagagacaagttggttgtaaagcaagagaatagaaaattttcttcacatatattacaaatgaataaattgaaaatagatatatcctcttcaatgaaacgtggaatatgaaaatatgactttaaattataaaaaagtagcattatacatttacagaaaatcccccataaaacaaaacaaaatttttttatttctttgaatagcttttctaaaatgattcatttactgaaatacattatataggcatctctgctgaattatgtcagcagagaacagtaaactatcgatataacttaatttttattacttcttcatttgaataaataccttttcataaatcttttattttaacttaatagccttgatctaaagaggattgctttatttcttctgagccctttttataaaaatatctaggcttttaaaataaggtgaaaataaaaggcaatcaagcttggtcataatatcatctttaaattggaatgtgttacactgcccagctcagggaaatgc

SEQ ID NO: 5568 - DNA, 503 bp, Homo sapiens
  source 1..503: mol_type = other DNA
cccagtagctgggattacaggtacgcgccaccacccaccttggccccaaagtgctgggattaattcttccctagctcagcaagacctgtgtgggccatcgaacctacagaactgaaggataatacatttgtgggtgtgtgttttcaaagacactaagttttggtaacttgttacagcagtaactggaaactaagacatgcaacaagccttatatttttaccaccactactggtggttatggtgtaaaagcccttactgaattttatttccggctcccagcccccgcgggtccccccaccccggggctgaccgggtgattcaggcagccctacatcctgctggggtggtgggcttcgagcgcgggtcccaggacgcagtggggcgcagtgcctgcggcaggcggcaggaggcgagcgtggcccaggaactcccgcgggagggtcggggcggggcttgggggcggggcggctcagcgcgcaggcgcggggccaggcgcctcgcgc

SEQ ID NO: 5569 - DNA, 307 bp, Homo sapiens
  source 1..307: mol_type = other DNA
gccacaaacctgccctgtgggggcagttcctagttaaggagcattaatgccagttggaaccgttttttttccccttcaagtggccaaatagagaaacatagaagaagtgaggttttcttttttcccagctgagtaagccgctgaacttgtatcatcattttagtggaaaaacataatttaattttggtgaaatgagattcatctcgtgacaggattagatttcacactgaagaagtgaggttttctaaacccagaatccaggatgctgagtgccaggctccctgttaaatgggccccctcatgagaa

SEQ ID NO: 5570 - DNA, 298 bp, Homo sapiens
  source 1..298: mol_type = other DNA
ttccctgtggctgtggccacagacccatcaccacaagaggggttggtccactctttgccaaagtccattaatataccttgattggaatttgtacggtaaagctgcctaaaaaaattaagtaattcaaactagagtcacctgggtgcaccccaggtgccctctagggtggaccacttccgagttcaatgaggcatgccattctatttccttggggattaaaacccatgatcttcagttcctcagagaactgaaagttgcaaggagaaatccagtaattcctgttatctgcaggctttat

SEQ ID NO: 5571 - DNA, 386 bp, Homo sapiens
  source 1..386: mol_type = other DNA
ttgctgagccctggccccttgacgtctggagtggcaggccaagcactcagtgcagcaggaagatctgggtgccaaatatctgttaaatgaacgaatacatgttttgatgaaacagtgcagtgtgagcccaaaggggtcttactgaaggcttcctggaggtgtccagaggatttgggggctcctgcgcccccaggtgtcttctgagaaaagaagtcgaccctgatgcccttcggggcagagatccagagatcctgcctgagtcactttggcgggtttatgtggctctgcgggctcagaggccctccccgcgccccgccaccgtgtgcgttccggggcggggcggggcgggggcgggggcgggggcgggggcgggaccgggcgctcgg

SEQ ID NO: 5572 - DNA, 385 bp, Homo sapiens
  source 1..385: mol_type = other DNA
tgtccagaggatttgggggctcctgcgcccccaggtgtcttctgagaaaagaagtcgaccctgatgcccttcggggcagagatccagagatcctgcctgagtcactttggcgggtttatgtggctctgcgggctcagaggccctccccgcgccccgccaccgtgtgcgttccggggcggggcggggcgggggcgggggcgggggcgggggcgggaccgggcgctcgggctccgcccccggtacctctcgcgcggaggaactggggataagcgccccggagcccccaaacagagcgcggccgctgggggacagcgcgcggcgccgggtcggggcggggcggcttttctgtcggaggacgcgaaccggcacgctgcgcctttaagga

SEQ ID NO: 5573 - DNA, 445 bp, Homo sapiens
  source 1..445: mol_type = other DNA
gccaaattgcaatctgtagagtttgctgatgagaatgcaaattggtacattatatgtctattttttaaacttcttgttctttgccagtacaataaaggaagatcaccaatttgcatatctcttattataaatgagattgagcatcttttatctgttcagatcattttatacattaaggaaattactatgttgtctctattatgtatttacaaattttaatcttattatctttccatgtggagatttaaaaacttttttatgcaactaatacattacttagaaagccctttcctatggagatacttttaaaatagaattctcatggttttattttttatatttaattctttgattcatctgaaacaattcaggggtggagcggtgcagcccctgacagtaccagtgccatcactctggtaacaatattatttaggtaagccctaac

SEQ ID NO: 5574 - DNA, 220 bp, Homo sapiens
  source 1..220: mol_type = other DNA
tgtaatccgagaccatgctggccaacagccaagatggcgccactgcactccagcctgggcacatccatctcaataaataaattataatataatgaaaaaaatgtgttcaaaattgttgaatgaatgaatgaatgcatgaagaaagggcgctgagctcggccgctctcagctccggatcaggattcgcgcctgggtccttaggacgacgccgcgtggtgac

SEQ ID NO: 5575 - DNA, 222 bp, Homo sapiens
  source 1..222: mol_type = other DNA
tgtaatccgagaccatgctggccaacagccaagatggcgccactgcactccagcctgggcacatccatctcaataaataaattataatataatgaaaaaaatgtgttcaaaattgttgaatgaatgaatgaatgcatgaagaaagggcgctgagctcggccgctctcagctccggatcaggattcgcgcctgggtccttaggacgacgccgcgtggtgacgt

SEQ ID NO: 5576 - DNA, 250 bp, Homo sapiens
  source 1..250: mol_type = other DNA
tgtaatccgagaccatgctggccaacagccaagatggcgccactgcactccagcctgggcacatccatctcaataaataaattataatataatgaaaaaaatgtgttcaaaattgttgaatgaatgaatgaatgcatgaagaaagggcgctgagctcggccgctctcagctccggatcaggattcgcgcctgggtccttaggacgacgccgcgtggtgacgtcatatccgcctgggcgtcacgcttcgtg

SEQ ID NO: 5577 - DNA, 470 bp, Homo sapiens
  source 1..470: mol_type = other DNA
tacacaactcatttttgtgcttgcataaatgtaatatggttttgtttccaaacagagcacttagattttaaaatctatgggagatgttttgggataaaaaaggcttactttttttatttaacacttaatgccgaaggcttccaaatgctcctaaggtaatagtagggaactagtattggattgaatgaatagtcttccattggtgcctgcatgtttgaagactgaagcaggctaaaagcctgtctgaacctgccagtgctgaccctgcagcactttcagcatatgcacatgagaccgcgctacttaggagggccttgggatgtcaatcctttgcatttgaatgaagactttgcaaaacacacttggaaatacaattgtacatggagttttgactaggaactaaaatgccagggccaggctgtgtatttctttcccaggaaattagctgagaagttgttttagcttctgca

SEQ ID NO: 5578 - DNA, 377 bp, Homo sapiens
  source 1..377: mol_type = other DNA
gccaagatggcgccactgcactccagcctgggcacatccatctcaataaataaattataatataatgaaaaaaatgtgttcaaaattgttgaatgaatgaatgaatgcatgaagaaagggcgctgagctcggccgctctcagctccggatcaggattcgcgcctgggtccttaggacgacgccgcgtggtgacgtcatatccgcctgggcgtcacgcttcgtggggcgggacgtttctcgggcccagctgtggctgctgccggggagccccaagccttggcgggtccaagccttccaaagagcggcggttgtctgggagccgtctcagttggccgcgacccgggcgcatgcgcggggcgggcggtgcgccttgggta

SEQ ID NO: 5579 - DNA, 455 bp, Homo sapiens
  source 1..455: mol_type = other DNA
gccctaggagagaccattttatagggtctccagttcttagagcttgggtctgagggttctggggcccaagacctccaattatggggtccagctcttaggtgttcaggcctcaacatcctaaaggccctttgaggcctggtccctgaagattcctggatcccagggctcaggaccaggcgtctctggatctgaggatcctgttccctggtccgaagcccggagctaagggcaccgggtctgcggtgcggctgcgaggagcagggaagcgcaggcccatggcagccgcgaggcggaggagcgggccagcgggcggcagtgctggcggcccccacacgttctgcgctgggtcggcgctaggactccggggcggcggccgtgggaagggcggcgctaggaccccgcgggcccggcggcgcgtggggcggcgcgtgttgacagcggcggcggtggaaccg

SEQ ID NO: 5580 - DNA, 542 bp, Homo sapiens
  source 1..542: mol_type = other DNA
tccttagagctgtgagcccttaaaagggacaggaattgcccattcagggagctcggctcttgagacaagagtcttgcccatgccggaatccacttctgctttaggaagacagtcctaaattaaaatatcggctcatttaatcaatttctgcttcagtttaaccgtcttcaaaatggagataataataacactaattacccaagtggggtactgtgagaatgagctggctcacagtaggtgcttaatgcaatcaatgaaagctatgatgtgccagcactgtccagggaagactagactcactcatgaagtgttaagttccccatcagtagagcgtgtgcaagcacttcttggtgcccaaaggattccagcacccacaacaggttaactcttacgtgtgcccagcgggcacggccacccacacgccacctcagcccggccccgcggcccctcacccggtgggcgggtgggcgggtcacgcagccggcgcgccttgccattggcccgcgccggtggaggcggggcctgctcacgtctgccggccc

SEQ ID NO: 5581 - DNA, 277 bp, Homo sapiens
  source 1..277: mol_type = other DNA
acatatgaataagaatatgtggtatttgtctttctgtgcctggcttatatgaacataagctgcaaatgacaggatttcattcttctttatagctgaagaatatttcattgtgtatgtataccatattttctttatccattcatccatcgatggacacacaggtcaaacataggagtgcagatatctctgacatactgatttcctgagaaatgtctattcatatattaggtaatcattacctggggacaggaggtaatgattacctcctcctgggtcc

SEQ ID NO: 5582 - DNA, 523 bp, Homo sapiens
  source 1..523: mol_type = other DNA
tcgagctcctccaggccccagctgagcttctgggcccagcagccctttgctgtcttgcccgtcaggccggaccagaccgtcttgccccggtggccccgggggcttctggcaggaggagctctggccgcaggtcggggtccaggtcttccgtatctcctaaacccccaggcctgagatatagtgcaccacccctgaggacgcagtgggcctggggttgggcggaccccaggctgcgggcggagcttcggagcggagcctaaggggcgggactggggcttcgggggggctgcggtcgtgtggtcttgaccgcgcggctccgactgcgctggctgagttcctcaggccgcccgctctctggcttccagcccgcgctgccgttagggggcgcccgcgctcgtggcgccgcggctctgctgggaaggcgccgcccgcgccgggcagctggagccgcaactccgggcgcgggctcagtcgtcccctctgccgccgccgccgccgccgtcgccgggcgcgggctcgcttg

SEQ ID NO: 5583 - DNA, 231 bp, Homo sapiens
  source 1..231: mol_type = other DNA
tgaaatggggagccgcatctgactttccaaggtggctttcacatgaggaccatctcaggggagcctattaagctcgtgtgatattaacagcttgagtgctttggtacaagtagtgtcaaaggaatccctggctttgagatgtaagggctcggcttgagagcagacaagggcttgagagcagacaagggcttgagagcagacaagggcttgagctatgtgggaggagagaag

SEQ ID NO: 5584 - DNA, 172 bp, Homo sapiens
  source 1..172: mol_type = other DNA
tcattgcccatggtcagtgatatgaaatggggagccgcatctgactttccaaggtggctttcacatgaggaccatctcaggggagcctattaagctcgtgtgatattaacagcttgagtgctttggtacaagtagtgtcaaaggaatccctggctttgagatgtaagggctc

SEQ ID NO: 5585 - DNA, 333 bp, Homo sapiens
  source 1..333: mol_type = other DNA
gaacagccaggcaaaatgccgtagagtccaggtctctcttggagaaaagtcctatatgcactgagtggctgctgaaggggctggtgctggagccagggccaacacatgagcctggttccaatgacattcaaggtatcaggaaaatgtgtacggagtttctgacccattcgtggataattaagaactgggaagcttggcttcccctcccatggggaagtgctggaatcctgagccgccttgctcagaacaaagcttggcgtgtttctgcaccaagtggaatatctgttactatagtaacagttcctttttattgataccagaataaacaggaat

SEQ ID NO: 5586 - DNA, 371 bp, Homo sapiens
  source 1..371: mol_type = other DNA
tgcaatgttaatagaccctgcttcataggattatgaagattaaatgaagcaaacatgagtttttgttttagcttcttgttggcccgagtccagtgtatactgtatagtgtttgttctgcacctaacctcacaaccatgtgaggaaagtactctggttattccgattttacagatgaggaaactgagtttgcttcagaaccccatgctgggaagtcaggacactgtgttctcgccttggccctggcctcggggctaggagtcctcactcacccgcgccctgcctgctacctgggcgcggacacctgccctggcccctgcccggcgttcctcgcccgcccctccggccgccgccgtagggtgggacttggggc

SEQ ID NO: 5587 - DNA, 290 bp, Homo sapiens
  source 1..290: mol_type = other DNA
tggccagccctgtgccatgatggatgtgctcccatccagtgactcagagagtcagggaaggcttcccagaagtgatttctgcaaaggcccggggctgctccagcaatcttcccagggatgctcagggaatgctttggaaatcattctaaccttccaggacgatgcaagaattcaattcatttcctaggcctgccattgaaaagagaggtggcttgcagtgattcactaagcggacttagccatgctaggctggctaggtaagcatccagggcaatagacttttctcctcg

SEQ ID NO: 5588 - DNA, 209 bp, Homo sapiens
  source 1..209: mol_type = other DNA
gaagctgagcccctctcagtgcaccttgggtcctaaggagagagaagggagacaaaggctgcattcgtgatcatcagctgccccacacctcccagcgcctggggaggttgtccttgccaagggggaacaggcatggcccttctccccaggccccaggcaagactttagactcatttcctgcgggcagagcctgcgcagggcaggagcag

SEQ ID NO: 5589 - DNA, 520 bp, Homo sapiens
  source 1..520: mol_type = other DNA
gcccgggtgctaagtccctcattgcccggggccagcagggctggccggctgctccgagtgcggggcctgccaagtccacgcccacccggaactccagctggcctgcaagcgcggcacgtagcccgggttcccgctcagctgagggagtgggctccagccttggccaacccactcccagggagcaagcgagggctctgaggactgccagcatgctgtcacctctcagtgcaatgactttggccaagccatttaaccttctgagccacagttccttagccaagatctagaaactaaataaagtaacttaatagttacacttaagctctcaataagttattattttctacaaaaaaatcttggcttcctagggtcttctgaaacaatgaatgtactctagaagagtccagtacctggtatagccctagccaggagtcccgcggttgcctgggcaacgctacgtcaccgcgcgcaggcgcccagtgggaaccaatgggcgcggccggaacgcgggtggcgctcg

SEQ ID NO: 5590 - DNA, 446 bp, Homo sapiens
  source 1..446: mol_type = other DNA
aacaaccaccttgtatagtgcttgtggtgaaatattcttccctataaggaaggccacagttccgaggtgaagatgtcattgtacaaaggaactttgttctttaaattcagcaaatatctttttaggatttagagtgtgccaggtaaaaagtaagtctttattgtacacttttaagaaatggacattttgattgcatagttggagatattatatcttttttttttaaaagcaagttttggtaaattgaaaagctttataagtgtataaagaaataccatattgtacttatatgcattacaaattaccttttacattttatttttatttttatcaaagcagtgtatctacattgtttaaataaaacagcattaaatagcaaatatttaaaaactgcaacataaataatgtacttatattattttttcctaatttatcaattttagcaa

SEQ ID NO: 5591 - DNA, 364 bp, Homo sapiens
  source 1..364: mol_type = other DNA
catttattgtaaaattaattttacttttcatacgtctgaatcaatgatttccagaatacatcaataatgattttggagttcaattattgaaaatacggtgtatttactatgtgctgggcacttttcttgcattctagtacgtaaattttatacaatgcttaagtctgtgtttctgagagacacataaagaattcgttacacgtgaaaagaatcatgtttctttttctagttagaaaaagccaaagattgtgcgatttatgccccaaacccccttgtaaggggattctcaccgcgtaggcgcatgctctgcgcgtattggcctccgctcctgtccccagacaagcggccatcttgggtcccgccc

SEQ ID NO: 5592 - DNA, 309 bp, Homo sapiens
  source 1..309: mol_type = other DNA
ccgtagtcccagctactcgggaggctgaggcaggagaatcgcccgactgtactccagcctgggcgacggagcgagactcagcgttaagaatgtaaaatagggcgctaaagaagcagccgctccccgggtagctgccaggaaatcagtccggccccgcggcgctgctttcaccctgcagggtgtaagaggcgcacttcctgcgccctccccgcggccaaaccggggtgcgggaaccccatcgtggcgaagggctagatttcgcaatcctgggatcgacattttccccagccttggactgggccaatgaaa

SEQ ID NO: 5593 - DNA, 474 bp, Homo sapiens
  source 1..474: mol_type = other DNA
taaagaagcagccgctccccgggtagctgccaggaaatcagtccggccccgcggcgctgctttcaccctgcagggtgtaagaggcgcacttcctgcgccctccccgcggccaaaccggggtgcgggaaccccatcgtggcgaagggctagatttcgcaatcctgggatcgacattttccccagccttggactgggccaatgaaaggccgctcggctttgtttcccggcgccgcagacggtgagcctcaccgctgcaaatgccagcctccccctttcccctcgccagggcgaggggcccctcaagtccgggatccgcgagctgcgcggaggatctcgccagcaccgtgcggcgtcttttaagagctcgcgcaaggcgggagccaagcgcggctgctttaagaacgcggagagcgcgcgcccgccgccagctggcccgggctgcgcgcccccgccgccaccgcgcgccccctgttc

SEQ ID NO: 5594 - DNA, 368 bp, Homo sapiens
  source 1..368: mol_type = other DNA
gaagggctagatttcgcaatcctgggatcgacattttccccagccttggactgggccaatgaaaggccgctcggctttgtttcccggcgccgcagacggtgagcctcaccgctgcaaatgccagcctccccctttcccctcgccagggcgaggggcccctcaagtccgggatccgcgagctgcgcggaggatctcgccagcaccgtgcggcgtcttttaagagctcgcgcaaggcgggagccaagcgcggctgctttaagaacgcggagagcgcgcgcccgccgccagctggcccgggctgcgcgcccccgccgccaccgcgcgccccctgttcgcgaaggcgcccttccttcccggggccctggaag

SEQ ID NO: 5595 - DNA, 422 bp, Homo sapiens
  source 1..422: mol_type = other DNA
tcctgacgcaagagctacgttttatgtaaatattctacgaggagaaaatttaaaaaacaccttggattttggagtcctagctctttgtcttttaccagcagagtataatttataaagaaaacaactttacctctctatacttattttaaattaacaaccaagcttgtctccttggctgtcaaaggcaggggctcttgctgctctgctcagtataagacgcccaggttgaataaaccgactgtaaactcgactcactttagactactgtgcctccagcttctaagaacccagcttcactctctgaaactctttcaacatatgcaggtctcactttaaaaggtcttgaaagggtgcggtgacgtcaccgcgcgccgcgcgtgcgcaaatatgaacgtgaccacgccctggcctgcgctaaggcc

SEQ ID NO: 5596 - DNA, 296 bp, Homo sapiens
  source 1..296: mol_type = other DNA
ctctttcaacatatgcaggtctcactttaaaaggtcttgaaagggtgcggtgacgtcaccgcgcgccgcgcgtgcgcaaatatgaacgtgaccacgccctggcctgcgctaaggccccggcgtcggcgcagtagctggtgccttcccggaagggctcagaggacagtgggtgggtgccctgactgcctgacggccgcgcagggccttgcaggaccgcttgtgtcaatctttagacaatctttatagagtgcatagatgtttaatttcataaaatttaggaaagcttcatttcagga

SEQ ID NO: 5597 - DNA, 382 bp, Homo sapiens
  source 1..382: mol_type = other DNA
tgcttttgcataaattaatatttccccatcacatcctaatgaggtaattatcatttgcgcggcccagctcggctgcggacccaggggccctttgggggcgccgcgtccgggaccctccgccctccccgcgtcccccagcaggcgtgacccgctcgcactttcccgagaggagcgcgggcgccagtgcggtggtggcggcggccggcaggcgcgggggaacacaggggccgctacgggagccgcgccgccgcccatgtcattccacttcaagtgacttcatgtgatgtcagctgaatgtaaaagacagtgatctcacgtgtttgccagagacacgcttcccagcacgcgtggcagaggcccgggtccagggggggaaagtccc

SEQ ID NO: 5598 - DNA, 345 bp, Homo sapiens
  source 1..345: mol_type = other DNA
ttctctttattttagaaaaacacaaaacccgggcagaattcagctcttgtttcaatctgctccttaaacaggtggagatgggaccttctcaacaaatcaacaattctgatctattaggatctccgagagctggccaaaagctggaggcgcacctgcgcggcgccgaggcccccgagatgccggcgagcggccttgcttgcttttgcataaattaatatttccccatcacatcctaatgaggtaattatcatttgcgcggcccagctcggctgcggacccaggggccctttgggggcgccgcgtccgggaccctccgccctccccgcgtcccccagcaggcgtgac

SEQ ID NO: 5599 - DNA, 250 bp, Homo sapiens
  source 1..250: mol_type = other DNA
cgtgcgggtcgcaggtccccaagcctccaccgagccagaatggagggagggttaagagaaagcattccggtcgaaacaccaatccattcaaaatttgattcacttttattttaattagactaagaagcctggggaaaggagaaacagcccgctcggtctccctcccccaagaactttttgtccgcgggaggggaaaaggactgaggctctgaggacgctccccaatcggcaagatgcctcttcggctctt

SEQ ID NO: 5600 - DNA, 240 bp, Homo sapiens
  source 1..240: mol_type = other DNA
aaagtgatttaaactttaaactcatgctacactactctaggcgtgcgggtcgcaggtccccaagcctccaccgagccagaatggagggagggttaagagaaagcattccggtcgaaacaccaatccattcaaaatttgattcacttttattttaattagactaagaagcctggggaaaggagaaacagcccgctcggtctccctcccccaagaactttttgtccgcgggaggggaaaagg

SEQ ID NO: 5601 - DNA, 408 bp, Homo sapiens
  source 1..408: mol_type = other DNA
ttgttgttgtttttattatattcagcaagattagcccactaagacgtaatctaactgtgttagaaataaaatgagtttgaaaggtacctaaatttcattccctgtttaggccctgtgcccatggcccctgtgctctgctctgcgccactgtccagtcccctgggggaaaatgaatgaaagagccaacaaatagttatttttttatttttatgtatttatcattattattattcatcagaactcacacagatgtctcaggtaaagtgtgggtgtcttcctcctacctggaaaccccttcttcaggtggacagccgtcttgctgatggtgccggagccagagggcaccgggcgcacggctgagcctgcaccaatgtctgtgggccctgcctctggagcgcggctggccaa

SEQ ID NO: 5602 - DNA, 382 bp, Homo sapiens
  source 1..382: mol_type = other DNA
ggggggcgggaaggagaggcacacagacttcctctccctgtgggaaacattgtccacgatgccagtgtgagaacatgtcacctgtggcagcctttgcctcaaggtgctatgatttcggcccttcgaagtagtcgagctgaactccttcctatgaggttttgcaggtaacactcctaccttaatgattatttatggacagcccaaatggggattatgcataacagctatgcatttacattaaaatgagggcaatttatttaacaaacataacaacatttacttaatctatgcaaatctattcgtaagattttataaaattaaaacacaaaattctggctttaaaaaaatctcctagtttgtttttaagcactgcctgctcgtg

SEQ ID NO: 5603 - DNA, 484 bp, Homo sapiens
  source 1..484: mol_type = other DNA
gcgggaaggagaggcacacagacttcctctccctgtgggaaacattgtccacgatgccagtgtgagaacatgtcacctgtggcagcctttgcctcaaggtgctatgatttcggcccttcgaagtagtcgagctgaactccttcctatgaggttttgcaggtaacactcctaccttaatgattatttatggacagcccaaatggggattatgcataacagctatgcatttacattaaaatgagggcaatttatttaacaaacataacaacatttacttaatctatgcaaatctattcgtaagattttataaaattaaaacacaaaattctggctttaaaaaaatctcctagtttgtttttaagcactgcctgctcgtgcaaagcagtcctgcacttccgtgtgggagctcaccatggtggcagccacctcccagaggaagctgctatctgattggtatttctcctcctttgcttcataaaaagag

SEQ ID NO: 5604 - DNA, 183 bp, Homo sapiens
  source 1..183: mol_type = other DNA
actttctaaattctagcaatacttgtaaatggtcatttccattgattggataaataattcagaccaaaattttggagagggaaaaattccacatgaagttcctgttcttcccatggccaggccctttaatgtggagaccctggtggtcttcaactcttaagaagtggcctctccacaggcatc

SEQ ID NO: 5605 - DNA, 132 bp, Homo sapiens
  source 1..132: mol_type = other DNA
attccacatgaagttcctgttcttcccatggccaggccctttaatgtggagaccctggtggtcttcaactcttaagaagtggcctctccacaggcatccattgccatcgactccaccctatagccccgcgct

SEQ ID NO: 5606 - DNA, 708 bp, Homo sapiens
  source 1..708: mol_type = other DNA
acacgctcctggtcgcttcgcgaactcctccgggaggtctcccgcacccgccgagcccaggaaggaagggggcggccgcaggggccggaaccgcgcgacctggaacccgggtgccggccgcgccccgcgcaagtgccggcgttcgagacccgccccagcgcgcgtgggcgccaacttcgcggggacccccagcgacgcgcccccctcggtacccctagtcccgcctctcctgggctcagccggatccgggcgtccccgtccacccctagcagcgtcaccctggatggggcggcggggccgcagtcaccttcccggggaagaagccgggaccccgactgcgggcggcccgcagctcccgccgcacccccgcagccctggcggcgtccgggcgagctcacctggcggctggctgcggcctccggggcggcctctgggcgtgggccgggcgggggctgcaaggggggcggcgggagcccgggctgcagccggggccgccgccggccgccaagcctcgccccaactcgcgccggccgcggccgcccccggggagtaccgggagcgcggggagcgcgggtcccgcggcggcggcggcggcggcggcggcgcggcgcggcgcggctcaggcgtcggagcaggcggccgcgggcgccgccgcctcctcctccatggcagtttgacctccgccgccgccaaccgccgcctcagctt

SEQ ID NO: 5607 - DNA, 558 bp, Homo sapiens
  source 1..558: mol_type = other DNA
ccctatagccccgcgctgcctccgggagagcggacggggaaagccgagggtctccgaggggcgctcgggctctggcggccggggaggcccggggctccggggactctggcgaagaggccggggaggccgaggggttcccggaagcgggccgggaggccaggggtctcaggggaggcccagcgggccgtgcagcgggcgcgtgtggcggcgagcggggcctcaccgtcagtcacggctcccatggcgtgcgcggcggcggcggcggcggcggcggcgcaagctgaggcggcggttggcggcggcggaggtcaaactgccatggaggaggaggcggcggcgcccgcggccgcctgctccgacgcctgagccgcgccgcgccgcgccgccgccgccgccgccgccgccgcgggacccgcgctccccgcgctcccggtactccccgggggcggccgcggccggcgcgagttggggcgaggcttggcggccggcggcggccccggctgcagcccgggctcccgccgccccccttgcagcccccgcccggcccacgcccagagg

SEQ ID NO: 5608 - DNA, 313 bp, Homo sapiens
  source 1..313: mol_type = other DNA
tctgatgatgcccaaagtaatttttgtctttgtgacaaaagtcaagttcttgagcactaattcttgagagcactgtaatggtattattgaagtcactggtctcacataatatgactaaaattgtacatatttcttgcatttagtcttcttcatcccggatatgaagatgcaagatgctgcacaagacttttggaaagagatgccaatataatttgcagtgacacgctcctggtcgcttcgcgaactcctccgggaggtctcccgcacccgccgagcccaggaaggaagggggcggccgcaggggccggaaccg

SEQ ID NO: 5609 - DNA, 441 bp, Homo sapiens
  source 1..441: mol_type = other DNA
taatttcaaattttcacatcaatttgagaaaatagtaatatcaacaattattgaaagtggtgtcaagtatttttaatgctttaggtatctgtagcctatcgctaagcaatgcttaatttagtgaacaaaatttgaccgaaaacagtattttctaaacatgttttgtaggaattccttatcaactcaagttaaaaatgaatcagatttttacttttggggtgaatgaatcacttccagaaagttccccaggcgcacagtgtgacttccaattgcgggtcgggggcacacatgtgggcggcgtggcgtgcacactgcggccgcccgcaagccgagggcaaagtgccccctgcaccagcctctcccgcgctgccctggggccggccggccggctcctccatagggctccagtccggcggcgggaggcgtctccgcttaagggag

SEQ ID NO: 5610 - DNA, 839 bp, Homo sapiens
  source 1..839: mol_type = other DNA
gccggggaggcccggggctccggggactctggcgaagaggccggggaggccgaggggttcccggaagcgggccgggaggccaggggtctcaggggaggcccagcgggccgtgcagcgggcgcgtgtggcggcgagcggggcctcaccgtcagtcacggctcccatggcgtgcgcggcggcggcggcggcggcggcggcgcaagctgaggcggcggttggcggcggcggaggtcaaactgccatggaggaggaggcggcggcgcccgcggccgcctgctccgacgcctgagccgcgccgcgccgcgccgccgccgccgccgccgccgccgcgggacccgcgctccccgcgctcccggtactccccgggggcggccgcggccggcgcgagttggggcgaggcttggcggccggcggcggccccggctgcagcccgggctcccgccgccccccttgcagcccccgcccggcccacgcccagaggccgccccggaggccgcagccagccgccaggtgagctcgcccggacgccgccagggctgcgggggtgcggcgggagctgcgggccgcccgcagtcggggtcccggcttcttccccgggaaggtgactgcggccccgccgccccatccagggtgacgctgctaggggtggacggggacgcccggatccggctgagcccaggagaggcgggactaggggtaccgaggggggcgcgtcgctgggggtccccgcgaagttggcgcccacgcgcgctggggcgggtctcgaacgccggcacttgcgcggggcgcggccggcacccgggttccaggtcgcgcggttccggcccctgcggccgccc

SEQ ID NO: 5611 - DNA, 677 bp, Homo sapiens
  source 1..677: mol_type = other DNA
ctgcggccgcccgcaagccgagggcaaagtgccccctgcaccagcctctcccgcgctgccctggggccggccggccggctcctccatagggctccagtccggcggcgggaggcgtctccgcttaagggagccggccgggtgccgccgctcggacggacgcgcggacggaaggaaggagcggggcagccgggccgggcccggggatgcaagcggcgctggaggtcctggggtgcggctcgggcttccccgcgcgggctgccatggtggggcgcggggttggagccgggccgctccggcgctggcctccgcgccaggtcctctgagcagaagcaggcaggggacccagcgccgcggtggcgggccgcctgctgcccgtcccctccctcgggcggccgcgggagtcgaaagcgaaagctagcccgcgccgcggactttgagcccggggcgggggggggctgggcggccatgggggcgctgtcagcgtgccccacccggtccgcgggccgcgcacgccgccggaactccctggcgcaacggcctccccttttttttgttacattgtaggagcggaaagaagcgggccgcggatgacgtcaggggggagccgcgccgcgcggcggcggcggcgggcggagcagcggccgcggccgcccggcagcagcagcagcagcagcagc

SEQ ID NO: 5612 - DNA, 760 bp, Homo sapiens
  source 1..760: mol_type = other DNA
ggccgggcccggggctggaggtcctggggtgcggctcgggcttccccgcgcgggctgccatggtggggcgcggggttggagccgggccgctccggcgctggcctccgcgccaggtcctctgagcagaagcaggcaggggacccagcgccgcggtggcgggccgcctgctgcccgtcccctccctcgggcggccgcgggagtcgaaagcgaaagctagcccgcgccgcggactttgagcccggggcgggggggggctgggcggccatgggggcgctgtcagcgtgccccacccggtccgcgggccgcgcacgccgccggaactccctggcgcaacggcctccccttttttttgttacattgtaggagcggaaagaagcgggccgcggatgacgtcaggggggagccgcgccgcgcggcggcggcggcgggcggagcagcggccgcggccgcccggcagcagcagcagcagcagcagcagcagcagccgccgcctccgcagccccagcggcagcagcacccgccaccgccgccacggcgcacacggccggaggacggcgggcccggcgccgcctccacctcggccgccgcaatggcgacggtcggggagcgcaggcctctgcccagtcttcctgggaaggacggtgagtgtccacgccctcctcccctgtgacccgccccctcgaggggcagagggttgcggaacgcggaggtgcccacacctaccccgtgcgtgcgtgagtgtgcgtcacactcctggcca

SEQ ID NO: 5613 - DNA, 505 bp, Homo sapiens
  source 1..505: mol_type = other DNA
ttctgtagaagaatcttttgctgcttcttttgacatttaaaagagttcattttgaactatcaggtatctaagtcattattatcataaaactcagatcacttaggtagttgggattaggatacaccccattctgtgtcatttgaattctttttaaactggacaaatgtggatatgaaattatacatattttacaaatatgcacagaaagtgggttcagatattttgttactagatttaggaaggaaaagtatgcttaggaataataaactttttttgaaaagcttagcaactgcctggaaaaatgctgcaggtattttatagaaatgtttaactttaagacctttaggtctaccgagacttaaaatgtaggtttttaaataaatcatgtaagttttgtaatatacctggattcagaaaaaaaattcacaaaatataagtaatttgcattttagcaggttaaacttataaattccatcttcgacaagttgcctttcctgaccatatt

SEQ ID NO: 5614 - DNA, 479 bp, Homo sapiens
  source 1..479: mol_type = other DNA
agaaaacctgattctccagtggatagatttattttcagctaagtacttaaccatgaattacttcctggtttaaaaaacaggcgttgattcactggaaaatttcagcacagattcttataagataaccctagaaacattcgaaaaaaaagaaggtacaacttgtttcttaagattttgctattttgaaaatcaagcagagctctgcagatgaatgaataattttcctctcttgataaaactctttatgctgagatacttcagaaagaagtctgctgagtttaacataccttcacttaacgacacgtgttttaacctgaatatattgatttcagggaattcttccagaattacatttgagattcgcctaaaacatgatgttttttttctttgctttcgttttcagaaagaagattcccttctctgtccaaaagcaaaggaggcagtccagtggaatcaagttccaagttgttgaaatcacc

SEQ ID NO: 5615 - DNA, 585 bp, Homo sapiens
  source 1..585: mol_type = other DNA
cagaagtacagtacagcaagcttggtgtgtaagtcactggccagcttaacagctgttagagcactgactccactgaacaaagtttatacaacctcattgattcaaatcttctagataggaaccaggccagttgttagcttcctaccagtattttcagttttaccaagcaaaatgatagtgtcagtaagattccaagattcatatctttgttaatggcacaggtattccctaagctcctgtcatagaaacatttttcaaggactggagaattatttatttaattgagttctcataagtctttagtgacatttagaaatattttgatgaatcctttcgtacaaatgagaaattgcattgcattctcatgtgtaaaattttttgaaatgatgaaagaccaggcagacttaatcagtatgaaccttactaacaaaactcataaggagccttccaagaggctggccctgtgcagcgcttgggtaggcccaggctctatcctcatccctcgctcaccattcacctgggggctgctgaggcactcaggcactggttttctcacttcctcctgtgacagcatgacaccctctg

SEQ ID NO: 5616 - DNA, 302 bp, Homo sapiens
  source 1..302: mol_type = other DNA
gatcaaaggatcattgaacttcataagaatctcaaagggactcgtgaccccaaaatgctttaaagaatgctgctgttacaaaagtagggacctctacttgctgttccttgtggagctgccattaaaacaaaaataactggttgggtaggcacccccaagagtctgttcatggcctgtgccacaattcacacctgtgtacctggaataccttcaagcataagagccttttctctaagttagactttgcaatgattgtcttgtttagaatcaatagagtgcagtgtacaaagaggacaagttac

SEQ ID NO: 5617 - DNA, 331 bp, Homo sapiens
  source 1..331: mol_type = other DNA
tccaggaataatttgggaaaagaagctgtcagaagtttctaacttacaaactggtttgaaatttttgatgcccagacagcaagtataaatcattttggaggcttacttttcatgatacaaaagcaattctgtgtgatttttttttttaagaagaaagaaaatgcaagcttatagggagaaaaaacttttttcaagatttccaaagagatgaaattttcttaatccttttaagttttcatagtaaacagtatggcagtacctggtctatttttaaaagtcaccttttaaagtgacattattagatacacttaaatgtttcctgagtaacagg

SEQ ID NO: 5618 - DNA, 575 bp, Homo sapiens
  source 1..575: mol_type = other DNA
aatttcttgttctattataaatatggaagtatccctatttcagaagacatattttgttaaaaatgaattgtacatatttaaatatgtatttttgcacaggtttgagatcatctagtatttatttattaattaataaaagtaaatacctttttataatttgaagtggttcattacagttttaagggcccgatagactacatgtaactaagtgacacactgcttttcttggtttaaaacaaagtgcctgaaactagttttaagcttagacagaatctctttaaaaagacttgaatgttcagttgaacttttccacctaaatattgtttctaaaattttaggggcggagttgaaaaccaccaatgctggtaattttataaggtattttaaaattaagacctcttggttggtggcaccaagggttacagatctgttattcactcatgaaatacaatttaaaatatttaaaatattttgtattccaaaaatataatacaaagaagtattgaaaaaaatgtataatttgaaaaatgtaacttataagggcagctgtcttcctgcaagagttctgttgccaa

SEQ ID NO: 5619 - DNA, 411 bp, Homo sapiens
  source 1..411: mol_type = other DNA
accagcctgacaagattgtgccactgcactccagcctgggtgacaatgcaggcatgtaatgatttaatttatgtgtaaacaaaacgatgatgtttttttttcttcttaaaaccgcagaaagaatgtgaaataggctaattgattttaatcgacaaactatggtgattgtttttattaatgctgttattacattttcagttttcaaaaaattttaagctcccatcagttacaaacggaaagtcccactctgggactccgcagggggccttgagggtggaaaagcccccgtgaccacacaggggcgcaggcgcccaggccgggtgaggcgttcccggaggtgtccagcagaggacgctgccggcggagacgggaccggaagccgggccgcaggcggccgggcgtattcgccga

SEQ ID NO: 5620 - DNA, 415 bp, Homo sapiens
  source 1..415: mol_type = other DNA
agttacttcagggctctccaaatgtatagatggtgtgactttagaaaagtcctttctccagttgtctccattttctaatctgtaaaatgaggagatggctctctgagggtctcagggtcttcagatgccctgggaaactcaccaccaaggagtcacttgtgctttatttcgaggtgcacaaaaacttgacacagcatttaattaaaaaaagagtgctctgattccactcctaggttggtgcagcatataatctgaaacaggattgtgcccagatctgaaccttggcacctaagagcacagcttttaagaagaaaaaaaataggcatgtgtctttaaagcctctcttcttataatgatttggaaggcaaggctaatttacatgtaaataaatctcacctgacatcacagcttcatt

SEQ ID NO: 5621 - DNA, 394 bp, Homo sapiens
  source 1..394: mol_type = other DNA
tgccaggccatgactttgtgcctgttataataactaactctcaacaatggtgtgagataaggactcttgttacatcatttaaaaaaattattatcgataacgcaatggcttcaaagcttgaatgcaatgaatcaacacttactgcatctacactagattctaggcatacaggtctgtacgaatttgtcaaaactggcagaaggtgaatttactgtatgtggattataccttaaacaaactctcccctaccccagctacagcggcaggggggtgtgaaacggtccctgcccctaggctggggacaagggtccggagcgagccggggactgcaaggcggagacagccaggccagcggccgccgagggtgcccgcccaggctacccgccctcccggc

SEQ ID NO: 5622 - DNA, 457 bp, Homo sapiens
  source 1..457: mol_type = other DNA
ccctggtagtgaggggcgccagagtccccgccccttcttgctattttgcgaaattttcacccatttctaaaactcttgacttggggtgattaaatcgagagcggagctcaggtgccaaatctcttctaggaagggaaggcgctccggcgctgggccactttcacttggcgccaggaaagggagagaactttccctgctttccctccccggggcagggaatctcagaaaaccccacttcagcgaggtggcggggaccaggaacagctgccccggcgctggtgacgcctctggcctccgcctcttgcagccggcagggcctccggctgcgagtcccgcacgggccggccgaggaggggacatgggaaggaggcggtccccgctctcctcctcttagaggcgtgcaccgggggcatttgagaggctgtggacccgcggcccccccgcctccgccccccca

SEQ ID NO: 5623 - DNA, 548 bp, Homo sapiens
  source 1..548: mol_type = other DNA
gcgccaggaaagggagagaactttccctgctttccctccccggggcagggaatctcagaaaaccccacttcagcgaggtggcggggaccaggaacagctgccccggcgctggtgacgcctctggcctccgcctcttgcagccggcagggcctccggctgcgagtcccgcacgggccggccgaggaggggacatgggaaggaggcggtccccgctctcctcctcttagaggcgtgcaccgggggcatttgagaggctgtggacccgcggcccccccgcctccgcccccccactatcccggccagcacagggcgcccggcgcgcctcggagcgcaagttcctcgccttctcctgcccgctcgctgggcattatgcggccaagcagccgacggctcctcctgcggcccgagcggctcagctctcggcaggcggcggcgttgctcagccgagcgcagacgggaccctcgaaaagttggcggcgggcgccgggctccgcgcgctctccacggccgctgcctcgcgtcgccgccgcagccaaggagggcaggag

SEQ ID NO: 5624 - DNA, 347 bp, Homo sapiens
  source 1..347: mol_type = other DNA
tatacagatagaatctgtattttgcattctaactcagaaatgattacttttgaaaccccaattgctcctgacttccctagaattgaggagatgatgactggcgcaaaatccgtctttgttttggtattgagctcatccaaataaagaaagcatttcctcttccgaaaggcagaggaaaaaaaaagaaaagaccaaaaaaatttttttaattttaaccatgtactcgtttcaattgacaagtgaaataacctggacttaattgtaagttaagtctctcttaatccagaagagcatttgagattctgtcaattcaattcccaggccgctgaggtctgtgaatttctttt

SEQ ID NO: 5625 - DNA, 535 bp, Homo sapiens
  source 1..535: mol_type = other DNA
agaaggaaggcagtggatagcgtcctttctttgacagtctggaggcattcactctctatagagaaaacttacctttccaaagctagaggtctctctcttagagaatcttttaaagaggcctccttaaaaacagtgagttttaatgacagaagcagcttgattctgagtcagattgtacctttgattcttgaagtgtcaattccttgaaagtggatccttcaaattcattttaactccaaaggaagacaattatttcaaacataagagttattatctattggaattccttccaaagggacttcgggttgtatccctaaccaagaaagggagtccgcaaatggggcaaccctatttcccgcctttccatgtccaggggctcccacagggccatgcgggtgatggggacctgacacgccccagcagggagaggctcgctcagtccccgccccctccgcaggtatccggcagcctctaggagcccgggctctgaaattgttgtcatgtgttagaaatgtcgccagtaatataaaaggcg

SEQ ID NO: 5626 - DNA, 273 bp, Homo sapiens
  source 1..273: mol_type = other DNA
attaaaagttgtttcattcggaaaggtgcagtggctcacgcctctaatcccagcactttaggcgggtggaagtcaggagttcaagaccagcctggccaagattgcaccactgtgctccagcctgggtgacagtgtaagactctgtcgctagcaaaatattcaatatttgatgtcttctgttattttaagaagcatgctccatgaatcgtaagaatttcagataatcataagccacaggaggttactgtgaagtcatctgaatgagaattcaga

SEQ ID NO: 5627 - DNA, 455 bp, Homo sapiens
  source 1..455: mol_type = other DNA
ggcggcgaaccagccgggctgggtgaccgacagcctggccagccactggccgagggcgggcgccagggtgagtgtggcagcctccccaacccccacctgttggttttcaaatcgggtttcaaaagttgcaaactcccggcagccggaggggtgggccggccggctggcggccgcggggcgcatgcgcgcgcgtctcctgtcgccggccgctgcgctccgcggcgcggaatagggccccccgccaccgcgtcttcagggctcccggcaactggctggaagggcttccctcaccctcagtaacagcctgccagcgaggagtggactctggtccgggagagcacgggcgggcgccggacgcgggcgcctgtgcggggctcgcggggaagccccaggggagcgaggctgccaagtttctctctcctgttttgtgatttggggagagatgtttctcccat

SEQ ID NO: 5628 - DNA, 495 bp, Homo sapiens
  source 1..495: mol_type = other DNA
ccgtccccctcccccgggtcgcagagaccctggcagaccccgcgccaggcagcgcagggcaggcagggaggcggcgagcgccccggggcgggtctcgggggtttcagtgggacctgcggcaaggggggcggcgaaccagccgggctgggtgaccgacagcctggccagccactggccgagggcgggcgccagggtgagtgtggcagcctccccaacccccacctgttggttttcaaatcgggtttcaaaagttgcaaactcccggcagccggaggggtgggccggccggctggcggccgcggggcgcatgcgcgcgcgtctcctgtcgccggccgctgcgctccgcggcgcggaatagggccccccgccaccgcgtcttcagggctcccggcaactggctggaagggcttccctcaccctcagtaacagcctgccagcgaggagtggactctggtccgggagagcacgggcgggcgccggacgcgggcgcctgtg

SEQ ID NO: 5629 - DNA, 539 bp, Homo sapiens
  source 1..539: mol_type = other DNA
tctctcacgcccccgcgggcgccaggacgcagggcatgtccgcgcccggcggggatccttatctcctggccccggagtaggtccgcaggcttctcggccctgccaggaacttgaggccggggcagattcccaaagtcgtgtgacccgcacagggatcccagttggggaaccggaggatcccaccgtccccctcccccgggtcgcagagaccctggcagaccccgcgccaggcagcgcagggcaggcagggaggcggcgagcgccccggggcgggtctcgggggtttcagtgggacctgcggcaaggggggcggcgaaccagccgggctgggtgaccgacagcctggccagccactggccgagggcgggcgccagggtgagtgtggcagcctccccaacccccacctgttggttttcaaatcgggtttcaaaagttgcaaactcccggcagccggaggggtgggccggccggctggcggccgcggggcgcatgcgcgcgcgtctcctgtcgccggccgctgcgctccgcggcgcggaata

SEQ ID NO: 5630 - DNA, 306 bp, Homo sapiens
  source 1..306: mol_type = other DNA
ataagaataattataagaataattctagcagtgttatagaatctgtaaaatgaggacactagtgttctgtcaatcacgtttacaaggtatttgtttgtttaataaagacaggtccactattaagtacttaataacgtgtgctttgaggtgtacacatgagtacaacagcgatttttttctatatctttatttaataatcttctgataatgagttaatttaatataaactcagataaaattttttgacaaaactaaatatatccgattaggatcccgaatcgtgcgttgttgtggttctacgtcacg

SEQ ID NO: 5631 - DNA, 419 bp, Homo sapiens
  source 1..419: mol_type = other DNA
tagctggtattacaggtgtgcactcaggtgatccgcgccttggcctgccaaactgctgggattacaggcgtgagccaccactctccaggctgctcggaagaaatgtgttaagttttaaacctgtgtcttcgcttttggaaggaacctggaaaacggacgcgggtttgcttctaatctgcagtcctgcttgcagccggggccagacagccccaaaacggaagaggcgggggccgtccctccctcccgcccttcacaccttgggtgggaaaagagtgtgggcgggatcacagcgagcgctccaatggccctcgaggctggccacggtggactccggcagccaatgagcccaacgtgggccagcaggcggccgcggagcgcggagcccggccgggggcggggcttgggggaccggccggggc

SEQ ID NO: 5632 - DNA, 381 bp, Homo sapiens
  source 1..381: mol_type = other DNA
tgattggtccattttacagagtgccaattggtccattttacagagtgctgattggtccctttttaaagagtgctgattggtgtgtttacaaacctttagccagacacagagctttacattgattttaggttaaggatagaactggagagcctccaatggctctccttgactcacctgaagccctgggcgttctctgcgcttgtttggccatccagggactgtttgagccccaagaccgcagggctcgggggccctcaggccttgggaccgctcaaagtgaaccggggccgggtgggggacccagggctctgcagccttaagaacgcctgtgcccccgggacgcaggggtcaggcccggcccggcccagaccgcctctgcct

SEQ ID NO: 5633 - DNA, 510 bp, Homo sapiens
  source 1..510: mol_type = other DNA
ttaacgcttgccatctgcagaaggtaaaaatctgctttcattctccatcaacaaggaggacatggacagggtcattggaaagaggagaaagatcgtttcccatttttctcagttcaccctagggggtgagttctcacgtggtctaaacgtgcaagaaacttttcttaaacttggccatgagtctgcgcgggcagacagcggagactctagtgcgttgggtcgctcataccccgaggcacccggggctgccgccgcgccgcccctgccccacactggagcggggttccctgctgcgcctggacccggcgccgcgtcacctcccgaagtggggcgcccgaggggccgcgcagggggtcagggggcgagggaagcccgggcaggccggcgccgctgctggcgcccgcagctcctgcccccacgctcacctgggacccggccgccaggaagcggggccgcagcgctagggctcgcagaagcttcccggcctgcgaggcagaggcggtctgggcc

SEQ ID NO: 5634 - DNA, 740 bp, Homo sapiens
  source 1..740: mol_type = other DNA
tgcatggggaatttcaaaatgtttccaaggaagcaatattatgagaactaccttgattttgaaaacaccataaaagattagacagtatcatctatctttgttcccaggcacctaacacatagtaggtgctttataagtgatttgtgaaataactgagggtatttcagagaattattaatctataaatgaaaactaggtcatcttgtattcatcattgaaatttaggcaaaattatactatatttctgaagaagaagaggaagaagatgttgaacttctgagtgttttccctccccaccccagcatgttagaaggagaggaaaaattttttaaaaaagagctgtgagcatatttcttcatttgatgctgaaaataacatatttttatttattaaacatgttcaaaaagttcagaaggtttttattggacttatgcatatacgcatctatgtcctatattctagtctatttaactgctgaaacaaccagcagacttaaattagtataaacctgacaatatttgtggttaatttactggtaaaaagaacattaagaggtaagaaatggcttatatttcactttccatttactgttagaagtctaactcccactaatactatcagtattttgcagaataatcagtggtatcagtaggacttctaatgtaataaatcaggcaatataatgttacaattcactgtagctgtaatagagggtaatgtcactttaagacatgtgatac

SEQ ID NO: 5635 - DNA, 469 bp, Homo sapiens
  source 1..469: mol_type = other DNA
ccaagctgttgaaaataatgttttcctgcttgtctattatagtcctaaaataattagcgtgcattatgtgcatacatatgatgtatatttttgttttctgaacatcagtttttaataaagaaccaattttcatgaataaagaagcctctctgcctaacagaaaagcatacagttaactggattcttgtgtagaattaatttggcaatatgaaatgcagcataaggtgttgtttgagaaattggacaatatatagcgctttgtagttcctaagatcctcataggtgcagataagactgtcaaagtttcaggtacatattcatccataaatacatatgccacctgtatatgcatattcatcaatgctatctcttaggaggctaagcaatattgcaaattatgttcttagtgagaaatgattacttagtttagaagacagcattgcaattaaaaattcatgactgtagaatt

SEQ ID NO: 5636 - DNA, 126 bp, Homo sapiens
  source 1..126: mol_type = other DNA
tttctgtctttggggccaaggtgggtggatcacctgaggtcaggaacctgaggtcagaagtttgagaccagcttggccaacatggggatttttcacatggttaaagtattctttttcattatgcta

SEQ ID NO: 5637 - DNA, 463 bp, Homo sapiens
  source 1..463: mol_type = other DNA
tctgtgcttcagttatctcatctataaaatagagatcagatgaactaatcccagtaaaatgaataccattaagtgacactgattatcagttacttcactaagaagtcttaccaggctggagtgcagtggtgcgatctcggctctcccgagtagctgggactacaacccagctgtattttatacattaaaaaagaaaagtatttaggtactgcttgcaaaccgctttggaatggtttcgagtgagagccgaacccctcaggtattcaggaagaataccttttgctcagcacctgcggagtggtggccacagcgaggcgctcgggagaggcgcctggaggccggcagtgggggcgcgccgcctgagcaggggtgcgggcggggagaaggccggcccacgtggaccgcggggccaggcagggacaggagcagccgggcggcccggccaatcagcgcgttccgcggc

SEQ ID NO: 5638 - DNA, 671 bp, Homo sapiens
  source 1..671: mol_type = other DNA
ttaatggaacttgtaacaattcttaaacaacattacttttaaaaattacgtaaaaagcatgtaagcctttggaaacaaacttgtttccttatgatcatattatttaacttctggtgactatattcatttgagcatgtttattttgaagtcatcaccttcatataatcagttcaactttagtcactatttaatgatcaactctactgtgctgtagatggaaataattataagcagtaaattaaactccacagagtagcatttgaacttgatgagtttacggataggtaaaactatactgcttttaaaaggtgaacgatgttcagtccccaaatttggaagttagggcgcgctttaacgctctcgctcaaggaggcgcgggctgctgcgatggagatgggcgtccggcgccggcacgtgccgtcggtctttccgctggcggactcgcgcgaacgttcgcgggagtgagcccctccctgctgcgctcgccgggtcgaggccgctcgccgggctgaagccgctccgagcgtcgggccccgcgccctggccctcctgggtgtagtcccggtcctgcctctgcggggcccgagcccgcccacggcgccggctggccaaggtgtcccagctgctccttggcgccccctggcccagctcccgcgcccgaggtttccggt

SEQ ID NO: 5639 - DNA, 645 bp, Homo sapiens
  source 1..645: mol_type = other DNA
ttagaatgctttaacggcctgggaatgcagcccagtaggtttcagtcctatttaagatggagttgagaggcaaaatcttttcaataaaaagaataaattaatactgtaaagtgctttaaaacaatgtttggcacatgttaaacaccacatgttcttgctgttattatttgaaaaaaattccaggtaagattcctaatttagcaggtcactaatggaacttgtaacaattcttaaacaacattacttttaaaaattacgtaaaaagcatgtaagcctttggaaacaaacttgtttccttatgatcatattatttaacttctggtgactatattcatttgagcatgtttattttgaagtcatcaccttcatataatcagttcaactttagtcactatttaatgatcaactctactgtgctgtagatggaaataattataagcagtaaattaaactccacagagtagcatttgaacttgatgagtttacggataggtaaaactatactgcttttaaaaggtgaacgatgttcagtccccaaatttggaagttagggcgcgctttaacgctctcgctcaaggaggcgcgggctgctgcgatggagatgggcgtccggcgccggcacgtgccgtcggtctttccgctggc

SEQ ID NO: 5640 - DNA, 704 bp, Homo sapiens
  source 1..704: mol_type = other DNA
ttaaatatttttatattactgggagtattaaaaaagatatgttttgatttaaactattttgtggtactagttaaatagaactcagctaagagtaagtattcttcacctaaggatgagtctaagatattttagttcatttactttaaatctcatgtttttaatttatagtatgtgttagtgatttatttgaaaattaaagagtactaatatttgagcaaagaagtttaaaaatgaatcttttatcttgcttgtatctttacatattcaaagtaattttcacaatcatgtttagtcccagtataggaaaagaactagatttcatttggctacacttcatttataacattgaactttgtatgatcttagtaatattttgttgattgttgttatatgtatcatcacaattgtctcatctggatgttagaagacactgttaagccataagtgagaaagagactaaattttatatcaagtgtgcttactaaaattgatagccatctagcttggtttttttgctatttagttcaacatagactgaagtgtgagtttaatttttaaaagagatgagtatatacttttatttaaattgtagtgttttcattgttgactcctatggcaatataaatattaaagatgttctgtgtagttattttaaaaattgtaaacaaatacatttttcaggatttggatcaaatattctgcag

SEQ ID NO: 5641 - DNA, 267 bp, Homo sapiens
  source 1..267: mol_type = other DNA
gttttaagtaatatgcacagtgcacattgttaggataattagtccatttggactctcttataagggcactaaccccatttatgagggctcctatgcaccatgtgttccacgagttggacacagttaggcaagcccaaacaagtgtttattaaatattaagagaagtgtgaggcccaatttccctttgcaattattgctggcaaggtgcaagcttttagcacgttcctggaaagcaacgaatctatcggtagccatagcttaagcgca

SEQ ID NO: 5642 - DNA, 612 bp, Homo sapiens
  source 1..612: mol_type = other DNA
tactgttctttataacaactgagaagaatttaaaatcagttacttttgattccaaatatcattcttgcatagaaggagatgtgtgtgtacgtgtatatacatacatttttgaacatgatcattcagattcacagtgtatatttgtatttctgactctagaagaaaataattgaaacttttatcacaatttatctttaggttacttttttctttgtatctaaatatacacatttatctcaggaaaagttttaatcattttgtttccgctgaacttatctaacagaatgtgacatgaaaatattaatgctgatttgttcaaagaaaataataatctaaacggatttagataaatttattattcaagtgagtacttataaaggcaaagacagtgaaaatttccttgatctttgccccagaggaaagctctttcttcacgaatttttcatagaatataccaatattttgtataattacgtattaacatatagtttgtgtaaacgcataatgtattgtctacattttcacgctgcagagcaacattatgcacggtataagattcacctaattaagcgtaggtaattaagattataactcctccccgccctgccgcgc

SEQ ID NO: 5643 - DNA, 401 bp, Homo sapiens
  source 1..401: mol_type = other DNA
tcttttgccaggtacaaaacatcacgttatctatgaatatattgtggtccatataattagaaaacttttgaagtggaatgcatatttctgcccagaaaatgctggatgcagaacaactagttcactgcagacaactgtttgctttaaaatgtaaaaacagaccagcccttctgttctatcacacatagtgactcatgttagtaagacttagttttcaaaagcaatctagctgccaaaatttttctctaagtcagagaacacactcctaggtaaaccttcaaaaaaggtatttcgaaggaggcagcttctctgctgctagagaaggcattgccacctgccaaccgcaaagccgaccgaagctgtcaactctccaactcagctcagctgatcggttgccgccg

SEQ ID NO: 5644 - DNA, 541 bp, Homo sapiens
  source 1..541: mol_type = other DNA
gttgcagtgagctgagatcgcagcactgccctccagcctgggtgacagagccagaccctgtcttaaatatatatataataaaacttgtatattatatattattgtaccctttgtcacacaaataatggcatgtaaaacacactgttttgtactttgctatattgtgtaaccttgtacaaaatgggcatttgtaatttggacaaatgttgcatattgcccgtttgaaaacaaaatcttctcatagtttcttttagccattttcattgatattggcttaatggatacttaataagaaaagcaaataatttaaaatattaaactcacttatagtggaaatccaagacctctgttcagaggcagaccctaagagcttgatttctaccttcaagtgaattctttacttcagaaacaactcaaaatattgtaagttgctttaatatttaaataaaaacaagtggaatcccctatggcaatatgatggcatataggaagataattaattttattcctgcagagattctgtactctgcgcacatagcag

SEQ ID NO: 5645 - DNA, 529 bp, Homo sapiens
  source 1..529: mol_type = other DNA
acagaccaacctatattcattttatatatataaacttttattactttaattttgagaaattccaagagtcctaaagatatgacaatacctgtaaaaccacttaaatagctgttactaatattttgtcatttttcatcctatttttattaataaaagaaaacattactaatgatattcaagtttctattccaatccacatttatattattatatgcacatatatgaaatcatactttgcacaaacttttaagatttcaggcaggggaatgaactgctctctgcctttcatgctttctctaagctgaagtccttcgccttttaatgcttgcagggagcgtatttgctctcaatgcccctggtttttacgcaaaggaaaacacagctgagctgcattgtaactctttggattcaaagcaacttacttcctaggaagtatcaaaaggttcttttctgggaaaatctgccactgagaactttgccctcctctccctgatgggaggaaggagtaggaaattgagttacacctaag

SEQ ID NO: 5646 - DNA, 524 bp, Homo sapiens
  source 1..524: mol_type = other DNA
ttatcttctaagataaaaagaatgaacaccgttcaactgcctgccctgtgccaggtgctgtctgaggcaaggtgcatgagctatctttcagcaaatgaatgaaatattttcctagcaacttcaaacattgaaaataattaaaatgtaataatacttaatgtttaaaacaacagaccaacctatattcattttatatatataaacttttattactttaattttgagaaattccaagagtcctaaagatatgacaatacctgtaaaaccacttaaatagctgttactaatattttgtcatttttcatcctatttttattaataaaagaaaacattactaatgatattcaagtttctattccaatccacatttatattattatatgcacatatatgaaatcatactttgcacaaacttttaagatttcaggcaggggaatgaactgctctctgcctttcatgctttctctaagctgaagtccttcgccttttaatgcttgcagggagcgtatttgctctcaatgccc

SEQ ID NO: 5647 - DNA, 302 bp, Homo sapiens
  source 1..302: mol_type = other DNA
tcaaggcagctgtgagctatgattgagtcactgctctccagccctttaataaaactttaataaataaataaataagattaattatctagtgacttcatgagaactaatgccttcctgctggcaaccacaggaggctgctcctgcttccagcagaaccaaggaaacattcgtggctattcccacgcgcgcgcgcagctgaaatgcagctcccctctctgctccgtccctgccccgcgccctggggaagcgccagggggagtcctcgccggccagggcttcccgtgccccgggagcatcgaggg

SEQ ID NO: 5648 - DNA, 367 bp, Homo sapiens
  source 1..367: mol_type = other DNA
aaactttaataaataaataaataagattaattatctagtgacttcatgagaactaatgccttcctgctggcaaccacaggaggctgctcctgcttccagcagaaccaaggaaacattcgtggctattcccacgcgcgcgcgcagctgaaatgcagctcccctctctgctccgtccctgccccgcgccctggggaagcgccagggggagtcctcgccggccagggcttcccgtgccccgggagcatcgagggccagctgagcttagcacagcttgctcggcgctgcgagcgttctgtgtgccagtcgcagccgttggctggcgggcacccaatcccagggcatgccgccggagcctggccaggacgca

SEQ ID NO: 5649 - DNA, 502 bp, Homo sapiens
  source 1..502: mol_type = other DNA
aacaaaaatccaaagctatgtgattgtgtagttgtgagacaattatttttaaaaatggatttgctttttaaaataaattaattcatagtgtgtagagaaaaattaattcacgggaaatattttctccctccttgtcagctcatttgaagagaatataaaaactcttgttacaaacaaaaattgttcttagggtggctgggtgcattggttccgcccagagcttgagggagcgatggagaggcgcgggctggtgaccccctctttcccctcctcctggcaggcaccgctccgcgcctcctggcaccggcgccctttctctgccggggaaggctagcccagcccgcagccccgtgcggcgggggccgagggcgccccctcccttcctccctctcccccctcccgatacaatgactgggccggaacagcgcatcagccgagcctcattggcagcggccgccccagcccccggagaggcggcgggcgggggctgctggggagagag

SEQ ID NO: 5650 - DNA, 362 bp, Homo sapiens
  source 1..362: mol_type = other DNA
gacaagaaaatttgttattgtgcaatatagattagaagtctagactgcttgatctttcttctttctctcccagagaacatgaaggaaacacgttttctttgtttgcttttctaggatcccatttatgagctgttggggactaatttttattctgaaaatttggtaatcatcctactggatgtcttttctgatgtgaaattaataactcctgggaggtgctaattgttctagaatgaccactgagcagagtttttatagattctaaaactggtttgccaatctcttcttttatggatgaagaaatcatgctcaggattgcacagctcttcttagaaggactggggatttcaactctgagtctt

SEQ ID NO: 5651 - DNA, 437 bp, Homo sapiens
  source 1..437: mol_type = other DNA
gagttttaaaattctcttccctaagtgagttccgggaaggtggacacttgtacagttcacttgtacatcttcactcctaatctcatttgaactcccagtcaactgagaaattaaaagcagagagcaacgacgctattttgtaactttgtgccttttaaaattaaccgaatctttcaattgcattagaaaacaatttctggaaagttcttcctcaatgctaaaactttcttaaaacccttgactattttatttttaaaataagcacttggcgtgccctcgcagatgtctgagctgagaggttcttattcatagggagcggctccccaggcgagctgggaatgccccgcccgggccgaactacagatcccaggcggcgctcggccgccagcccctcccgcccgggtgcgagtgtaaactccccgcgctggggcgggcgg

SEQ ID NO: 5652 - DNA, 621 bp, Homo sapiens
  source 1..621: mol_type = other DNA
tttagacaacattattgaacttcaaatttttagcttaacataacatttgtcagcagtagatattaagcatttatcataatttataagtatatatttgctttgttcacaatgtatattctatgctttgtacagtgtttagcacttaacagtcaataatgaatgaataaaggaataaatatgtaaatatatcagtgttgtatatgataactcattcttctgtaatcttaagaataatatgtaaaaattctcagcaaaaatgctcatgcttttttcatttgagaattaaataggggagatatttatttcttattatccacataaatatatatccacttctgatctatgtagctagaataagtgttcagcacagagtctcttctcttctatactaaaagatagaagtctcatgtaatagtagcttttagatgatgtctcctccaaaggggcattctgctattaacctattgctgaaagagaaataccattgtctattaatactactggaactaaattaaaaaggttcttttatatttatgaaaaaaagcatgattccaaaaaaaaggcccttatgtgaacgtttttttttacatgcataactaattagcttaggttattataagc

SEQ ID NO: 5653 - DNA, 635 bp, Homo sapiens
  source 1..635: mol_type = other DNA
aaaaaataaatattattttccttgatgagaaaaatgacaacttttagaaatggtgggctattcatcatgatgtgtaccttccattgaaaacagtattatctatagacatatatccacacccagctaacttttaaaaaaaaaatttaaatttttgtagaaatggatccttgcctcaagcaatccatttcttgtctcaatccttacctaagaatttaatgacatatcatctttggaatgttattccaaactccctttggaatatctacagatgatcaaaaaaaacttgaaatgttttcttgttgtttataaaatattaggtggaaaaaacactcacttttcaaactatcaactacgaacagagtgtagctttaaattttaaccaaaatagcctgtgtatatttttcaatacatttttttctacatcttttaatattaacttgaagtaatgaatgtccagttgaaaagttcattatttttttcctattttgcagaatgtcattttaaataagtgctatttttattgttttcaaccacaggctttatattaccttaaaaaaaaaacacggccgcaagttagatgcttctggcagcaatacaaatctagcaccaccccgggagggagtgtatttgcttct

SEQ ID NO: 5654 - DNA, 327 bp, Homo sapiens
  source 1..327: mol_type = other DNA
aagagcaatacattttcagaaggaatccttttcttcccagtatttgctgaattactccgagggcatatccctggaatacgggacgatgtgttctttaaaaatacatgtgacaaaatcctcaaatgcaaaatctgaacaggtttcccgaaaccctggtctagccagggcgcactgcgtggctgtggcattaatagatttctttaagtgctaaatgcaactttgaaaattacctgcaagctccaactgatctttcaactttgaaagtgaagaattacttgaggaattctgtggttggcaaacctccctgaggttgcctacaaagggcaa

SEQ ID NO: 5655 - DNA, 550 bp, Homo sapiens
  source 1..550: mol_type = other DNA
gtgaattatattttctgccgaaatggagaaaattgttgactgtaattatgttatttaattgaaattataagtgactcagttaaaagcatcttttctaatatatatttttggaaaactcgaattattttccttaaatgattagtgaactagagaatatagttaagtagcgttttttttttttttttttaactagatatgcttgaatgtattatgtgtgagtatatatgcacatatatatatgtgtgtgtatatatttttatatgtacactttatatgcatatatcaaacagatctttgtaggtacagagatctgacaattgtgactaaacaaaccgattgtttaaaattcgttgaatgttaaagattgaaatgcaacccatagtagaactccagggatgggtatactacaagttctttttggagtagctggagatacaacaatagtgagttcttaattactaatgaatacaattcattttaattgttattatagcaacataacatttaactgagggcctcttcctgcatatttaatctagagtaaggcagt

SEQ ID NO: 5656 - DNA, 277 bp, Homo sapiens
  source 1..277: mol_type = other DNA
tcgccttctttcattggacaaagtgcagaaagaagagggagaaagggggttgaaaacaccacctcccaccccgctgggtgggcgccagcgccccggcgaacggcaaagagggagccgctcccgctcggggggccgctggagtgcccagcggggtgcggacccctgcgggaggtagagggtcgggccggggtgcgcccccgggccggtgctgcccgcgcctctgccgccgccgccgccgccaccggcgctggctgggctccgggaagctagtccggag

SEQ ID NO: 5657 - DNA, 168 bp, Homo sapiens
  source 1..168: mol_type = other DNA
ttcctaagaggagtcgtggcaagaacacagttcctgatgcagccacctcgacaggggagaaaacccctcgctggctggcggggtttctgtttctcgccttctttcattggacaaagtgcagaaagaagagggagaaagggggttgaaaacaccacctcccaccccgct

SEQ ID NO: 5658 - DNA, 368 bp, Homo sapiens
  source 1..368: mol_type = other DNA
caccgcctaaggagaggtacaggaagcagagcgctctgtgttcacaggtccacgttaagccaggcttgaggccttcactgtggtcgcccttcaacgtgggtctggggcttttgcatggctgcagagccagcccgcagaccggccgccactccaggccaggccgtcagtctcccacgctgggcccgcgcctgagcgggatcggccccccatcgttcggcggccccggcccggccgtgcctcccacggcccctccgcgcggctcccaggccctgaaggcggcgggcggcgggcggcgggcggcgggcggctagcccggggcggggcggggcgcgcggggcggggcggggcgggggccgggggtgactcag

SEQ ID NO: 5659 - DNA, 885 bp, Homo sapiens
  source 1..885: mol_type = other DNA
ccgtcgggccgctgctccagggcgcacggcgcgtcctcgtcgtcgccaccgccgtccagcactggcgggaaggccgcggccagcgccagcgcccaggcggcgcacaccagcatggcggcgcacggccagccggccaggcgctctgcatcccgggtgacgcccacgcccagcagcaggaaggcgggcggccaggaaggcgagcagcttgcagcccagcgcgcccggcggcgcccccgccgcggccgccgcacgccgcgccgccagcatgacggccgggaggcaggcgagcgcgcgcagcccgtcggccaggcacaggtcgagcagcaggtagtacggggcgcggtgcaggctgcgctcccgcacgatcagcagcgcgaacagcacgttgcccgctaggctcacgcacagcagcaggctgagcgtggccagcttgaggcccagggcggccgcctcgccgccgccgctgccacccggctcgctcgcgttcgccatcgcggcctcaccaggccgtgcgctccgccccggggccgtcccctgcctcgccgctcccgcaggccgcccggcccgagctccgccgctccgccggccctgggcgagctccccgtcctgcggggctcagcccgctcccggccggcccctcctgggctccccgagccgccgctgtgccgccgccgccatctcaggaatggtgcgcgcaggaggaggcggccactccctgcgccctaggcgccgcgggcttcactgcggacagggcctcgccaccgtccggccgccgcgcctcttggctctgccccccgccgggcccgccgccgccgctgccgccgctgccgccgccgccgccgccgccgcggagccccctcccctccgccggagcgcgcagcgcgg

SEQ ID NO: 5660 - DNA, 368 bp, Homo sapiens
  source 1..368: mol_type = other DNA
cacttgtgaagaagcttctgtagaaaactggccatggtctttaggaaacgttcggagctggagtgggctgagcatcctactcctcacccaccccacccgcagcaggggaactgggccctgaagcagtccctcagctccctgttgaagatgccggcctgcgcgaaggtcagccacacggaggccgtcaggtaggcctgggggacggcgccgggccgcaccaggacccgcaggtagctggccacggtgacggcgtagaacatcttgcacagcctcttctccgtcttgaattcttccagcacgaggaggcggcgcgcgccgcggcccggccctgcgggccggatgcccacaagcgcgggcggcgtgggccc

SEQ ID NO: 5661 - DNA, 376 bp, Homo sapiens
  source 1..376: mol_type = other DNA
acggctgtgcctggagcccgcagctggaagacaaatcctttcagtacctggcacgcagcgggaggggctgctgttacagcaaatgatttgcaagttttcggcgctgagcacgtgtctcggagttccggcgcgtgcgaaaggcacggcggagggaacggcgcagagcggggcgccccgccgggagcgctgcctgcgtggcgcccgaggcgggggcgcggggggccgcgcatagcacgtgctcgtctgggagccggccgggccgaggcgggcgcgcgtgtgcgcgtggggcgtggggtgtgtgcccgcgccgtgccccccgcgtgtgctgccgggcgggcgccggcgtgagtcacggcggggctagcctttataacgg

SEQ ID NO: 5662 - DNA, 600 bp, Homo sapiens
  source 1..600: mol_type = other DNA
ttcgaagctcagagtctggcctgggggtccctcccgcgacaggggcctgacagggagtggggcttcgggccagcgtctcggccggacgacgcggtccaaaggtggaccttgtcggcccctgggcactgcaagcctcgaggcgctgcgagcggtgaggctgttgcaagctcccgcggcgcgcgcaaactgcgtggaactacttccccggggcggcttcggggccggggtcccggcaacagcctcacggggcgccgtgcggggcccgaagccagttgccagctcccgggcgcggccacgtgcgccccgccgggcttgcacgctccgccgcgccgggccgcggggccaccgacaggcacgcgcgcccccagcgcgcaccgcccggccccgcgccccgcctccgccctcgcggcgccggccgccgccctcccattggccgcacggcgcgtgacgcgcggcgccaggccccgcccctcgtcagtcactcggcggaggcggcgctggcggggactagtctcgtcagtggagagggaaggagccggcccactccccgtcgccggcctcgggctgcccctgcgcgccccctccagatccggcccgcgg

SEQ ID NO: 5663 - DNA, 214 bp, Homo sapiens
  source 1..214: mol_type = other DNA
gtcaccgacacggtttaagagtcaaacgttctgagttctaattactgtatgctgtggctactgcagcacatcaagcgttgacaacttgccaagagaagatatagagaggttttgtaactttcccaaggtcttacagctgccaggaagggattcaaacgcacgtctgtttacctgttgggcgtggggagccttacgcgcgagcacttccgcctcg

SEQ ID NO: 5664 - DNA, 429 bp, Homo sapiens
  source 1..429: mol_type = other DNA
attagcaatgcttagtgatgtatgtattgttaattttattattataggctggaggcagtggcgcgatatcggctcactgcaaaagcgattctcgtgcctcagcctcccgagtaactgggattacaccgcgcccggcctgtatttatttttatatagagaagggcgtgttgggatcaccggcctgagcccccattctgaacgtgaagtgtatacactgaattctcatcagtaccagtgcccttactgtacaagcctaggagtccagcttcagctccgcggagcctgggcctggggctggggctggggctgaggctctggaagccgccgggacgcagacgccactgggccccagcgtcacacctcggccgcgcacgcgctctcgggttccgggccggagcgcgcggcgggagcgaggacggcggcagggag

SEQ ID NO: 5665 - DNA, 451 bp, Homo sapiens
  source 1..451: mol_type = other DNA
aagcgattctcgtgcctcagcctcccgagtaactgggattacaccgcgcccggcctgtatttatttttatatagagaagggcgtgttgggatcaccggcctgagcccccattctgaacgtgaagtgtatacactgaattctcatcagtaccagtgcccttactgtacaagcctaggagtccagcttcagctccgcggagcctgggcctggggctggggctggggctgaggctctggaagccgccgggacgcagacgccactgggccccagcgtcacacctcggccgcgcacgcgctctcgggttccgggccggagcgcgcggcgggagcgaggacggcggcagggagcgtgcgcgcggtgacgtaccgggcgcccccccccccggtcgcctgcgtgccggagtgtgtgcgagggagggggtggggggaggcgttccggtccccaagagacc

SEQ ID NO: 5666 - DNA, 266 bp, Homo sapiens
  source 1..266: mol_type = other DNA
gtaattgttgccataaaatagcagttcatagtctcacatttttcattcattcattcattcatttgagaaatattttgccttcatgctgcttaatcctagtaggacaaggctgaaatggcatcattttctcctgtctgtcgccctagtccagcccagcgcctggacctttggccaggggtaggctcagtgctgcctggagaagaccccagacacagggctgaggtttggcacagggctgtctgtcctctgagaaagcttcactgata

SEQ ID NO: 5667 - DNA, 534 bp, Homo sapiens
  source 1..534: mol_type = other DNA
gaaaataattttcaaaaacattgtactaatgatctttaaagcgacggatttctgagggcagacacttcagaggtgttaggtgaagtggatggagccagcacgctggcctctcccactccgacagctggcgagcagctcttgaaggttcacagaacctctggtcagaactgaagttgcagccggagcttcccgcaggctctgtaactgtctcctatagcgtagactgtaagagaacagactggcgtcctgggctggcccgtccctcagcctcctccctttttcggggggctggcgggagggatgtatgtgcgctcgcgctcgcgcaaatacggccggaggagtcctgttcctcgggcattttccgccggggagagccagcgagcgcgcgggcggcgtagccggcctgtctgggccgcctcgtggggagggagggggcgcccggccgcccggcggcgaccccggggcctggccgccaccatgggcttcgagctggaccgcttcgacggcgacgtggacccggacctgaagtgcgcg

SEQ ID NO: 5668 - DNA, 367 bp, Homo sapiens
  source 1..367: mol_type = other DNA
gggaaaataattttcaaataacattgtactaatgatctttaaagcgacggatttctgagggcagacacttcagaggtgttaggtgaagtggatggagccagcacgctggcctctcccactccgacagctggcgagcagctcttgaaggttcacagaacctctggtcagaactgaagttgcagccggagcttcccgcaggctctgtaactgtctcctatagcgtagactgtaagagaacagactggcgtcctgggctggcccgtccctcagcctcctccctttttcggggggctggcgggagggatgtatgtgcgctcgcgctcgcgcaaatacggccggaggagtcctgttcctcgggcattttccg

SEQ ID NO: 5669 - DNA, 525 bp, Homo sapiens
  source 1..525: mol_type = other DNA
catcaccaaaaaggtgtttgaattactcaagtgttgtttgaattaccatcaatgaataaatagataaaatgtgatttatacatacagtggaatgttattcagctatgtaaaagcatgaaccttaaggacattgtgcaaggacaaatactgaatcattccacttatgagatacttagagtagttaaattctagaaaaagtagttaatttttctgagctgcacacttaaaatagctaaaatggttaattttatgtatactttaccacaatgtaaaaaataattttaaataaactatagctatctgcaatatcatgaattaatatcataaatataatgttgcatagaagaaagtagatgtaaaagtatacatattacacaatctcacttatataaaatccaaaaagtgcttctggcttccagtaataatgaagtaaagtaatttgttgaatacttcacagataactataacaacagggctgcagcactgcaatcccagcatgggtcacagggctgcagcactacaatc

SEQ ID NO: 5670 - DNA, 414 bp, Homo sapiens
  source 1..414: mol_type = other DNA
agcctaggctagttggagggctctgaccagcagagacagactccggaaagtttttccgctcaacctaatcaatgcaattttattgcatttgatctaattatcttccccatttttaaggtaggaagggccttatttcatcatctatgtgtggatctaatagactcaaccataatttgacatttgttgtttccaagcatttaagaaattataatatctatgcatacaacgttaacactatgtataataaattctctttctgtgcaaaatatataacatatgtcaatatagacatgtttaattgtgcatcttgaaaggtgaacaggatagaaatcggaagaaatgattccctgatcttccttttcttgacactatgacaagatcctgaaaatacagaaacttctgattgaggctcta

SEQ ID NO: 5671 - DNA, 321 bp, Homo sapiens
  source 1..321: mol_type = other DNA
gctcagctggggagggtaaagacttcggggatccccctcccccaagctcttaagaggggctgcctccccttcctccttcccttggggatgccgcaggggggctaaaaggtgaatttcagttcgaggagcaggagcctggagcccacctatcccctcccgaggcgggaaggagtgggcacccgggggcgggggaaggagtcgcccggtggcctcggccctcggcagccggcggggctctccgacccctccccactccccagcgggcgggtggccgagtccggaggttcagggctccgcgcgcccctcctcgcccccgcccct

SEQ ID NO: 5672 - DNA, 423 bp, Homo sapiens
  source 1..423: mol_type = other DNA
tcaaaattgattaattcctcaagacagtttctcattcgcctggatttccgattccgagcaattggattctcacctgagggcgcagttgccacgcggcccctttaagtattaagacgccgctgatccgggaggagctggggtgagccgcggcggccgtctctcccacccgcagccccttctctgccaccccggggagagccgggagctgcctctttacagcttccacgagccaggggtgcaggcagctgcccccaggagcgccccagagggcgaggggccgagggcgatgttgggcgccgcgcggggctgggggcgcccagaagacgtgcgagtgtccgcggtcctgctgctgtctccagtacgggaacaagggcccgcccaggcagccgctgtcgccgcaccgccccctcgctcgctctctgc

SEQ ID NO: 5673 - DNA, 555 bp, Homo sapiens
  source 1..555: mol_type = other DNA
gaggagcaggagcctggagcccacctatcccctcccgaggcgggaaggagtgggcacccgggggcgggggaaggagtcgcccggtggcctcggccctcggcagccggcggggctctccgacccctccccactccccagcgggcgggtggccgagtccggaggttcagggctccgcgcgcccctcctcgcccccgcccctaagtccttccacccgcggcagctgccggaggaagcggacgctctgctgcgaggctgcgggggctggacccgggcgaggggcctcagcgcgcctggcgctggactgagcgctccctttctccgccgcgcccgggctgggctctcacgcccgtctctgctcgcgcccgcagccgcctggtgcactatcctcagaggcggcaccgcgggggtgtctgcagcctcggcctccgcccggccctcccttctcctctcttttggaaaccggagaggtggagggagggcattcttattatggaagttaagtaaaaatatagacatattaaaaccagtaggcaggccaatggtttttcggcagcg

SEQ ID NO: 5674 - DNA, 574 bp, Homo sapiens
  source 1..574: mol_type = other DNA
aacagcatgtttaagacttcaaattaatatatattaagattcagcatttaatattctaattcttaaaataactggctttaccgatgatgaactaaagtgattttgcacactattacaatatttcaaatttaaatctccttgttatgccaatttgcattactaatgaacttggataatgtagcaattaatagtaaatgcttgacatactgtgacattataatacctttatgttgatttatatctttatgtcaatatttacaaggaaaatatttttgaatttctaattttgcgaagtaaaaatgatgctgacgccattgtcattgaatttgactaatataacccgtgttttataattggtagactcattctactatctactacccatgtaaggtattttatttgtagtagctatgaattgtaaatacaattgaagtatttgattatataaaatttcctggatttatatgagaataatgcataaaaaagtgtcgaattttccttcgaaaatgttcttttaaaatcctttgtatgatcaaagcccaattaaaactagcaggcattacaatagaggtaa

SEQ ID NO: 5675 - DNA, 518 bp, Homo sapiens
  source 1..518: mol_type = other DNA
tggaccaactctgtattcctaaaaagcaattattgaaatagaagctagtcagttaatggcaatttcaatgatatcatttgtgttatcaaaggtagtttaatcgttgaaaagcttgttaacaattataaacacaggcaaatgccttttcctttttggccttacggagaatgagaaaagttcttcccatggctaaaattcttagctgttaattttaaattcacgtgacctggaattttcagcagtagtactctttgaaatactgcccctcaaaagtctcagaactttgagaaatacggtcctttccaaaaaaaccccttatgtccaatttgaagggggtcagcttgggacaagggcaggtccctgcggcctccaggtgccagccgcgtgagtgggcggagaggcctcggtgcctcctacccgctccggacgtgcgtcccggcatcaccccgggatccgctcctccccgctggcggggggagaaagggcaggaggccttccgtcccggctataaagggccc

SEQ ID NO: 5676 - DNA, 366 bp, Homo sapiens
  source 1..366: mol_type = other DNA
tagccagtttttatattttacaaatgtctgcagcagttttttgtcatctttatggaaaacaaggcacgtcttaaagtcgttcaagtcatgaaaccccttataaaaactttcctttgaaatattttaaaattcaagtggaccaactctgtattcctaaaaagcaattattgaaatagaagctagtcagttaatggcaatttcaatgatatcatttgtgttatcaaaggtagtttaatcgttgaaaagcttgttaacaattataaacacaggcaaatgccttttcctttttggccttacggagaatgagaaaagttcttcccatggctaaaattcttagctgttaattttaaattcacgtgacctgga

SEQ ID NO: 5677 - DNA, 331 bp, Homo sapiens
  source 1..331: mol_type = other DNA
aaggctattgttaaaacattttaaagaggcttgcctaagtagacttaaacgttcaagtaaatcatcaaatattataaaacatagtgccagcactgaacaacaacaacaaaattatttcctccacttgtttttcctttgctgctggaatcgtcagagattgctactgcagctggtgagtgggcaggtgcagccaccatctgctcaggacctggcccaggcctggggacacggctaaccccgccccctcgcggtggcgattggctgcgagacatctctggggcggtgtctgtccctggccggggtgggggcggggcctccgccgctctgagct

SEQ ID NO: 5678 - DNA, 606 bp, Homo sapiens
  source 1..606: mol_type = other DNA
attgctctgtgaaaaccaggctgtaaaagccagacatgtgggcacttgcagagatgttaactttcacttatgattattttaatccctcgccctggcggccaggtagggtgggaacctgccgagccttgagggcgcggagcctctcccctcccaccaccatcccatgctgggaggcggagagggctgcaaacttcgctccaatccgcagccagccttccccggggtccccctgcagggtgacccgcccgctgcaaagcgagttggagaaactttgcaaagttccgcgtcagagcctggggaggcaaagtgctcccccttctctgtcctcgcacagccgggagcacccgtgataggacgagccccgggcgtgcattgtgtaatgcaaaccggagctgggctccccacggctgcccgacccgggcctgggctgtggctgtgactggcgctgccgtgggcgccgcagccctcgcgggagccggacgcggtaatgccccagcggcgcagcgggcggctgcgtccctgagccgctatataagcgcggcagggatcggtgcccgcgcatgggccccctcccgaccccgcgccccgcgcggagcccgaggccgc

SEQ ID NO: 5679 - DNA, 514 bp, Homo sapiens
  source 1..514: mol_type = other DNA
gcctgtagtcccagctactccagaggctgagatgagtgctcatgtctcaaaataaataaaataatgtgagtataattatttctactgattatgtcagaatacaagtatattctcaatccaattgcaaagatattgctctgtgaaaaccaggctgtaaaagccagacatgtgggcacttgcagagatgttaactttcacttatgattattttaatccctcgccctggcggccaggtagggtgggaacctgccgagccttgagggcgcggagcctctcccctcccaccaccatcccatgctgggaggcggagagggctgcaaacttcgctccaatccgcagccagccttccccggggtccccctgcagggtgacccgcccgctgcaaagcgagttggagaaactttgcaaagttccgcgtcagagcctggggaggcaaagtgctcccccttctctgtcctcgcacagccgggagcacccgtgataggacgagccccgggcgtgcattgtgtaatgc

SEQ ID NO: 5680 - DNA, 570 bp, Homo sapiens
  source 1..570: mol_type = other DNA
tttaaacagtagagactatatacaggtacgcacgcataggttgtattttccattttatacatgcaaggattctttaaataattcattacattttttctttaacatgatatgcagtttttcacaaaaagccgaattctaataggatcaccgtatagccatgacactttatgattcatgatttacaagaaattaagaacatttagaccagcctacaaatttgtgtgtgttaatgtttccaggcaagaaccttaaacaaaaagttggatccccggagacccacgctgggtcgtcggagtctggagccgggggtcctgcaggggtctgcgcggtgcggggtctcctggagtgggtacaggcggttccgggacaacccacacttagtctaggagcccggagatccctcatccagctttccccggggcaaggggtgaagcgctaagcaaggctgatcactgtcgccaactcccggtgcaggaggaactggcagccgcagacgtgaggaaagcggccgcggcttcaaactccgtagtgcgcaggcgccacacaacgcgcaggcgccgcctagaagtg

SEQ ID NO: 5681 - DNA, 637 bp, Homo sapiens
  source 1..637: mol_type = other DNA
tcatgatcattgtaaagttttgatgaatactgtagcatattatttttttcattctcatataaagtcaatatattttgtaggtacataactcacatagatgttgtgagatttgcatgacgtaactgtataaatacctagaatactgtcagcatctagtaacagcttactaaatattgggtgaaatcgaggtaaagataacaattacccatatcttagttgtatttaactttgttcttgccattaatgcaatcaatttttttccatttttcacttataatatagtaaaacttatattggttgtcatcgtttttaaaagctgtgcatttttgagtatgaatcattaattgacaacatattttctcatgtttagtattatatgcttctctcataatcttaaatattgtttcttaaaattatgtataatactatgcacttcttttcatgttttatcgcagatttaatgagaagttgtttaaaaaaatctcatatttatacatttgcaattgtgttagtagcaaaaagatacctactatttttcaattgattgcaaaatttgattcctctctaaaaggtctgaactactgaatctctgccatatactcctgggaaaagactattaacatgtataaagggattt

SEQ ID NO: 5682 - DNA, 415 bp, Homo sapiens
  source 1..415: mol_type = other DNA
agatggcatgtctcaggcatgtcaggacagagctttccggacagccccccaccccaagccggataagtggaggagggagcttcagcctcaccctccttgttggtcggggcggccaacggacgcctcacctgacagaagcgtcggcagtaatcccgactgctgattccgacgccgccgccgcagttgccgctgccagcgccgcctctgccgtcgcccgcagctctaagccccacagggcccagcggggactccacaggctctcgccgcccagcgcgtaccagcccctgcgccgccgccgccgccgtagatgcctaggctagccggacaggggcctctcggctgggctcctttccactactattggtgaaatcgacagtctgtttgataaaccggccgtctgttggctggggaccgc

SEQ ID NO: 5683 - DNA, 776 bp, Homo sapiens
  source 1..776: mol_type = other DNA
tatttggataaataacattacttaataagcaaaataagtaatattttttcatatagcactataataaaagttcccataagcagtttttttaagcctagtttatttcttgatgtggaaaattgataaatctgttaaaatacacataattttgacccttctctcaaagaatatgagatttgtacctacaataataaatgggggtctagaagaaatcttaatcaccataagtttatgaatcaccataagtccattttgtattatggatagtgggcttgtcaaatgtgaaaattaaataaattagaagctaaaatgctatctattccagattattttcaagtttaagaaaaagagaaaggtatatatttaaaagagttaaatatggaaaattggacattggaatactatgtttattcagctttcattttaagagttgtgttttttaaagatagactagtataaccatttttttggaaaaaaagtatttagcactaatatttttctttttacaggttgaagaagaaggccaaaactaaatgtctaatttataaaacaattgcacattttttgccaaatgatttggagatcctcaggatttgtgcactatattttttctggagcgctccttagaagcgtatcgtactgttgaagagctttacagttttgaattgcttccaattttgaaaaagggattgtttttttttggaacttcgtaatgattaagaaaaactgtgtagcattattgagtgataaatcagcagttagatttctaaatgaaa

SEQ ID NO: 5684 - DNA, 441 bp, Homo sapiens
  source 1..441: mol_type = other DNA
tattttaaacaaagttaaatttgctcaccaggatctgcagatgtgtacatttcagctactaaacaattaaataagtgacaatgcatttagtctgattcctgtttaacagagcagactatttctctcgtaaatgtgtgttgctaccatgccaatagtaatataaattagtaaactcttttagatccacttccattggaaactgaaggggaagctggtggattatctatttttaacttttcatactataatgttaaacaaaactaaattattttaatttacttaatttaaggaaccaaactcaagcgctcccgggggcccggccagcgggcggggaggagccgcctccattggccggccccgcggcatcacgggagctcgcggtgcgcccgggtggcgggctgctttccacgcacctgcacctgcgcagccctccaaggcgct

SEQ ID NO: 5685 - DNA, 497 bp, Homo sapiens
  source 1..497: mol_type = other DNA
tctggaatttttcacgttttgaagtaaaattcagcaaatttaaaataaaattacatttttatatggactagtcacaatcagacttagcactaatacccttaaaaatccaccggtatatacgaaaatcatctcagaaaaattttgcctcagcagcagctgactcttcagctgatcgtgaaaatgcaaaacattctggctccccagaaaattttttaaaatttttaaaaatttaaatgacttattccgaatccttgaaatattcaatggataaaacctggaagccccggcagcccaagtcggcgtagtggttccagagctgtggatctgcggctgcggcctcccgaggattctgcctaagcgggaggcggcagccttctaggtgaagggtccgcccttaccttggccgacatctccatccccgggactgggggggaaagacaacgtgtcgcccctacggcccactgggcccgccgaagggcctccagtattccaggccc

SEQ ID NO: 5686 - DNA, 458 bp, Homo sapiens
  source 1..458: mol_type = other DNA
gatctgcagatgtgtacatttcagctactaaacaattaaataagtgacaatgcatttagtctgattcctgtttaacagagcagactatttctctcgtaaatgtgtgttgctaccatgccaatagtaatataaattagtaaactcttttagatccacttccattggaaactgaaggggaagctggtggattatctatttttaacttttcatactataatgttaaacaaaactaaattattttaatttacttaatttaaggaaccaaactcaagcgctcccgggggcccggccagcgggcggggaggagccgcctccattggccggccccgcggcatcacgggagctcgcggtgcgcccgggtggcgggctgctttccacgcacctgcacctgcgcagccctccaaggcgctcttttggaggagggagtgagggcactgcgtgggcctggaatactggag

SEQ ID NO: 5687 - DNA, 496 bp, Homo sapiens
  source 1..496: mol_type = other DNA
cataaagtacggacattattatttagcttttggatttggaatgttaaagaataagaataccccaatattattagactatcagtggttgaattatgcattgtttctcttgcagaacccagaattattaagaaatttaggtttgatctgtattacttttacaacacagaacgagaaaaggggtaaggtcaacttccctgtttgaaaaaaaatgcagagaccctctgattcaggctgtgtattagtgtctttctgaatcacaaagaagttatgatcacattgaacacagtaaaggaataactataatcatttttttcaattatacaaacatgattgactttttaacgaaagactgctattctttcaaaacacacgttgatttcttcggtgaattaagctcccgagcagctctgggctgcagagccagctgcgtgccatcccgctctgcttcagcgcacgctgaagacggcactacccagggaagtccccgagcggggtt

SEQ ID NO: 5688 - DNA, 355 bp, Homo sapiens
  source 1..355: mol_type = other DNA
aggctgcagtgagctatgattgcaccactgcactccagtctggagttcagaaccagcctgatggtgtcaggcgcctgtaatcccacctactcagggcgccactgttctccagcctgggcgacagagtgagactctgtctcaaaaaaaaaaaaaatttttttaaattaataaataggtagatgtatagatagatattcactttcaactgaagtctttatcggagcaagattttttttaaggtagattattctaatattatttttatgcctgtatggcatacaagaccgaaaaaacatgtggatgatcaaaatgaccccatttgcttttactatcgggctgggcgctgggagcgggc

SEQ ID NO: 5689 - DNA, 348 bp, Homo sapiens
  source 1..348: mol_type = other DNA
ccaaagctttgggagaggctgcagtgagctatgattgcaccactgcactccagtctggagttcagaaccagcctgatggtgtcaggcgcctgtaatcccacctactcagggcgccactgttctccagcctgggcgacagagtgagactctgtctcaaaaaaaaaaaaaatttttttaaattaataaataggtagatgtatagatagatattcactttcaactgaagtctttatcggagcaagattttttttaaggtagattattctaatattatttttatgcctgtatggcatacaagaccgaaaaaacatgtggatgatcaaaatgaccccatttgcttttactatc

SEQ ID NO: 5690 - DNA, 242 bp, Homo sapiens
  source 1..242: mol_type = other DNA
ctggagccaggatggtctagatcacctggcctcgtgatccgccttttcacattttctacaagaaatgcatttttcttttgtaatcaattccgtttcacatatgtaacagtaataaacgttttagagaaaatttagcatgctgcctaagtcggccagaattcctcttacgagaacgagctacctcgagctggcgagcgcagtacgggcgttgcctggggaacgccttccgcgcctcgaagtaa

SEQ ID NO: 5691 - DNA, 367 bp, Homo sapiens
  source 1..367: mol_type = other DNA
ctggctcatgctcctgtagtcctagctactagggaggctgaggctggaggatcgcttgaacccaggagttcaaggttacagtgagctatgcagctggaaaggtatttgagaactctgtactatctttgcaacgttattttaaagtgaaaagttaatttagggagaaaagtcactccaatttcatcgtgaacttccattgtttcatttattcatccaagaaacgtgtattcaatgccggacgaacaaaggtgatgttcccccggtacccagccgggccccaggtctcacctgggtcagcattgtcccgccgggattcgcgatttctcgcgagatactgatttgctcgcgctatagaattcttagctcc

SEQ ID NO: 5692 - DNA, 654 bp, Homo sapiens
  source 1..654: mol_type = other DNA
ccccagctacttatggggctcaggcagcagaattgcttagatcgtgccactgcactccagcaaaaaaaaaataaaaaaaaaataaatatatatatatatatatatatatatatatatatgattttgatagatacagcaatttccttcttcttgccctcaaatagtaacaagaaaaaaatttggtagtacaagagaaattttcatttttaattcttcctataaacatttccctctggtataaattaattttgagttgttatattgacaaaataaatgatttaacatatattgctggataactttagttctatataaaatttattttaaaataaaaacagcaggcatatcttttgggatttcctaaaataggacagatttcaaccattttaaagtaaatggaacaaaaaaagcttttacaccaagcttcttttcattcctatttaattccatatttttagtaagttttgatatctatagaaaagaaagtaacctttgtttaaatacaaacccattttcttggaataatatattacatatacaatgtaggactaaatttgcagatccagtgccaaattctacgtaggcagtttaacgaggactgaaaatgatcttcctttaatctaaagaataggcgtctaacaggcagaaccagat

SEQ ID NO: 5693 - DNA, 366 bp, Homo sapiens
  source 1..366: mol_type = other DNA
ctggctcatgctcctgtagtcctagctactagggaggctgaggctggaggatcgcttgaacccaggagttcaaggttacagtgagctatgcagctggaaaggtatttgagaactctgtactatctttgcaacgttattttaaagtgaaaagttaatttagggagaaaagtcactccaatttcatcgtgaacttccattgtttcatttattcatccaagaaacgtgtattcaatgccggacgaacaaaggtgatgttcccccggtacccagccgggccccaggtctcacctgggtcagcattgtcccgccgggattcgcgatttctcgcgagatactgatttgctcgcgctatagaattcttagctc

SEQ ID NO: 5694 - DNA, 366 bp, Homo sapiens; identical to SEQ ID NO: 5693
  source 1..366: mol_type = other DNA

SEQ ID NO: 5695 - DNA, 398 bp, Homo sapiens
  source 1..398: mol_type = other DNA
tcaaaatgatgattattaactatcagcaaaccggttttttctaattattcatcttccttgccattaaacattgctcccttgtaaaatttggtatcaacgcgacaaaaatcacaatgatcacaatagtgaaaataatagcagctaacatttgggcaaaaggagagattatccctttgagaatattttaaatcaagacaaagcctcgctctgtcgcccacgctgcagtgcagtggcgcgatcacgggcccacctcagcatccgcagaagcaggggccgcacaggcgcgcagatgtgtgactttctaaggtccggccgcccaaagctacgccgaccaatccagtagcgaaagtcgctttggcagctaccggaagtaactgcgctcccgcgggagctaagaa

SEQ ID NO: 5696 - DNA, 407 bp, Homo sapiens
  source 1..407: mol_type = other DNA
aaccggttttttctaattattcatcttccttgccattaaacattgctcccttgtaaaatttggtatcaacgcgacaaaaatcacaatgatcacaatagtgaaaataatagcagctaacatttgggcaaaaggagagattatccctttgagaatattttaaatcaagacaaagcctcgctctgtcgcccacgctgcagtgcagtggcgcgatcacgggcccacctcagcatccgcagaagcaggggccgcacaggcgcgcagatgtgtgactttctaaggtccggccgcccaaagctacgccgaccaatccagtagcgaaagtcgctttggcagctaccggaagtaactgcgctcccgcgggagctaagaattctatagcgcgagcaaatcagtatctcgcgagaaat

SEQ ID NO: 5697 - DNA, 682 bp, Homo sapiens
  source 1..682: mol_type = other DNA
ctcgcgcggggagagccgtcagcccacggcgcccctgcgctgctgtggatgtggccacgcgccactcggcccttggactgctaggagagcgcggcccgacgccaccacgccgtggacgctcggggacccctgaatcccagcgtcaaggctgcgacgatgctcgtgacctccagcaaggacctcggcgatcccgggcgccgtaactggaagccgcgaaggcggctactgcgctgagccgctcgctctgacccgcgcggaggagggtcgggctgactgccgccgctgagctgtccccggacgggagcgcctgtccacggcactcaccccctccagcggtggaggcggtgtcgggaactgactcctcttaaaacggtcggcgccgctgctctctgccacggccagagtgcggcgcagacgcggcagagttggaggtgtccgcggtgcaggctgctgcccacgccgctcaggccaggtgctgagggctcagcccgcgcctcggccgaaccactctcagcaccggccagaggaaagttcccgcgggcccacttgagtcgggagaggtcctcgggccgccccaactgcccgccccacctggcagtccgtccccgcccccgtcctcgcggtgaggcgctccccgccccctcccaaaccacagcccgagctcgctcttgcgcgcgcgcgc

SEQ ID NO: 5698 - DNA, 697 bp, Homo sapiens
  source 1..697: mol_type = other DNA
ggacctcggcgatcccgggcgccgtaactggaagccgcgaaggcggctactgcgctgagccgctcgctctgacccgcgcggaggagggtcgggctgactgccgccgctgagctgtccccggacgggagcgcctgtccacggcactcaccccctccagcggtggaggcggtgtcgggaactgactcctcttaaaacggtcggcgccgctgctctctgccacggccagagtgcggcgcagacgcggcagagttggaggtgtccgcggtgcaggctgctgcccacgccgctcaggccaggtgctgagggctcagcccgcgcctcggccgaaccactctcagcaccggccagaggaaagttcccgcgggcccacttgagtcgggagaggtcctcgggccgccccaactgcccgccccacctggcagtccgtccccgcccccgtcctcgcggtgaggcgctccccgccccctcccaaaccacagcccgagctcgctcttgcgcgcgcgcgctctctccggcccaagtgaatagtcctcgcgcaagcgggacactgtggtggatgcaattcccctcgcctccagccgcgaggagctccccggcgccgcaggcagcgtcctcctccgaagcagctgcacctgcaactgggcagcctggaccctcgtgccctgttcccgggacctcgcgcagggggcgccccggg

SEQ ID NO: 5699 - DNA, 657 bp, Homo sapiens
  source 1..657: mol_type = other DNA
cattttttaagacttgtgatgatgatagttactcttaaaagagatcctgtaaaacagttttacatattattttggtttatcttacaacaagtataggtataaccttttcatagatgaactgactacaactaggactctattggtctcattctagcaccagtattttcaaaagatcacactttaataattaggccattttctctaacagtaaatatcactattaaaagcagttcgttatctatatatgttatctattttattaaaatcaattacgaatgtttaattccagatcaatattcgttcaatatttaatgttcaggaatgcattaaatattcattttaggcacattggtaggaatatatgaaaatagtcatgaatgcatttcaaagtgatttggggttatctgtaattttggattactgggaataatcaagagttgattgtagtaaattatagtagtagaatacttaatgataaaagtagttgtgtacatggaataactacttctacatttttcttacttatacatattttgcaattttgccacaacagtggctaatttttacctaagaagaaatttcttcttgtgcattttaatgaatgcgagaaaagacaacaatggttgccaacaacctgccactactatttaatgttgt

SEQ ID NO: 5700 - DNA, 317 bp, Homo sapiens
  source 1..317: mol_type = other DNA
tagtccatttaataggccaaatgaattgacaggccaagggggtcggaaatcctacacagatctttaaaatgactgcatctgtaatgtgcctaaatattttctatttgaagaccatttgtgactatgactataaaatccaagtgcaatttaagaaggtggtcaactttaagtattgactattaataccttctggagactgtaatctactcacaggagattatgcctggtagaaatctcttcgggctccggcgcacatcttgccccaggggggacagtatcgtcttgcagtcgttgccacaacgctacgctggtaagct

SEQ ID NO: 5701 - DNA, 362 bp, Homo sapiens
  source 1..362: mol_type = other DNA
agatctttaaaatgactgcatctgtaatgtgcctaaatattttctatttgaagaccatttgtgactatgactataaaatccaagtgcaatttaagaaggtggtcaactttaagtattgactattaataccttctggagactgtaatctactcacaggagattatgcctggtagaaatctcttcgggctccggcgcacatcttgccccaggggggacagtatcgtcttgcagtcgttgccacaacgctacgctggtaagctgaactgcccggctcctcgcaggacgccaggacccccggggaggcgtggcttcaggaccggaagaagctcctgttgccaagggaacggtgcctgccaaggcgc

SEQ ID NO: 5702 - DNA, 473 bp, Homo sapiens
  source 1..473: mol_type = other DNA
aactcaattcaagacttgctattattgttagttttagacaaatactagacaagggtgtcgacttcctctgggtcctctggctgtctacagagcaaagaaaggcacaggcccgccactgatttcctcctgactggaaccaaatgttccactgcatttcttctgtttctatagccatagtcgcaacgaatttctcttttaaaactaggattgactctctctcccggagcgagatgatattcagcattgtgtcataaaaggaacgcaagatcgctaccactgcactccagcctgggcgagagtgagaccagaggaaaaaaaaggccatttatttccttccatatggactacgcccgggcgacgcggaacaccgccgggtagccaggcctccgggctgccaccacttgcgggccggcgtggcggggcggggcgggggctggagcacggcccggagcgtgcccacgctgccccgcctc

SEQ ID NO: 5703 - DNA, 350 bp, Homo sapiens
  source 1..350: mol_type = other DNA
ggcctggtcgggtaccgggggaccctggcccggggccgagcacggctgccccgccccagccctggccttctccggccccgccgtgaggcccaggaggtggctgctgcaggcgtccggcgggatttttaaaaaatcaaaatacaaatccaactttttgagttttcgttgtgagattgctatctagcattattacatgttattgttctctttgctattttatacacctagaacaactttgttttaggaggcttccctcttcagaggaaactgggagaagccaatttccactgcttctttttcagtctgtaatttaaaatgtgtgcacggtacactgctgaccatgggcatgt

SEQ ID NO: 5704 - DNA, 683 bp, Homo sapiens
  source 1..683: mol_type = other DNA
ttagtagtaaaagtagaatatgacaccacttatataaagttttaaaacatgcagaagtttgtacattatttatagatacatacatatacaataatagtataactgcatatgattataaacactagagaagcaaggatttattacatcattctgtatatttgtaatcttttatattaaaatatattttaaagagaaaagacatgcttaatatgcacaaatcaatttgaggaaatttaagaatttctctcacaacactatatttctgggaagaaaatggctttcttcctaagtcctagaaaaacttgtgctattccagttgaagaagattaatttcaatgacatgaccatttattggcatatgtgaagtagaaatattttcttaaatattttctctaagtatgcaaagcacagtgacagtgtgtgttcatttttattaactgggttgcttgctattaaataaaccttaaattaaaccacttttgttatcaatgaaataaaccatcatcttaaaatatgattatttaccttaaaaaaaataattttattttgtattcatgctaattcaaacgtgtaattaagattaaattaatcatctttttttctcaataagcatattattttgctgagtcactaagtatatttaaatgatattgcattggattaagaggattaatgcttaacct

SEQ ID NO: 5705 - DNA, 491 bp, Homo sapiens
  source 1..491: mol_type = other DNA
ttaatagtttttaaaataagtgaaaagaatttaaaaggaacaacattgctgcaatagaaaactagtatcacttgtcatttatgaaacccaaataatatcattacattcttgatggacttatgcaaatgggtcaacgtttcacaagtagaatcccatttttactcgagatgaccggaaacaggctatgcgccgcgcgcggcgccaggaatgcctatcgccgcctcagacagcacaaggcccctcggccccgggccgcggcccggcccggagtgggggcgggcggaggcgggacctgcgtcgccgggcaggggtcgcgtcgcggttccatgttcccggcggtttgaagaggggcccccttcccgggcgtggtcgggctgggcgggttcctttgtcccagggccgagccctctagggcggggcctggtcgggtaccgggggaccctggcccggggccgagcacggctgccccgccccagccctggccttctccg

SEQ ID NO: 5706 - DNA, 353 bp, Homo sapiens
  source 1..353: mol_type = other DNA
cctgagggttcagaatcattgttgcccctgtgccacacatcatctgcatcctcagtattattaacttaatagtttttaaaataagtgaaaagaatttaaaaggaacaacattgctgcaatagaaaactagtatcacttgtcatttatgaaacccaaataatatcattacattcttgatggacttatgcaaatgggtcaacgtttcacaagtagaatcccatttttactcgagatgaccggaaacaggctatgcgccgcgcgcggcgccaggaatgcctatcgccgcctcagacagcacaaggcccctcggccccgggccgcggcccggcccggagtgggggcgggcggaggcg

SEQ ID NO: 5707 - DNA, 492 bp, Homo sapiens
  source 1..492: mol_type = other DNA
gaaatttggtgcttatgtatataaaccagaaattttttagtttaataatgtctgctcaactagcagaatactttccccctacttttagatgaacaatgaacattttatgtaaatttacatttcactaccatttaccttgtcataagaacctttatgaatagtttgatactttggatacacttgtcatatatgtttaggaaatatagctctattaaggaaaaactcgccctagggtggatttttacatttgcaatataaaatcaagtcagtttccctgtacacttatacgtaaagtctagtcgtaatcgtttacttctaaaattgataaaaacaaagaatattttaaccggcatttgcaggggatcagtaactgttgcaaatatttttgctcagcttttatgaatgagctctgcaggaaaacaggttctttgtggcatgcacatatgacaagtcatttctctcttctgagatcgctaggtagaattaaaaatt

SEQ ID NO: 5708 - DNA, 386 bp, Homo sapiens
  source 1..386: mol_type = other DNA
tttctcatcctaaaattggaataaaaatatttactctcctggttgcttaaaggattgaaatagaaatgcatgtaaagtagaaaagtatcagttgttgcaatttccttccaaaatgacatttcctcaaccctttgggtgggaatgaggcatttgaaattgcacctaaatttaccttagaggaagtaaattataaagagctctttggactgttaaaagtgaagtaatttaaaaatacagaaccatgatcaattctgtttctggaaaaactgattatttgttacagttgttatatttctgaaaaagtgctctccttagttcagtaatgagatcagtcacccctttttcatgagaaagtgcctacctcaaaccttagctctagctaagga

SEQ ID NO: 5709 - DNA, 434 bp, Homo sapiens
  source 1..434: mol_type = other DNA
gcttttcctttttctaaaataatcaatctgagacagagtctcactctgtcacccaggctggagtgcagtggtgcgatctcggctcactacaacctctgtcaagcgattctcctgcctcagcctcccgagtagctgagcctacaggtctcgaactcctgacctcatgtcggccccagcctgatgtggactcgatctcgagtctatacagatcctgagccaggctctgtattcgcaaatcctgtttgaaaatgtaagcgggactgggatctctgccacattgctgagtatacgtgacaagaaagcctcttttatctgggcgcgtcggattcttatctcccgccccgcgcagggacgccgcaggcggcgataggatccggactacagctcccagcgcgccccagttcccgcccccgcctccggagcccgacgctgca

SEQ ID NO: 5710 - DNA, 351 bp, Homo sapiens
  source 1..351: mol_type = other DNA
atctggaactccggacctcgtgatccccattttttttttaaagtaaggttgggaaaacgttattacaaataccagctgggagtggtaatcccagcctgtaatcccagctactcgggaggctgaggcaggagagtcgcttgagcctgggaggcagtgagccaagatcatgcccctgtaccccagcctgggtgacgggcccaaactatgacttgaatgtttctagacaaggaattatttgacaaacacactttaaaaagtaaagaaaacgcaaacccttcgttctccctagtaatttatctccttcaaaagataaaaagccttgaagggcagagccccggaattcaggagctc

SEQ ID NO: 5711 - DNA, 440 bp, Homo sapiens
  source 1..440: mol_type = other DNA
gcagtgagccaagatcatgcccctgtaccccagcctgggtgacgggcccaaactatgacttgaatgtttctagacaaggaattatttgacaaacacactttaaaaagtaaagaaaacgcaaacccttcgttctccctagtaatttatctccttcaaaagataaaaagccttgaagggcagagccccggaattcaggagctccggcgccacaagtgtttacttctgccgcctgccagccgggcggggaaggggagtacccggccacccctcatccggtcccggcgcccggcgagggcgcgcggctggtgtccgccccgcccgaaaggtaggggttcggctgtgctcccgcctggtccccaacgcctcaccctccgggagatcgaatttgggggcggccaccgtgcaactggcgccagccgcggagcaggaggagcttcccg

SEQ ID NO: 5712 - DNA, 590 bp, Homo sapiens
  source 1..590: mol_type = other DNA
taatttactcagcaatgtcagagtttttttcttaacttgtattaaatagcattagtttataacttcagattaaatttagcctttttgtaatattgtatgtttaaaaaatctatatgtgctgttttttatttttaggattctctttaattatgagattaatagcttttcatattataatgtttctaaagaagtgtgtttgataaatgcataatttaattgtatcatccccttgttttatttttaaaagatattattaaatgattatttaacagttcatactcttaaaaatatggttattatagttttctataagccacaatttcaaagtgtgggctttgaaatcagatctcagtttgaattctggccagtgctctgggtgagtactgtgctggccatttagtaagtggttaataaatcacgcatttggactacctaattagtaataaggaccaggcctttccattcatcactgtggagtcctgtacattaaggcttgaggcttaggcttaggggacaaatctagacattaatgcatggctagaatgtgactgcagattataatcacaaattgagctgttggccatgttcca

SEQ ID NO: 5713 - DNA, 579 bp, Homo sapiens
  source 1..579: mol_type = other DNA
gatgggggacgtcccggaagtcactgacgagctggctgccgcctctgcgggatcagtttgggctgagggcccaacaataacaggcgcccgggccgggcgggggccgcggggatccgacctccaattggccgcggtgcctagggggcgtggccggcgcgcgcgagagggagcgcgagggagctggctgcgggcctgcctgccagctagccggagccgcgggtgagcgcggcgagcggcgaccctggtgaggagcgcggcgcgggaggcacgttccttagctccgccgcggccgtcctccgcggctcgagcccctcccctgcgctccggcctggggtctcggcgcggggagcggagggcgcggggtgaggcgagggctgcctcttgttctcccgccgctgccgccgtctcctggtcgggtgccgcggccagaggcgcgcggggctgccgaggcacccgcactatgcaggcagactgccggccgccgcgatggcgagccgggcggtggtgagagccaggcgctgcccgcagtgtccccaagtccgggccgcggccgccgcccccgcctgggccgcgctcccc

SEQ ID NO: 5714 - DNA, 262 bp, Homo sapiens
  source 1..262: mol_type = other DNA
tgtgactctaattagtgtagatagacagcaggtgctcaacaactccttgtataactcggagctgttgcaacaactggcggcagttttaacaaaagatgggggacgtcccggaagtcactgacgagctggctgccgcctctgcgggatcagtttgggctgagggcccaacaataacaggcgcccgggccgggcgggggccgcggggatccgacctccaattggccgcggtgcctagggggcgtggccggcgcgcgcgagaggg

SEQ ID NO: 5715 - DNA, 178 bp, Homo sapiens
  source 1..178: mol_type = other DNA
atgcatcctctcttaatgtttaagacacactgagaaagaacttctaataccgaaactctgatgcccgtgggacggggctgagggctgggggctgcctggctccaggccatgtcagtgcctccagctccaggtccgggtccaccctgaactttggctctgctgcccggacgcccagttt

SEQ ID NO: 5716 - DNA, 255 bp, Homo sapiens
  source 1..255: mol_type = other DNA
cctctcttaatgtttaagacacactgagaaagaacttctaataccgaaactctgatgcccgtgggacggggctgagggctgggggctgcctggctccaggccatgtcagtgcctccagctccaggtccgggtccaccctgaactttggctctgctgcccggacgcccagtttgcccctccccagagaagagtgtccagctcctccagaggctgcccactatgaggagcagctcctcccacctgcccataaaagcc

SEQ ID NO: 5717 - DNA, 455 bp, Homo sapiens
  source 1..455: mol_type = other DNA
taattttccacatatggctaatcctagcctcatcagacctattagaagtctagccctttattcctacaaattgaatttccactacttattccatgcatagtaccaggcacgttgcgtgcagtccctccctgccaaatcacgttgggactgagacaagaggcactgcgggtctcttacctatagttacgaagcaatggactcccttattacttcgtttcccaagcataaataaaaggcccgacattcatggtcatggatccttgcgcatgttttgaaaacacacgcacatgtttgggtcttctcccgctgcggagaaaaatcgtcttcacatggtgtctcacactttcgacacaatctcgtaaacaaaattttttaaaatgcattatcaaaaacgatgacaatccctcgagtctgggagcggctgccggagaggcggggcagaggtgtgacgtcat

SEQ ID NO: 5718 - DNA, 561 bp, Homo sapiens
  source 1..561: mol_type = other DNA
tattctcttataattcggaggtgaattctcattcacaagaagtaggatttgtacaagtaaatctaccccatactagaggataatattcttaattcaatcacatttggctaattgctttattttgtttgccggtagaagagaacaaacattaaaactggctctaaagttctaattttatacattgtcttgaaagtacagcacaaaacatttaatttctttaaaaattttttccctgccaaaaaatgatagttttaactgctttcgttaattcaggaaaaacactaaaaaataagatttcattccttttgaagaattgtttggtagttacatcatcaggaaataaaacaccctgcctcccatgttagcccgacaggagggcgccggcgccccggcccaccggcccaccactctcctccgctgggagccgggaaccacggtccgttcacacggccggaacatccgcgggagctggggtgtgtggctgcgccgccgccgcggccgagggtcccgcggtcaccggcgcccccgccgacagcgccgcacacgcggagcgcaggccgg

SEQ ID NO: 5719 - DNA, 609 bp, Homo sapiens
  source 1..609: mol_type = other DNA
gaagcaatcctattttaatgtaattttaaaagaggttttaaaaggactcaagctactaaaattactcatctgaagcttgcaaataagaatgtccctaatttatttagcagattcatatagttgggctagaactttagttctcttataattcggaggtgaattctcattcacaagaagtaggatttgtacaagtaaatctaccccatactagaggataatattcttaattcaatcacatttggctaattgctttattttgtttgccggtagaagagaacaaacattaaaactggctctaaagttctaattttatacattgtcttgaaagtacagcacaaaacatttaatttctttaaaaattttttccctgccaaaaaatgatagttttaactgctttcgttaattcaggaaaaacactaaaaaataagatttcattccttttgaagaattgtttggtagttacatcatcaggaaataaaacaccctgcctcccatgttagcccgacaggagggcgccggcgccccggcccaccggcccaccactctcctccgctgggagccgggaaccacggtccgttcacacggccggaacatccgcgggagctgggg

SEQ ID NO: 5720 - DNA, 452 bp, Homo sapiens
  source 1..452: mol_type = other DNA
ggaaattctttattattcctgtattttttctataagtctgaaattattttgatgttaaaaattaaaaataaagagcatggttggagtaactcagattcaattttgaatcctcagtcttatatctatcatctgtgagatcctaggaagttattaaattattctgatctttggttttctcattagatcaatattaaattagataatgtggatgctgaaatatatatttgttgaataaatgaacaaaagtgatcctacttaaagaaaattagatgcttcaaattttagcaatcctaagtatgaaggttttcttaacacttgaataatataaaacaaaatgtcaaataataataatagtctcctgtgacactaaatggaacaggcagggagtcccttgttacttaaatcaatttaatgtccatctggccaggaagtatttaaaaagagcagctgct

SEQ ID NO: 5721 - DNA, 546 bp, Homo sapiens
  source 1..546: mol_type = other DNA
tttaaactcatatggatctattttaaatatattgtcttttaaacaccaactataaatgatacctgagcgtgtgctcaccccaaggccccggcggtggccaagtgtccgcccatggcctggaattccagtcctagaattctaaattcggacttgatcttccagactgttaggaagatatatttaaggtaggaggctagaacgtatctcctttagtatatagcttcatttacaacttttaaatattcagtcaaaaagtatgtgggccttcatttacacttttgacggggcctcacaaataggggtggtcttaaattgctacagcaggttaggactgtaaattctaactttgttaatttcgattgtcacaagcctccaactgggacggcgtccaccgcgccccgccccgcccgcggcaccgtggtttggaggggcagctgcctccaccaagtctcctcccccaagacgctgcctttcggcctcgggacgccgtgacgttaagctcagtgctggacttccgaagaccttttacgacattgagtctcggag

SEQ ID NO: 5722 - DNA, 251 bp, Homo sapiens
  source 1..251: mol_type = other DNA
tagggtcttgagctcaggagtttgagaccagcctgggctgctgcactgcactcctgactggatgacagagtgagaccctgtctaaaacgggcatggcgttgttttgcggagaacgctacaaatcagggctttcctccctgaaaagtctggttgttaagcgcagacccttctctcctcccggccggggccaggaggaggggtggggcggggcctctgacgcggtccccgccccaccgtagcgacgccgcggt

SEQ ID NO: 5723 - DNA, 239 bp, Homo sapiens
  source 1..239: mol_type = other DNA
agccggcgggaaccctgacgcttacgcagatgtcatcgcttcgttaattcacagcgacatgatgcagcagccttcttcagctgggtagctcggtctacgcccgtatacgcgccggcttcagtaggcaagagggccatctgcccttctttcctgaaggtagaggggacaacctctccctcttcggttgatactggaggagaaggacggccaggtctggcccggcatgccctgggcttccg

SEQ ID NO: 5724 - DNA, 532 bp, Homo sapiens
  source 1..532: mol_type = other DNA
aaaggctcttagccagttcgtatcacgatgtaccaattgttaatcgaatttagcttccttcacttattaaatacaatcatgctggcagccagttggcagcttccgtctgatgggaagcccccttgcttctcaccatgtccaagtgagcaccgggaccttcagggtgtccgctgcccggggccggactggccctgccctccggggtcttcaggccgctggcgtcgccccggcctctggcctcccggcgccgttgctgccgactccacaggatatggcacccgcgcccagcagcaggggtgccccgaccgccagagccagctgccatcgcggcagcccccccgtgcccgggcccgcagtcccgccgccgcccaccccactcccggagctcggtacagcggctgcgaccaccgctgcctccacaggtagaggcggccccctgtctgtcgcgagcgccacagtcaccggaagcccagggcatgccgggccagacctggccgtccttctcctccagtatcaaccgaagagggagagg

SEQ ID NO: 5725 - DNA, 325 bp, Homo sapiens
  source 1..325: mol_type = other DNA
ctactgtgatgttgttgcacttaacagcaaaacaatcatttatgaaatcttaatgtaaggcttctggtataccagaaatggagaaccatagttctggactctgatttttctattaatagttgtcttcatgaaaataccgtgtattccaaacaataccttgcaaggtaattttatattttaagagatctggtgcagagcatcggaaaaaagctattatagataaagccggcgggaaccctgacgcttacgcagatgtcatcgcttcgttaattcacagcgacatgatgcagcagccttcttcagctgggtagctcggtctacgccc

SEQ ID NO: 5726 - DNA, 494 bp, Homo sapiens
  source 1..494: mol_type = other DNA
tctcaccatgtccaagtgagcaccgggaccttcagggtgtccgctgcccggggccggactggccctgccctccggggtcttcaggccgctggcgtcgccccggcctctggcctcccggcgccgttgctgccgactccacaggatatggcacccgcgcccagcagcaggggtgccccgaccgccagagccagctgccatcgcggcagcccccccgtgcccgggcccgcagtcccgccgccgcccaccccactcccggagctcggtacagcggctgcgaccaccgctgcctccacaggtagaggcggccccctgtctgtcgcgagcgccacagtcaccggaagcccagggcatgccgggccagacctggccgtccttctcctccagtatcaaccgaagagggagaggttgtcccctctaccttcaggaaagaagggcagatggccctcttgcctactgaagccggcgcgtatacgggcgtagaccgagctacccag

SEQ ID NO: 5727 - DNA, 400 bp, Homo sapiens
  source 1..400: mol_type = other DNA
taatatttcaatgagggaacggttctgtcaatatgcacaaattataatggcaattgatttgcagattaggacttcaacattaaagaataccgtccccagggagcaggctcttgggccctattatttgctccctggagaaggcctgaacgccctttgggggcgtgggcagcccggagccccagcctcttccactccaagatcatcctgtttaaacaaagcggtctgtccctctctgccccgagccgtcccggccgcgcagccgccgagtgccacatcagcgacggcgctgccagcgggcctgagagaggggcgggcccgaggccctccggagtggcgggccgcccggccaatcggcagcaaggagctggggcttgtgccagccgcggccgccgaggcccgt

SEQ ID NO: 5728 - DNA, 349 bp, Homo sapiens
  source 1..349: mol_type = other DNA
agtgttaacaggagtgagaaattagaatcaagggcccatttcctcacttttgatttaatgtttaatctcctttaacagaaatatgtgaaacttctgtcctttgaaaagaagtcatttttaaaatcttggtttactttgttttatggtaacaagacaatacatcttcttattttcttaagtacaagtgctgaaactagcactaatgactgtgaatattcattcctgagtcgtatttgcaggtgaggcacacactgaacacctaagctggctggtcagaataaatgagtgtagttactatatagccattaaagaaaaatctgctaatggtgactcaatcagatttacatgt

SEQ ID NO: 5729 - DNA, 253 bp, Homo sapiens
  source 1..253: mol_type = other DNA
aataaataacttacactgatcatttcattaaataattatactttactaaatggaaagaattaggatccagaatattatcttgtcaacactatttttaggactagtagagatgttctctagaaaatttgaaactaaaaaagactttcgggagttccttttctttccagggttacatgaatcagagtccacatattttagtttcatggacaataaacttccactagtgttaaatgagttactagtaggaagttcc

SEQ ID NO: 5730 - DNA, 276 bp, Homo sapiens
  source 1..276: mol_type = other DNA
ccagagcatctgttctctctaccctgttcttccctgtaagggtagaggtgcatctatagagagacaccagtttgtagttactctgatgatgtattagtttcccagggctgctctaataaagtaccacaaactgggtggcttaaacaacataaatttgttgtcttacagtttgggttcagcagagccagttccttctgaggacttgtgaggcctcattctgaggtaccgaaggttaggatgcttgtcaagacccagcctgtgccagtatgcacactt

SEQ ID NO: 5731 - DNA, 339 bp, Homo sapiens
  source 1..339: mol_type = other DNA
tgctcaattaaactcctttaaatttaattcagcttaagtttttcttttataactggtaaacaactggagaccaggtagggtctaaatgtggccaaactcagtttcagcaaagaaccttgttaaggcagtgtagtgagaatccctcacccttgatggttactcatactgtatttctatttgaacaggaatctttagttcctagaaccgggcttataatgaatgaatggatttatagaagaaaaggttttttctttttcagctgttagaaatacccgctttcgagaaaaccggaagtgcgtggtcacgccccgcgcatgcgtgcatcggggcagctcacgc

SEQ ID NO: 5732 - DNA, 377 bp, Homo sapiens
  source 1..377: mol_type = other DNA
ttactcatactgtatttctatttgaacaggaatctttagttcctagaaccgggcttataatgaatgaatggatttatagaagaaaaggttttttctttttcagctgttagaaatacccgctttcgagaaaaccggaagtgcgtggtcacgccccgcgcatgcgtgcatcggggcagctcacgcggactcttcggcctaggcagccgggacccagccagccctgcgcctcgcgccgtcgcgcatgcgtcctgggtatgtaaggaggggcgaaaggacatttttttttttcttgctgcgcgattggccggggcccgcgcgagcctgcgagcgaggtgcggcggtcgcgaagggcaaccgagggggccgtgaccaccgcc

SEQ ID NO: 5733 - DNA, 475 bp, Homo sapiens
  source 1..475: mol_type = other DNA
aaaagacaataaaatgttataaatttttaatgtctggtagcattttaaattagatggttaggaaagatctctctcagttaacacttgataagaatctgaatcaactaggttttacttaacagtgttaactctggtgttctgagacagactggttaggagttgaatcaagttagagatcaaccaagatttttttgtcttatacaactcgaaggaagataaagaaatcaggaatttatttttagatatattaagaaaaatctaaatggtcatgtcagatgatgagaaaaaataatagtagacgtaaaataaaagcttattttattatccctacagtaaaataatgttgcctccagaccattttaacataaatatggtaacatgagtttcttagcatctaatagtagcttatgttttgttgtttaattatcaaaaccacttttatcagtctttctctagagttgtatatatagaacat

SEQ ID NO: 5734 - DNA, 535 bp, Homo sapiens
  source 1..535: mol_type = other DNA
ggaataaatgtcttaacatgtgtaaatttaaatgtcatcaatattgataatatagagatgaagtttgctcaaggacaattcattagtaagtgtagaatatactagcaaaatggggataatgccatatctcctctacgtctctacatctacatctgttgaatatatgtgtatacacatatatattataacgtaatgtatagctttgtagccaaagacttactcttaaatgtttctcataatagaatggctcaaaatatatctttatgagtttactcccatttaaaagaattactggataattaaaaagtttccttcttaataaggttttattttatatttttaacattttgatagcttttagtacattgtttctggattctttaaaatagtttatcaaatgtttcaaaactgcctaaatacttcaaatacagatctgccataatttgaatttttatatcacagcagaaagaaagaaatgtgatgatatgtttttgctgttgtgtgatgtcatcttgcccgcctctgtcactgggag

SEQ ID NO: 5735 - DNA, 724 bp, Homo sapiens
  source 1..724: mol_type = other DNA
tttggcaagtaagtttcttataagcttaccagtattttgcaaatacaactatgcaaatatatttaatggtcatttaggtttattagcttttataaaggctgaaaatgtggtttatttgaggctgtattgaaaaaatatacttgagcttttcctaaagcataaaataacattgagggtgatttaagaggaatgtggtttagatctttacaatacactttttttcagagaattttgccagagataacatgaaataaaatataatttcattgctatttgatagtaaatctttacttgatttaaaaaactgttctaatatagagaatttcatctgcagggaaaatgttttcttggttaagagttcctttaagcaacaaagttatcgcacagctatcatttatattaagtgcttaatatgttctaagcaaagtgaagattgaattagttaattagttaatttaatcctcacattagctctaccatactatttctattccattttatacgtaaggaaggagacaaaggaaatttgcaagagaatagtttcattacaaaaactaaatttgtacgtagctctgtattattgaaataggtagatatagtcagtctggactttttatgcttatatggaaaaatcagtgaattatatgtgaaacacattattcttagttagaataaagaaattgtctctctccatctgctctaattagcttatctcaccagcttt

SEQ ID NO: 5736 - DNA, 411 bp, Homo sapiens
  source 1..411: mol_type = other DNA
aaacattttccctgcttagagcaaaacttgtgattaaatcgtcatgaaagcttacacgtgcatttaaaaattattcagatatgcaccattagggataatcaggctaatagtactaaatgttaattgaacaaattcctgtcatatcagcatttcagttattgaaaaattaagttctagcttttcttttaaggaactttaaaaatcacaagttcgaattttaaaaaggaatcctgtctgctgacatatttccacagcaaatgctaaactaatagctaggctattattaggtgattttgccatcttaaaatcctgcaaacgctaacgtttcccttttaatttttgtcaatctaatcttcaaagtcaacaaagctaaacggtcgaagggcaggcgacggctcttgcgcaagcgcg

SEQ ID NO: 5737 - DNA, 487 bp, Homo sapiens
  source 1..487: mol_type = other DNA
tggttattatcaataatgctacaatgacattagagtacaagtaatgtgaaaggccaccaatttacaaatgtgttttaatttcatttcacattaaacaagcatagtgccaggaagtttaaagtcctagcgtcaaggagacgtgtgaaaaaaacatactttattttagtactctgtcagcaaatgtttataaattgaaaagaggattagaaacagttttttttttttttttttttttttagagagtcttgctctgtcgcccaggctggagtgcagtggcgcgatctcagctcaccgcaacgcaactgggattacaggcgcgcgcccaggctgcgcccgcctcggccgcccaaagcactgggataagccaactggccgagagcgtagtcttcgagtacccagttgcctactgacagccgtctcctaaggcgcttcttttagccaagaaagcgttctttgcgtgctgaagggagagggcggaacttccggc

SEQ ID NO: 5738 - DNA, 371 bp, Homo sapiens
  source 1..371: mol_type = other DNA
actattattattgctcttttatagagaagaaaagactttctctaactatatatggtaagacaaggacttcagaatgcagactgtaggaatccggtttcttattaaggcagaaattactgcagtcttaacttgacatagtcagactatacaaaaagtaactttacagttggctacgtgacttagacaaattactctctctgacctcaactcttacaggtaattaaacactgatttcccctttagggaaaaagaatgcaggctttttgtttacatagagttggcaggcattctgggtatgcagaaaccttctaagatcccagcgtttcgggattccgaaggcgggccggctggccccaaaaactcgatggttg

SEQ ID NO: 5739 - DNA, 416 bp, Homo sapiens
  source 1..416: mol_type = other DNA
gtcagctacttctaggagtccggtggagaagtgtactaggccgtgtctgcagctggagcctccaaccccagtccccgaggagggatgtcagccctgggcgaggtgaccggggtcgcttcccctcatatatatttggtgcaaaatggagaaccttttcccctacgtttgtgtaaaaatatatgtaaataaagccttaaaatacattgactataaatgcgataccaaaagaatctcgactcttccttgagtagtctcactgaaaattttataactgttaactggaatctaaatttccatgtaaatgggctgtctctggtcccgtgtcaagagactaatatttttccagaagcctgaaaatatgcttttatgatgttgggagtctcaaacgtaaaaacgctggatcggctccatgggct

SEQ ID NO: 5740 - DNA, 342 bp, Homo sapiens
  source 1..342: mol_type = other DNA
ctccgaattgtagttctaaaattataatctgttcgattcgcacagcctgagaaacggaaactattaactttatgagaagagaggacacctttctcttcagttcaccagaatgggccgggcgcagtggctcccgcctataatcccgaggagggcggaccacctgaggtcaggcccagctagagacagaatgactcataaaccaactgtctgactgcctttttggcaggccctctgggcccgagaaccctccagcgcctctggatgaattgcgccagaggtttcgcctcgcgatgattacgtcatcaaggattggggaggagatttccggcccccatccccgca

SEQ ID NO: 5741 - DNA, 413 bp, Homo sapiens
  source 1..413: mol_type = other DNA
ttgtgcacatctacagaagagatcttccaccctgtggcagaactaaacatctgaatgagcatgcagagtccattatggtcaagaaatggaaaaatacttagttgtcatgtacattaattatttttcttagtgctccaagcacagagaaataccgacgttttaccagttagaaaaatgtccaaaataggatcaaggtagagtcaactgcggttgtgggcactttcgctgctcccaggaaactcagacgtccgaagttcacgaggagtacctcgatccgcggggcgacagctgcagtgtcgcgtcgcgagcaggagcttggcggcgtagagcgccagggtgccaacttcgcttcccccggcgcgtgctgctgtcagtcaacgccctcggcccgcccccgccgaagctccaccaat

SEQ ID NO: 5742 - DNA, 519 bp, Homo sapiens
  source 1..519: mol_type = other DNA
taaatatataacatatataatatataatatctaaatatataacatataatatataatatctaaatatataacatatataatatataatttatatataattataatatatgcaatatctatataaaatatatatatttttgagacatagtttcagtgggctcactgcaacctttcaagcgatgagtacctgggcccgacctcaggttggagattatattttaaagttattttgaatactccctggaagtcaaaagatttgtcaaatattcaagaacaatcaaacaatcacttaaaaatactgtataaaagtttctatttcggcatactttacttttacttaactaaaatttcaaataaaatgtatccacttttatgatagttgaaaactttcaacttattcacaattagtaaaatgcagtctgcattaagtagccccgatggtaaaagtgtaaatgatcatctaataacgcagttgactcatctgtcaaataagcgagtgggccagggtccctgagctca

SEQ ID NO: 5743 - DNA, 544 bp, Homo sapiens
  source 1..544: mol_type = other DNA
tcaaggtagagtcaactgcggttgtgggcactttcgctgctcccaggaaactcagacgtccgaagttcacgaggagtacctcgatccgcggggcgacagctgcagtgtcgcgtcgcgagcaggagcttggcggcgtagagcgccagggtgccaacttcgcttcccccggcgcgtgctgctgtcagtcaacgccctcggcccgcccccgccgaagctccaccaatcgtagccgggggtcggaggtgaggaagcggggggctagcggcctggcgctgcggcgaccgaccggggcgtcaggatccctggcccccggagagcgaagggctcgggaggggccgctgcgggcggagcgacccattgcccggctctgccagcgcgctcctagactgcgacgcgcgcatctgctcccgagtccccagccccgtgctgataggtgcagcccctggagtcgtggctgtggggagccctgggttgccaaagcgtcgcagctaagaagccggagcccaggctagtaccggcggggcggggcggggcggggccggga

SEQ ID NO: 5744 - DNA, 429 bp, Homo sapiens
  source 1..429: mol_type = other DNA
actctgtctcaataaataaataaataaataaaaaataaaaaagtgtgaacttaaatatatttatatgtgtgtacatatattttcttttttaatttaaatgagaggccatcgggcctctttttaagagcatggattgtctaaatgtcataggagaaatcctttcagaaaataaagtgatcttcatgttacaggaccattgctttatttatgtcacagatttcttgtcctttaattagtcagtgaaggcacctttttgattgccgtattgtaaaaacattttaaaaggacgtctttaaggaaaaagttttgtttgtaggctccagtccaggtcttggagccggccctcgaggggaatgtccgggactcgttttggtctgggaatttccagtgtgcagaaaagatgaccgtattctgcattttagaaaacag

SEQ ID NO: 5745 - DNA, 606 bp, Homo sapiens
  source 1..606: mol_type = other DNA
tatttaatcataatcggtttatttaaacatagcatgtgtgtacttgctagttggacttgaacaaatagttgtataaatccattggaaaaatactgtgttagtttatcagatagtgtaaagctatgcagaattttaaaagttatatctacatatactacagcacctacatgtttgtgtattattaattactttttattcatggctgcacctaaaacattatttgcgtcccagcagataatttgagaacataaaaatgctccaacaaggccctgggctaacagctcgccgcgccggggcaggcagaggggtgcggggcgcgctccttccaggactctgcaggcccagccctgcgccgcgcgccctctccccgggcgcccaggcccggcgggggcctagagggcagggatggcccgggcgaggggtcccggggaggctggaagccgcgcgctgtcggggtttcccggtgaaggcaaacaaccggtcggtctgggcggagccgggcgggcggggcgtcctgaggaggggctgggaggcggcccgggcaccgccaatggccgggccgggcgccggggaggtcggcgagcgctgcggcccgttaaataccct

SEQ ID NO: 5746 - DNA, 345 bp, Homo sapiens
  source 1..345: mol_type = other DNA
agtgtcagacattgcatcggacaatgcagatgatctaccaactctatgagccaatgtataggatgatagtatttaactttacagagtagaattttctgtatcactcggtaaagtaccaagtactaggtaaatacaaagtgttatttctgtttactgagaatatacttatcaatagtgcatcagcaccttagaaattaagaggtccctgagcactaggagatattgccttgttctcataccacactgggtggtcaggccagcccgctaccacaaacatttaattttatataggggagatagtggaaggggaggaggatccctgttccccagggccttgcctttggg

SEQ ID NO: 5747 - DNA, 412 bp, Homo sapiens
  source 1..412: mol_type = other DNA
atctgaaataatttgaggattttctgtctataacttaaaatcaccgcttaactcaaagtaaaaagtacacgctctctagagggcttttgtagacattgggaaaatccgtatgacgaagtacggtttagaaattccggatttaatttcccccgggaaaagcaaatatcttctaggaatcagtccagtacaggggttgcccctcagaaggctgcagtcccagggctctccctggcgcgcgcggggacctggccctgggggcggagccgcggtgaagcaccgctcatccgggctccaggaccggggcacgcggttctccctgatcccggagctgggctcagggctcggactcagtcctgcagcgcctctaggctgcggatccgcgccctgccgaggaaagaggcagcttacacac

SEQ ID NO: 5748 - DNA, 401 bp, Homo sapiens
  source 1..401: mol_type = other DNA
taaatggatagaaatctatgtaaagcagtagctgtctcctcctcagtcatttaaaaaggtgcaaggtatttatcagcaattcccattcggaaacttgggaagtttcagttggcatgctgttgctctttttgatagccaacaagaagcaacgtcagccctagggagatgaatttctccagcgttggacccgcccagagctactctgttgctatgcaggaagtcccgcctttcagccccagatggctttggctcccggtcccgacggggcggcagcgcgaggaggacgggcgcctcccgtccattggctgcacccgctgtcgggcagtgcgcggttgcgcggcattggctcagcggcgcccggccccgcccccgccccgccccgccccgagcctgggtcctgt

SEQ ID NO: 5749 - DNA, 437 bp, Homo sapiens
  source 1..437: mol_type = other DNA
tcccagggctctccctggcgcgcgcggggacctggccctgggggcggagccgcggtgaagcaccgctcatccgggctccaggaccggggcacgcggttctccctgatcccggagctgggctcagggctcggactcagtcctgcagcgcctctaggctgcggatccgcgccctgccgaggaaagaggcagcttacacacgccttccgcagcccggagaccgctgccgccgctgccgctgctaccaccgctgccacctgaggagactgccattattattatcattccaatacaaggaaaataaaagagcgccacagcccaggggacggtgtgtctgggagaagacgctgcccctgcgtcgggacccgccagcgcgcgggcaccgcggggcccgggacgacgccccctcctgcggcgtggactccgtcagtggcccacca

SEQ ID NO: 5750 - DNA, 406 bp, Homo sapiens
  source 1..406: mol_type = other DNA
aagagtttaatctacaatttattccttctaattctgaagttgcattgttgaaatcatcatctccaaaagtcatgcaacatatgatgttcacatgagatgtgaaatatgtaaagagtcatatatttttatatataatatgcaaaatataaatcatgtatatattgaatcaaaggtctcacaggtgatggcagtccactgaccagttaaaagttgtttgatttttttgaatctacctacgaatgaggcactaacaacctcaatgcactttcttcttccatatccagtggagttgtagtttatttgcaacttggtgcagacaggggttttcccctacaggtcccgaacattagaaaatagaaaatgtgcggcctgtccgtcactgcgcgggccaatggcaggctgcctt

SEQ ID NO: 5751 - DNA, 567 bp, Homo sapiens
  source 1..567: mol_type = other DNA
cagcgcagagggctgcaccaagctcaatggcggtgttcacaggtaacaatgtttaccaccgtgaaccgcgaggggcgagtggaagctccctgcgggcaggtacccgaccaccgccctgccctgggcgtggcggcctcgggctcagggaccgcttcggcgctagacggccgcgtccggaggaaacgggcggtgtcctggtccacgcgcgcagccggacgtcgggtccagggagagacgcgggctggggcgggacgggacccggcccctgaagcgcgaccagcgcctccccggcgagcgtgggaacacagggttcagcctcctgcggcgggcgagcacgcggaccccaggggcgggcgggtgcgacaggacgtgacctggaagcgcggcgcgtgccaccgccctggagcaggcatccggcctccgtggagcgggcaggcgggccccgggtctggagcctgcgactggggagggcgccgcgtcaacagcagcggttgcggggcggggccgagtgcgcgtgcgcggctctcgcgggcggggagcaggcgggggagcggaagcagtgggagc

SEQ ID NO: 5752 - DNA, 318 bp, Homo sapiens
  source 1..318: mol_type = other DNA
ctctgagcctggaaagttaagatttgccaatagggagggaggagagtgaagtcatttagtttgccacctacctccctgccaggctggttgtagcgggaaggccacagtccaggcgtggggtgcaatagctgttgttagccaacattgccatgtgtgttctgatgagacccaggagacacacttccacccctccatctctggcagaggacggagtgtgagctctgaagcaagattcaaaccccaacctcagttactattcgtatatgatgagtataacaatagatttccaatctctgggaattatcttggattaccaag

SEQ ID NO: 5753 - DNA, 234 bp, Homo sapiens
  source 1..234: mol_type = other DNA
ctaaactaatattacagtggtgtgatgtaccattagtttgattttgatttcatttcataatagatcttattaatgataaaagttggcggccgggcgcggtggctctgatcatataatcatagggcaggggagagggcaaggtacatttggggaactccccctcctcttcccagctactcgggaaaagagactctagaggagggggagttccccaaatgtactttgccctctccc

SEQ ID NO: 5754 - DNA, 418 bp, Homo sapiens
  source 1..418: mol_type = other DNA
acctcattttttgcaactgttaagaaaattgcctaatacagaagccttttgaaaacataactgcagaataccttagagctttagggcagggaacactttatactacatgtaatgggtttgaaacagattaagcttagtattcttgtttttgaagtaaaacaaatccttccaaacgtaatacagtacttcaagctttacaatatactgttaagtgcagcaaaacctctcgttggaaagttcctgcagtaaaagtgaaacctatggtattgactatctttacaactatgaaaaacttttcaattctgagaaaataaaggtatcagtgagccagtgcagccttcagtgctacttttacggcagtggggcgcgaacgccacgcctccatgaggggcggggctgcttcccgaccaccacattc

SEQ ID NO: 5755 - DNA, 345 bp, Homo sapiens
  source 1..345: mol_type = other DNA
agaggagggggagttccccaaatgtactttgccctctcccccctatgattatatgatttggatggcatcctttgttccagacacagatattgaccagctactatgtgctagtaagtaagtggtagttggttgtatgtgcatgcatgccatgcatgtgacagtggaacttaactctgcagcaagtccaacctcaggaggttgcctgtatcatgttgatggtgaagctgatgaaactgcatcttctaattcctggacttttcagatctgtactgactcagatctgtttccttggtctgtcataggtagcaaatcaaacgtaccttggactttactctctgagaaact

SEQ ID NO: 5756 - DNA, 582 bp, Homo sapiens
  source 1..582: mol_type = other DNA
aaaataagccttaattgagctttaaaaaaattaaactgaggtcaatgttagtttgaattccgtaaatgcaaagcattctaagattaaaaaactgtaagcaatgtattttggtaaagaaaaaggattacgcttactaggaaggggaagtgcttcttaattgaaataatgtttttcaagtttgagttcaacccgagttcaaagggcaaaaccaagttttaatcatgactttccgtcaggcttggtttcgtagaaaaaccaaaactagaagcaaaggaaaagataaagttccgagctttttccgttacctactcgaaagccttcagtgagcgctcttgcctctcgctgcggccagcgggacaacagagggatcgaaggactgtcctttctttcccaggctggggccgccactcctcggcctcactgtcaaaagctgagtggcgttcgcctctgacttcacggctttgtactgactgacagtcaggagcaaggacttcaagcaggcagtggagtccattgcaccggccgcggcccggcttagggaccaccaccgcccagcgtgcgccggcgaagcttccggatccg

SEQ ID NO: 5757 - DNA, 469 bp, Homo sapiens
  source 1..469: mol_type = other DNA
tcaaaaatctagtaattcaaaaaaattcttttgaagtgaaaaaacatgatttctgataaacgatttaattaaatggaaatgtaccctattcttacaatttcttttttaaagctttattcgacgttaggaaatattaagcaaaataatattagatttaaaaaacgcaaataatagtgccattttcgtagacatcgagaattataaaacaatacctggcccagggtcagcagaatgtgacaaatactttggtcagggcatgactaatttgccacataatgccaataggttgactggtgattcctctcccgagaaatcgcgagatttctcgccttcacgggatctcaggccgaaacctcgcggcctctcagacgagggtgggttagcgggggcagctcccaacccccgtcctggagaacggtcccctagggtgcctagggacttccggagcccgaccggatccggaagcttc

SEQ ID NO: 5758 - DNA, 454 bp, Homo sapiens
  source 1..454: mol_type = other DNA
gttacacgctctataattgtttacggaatgaatgaaagcattacatgaatgtcccaactggttaaatcatttttatctttcagatttaaacttttataaaaaacaaaaccaaaactcaaaaatctagtaattcaaaaaaattcttttgaagtgaaaaaacatgatttctgataaacgatttaattaaatggaaatgtaccctattcttacaatttcttttttaaagctttattcgacgttaggaaatattaagcaaaataatattagatttaaaaaacgcaaataatagtgccattttcgtagacatcgagaattataaaacaatacctggcccagggtcagcagaatgtgacaaatactttggtcagggcatgactaatttgccacataatgccaataggttgactggtgattcctctcccgagaaatcgcgagatttctcgccttcacggga

SEQ ID NO: 5759 - DNA, 646 bp, Homo sapiens
  source 1..646: mol_type = other DNA
gtaagcaatgtattttggtaaagaaaaaggattacgcttactaggaaggggaagtgcttcttaattgaaataatgtttttcaagtttgagttcaacccgagttcaaagggcaaaaccaagttttaatcatgactttccgtcaggcttggtttcgtagaaaaaccaaaactagaagcaaaggaaaagataaagttccgagctttttccgttacctactcgaaagccttcagtgagcgctcttgcctctcgctgcggccagcgggacaacagagggatcgaaggactgtcctttctttcccaggctggggccgccactcctcggcctcactgtcaaaagctgagtggcgttcgcctctgacttcacggctttgtactgactgacagtcaggagcaaggacttcaagcaggcagtggagtccattgcaccggccgcggcccggcttagggaccaccaccgcccagcgtgcgccggcgaagcttccggatccggtcgggctccggaagtccctaggcaccctaggggaccgttctccaggacgggggttgggagctgcccccgctaacccaccctcgtctgagaggccgcgaggtttcggcctgagatcccgtgaaggcgagaaatctcgcgatttctcgggagaggaat

SEQ ID NO: 5760 - DNA, 488 bp, Homo sapiens
  source 1..488: mol_type = other DNA
tggccagattttacctaatgaagattctgcagcagtgagacgtgaatttcaaaagtactattttgtatgtttcccttgttacacgctctataattgtttacggaatgaatgaaagcattacatgaatgtcccaactggttaaatcatttttatctttcagatttaaacttttataaaaaacaaaaccaaaactcaaaaatctagtaattcaaaaaaattcttttgaagtgaaaaaacatgatttctgataaacgatttaattaaatggaaatgtaccctattcttacaatttcttttttaaagctttattcgacgttaggaaatattaagcaaaataatattagatttaaaaaacgcaaataatagtgccattttcgtagacatcgagaattataaaacaatacctggcccagggtcagcagaatgtgacaaatactttggtcagggcatgactaatttgccacataatgccaataggttgactggtg

SEQ ID NO: 5761 - DNA, 370 bp, Homo sapiens
  source 1..370: mol_type = other DNA
cagtcagggagatagatttgagattgagcttcatctcccctaggcaaatggtaacattttagtcaagatgaacatttgagtggatttttataaaaatgtgcctatatacagtttaggaaggtgatagtaacacaagttaaatgtttaagtggattattaaaaaattatgcataagagctaatacctttacaactaaaaaaaattgttaaaatttcagtaagtgatggtattaccttatttctttagtctcttaatcccaggaagtcagagtaaatttagtttactgctctaggggaaactagatttacctttcgctttcttaaaaggtttcctcttctagaatggtaaaaacctttgggtcctttctcgc

SEQ ID NO: 5762 - DNA, 501 bp, Homo sapiens
  source 1..501: mol_type = other DNA
tccaaaggataagatgcactgtattttgcttactagggagttattttctataatggaagacaaagaaagcacaagacacccatggttttgtttgttcaatcactgagagtaagtctcaattattgagacttagcttaattctagttatgaaattttaataatgaataatatagattctattccttatatgagtttccaaaagcattgtccagaacatctatattaaaatatcttatcatatacaatatatgtaatttaaaatgcactcagaaaatctgcttgttaaaatgcagattctaccctaaatagtctaatttagacgggggattttaaactagcatcttatagcatacttatgtacaccaacatgtaagaactgctgctatttgcttactatttacttacctttatttatttatttttcaattagactcaggtattgataaaaattcaaatgtcagattacaaaggtgtgggattttctgtttgtaactgaaacaa

SEQ ID NO: 5763 - DNA, 334 bp, Homo sapiens
  source 1..334: mol_type = other DNA
atacagaatttgcaccttccataatctgaaacattctgagttctgaaacatcccaggtcttggataagcccagctctctttttcagccatagctgatagaaagggaagcttctagagaaagatcttgctcttaaaataaaaaggtaaatgggctgaggatgtggcaccttctaccttgtgaccattatgagcccccatcataaaccatgcttctagttaagtaaatactgaacttccttatttttaatccaggattaattagtttgttaactgcaaagtaacctcttccttccagagcaaaggcagctgttgcttctcatggtgtattaaaacg

SEQ ID NO: 5764 - DNA, 391 bp, Homo sapiens
  source 1..391: mol_type = other DNA
tataatttaggggtaacagaattatattcaagtatggttggtaccaaaatgggttgaggaccacacgaccttgatacagttcttaggtccattgaccctgttcttaagttcattggcaaattatacatagacttctttttaataatactcaatgtatgattttttcatgtaaaatgttatctaaatatatcttcacaatactcaggtatgaaaaggcagaaacttttattactgttttatcaatatagtcatagaatctaggcttcctgattgcacaataatgtaggcaaaatttatggctaacaatataacaaggatcaccctctaaaagttagttaccaagtgccaagtgaccttggttttaaaactgggcagataagttaatctcact

SEQ ID NO: 5765 - DNA, 346 bp, Homo sapiens
  source 1..346: mol_type = other DNA
atgactatcatgtaattccaagtcaaaagacattgaatcagcttgggttttggtgacttaagaactcgagtagagaaacaccatttatttatacagctgttctacacatctgcgcatatctagctgatttgtttttcattttttcctccaaatagaaaaaacatgatcgcactcttacctctggttctatgtaacacagtgtaatcatttcgaatcaaattttaataccaggagactctaactgagtcgacgacgcagtgggagcttcgcggtcccgccgcaagggggagcacgtgtttgccccgccctctgcgcgtgagcgtgggcgtgggagtgggcgcgggcg

SEQ ID NO: 5766 - DNA, 314 bp, Homo sapiens
  source 1..314: mol_type = other DNA
ggaagtagaatgactactccaaaacaattacaaacacatctagttcaagttctttatttaatagatgtttgatgactatcatgtaattccaagtcaaaagacattgaatcagcttgggttttggtgacttaagaactcgagtagagaaacaccatttatttatacagctgttctacacatctgcgcatatctagctgatttgtttttcattttttcctccaaatagaaaaaacatgatcgcactcttacctctggttctatgtaacacagtgtaatcatttcgaatcaaattttaataccaggagactctaact

SEQ ID NO: 5767 - DNA, 343 bp, Homo sapiens
  source 1..343: mol_type = other DNA
aaaaaccccaggaaaacaaataagatttttttttttttttttttggggggacagagtctctctctgtcgcccaggctggagtgcagtggcgtaaagcgattctcgtgcctcagactcccgagtagctagggctggtcttgaactcctgacctcaggatgattatattgtaaaaaatgtaggatcactcaggccttaggtacacccaaccgggtaggcggagtgctttcctggctgcatcttagagggctgcattcaggttccaccctggaagggaggagccggaattccggcctgatctagctaaggcttctagacttcaggagcttaagaatcgtaggggcg

SEQ ID NO: 5768 - DNA, 359 bp, Homo sapiens
  source 1..359: mol_type = other DNA
atctgaggaaagatttttcaaattattttaaggagaaaaacttgaacttcttttcacttactgtgctattgaaaaagttaccaataaaaatttataccaactttagtcatatataaaatggggaacaataatgactgaatttaaaactcacaatttgagatataaacctgtaatcccaacactttaaaataaataacaaatactctatagactttaaaagctactattattagttctttagttggttgagtaacttacttaggaaatggaatgtatttggtacgagaaaatagctttcttcaagggtctccggaaccatactttggataattacatttaaagttgcaattttagcattt

SEQ ID NO: 5769 - DNA, 265 bp, Homo sapiens
  source 1..265: mol_type = other DNA
agcccagctactcactgcactccagcctggactacagagcgagactctttcttgtttttgatgataaccagattttaaacaaaagttattaattaacctctaaatttaattttaagattatccactataggagatactacaaggtagaattattataaattaggtgtgtcaagtactagtgtacttgttaaaatactagactcttattggggaactctatatagatattaaataaacccataggaaacagtgttacatatgaatc

SEQ ID NO: 5770 - DNA, 440 bp, Homo sapiens
  source 1..440: mol_type = other DNA
caggctgaaaaactaatcagacatttttaccaaggggtcactttcctgaaacctgtttgcggtctgtaaatagaacctccagccaacctggtgggatcccagacgaggggtagaaaagtacctccactcccaggaaatgtgcatttccctgcaagaggcaataaaatttggtttgatagcactattccctgttacttttcagattttattaaaattaaatgtgttaattctttgttctttcaccccattctggaaagaaaacatacaagctcacatttgttaaatgactttgtgctcttgaaaaaaatgtataaaaagcacattgaggacacagagatcctgaataagagactctttggatactgaaaagtctcttaaataaggtgatacacaaatttcagagaacaatttcaacattgttctgtcgaacttgaaaacat

SEQ ID NO: 5771 - DNA, 336 bp, Homo sapiens
  source 1..336: mol_type = other DNA
aacaggaaggaggagaaagtctctccctcccttcagtgccccgcgccccagcgaggaggaagattactagtccagcaggctgcgtccagcttcctggcaacggaagggcagccccctcctgccttcccctctcccaggtccccgccacagggagagcgccgcccgggagaggagaaggccgagcgtgattgtcccgcagccctcgcctcagtcggcgccggggcccccgtggacccgcgaggggtggaggatgaaaagaatatttttttttgggggagggcgggcgagtcgggcgcccgctctgagaggggaggggagtggcggcggcggcgggcg

SEQ ID NO: 5772 - DNA, 239 bp, Homo sapiens
  source 1..239: mol_type = other DNA
atgttagctgacctaaggtcctcctgagttactgaggacctgcctgacctggagccctccaggaccctaccgtcaattccgtcacggagaagtgggtttgtatgcctacgagcctccataccagcgagactctttccaaaatgggatttccaatagtgccgacaatacaaatatgtttcattattgcctcctctaactgcacagaagtccaaatatgagatacagcacctttggccgaa

SEQ ID NO: 5773 - DNA, 324 bp, Homo sapiens
  source 1..324: mol_type = other DNA
ctggagccctccaggaccctaccgtcaattccgtcacggagaagtgggtttgtatgcctacgagcctccataccagcgagactctttccaaaatgggatttccaatagtgccgacaatacaaatatgtttcattattgcctcctctaactgcacagaagtccaaatatgagatacagcacctttggccgaagcctgcaagtttccacaaatgcagtcgctgccgcggcgtctgtctacacacacaccagcccggagagcgctggccaatcggagcgcgctccgccagcggccaatcacgggccgcctagcccggcaaatctgcc

SEQ ID NO: 5774 - DNA, 398 bp, Homo sapiens
  source 1..398: mol_type = other DNA
acagggtttcactgccctgtgattacactgggcccaccttgataagccaggataattttaccatgtaagataacatactcataggttctgtattagaacagatctggattcaaatcttggcttcagtacctactcataaaatagaaataaaatctcaacattaccatcaggatttgtggtaatatgcatgaaatgcataacatataatactctctcaatgaatggtagccatatttatttaaaaaactaccagatgctacaagaatttaatagaagaaactccactattaaataggacatttgataaagtgacttccagatttccctctgagattgctgaaatctaaaggaataaaaatttcgtttcctgcaatggccaggcggctgaggccagctgg

SEQ ID NO: 5775 - DNA, 553 bp, Homo sapiens
  source 1..553: mol_type = other DNA
tgaagggttgatgggtgctgcaaaccaccatggcacatgtatacctgtgtaacaaacctgcacgttctgcacatgtatcaacttaaagtataattaaaaaagaaatttaaaaactctccctaaaagtcaaacttttacttgcacatatgaaaagtgtaatcattaaataagctatttcttcagtgacggtatactcaagtactttgcatatattattcagaagcttattagctgccctgcagcaccagtatcatttattgctgcactccaggtgaagaaattgttgctgggagctacaacaacttgcccaaagccacaatgatcataagtttatctgcgtaactctagggactcgcccatccaataaagcattggctgttttcattaaaaataaaactttcaagagatatgattgcaagaaaatcagaatgagtttaaaaccctcctgaccccagtccttagctcaggccgttctccaaggattttgcaaacctgctttcgcagctggtaaacttgccccggggcgttcgctgtctggtgaggaaatcatcac

SEQ ID NO: 5776 - DNA, 541 bp, Homo sapiens
  source 1..541: mol_type = other DNA
tccaataaagcattggctgttttcattaaaaataaaactttcaagagatatgattgcaagaaaatcagaatgagtttaaaaccctcctgaccccagtccttagctcaggccgttctccaaggattttgcaaacctgctttcgcagctggtaaacttgccccggggcgttcgctgtctggtgaggaaatcatcacggagcggggcaggtcaccaacttcgttgctcgaactccctgggtgcccgccgcggtggttagggcggacccagccgcgcggagcccaccattgcggcccgagggggacccgacgggggcccgacggtgtggcgtggcgcaaggagcgcgcctgccttctctcgccgccgggaacgggctgcaccaatggccaggtgagtggtgccgactccgtgtgccaggagtgcgtcccggggacgctgcctcccccgcggccgagttggttgccgccggttgcgctgcggtggctgcccgggccgaggaggggcgcgctgactgctcaccgcgagtcaggaggggccggcgggc

SEQ ID NO: 5777 - DNA, 444 bp, Homo sapiens
  source 1..444: mol_type = other DNA
atacataagtgctagtgtctagcatccttgccaattatttttcttttttgccaactgaatggggggaaaaaggcattatttttttaattccaaattttatttgaattatatttcttatttataggagggctgagtagaagtattaatgtatctatgctacaaaatccatttgccattcaaaaagtttaaattcgtatacaaatatattttttatttatgatggttaagaaagtcggattatataatattctcctaaaatttatttactttttttactgaaatttattttcgaggtcggcgggattgcaggtgatgcagcaagcctggtgtcctcgacaggagacgtttcccatctaggactttctgagcttccatcagcccgctgataggtgaaaatcttgcggggagctctttagctccgaagcgcatgcgcagccgttgcgt

SEQ ID NO: 5778 - DNA, 384 bp, Homo sapiens
  source 1..384: mol_type = other DNA
cccatgagaaatattcagttacttctgacaatatgtcggacttcagatgaagtctttacattctatcaaaacctttcactctaagagttcttagtcgttgagttttgtttaatttataaaacttatcccagaactttggatcacctgaggtcagctgcactccgcgagactctgtctaaaaatatatagtaagaattataataataatttataaaacttgttcttagtgtctttcagttaagagtagcatgaaaaaaaagtttcctcctgtcctgccagacagttgttacctcagggcagggggatggacagttggtagaacggaccctcccacaggccctcatccctgtgcagctgctggcctcgtagacaatcggctgtctc

SEQ ID NO: 5779 - DNA, 395 bp, Homo sapiens
  source 1..395: mol_type = other DNA
ctgcactccgcgagactctgtctaaaaatatatagtaagaattataataataatttataaaacttgttcttagtgtctttcagttaagagtagcatgaaaaaaaagtttcctcctgtcctgccagacagttgttacctcagggcagggggatggacagttggtagaacggaccctcccacaggccctcatccctgtgcagctgctggcctcgtagacaatcggctgtctctagcaacggccctggttgagccccctcattcttccaggcgcgaggcagcagcggctgcagttcaacatgaaaggaggcttcctccctactgagaagggggaagaaacgtccgccacccatcccccttgctgcggagggggattccagcccccctggaccggccgg

SEQ ID NO: 5780 - DNA, 420 bp, Homo sapiens
  source 1..420: mol_type = other DNA
accggaagttctgaagtgtgtgtaaggcccctcctctcaaagataaataataatggtcatttatgagtgcttgcaatcactgttctgagtgctttgcttacaacaacccttgtaatcctggtaacctcacagtgaggacactggttttagtgtatattattcacctcctagcaccatgctggcacgaggcccccaacaaccaacagttcgtagggttagatcggagatggtctgcatctgcaggcgggctctggagcccactccggcacggcctcaggtgctctaccccgcgggatccagggagtggccgccactcacagttgcccctgctccggtccgctcccgccgcccgaggtccgcgacgccccgcccagtgggtggagtgtgaggcggggaggtcgctcgactcgccggcgctgt

SEQ ID NO: 5781 - DNA, 274 bp, Homo sapiens
  source 1..274: mol_type = other DNA
cagggataactgttcattttgcattctcatcagcaatgcatgagataccttgccatacttgatattgtcagggttttatagccattgtaataagtatgtaaaagtgttccattgtggatttgatttacacctacaatgtttagtcaaattttctaagaagacaacgtgatttataaacgtaaatatctgtagtggaaaaactcccatggcccatctgtaatttcagacctgggattccccagaggttctggccaacagccaggcactgacatgt

SEQ ID NO: 5782 - DNA, 407 bp, Homo sapiens
  source 1..407: mol_type = other DNA
tagaaaaggccttgtgggagctggaacttccataacaaagagttgggaattttaccaccattcacttatacaaaacattaaatacaattttaaataactttaagatattttatgagagtaggaatgtgaaaagttggctctatagtaataactaagtaatttcaattaaaatattttttacatattatgtttagaaaaaacaaatgagtatatcattattcctgaaaatttcctcacatataacccagagtgaaagttcaccttgtcatcttccaggaaacttccttttactagaattctgggaaagcagtgtccaacagctctttgtagtcttaaattaacacaatggcgcaattcaccccttatttgtttatttttaaaaaataaaacaaagccttaagcatcat

SEQ ID NO: 5783 - DNA, 402 bp, Homo sapiens
  source 1..402: mol_type = other DNA
tttttttttttttttaagagccaagaactctggaacaagaagaacctgtaatcccaggcgtctgtagtcccagctactcgggaggctgaggcaggattcaccaaagaattgatcacatcatgaaaggtgaaatcattacggaattgcttaaatatataatttgaatctggatttaaaaataataaatgtaagttttttctttaaaaaaaaaaaaaagtccattggtttcctttctcagtccaggtagcaggaaaatggaaaaaaaaaaatgattttttttttccaaacactttgtcagtttccccagcggtcacctttgaaaagggaaaaatgtctgaagctgaatataaacatccagcctccgctcctgtgagggggaggtgcggcaggggcacaggtgac

SEQ ID NO: 5784 - DNA, 446 bp, Homo sapiens
  source 1..446: mol_type = other DNA
atctgatttgtgtttttgtgattagtcagaaacaccagctgcctcccgagtagctgggacgatggtctcgatctcctgacctcgagatccgctgggaaaagacaaggattatcattcatttccacataagccaaatatttggagtcaacacttttaattgttcaatattttactacaaatataagaaacaatacagaattaaataacacatgaaaatcttgctatatatatatataaatatccaatttaacagtaattatggttattaaagattcaacatcattccctggaacaatatctttagaacaaagggattgtatgtgcctcctctgctattgggatatgaattggctgactgctatacaggaaatctcctaaacatctgttttcataatgtattttcattatatgaggctgaatttagaatgacgtaaaatgttataaga

SEQ ID NO: 5785 - DNA, 608 bp, Homo sapiens
  source 1..608: mol_type = other DNA
aaaactattgaagtttggccttggaataaaatcatcagtctctgaggaaaaaacttatataatcgacttctgttaaatgccacaaatctagatctctcatttggagtctcaaatggcagatgaatttgattagctcctatgactataagctaagctaattattaacaactgcatgaagaatgtttaaaatggaaatttcctttaattgatattcaagatctcctttagattagaactttattatctagagagaacatgtagccaatattgatgatcttgttccattgatatgtatccacagattaaagacggctgctcttccttcttctgttgaggaagttttctccataacctgagataaatcttcactggtttaatgacaataagcatcctcatcttaccgtgacatgtacaggaaaaaaaagaaacctaaaatcttttacataaaagaagtttcataggggaaaatgtatacttaccattgatagttttaccataaatttcctgaccttaatttgattaaaatctcaacttaaagactgcaacaatacagatttctttaaagtttaattgctcatttcactgaacattgagtgcagggttctttt

SEQ ID NO: 5786 - DNA, 553 bp, Homo sapiens
  source 1..553: mol_type = other DNA
ttctaagttgactgtctctgtcatgaagattatagtcgtaaaaactgaagcagcattatttaagccaaggtatgttaaaaagactgtttctttaaaaattatctttttcttggtttgatatcactcttttctatagtacaggagagagaacagttgtatagataggacaaaaacttcatataaataaatacctttcttcttataagccaaaaaatttatttttacatagaattggataaattttagaatacctattgttttggcttattctcagctaaataaacagcccagatcacaagattatagatacctctttgctactcttgtttcttagagcaaacagctatcatcctggtaaaactgttggcatggcataacaagagatattttataatttaactattttaataaatattttatagttattatagtttataatataactattaaaaattaattcactgagagtaatagggtcgatttctttacaaatgaaaatatgtttttcttctttcgggatctacattaacaattttttttttttttggcttct

SEQ ID NO: 5787 - DNA, 349 bp, Homo sapiens
  source 1..349: mol_type = other DNA
aggcgtgagccaccgcgcccggcctcgcttttactcttattagtaaataattttgctgtaagataaggctttcagaattgtattttcctcctcttttccctcggaggaaaaagcttatctgaaacactgctgtaaagttttactgaactaatcaatgaatctaaggccctcttccccattgggcgcacgcctacaggacgcctccccgacaggagggggccagcccgcggggcgcggttacctccctactggagaagctacagtaggtataggaaggaggggagaagcggcttatcccgccccagcccggcccctttctcacgtcacgtgccgggagagtctagtgtca

SEQ ID NO: 5788 - DNA, 500 bp, Homo sapiens
  source 1..500: mol_type = other DNA
tttacctttaaaaaaaaaatcagtcactactgtaacagctaatgtgtcacaattttttactttaaaaatgctgtactgttgccaatatatttttaaaaattatacagccaatttcacagttgggatcaacttaaaggaaaagtgacctcacctcaggtctcttttgacctctgtgtgtcaaacactaaattcattttttaaagagaagcaaaatccttgcttaaaaaggctaaaagacttccagtgtttggatttaaccgcagagcgtcgctccaagttttgccccgccggagaaagcggggactcctgcggcgcctggtctcccggcaaccctggcctggcttaccttgaggaccggggtcaggtactcagcctcctggggccggagtagcggccggccccgcgacgggatggcaggggctcgctgccaccgactcgcatcagcacccggctggcagcacccgaggggacgggacgcgacgcgacgggacgggcgggac

SEQ ID NO: 5789 - DNA, 547 bp, Homo sapiens
  source 1..547: mol_type = other DNA
gtgtgtcaaacactaaattcattttttaaagagaagcaaaatccttgcttaaaaaggctaaaagacttccagtgtttggatttaaccgcagagcgtcgctccaagttttgccccgccggagaaagcggggactcctgcggcgcctggtctcccggcaaccctggcctggcttaccttgaggaccggggtcaggtactcagcctcctggggccggagtagcggccggccccgcgacgggatggcaggggctcgctgccaccgactcgcatcagcacccggctggcagcacccgaggggacgggacgcgacgcgacgggacgggcgggaccggggcggcaggcacagcgcgcgaagacggggtgcgcgatcctcgcaccccaggcagcccgcgacggaccggacccagctgtcacccagccgcgagggagggcagcggggcccctcgccgtagctgcgccgccaccggggcctcacgtgacactagactctcccggcacgtgacgtgagaaaggggccgggctggggcgggataagccgcttctcccct

SEQ ID NO: 5790 - DNA, 315 bp, Homo sapiens
  source 1..315: mol_type = other DNA
tctgagaaccctggcttgtcactgtttaatagtgacatggagagtcagctcgcccttctatggattgcctaaagcccttcagacatctaaagtctctgcagaggaaaatattgtgcagccagagctttgaagctagagatcataatgcctgttccctgatgtaacagtcaactgcaatctcgacttgcagtaagaatatacacatgggactataaatacatatatactgtctgtgtcagaaatctgagaattttctccttccaaccagtcatcctcttctaaagtgatttatgatgatgtgtggagtttaaaaac

SEQ ID NO: 5791 - DNA, 312 bp, Homo sapiens
  source 1..312: mol_type = other DNA
acagagggtctagcagggctggccatccttcttggtacccctgggacttcaaggtgtggccgggcaactctatagtctgagaaccctggcttgtcactgtttaatagtgacatggagagtcagctcgcccttctatggattgcctaaagcccttcagacatctaaagtctctgcagaggaaaatattgtgcagccagagctttgaagctagagatcataatgcctgttccctgatgtaacagtcaactgcaatctcgacttgcagtaagaatatacacatgggactataaatacatatatactgtctgtgtc

SEQ ID NO: 5792 - DNA, 367 bp, Homo sapiens
  source 1..367: mol_type = other DNA
ctgcagatgtgattaaattaagatcttgaaattagatcatgttggattatttgggtggaccaaaaataatcacaaggcatctgatcaccagaactgtaagataataaatgttgtgttgtgtggtaatttcttacagtagcaataggaaactaatacacatgttgactcccattatagacaggaatttcacacaataattttcaagaaaacatattgtattccagactcaaatactatcataattgggaaatttacaaggatgggccaaagtagatcaatattctgttttactttttggtgcaagtttagacaaatctgtttatcttgtactgtaaagaatgagctgagagataattcaatcaatctg

SEQ ID NO: 5793 - DNA, 444 bp, Homo sapiens
  source 1..444: mol_type = other DNA
atttgtaatttggttaaaatgatcagtctaattttccaaaggtgaaactgaatggcaataagtactgagttctgatactgcagatgtgattaaattaagatcttgaaattagatcatgttggattatttgggtggaccaaaaataatcacaaggcatctgatcaccagaactgtaagataataaatgttgtgttgtgtggtaatttcttacagtagcaataggaaactaatacacatgttgactcccattatagacaggaatttcacacaataattttcaagaaaacatattgtattccagactcaaatactatcataattgggaaatttacaaggatgggccaaagtagatcaatattctgttttactttttggtgcaagtttagacaaatctgtttatcttgtactgtaaagaatgagctgagagataattcaatcaatctg

SEQ ID NO: 5794 - DNA, 606 bp, Homo sapiens
  source 1..606: mol_type = other DNA
tcagctctatagctccccatagggctagctctggtgtgggcctaccatatacaagtgatgatctgaggttactccttaatataataacaattcttcacattaaactgtttgcattccagggtacccaaaggtggcaatctttgcaaattttcatgcaatgagatagggaatctatcttctatccatccatccatccatccatccatccatccatccatccatccatttatccatttctttacactgctgcttttaaaacaatttttaaattttatagagatgggcgggattacaggcatgagccaccatgcctggcagcactgttgttttattaaaccatcctggcaactcaaaagattcatttttgtttttttcagcaaaggtataatacagtttccaaaagatgtaaattaaatgtataacatttaggcatgttagcatactttgtgatcaaaatcttaatgtgaagctatttttgaatttgctagataaatttacaaaaatcttagcattgatttcaccaaattattaattgattagaaacagcacagggtttgcttatttatttaaacaaaacagaccaattttgtaaagcagagactaatt

SEQ ID NO: 5795 - DNA, 383 bp, Homo sapiens
  source 1..383: mol_type = other DNA
tctgatgtatacaacagagtattatacacacttttatacatggcagccagcagcacatcaggctgccgtattggctgccctttaatttttgtatcatatttattcaagaattgtactgtttaattactgaacaacaaaccagatgttttagaaaacctagtttttttaacatatgaatatttttcagttattcatttcatcattatgatacctgagaaacttttgaaataagatgatattacttctgtaacatctgtgcaaaactgtttttataagaaatctctaaaatttaatgacatttcctgcacctatagaagtcgcttgagactcaaaggccaagtgagctgttccccgcaggtcccagcaggcgtcgcggcagcggg

SEQ ID NO: 5796 - DNA, 573 bp, Homo sapiens
  source 1..573: mol_type = other DNA
agtcctgcaaaaattttaaatgctctgccagagcaaatctaatgctaatatgtagataaaactgaattttaaaaacgaattacaaaatttttaaataaaaaagcaatggctgtctcaaaatcattaaataattgaggtactctttgactatagttccacatatatttagacgaaatatctctggcatgcaagaatgctcactcatgaaatttcactaataaacgttgttataaaaatttttccacattattgccatctagagattattatttttgcacgataggaaatttagattaggcgaaagttacttattgataaggaccatctcatttgcatgttttccctacttaagttaaatagaagaaaaaaggagagttaattttttgaatgcttaatttgggtttgaaaagcttttaaagcattttgaagtcttctatattcattccaaaataatttaagctgtatacagggccggacggccagggaagcggttagcgcgccggcgcgcaggtgaaccgtgagaatcgcctctcacctctggccgcggaaggtccggggcgtggtcgaacggac

SEQ ID NO: 5797 - DNA, 372 bp, Homo sapiens
  source 1..372: mol_type = other DNA
agtaagactgcttgcatgaaatagtagtaataacatcaacaatattaactatggtaaatgttcattgtttgtataagtctgtgagattgatactattattatcatcttcattttactggcagtctgtttccaaaactcactgtttttctaaataaaggagccttcctttacatgtctgaggcagagttgggggtaaaagcaattttccatatttgtaaaatgcctagaagtatttaacagttccaaacttggtggtaaccaacagatgactgaggcagcctcccgccgggctcctggccccgcccgagccccaccccctgctcccttccggcccggactgggtcccatcgccccacctccggtcgctggacg

SEQ ID NO: 5798 - DNA, 333 bp, Homo sapiens
  source 1..333: mol_type = other DNA
agctgacttacactctagcctgggcgacagagtgaggttaagtgactttccaaagtcacagtggcttcctgactcccagtgcagctgtccagccacacagggaaggcgctgcaatgaagatacggaatacctgtgcttcattcctaaaaaataagaagggaccaccaccgaatcagaaactctggaggtgcttttctgaccaacacacacgcgcgcgtgcgcgtacacatacacacgcataggtaaattcctccctggctccatcctgggatgatgaatggaggtcaggcaaaccctccccaaccgaccgagggggtcgggggaggctgcgtt

SEQ ID NO: 5799 - DNA, 187 bp, Homo sapiens
  source 1..187: mol_type = other DNA
ccaccaccgaatcagaaactctggaggtgcttttctgaccaacacacacgcgcgcgtgcgcgtacacatacacacgcataggtaaattcctccctggctccatcctgggatgatgaatggaggtcaggcaaaccctccccaaccgaccgagggggtcgggggaggctgcgttactgccctagagttt

SEQ ID NO: 5800 - DNA, 280 bp, Homo sapiens
  source 1..280: mol_type = other DNA
cttttctgaccaacacacacgcgcgcgtgcgcgtacacatacacacgcataggtaaattcctccctggctccatcctgggatgatgaatggaggtcaggcaaaccctccccaaccgaccgagggggtcgggggaggctgcgttactgccctagagtttaaagcttcttccatatggagggaccgggtgcgctgggcgcggcgtcccctgcgttgtcctcctgctgccgcccccgcggccgccgctttctgccgcggggaccctgagccccggcccgccgg

SEQ ID NO: 5801 - DNA, 454 bp, Homo sapiens
  source 1..454: mol_type = other DNA
ttaacttttgaagaaacctctcaaatagttttccaaagtggttatgccattttaccatgtgcttattggccatacatatatctgatttggtgaagtattcaaatcctttgcccatttaagaaatttttcttattgaattataagagttctttatacattctgtatacaaagtcctttgtcacatattggaatgaccattttaaaacaagtatttggtaactaataacgttaggatttactcttaaaagccaacagagataatatagttttaaaaataacaaaaatcccacgatgtatctttgttgttgatattcatgtcatttaattatctacatgacgtcctttaggggaggtaccgggttcccggagagctggacgccggccgcgcatgcgccccacggcccgccctggttccgcctccctggaagaggggtggcgttgtctcggtaaccgg

SEQ ID NO: 5802 - DNA, 291 bp, Homo sapiens
  source 1..291: mol_type = other DNA
taggttgtaataaacaacttttttttttttttttgagacagcacctcagcttcctgagtagctggaaagcttaagcaatcctggattccactactaaagatttgtaaacaaatgaatagagagaactttcgcccaggccggactgcagtggcgccatgtcggcgcctcccgagtagctgggactacaggcgcccgccacctggccacctctctcccttagactcaggacccgagatagctttgggaggcgcctgcgcactgggctcgccgctggtaacccaggcaacagcc

SEQ ID NO: 5803 - DNA, 358 bp, Homo sapiens
  source 1..358: mol_type = other DNA
ctaatttttatcagaaaagtatttcctttttacgataggctgtggtttctgctttaaaaaaacaatcctggggtttctctcagaatcttaaaacttccgggaccagacttcaggcagtgctggaaatctttttttttttaactgtacatatttacatacatacacatatggtgactctccgaactcgcgacccgtgacctccagtggagaccccaggcgagcacgctgccagccctggccggctgggttcgccaggcatcacccgctcggctctgaagcggacgcctggccctgcaccgggctttggaaggaccgcgctcgccccctccccagggtggctccgctttcgagcccgggc

SEQ ID NO: 5804 - DNA, 442 bp, Homo sapiens
  source 1..442: mol_type = other DNA
gccagttaccggtcgccgctcacctgctggggcgcgaggtgcagagactgtaccgaccgaggacccagaggctgtcaccacggagggggggggggggcgggcccaaccagtcacatgacgtggggcctgaatttttacggatcccttgaatattaattttcttggattaaagaaataaaagataaattttcacaaagagtatgttataaagtacaatgtgacgttcgagggacaggaatggcggtggcgttccgtccctctgcgattgttaactacgtttgttttaaaacacctaacttaaacttgagctttccacagatttctttacatttagaagaactaactttataaaaaaatctggattttaccgccagggcctaccccagccccgcgcggaggcgagcagtgcggctgcgcgtgaggcggcggcgcgccggcgcgc

SEQ ID NO: 5805 - DNA, 309 bp, Homo sapiens
  source 1..309: mol_type = other DNA
tggagttaaggggcactcaggtctccaggtatttagtaacccaggcttgagatctcaaacccgctgggaggcccccagggcatttctgaacatggccatctccaattcacagaaatctgtgtgttgttgcatatcgagaagtcggaaacgtctgattctttcttctccgaagatacaaagaagtttcttaaaacaccttcttttctaggttccggcagcgttcccgcagcctgattggcggggcgggaacgcggcgcgcccagggtaggctgttcgcttgctgagctgcggccgcaaagttgaggccgc

SEQ ID NO: 5806 - DNA, 441 bp, Homo sapiens
  source 1..441: mol_type = other DNA
atctagttgagtctgaaaccactccacctggagctgcgggccggcgtggctcagcggtccgctcccgggaaggaggccccgggcgctcccgggagcctcgcctccgccccctccgggagccgagggaactgagaagcagagaaatctccctccgcccgggcccggaccccccaccggccgggccctgcccggccgtcgttaccaccgatatcaacgccgtcgtagtcgccgcccttacactcaaccccgcaagccggcctcctagcctgggcagggagctgtgcgactggtgggggcgggagtgtctcccgccgccgcgcttgtgccgcggctccctcccgccgctgccgccagccagacccgctgccgcgctgttcaccccgcccctcgcgcgccggcgcgccgccgcctcacgcgcagccgcactgctcgcctccgcgc

SEQ ID NO: 5807 - DNA, 460 bp, Homo sapiens
  source 1..460: mol_type = other DNA
ctggtgggggcgggagtgtctcccgccgccgcgcttgtgccgcggctccctcccgccgctgccgccagccagacccgctgccgcgctgttcaccccgcccctcgcgcgccggcgcgccgccgcctcacgcgcagccgcactgctcgcctccgcgcggggctggggtaggccctggcggtaaaatccagatttttttataaagttagttcttctaaatgtaaagaaatctgtggaaagctcaagtttaagttaggtgttttaaaacaaacgtagttaacaatcgcagagggacggaacgccaccgccattcctgtccctcgaacgtcacattgtactttataacatactctttgtgaaaatttatcttttatttctttaatccaagaaaattaatattcaagggatccgtaaaaattcaggccccacgtcatgtgactggttgggcccgcccccccccccc

SEQ ID NO: 5808 - DNA, 210 bp, Homo sapiens
  source 1..210: mol_type = other DNA
ccgaggcaatagatgataaatatttcttctcagacttaagttttatttttggtttacagaaccaagaatctgcaatacgtacagcagttaatcagtaactaggccaaggccagaaaccttgtcgcctgtaaccacagctactctggcggaggaggcgcgcggagcctgtaactcgcagcgcgcgctggaggtgggcgcggggcggtgcgg

SEQ ID NO: 5809 - DNA, 693 bp, Homo sapiens
  source 1..693: mol_type = other DNA
aaatatcagttgtggtacagttaatgtatattttctcatagctatttgttcaccatcgtaaatatatttagttacaatttcagtcaatgagactctatctcattctgccattgtataaaatgatgagattttagcatccctcaaaaggcctttgatttgtttacacacatcactaaattaaatggaatgactaggtagaaattagggcaaattttgcttctttatttagaagaaaaattttcttctgagaaataaataggaattagtagatgaaactgtactgtctattatagtccagatcactgccagggaattattctaaatacaccaaagtcagaaatattttcaaagaaaagaattattgagtaatcaaaatgttgccttaaacctttattattccacctgaacagctgtcagagatagaataaaggattaatgcaagagtctgataggaatactacgtcagtactagagaagagtatatgagaggtaatcatgacattcccagaattgcatagaaattactaagaaaaattaacctgtaatatagttaattttaaagatgagattaaaataatattgcagtagctgttttatatcaatttagcataagcaagatgtttttactttcattttgttttttctaatctgtgcgtagaacagagaaaattaggaactgtccctttaataaga

SEQ ID NO: 5810 - DNA, 378 bp, Homo sapiens
  source 1..378: mol_type = other DNA
aatttcaaatcaactttagtttacatttcctggcagaatgcttcacatacatttatttttaatcattacaacactgattcaggtattatcgtccccattttgcatgagaaaacagggtctctgagttattaaacaagttgttgaattcaaaactctacctcggctaagccaataagcctcatgggtcagcagaggctagtcgaaaggggcccttttatctcagaggtgtcggcgacgctcacacgatttatgagcgtctggacgcgacgtgtccaatcagggagtactgcgtcatcactggtcaagcgagccttgatgacggcaagagcgagggacctctgccgttgctatggtaactgagccaacgcgagcggcctg

SEQ ID NO: 5811 - DNA, 628 bp, Homo sapiens
  source 1..628: mol_type = other DNA
ataaacttgaagatttctctgttaaagtcacaaaaatgatcgacaaacaatatttttgtgatgtttatttaaacgttgtattttataacatacttcaaggaagagtatcgaagtaagttgctttataaattaagactaaattcgtatggatgcagaattcaattaataaaatttgagcctgttacgtaaattgaatattaataaaattgaaaatttctgagttgtagtttttcttctttttctacttaaaaacaaaactagaaagctgggcccacactctttaaagaaattttgtgcaataataaaacccaaaaaggagtagttcggaaatcctccgggttcccgggtttccccacctcgtccgcaccccggggctccggaggctgtcccaccggcgcgccgcccgcaggcaccggcggcgcccggctgccgcctctggggcggggcggggcgtggcgtggcggggcaggccggaggtgcgggacccacctcctgcccctgcctcctggacgcgctctcgggagccgattttccccttcccggcgccagggccgcgggccaggaggaggagcctcgcccgcgggcaccgcggggaggcgggcggcgcacgtgcggacaggcggggaac

SEQ ID NO: 5812 - DNA, 440 bp, Homo sapiens
  source 1..440: mol_type = other DNA
tttttgaaagttggttgaatttagaaattactatgtgaatcaagtattaatgtattcaatatccatttgcactcctgagtttatttagatactttacgtaattcctaaaatttttgcaaactcctttcaccagagctcctagagcatttcactcaggggaagcacagacgggccgcgactggcttcctgactgcgccgcgccttgggaaagtccccgtgtgaaccgtttccgaaggaccttccctgaggcgccaggagcattttccaagttcgagcccgaacctcggccaaagctgcagcaaccgcccttctgcccgggctgcctccgggtccaggccgctcgcgttggctcagttaccatagcaacggcagaggtccctcgctcttgccgtcatcaaggctcgcttgaccagtgatgacgcagtactccctgattggac

SEQ ID NO: 5813 - DNA, 413 bp, Homo sapiens
  source 1..413: mol_type = other DNA
gcttagcacccgggccagcggctgcggagggtgtactgggtcccccagcagtgccagcccaccggcgctgcactctgccttcccgtggggcagggctcgggacctgcagcccgccatgcctgagcctcccccgatgagcccatcgaccacccaagggctgaggagtgcgggtgcatggcgcaggactggcaggcagctccacctgcagccccggtgcgggatccactgggtgaagccagctggtcagggtttgtgataaatacactgatcagcactctgtatctataaacacaccaccctgtgtctagctcagggtttgtgaatgcaccaatctacactctgtatagcaccctgtgtctagctcagggttttacgtggggacttagagaacctttatgtccacactctgtgtc

SEQ ID NO: 5814 - DNA, 289 bp, Homo sapiens
  source 1..289: mol_type = other DNA
ctaccccctctcctaggggctgtgattatttactctcatatcctcagagggctgggagctccaggctcatgaggtcattgtgcacaggaaagcaatctcctctgatcctactgcaccagagaaatcaagtcgagtagaagatctccttcaagggaaagtttcaagtgcagtccctggcctgtaagtccctacaatgataagtgcagcagattcttcatctttgaataaaggctgatttttagaaaaaacattaacctctaaccacaattttcatttatttttaacaaac

SEQ ID NO: 5815 - DNA, 477 bp, Homo sapiens
  source 1..477: mol_type = other DNA
gttagatggaccttgtctttctcagaagaaacatctgctggatgttgctatactttctcatgataatcaagatggttattttctagaactagtagagatattctccctcttcctatataaaagtcctattttctttctgtttcttttacatgcaatttcactaaacaaagtctctttcagtagataattctataacttatgaaatttcaagtgtttcataagaagcatctttctgaggcacatcttcatttccctcatttgtgttttttaaaaaacatagctttgatttttttttattcttaaggtcagaattaaaaagctaaatgaattccaggcttcaaactcccagaattatagctggttcaagcctaattcagccatgaacataccgtttaatcagtggtgtattaaaaaatcgattggctatttttaaaaggaaaaaaggaagatagaaaattgctcttttaatctagaagc

SEQ ID NO: 5816 - DNA, 266 bp, Homo sapiens
  source 1..266: mol_type = other DNA
gtattgcagaacagagccctgccatctagatccaggcctggcctctcatgaccaggactagaatgagatcactgaactcatttcacttgttgcttactacagtccagcatgagctggcccttctgaaaatgtctggatggtaacaaaattctggaacagtgacaccccaacagaattcaaggggatgaaatcttttttgttgtaaagttttccgtcgggagacaataatgtacattcctccagttagtggaagttagatcgtaaga

SEQ ID NO: 5817 - DNA, 373 bp, Homo sapiens
  source 1..373: mol_type = other DNA
gacttttttttatcagttgacttatagagcaatttgcctcctctgaaacaaaatgtctatcactaattttttttatgttgctatattacagtactactgcagagggagaagtgtgagtagaaatatggtcacagtgtcatagttcccacacctttgagatatcagactcatattattttatgaaatatgaggcttttcttgctatttaactgcagtgccttgcattttatttgttttgctacttactgaattgggaaaacagtaccaaaatactaggatagtatataggaagtcaccatttcagaaaccgtattgcagaacagagccctgccatctagatccaggcctggcctctcatgaccaggactagaat

SEQ ID NO: 5818 - DNA, 531 bp, Homo sapiens
  source 1..531: mol_type = other DNA
atggactcaagtgtgttgtcaattactgattatttggttgagccacacagaaactgttaatggattgtcagttaaatggaaaagtcttactttcaagcaaaattctcagcatttaatacagtgtgtagcatatatttgggagtcaataaatgttcatagaatgcatgaacaaatcagtcattgttgcaaactagattttttttttaaggctaaatgaaatgcccagtatcacatagcaggataagagaaaatctgacactcataactcatacttctgtgtttccagacctgagaagtgcagtatatgtctgatttctcaacttcaccctgcagtatggtttccatctgaatacaaattggtggacataacgtggtaattcaactgagatgtcctctatattataaaaatggccagtgtgaggaattattaattaaagctaacaaatcaccctgacaagctgtgccctggcatggctggtcttctcctttggagaaaagacttttgcaaattgagtatttactggcaaataa

SEQ ID NO: 5819 - DNA, 486 bp, Homo sapiens
  source 1..486: mol_type = other DNA
caagcatatttattattcattgtatctacatcagttacagaaatacagttttaaactctggggtgatatagacggaggaaaaaataatcaattatataatatggtctcttatgaatgggaaaccctcaaaactgtataaccaattagaaattattcaaatttcttttactcgcaagaatgtttaaatgtgtgaattgcagagataaaagaaataaaccctgatatttctcaagttctgccataaagaagtctagtttattgccttagtttcaaaagaatagttttctaagtatttcaaaactggcatgcaggaataagaattctttctagagagacaggctctcagggtccgtcccttcatgccaattaaagcacttgaacttcactgacgatggttaattattctgaccagtggaaagaaacagcataaacatgggaattatcttaaattccctactttgtttaatcaaaattttaatactaatt

SEQ ID NO: 5820 - DNA, 228 bp, Homo sapiens
  source 1..228: mol_type = other DNA
agcgtgacccggtgcggccttgcgcgctgccgccagccagagctgcgctcccgcggctcccccggcgcagctcgccgcgccagacagcgggtaaccgccgcctccgctggggcatcccggctccacaggcccagcgcgtggccagatttaagtttatcacaaataaataaagattgcgcctgtgtcgaccaatcatggctcactccagtccggtctgacttttcagaa

SEQ ID NO: 5821 - DNA, 508 bp, Homo sapiens
  source 1..508: mol_type = other DNA
tctatattgacttcagctgtgaatgaagtaaaagtattgcttgagagaaatgatatatcctaccttttatgtttcatctgaaatttcatctctgaaattcctatctaaccagaaactggtttcatattcacggtcatcattattattaattcatttaatgctgttcaactaaaattcattccaaaaataatccatgggaagggataacagcatttactgtatgctgggcactgtgctgagcacttcattctgctttaccatgatttgaaccagcaggttataactgtttatgagaaagaaatacatttcatttccctcctcctaagtatcatgcttagtgtgaaattggctatcttcagagaaacatgaggctcagacaagtcacatggctaccccttcaaaattcatgttgaaatttaatctccaatgtggtttaagggtcatgaaggctctgccctcatgaatggattaatccattcattagttaatggattaatgggttatcatg

SEQ ID NO: 5822 - DNA, 658 bp, Homo sapiens
  source 1..658: mol_type = other DNA
catgttgtcaagattggcattattatctccattttaaagatgagaaaattagctaaaaattgtgctatacacactttaagaattcaagaagtaggcttcatgacttatcgtttcttctcatctcagatgaattcacaaattgtaaaatatcattttgatcaccgtcaatattacacagacctgtttgaatgtgctcagctttttcagtaaaattagaagaaactgtgcataaaactaccatgtgattttagatatggatgccaattcttaaacattgtttattatttctgagctcaagtgcttagaatgtttaaaatgcaatatatttatgtggatttttttccaggatattggaacatatataaaatatgcttgtgcatatctaagctttgtatttatttcaggttatatgtatactgagaagaatatataaacagtgtatgatatttacatgttatttcattttttgagggaaattaacctccacaattattaactatgcataaaatgtaatggcagatatgacttatattgtataggactgactacaattcctctttagaaatagctgttctttgcttttataatactaggaaaagaggaaaagagttcttaaagaaatacaaggattcccaccctctcaatgcagtggaaaagt

SEQ ID NO: 5823 - DNA, 482 bp, Homo sapiens
  source 1..482: mol_type = other DNA
agacctgtttgaatgtgctcagctttttcagtaaaattagaagaaactgtgcataaaactaccatgtgattttagatatggatgccaattcttaaacattgtttattatttctgagctcaagtgcttagaatgtttaaaatgcaatatatttatgtggatttttttccaggatattggaacatatataaaatatgcttgtgcatatctaagctttgtatttatttcaggttatatgtatactgagaagaatatataaacagtgtatgatatttacatgttatttcattttttgagggaaattaacctccacaattattaactatgcataaaatgtaatggcagatatgacttatattgtataggactgactacaattcctctttagaaatagctgttctttgcttttataatactaggaaaagaggaaaagagttcttaaagaaatacaaggattcccaccctctcaatgcagtggaaaagt

SEQ ID NO: 5824 - DNA, 238 bp, Homo sapiens
  source 1..238: mol_type = other DNA
tgcatatgaacattttgagaagtaagtgccaggaggacttgggtagcaattcaatgtgccctttaaatagtaatccttaataccattactcatgtgtaggattgacagctgcagttgccaagaatgtttcgtttgaaatcaactttggcttttaatcttagactccactgtgtcctgacaacccaaaggcgcatcaggctttcattgaggctgttgctgctgcttctgctgctgctgc

SEQ ID NO: 5825 - DNA, 309 bp, Homo sapiens
  source 1..309: mol_type = other DNA
ccacacagtaaagaattatctggtacagtatatattcattatcatgtaaatacatggatgaataaaatgaaattcagagattgaatgacttagttaaggtccagcttttggtacccagctgggaagtctaagctgagggctaagcatagaccttttatttccaagtaacttaaagaaattataaagtgactttgaaatcaaatgaggcttcaaaaggccattggactttttcatttggagaaaaatttccatagatccaagagcttcctccacagcgaagaagagccgcggcgatgccgttctgtgagc

SEQ ID NO: 5826 - DNA, 540 bp, Homo sapiens
  source 1..540: mol_type = other DNA
ctgtacaataaagatgtaggtagatatttaagtaaaacaatttcagatgctaggaaagtcttactagttaacatgtatacttaaggtcagtttaagaaagcactaacgtttaagctggaaaacttaaaatattagaagttcctctatccacttttcaaggaagaaaggtgattaggaattcctaattctgccagagtcaggttctttcagattatttaggttttataatcattgctagagctctccaggaagggaggggccctaactccggcgaggagggcgcccacccctcggttcccggagctggtggaggcgtgcgggggagcgggcggcgcggtgcacaggtggcgggggccgcgccagctgcgcgccgcgctctgctccgcgggtgggccgccaggcgtcgcgctggagccgcggttgccctggagaccaagcggggcgagtgggcggcgcggcgaggagccgagctgcggcggctccccggactgcgcgaggggtcggctagtcctggggcagggctgggtggcacggctggcg

SEQ ID NO: 5827 - DNA, 412 bp, Homo sapiens
  source 1..412: mol_type = other DNA
taactataaaacagctacatttaaaaaaaagatctcaaattgataaatcatcattttgtaaaatatatacatacctatagatatagacacatagatttgcatgggggtatttccagaaggataaacatcaaaatgtcaatacacttttttatatttctatgattattacatttaagttataaaatggaaaaataaatctcgtcatgcatttttaaataaataaggtagataattcataaagtgattcttgagcacgactaagtatttgaatttggattttaagtctcatttctaattgtttaatgcagttaaatccctactaaaggaattggtcagtgatttcaggctttgcaaggtcaagaaagtagacagcctactgacaaaactgggcccaccactagatggtgagtta

SEQ ID NO: 5828 - DNA, 397 bp, Homo sapiens
  source 1..397: mol_type = other DNA
ttctaattgtttaatgcagttaaatccctactaaaggaattggtcagtgatttcaggctttgcaaggtcaagaaagtagacagcctactgacaaaactgggcccaccactagatggtgagttacttggggcaggagtttccactggctatacccaaaggggatggcaatagcaaggagcagtacctgagagagggcctctttctcacacacaggtggcgatgcacggagccccgtggcctggttgctcggagagcctgagaatcgccccttctcaggacatggcgtactccctgcgctcgcctgcacactgcagggtcagctgactgccgtccctccacttacaacagcgggacggccactctgggcgttcctggagggtcgcctagacgacccagc

SEQ ID NO: 5829 - DNA, 343 bp, Homo sapiens
  source 1..343: mol_type = other DNA
gggcactgtctaataaatatattgcacactaaattttgtctcaaagtctgactcagtaaattctaacattactgcagttaccgattcctaactcaggttaaacaagcgatggcatgtataccatgtgccattaaaataatgttctgggtgccatggatattactgtctctctgaatttggcatatgcaaattatagaaactaaaactgatcaaaataaaatccctgagtttgtattccagtattccatctgtcagagtcacaccggttactcccccgcctcagcgaggcagggcaggcagcggaaagctcagcccatgtgaggtgcctcctgccccctggtcc

SEQ ID NO: 5830 - DNA, 452 bp, Homo sapiens
  source 1..452: mol_type = other DNA
cacttaccttacagctgtgtatggcaccaaagtctatacatagtttacttaatttacaaatttaagctttagtttcctcagatgcgtgcatgcaaaattctagtccccgttttcatctcatatacaacggggcacttttttatttgccaactatttctttgaagataataaaagagtcagaaaatgatagtttttaaatgtcatggccaagggcagtgagggctatgccagggaccctcagtgtgtttggccctacccagggctcagtccaccactcagaaggatgcattctgcacactccttgcctgaaagaactcctgaaaggcactgacctattcttttcattctttataaaagttatgtgattaccaagctcaataatcaaatgtccttcatcgctaaaagatcaatacgttactcatgttacagaaactgtagcagttatttggtaa

SEQ ID NO: 5831 - DNA, 574 bp, Homo sapiens
  source 1..574: mol_type = other DNA
taatttttcactcaaatctttagtgtaaatataattgtctttgctttctgtaataatatctttgaagaaatacggatttaaaaaaatcatttaatattctcagacctgcaacatgggaaaaatattattattattattatcatttttgcagtcagggtgattaagattagccttgtaaaatggaagggtccctatctctttcctagaggcgtcgggtggagcgccaggcgcgtgcagagccgggcggaccagcctctccggccaaggcgggaggcggagctcgtactcaagagccgcctcccgggcggctggggcggtccccgagctgccctctccgcgggcagtgctagctcgccgcggccgcctccggggtgagtacgctggctccgccggcgcccgggaaatgcagttccctggacacgggcgccgtgcgagggtagccgggcgacggccggggtcagtcccagggctgtagcggggcgggcgtggggatgacgtggcggcgtccgtggggcagtcccgcctcagccggagcggtgggccgggccgggggcctacggaggccgagcctggc

SEQ ID NO: 5832 - DNA, 441 bp, Homo sapiens
  source 1..441: mol_type = other DNA
taacgccactggatgaaatccagtaatgtcctttttcactaaatgtggttactggaccttgttcattccaagggcctacattgggcctatgcggcctcagtatagcctcagattaatttttcactcaaatctttagtgtaaatataattgtctttgctttctgtaataatatctttgaagaaatacggatttaaaaaaatcatttaatattctcagacctgcaacatgggaaaaatattattattattattatcatttttgcagtcagggtgattaagattagccttgtaaaatggaagggtccctatctctttcctagaggcgtcgggtggagcgccaggcgcgtgcagagccgggcggaccagcctctccggccaaggcgggaggcggagctcgtactcaagagccgcctcccgggcggctggggcggtccccgagctg

SEQ ID NO: 5833 - DNA, 463 bp, Homo sapiens
  source 1..463: mol_type = other DNA
gatcttccattttttcaagagaagccagaaattcagattttatgtgaaatctcttaactttttaatgctagctactaattttaaaacgtgttaaagcagtctgccagtatgggccagatctggcagtgtgacctctgacatagagaaaatgtcaagggtcaaagttcatagactgttaaggttacatagagagacagtgactgtaaagggattcagtacctaaaatgctacggatgcagctttgccagcaatctgagcttgtatatggatttgaatttatacaggaagtttcatctaatcctcaaatggttaaatcacaagaatttgagtgctttctgtgtgctgagtacacagaagttaaagaatttaaaaatgaaagaacctgggagactgctttcttcacatttcatgtgtcatgtaaccagaaatctgatttcctgggcagtggagtatttgcgtagca

SEQ ID NO: 5834 - DNA, 364 bp, Homo sapiens
  source 1..364: mol_type = other DNA
tgtatatggatttgaatttatacaggaagtttcatctaatcctcaaatggttaaatcacaagaatttgagtgctttctgtgtgctgagtacacagaagttaaagaatttaaaaatgaaagaacctgggagactgctttcttcacatttcatgtgtcatgtaaccagaaatctgatttcctgggcagtggagtatttgcgtagcatcctcccgccacttcaaagagccggctcggcggggcaggaagcggcggctgcggctgcgggtcctgcgagaagagcgcgatttcctccggggctgcccagttctctggagtcgcagaactgctctcgggagaacgcgttcctgagctggatgatcctagg

SEQ ID NO: 5835 - DNA, 437 bp, Homo sapiens
  source 1..437: mol_type = other DNA
ttaacttcagtttcttctgtaaaataataaccatagtagaagctatcaaaatgtgagatttaaatgaaatgtgtaaagaattcttaataaaggttaatcattcaatcaatacaaacaactttctattaaggagattaaaatctctggagtgaaagattacaattgtcaattcctaatcaagaggaggactgccattctcccacaaagcccctatgcctttgtggagtcttggctgaaaccccaagctctctgcaaagcttttcttggtattgacatcaccacttttaatattgtaacaaatggtaattactgtattttcttttagcaaacaagaacgtgacctaggtgaatggtgcccgcacctagcagccgctagctgactgaggccgcgcactcgcggctggggcagaccgcggtcgcgtagctgacgtcatcgc

SEQ ID NO: 5836 - DNA, 366 bp, Homo sapiens
  source 1..366: mol_type = other DNA
tgtaaccagaaatctgatttcctgggcagtggagtatttgcgtagcatcctcccgccacttcaaagagccggctcggcggggcaggaagcggcggctgcggctgcgggtcctgcgagaagagcgcgatttcctccggggctgcccagttctctggagtcgcagaactgctctcgggagaacgcgttcctgagctggatgatcctagggcgggcccagggcgcaggacccaccgcagccccctgggcagtctcctcgccccgcgtccgcgtcgtctccggggcacttagtaaggggtggggagagcttgccctccctcttaagctgagggtccctaggactccaagtgaggaagtgacactcccagg

SEQ ID NO: 5837 - DNA, 358 bp, Homo sapiens
  source 1..358: mol_type = other DNA
ctcaaaaaaaaaaaaaaatcgaattggcttttattagtgattcatgaatcaggcagcatctcatctataaaacagaaaagtgttctaatgagctgaggaacaaaaagcagattggtcattttgaagttactttcctcaaagagttacatcagaggggacttcttttatgggccccttttggaaaactgaccccttttaaagctgagtttaaaaattcctattacaaagggatcccctaggctctatgccaagggagggaggataggcaactggtccatcggcgcagccttctcagggaaactccgcctcaaggctgcggtggccatctttgtgcggggcgacccgccgcccacgtgct

SEQ ID NO: 5838 - DNA, 415 bp, Homo sapiens
  source 1..415: mol_type = other DNA
ttgacaacttgttaacaaggattgaatgaaattacacgaatattgagaatattttaaatgcattcattttaatgaaaactgtacttcgaagcatatgtgtagtgacggcaaattatacaaacacttgatagaaattccagaaattctcctgccttttgagaagcagtaggcattcttcaaaaaagtgttctcgaaccgcccagcctggaaggcttctctaatcagtgcagtggtgtgatctcggctcactgcacccgagtagctaggattacaggcgcccgccaccatgcccggctaattcctggcattttaaatacgataaattacttcaacctacctgccgggaccacgctgagctggaagtcttttgggctccggcttcgccgtcgccccgccccctggcctttgccccggt

SEQ ID NO: 5839 - DNA, 314 bp, Homo sapiens
  source 1..314: mol_type = other DNA
tcatgatttccaaagcttcagtattccaaatctccggctcactgcaacccaggttccacctgtgcaaacacactggtccagcattgggcatgactaaagtcttcctcatcccaccagaggcgcactcaactgtggctagggtgaccagaattcactgtccagcgtggctggcaggagcccactctctgctgtgagctgagcactctcccaaaagtgtcccctacatatgagggacagcttattcctgcagggactcaggagtaactctgctgtgtgatttgccccagccacaggcagagggcgcttcttcaaac

SEQ ID NO: 5840 - DNA, 567 bp, Homo sapiens
  source 1..567: mol_type = other DNA
taaaattaagtgatggaaatatttcatatctcgattatggtgtaaggacatttcattatatataaattatatatcaattttttaaaaagctctcagcaaatttaaaactttggagaaatatatagaatatttgcatatggtgattctgatttgctttaaaagtgacatgattaatgtatttagacaaaaatactcttcgtttttctttgcttttatttacgatcaggatacaagaattcttgactagttaaaattaactaactgaatccttaacaaccataggcagatagtcggacgtgagcacgggcgaaggcgtcagccggggccacacgggagtcactgaccacagccaggcgagagccggctttccggtgccgccacattccgggcaccaggctcgggcgacggaggtcccgtccactctcgcttgggtgcagaagggcgcggcggtgccaggaagccgccttggaggctccaagatgctcactcagcgcggccaagcgcaggtgcgggggccctcgccgccaccctgcttatctggggacagtcccggaacccggtgacccg

(The sequence listing continues in the following parts.)
